United States Patent Application Publication US 2005/0228172 A9 - sequence listing, part 52

SEQ ID NO: 212994 - DNA, 666 bp, Homo sapiens
taatgggtttcatggatctgatggttttaaaaatgagagtttctctgcacaagctctcttttttggtttgccaccatccacataagatgtcacttgctcccccttaccttctgccatgattgtgaggcctcctcagccatgtggaactgtaagtccaattaaacctctttcttttgtaaattgcccagtctcaagattgtctttatcagcagcatgaaaattgactaatacactattcaatttgcctgcttcacaattaataagtccagggacatatggaattaaccacacccttaattatgcagraaggaatcagattttatttatgcctactactacataattaaagcaacttgccaggttgtacattaaagttaaaaattgctaagagttaccataataacctgtaatcgagacaatgaaaatagatttatatataaggtaagtaaggaaagtaaaatatgtttttagtaaaagattataagaaagcatgaaaatgtaaatttttgccttgggttaaaggattgttttgaattagataagataaagctgagggtttaaacaaatggtgaaaagtttgtaaaaattaatcttgcaaaagaaattgtgtgaacatattgactaatttcaaaaaagtattttgtttttataaattgagcattgaaa

SEQ ID NO: 212995 - DNA, 190 bp, Homo sapiens
tgttggttatattacaagattgcagcaattcagtgacrtctttaggctccacttttaatcctagttctcttgctatttccattacatctgcaattactttctcctctgaagtcttgaacccctcaaagtcatccatgagggttggaagcaacttgttctaaattcttactaatgttgatactttggccgc

SEQ ID NO: 212996 - DNA, 190 bp, Homo sapiens
tgttggttatattacaagattgcagcaattcagtgacgtctttaggctccacttttaatcctagttctcttgctatttccattacatctgcaattactttctcctctgaagtcttgaacccctcaaagtcatccatgagggttggaagcaacttgttctaaaytcttactaatgttgatactttggccgc

SEQ ID NO: 212997 - DNA, 190 bp, Homo sapiens
tgttggttatattacaagattgcagcaattcagtgacgtctttaggctccacttttaatcctagttctcttgctatttccattacatctgcaattactttctcctctgaagtcttgaacccctcaaagtcatccatgagggttggaagcaacttgttctaaattcytactaatgttgatactttggccgc

SEQ ID NO: 212998 - DNA, 411 bp, Homo sapiens
ataagtagtcttggtgcattggtttttctgtaatgccacctgtagtagtaatgaactggtcacatggacagactcaggacctcctagttarccaaggttatataggcaaaggtgatagcttaggtcacacacaagttttctctttcctgtgcactgttagtgtgcctgcagatgctgtaatggattgtgtcagtaggcttccagccacaaggtggcacttgaaaaagagcaccagctggtagcagtgggatttgtgcttgccttatgttacccaggggaggtaatctgatgactcaggcaatgggcagggccattgagctctcaaaattttctattctttgtgttaagctaccagggcggatggaggggcaaagccagctgggggctgaatcaggcaagttcacattctgg

SEQ ID NO: 212999 - DNA, 620 bp, Homo sapiens
agaacgaagaaaggaaagaaggaagaaaaacaaatagcaaaacagagcaatatttaaatgtggttatgattcagccaaccattacatttaatgataatgtgcctgtttgggaaagaaaatagaagaattaactgaatgccaaggggagggggaaggaacacawgaaaaaatcaaaacaaaataaaactgtgaaagataattaatgggaatagaaaaattatgtacaaaaagcattttatttggagagtaatttaggagatctttaggaatatattggctatattcaagttcctatacttaagtgctacacaataataattaaaggtaccagatttagtaaagggattttgcaccatgaatttttttttcctgtaaagatacaaatatatctccttagtagaacagataacctcacagatttatgacactgttatatatcaatctatatttatttatttaaccaagcaatcttaatgttattttgctaaattgcttctaaatgtcccagtttctcagattccctttgtgtcatttaaaacatctatttgttatttattaattcaagttaatatctttaaaacctattcattttatatttgtctgagagctatgattttaag

SEQ ID NO: 213000 - DNA, 620 bp, Homo sapiens
agaacgaagaaaggaaagaaggaagaaaaacaaatagcaaaacagagcaatatttaaatgtggttatgattcagccaaccattacatttaatgataatgtgcctgtttgggaaagaaaatagaagaattaactgaatgccaaggggagggggaaggaacacaagaaaaaatcaaaacaaaataaaactgtgaaagataattaatgggaatagaaaaattatgtacaaaaagcattttatttggagagtaatttaggagatctttaggaatatattggctatattcaagttcctatacttaagtgctayacaataataattaaaggtaccagatttagtaaagggattttgcaccatgaatttttttttcctgtaaagatacaaatatatctccttagtagaacagataacctcacagatttatgacactgttatatatcaatctatatttatttatttaaccaagcaatcttaatgttattttgctaaattgcttctaaatgtcccagtttctcagattccctttgtgtcatttaaaacatctatttgttatttattaattcaagttaatatctttaaaacctattcattttatatttgtctgagagctatgattttaag

SEQ ID NO: 213001 - DNA, 620 bp, Homo sapiens
agaacgaagaaaggaaagaaggaagaaaaacaaatagcaaaacagagcaatatttaaatgtggttatgattcagccaaccattacatttaatgataatgtgcctgtttgggaaagaaaatagaagaattaactgaatgccaaggggagggggaaggaacacaagaaaaaatcaaaacaaaataaaactgtgaaagataattaatgggaatagaaaaattatgtacaaaaagcattttatttggagagtaatttaggagatctttaggaatatattggctatattcaagttcctatacttaagtgctacacaataataattaaaggtaccagatttagtaaagggattttgcaccatgaayttttttttcctgtaaagatacaaatatatctccttagtagaacagataacctcacagatttatgacactgttatatatcaatctatatttatttatttaaccaagcaatcttaatgttattttgctaaattgcttctaaatgtcccagtttctcagattccctttgtgtcatttaaaacatctatttgttatttattaattcaagttaatatctttaaaacctattcattttatatttgtctgagagctatgattttaag

SEQ ID NO: 213002 - DNA, 560 bp, Homo sapiens
gtgaggcatgagttacaattaaaatactagaaaagtattgaccatttcaattaaatgttyctttcaaatcactaattattttcatgttccaaaatataaaggttaattttttattctcattttattgatctatcagtagtctctttttctttaattaaaaaacaaacaaacaaaaacacataaacaaacaaacaaacaaaaccagtttttttctttggcttccagaacacgtcctcttggctttcttcttatgtctttgtatgctatttcttagtctttggaacacttctgtgtccacccccactcccttgatgagttgtcacagagccatggtttacaatattgtttatgctaagaacttgcaaatttgtacctctacctcttacttctcttctaaatgccaggctcttacatccaacttcttatgctgtcttcttttgagaagctaataaatatctcaactttgaaatgcacattctcaccaacgaccatttgtctcagagcaaaaatcttagagtcaatcctgcttattttctttgtcaagaattgcacatccaacc

SEQ ID NO: 213003 - DNA, 437 bp, Homo sapiens
tgggccctcaccagacatcaaatytttgagtgccttgatttcagacctctcagcctccagaactatgagaagtaaatttataagttataagtttatattattataaattataaaattatgttgtttataagccacaacaaaaaggtatttttctattgtagtcgaaatgtactaaggtaaaaagaaataataaaatacatataagaacaaaaatcaataaaaattgaaagaacaccaaaatggaatatcaataaaataaaaagctaatttattaaaaaatgaaaaaattctagctatactcaacaaaaaagagaaaaaatactaaatactaaagccagtaatgaaagactgtcactaattatactatagttataaaatgatagtaagcacacaatgtttaaactttatgcaaatacattttaaaagtttggtaaacg

SEQ ID NO: 213004 - DNA, 437 bp, Homo sapiens
tgggccctcaccagacatcaaatttttgagwgccttgatttcagacctctcagcctccagaactatgagaagtaaatttataagttataagtttatattattataaattataaaattatgttgtttataagccacaacaaaaaggtatttttctattgtagtcgaaatgtactaaggtaaaaagaaataataaaatacatataagaacaaaaatcaataaaaattgaaagaacaccaaaatggaatatcaataaaataaaaagctaatttattaaaaaatgaaaaaattctagctatactcaacaaaaaagagaaaaaatactaaatactaaagccagtaatgaaagactgtcactaattatactatagttataaaatgatagtaagcacacaatgtttaaactttatgcaaatacattttaaaagtttggtaaacg

SEQ ID NO: 213005 - DNA, 437 bp, Homo sapiens
tgggccctcaccagacatcaaatttttgagtgccttgatttcagacctctcagcctccagaactatgagaagtaaatttataagttataagtttatattattataaattataaaattatgttgtttataagccacaacaaaaaggtatttttctattgtagtcgaaatgtactaaggtamaaagaaataataaaatacatataagaacaaaaatcaataaaaattgaaagaacaccaaaatggaatatcaataaaataaaaagctaatttattaaaaaatgaaaaaattctagctatactcaacaaaaaagagaaaaaatactaaatactaaagccagtaatgaaagactgtcactaattatactatagttataaaatgatagtaagcacacaatgtttaaactttatgcaaatacattttaaaagtttggtaaacg

SEQ ID NO: 213006 - DNA, 437 bp, Homo sapiens
tgggccctcaccagacatcaaatttttgagtgccttgatttcagacctctcagcctccagaactatgagaagtaaatttataagttataagtttatattattataaattataaaattatgttgtttataagccacaacaaaaaggtatttttctattgtagtcgaaatgtactaaggtaaaaagaaataataaaatacatataagaacaaaaatcaataaaaattgaaagaacaccaaaatggaatatcaataaaataaaaagctmatttattaaaaaatgaaaaaattctagctatactcaacaaaaaagagaaaaaatactaaatactaaagccagtaatgaaagactgtcactaattatactatagttataaaatgatagtaagcacacaatgtttaaactttatgcaaatacattttaaaagtttggtaaacg

SEQ ID NO: 213007 - DNA, 549 bp, Homo sapiens
cggtcatgtaacttctcttaagtcctcaggaagttttctggtctttgcttactttatattaataactatcaagatgacatctttaatacaattatataattcactttcatagcaatcaatccacttgtaaatccatatgttaatttgtgtgatactctgtttgatgtctgtcttcccccaaatcttgcatattctatgaagaaaattccatgatttgataaaaattttgtccttagcaactatcacggattatgacacagaagcagaattcaacttaaaggaataaatrtgttatttgccttattactgggtttggaaaaatcaatttaagttttcttattttgtacagtctggtaatttaatataaagatattagaaattgcctagactgtctaaataataaatgtgagattaaattataattaaattctaaaaagtttttaactaattagacttcattacatctagataaaatagactcacttatgctataaaatattttatattattgaaattttaatataatcaatgaaacataaaactgaatta

SEQ ID NO: 213008 - DNA, 512 bp, Homo sapiens
acatctttaatacaattatataattcactttcatagcaatcaatccacttgtaaatccatatgttaatttgtgtgatactctgtttgatgtctgtcttcccccaaatcttgcatattctatgaagaaaattccatgatttgataaaaattttgtccttagcaactatcacggattatgacacagaagcagaattcaacttaaaggaataaatgtgttatttgccttattactgggtttggaaaaatcaatttaagttttcttattttgtacagtctggtaatttaatataaagatattagaaattgcctagactgtctaaataataaatgtgagattaaattataattaaattctaaaaagtttttaactaattagacttcattacatctagataaaatagactcacttatgctataaaatattttatattattgaaattttaatataatcaatgaaacatraaactgaattatgaatggtagtcttccaatatggcaaagttttaataatt

SEQ ID NO: 213009 - DNA, 559 bp, Homo sapiens
agtatgcaaacattgattttgtgcttagggacattctatacactgagcatcttagaaaactttatgctacgtggactattttataaaagaaattaccctcagggattgactaaaaatctggttatgattataagccattatatgtcaatacaatgtaaaataaaagtaacatgctataattttcaaattatggcctaaagatggccaaatatagcatacatttcaaaaatcaatatggtgtatatttcaatcaactggcttcaatattaagtaatatagttatccaaggaaggacaatcacaatatgcagattagtttaaagagggtgaattgaatagcgaaggtttgatatggcagagagccraagaagccctgggacctagctggagagaatagtttaaaggtggagcatcaaaatcatttttttacaaaccaatttctctactgttaataacattcctacttaataaaatcatatttattatgcatgatagggacttgtttctctatttcacttatttaaattataaattttatccactatttttacagttttgta

SEQ ID NO: 213010 - DNA, 414 bp, Homo sapiens
gaggcaggctaggggcactgagggaagctcggcatgaacctgcaggtgctcctcagcatgaacagcctgggtgctgtggacagyaggtcccagagtgagaacttttggtgctttttccaggcctgcccatggccacccacggatgaattagcatgcactttctgccttttgaacccataaaatcttcagactcagccagacttggacagacatcaagactaccagctttgggaaggagctacccactttgggtctccttgactcattgggatgaactgcctgtggaaaggagctacccatttcgtgtctcctgagagctgttctatcacttaatgaagctcctctccaccttgctcaccctctagttgtccacatacctcattctttctggatgcatgacaagaattcaggacc

SEQ ID NO: 213011 - DNA, 364 bp, Homo sapiens
agaattcaggacctgctgaatgatggcactgaaggagtggtaactccaacagggctgaaacacatccccayattcgccacattgagggcagcgaggagagaagagctgtggccctttggaaagcccagatctaggggttcctgagccaggactatgacactgtctttggggctctgcttccaggtcccactgcattcccctcatccagatgtagacgcctgccctgctgcagcagctggcatgcctggctgtgcacagtggccctcaccgcccagggcctggctcgcccttggcaggtgagggatctgggctggtatcacaagcttagtgcagcctgccaggctgagtgggtgaaacaagccca

SEQ ID NO: 213012 - DNA, 554 bp, Homo sapiens
ctgtttttttactctcaaactgtgttctctttatcccatttattataaaatttcacaatgtgacttttaaaaaattcttattcattatactgagcacaggatggactcataagcggaagttcaaggaaaatttcttaaattatttctttgatgatctttttttctctcttctctggaactcttggtcctcaaattttatctttcctatttccaacctctatctttggttccactttctgagaagtttattctactttatcttctggatcattatttatatttttatttatattattatttttaatttccaagaacttttcactgatcctggtttttgttttttgttgtttgctttttttgttttttaatcctgttcttctgtgataataggttttcatttttgaggttttatttggctccttgtctcatatctttgagtcatttttttctgttttttkgggttttttttgtgtgtgctctgtcttttcatgttaaagtcttttcctcaaatgtctggcaatccttggttgtcacttgtattaaagcgtgagaca

SEQ ID NO: 213013 - DNA, 354 bp, Homo sapiens
tgaattgcaacattatgggaggtgcaagtcacatttttggaagaacaagtcacattatgttggaatatatttctacaagttattaggtattatttttatttaagagttctaaaayataaactattttttcaaatcattttccttagtgtattaatttattatcttagtaaatatgtattaagaactttgtatggtgcagaattccatattatacctttagttagtttacaatgtctttgaagtgaataaaatttgaatcagtgacatgatgtactcagtaattttgaatatgcaggtgttattatttttatttgatatacaaactaaagtgaaattctgaccaaacttaagcca

SEQ ID NO: 213014 - DNA, 354 bp, Homo sapiens
tgaattgcaacattatgggaggtgcaagtcacatttttggaagaacaagtcacattatgttggaatatatttctacaagttattaggtattatttttatttaagagttctaaaatataaactattttttcaaatcattttccttagtgtattaatttattatcttagtaaatatgtattaagaactttgtatggtgcagaattccatattatacctttagttagtttacaatgtctttgaagtgaataaaatttgaatcagtgacatgatgtactcagtarttttgaatatgcaggtgttattatttttatttgatatacaaactaaagtgaaattctgaccaaacttaagcca

SEQ ID NO: 213015 - DNA, 617 bp, Homo sapiens
atcctgaccctgtaataaatcttttattccacatcattcaccaaacyctatctgatacaggcatgaaaggaaaagggcttacttttcaaatttaaccaagagtttaatttctacttttcttgtcaaacatactttcaaattgaactcagtgttttcttaaatattgtttagaataatcttctccattatgataacatttatattgaggagatgttgttaaaataatacaagttgtatttcctttcttggttcagggactgtaagatgaaaacaaattgctaagacaaataccacaactatacaaaatattttcttcccataagagcagactctgctcgataaaagttggctcatgactactcaccatataatttaaattctatcttcaggaagtcattaaaaatattgtttcattcaacattattctgttataacatcgacagggaaaataaaattgattctcagccaggaccactggctgtatggactttacatatgactgtgtgagttttccctgggtgctccagtttcctcccacatcctaaggttgtgcttatcaggttattgcgtgcatctcaatactcctaattagagtgagtgtgagttagcgtgggtgt

SEQ ID NO: 213016 - DNA, 563 bp, Homo sapiens
cccagaaattcaacctcccctccccttcaggagaccactccctctccctggcatgtgggaggctgcattttctacttctctctccaacgaggaaagtttaatgggagcacaggagagtcctagagttttccagctggggagggaaggtgtcagagttaagattcaaaccaacctcctgaattccttgcctacttttcttgccactgaatcatgaaagccacgtgtgacactgagaaatgcctattactccagcaaccccaaaggggcagagcattcaaggactatttctggaggagattaacgtttccataagtaaattctgggaaaagcaggttgccctccctactgtaggtgtgcctcattcaatcaactgaagacctgaacagaagagaaaggctgggtaagagggaacctcagctgcctgtgtgagctgggatactgaccttttccagccttcaggcttggactgaaacattggctcttcatgggtctcgagcctgctggctttcacactggaacttacamagtctgctctcctgggtctgtagtttgccaagtgcaga

SEQ ID NO: 213017 - DNA, 587 bp, Homo sapiens
tgtttttggggttttggttatgaattctttttctaggccaatctctagaagagtttttacaagattatcttctagaattgttatggtttcaggtcttatacttaagttttggatctatcttgagtttatttkaatataacatgagagatagggatccagtttcattcttctgcatgtggctagccacttttcccggcactatttattaaataaggcgtcatttccccaatgtatgtttttgtatgctttgtcaaagatcagctggtcgttaagtatttggcttgatttctgggttacctgttctcttccattgtgttttatgtgcctactttcatacaaataccatgttattttcataaacatgtagcccttatagtataattcaaatttggttaatgtaaggcctccagatttgttcttgttgcttaggattgcatatattatttgggctctttttaaattcaatataaattttcggattgattttctaattctatgaaaaatagtgctggtattttgatgggaattgcattgaatttgtagattgctttaagaagcatggtcattttcataatattgattcttcc

SEQ ID NO: 213018 - DNA, 587 bp, Homo sapiens
tgtttttggggttttggttatgaattctttttctaggccaatctctagaagagtttttacaagattatcttctagaattgttatggtttcaggtcttatacttaagttttggatctatcttgagtttatttgaatataacatgagagatagggatccagtttcattcttctgcatgtggctagccacttttcccrgcactatttattaaataaggcgtcatttccccaatgtatgtttttgtatgctttgtcaaagatcagctggtcgttaagtatttggcttgatttctgggttacctgttctcttccattgtgttttatgtgcctactttcatacaaataccatgttattttcataaacatgtagcccttatagtataattcaaatttggttaatgtaaggcctccagatttgttcttgttgcttaggattgcatatattatttgggctctttttaaattcaatataaattttcggattgattttctaattctatgaaaaatagtgctggtattttgatgggaattgcattgaatttgtagattgctttaagaagcatggtcattttcataatattgattcttcc

SEQ ID NO: 213019 - DNA, 604 bp, Homo sapiens
tgataacataacatccattctacagcccacgtatcaaagagtcattttaattttcaagtattagtattaaagaaatacatttttttttcaggctatagctgccatagattatgaktcctctgatgggtctgtgcaaagtaaattgaaaaccttctggaaaggagttaacattctagacaccatgtagcacatttacgattcatggggggaggtcaaaatatgaacattagaagaagttcagaagacatttattccaaccctcatggatgactttgagagcttgaagactttagtggaagaaataacagcagacggggtgaaactagcaagagagcaagagttagaagtgaagcctaaaatgtgactgaattgctacaatctcatgataaaatttattgaatgaagagtttcttcttatggatgaacaaagaaagtggtttcttgatatagaatctactcttggtgaaaatgccatgaacatagttaaaatgacaacaaaagatttagaatattacagaaacttagttgataaagccatgggagggtctggagtcaagattgactcccattttgaaagaagatctactgtggatcaaacgctatc

SEQ ID NO: 213020 - DNA, 520 bp, Homo sapiens
ttttgagacatgagaataaatttttttaatagcctaatgattactttatataagccactgatattcatgagatgctggaggaaagacagtgtaaatgrtgaggttttaaagcttgagtctttgttttgagccctggagggtatttcttttttcttttgtttcctattttttttttttttttttgagacagagtgttgcttttgttacccaggctggagtgcaacagtgcgatctctcggttcactgcaatctctgcctcccagattcaagtgattctgctgcctcagcctcccaagtagctgggattacatgcacgtgccaccacacccagctaattttgtatttttggtagagacagggtttcacgacgttggtcaggctggtctcaaactcctgacctcaaatgatccaatcacctcggcctcccaaagtgttacgattacaggtgtgagccactgcacctggctgagccctggagctatttctttctaaccaagatggacgcagaggtctagaacca

SEQ ID NO: 213021 - DNA, 520 bp, Homo sapiens
ttttgagacatgagaataaatttttttaatagcctaatgattactttatataagccactgatattcatgagatgctggaggaaagacagtgtaaatggtgaggttttaaagcttgagtctttgttttgagccctggagggtatttcttttttcttttgtttcctattttttttttttttttttgagacagagtgttgcttttgttacccaggctggagtgcaacagtgcgatctctcggttcactgcaayctctgcctcccagattcaagtgattctgctgcctcagcctcccaagtagctgggattacatgcacgtgccaccacacccagctaattttgtatttttggtagagacagggtttcacgacgttggtcaggctggtctcaaactcctgacctcaaatgatccaatcacctcggcctcccaaagtgttacgattacaggtgtgagccactgcacctggctgagccctggagctatttctttctaaccaagatggacgcagaggtctagaacca

SEQ ID NO: 213022 - DNA, 520 bp, Homo sapiens
ttttgagacatgagaataaatttttttaatagcctaatgattactttatataagccactgatattcatgagatgctggaggaaagacagtgtaaatggtgaggttttaaagcttgagtctttgttttgagccctggagggtatttcttttttcttttgtttcctattttttttttttttttttgagacagagtgttgcttttgttacccaggctggagtgcaacagtgcgatctctcggttcactgcaatctctgcctcccagattcaagtgattctgctgcctcagcctcccaagtagctgggattacatgcacgtgccaccacacccagctaattttgtatttttggtagagacagggtttcackacgttggtcaggctggtctcaaactcctgacctcaaatgatccaatcacctcggcctcccaaagtgttacgattacaggtgtgagccactgcacctggctgagccctggagctatttctttctaaccaagatggacgcagaggtctagaacca

SEQ ID NO: 213023 - DNA, 520 bp, Homo sapiens
ttttgagacatgagaataaatttttttaatagcctaatgattactttatataagccactgatattcatgagatgctggaggaaagacagtgtaaatggtgaggttttaaagcttgagtctttgttttgagccctggagggtatttcttttttcttttgtttcctattttttttttttttttttgagacagagtgttgcttttgttacccaggctggagtgcaacagtgcgatctctcggttcactgcaatctctgcctcccagattcaagtgattctgctgcctcagcctcccaagtagctgggattacatgcacgtgccaccacacccagctaattttgtatttttggtagagacagggtttcacgacgttggtcaggctggtctcaaactcctgacctcaaatgatccaatcacctcggcctcccaaagtgttacgattacaggtgtgagccactgcacctggctgagcyctggagctatttctttctaaccaagatggacgcagaggtctagaacca

SEQ ID NO: 213024 - DNA, 342 bp, Homo sapiens
gaaaaaacctgtcagagtacagactcctgtcagagtacaaactagcatatctcaagatctctgtggaagagctgatggttcctaggggttactaggaacctgtggacctagaggtattccaccatgggaataggatgcatggccaacgagatgggttaatttgtggtaccaaacatttaacagcattttagaagagagagtaaaagccaggttacccaacaaaggctgcacaatccccagagtctgcttctattctctcttccytccgtctcagaaaagtggaaagaaaatgagatttcagctcttgctctgtggctgggaggtgagacatgcaagtatcag

SEQ ID NO: 213025 - DNA, 342 bp, Homo sapiens
gaaaaaacctgtcagagtacagactcctgtcagagtacaaactagcatatctcaagatctctgtggaagagctgatggttcctaggggttactaggaacctgtggacctagaggtattccaccatgggaataggatgcatggccaacgagatgggttaatttgtggtaccaaacatttaacagcattttagaagagagagtaaaagccaggttacccaacaaaggctgcacaatccccagagtctgcttctattctctcttccctccgtctcrgaaaagtggaaagaaaatgagatttcagctcttgctctgtggctgggaggtgagacatgcaagtatcag

SEQ ID NO: 213026 - DNA, 449 bp, Homo sapiens
aagagaattcatcatcaacagacttgctttaaaataaatgctcaataaagtttttcaggttgaggagaaattacaccagagagaaacayagaacattagaaattaataaagaacaaaggaaatgatgaatatctgaatatgtatttttctcctcttaaattctttaaaatatatatatgactgacgaatgcaaaaatcataacattgcctataatgtttcagtgtatatagatgtaatatatatgacaactacaacataaaagaaagtggatagaggtactaatatgattataagccttctacggtttactgcaagtggcaaaatattaactttatgcacactgtgaaaagttaagtacattgtaatccctcaagcaaccactaaaaaataccacaaagagatataggcaaatacccaataaataaattaagataaaatattatgaaat

SEQ ID NO: 213027 - DNA, 615 bp, Homo sapiens
ggaatgtgtggggttgacgcaggtgcttcagcacagagaacagagaagttgaaggtccagggagagggcagatggagctctggtctgagctttcatcgtcagagttgacccagtggagaagtcctggtgtatcagccagagtcctttggttgaaacacacagagatggcagctgatttaagcataaaagggaaagtattgaaaagctatggggaaagttcgcagaatcagaaagagtggagaacaagtwtcagcaaacgacaaaatttggccatgctgtagagaccatcctggctaacacggtgaaaccccgtctctactaaaaatacaaaaaaattagccacgcttggtggtgggagcctgtagtcccagctactcaggaggctgaggcaagagaatggtgtgaacccgggaggtggagcttgcagtgagccgagatcgcaccactgcactccagcctgggcgacagtgctagactccatctcaaaaaaaaaaaatcaaaaataaaaagaaaaaattggccatgcaggagatttgattaggaaaaacaatagaaacaattttacaattatgtcgggggcaccactggatttgataggctcatccgtttttagtg

SEQ ID NO: 213028 - DNA, 464 bp, Homo sapiens
tgcagtggccaatctcactgcaacctccgcctcccaggttcaagtaattctcatgctttagcttcccaagtagctgggattacaggtgcatgccaacatgcctggctaatttttgtatttttagtagatacagggattcaccatgttggccaggctcgtctcgaactcctgacctttggtcatccacctgcctcagcctcccaaagtgttgggattayggggtgagccactacgccaggcctgcttttaattttgtgaatggtcttgataacatttcattgttcattgattaaattcattgttgtgatgttttaagcttggtgacttaatgttgttgatgaacaatgcaactagttgccaaaagcctgatattacactttactacccaactacagctgatgctcaaataatgacattgggatatgattttaaaatttattttcctgaaataatgtgtgtgtcaa

SEQ ID NO: 213029 - DNA, 617 bp, Homo sapiens
ttgggctgtttaaaaaactgagatgaggccagtggccctggtatggagcaagctttagggagcttagtgcaaaagagttgggtggggctgtgccaccatggaagaggcagggatcccagaacacaatggacaggtcatcataagcaggataaggagcttattccattacgtcaggaaggaaagaggaaagcatgtgggtagacacaggtaagtcatgtaagtgggtctggctgcaggaagttgaaagaaatgactttctcttttttttctgaaagtagaaaatgagtgcatctgctgacagaaggggaagatggatgtagctgaagtttaaagagatgtggcagtgtttgaaatagccccactgaaaaactagggaaagagagagagagggaacatgagcaagagagagagctgactaargaaatagagattgctgagcagcacctaggtcccaactggtaggaggctgtgaatttatagttttaataatagaaatttaagtctttggccagcaggttatagaactgcaagtatggtcactcttattaatgtaaaatcatatgcatatatcttggagcacataggcaaaaagggatgtctagaagaaaattcaacaa

SEQ ID NO: 213030 - DNA, 546 bp, Homo sapiens
gaaacatatgtaaaatgttatttatgcattgaaaaagaagacaagaaaaatggcatgatataacatgatcatggatgagaagattcaatattgtaaagatgcaaattttcccccaattagtctataaattcaatgacattttaattaaaaatgtaccaaatatttcaggtatcctggtaaatttattttcaacttaatctaaaggcataaaatacaggaaaggccgagataattctgagagagaagacaaaagagagggcaatgttataatatatatgaggcttatagcaaggatattataattaaaacagcaaggtattggtatagcagtaatcaaatacacaagtgcatcagaacaaaaagctggaaaatagataaatgcatatatggaaattgctgtatctgaaactgcaartcagtgcaaaaatgaactacttgatatgtagacctgagaaattatctttctttatagaaaaaaaattgtattcctaccttcccttatgcaaaaataaactccaaagaattaaagacctaattgtgaaaaac

SEQ ID NO: 213031 - DNA, 544 bp, Homo sapiens
ggaatttagtcatgagatacccaattattcttagcacttctgctcactctgygtattaccaggactggcaccatcttaggactgcaacattttagccatctttggaatccctagggaacaattcttccttaatagacatgatttctgatagtcaaagttttgtcatttaagaaccaaaatttcaagttgttttaaaaaagactgtaactattttaaatagaaattattagttaaatgtataacttgttgacatccttgtgttttaaaatagagttgatggaaaacattttaacagttttttgacaacattgctctttgccagaatgcaacgacatcctcagaacctgtgaagcagagcagggtttctttgcccttatgtaaaatattctgagaatgccatgctttcaagttcttctttctgctccttcattgtttttgtgctctctcttgttcccatggggctctaagtgtgccttcttctgacagtttgttctgttttacttggcttcttctaatatgctgtcaacttagaaaaaccaacctt

SEQ ID NO: 213032 - DNA, 544 bp, Homo sapiens
ggaatttagtcatgagatacccaattattcttagcacttctgctcactctgcgtattaccaggactggcaccatcttaggactgcaacattttagccatctttggaatccctagggaacaattcttccttaatagacrtgatttctgatagtcaaagttttgtcatttaagaaccaaaatttcaagttgttttaaaaaagactgtaactattttaaatagaaattattagttaaatgtataacttgttgacatccttgtgttttaaaatagagttgatggaaaacattttaacagttttttgacaacattgctctttgccagaatgcaacgacatcctcagaacctgtgaagcagagcagggtttctttgcccttatgtaaaatattctgagaatgccatgctttcaagttcttctttctgctccttcattgtttttgtgctctctcttgttcccatggggctctaagtgtgccttcttctgacagtttgttctgttttacttggcttcttctaatatgctgtcaacttagaaaaaccaacctt

SEQ ID NO: 213033 - DNA, 544 bp, Homo sapiens
ggaatttagtcatgagatacccaattattcttagcacttctgctcactctgcgtattaccaggactggcaccatcttaggactgcaacattttagccatctttggaatccctagggaacaattcttccttaatagacatgatttctgatagtcaaagttttgtcatttaagaaccaaaatttcaagttgttttaaaaaagactgtaactwttttaaatagaaattattagttaaatgtataacttgttgacatccttgtgttttaaaatagagttgatggaaaacattttaacagttttttgacaacattgctctttgccagaatgcaacgacatcctcagaacctgtgaagcagagcagggtttctttgcccttatgtaaaatattctgagaatgccatgctttcaagttcttctttctgctccttcattgtttttgtgctctctcttgttcccatggggctctaagtgtgccttcttctgacagtttgttctgttttacttggcttcttctaatatgctgtcaacttagaaaaaccaacctt

SEQ ID NO: 213034 - DNA, 340 bp, Homo sapiens
acaagtcactccacctctcctggagcagcatagcaaaagaataaaagaggccaggaccaggcgcagtggctcatgcctgtaatcctaccactttgggaggccaaggtgggcagattgcctgagctcaggagttcaagaccaacctgggcaacacagtgaaaccccatttctgctaaaatacaaaaaattagccaggcatgattgcagtgagccgagatagmaccactgccctccagcctaggcaacagagcaagactctgtctccaaataaataaataaaaataaaagaggccaggagctacactaatggaactcctattgtatgaagctaagaacagga

SEQ ID NO: 213035 - DNA, 580 bp, Homo sapiens
caataagcattatgacaggaaaaagagtttattccttgtactccaaacaattgaaagcttgttgaatatttaagcagtgcatataagagatttttgttttagactctttcccttacaaaaattttatgttttctaccagttttcaaactacattgtgataaataacaacctggagaaattgtttaatacatatacacttcggtctcaccgccagaaattctgatttagtacattaggggtggggcctargcatttttatttgtaacaagcatcccaggtatttgagatgcaggtgtcctaccgacatactacctctcagaaactccgcccctgtcaaatcgagttgttagatactctcagaaccccttccagcccttcttgcatatcctaggatgataacttatcctggattgccatggacttccttcgttataaaatggaaagtcctgagtctcaagaaatccctcagtcctggaaaaatggctaaagatgttaaaaccatatttggtcattcagtgtcctcccatgccagtctctgcaacagaaatgccccatccaccacaatctctgcattttcacc

SEQ ID NO: 213036 - DNA, 474 bp, Homo sapiens
tgaacattttctagcgcataatagctagtccctaatctaaattatttgcttaagtttagcacattccccttgaaaaccagatgcatggggcaattctctacacttttgctgtccaatattgtaaccactagctatttaattttattattaaaaataaattaaattaaaaactcattccctagcttgcttgttccctarcttgcttagtcacactagccttattttaagtaaagtatagccatatgtagtgagtggctatggttttgaacagtgaggatatagaatatttctatgattgcacaatgttctattagacagccctctttatatataaatagagtcatacctcactaggattcatttatttattgattatttaaattataaacaactaaactgtacttttaaagagtagaattaattatttgagattccactggttgactgagaaactcagttcttctcagtacatta

SEQ ID NO: 213037 - DNA, 567 bp, Homo sapiens
tatcaatgctgctgctgttactctgttaacttccttcactctgctggagtccatccccctaggaacagcctcaccttcctttatgcccatgtaaatcgcatgcagccttgaagatcccctgaaagtccacttttccttaagaacttgctaatatygtgtgcattgataaaacaatgttttaggttgaatcataaactgacagttttgtaggacaaaaagagtcaaatactgataacatcacacagttcaaccaattctttccaattaagataatttgttaaatgcataagtagaattatttttaatgtgtcataaactgcatttaaaaattcacaaatcagagaaactataattttgcaactgtatttgctcgagagacagtagccatcgtgtatcccttgctttgtggcaatgaataccataccacttcgtattattcttatatgcatatatcttgggcataatctcagccatgtaatattctcctatatcttttacaatatctggtgttacaaagaaacatattaattgtggactattgaaaaggggactttaaatgtcacagag

SEQ ID NO: 213038 - DNA, 481 bp, Homo sapiens
ccatgttaaatggttaagacatgcatagatacaataaatattgcacttttccttgtcaaagacttggaatctgcctgtggaagtcaaagtggaaagggttgctgcttttgagctattgtgaagtggtgggagggggttatgtagaatcagaaagaaagttgcagcaccggatgtgcatggtgtggctcatgacaacgtggtggactgagatagatgacagatggtggaggtgtatgcattttgtgtattcctatcaggtgcagttcagctgggtacagttttctgcattcatctagtgtttctaggggatgaaattgtgtataagcaaacgtgaaatccagttatgttcaaattgttccctaatatatcaataccgttggaacaaattcatgatttcaaaacaagtcttatagcagaactgactttacgtacttaattgcactgaatggactkgacgaaaactgtaatctacagcaccagt

SEQ ID NO: 213039 - DNA, 444 bp, Homo sapiens
atcgtttttctagatcaattctcaaactctctgaaataaaggacaagttttattttgtttttcaatctgacctgaactgatgcttttgtaaaatacaagaaaaataaattactagaaaagtgaaataatgtaaaggtaatacaaatacaagccccatttttaaaattatcatttggatccaacagacataaaattaygctgcaaattattataaaggtttccaaaagctgactctcaatgtctatgctgacctgatcttggactggtttcagaaagtagacagattggccccagatccctggcccactatagcactcccagcctgactgagaagtattggtttagaggctcttctgattcttcctgtcttggaaatttctggagtagaatccaaagacctcaagcctgggcccaaatcttctaccctgaccagtaatcattagc

SEQ ID NO: 213040 - DNA, 414 bp, Homo sapiens
taatagtgcctcccttccaaagttggggtactaagacttgtgagaaattacttccaaactctaaaatgctaaatacacgtaatgttattgcttttacatgtttattagctagcratgtctttagttaattgcattagctaaattaacatattatgcttagattataggtgggaagcctcactattagctagcgatgtctttagttaattgtattctaactaactgatatactatgcttagattataggtgggaagcctcactatctaccatagggcagaaattggtacaagacctcctggctttggacttgatccaatgtggcctagttattgaattaccacaaggaactcaattaaaggtggtctggctaatgaaataggcaactcacagcttctagtactggtcctggtttt

SEQ ID NO: 213041 - DNA, 578 bp, Homo sapiens
gaatgtagctggcagagaattactttaggttgagtgatacagaatggcatctttgaggagctgaaatatgagctggcactgccttgatgcaatgtgtcagaatgaaaggcatctcaggaggaggaaacagcaagtgcaaaggccctgygatgggaacaagactagaatatttgaggaatgaaaagaagaacctgcagtattataagtgaagggcagggtgagattagaaaagattagcaaaggctgcagccagaaattattgggtggaaatttgacacgttttgtcttccatttccttgatcttaaaaaacagctttaaaaagcatctgagaacatttggtgaacacccagtgatgctcccacattcctagatgtctgaggaaccctcagaaggaaatcatcgaggtctttcaccatgtggccatgccaattgtctcatcctgttcttcagcatctcccatcaagatctccagtggcctcacaaattacaaccagtctctaaaagctgaatgtcaacctgcccttcaaaggccctgtgtcccagtgccaaaaggcagtagtttaaagaaacagggaac

SEQ ID NO: 213042 - DNA, 578 bp, Homo sapiens
gaatgtagctggcagagaattactttaggttgagtgatacagaatggcatctttgaggagctgaaatatgagctggcactgccttgatgcaatgtgtcagaatgaaaggcatctcaggaggaggaaacagcaagtgcaaaggccctgcgatgggaacaagactagaatatttgaggaatgaaaagaagaacctgcagtattataagtgaagggcagggtgagattagaaaagattagcaaaggctgcagccagaaattattgggtggaaatttgacrcgttttgtcttccatttccttgatcttaaaaaacagctttaaaaagcatctgagaacatttggtgaacacccagtgatgctcccacattcctagatgtctgaggaaccctcagaaggaaatcatcgaggtctttcaccatgtggccatgccaattgtctcatcctgttcttcagcatctcccatcaagatctccagtggcctcacaaattacaaccagtctctaaaagctgaatgtcaacctgcccttcaaaggccctgtgtcccagtgccaaaaggcagtagtttaaagaaacagggaac

SEQ ID NO: 213043 - DNA, 588 bp, Homo sapiens
atggtagtgtggagataccattatgtgtgcctgtagatttctcaagaagttaggataggaggagaaacmagcaaatagtaaatcttttagtcccatatacttgtcactgactcccattactcagaaggaagtccaagctcaacaggtctgacgagtcccacctggattctggcattcaaatgtcataagtgctctaccttgttctctctggactctggcattcaaatgatgtcataagtgctctccatcttttcagcagaccctcctcctggcagggaatgcttgcattggacatagttagctaccacacagaaagagctcaccctctacctgtgtctatgcagccatatccatccagcacaggacactgattggctcatcttgaaacgcacccctaacaatgagccaatcaccacagtcatgggaatcaaatactttcattggctagtctgggtcacatgaccacccctggggccaatagttgaaatcaagcacatctgaaccaaaggaactgaccatgatttccacagtatgaaggaggaattgtgcccctaaaagatgccgggcagtcttggttccgaagagaat

SEQ ID NO: 213044 - DNA, 428 bp, Homo sapiens
tactagtctatctaaaatttaacttgcttgatatgggcctatctcagactacattgcatcatgtagtgatgagatggggtagaagtaggaaagagagtggaaaacagaacaaaaatactattaatagatttaaggtcaaattgagcatgtgggtttaacgataatcctaaytttctcatcagcagggtttgcaatggaaggaaacttgtgtggataagtgtttagtcctcataaagaagattcaaaagccattccactatttttaagtaatggaaataatttcacaagcacagagctgtgaaaattttaaaaaatgtattcttaactattactatttttctatgtttatctaatggcttgatttttctggtggcatgcttagcatctttaaagagaaaacttgtttcattaagttagtaatgtatgtt

SEQ ID NO: 213045 - DNA, 436 bp, Homo sapiens
tccatgacaaccccactgtcattatatgctgcctccccacatgcctgtgagtaccctgatgtccgggaacaagwcttactcctctctgtaccacatagcacctctcacagaggccacacagaatacagcctaaggtggttctggctgaaataaactaaaaagggagaaagacttctccaggacattaatcattaattcatttctcatttcttttcttttgtggacccaaagagacacaatgagagacacttgatgattacctaggaaagttctggaataaagctcaggagtcatctggaaaagttcttgaaagctagtattaggcagtagtgcagtcatatggatgtatggcatttggtagtcaaacaggtttaaactacaagtacttacatttgatccaacaaaacttactaggtgcccattgtgttacatagta

SEQ ID NO: 213046 - DNA, 502 bp, Homo sapiens
cctcttaaaaaagattccaattcctcatggaattcaccacggaatgctttctttgtgttacaaccccatggtgctagtgttcttaggaacacactttgggaaagtgtgggtgttaacacacaagcagggagtttatgtcttaggagctattttcttcagtctagagtagactggaagagtttgatctagttstttgctgtttgggttttctttttccttctaatctgtggtgtaatttataagaaaagtcttagagaggcatcaaaatgaaatctcatttgattttgcacataaggagctactttttttgaaaagagtaaacttgaggaagtttggggaaatcaaagacgcagtcactccaccagtgcactgataatatatctgtatgaaaaatgaagttcctagacatcagctgggtgttgctatgcgtttaaatgcttcttatagagtgacatttagataactgcctaaaaatttcactttcaaagtatgatgctataag

SEQ ID NO: 213047 - DNA, 502 bp, Homo sapiens
cctcttaaaaaagattccaattcctcatggaattcaccacggaatgctttctttgtgttacaaccccatggtgctagtgttcttaggaacacactttgggaaagtgtgggtgttaacacacaagcagggagtttatgtcttaggagctattttcttcagtctagagtagactggaagagtttgatctagttctttgctgtttgggttttctttttccttctaatctgtggtgtaatttataagaaaagtcttagagaggcatcaaaatgaaatctcatttgattttgcacataaggagctackttttttgaaaagagtaaacttgaggaagtttggggaaatcaaagacgcagtcactccaccagtgcactgataatatatctgtatgaaaaatgaagttcctagacatcagctgggtgttgctatgcgtttaaatgcttcttatagagtgacatttagataactgcctaaaaatttcactttcaaagtatgatgctataag

SEQ ID NO: 213048 - DNA, 529 bp, Homo sapiens
tattccaatcagaagagtcatcagtagcatttaaacccaaattaattttgtttccatttatccactcatccaacatttattttttcactcatcttagtgtgtttcaggcactgtgctgaatcatgaagacaccatggtgaataaaacagacattgtctcctccctcacagagcttatactccagtragagagacagagagaaactaagtagataactccacaaatacataattgctaattctcgaaagtgctaccaaggaaactaataaggagataaaataacaaaagggcagagggtgaggttggaagtctctagaggggtgatagttaagctgaaactcaaaggaagagaagaaaagaaaggccatgaccctatttatttttattctgatttcttctttggtcccaactttttttgagttcaaaccctgtattccataggaaattatgctcaaagagcattagaacattgaggccagaagaatctaactggtccttattctcgtatcaagtttgtgtgcccagactc

SEQ ID NO: 213049 - DNA, 547 bp, Homo sapiens
catgcagaacttagagattcattcatgaagttgggggagccccaagagattccaagagtgtctgctatttcattgcacaactccaatagaactgtggatctcatcagagttatgagtctcggtgtctacagaggagaagctcctatcagaccccttaaccctatgagtttgtctgcattatctgagtacaacccaattctctaaattctgaaagcatctatcttcatctttcggcttaccagttctacagttgagaaaggtccagagaggaaagcaatttgcaaacaccacttagcaaattggtggcagagcygattcccatcaccagttcaccccgaatcatttattttgttgcagtatccactttggtaaactgaggcctgttattgtattgatgtacattatgacttcaaagatgcttttttaatttctaaccaattgtcagttatcaatggcttttacttctaatgctgcacttgagttttaagtgtctcttctcttcttcccttcatgttttctgacatctattggcctctctgccaagtag

SEQ ID NO: 213050 - DNA, 549 bp, Homo sapiens
tcagtttatatggggcatgcagaacttagagattcattcatgaagttgggggagccccaagagattccaagagtgtctgctatttcattgcacaactccaatagaactgtggatctcatcagagttatgagtctcggtgtctacagaggagaagctcctatcagaccccttaaccctatgagtttgtctgcattatctgagtacaacccaattctctaaattctgaaagcatctatcttcatctttcggcttaccagttctacagttgagaaaggtccagagaggaaagcaatttgcaaacaccacttagcaaattggtggcagagctgattcccatcaccagttcaccccgaatcatttattttgttgcagtatccactttggtaaactgaggcctgttattgtattgwtgtacattatgacttcaaagatgcttttttaatttctaaccaattgtcagttatcaatggcttttacttctaatgctgcacttgagttttaagtgtctcttctcttcttcccttcatgttttctgacatctattggcct

SEQ ID NO: 213051 - DNA, 579 bp, Homo sapiens
tactgacctcaggggatgcaaataggatctatgaccacagaatatacccccactctcaacttatatgtaagtctttggtcagcaaaatggatagacaaaattatatgccgcacacagtacacatctattgacaggactagaggaatatttataaatcatagatttaggtattgatgataaaggcttatatgggaatcttcccttggtcacagagaagggagctagatctggtytactttgattttggcttctaggggatcatgtgaaaaccaggtcaatatcacattcttggaaatgagatggacagttattatgtcctagctccttagtcatttttacaggtttttcctcttctcttttgtcttgaacccatgccctaggtcagaaaatcatagaattaaattcctaatacagttttggaactgaaattttcccagaagaaatcttatctgattttcttatcccgaaactagaaaattgaggcctggaaaaagtaggcagctagcccaagttcacagagctcttttgagatgaagccagaactaaaataagtctcccagcacctagtggagtgcttta

SEQ ID NO: 213052 - DNA, 579 bp, Homo sapiens
tactgacctcaggggatgcaaataggatctatgaccacagaatatacccccactctcaacttatatgtaagtctttggtcagcaaaatggatagacaaaattatatgccgcacacagtacacatctattgacaggactagaggaatatttataaatcatagatttaggtattgatgataaaggcttatatgggaatcttcccttggtcacagagaagggagctagatctggtctactttgattttggcttstaggggatcatgtgaaaaccaggtcaatatcacattcttggaaatgagatggacagttattatgtcctagctccttagtcatttttacaggtttttcctcttctcttttgtcttgaacccatgccctaggtcagaaaatcatagaattaaattcctaatacagttttggaactgaaattttcccagaagaaatcttatctgattttcttatcccgaaactagaaaattgaggcctggaaaaagtaggcagctagcccaagttcacagagctcttttgagatgaagccagaactaaaataagtctcccagcacctagtggagtgcttta

SEQ ID NO: 213053 - DNA, 588 bp, Homo sapiens
tccatacagtgatttgcacatgaatgtttatagaaaatttatttataatagccccaaactggaaataactcaaatgtctctcaataatgaatggataaactaactgtgatctattcatacaagggatacctttcagtgataaaactgagtgaactattcaaacagactacaacatgaataaatcttaaaataatcagactagatttaaaaagccagaccaggaagaaatgcacacagtgtcattttatttatataaaatatttgaaaatgctaactaatctataatggcaaaaaacagatcagtgggtatctgggacactggtgtgggtcagggaaatgaggaggaagggcttcccaaggagcataaggatatgcttgggaatgataaatatattcattatgttgactatggtgatttttttcacaggtctctgtatatctatctatatatccatctatctgtccacacacatacatatgtcaaaacttaccaagttctatgttttaaatatatataatttaagtcaattatacttctataaacatgttaaatttttttwaaaaaataaactattgaggtatatttat

SEQ ID NO: 213054 - DNA, 585 bp, Homo sapiens
tcctgtttcccattgtcagtcagtctctgtgtctgagcttttccctgtgtactcccccaccccccactggaggtttcttgcacaccccgataatcacttcatacatctccagctgtttcccycacgggagaacagaactgcgaattgggactccgcattcactttgtatcttggatacgtctcagtcacacacactcaacctgcaaaaatgcccaactattaaggaagtacttatagtccacttttccttcctcagctcatgcacgaggttgccttgttcccacagggcctgcttttttccctttgttgcctctattgcctcctgaataacagtctccggtttgtctatggcctccgcggggagccgggatgcccagacagagcaggccacctaaatcgggtggaatgtgtctcccctctcagccagagtcccactccatgcaggcacagagatcctgaacgggacctcagatttgtgagaaacatgttcactcatccaaacccaaagaatggactcagagatacaaagaacagcaaaagtgagacttttaatagcggtcttgcaagatctggtgtctgacaggc

SEQ ID NO: 213055 - DNA, 585 bp, Homo sapiens
tcctgtttcccattgtcagtcagtctctgtgtctgagcttttccctgtgtactcccccaccccccactggaggtttcttgcacaccccgataatcacttcatacatctccagctgtttcccccacgggagaacagaactgcgaattgggactccgcattcactttgtatcttggatacgtctcagtcacacacactcaacctgcaaaaatgcccaactattaaggaagtacttatagtccacttttccttcctcagctcatgcacgaggttgccttgttcccacagggcctgctttyttccctttgttgcctctattgcctcctgaataacagtctccggtttgtctatggcctccgcggggagccgggatgcccagacagagcaggccacctaaatcgggtggaatgtgtctcccctctcagccagagtcccactccatgcaggcacagagatcctgaacgggacctcagatttgtgagaaacatgttcactcatccaaacccaaagaatggactcagagatacaaagaacagcaaaagtgagacttttaatagcggtcttgcaagatctggtgtctgacaggc

SEQ ID NO: 213056 - DNA, 588 bp, Homo sapiens
cgtttgctacagagcatgtggaattttctgttttcctaaattcaatctaaatagacattctaagacattaaaatcctaccattcatggtatccataaggaattttacctacgtatcaatgtgtttatgtatctgcctacttacattaattggtgaatatatacttaatacgttgtttcyacagttttaaacaatgagcattaaatataagctaaaacatcttcccatttaacagtcgtgtatagctcacaaatggaattgattctttttccatttctgattgcttaatacatatttttcctggaataagctttactcacatgagtaaaataacccaagatgagaactttaccaacaaaaaaccgaaatgaaagaatgatttttcaggacatttgccaaccaaaaaaagaaatagaaaactgcttctgtgaaaacatctgattcaacatatgacaatctatattataatgttagggttaggagcacatgcatatgaaataatcataaatcatgcattcatttatcttaaccaaaggaagtaatgcctatatacatacataatttaaatatatactctttttctgtactt

SEQ ID NO: 213057 - DNA, 599 bp, Homo sapiens
ttcttctatttatgaattaaacaatctatctcaagttactctatatttgcatgtcataaaataatttttaatttgacactttgacattttgttttactttatacttaacattattttttgtattttttccaaaatttgagaaaacaacaagaaatttggcagttatagatggctttcatataatttgacttgtgttttacctttataaagcattatttatcatttttgtcattggtaatctcattgaagcaattgttgataggtagtagtattatttacacatttgagtgaaatgaggcagaaaagcttttaaattgttgatgatatcaaattttaaacattatagaggatatatgcatcaataaagaaattaaagtctatgacaagatggtgaactaataaaatcgaaaagattgcttcccaaattcccactcaggaaatactaaatatttaaaaagaggttgcatggaaattgctctaataaactaattttttttwaaaaaaaagtagagaaactcttgaattgaaagaaggttggttattagtgctaggagtatggttggcagatggtctggggtggttacaaaggagtcaagcag

SEQ ID NO: 213058 - DNA, 610 bp, Homo sapiens
tatttggcatccacatgcatatttttttcaaatattgttaaattaawttccaaataaaggcaacagaaaaattaggcctttgccaaacataatgcaattattcttcttgaatactgaaatagacaaccttctcctcaacagaggatgcaaagtccttttatctatttttgagtgatatttattcttcttctgagtcatattctccctttgatattttataatttaaatactgagatacaaagttaaaatctattaacatattttatgtcagatgatagagaagtgggagaggagaaaatgaaaaactagttgatatatgcataaatgtattcatattaatagaaatagatgcatataactattatagtctctgtgcctacagctcatcacatggccagttataagctgatacctttttctactatctgtgttatataccatttgcttctagcaagcatattggctagtcttagttccttgcctatggagtgacaaaaccttcattcctagaaactctggaatattccattaatatttcctcctatattgggttgttgcagttttccactgactttagtcacaaggtcatatgagtaataagaagaaatgt

SEQ ID NO: 213059 - DNA, 610 bp, Homo sapiens
tatttggcatccacatgcatatttttttcaaatattgttaaattaatttccaaataaaggcaacagaaaaattaggcctttgccaaacataatgcaattattcttcttgaatactgaaatagacaaccttctcctcaacagaggatgcaaagtccttttatctatttttgagtgatatttattcttcttctgagtcatattctccctttgatattttataatttaaatactgagatacaaagttaaawtctattaacatattttatgtcagatgatagagaagtgggagaggagaaaatgaaaaactagttgatatatgcataaatgtattcatattaatagaaatagatgcatataactattatagtctctgtgcctacagctcatcacatggccagttataagctgatacctttttctactatctgtgttatataccatttgcttctagcaagcatattggctagtcttagttccttgcctatggagtgacaaaaccttcattcctagaaactctggaatattccattaatatttcctcctatattgggttgttgcagttttccactgactttagtcacaaggtcatatgagtaataagaagaaatgt

SEQ ID NO: 213060 - DNA, 573 bp, Homo sapiens
cttagatttaagcctttaatccattttgatttgatttttgtatatggtgagagataggagtatagtttcattattttgcatatagatatccagtttttccagcaccatttattgaagagactgtcctttccccatttatgttcttggctcctttgtcaaaattgagtttactgtagatacatggatttgtttctcagttctcagtggatttgtttcattggtctatgtgcttattttaatgctagtaccatgctgttttggttattatagccctgtcgtataatttgaagtcaggtaatgtgatttatccagttttgttctttttgctcaggagagcttgagcaaaaagctatccttgagcttggctrttcctggtcttttgtggtttcatataaattttaggattgttttttctatttctgtgaagcgtatccttggtattttgacagacattgcattgaatctgccaattattttgggtaggatgaacattttaacagtagtgattcttccaacccatgaacatgaaatatccttccatttttgtgttcattttcttcaatttcattcgcc

SEQ ID NO: 213061 - DNA, 542 bp, Homo sapiens
gaattcttatccattctgtcatttggtatcttttaagtggggcatttaggccatttacatttaatgttagtattgagatatgaggtactattatattcattgggttatttgttgccttaataccttattttttaaattttgttattgttatataagtcatgtgagattaatgctttaaagaggttctattttggtgtattttgaggatttgtttcaagatttagagctccttttagcagttcttatagtgctggcttgatggtggcaaatttctcagcaattgtctgtctggaaaagattgtatttttccttcatttatgaagcttagttgagctggatacaaacttcttggctgataattgttttgtttaaggaggctaaaaataagamcccaatctgttttagtctgtagggtttcttctgagaaatctcctgttaatttgacaggttttcctttataggatacttgatgtttttgccttacagctcttaagattatttccttcattttgactttagataacatgatggctatgtgccta

SEQ ID NO: 213062 - DNA, 542 bp, Homo sapiens
gaattcttatccattctgtcatttggtatcttttaagtggggcatttaggccatttacatttaatgttagtattgagatatgaggtactattatattcattgggttatttgttgccttaataccttattttttaaattttgttattgttatataagtcatgtgagattaatgctttaaagaggttctattttggtgtattttgaggatttgtttcaagatttagagctccttttagcagttcttatagtgctggcttgatggtggcaaatttctcagcaattgtctgtctggaaaagattgtatttttccttcatttatgaagcttagttgagctggatacaaacttcttggctgataattgttttgtttaaggaggctaaaaataagaacccaatctgttttagtctgtagggtttcttctgagaaatctcctgttaatttgacaggttttcctttataggmtacttgatgtttttgccttacagctcttaagattatttccttcattttgactttagataacatgatggctatgtgccta

SEQ ID NO: 213063 - DNA, 501 bp, Homo sapiens
aatgtcagttttttaaatgaaaaattatagggagatgggacttgataccaattccaaagcaaaaatattctaggaagaataaaagatttgaaaaaggcaaggcttctataagaaacacacactttaaagggttataaaaataatatatgcgaaagcactttttttttttttttttgagatggagtttggctcttgttgcccaggctggagtgcaacggcacaatcttggctcactgcaacctccacctcccrggttcaagcgagtctcctgcctcagccgcccaagtagctgggattacaggagtgcaccaccatgcctggctaattttttgtatttagtagagatggggtttcaccatgttggtcaagctggtcttgaactcctggcctcaggtaatccactggccccggcctcccaaagtgctgggagaaagcactttttaaactgtgaagaactgcataaatctgtggacattttatgattaccattgtgacagcatc

SEQ ID NO: 213064 - DNA, 526 bp, Homo sapiens
gatcactcactcacccatcagacattgatggagcatctgctctgtgccaggcactgttgagatatggagsagcagcccgcacaggtggggctcctgccctcagagggccaggagttcagcgggacagacagacaatcaataacagtgacagggcgatgaaagttaaagacccctagggtgtaacaggacttcagagcagtggcctaactgcctggagaagtcaaaaggcctgctcagaggagataacttaactaacctagaagagctcccgggaggtcagagccagggaggggacctgaggcaggtgtgtttgtctgttttttgttgctataaaggaatacctgaggctgggtaatttacaaagaaaagaggttcatttggctcacggttctgcaggctgtacaggaagcatggcaccagcatctgtttctgatgagggcctcaggaagcttccactcaagatggaaggtgaaaggggagcagtcatgtcacatagtgagagaggaagcaagagagagggggaggt

SEQ ID NO: 213065 - DNA, 585 bp, Homo sapiens
tgtatgatctcaaatacatgttgctcagtgaaagaaatcagacccaaaagattatgtattctattattattccatttgtatgatattttggaaaaggcagagctacagcaatgagagaactgatcagttctccaccaagttgccaagatttggtggtgaagaaagtttcaggcggggcacagtggccctcgcctataatctcagcactttaggaggctgaggcaggaggattgcttgagcccaggagttcgagaccagcctgggcaacatggtaaaacttgtttctataaaaaaaaatatgaaaatttgcagaccatgtcggtgtgttcctgtagcccagctacttgggaggctgaagtgggaagatcacttgaatctgggaggytgaggctgcagtgagccataatcgtgctactgtattccagcctgggcaacagagtgaaaccatgtcttaaaaaaaaaaaaaaaaagaattttactacaaatgggtaacacattttgggggatgataaactttggtatcatgactgtaatagtggataaatggcactatgtgtgttaacaaatagaactttatttcacaaa

SEQ ID NO: 213066 - DNA, 438 bp, Homo sapiens
ctttctggggttttgattgggattgtgttgaatctacaaatcaatttgggaagaactgacattttaacagtaagtcttctaattaaggacatggaatatttcctcatttatttagatatcctttgggtttttttcatcagagcttttgtagttactgtttactgtttttgagcatttgtgttatttmcaatttgaggctgttatattatgaaaattataatgtctttggacaaacacatatgctcacttgccctatgtccagaagtgggaatgctgtgtcataagataggaatatatgtagcttcagtaggtattgccagttttcctaagtaattgtaacaatttgctcttttcaccagcaatgtgtgaataggatacaaacaaaaaagaccttacaccttatacaaaaattagatcaaaataaatcatagacataat

SEQ ID NO: 213067 - DNA, 240 bp, Homo sapiens
ttccctcttccactgaatgtggtactcctttgtcatatattaagttttgaaatgtactaggatttataactgggataactatgtttttctatctttctgcctgttcttgtggcaatcacataccaatttcttttttcagtctaaaggctgaccaaaatgctatgtagactrggttctggaatatttaaaaggaaatacagtttgtgtgcctatcagccaaagactgcatacctgtagtta

SEQ ID NO: 213068 - DNA, 530 bp, Homo sapiens
tgagaaatgcaacttgtcttttgtgtggttcttcctctcttatatctatgaaagatttcttttttaaaaataaacttcaatgaacttcttacatacaaaaatgcacttggtcatcccagtagcagtggaattgtacattttggacagtatatgaatctttctttttcctcattagcattaaatttctttkaattatacatgcaagaaattggtttcaccattctgctgtagggtaaacaaagaaaaacatagataattggctactttgcatataaatgccaacctacagcacataccaatgtagagatgggttaaatgtaaacaaatttctagtcttacaagtttcacttcactgccaaggtcaagcaggtgattatacaataacaccacataagtaaaacttcaatggcaatttatataagctaggaagacatgctaatgttgttgaaatatggtccagtattcacactcatatatatttaaacccttgcctatcaatgatctttaaattcctttgtggaaatccatat

SEQ ID NO: 213069 - DNA, 307 bp, Homo sapiens
gaaactagtttacttaagtaaaactttatccaagtgaggttttacacacagcctaaccaaactgaaggaagagatatgcccacctccagccatctccagccttccaggtaggggaagagaraagaaataccaactctagccttcctgtctcccctaataaaagaaaaataaatcaacctgagaagcacttgtgaaggtcacagcccaaggacacaggctcactaaaagactgagtcctaattatagacctacagaatgttttccctcccccacacctcaacaccacatcaatagggctcctataata

SEQ ID NO: 213070 - DNA, 607 bp, Homo sapiens
actgttttattttacttacttatttatttatcttagagacaggggtcttgctatgttgcccaggctggagtactattagtggctattcatgatcacagtgcattagagcctcraactcctatcctgaagggttcctccccctcatcctcctcagtagctaggactacaggcatgtgctaccatggccaccccttgctattttaaaaggcaaatcttacctctattccccaccctaccattccctttctggtagcctcaattgcttttctgtggattaattgcatcaccacccctacagtgtaccaaaatgatattaaaacctactgtctctgctattttttcaccacttttcttttctataaagtcaattcctcacacatctcccctacttctactcttggtactgatgctactaattatattctctattatattgttgaccttaattctatccatcaccttactgaaaatatgtttaccctaatcaatttcctcttggcctaattcacttgtctctgacaattctgtgttatttgtttgttgttttgaagtttgttttgtttttactatctttgaccactccacaaagctgggacatgcctgagtt

SEQ ID NO: 213071 - DNA, 416 bp, Homo sapiens
aataagaagagttggcacaatagcaaaaacatgatagaagtggtacattcagaattaggcccaactaagttcatatataagtgactcagatccccatttcacctttctctaattgcaccattattgcttcctctgctcatagctatgaacatgtaggtgtttccttataactaccacaaagaggagaaataagaatgcgctttttaaataaatgggtcmtctccataaggtggtacagtaataaatgaactgctaccacattcagatgtggttgtgttaaaacagtggtgaagggaattcctcccactgagcaaggatccaagcagtacacttagtcataaacttggtatggacagagaagtaatgtgaggaaggataaatgcagactgttgggcagttgcaaatggcatgattgg

SEQ ID NO: 213072 - DNA, 652 bp, Homo sapiens
atataagaattacagtaaacctaaggctaccacttggatactttagaacctctcatgacactagaccagctggcaaaggaatgagttattatactgggaactgaccctgattattatgaggggctagagttgttgctactaaaagtggtccaggagaagcttattattgaggcgtcgatgcccagtactaatcacttataagcaaatggagaaagcacagcttaacaagtactctgacacccagaaaaggcctacataaacycagtaggaaagaaacctaaaatagcagaagtgctggatgagagtaaggaaaatctataaaaaacggtaaaagaaaaaatgataaatatctattacaaccttagaattaaccatagcagcaggaaagtatagttttttccactaactctcccattataaattttttttaatgtcataaatgaataacacctgtaagtattagtttacatagtaaacttaacatggagcataagagtaactgtgtagtaaaagatgtgtatctgtagaagatgctgtcagtatcctgaccacattcttttgaccattacaatttctatgcaggcagggtaaccttcaactacaagcagtgcaagcttcaactacaagcagttaaaggctttctctaaccact

SEQ ID NO: 213073 - DNA, 507 bp, Homo sapiens
aaaaacaacatccctctctccccccgcaaaaaaaaaaaaaaaaaaamaaaaaactttttctccagtgaaccaagagatttaagtagcagctccagggacagaatatctggctggctgtctggctcctgtgtgctggcgcctctccattcccgcccatccccatcctagttttggctttcctagtcagacttctctgcatagcagcagagggtgtgctcagcagctctgcccaatgactgatggacctgcagcagcccccgcggaggaggccaggctgtgattcagacttcagagcatatttggagggtattgcttctcagctgccagtaactgcattagacttgcacttggttagtgatgggcactttgtggttacttttctgattaataacttatcttacctatatgaccctctttccaactaccctttatttttgccccctctccccttatatctatttccttgtttgtccttgtgaataactacatatttcaatgtctttggat

SEQ ID NO: 213074 - DNA, 380 bp, Homo sapiens
cattacattgtgtatgacattkggctatccaaggatgccaagtgataaccactggatgattatttgattgtattcaatggatgtttacatcagttttacaaattagtcatcatttatgactggtcccgcactcgaattatgtctgcttaaaagtctggtacaaagtgagcactcaataggtgttagtccccccatgttgtgtaactatgtgttgtatttagcttttttttttaaattagttttcatgtacgggtatctgtgtgggtgggtacactgcaaagcacatctgtgcttccacacagtgttaaaagctcttaactatctgtctgcagcttatcagagagaagacaataattgcttctttagtattcccttttcac

SEQ ID NO: 213075 - DNA, 365 bp, Homo sapiens
caaggtaggcagatcacttcagatcaggagttcaagacaagcctggccaacacggtgaaaccacatctctactaaaaatacaaaaattagctgaacgtggtagcatatgcctgtagtcccagctactcgggaggctgagccacaagaatcacttgaacccgggaggaagaggttgcagtgagccaaaatcatgccactgcactccagcctgggtgasagaatgagactccatcactcagaccataggacaacaaaaacagaaatcaatatgaagatctcacaaaacatacaattatatgaaaattaaacaatctactcctcaatgatttttgagtaaacaatgaaattaagcagaaatcaagaaa

SEQ ID NO: 213076 - DNA, 468 bp, Homo sapiens
tttctgcatccacattcaaagacaatattgacctgaagttttcttttttcattgcctctctacacagcacaggaaactatcaacagagtaaacagacaatctacagaatgagagaaaatatttgcaagctatgcatctgacaaaggtctaatatccagactacaaaagcttaaaaacaaattaaaaagcaaaaaacaaacaaccccactaaaaattgggcaaaggacatgaacagatgctactcaaaagaagacatacacatggccaacaagcgtatgaaaaaatgytcaatcattagagaaatgcacattaaaatcacaataaaatatatcataccagtcagaatggctattgaaaagtcaaaaaataacagatattggcacagttatggagaaaagggaatgcttattcactgctgatggcaatgtaaattagttccactcctgtggaaatcagtttggagaattc

SEQ ID NO: 213077 - DNA, 420 bp, Homo sapiens
actgatataattttttccttgaatgttttgttagaattcaccagtaaacacatgtgggcctggtgctttctgttttggaagattactaataattggtttaatttcttcaatagatacaggcctattcagattatctatctgtcctcatgtgagtttgctacattatgtctttcaaagatcaaatatagttcttctgttttgctcactctttcttctgcttctggtagtccaaacgcacatctatgttacaccttttgaaactgtcacacagttattggatattctattcaccagcccacccccaattgccttccttctttacatttccatttgagaagtttctatttatctatcttcaaactcaatgactcattctatgtctgagtctaatctawagatacgtacatcaaagtcatttat

SEQ ID NO: 213078 - DNA, 467 bp, Homo sapiens
gcaagaatccaggtaatctgaaactgagcacattacttttctacattctccttattttttaggaaacaacacttgaatcattttttccccctaatgaaaatgcctatcagcaaacaaaccagaattacaggtactttcctctgttgaagtagaggttgacaatggcctccatgtgtacaacaatctctaatggctgaggacaagaaaaactcgaaaaccaatcttatggcataccaatacctagtatatcgagatgtttttcaccctcattcctttttgtttgatttgtgacgtgttatcatcatattgacgatataagactttcttgtatttggacccaagaagtgttccacttctgtccacatacatgctcgtttggctttaagaaaataaaacaaaaaccaaaaaaaccccmcaaagttagttaatttaaccattaatttagacaaagaactcatatggaagaa

SEQ ID NO: 213079 - DNA, 520 bp, Homo sapiens
tatctgcattgtcttctatgatttttactataaatataattacatgagaatggagtgtttcttagaagtgaccacttatgatattagtctccatttaaacatttcttcccatgtgatacaaatatatttccatatttattgtgtcagtatatttgttactctcatgaagcaaacagaatgccaattaaatgcaaatagcaggatttaagtgattagatgtgatgaggaactacttaaatcacacataaagatttgacaaataagmatctagtaaatgtttgaagaaaagcaaagggggtaatgataggttatgtgtctcaaaagaatggtttgaatagcatagattaagagatgcccttcgaaaaagtgaagtgccctctaatatttaggcaaaataaccctatttgtgaaggtactgcaaaaatcaacagtgaaataaaggacttgatattgtgcccctcttacagctttgtcaacaaaaatcgtaacattcaaatccaaacacttgatttattcctgg

SEQ ID NO: 213080 - DNA, 520 bp, Homo sapiens
tatctgcattgtcttctatgatttttactataaatataattacatgagaatggagtgtttcttagaagtgaccacttatgatattagtctccatttaaacatttcttcccatgtgatacaaatatatttccatatttattgtgtcagtatatttgttactctcatgaagcaaacagaatgccaattaaatgcaaatagcaggatttaagtgattagatgtgatgaggaactacttaaatcacacataaagatttgacaaataagaatctagtaaatgtttgaagaaaagcaaagggggtaatgataggttatgygtctcaaaagaatggtttgaatagcatagattaagagatgcccttcgaaaaagtgaagtgccctctaatatttaggcaaaataaccctatttgtgaaggtactgcaaaaatcaacagtgaaataaaggacttgatattgtgcccctcttacagctttgtcaacaaaaatcgtaacattcaaatccaaacacttgatttattcctgg

SEQ ID NO: 213081 - DNA, 563 bp, Homo sapiens
gccataaaaatgattaacttctagactaaaaaaaggataacgcgctaaatatattccacatatttttgccttgtaattcctgtaattatttttcactatctttatctcccaaagaaagatctgggagcaataaatctttctctccaataaaaagcactaacaatcaaaggcgttccgtaaatccagagaaagttttggcaactaaggcagaatttcttccgtcccgtccttacttcatgtatctcyacctaggatattccgttattaatgccagtcaacagtcactggctaaagcactggtcaggtgaagctaaataatagagggtctggttttgtttttaagaaaaacaaaaaccaggtgatgagaaccctccatacgaggcatcctaaggtaaggtgacggaattttccgactggagtgtcggaaactagcctctcgactcccggaaggaatgaactgcgagccagagagaagaccaggtcattcatgcggtcagtagcaagggcggcgctaaaacgctggggtcggggctcccaaggcgctacctaaaccccggacccca

SEQ ID NO: 213082 - DNA, 549 bp, Homo sapiens
aggaatatcagatagtaattaaaaatcatgttctcaaagaatatggaaaaaaattcaccatatactatcaggtttccaaaaaggagattatcagtaagtatagtatattcccaactttgtttaaagtatacacctgtgcaaagaaaaaaagacaggttagacagaggtgacaagggaaacatgtagaaatgtttaataaaatacaaatctttaaatattttcaatasatacatgatctagagcaagcaaaagaaacctccagagccagatatgaagtgggaagctgcataagagtagggcaacactcacaactcaagggagtgagaccctcagatcctgaacacagcagaaagttagaagtagaaaagaaaggccaaaactgggaagaggcagtcctgtctgtaaagtggtatacttaacacatactacagatagaaaaaaacaaaaaggcacccaggagaaatctgaaccccaaagctgccctaggtgtcagggggagcctgaattcacaccatctcccctaaagaaacccagaacccaagaaaccaa

SEQ ID NO: 213083 - DNA, 572 bp, Homo sapiens
tgacaagcatgctttgtctatttgctttagttaatgtctgagggcagatatagagtagcccttatcgcctatgtttttttatacttcacaggtcaatttatatttcttgaaacactgcttctaatagaaatttgtagcactgatctccaccccaccaccagcaaaaaataaaacacaggacactgaagaaagtaaacaattgcagttatctccttcagaagcttctagaagcagtgcctaattgacctatgcagatataatatagattcatttataaacagtggtgttaataagtattgttactagcttttctcgaaaagcaaattttgaactgaacttaatacttctaccaggcttggtttgagtcaatctaaatgccatttggacagaccacttgatcagtaataaatgcctctgctgtgtaaactctctcacaagtttraaataacataggctagtgctagtttcattgatgatgaacatatctttaaagtagatatgtaatacacagggaagtgttatgggcttcagattttggtgcacatttcttccagggtacagcttcaagtgtg

SEQ ID NO: 213084 - DNA, 618 bp, Homo sapiens
gcatggtccagggtagatcatatgataggccacaaattgtctcaatatatttgaaaaaatagatgtctgcatgttggaagtccaaggcaggaggatcacytgagcccaggagtttgagaccaggctgggcaacatagcaagactttatttctacaaacaaaaaaaaagaaaaaaattagccaggcatggtgtgcatacctgtggtcccagctactttggaggctgtggtgggaggatcatttgagcccaaaaggttgaggctgcagtgagttgtgatcacactactgcactctagccagggcaacagagacaaggtcaaaaaaaaaaaaaagatagatagatatcatacaaagtatcttctgtaactacaacaagacaaaattagaaagcagaatcagaagtaaaactagaaaactcacaaaattgtggttaagcttgtctaaattcaaattagaatgttataactttaggatgctaaacaaccaatgtttcaaagaagaaatcacaaagaaaattagaaaatacttacagatgaatgaaaataaaaacagaacataccaaaacttacggcactcagcaaatgcactgatcacagggaaacgtatagctataaatgtt

SEQ ID NO: 213085 - DNA, 547 bp, Homo sapiens
tttgtcattgtgaactgcatcttaagacatgtcatttaatctctgattcagtcagttycttttatttgctgcaattggagaacaaggatcagagctgggggagccctaagggagacagctcccattgataatgcttgtgaagacgtgcccagagcttgatcagataaaataactggtacaaatagttcaataagatggggtcctaaggtttcttcagtagccattgcatccattgagaacaccaccacaaagaattggcctctggatttccttacttaagggaattaagtagcaggaagctttgtcaaaaaggaaatagcacattgaatatatgcattctcaacaaattaaaataatttcctttgtcatggaccccaaagaaaaaaatgattaataactttgaaaacttaccagccagattttctgaattcaggattgaattattattttctatattttttctgagaagttgtgaataatgtaaattatcattttcatttttctttctttcctttttttttttttgagacaaagtctcactctgttg

SEQ ID NO: 213086 - DNA, 393 bp, Homo sapiens
  misc_feature (1)...(393): n = A,T,C or G
atcacttgagcccaggagtttgagactgacctggacaatawaaagagaccctgtctctataaaaagagaaaaaattagccaggcgtggtggtgcatatctgtggtcccagctactcgggagggtgaggcaggagggcggcttgagtccaggagttcagggctgcagtgagctgtgattgcaccactgtactccagcctngggtgacaaagcaagaccttatatcaaagaaagaaaagaaaaaaagaaaagaaaagaaaagaaaggaaaaaaagaaaagaaaaaagaaaagaaaagagaaaagagaaagaaagcaagtgagcagactcagggggtctgcactgcaccttagctgccatttattgagtgctgactctatgccaggcatggggcca

SEQ ID NO: 213087 - DNA, 393 bp, Homo sapiens
  misc_feature (1)...(393): n = A,T,C or G
atcacttgagcccaggagtttgagactgacctggacaatataaagagaccctgtctctataaaaagagaaaaaattagccaggcgtggtggtgcatatctgtggtcccagctactcrggagggtgaggcaggagggcggcttgagtccaggagttcagggctgcagtgagctgtgattgcaccactgtactccagcctngggtgacaaagcaagaccttatatcaaagaaagaaaagaaaaaaagaaaagaaaagaaaagaaaggaaaaaaagaaaagaaaaaagaaaagaaaagagaaaagagaaagaaagcaagtgagcagactcagggggtctgcactgcaccttagctgccatttattgagtgctgactctatgccaggcatggggcca

SEQ ID NO: 213088 - DNA, 609 bp, Homo sapiens
ccattctttgatctcttcatagtcagtcctacacagtcagaagacaaatagtgagcatgaccactttttaattgatttagacaaaaatggagagaaggcgggggtggagggaggcacatgtgcaatgctcccaagtgtcctcatagtgtttggttttgatccactcgttttcactgccacgtactccaggagagtcgagaaattgttcattccttaatgcaatctgtttccttctctctgatcctcattttgcagataaataaagctaaagccactgagttttcccaggtcactttttaaataagccagtctctctgagagatagatgcctgccaaggtgtaagaacgttgccccartttttttcctgtgaggctataatttagcttcatatgataattaatttctctactattgatgaataatccattcaataaaaaccgtgatttaagtgttttccttagggactaactcttgctggcctcttaatttaattttgtgcaagtttttcccacctcttcatcagtggaaatgattattaacctctatttgcatatatccttataaatcggtctctccttggagtgcctttttctgagcacagcaagctg

SEQ ID NO: 213089 - DNA, 435 bp, Homo sapiens
gggtctttgccacatgatgttctaatttgtataacactgtgctgagactaggccagcactttctgatgctgagtaatgcaccatcttcagggcaagggaccagtgtccaggggccacagaaagcatcgcagaccaggaagagcacayggctttcacccaggtgactgttcccatccactggtagtagctggcttgtcatctggaagagccgggatcaaagccaaagaggattatgcctgagcaccctatgagctgcccaggccatctgcatactaagccctgctcttctgggattgggggttctccttgaatttccagatccttctcagggctcctctacgtctggcattgaaaatggcctctttgtcactccttggattatttttcatttttatttcttcagcttccagaagtactttaaaatttgggatccat

SEQ ID NO: 213090 - DNA, 437 bp, Homo sapiens
tttgccacatgatgttctaatttgtataacactgtgctgagactaggccagcactttctgatgctgagtaatgcaccatcttcagggcaagggaccagtgtccaggggccacagaaagcatcgcagaccaggaagagcacacggctttcacccaggtgactgttcccatmcactggtagtagctggcttgtcatctggaagagccgggatcaaagccaaagaggattatgcctgagcaccctatgagctgcccaggccatctgcatactaagccctgctcttctgggattgggggttctccttgaatttccagatccttctcagggctcctctacgtctggcattgaaaatggcctctttgtcactccttggattatttttcatttttatttcttcagcttccagaagtactttaaaatttgggatccattagttgt

SEQ ID NO: 213091 - DNA, 549 bp, Homo sapiens
tgctgctgtctgtgccttgtggaatcttaagtagaatgaaacaggcccccgacaatcaatattactgacaaataaattaatctcggcaaataaactgttgttagcttcaaggctgtcccagtacccggaataattgcttaaatgaagctgaggccttttcaccagtttgtggctattttttctggtcatctacctgtgggtagsactcaggttgtccagagggaattggttttataaaataaaatcatacagtggccctgaccttgctccattagctccctcagtgctagagctctgtcctggcttcagaacaaacactgttgccaaatgctgagaagatgcctgcccttcacctaccttgagggaggcaggaggcaagagagaagtaggcagtgattgtctacattgctgcccaaaccctgaagtttatcagaagtagtttggaagcttggggtaagcaaggcactcaatgtcaagattgcaaaattctagtttttcttaaggaatataaagggcacatatactcctgtgacttccaagatccctaag

SEQ ID NO: 213092 - DNA, 537 bp, Homo sapiens
ccatcacaaattactatttgttttctctaggcattttttttgttttatgcctttatcttcaattttttaattcatctcacattgattttggtgaataatgtgagaggaggttctggttctttctccccaccatgtcccccacagatatatttagttgccttaacaccagtcaatggatgatcaatacttctaaaactgatttggaaatttctctctttaatattttaacttctttttttaatttttgagacagggtcttgytctgtcactcagtctggagtgcagtggagtgattatggctcactacagcctcaatctcccaggctcaactgatcctcctgccttagcctcctgagtggctgtgtgtacaccatgcctagctattttttaaaaaaaatattttttgagaaacaaggtctcactatgttgcccaggctgatcttgaactcctgagctcaagtgatcttcttgccttggcctcctgaagtgctgagattgcaggcatgagccactgtgctgggcctaacttctaatttt

SEQ ID NO: 213093 - DNA, 505 bp, Homo sapiens
gttttatgcctttatcttcaattttttaattcatctcacattgattttggtgaataatgtgagaggaggttctggttctttctccccaccatgtcccccacagatatatttagttgccttaacaccagtcaatggatgatcaatacttctaaaactgatttggaaatttctctctttaatattttaacttctttttttaatttttgagacagggtcttgctctgtcactcagtctggagtgcagtggagtgattatggctcactacagcctcaatctcccaggctcaactgatcctcctgccttagcctcctgagtggctgtgtgtacaccatgcctagctattttttaaaaaaaawattttttgagaaacaaggtctcactatgttgcccaggctgatcttgaactcctgagctcaagtgatcttcttgccttggcctcctgaagtgctgagattgcaggcatgagccactgtgctgggcctaacttctaatttttaaaggaga

SEQ ID NO: 213094 - DNA, 399 bp, Homo sapiens
ttaagttaaaatgaggatatttagggtatgtcctactccaatctgactggtgtcctagaaagaaaagatcaggacatatgagagagaaagtgagaaggctaccatctgcaagccaaggaaaagaggcctcaggagaaaccaaatctgcaggcaccttaatcttggacttccagtctccagaactgtgagaagtaaatttctgttaagccacccagtctgtgatattttgttatggcaaccctagccgactaactcaccattctggtggctatgaagtggtatctcactgtggttttaatttgcatttccctaagatgtatatcatcttttcatgtgcttgttggmaatttttatatcttctttgatgaagtctctatttaaacgttgcccatttaaaac

SEQ ID NO: 213095 - DNA, 498 bp, Homo sapiens
tcttcttaaacattcccaagttctcattttgagaatggccagggttctgggcagtgtagtctactgaaagactcaggctactaagttcctgagggatcacattccagtcagggtccattacaagtcagagattatataaatatgcaagagagcatgaaccaaggctaaaactacagttggtaattcctcgaactctaacttttttgttttttkggcttttgggttttttagtaatggggacttgctctattgcccaggctggaatacagatgtgtgatcatgggatctggctcattgcagccttgcactcctgggctcaagggatccttctgcctcagcctcttgagtagctgggactacaagtgcatgccaccacacctaactaatttttatattttttgtagagacggggtctcactatgtttcccaggctgatcttgaactcctagtctcaagtgattcttagcctcccaaagtgctgtgattacaggtgtgagc

SEQ ID NO: 213096 - DNA, 498 bp, Homo sapiens
tcttcttaaacattcccaagttctcattttgagaatggccagggttctgggcagtgtagtctactgaaagactcaggctactaagttcctgagggatcacattccagtcagggtccattacaagtcagagattatataaatatgcaagagagcatgaaccaaggctaaaactacagttggtaattcctcgaactctaacttttttgtttttttgscttttgggttttttagtaatggggacttgctctattgcccaggctggaatacagatgtgtgatcatgggatctggctcattgcagccttgcactcctgggctcaagggatccttctgcctcagcctcttgagtagctgggactacaagtgcatgccaccacacctaactaatttttatattttttgtagagacggggtctcactatgtttcccaggctgatcttgaactcctagtctcaagtgattcttagcctcccaaagtgctgtgattacaggtgtgagc

SEQ ID NO: 213097 - DNA, 545 bp, Homo sapiens
agactatttccttgcctatttgtcactgctttctcataaatgcccatttatttttcaccactggtaatggaaagtatttaggaagagagggaatgatcagtcagggaaattcatctatagacattcattaygtttccttgcaatttgtcactttcccatttcatggaatctcaaaacaagatgctaaaatcatctctatactacttatcacctcccattgccaaagtgcttaccacatttctttctaaatacctcaagttagagtaaacttactacttccaattgtttgaagtttttccacccatcaagcaaaacactggcttcttggaggctttcactcattggtctcaggtttaatcactgacatccttccagcatctataagcagctatagtattctcctcaattcttgtccaggctaactatccctatttccttcaatctttcctcataagacataccttttagttcatctaccaccctggtctctttcctttgaaactgtttcagttttcctcactattaatggccagtatccagcattg

SEQ ID NO: 213098 - DNA, 543 bp, Homo sapiens
ttgcctatttgtcactgctttctcataaatgcccatttatttttcaccactggtaatggaaagtatttaggaagagagggaatgatcagtcagggaaattcatctatagacattcattacgtttccttgcaatttgtcactttcccatttcatggaatctcaaaacaagatgctaaaatcatctctatactactyatcacctcccattgccaaagtgcttaccacatttctttctaaatacctcaagttagagtaaacttactacttccaattgtttgaagtttttccacccatcaagcaaaacactggcttcttggaggctttcactcattggtctcaggtttaatcactgacatccttccagcatctataagcagctatagtattctcctcaattcttgtccaggctaactatccctatttccttcaatctttcctcataagacataccttttagttcatctaccaccctggtctctttcctttgaaactgtttcagttttcctcactattaatggccagtatccagcattgaatacaact

SEQ ID NO: 213099 - DNA, 545 bp, Homo sapiens
agactatttccttgcctatttgtcactgctttctcataaatgcccatttatttttcaccactggtaatggaaagtatttaggaagagagggaatgatcagtcagggaaattcatctatagacattcattacgtttccttgcaatttgtcactttcccatttcatggaatctcaaaacaagatgctaaaatcatctctatactacttatcacctcccattgccaaagtgcttaccacatttctttctaaatacctcaagttagagtaaacttactacttccaattgtttgaagtttttccacccatcaagcaaaacactggcttcttggaggctttyactcattggtctcaggtttaatcactgacatccttccagcatctataagcagctatagtattctcctcaattcttgtccaggctaactatccctatttccttcaatctttcctcataagacataccttttagttcatctaccaccctggtctctttcctttgaaactgtttcagttttcctcactattaatggccagtatccagcattg

SEQ ID NO: 213100 - DNA, 545 bp, Homo sapiens
agactatttccttgcctatttgtcactgctttctcataaatgcccatttatttttcaccactggtaatggaaagtatttaggaagagagggaatgatcagtcagggaaattcatctatagacattcattacgtttccttgcaatttgtcactttcccatttcatggaatctcaaaacaagatgctaaaatcatctctatactacttatcacctcccattgccaaagtgcttaccacatttctttctaaatacctcaagttagagtaaacttactacttccaattgtttgaagtttttccacccatcaagcaaaacactggcttcttggaggctttcactcattggtctcaggtttaatcactgacatccttccagcwtctataagcagctatagtattctcctcaattcttgtccaggctaactatccctatttccttcaatctttcctcataagacataccttttagttcatctaccaccctggtctctttcctttgaaactgtttcagttttcctcactattaatggccagtatccagcattg

SEQ ID NO: 213101 - DNA, 525 bp, Homo sapiens
gtcagcagggatctgcccgagccaacagacaaaaagagatggaaatgttcacagcacctgccatgtgcagacggtgggctggactttatcctcaccatagcactcagtttgtacatgagaaacccaaagctgggaagttgcagatgccaccttgggcgtcagcatgtcagctaagccccacaggcttagcaagtgagagacgtggaaggagtggagtaaaggtgttggaaaccctgccccagtgtgctcactcactttctgtgcttggttgattagggcaggggacagggmctcatgcagcacctcccacccccactggacagtaggtcctgggctgccccacacttcggtgactggccttcctggggagtggggaaactggcatgatgctccctttgctaaagattaagttctgtagactcactccttttcaaagtttgcgttagggttaggacacttggccactccaacagcagcttctggtagatagggtacactgtcattaggtcaaaagaggaagaattc

SEQ ID NO: 213102 - DNA, 525 bp, Homo sapiens
gtcagcagggatctgcccgagccaacagacaaaaagagatggaaatgttcacagcacctgccatgtgcagacggtgggctggactttatcctcaccatagcactcagtttgtacatgagaaacccaaagctgggaagttgcagatgccaccttgggcgtcagcatgtcagctaagccccacaggcttagcaagtgagagacgtggaaggagtggagtaaaggtgttggaaaccctgccccagtgtgctcactcactttctgtgcttggttgattagggcaggggacagggccycatgcagcacctcccacccccactggacagtaggtcctgggctgccccacacttcggtgactggccttcctggggagtggggaaactggcatgatgctccctttgctaaagattaagttctgtagactcactccttttcaaagtttgcgttagggttaggacacttggccactccaacagcagcttctggtagatagggtacactgtcattaggtcaaaagaggaagaattc

SEQ ID NO: 213103 - DNA, 525 bp, Homo sapiens
gtcagcagggatctgcccgagccaacagacaaaaagagatggaaatgttcacagcacctgccatgtgcagacggtgggctggactttatcctcaccatagcactcagtttgtacatgagaaacccaaagctgggaagttgcagatgccaccttgggcgtcagcatgtcagctaagccccacaggcttagcaagtgagagacgtggaaggagtggagtaaaggtgttggaaaccctgccccagtgtgctcactcactttctgtgcttggttgattagggcaggggacagggcctcatgcagcacctcccacccccactggacagtaggtcctgggctgccccacacttyggtgactggccttcctggggagtggggaaactggcatgatgctccctttgctaaagattaagttctgtagactcactccttttcaaagtttgcgttagggttaggacacttggccactccaacagcagcttctggtagatagggtacactgtcattaggtcaaaagaggaagaattc

SEQ ID NO: 213104 - DNA, 525 bp, Homo sapiens
gtcagcagggatctgcccgagccaacagacaaaaagagatggaaatgttcacagcacctgccatgtgcagacggtgggctggactttatcctcaccatagcactcagtttgtacatgagaaacccaaagctgggaagttgcagatgccaccttgggcgtcagcatgtcagctaagccccacaggcttagcaagtgagagacgtggaaggagtggagtaaaggtgttggaaaccctgccccagtgtgctcactcactttctgtgcttggttgattagggcaggggacagggcctcatgcagcacctcccacccccactggacagtaggtcctgggctgccccacacttcggtgactggccttcctggggagtggggaaactggcatgatgctccctttgctaaagattaagttctgtagactcactccttttcaaagtttgsgttagggttaggacacttggccactccaacagcagcttctggtagatagggtacactgtcattaggtcaaaagaggaagaattc

SEQ ID NO: 213105 - DNA, 412 bp, Homo sapiens
ctgggggagggatagcattaggaaaaatacctaatgtaaatgacgagttgatgggtgcagcaaacaaacwtggcacatgtatacctatgtaacaaacctgcatgttgtgcacatgtactctagaatttaaactgtaatagaaaataaaaaggaagaaagagaaaaaaaacaaaaacaaaaaacaaaaaaattataaccattgctttcttctaatttacatttgtaaagattttgtatttacttttttttggatcccttgtatacagcatagagttggattttcctttatgatttaatccaaatttattttattttatttgactttcaatttttattattttttaaataaaaaatagtgatgggatctcactatgttgcccaggctgttcatgaactcctgggctcaagcgat

SEQ ID NO: 213106 - DNA, 619 bp, Homo sapiens
taagttttgaaggggattatttaatttttttctgtatgttgaacataaaagcacactaatgccgggccagaatctgggcccctgtgtctaaacaaaagggttttcttagaaaattaatctgctgtttaatggaaaattgtaaagtgttctaaaaaagtttataaaaaccttaccttatggtcaaactaattaaaactggataatttataacattttatttwaaaactagctttagcattaaagaggcattaatgcaaacatgaaatttggttttctcttttgaaaaagatttttgtgttattgatatatgttccaaaattatgtgaaactcctgtaattctgatatgactttgtatatgttatcattaataattataattgctatgttaaattattgtgttccccagaagtaacaaatttccttgtcaattgtgtctttaactgtggctggcctaaaactttttgtcatccacagacaattattgtcttttgatcctctttaaatggttttataatcagctataacactctgacaggtgctcttaaatgcaggtttctgaaaactttggagattgtgacattagaatagaggaaaaactttcaggactctcattgagag

SEQ ID NO: 213107 - DNA, 501 bp, Homo sapiens
ccgttgcaagtttttggtcagggataaaaaaatgaaccaaaatcatgggcagttttttcttttagatgggaaacactcaggcatcaaacaggctcacacttgaaatgcatcctaagccattgggatgaatttgacctgcaagccctgaaaaagaagaggcttatttttttctgcactgtggcctggtcccaatattctctctctgatagggaaaaatggccacctgtggaaagtataaattacagtattatcctgcagcttgacyttttctgtaagatggaaggcaaatggagtgaaataccttatgtccaagctttcttttcactgaaggacaatccacaactatgcaaagcttgcaacctacattccacaggaggacctctcagcttacccccatatcctagcctccctacagctcctcttcctattaatgatgagcctcctctaatctcccccacccagaaggaaacaagcaaagaaatctccaaggggccacaaaaa

SEQ ID NO: 213108 - DNA, 596 bp, Homo sapiens
ttccctcatctaaaaaacagaaaaaattacttttttttcccccaaagacagggtcttgatcagagctcactgcaatatcaaactcctgggttcaagtgatcctcctgtctcagcctctggagtagctgggattataggcatgcaccaccatgcctggctactttttgtagagaaaaaaatttaaaaaggtctcactatgtggcccagagtgttcttgaattcctggcctcaagcaatcttcctgcctcagtttcccaaagcactgagattacaggcatgagccaccatgcccagccaaaactttacttttttacacttgcttttctggaatcaggatctaaacatattgcatgcggttgatatattaagcctgttttattttttattttttcttctttcttaagcctctttattatagttccccctacattttggttcacatgccactgttatgttgaagaaactgggtcctttgtcttctggataccrttttacaaacatacttgttttcatttaataaatggctaaatttctttctatgtcaataattatacacatcattattttaaatcaccacatcccattgtgtggataga

SEQ ID NO: 213109 - DNA, 546 bp, Homo sapiens
aaataaattttttgaaagcatttacattgccatcagacacaagaaggtcctgtcaggcatggacaaagtctatacagtcataactcatggcctagagagcccttggaatgtacagctacagacagctacagataccccatatccttgcccctagggacatcaggaaacagggtttcatctgccagactgtggtgaccatgactgaggattacttcccttcaatcccctcagagacaaaatgaaatgaagggaaagtcatccctgactttgtttaaaacacagcatcctacacaggttttacaaacatcttattttttacgacctttttctgttatttcatttttaagaaacccaccgctcacctattcatcccctgagagmagcttatttaaagctcatgagaaagcagagaactatttcacaacattgaagcaaaataatctgactgaaccaagctttcacaggggaactggggaaagagtgaagaaccaagcaaaatagacgagtcaggagactaaagttgtaaaatagtttggttttgaattc

SEQ ID NO: 213110 - DNA, 529 bp, Homo sapiens
tgataatttaatttactttgtaatcaagcattataattacttccaaataaaaatcaaacagaagctaaagaaagaacaatgacacaattatttagacatggaagctagctaagaaatctcatttttctgcctatcaacttcctatttaggaaagtttccttggtcacttagggagggttattcttggcctgtgtctctcctactaggcttgactagaccaattccatagctactactcaagaactcactcactccattaaggtggcaggcgagagcccaaggtggcctctacagatgcatgttggttttgcattaygtgactaaccaacacattatagagagaagaatatatagacaaatgttttttggaagtcagaccatggaaaaacactaagagataccaccgtccttccattcatgaagcttatggtttcataagaactaatgacaactgagatgattacatattgtattttgcactgcggagataaggaagtggtcaaatgaaaaataatagtgattgctattc

SEQ ID NO: 213111 - DNA, 462 bp, Homo sapiens
tcttacctaaatgattgtgcacatctaaccatttctaaagataaattttcagaagtgggttcatgggaagaaaaacacaagaatgtttgaaattcttttgtatataatgccaaagtgccttctagaaaagttcatgtccacatccaccagtagtatttcagagtgtctatcttactgcatactgccaggatcagatattctattaatctttgttaatttgatggatcaaaaagactttgtgatttaatttacatttctttacgagtaacatagagagagagagagagagwgtgtgtgtgtgtgtgtgtgtgtgtgtatatatatatatgcttttgttccaggcctaatatatatttattaggcctgggacaaaagctttagtgaaccaaatttaataaagctttggcataaattgaaggaaggtccagtaatatactgaggctgctttcaataaaaacagca

SEQ ID NO: 213112 - DNA, 438 bp, Homo sapiens
tatgtagtagtcatttattaaatattagaatgaagaaatgaatgaaggtagctgaaaagtataagaaattaagagaaaatcgatttgtaaaatccaatattatagaaccacatcaagaaaagcttccaaaaaatgcataactaagactcttttattatatttttaagtaatattrtgccatttgctatcttcaaagagttgcctctgtcagtcacaactctcagaagtcttagggattatatattaggtgtttatactatttgggagtctcggggattacgtgtttgcagtttataggagtcaccaccagatggtgatatttttattaggtaataagtttttgccttcagatacatcaatttatagagaaaagagaaaactatacaaaatatagtatttattaataagaagaacaatataactatacaagggtaaggt

SEQ ID NO: 213113 - DNA, 654 bp, Homo sapiens
tgggacaatctcaagatcagttagaaacctttaagacagcaaacctgttgctggtgttgctgcagtgttccaggtaacagctttggatatttttgtctaagcatatttgggtttcctctcatgtgagtggacactgaaacaaatgaactagctatgaaagatgcacctttattcattgtaatctcaatcccaacttcttccttttcatcatttcacatgggatgagagaccttatcacactgtcttcatcagtagataactcccactaactcaagaataagcagaagtatccaatttgtatacactgatatataaaaccatggtattctcctacttactttgatcaaccccaatttggcatgtccagttactgccctggggacccattaagagtctatrgaaacaaaaaatgcatgaacgagtgttgggagttgattacaagtccaaccctctataaaggccacggcatacttctgtttatttaatatgcacaacaccaagagagagaggtagtaattcagtctgctgggtttctccacaaaatctaccctaaggacaccagcataacaggggaacaagtcaaactggggtggaaatcagttggtatttaaaaaaattatacaagtagcattcatcctaggaaaaagcagaact

SEQ ID NO: 213114 - DNA, 642 bp, Homo sapiens
aaagtagaagaaatctggtccagtgtaaatcaagcttattaacgtaaagaattagtgcagaaaaattaaatgagtggatgaagaaaaagtttggaaggaaaaaataatcctcctcactaccttttaccaaatgagygttggcaacatgggttggagttgcctttatgcacataatttgccatgcctacattctttcagggcctacaataatgttcctagccatgtatttgaattaaccaggcccagaggataaaactttcaaattaaacacattcctaaaggatttcaggctcattgtgtatgcaccaaggaaacataacatcctaaaaataatacgtacacagagagaagcacattttccatgaacattaaagtggaatatgaattatgacccagctcatgggaatagacatctgattacatgcaaaatggagcttttgtaaataacatcagtcttcgtgagctaccacaattattatcaaccatttaattttattccctagcaactcatccatcgttgttaaaactgtccacttttgttttttaccttctgatgcatgaggctccgaattttataaagttcaccgttaaagctatgtagattaccagcccaacagcgaacgagttcacgaaattattaga

SEQ ID NO: 213115 - DNA, 642 bp, Homo sapiens
aaagtagaagaaatctggtccagtgtaaatcaagcttattaacgtaaagaattagtgcagaaaaattaaatgagtggatgaagaaaaagtttggaaggaaaaaataatcctcctcactaccttttaccaaatgagcgttggcaacatgggttggagttgcctttatgcacataatttgccatgcctacattctttcagggcctacaataatgttcctagccatgtatttgaattaaccaggcccagaggataaaactttcaaattaaacacattcctaaaggatttcaggctcattgtgtatgcaccaaggaaacataacatcctaaaaataatacgtacacagagagaagcacattttccatgaacattaaagtggaatatgaattatgacccagctcatgggaatagacatctgattacatgcaaaatggagcttttgtaaataacatcagtcttcgtgagctaccacaattattatcaaccatttaattttattccctagcaactcatccatcgttgttaaaactgtccacttttgttttttaccttctgatgcatgaggctccgaattttatraagttcaccgttaaagctatgtagattaccagcccaacagcgaacgagttcacgaaattattaga

SEQ ID NO: 213116 - DNA, 591 bp, Homo sapiens
acaaaaggctgagagatcgatcacctggtctggccaattgtatgaatgcacaggcatacaatccaaacatcccaggggtgtggagcttccattcaccagaactgaccaggaaggggagtgttcactagcagattatagaaaacatgattttaatgtgccctctcttcaatatttactgtgatcccttgtgcctcagttttcctacctctgaaatggaaataaaaacatcaaygaagtcatattaggacttagttgcaagggggtgctgtgttatgcccagtggacaataagaacattgcatgactttagaacctggagatgaggactgttggctgggagtactcaaataaatttactccctcaggttcttccctcctatttctacttacatcaatgagcctggttccttggttctgttctgctgttattccaaaactctcagattccatgcatatatattgattaagccaagcacatttcaactacatcatgtcacctaaacatcgtgtaaggcttatatgattattacttcatgatataaaaagattctgatgaagtcaagtgcgaaggcaaaggtcatttaagcaaagg

SEQ ID NO: 213117 - DNA, 546 bp, Homo sapiens
atatggtgggaaatgacaaagtaactcctgtggccctaggtcaggttctcttgaggaaaacaaaaaggctggaatgatacagctcttcgtaaaccaggtgcctccagtgcctgcggttattcccaagtccacattttgcagacagggccctaaaatgtctagctaggaagttcctgagcctgtttttttaaaattctacacacacacatgcacacacacacgcacgtgtgcacacatgcggatatatacatcctcaccttttcttgagattactgctcagaagaaggcacatttggtttggtctgcttaccagtttgtgaagcacttcagcaccttttaagatgtcaagtgccataaaatcaacgtccttgttatcgtggtaaattgaccttcgttgccaaggcaaagtcagagacagagttaaccaygacagccacgaatagctgttctttgagggccaaaatcatgattttcaatgtttttccatctgaaataggggaacattactcactacagcctataactgtttcctgtcccatgaagcta

SEQ ID NO: 213118 - DNA, 478 bp, Homo sapiens
ggccttggtccactgagcactgtcatttttggcagctgcattaaaggtacgattgtggaaaagaatggctgtaaccctgatttcaatgtcagaggttaaagatttagcccaagtgctctagctctcccaagttaaccattattgacatattatctatgtatstatgcattagtctaaactttttttctttttttttttttttgagacagagtctcactctgtcacccagactggagtgcaggggcatgatctcagttcactgcaacctttgcctcccgggttcaagcgattctcctgcctcagcctcctgagtagctaagattacaggcccatgtcaccatgcctggctaatttttgtatttttagtagagacggggttttactatgtcagtcaggcttgactcctgaccttgtgatccgcccgcctcggcctcccaaagtgctgggattacaggtgtgaactactgtacctggccta

SEQ ID NO: 213119 - DNA, 478 bp, Homo sapiens
ggccttggtccactgagcactgtcatttttggcagctgcattaaaggtacgattgtggaaaagaatggctgtaaccctgatttcaatgtcagaggttaaagatttagcccaagtgctctagctctcccaagttaaccattattgacatattatctatgtatgtatgcattagtctaaactttttttctttttttttttttttgagacagagtctcactctgtcacccagactggagtgcaggggcatgatctcagttcactgcaacctytgcctcccgggttcaagcgattctcctgcctcagcctcctgagtagctaagattacaggcccatgtcaccatgcctggctaatttttgtatttttagtagagacggggttttactatgtcagtcaggcttgactcctgaccttgtgatccgcccgcctcggcctcccaaagtgctgggattacaggtgtgaactactgtacctggccta

SEQ ID NO: 213120 - DNA, 611 bp, Homo sapiens
gtctttcacagttaagtatgatgttagctgtgggtttttcatagatgccttttattaggtttaggaagttcccttctatttctagtttgttgaaagtttttatcacraaaggatgtgagatttggttaaatcctttttctatatctattgagatgatcacatgggttttcccctcttcattgtattaatatggtatattgcattgattgactttcatatgttgaacaaactttgcattcctgggataaattcccattagctataatgtccagcccttctaatatgctgttggattctgtttgctagtattttgttgataatttttgcatttatattcataagagatattagcctgtagctttcctttcttgggatacctttttctggtttaagtatcagggtaatactgacctcacagaatgagttagaaagtgttccctctgctatttttttggaaagattttgagaaggattggtgctaacttttctttaaatgtttggtagaatccattgatggagtcatctggtcctgagcttttctttgttagaagttttttcttgctaactcaatatttacttttataagtctattcatgtattctattttatct

SEQ ID NO: 213121 - DNA, 611 bp, Homo sapiens
gtctttcacagttaagtatgatgttagctgtgggtttttcatagatgccttttattaggtttaggaagttcccttctatttctagtttgttgaaagtttttatcacgaaaggatgtgagatttggttaaatcctttttctatatctattgagatgatcacatgggttttcccctcttcattgtattaatatggtatattgcattgattgactttcatatgttgaacaaactttgcattcctgggataaattcccattagctataatgtccagcccttctaatatgctgttggattctgtttgctagtattttgttgataatttttgcatttatattcataagagatattagcctgtagctttcctttcttgggatacctttttctggtttaagtatcagggtaatactgacctcacagaatgagttagaaagtgttccctctgctatttttttggaaagattttgagaaggattggtgctaactttyctttaaatgtttggtagaatccattgatggagtcatctggtcctgagcttttctttgttagaagttttttcttgctaactcaatatttacttttataagtctattcatgtattctattttatct

SEQ ID NO: 213122 - DNA, 597 bp, Homo sapiens
cctttttctggtttaagtatcagggtaatactgacctcacagaatgagttagaaagtgttccctctgctatttttttggaaagattttgagaaggattggtgctaacttttctttaaatgtttggtagaatccattgatggagtcatctggtcctgagcttttctttgttagaagttttttctygctaactcaatatttacttttataagtctattcatgtattctattttatcttgagtgtcagttttggtagtttttatatttctaggactttgtccattttatgtaggttatccagtttgctggtatatagttgctcattatattctcttaaaatccttttgtatttctgtaaaattggtggtaatgcccttctctcattttttaataactttactactttcttttatttctcttcatcagactagctaaaggtttgtcaattttgttaatcttttcaaataaccaacttttggttttgatgattttttttctattatctattccattgatcacaactctaatctttattattcttttcttctgtttgctttaggcttagtttgcttctctttttctagtaacttaaggtggag

SEQ ID NO: 213123 - DNA, 420 bp, Homo sapiens
cctcaaaaatgcctgatgtgtattccttttcaaatcactgcattggtccacagagtctcgtgatatgctggcagaataccctggggtttccctacaagacagtgaagscttctttgtaagtgttcactaacaccaaatagtacgccccacatatttatgtcctcattgttatgtccaccacagagtatgaatatgaaaaaagaacgcacatctgaccattctgttcaagaaaagcagtcaatattttgagtcaagttcaaggggaaaatcgttttcttgcaggtagctgtgaaagttccttgcttatcaaattgtcccctttccagtgattcttgtttatgcattgataaataaaaagaacaaaaatgaggaactaagatatttaggagcttatgtgaggaaagtttctagagggatgga

SEQ ID NO: 213124 - DNA, 420 bp, Homo sapiens
cctcaaaaatgcctgatgtgtattccttttcaaatcactgcattggtccacagagtctcgtgatatgctggcagaataccctggggtttccctacaagacagtgaaggcttctttgtaagtgttcactaacaccaaatagtacgccccacatatttatgtcctcattgttatgtccaccacagagtatgaatatgaaaaaagaacgcacatctgaccattctgttcaagaaaagcagtcaatattttgagtcaagttcaaggggaaaatcgttttcttgcaggtagctgtgaaagttccttgcttatcaaattgtcccctttccartgattcttgtttatgcattgataaataaaaagaacaaaaatgaggaactaagatatttaggagcttatgtgaggaaagtttctagagggatgga

SEQ ID NO: 213125 - DNA, 583 bp, Homo sapiens
ttcaggcattaccatttatgcatgacacagtaataggaaattttctgcccctcttagcttgataagaaccttctgcaaagaccctacaactccttcaggtagtagccacctacttgatttataatcttgcagtggcggaagaggttagctgggtaatttaaatcactagatttcactaatgaactaaggccagggagaaagcactttacgttgtaaaggctccatttcaccttccttatgccccacatactttatctccaaatttttacattatttatataaaaagggaaatggctctctcaygggaaaatgagtgagcaaagcatctccgctgatagggtatcttctacaattcactgcaaatcagctaccctctcccagggcaataaaaatagagtcaccagatttagtgactaaaaataaaggatgcccagttaaatttgaatatcagaaaaacagtaaataatgcaatactggagatatttatattaaaagttatttgttgcttatgtaaaattcaaatttaactgggcttcttgctttttatctggagccctaaactaaaagggtggaaaggagccct

SEQ ID NO: 213126 - DNA, 585 bp, Homo sapiens
tgactgtggctccatgagagagttattttttggaagttcctagaaagtaccagggagacttgcttgggttgagtcgggggaatggactctgatcctacaatcaagttggtgggggactcagagcatttaaatggggaaataatataaacacaactcaaatatacagaaaaaaagtcattaggggcagtctggaatcaagactgcctggggtctcatttctgctatttcataactgtgcgaccttggtcaaattacctaacttctccatacttcatttccctcatctataaaataaaactaacatttgtacctatctcatcacattttattaaaaattatgttagataatacatgcaaagcaaagagcacagtgtctggcacacacaaagtaaatctttaataaaagttaactgttattaaaattatacatactttgggaacaagtaattctaggtgtgtgaataattagccaataaaagtgttaaggattatatgccttttactatgagctaagcaatgttctawatcagtgacactcaagacttttagggcttaagatgccttcacactcttagaaatcattga

SEQ ID NO: 213127 - DNA, 599 bp, Homo sapiens
ggattttgaagaaaagaaggaccaggaaagaaggaaggaacacagaatttgaagtcagggtcttgagttcaattctactaacaccatcgactcactggtgggaagtgtagcacagaaccaagagcctaagggtcagttcaggccaggattcaatactcagtcctccaggggccagtgtcagaacatgggtatgttagataaccaccctgctgtggtctgaatgtttgtgactctcaacattcatctgttgaaatgctaacctccagggtgatggtattagaaggyggggtctttcaggaggtgatttggtcatgagggcagaaccctcaaaaatgggattcatgtccttattaacaggcccaagagagctcattttccccttctgccatgtgaggacaaagaaagaaggtgccatctgtgaaccagatccagagtctgttgatggcttgatcgtggactttccagcctctagaactgtgagaaacaaatttctattgtttataagctacctggtctatggtattttgttatagcagaaggaaaaagtattttgttacttttcctaagtaagattctttactgtctgttatagcaagctt

SEQ ID NO: 213128 - DNA, 425 bp, Homo sapiens
gaattcattgtacaagaaccaaagaatgcaggactgggcatttgtgtcctccaaaaagagatatgctgaatttctaacccccaaaaccttagaatgtgaccctatttggaaatagggtcctcacaaattcaactaagttaagatgaggttattagaatggrttctaatccaatactactggtgtcctcatacaaagggggaaatttggacacagcacagagataagattatatgaagacacacagagagaagatggctatgtgacagtggaggcaaagaggggagtgatgcatctaccaagccaaggaataccaagggttgcttgccttggcatcagaagctagaagactcaaggaaggattctctcctagagctgtcagagagaacatgatgctgctgacacttttgacttcgtacttctagct

SEQ ID NO: 213129 - DNA, 423 bp, Homo sapiens
gaatgcaggactgggcatttgtgtcctccaaaaagagatatgctgaatttctaacccccaaaaccttagaatgtgaccctatttggaaatagggtcctcacaaattcaactaagttaagatgaggttattagaatgggttctaatccaatactactggtgtcctcatacaaagggggaaatttggacacagcacagagataagattatatgaagacacacagagagaagatggctatgtgacagtggaggcaaagaggggagtgatgcatctaccaagccaaggaataccaagrgttgcttgccttggcatcagaagctagaagactcaaggaaggattctctcctagagctgtcagagagaacatgatgctgctgacacttttgacttcgtacttctagcttccagaactatgatagaattc

SEQ ID NO: 213130 - DNA, 600 bp, Homo sapiens
cctctctgatcatctaatactccaagaacaaagtccagtaaccagtgtttttgagatggaaccaaatggtgaaagaaagagagagggaattttaaagggctgttgatcaggaaagacatatcagagagtgaggtagcttggagaaagggaagggagtggtgcttgggggagggtacctrgatcctgggggcccactcaccacctttataggggcagtagataggagggtaatgtcagaggattgcttagtggtcgagtacatcttcttaggggcaactaattccctctactcccagcagggttctaccaacagaccgtattcattagcacagaggttgactgctgtcatagggacccaggatgagtttggcttaaccaaaagagaagccctttctctctctaagcctagggctgctatagtatggcagtaccatagtatcagtcatccagcaccttcttacttgttgcttctccattttttgacaacttccttgtttgtctgactcagaatggtttactaccatccccacatttcagctagggggaagaagtaagtgcagacgagtgggcaaggtgcttgagaagccatgacccagagtt

SEQ ID NO: 213131 - DNA, 602 bp, Homo sapiens
cagttgaatttacaattttgctactcagaaaaaaagaaatatcagatgtatactatccacccactcctttgcagagattttttttttttttacaaaaacttgtttttaataggttaaacatattatggtgtctgtgtaagtagttgtaagctcacgtttaaatgtaaataattacttggaattttatatgacatatcacacttctgaaacttgcaacagtgtacaaccaagtttgggaagagaaggaaggcacctggtgattcccaaktggtgaatggaaaagcaaggcttccaaaaattatattcagccatgtaaggccatataacgctatggttaagaatatgcagactctagccagactgcctcgagtaactgcaataccatctttacttggtcaggtcacttaggcatgtttcacgctgcaatattctcatctgtgaaagagaaattatgacaatacccaacgtgttttatgaacattaaatgagttagcctgatcagtcatttaacaaatattacataactgctgtccaaaatgtttattaaatcttttgtctcctaacagaacacaaaatatataaacaccaccacttggcaataa

SEQ ID NO: 213132 - DNA, 629 bp, Homo sapiens
taagtgctctctttcgagcaagtggtggaaacccaggggacaagtggggtacagtgtaccaaagaaagagcaaaaattaagccattataattctactttgttctccatacccagctttaaaatattatttctatttttcacatgcacattcttcaacttttattttcataatttctatatattattttaaaagtgtctcttgtaagcaacaaattagtaattatttttgtgaatttaagtttccaccctttcattgatatatttaagccatattttcattactttaaacttttttctatgatactgtttcatcttttccatttaygtactttatttttcttgcctgctttcacttgtatatgtatgtgtttatcatttgcatatgttaaatttcctcctgctgaatataaatttacatatgttgtaattctttggaaactagataagacacatatttgagccctttttacaactattgatttataaaattgatcagaatatatacattttcaaaggaagacaagagcattagtatagtttttcaatatgttatcttatctctgcccaacaccatattggcattttctacaactttatattggatttttcagatacatatattttaattt

SEQ ID NO: 213133 - DNA, 629 bp, Homo sapiens
taagtgctctctttcgagcaagtggtggaaacccaggggacaagtggggtacagtgtaccaaagaaagagcaaaaattaagccattataattctactttgttctccatacccagctttaaaatattatttctatttttcacatgcacattcttcaacttttattttcataatttctatatattattttaaaagtgtctcttgtaagcaacaaattagtaattatttttgtgaatttaagtttccaccctttcattgatatatttaagccatattttcattactttaaacttttttctatgatactgtttcatcttttccatttacgtactttatttttcttgcctgctttcacttgtatatgtatgtgtttatcatttgcatatgttaaatttcctcctgctgaawataaatttacatatgttgtaattctttggaaactagataagacacatatttgagccctttttacaactattgatttataaaattgatcagaatatatacattttcaaaggaagacaagagcattagtatagtttttcaatatgttatcttatctctgcccaacaccatattggcattttctacaactttatattggatttttcagatacatatattttaattt

SEQ ID NO: 213134 - DNA, 468 bp, Homo sapiens
atgtctactgagtctggcccagaatgttggcagttgagattttacctagttttcaaattagaactgcagtttaaatattgatgagtattatagttacactatgcagacttttaaaaaaatttttccataaaaaggccttatgaatatattaaagttaatcagtttatttttacaactatgatttcaataatctgggaatttgatttgcatagtgtactgaaaagtaataagcagataaaatattttataaacaaaggaatttggaaaacatcttaaactctatatatttaatcttataaagtaaagaaaatgtatctaacaaattagagattgacattaactttygcaagaacaaagaatgttaagatattaaaaatgcatgttttcaaaataaaaaagaatgaagattaaaaaaagaaagtttagcagaaaggattttttttaagtagaagaaaaaagtaagagcat

SEQ ID NO: 213135 - DNA, 519 bp, Homo sapiens
gtttgtcaatttttgctcctgttgcaaatgattttggcgtgaagamtatgtttttaaactcatggttaaatatctaacctgcaacagttccaccatatccacttcatgagactgatagggaagcccttgataactgactaatatccacaagtgttttactgtgttcattttccccagtaataaagggcctcctccagacttgacatcaccaatgagccttacaatggacaaacacgctttcaatctttcagaacaaacctttgctccctgttgtaaattgtaagagatctatttttttagtgtttctcctttcaggcacagtaggaaatgtaatataatagttgaagttctgcccacggtggagttttccttcttcatggccatctggaacccattaagccaggaccaacgccatgctacacagaaatcatgtattggatttttggggatctgttaattgtcacaaaaaacacacataaaatcttagatgtaggttgaagaagagacaacagaatgaca

SEQ ID NO: 213136 - DNA, 504 bp, Homo sapiens
ggttttcttgtccttatacttctttatatccaaatatatatgcatagaattataatgtttctcaggaaaaatgacctagcattttgatatgcacttttaattcatcaagactgtaaaaacgttgctttctataacataaatcaatcatagaaagaatctttcaaacactccaccattaagatatctctatattcctttgttttgaagttcttattactwttgcaaccttgaatttccatatatatcttcccattataaaattatacaatgttatttgtatgtactctatactcatatttttcttctccaacagagtagcacaaaaggagccacaaatctatttctatgactactgccactacgagtagaataataattattatcataataatgacaaattcactaaccttttctatcgtcaccttcagtctgtttagttaaagaatatttgccaaccctatggaatgatcaaaaactgactgacagggcattagagactttata

SEQ ID NO: 213137 - DNA, 388 bp, Homo sapiens
ttccaaactcactctataaggctgtctgtcctctgattccaaaaccacacaaggacacaataaaaacagaaaagtacagccaatatctccaatgaacataaatgcaaaaaccaacaagacactaagaaaccaaattcaacaaaacattaaaaagatcagttaccatgatcaattgggattgatcacagagatgcaaaaatggttcaacatatgcaaatgtgatacatcacattaacaaaacctacaacagaagcatataattatttcaatagatgcttwaaaaatctgttaaaattcaatatgttttatgataaaactaccaacaaaatgagtatagaaacaacatacttcaaagtaataaaagctatatatgacaaacccaccgcca

SEQ ID NO: 213138 - DNA, 593 bp, Homo sapiens
cctccgctttcctagttctgaaactttgcataagcgaatgtaggaattagctggaaaccaaaatgtcaattttgtttttgggaaatatgcattgatgtatttcaacttgatgcaacatatgatctcctgtttttacttgaattgagcctatctagcaaatggtttgctaagctgaatgctttcctgcatagagaaagggcttagcaaaccatttgcttacattgccattgttattaccattattattattatttacttttagaagatttgtttgatattttctttatcctcattattgtgcatatcaagaagatattaattatgcttctctttcactgaatattttggctttctgggaatttttaatctaaagactgrtactcttttctaccattattattattattactattattattttggataatttcagacatctattttctgaagtctaacatcctaggactcgtagatatttcacattgtcaatctatatgtctattattttttctgtcatattttaaatttttttcctttggctatatgctctgcggtaaagccaaagaaataagtaatgattttaatgtaataaa

SEQ ID NO: 213139 - DNA, 593 bp, Homo sapiens
cctccgctttcctagttctgaaactttgcataagcgaatgtaggaattagctggaaaccaaaatgtcaattttgtttttgggaaatatgcattgatgtatttcaacttgatgcaacatatgatctcctgtttttacttgaattgagcctatctagcaaatggtttgctaagctgaatgctttcctgcatagagaaagggcttagcaaaccatttgcttacattgccattgttattaccattattattattatttacttttagaagatttgtttgatattttctttatcctcattattgtgcatatcaagaagatattaattatgcttctctttcactgaatattttggctttctgggaatttttaatctaaagactggtactcttttctaccattattattattattactattattattttggataatttcagacatctattttctgaagtctaacatcctaggactcgtagatatttcacattgtcaatctatatgtctattattttttctgtcatattttaaatttttttcctttggctatatgctctgcrgtaaagccaaagaaataagtaatgattttaatgtaataaa

SEQ ID NO: 213140 - DNA, 492 bp, Homo sapiens
ccagccttctagtgctgtctggtgatagagttctcatgagatatagttgtttaaaagagtgtagcaccttcccctttactctctctttcctgccagccatatgaagaaattggagggaagatacagtgtttatactgggttagcctgtataaaaagggagtttcataaaagaaaaaaaaagaagaggaagaatggaagaaagaaacaggaagaatgaaaacaataaacagaaagaatagccacaccaatatggcacaaataggcaggacctacatgtctgatttggaagatgtctactttatctaatactctaaatttaagcagaaattccccaggtaaaaaaatgatgaaggatagagcacagtggctgaatagaagcctccagtgagggttccctcctaaaacaccaaaytgaacaactagccaaagacaaaaagcaccttcataagaactgaaaatcaggcaagcaatcacagtacctagatgttacat

SEQ ID NO: 213141 - DNA, 493 bp, Homo sapiens
gtatcttatactggctttgactgaaattattgcagaactcacaaatgagacgacactatttacaataaatctcgttatgaaagattcaatttgcagcaatcagatgctagctactaagcgattttaagtatttgaattttatcctacttcagtgttcaacatacagaaattgcatctgtgtgtttgatctgtcctgctgagcgctatcagcagcttgcatctctgccactattgtttttaaaaggcaggaaggacgtgactagtcaggagcactcagcaggatggatttcacgtggcataagaggagccagaattgtcttttttwaaaaaaaattaaatatgattgtgtagtcatctaatgcaagccatcttcatacttcgatagaattatcaaaattattcattagtgaatttgcatttaaaccatgtacaatggaaagattctgaaactatggccactgagcagtctactagagctgccattagtttctag

SEQ ID NO: 213142 - DNA, 255 bp, Homo sapiens
tcaaaccagtttagggaccaagttatcaagtcctgcatagataacccggtatgtatctttagattgtcttagcaccagggtctcagcctatattctaacactggagaagtggcaaatattcmtatcattcataaatatattcataaataaatattacttagtattcagtgaatatctagttttgccagttaaaaaacagtgccgagaaaggggtaaagggattcatcatattgttctacatactctgacctgcac

SEQ ID NO: 213143 - DNA, 462 bp, Homo sapiens
tctacagcacttaattattagttctgaattaaggggctaaataataagttgctgagatttggcactataatattgacttactaaaaatagaatgagccaatgcmctttaaataaagaaaagaaagaaaaataagaaatttctgtttaactatgaaaaaaaaaaaaaaaccttgaagcttgaatttgaaccaaaagttggtttccctggatttctgtgcactgaagtactaaaggggtgtcagatttgtttttgtgacagtaaaacactattcatgttggggatactttcaggtgattaaataaccaggtagaagttggaattataaaaatacctgtatattttaataacaaaataagacctctctaactgaaaatttattctgtttatattttgtttcaagaaaatcaatttaacaattgttagatcataaatgtttgtcttctctcattcacttagaattc

SEQ ID NO: 213144 - DNA, 424 bp, Homo sapiens
cagaattctatccttctggtctacagcacttaattattagttctgaattaaggggctaaataataagttgctgagatttggcactataatattgacttactaaaaatagaatgagccaatgcactttaaataaagaaaagaaagaaaaataagaaatttctgtttaactatgaaaaaaaaaaaaaaaccttgaagcttgaatttgaaccaaaagttggtttccctggatttctgtgcactgaagtactaaaggggtgtcagatttgtttttgtgacagtaaaacactattcatgttggggatactttcaggkgattaaataaccaggtagaagttggaattataaaaatacctgtatattttaataacaaaataagacctctctaactgaaaatttattctgtttatattttgtttcaagaaaa

SEQ ID NO: 213145 - DNA, 561 bp, Homo sapiens
ggagcttattattctatgagtatggggatgtgcagctcttctgatcatttttctgcttggttcaaaaaaattgttgagacatgaatgggggaagaaacaggaaaaaatgaaacagatatctgcaagcaaggaacattctttgatggttatgatttcgttgccactaaaaagactctacagtaatgtggttattcatctcctcttttgttttgggtgaagaattcgctctaacaagaaaatgctgttattggttggagggctgcctcctggaccggaccggctcccagcaatttggttcagtattacgacgatgaaaagaagacatggaaaatactcacaagtgagtgcattatttatttatttattcactcacctatttatttcaggttagcgctgtcttgatgaatttgaaaacatggttaatcaaattagacattttattgatttgttcccctttggaggtttgtttatgtatcaccggggatttagagtaaaaractaaattaacattgcagaggtggccaatttggtagtcgagtaggcctagcctaaaatcactgt

SEQ ID NO: 213146 - DNA, 614 bp, Homo sapiens
aattttaaatattttgtttttctagtaatattttgtgttacaagaaacaatgggagacaatattctttctaacatatccattgtttttaatccaacgacaaaagtcaaaaattcaagcagggtaaggatatagtaatccaatctcatgctttaggatataaactgacaactccaagggccagaaagaacttgtaaagatctgcaaaataagcagagtgtaaagtatatttgtacgcattattattaatctttttaaaacttatctcacaaatactgaatattgcttctggcagtgggggcaggggaggctgaaggagggagagatgaacaatytgaaacagaaacagtgtaatcccaataagaaatctttaataatcttgaacttactttccccccaaaataaaatagcctgaaccttatatgttcttcatgtggcgaagaggggcagggagcattgtcaagagagacctggtatgggaagattttagcctacagtgaatgttcacagttgctggcagaccattaacaatcaggtttctaaaatgcatttcaggaactctcactttggtcatgcaagggaataagtcaaagactcagaatctttactattggaa

SEQ ID NO: 213147 - DNA, 614 bp, Homo sapiens
aattttaaatattttgtttttctagtaatattttgtgttacaagaaacaatgggagacaatattctttctaacatatccattgtttttaatccaacgacaaaagtcaaaaattcaagcagggtaaggatatagtaatccaatctcatgctttaggatataaactgacaactccaagggccagaaagaacttgtaaagatctgcaaaataagcagagtgtaaagtatatttgtacgcattattattaatctttttaaaacttatctcacaaatactgaatattgcttctggcagtgggggcaggggaggctgaaggagggagagatgaacaatttgaaacagaaacagtgtaatcccaataagaaatctttaataatcttgaacttactttccccccaaaataaaatagcctraaccttatatgttcttcatgtggcgaagaggggcagggagcattgtcaagagagacctggtatgggaagattttagcctacagtgaatgttcacagttgctggcagaccattaacaatcaggtttctaaaatgcatttcaggaactctcactttggtcatgcaagggaataagtcaaagactcagaatctttactattggaa

SEQ ID NO: 213148 - DNA, 562 bp, Homo sapiens
cctagaatcacatggaagaagtgtactgacctaccttagtgtcagtgttggaaaaaaaatatgttttactttaggatggatttttgtagatatgtgtcagtcttttcaatgaaacactttaacttgaaaaggtatatgtactagtagaataactttgacctatcatattcaatgagaaagtaactgaagcctggttgaggaaatasaaggaatcagtttatctgcaggcacttaattttgcaactgctttgaaattttattttatatttagatgagtttttagtccctcataccagaaaaatctcaattttttaaagatcagaaatccctttgatgatcacattaaaaagcttcctccaaaaaatgcacatgtgcaaaaacatctatctacagcattttattataatttcagaggctcacggaccccacagaagacatggacctggttaagtctttactttatgaaatctgactcgtcttctctttattttattcctacttttctccctgccactgttttcattattgttgttcttcattatctttctgaattttccaaggc

SEQ ID NO: 213149 - DNA, 416 bp, Homo sapiens
gaattctacctgttcctcaaggcagagtatctgctaagctgctgcaaagagtgttagccattcatggctctttctgtgcataaagagctcatggttgggagacaaggtgaatgcaaacccggagtgaaagctttgtaacttctgtgtttgtctgaaatcgtgcacaaattaagccagtatgcaaaacagagctcaacaaatatattcctctttttagtggyattttcagtgctagtttttcactttttttttttttaaagaccaggaaagaggtatcctggaaacagatcaaaaacacaaggagatgaaaactttaaagtgatcaagccacacagtttcacaaatgataacataaaggtttttaaaaacattggttgtaatttctactaggtgtcacaactcagtgaaccattacg

SEQ ID NO: 213150 - DNA, 438 bp, Homo sapiens
  misc_feature (1)...(438): n = A,T,C or G
gagtatctgctaagctgctgcaaagagtgttagccattcatggctctttctgtgcataaagagctcatggttgggagacaaggtgaatgcaaacccggagtgaaagctttgtaacttctgtgtttgtctgaaatcgtgcacaaattaagccagtatgcaaaacagagctcaacaaatatattcctctttttagtggtattttcagtgctagtttttcactttttttttttttaaagaccaggaaagaggtatcctggaaacagatcaaaaacacaaggagatgaaaactttaaagtgatcaagccacacagtttcacaaatgataacataaaggtttttaaaaacattggttgtaatttctactaggtgtcacaactcagtgaaccattacgagtgaaccagctcastgaaccaaactgaactgaacagatnnnnnnn

SEQ ID NO: 213151 - DNA, 438 bp, Homo sapiens
  misc_feature (1)...(438): n = A,T,C or G
gagtatctgctaagctgctgcaaagagtgttagccattcatggctctttctgtgcataaagagctcatggttgggagacaaggtgaatgcaaacccggagtgaaagctttgtaacttctgtgtttgtctgaaatcgtgcacaaattaagccagtatgcaaaacagagctcaacaaatatattcctctttttagtggtattttcagtgctagtttttcactttttttttttttaaagaccaggaaagaggtatcctggaaacagatcaaaaacacaaggagatgaaaactttaaagtgatcaagccacacagtttcacaaatgataacataaaggtttttaaaaacattggttgtaatttctactaggtgtcacaactcagtgaaccattacgagtgaaccagctcagtgaaccraactgaactgaacagatnnnnnnn

SEQ ID NO: 213152 - DNA, 571 bp, Homo sapiens
ctgggctacatagtgagaccctgtctcacaattaagaaattagccaggcrtgatggcacatacctgtagtctcagctgtttgggaggctgaggtgggaggattgcttgagcctaggagttggaggctatagggagccatgaccacaccactgcactccagtttaggtgacagggtgacaccatgtctttaaaaatcaacaacaacaaaaacaaaaacctaacaggcgtggtcattttcagtgtagggaatgggcataggataacactggtttgctcctccttcaatggaggacaggcttgtgcagtggaatcatgtcactcccctttgcttccacttcaatttgtttgtttgctattgggtcagttagacacaatagaaaacataaagcagctaaggttttaaggagcttggttaagccaaactagatattacatttccaaagaaccaaaaatgtatttgtattttgacatttaaaatagttgattttgatctctaataaaaggtagtattcatagatagtgaatccaaggaagctggcatcttttgattttgaccctacagatgtactct

SEQ ID NO: 213153 - DNA, 571 bp, Homo sapiens
ctgggctacatagtgagaccctgtctcacaattaagaaattagccaggcgtgatggcacatacctgtagtctcagctgtttgggaggctgaggtgggaggattgcttgagccyaggagttggaggctatagggagccatgaccacaccactgcactccagtttaggtgacagggtgacaccatgtctttaaaaatcaacaacaacaaaaacaaaaacctaacaggcgtggtcattttcagtgtagggaatgggcataggataacactggtttgctcctccttcaatggaggacaggcttgtgcagtggaatcatgtcactcccctttgcttccacttcaatttgtttgtttgctattgggtcagttagacacaatagaaaacataaagcagctaaggttttaaggagcttggttaagccaaactagatattacatttccaaagaaccaaaaatgtatttgtattttgacatttaaaatagttgattttgatctctaataaaaggtagtattcatagatagtgaatccaaggaagctggcatcttttgattttgaccctacagatgtactct

SEQ ID NO: 213154 - DNA, 571 bp, Homo sapiens
ctgggctacatagtgagaccctgtctcacaattaagaaattagccaggcgtgatggcacatacctgtagtctcagctgtttgggaggctgaggtgggaggattgcttgagcctaggagttggaggctatagggagccatgaccacaccactgcactccagtttaggtgacagggtgacaccatgtctttaaaaatcaacaacaacaaaaacaaaaacctaacaggcgtggtcattttcagtgtagggaatgggcataggataacactggtttgctcctccttcaatggaggacaggcttgtgcagtggaatcatgtcactcccctttgcttccacttcaatttgtttrtttgctattgggtcagttagacacaatagaaaacataaagcagctaaggttttaaggagcttggttaagccaaactagatattacatttccaaagaaccaaaaatgtatttgtattttgacatttaaaatagttgattttgatctctaataaaaggtagtattcatagatagtgaatccaaggaagctggcatcttttgattttgaccctacagatgtactct

SEQ ID NO: 213155 - DNA, 453 bp, Homo sapiens
tgtgctgtggtgtaggagaagaccagagaaggaagatggaagctgcaatcctggaggtaggaggtcacagtgcattcttaacaattttacctgcagtcattcctacccacttcatttccctttcactgattatttttcttctcccaaaggaagcagtggtaaaaagagcaatttgagcagctttatttttttgggtgggtgggggggtgcattctgcttttattttgatagtctaataatacagaaatcctgtatctttggtggttttatcatggaagaaattagatctctttttcaagatattttsgtgcgagaagaacaaataaggcaagatatttggacatctttctcaatagtaggcctaatgagggactaaaccacctttcttttctggattcttcagcagagagagtgattcttcaactgttctaaacagggaaaaactagcatcag

SEQ ID NO: 213156 - DNA, 579 bp, Homo sapiens
tgatttttaaaattatgttataaacctatatgttaagaaatatgataaatatatttcttacagatatatcattgttcaaactttagagatggcattagggtaatttaaggaagaaatttgaataatactttgtgttcrtaatacctatacaatgtatttagctagtcaacagttgtgttcatctttcatactttatgtagcatctaatacagtaccatgctcatgagccttgataatttggccattaattaagagtggaaattagaactatgaaaatcctcatggaatcttttttgctttttctggtaagaatctcagaactaaatttagtctttattggtaagataaatttctacctgaataatggtgtacctcccctccctttttcctaaatcatgggcaatcttaatttcctcgttgcctccctgccactctttactgacctttctaatgtctctttatagtatgccacatcaaatcatttttttaaaagaagaagaatataaactgtaaatgagttattaaactgtaaagggagtttggttgtgatgaaattaatgaccatggtttttgcctatt

SEQ ID NO: 213157 - DNA, 572 bp, Homo sapiens
acgtggaaaattaggagctgtgtgcagttacaatggaaagagccactgtaaaagttttccaaatgtctttctggaataaactaaaaaatattttctcctgctccctgcagcatataattaagtccatcctaacaagctagctgattaccaccagtaggaacttcctgcacagctgcctgcatctcttcttggcctgcagatcactcatgaactttccctgtctgaagacacaggcagtcctatctggaccatgtgctcaatctgagtcttcaggatgacaacgataagagagcttcattaggcaaaagactggtgctctctgctgtgggggtggctggaacacatcagttgttaatttgagatccagctgtcttggtctgggtctggggttcctttcctgccttaccattccatatatctttctccagaacaagcatgcctgggcaagggagacagtctttctcaaaaagaaccgggtagrataggctgctgggcatgagttttacaggttccctctggcagagttatatggaagagaagctggcctctccactatgaccctaaaaactaaa

SEQ ID NO: 213158 - DNA, 651 bp, Homo sapiens
cctgggtgcccgttggtatgttttacagaaggaatggagaatgttggttaatttagtaattgagctaggtggaggttggcttaaaaatcttccattatttttcatgtttaaaaaaattgagttacgcrttacatacaataaaatatgcccttttgaatgtgtaaccctatgagttttaaaaaacacttgcagttatgtaatgaccactactaccctgatcaagatatggaatgcctctgtcacctctcaaaatccccttgtgctactcctttgtagtcaatccctccaccccaccacacccccggctcctgcaaatcacgtacctctgcataattctctggagattcaccaaagttgttgtgtgtgttagttattcctttctattgccaaatagaattctatattgcagatgtacagcagtttgatgattcacctgttgaaggaccccttggttgtttctagttgggggtattatgaaaaaagctgctagaaatatttcatgtataggtttttgtgtgaacatgagttttcatttctctatgtagtgctatctctttgtggtttaaatttgcatttccctaatggctaatgatgttgaatgccttttcatgtgtttgtttaccatctgtattaacattttcagtaaaacaa

SEQ ID NO: 213159 - DNA, 651 bp, Homo sapiens
cctgggtgcccgttggtatgttttacagaaggaatggagaatgttggttaatttagtaattgagctaggtggaggttggcttaaaaatcttccattatttttcatgtttaaaaaaattgagttacgcgttacatacaataaaatatgcccttttgaatgtgtaaccctatgagttttaaaaaacacttgcagttatgtaatgaccactactaccctgatcaagatatggaatgcctctgtcacctctyaaaatccccttgtgctactcctttgtagtcaatccctccaccccaccacacccccggctcctgcaaatcacgtacctctgcataattctctggagattcaccaaagttgttgtgtgtgttagttattcctttctattgccaaatagaattctatattgcagatgtacagcagtttgatgattcacctgttgaaggaccccttggttgtttctagttgggggtattatgaaaaaagctgctagaaatatttcatgtataggtttttgtgtgaacatgagttttcatttctctatgtagtgctatctctttgtggtttaaatttgcatttccctaatggctaatgatgttgaatgccttttcatgtgtttgtttaccatctgtattaacattttcagtaaaacaa

SEQ ID NO: 213160 - DNA, 651 bp, Homo sapiens
cctgggtgcccgttggtatgttttacagaaggaatggagaatgttggttaatttagtaattgagctaggtggaggttggcttaaaaatcttccattatttttcatgtttaaaaaaattgagttacgcgttacatacaataaaatatgcccttttgaatgtgtaaccctatgagttttaaaaaacacttgcagttatgtaatgaccactactaccctgatcaagatatggaatgcctctgtcacctctcaaaatccccttgtgctactcctttgtagtcaatccctccaccccaccacacccccrgctcctgcaaatcacgtacctctgcataattctctggagattcaccaaagttgttgtgtgtgttagttattcctttctattgccaaatagaattctatattgcagatgtacagcagtttgatgattcacctgttgaaggaccccttggttgtttctagttgggggtattatgaaaaaagctgctagaaatatttcatgtataggtttttgtgtgaacatgagttttcatttctctatgtagtgctatctctttgtggtttaaatttgcatttccctaatggctaatgatgttgaatgccttttcatgtgtttgtttaccatctgtattaacattttcagtaaaacaa

SEQ ID NO: 213161 - DNA, 651 bp, Homo sapiens
cctgggtgcccgttggtatgttttacagaaggaatggagaatgttggttaatttagtaattgagctaggtggaggttggcttaaaaatcttccattatttttcatgtttaaaaaaattgagttacgcgttacatacaataaaatatgcccttttgaatgtgtaaccctatgagttttaaaaaacacttgcagttatgtaatgaccactactaccctgatcaagatatggaatgcctctgtcacctctcaaaatccccttgtgctactcctttgtagtcaatccctccaccccaccacacccccggctcctgcaaatcacgtacctctgcataattctctggagattcaccaaagttgttgtgtgtgttagttattcctttctattgccaaatagaattctatattgcagatgtacagcagtttgatgattcacctgttgaaggaccccttggttgtttctagttgggggtattatgaaaaaagctgctagaaatatttcatgtataggtttttgtgtgaacatgagttttcatttctctatgtagtgctatctctttgtggtttaaatttgcatttccctaatggctaatgatgttgaatgccttttcatgtgttygtttaccatctgtattaacattttcagtaaaacaa

SEQ ID NO: 213162 - DNA, 381 bp, Homo sapiens
atacttaaatactataattgtagtatgcaattcactcataactctagtatgaagccccaaagacaaatctattaaaaaagaataatagtaactaaccgcaggctgttaagagatacataatgtaaaactatgtaaattgagacaactaaaagtcaaaatgtgggagggatggagttaacatgtagagttattttttayttttccttaatgtctattcttttattttttatataagttgtcatctctttaaaataacttgttatatctataagattttttttaagcctcatgataaccaccatatgcaaaacctgtaatacagtcactaaaaatagcaattgaagatggcagcagcaatgatttaccagctgtgggctggag

SEQ ID NO: 213163 - DNA, 576 bp, Homo sapiens
ccacacatacttcttctgttttaaacttgattatttaatccacttatactttatttaattactgatttatctgtatctaccatcttaccatttattttctatttaacttacgtttttattcccgtttctctaatttgtcctttcttttgtatttatattatatgctatttccattctaatttatatttaacatattaattatatgttttaagcattcctttagtaatcaccttgaagcagcactgtcaaatagaaatayaaggtaagccacattggccaggtgtggtggctcacacatataatcccggcactttgagaggctgaggcaggaggatcgtttgagcccaggtgtttgagatcatcctgggcaacatggctaaccccatctctagtgtatgcctgtagtcccagctacttggaaggctaaactgggagtatctcctaagcccaggaggttgaggctgcagtgagccatgatagcaccactgcactccaacctgagtgacagaagtagatcctatctcaaaaaaagaaaacgaaaagaaatatgaggcaagtcacctatgtaatttaaaa

SEQ ID NO: 213164 - DNA, 534 bp, Homo sapiens
cttaacttctcaatatggttgctgattgcttctcttttagtggcctccaaccttctgcctatgcccactgggtgtcatactcactaaagggatgtacgctaagttctccagttaaaaagggcacctcaccctgtcctcctggctacattcaggcactaccctccttatggtcatataattactgaccctctctgatgtccaccctaccagtttaccttggatgtgaagcaggtggaataaaatctgtattagagcaatatctgactaaaaagactaagaaaatccaagagagagcattacaagagtgacataatacagacagattggacaccacagtcccactcttgtatgtactgaaatctcagaaaggaggagaggtaagagtggttcttgtaaagaaagtggcaaaactgtgggcccattttgtattctcttattmtccaaaggaagcatccttggtttctgcacaagggccctgttttctctctctccaccctcccaccaaccacttccttggcataaaaatgagacaga

SEQ ID NO: 213165 - DNA, 396 bp, Homo sapiens
  misc_feature (1)...(396): n = A,T,C or G
naattcacatgcatacctgcatacatctatgaacaaaaaaccaagcaggcatattcttccttaaagatttagttgttttcctacatctatcagaataaggtccaaatcctttagatagatatccaaaggcttccagaatctgagttgaattttcctttacatcattgccatgggtctttcctcacaccaggatggtttacttcctccaaaagccagccctttatttttgagtgtctttgcccatgctgagtacttttatttttttttattatactttaagwtttagggtacatgtgcacagtgtgcaggtttgttacatatgtatacatatgccatctccttaactccatctagtaaaccatatctattttcttggtccaccacagggcccaaccc

SEQ ID NO: 213166 - DNA, 547 bp, Homo sapiens
ttttttgtattcttggctttttgttttcactttttttagcaatcaaagtaaggttgccagtttaattcagtaagtgtctgtgatgattatcattgttcaagattatagagctaatacrtgatgcagctgaaacctgaattcaatgcttaccaatgtactatgtttccagagacgtcattagtctacaataatttgtgagcaattatacccaatatttgctggagtatgctggtttgaaactattgttttgaaggtcttcaacctgttagatcaattctccacctagcagcaaaatgaccttctaaatatataagtaggatcacagcacattccttcctaagctccttcaatggctttccattgttccttccataaaatctaaatttcttatcatggcctgaaaggccctacatgatctggtatctgccctgcctgttacaacttccactttttattcactttgctcagcaatacaatgtcctttccctttcttgaaattgacaatctgttcacagcatcagggattttacacctgatattacctgta

SEQ ID NO: 213167 - DNA, 547 bp, Homo sapiens
ttttttgtattcttggctttttgttttcactttttttagcaatcaaagtaaggttgccagtttaattcagtaagtgtctgtgatgattatcattgttcaagattatagagctaatacatgatgcagctgaaacctgaattcaatgcttaccaatgtactatgtttccagagacgtcattagtctacaataatttgtgagcaattatacccaatatttgctggagtatgctggtttgaaactattgttttgaaggtcttcaacctgttagatcaattctccacctagcagcaaaatgaccttctaaatatataagtaggatcacagcacaktccttcctaagctccttcaatggctttccattgttccttccataaaatctaaatttcttatcatggcctgaaaggccctacatgatctggtatctgccctgcctgttacaacttccactttttattcactttgctcagcaatacaatgtcctttccctttcttgaaattgacaatctgttcacagcatcagggattttacacctgatattacctgta

SEQ ID NO: 213168 - DNA, 547 bp, Homo sapiens
ttttttgtattcttggctttttgttttcactttttttagcaatcaaagtaaggttgccagtttaattcagtaagtgtctgtgatgattatcattgttcaagattatagagctaatacatgatgcagctgaaacctgaattcaatgcttaccaatgtactatgtttccagagacgtcattagtctacaataatttgtgagcaattatacccaatatttgctggagtatgctggtttgaaactattgttttgaaggtcttcaacctgttagatcaattctccacctagcagcaaaatgaccttctaaatatataagtaggatcacagcacattccttcctaagctccttcaatggctttccattgttccttccataaaatctaaatttcttatcayggcctgaaaggccctacatgatctggtatctgccctgcctgttacaacttccactttttattcactttgctcagcaatacaatgtcctttccctttcttgaaattgacaatctgttcacagcatcagggattttacacctgatattacctgta

SEQ ID NO: 213169 - DNA, 603 bp, Homo sapiens
aaggcagctacactaaacaacatattttcaatgtggacaaaatagccttcagttggaggaaggtgctatctaggattttcacagctagagagaagtcaatgcctagcttcaaagagcttcaaaggacaggctgactctttttaggtgctaatgcagctggtgattttataagataaagccattgctcatttaccattccaaaaatatcaggacycttaaggattctgctaaatctgttctgactgtgctctatcaatgcaacaaccaagcatggatgacagtacatttgtttacagcagggtttattgaatatttcaagcccactgttgagacctgctgctcggaaaaaatgtttcctttcaaaatgtttctgctcattgactatgtacctagtcacacaagagctctgatggaggtgtacaaggagattaatgttgttttcatgctgctaacacagcattcattctgtagcccatggatctggagtaattttgacttcaaagtcttattatttaagaaatacatttcctaaggctacagctgctataaatagtgattatagtgattgctctgatggatctgggcatagtcattgaaaacctt

SEQ ID NO: 213170 - DNA, 581 bp, Homo sapiens
ttgttgacctatatcatattctacagttcaattcatggctaatatttgaagattaaaacttcaaataaatatagatttctgacktctgaaaatttggaggacctggagacatcaagctagccttccttcatgagaacaattgctcagagttgattagtggttgcccttttggatgcttgttctccaaatgactgtcctctcctttccctgctgagccctcagtctgaggccaacagtcattgccattatccgcttaaatttgctcatttccctcctttatacctgaccgccatacatagtggggattgtgacttacacataattaagtggacagctgggggagataaagcaaagggattaaggcaagcacaggagaaaggtagatggtaacaagtctatcagattgacaggaatagaggactgtgtttatggaagatgaaggtaaagtgtatctgtgagtcagaattgggagaatgtttagtgcagagcaaataaatatatacttgaaaataatgaggagccattgaagatttgggacggtgttacacagtgataaaagcagcacttagagagatcttctt

SEQ ID NO: 213171 - DNA, 581 bp, Homo sapiens
ttgttgacctatatcatattctacagttcaattcatggctaatatttgaagattaaaacttcaaataaatatagatttctgacttctgaaaatttggaggacctggagacatcaagctagccttccttcatgagaacaattgctcagagttgattagtggttgcccttttggatgcttgttctccaaatgactgtcctctcctttccctgctgagccctcagtctgaggccaacagtcattgccattatccgcttaaatttgctcatttccctcctttatacctgaccgccatacatagtggggattgtgacttacacataattaagtggacagctgggggagataaagcaaagggattaaggcaagcacaggagaaaggtagatggtaacaagtctatcagattgacaggaatagaggactgtgtttatggaagatgaaggtaaagtgtatctgtgagtcagaattgggagaatgtttagtgcagagcaaataaatatatacttgaaaataatgaggagccattgaagatttgggacggkgttacacagtgataaaagcagcacttagagagatcttctt

SEQ ID NO: 213172 - DNA, 564 bp, Homo sapiens
tcagccctgctggcctccagaactgtgggagaatacattcctgttgttttaagccatccagtttgcggcacttcgttactgcagccctaggaaatgaatacagccttctactgagtgccaggcactgttccaggcataagagattcagggtgaacagaaccgacaggctcactgctctcatgcagctgacattctagtgtagaaagacagacaccaaaatttaaacaaagtacaagaaaacagcaggtaaggaaaagtgctctgcagatagtgcagtgagtaggctgagagagagtgactggcatggtgggcagggctgttttagccagattgatttggaaagttaggttgagacctaaattaaaaagaagactgaaaatgtacatacaattttattattattatttgagatggagtctcactctgtcccccagagctrgagtgcagtggcgtgatctcagctcactgcaagctccgcctcccgggttcacgccattctcctgcctcagcctcccaagtagctgggactacaggtgcctgccaccatgcccagcgcattttttg

SEQ ID NO: 213173 - DNA, 564 bp, Homo sapiens
tcagccctgctggcctccagaactgtgggagaatacattcctgttgttttaagccatccagtttgcggcacttcgttactgcagccctaggaaatgaatacagccttctactgagtgccaggcactgttccaggcataagagattcagggtgaacagaaccgacaggctcactgctctcatgcagctgacattctagtgtagaaagacagacaccaaaatttaaacaaagtacaagaaaacagcaggtaaggaaaagtgctctgcagatagtgcagtgagtaggctgagagagagtgactggcatggtgggcagggctgttttagccagattgatttggaaagttaggttgagacctaaattaaaaagaagactgaaaatgtacatacaattttattattattatttgagatggagtctcactctgtcccccagagctagagtgcagtggcgtgatctcrgctcactgcaagctccgcctcccgggttcacgccattctcctgcctcagcctcccaagtagctgggactacaggtgcctgccaccatgcccagcgcattttttg

SEQ ID NO: 213174 - DNA, 464 bp, Homo sapiens
aatcccaccattattcagtagaaattgaatgccaattctgttatttgtatggaattctaaacagagaattctccatcagtctgtgttttcagtgacagtcatgatttccttggaaaagacagaatgaaggtgtcacattcccagggaaacattgtaagtcacaacaaacaccaacctgaactgaaagactgactgcataaaactttgcttgtttaattttgatttctgttgtaggggttttttaaaaaataaatttggttgtgtatatttaaggtatgtaaaatgatgttatagaatacatatagatagtaaaatggttacaaattgytatattcatcatctcacatagttacctttgtgtgtgtgacaagagcagctataacccacttattataaaaaaaaattgatctttgggcctactcaacatctatgaccagggattgggccattaaacatgcccatcc

SEQ ID NO: 213175 - DNA, 571 bp, Homo sapiens
acctcctctctgctgagagctacagagacaatgggacaatctgcctgcagagaggagcttcccactcaagggtcacctctcttrtaagggctgaacattcactgggagaccctggctgcagaaaagagctaccccctccacttatctgtgtacctcattcttcctggaggcagtatctgttgaatggcagggctaaaagagctgtaacacaaacagggctgaaacatgtcccttgctcgccatgctgtgggtgaagaggacagaagagctacagccctttggagagctgagacttgggagttccgtgagttagggctctgaattcctttttggggccctgtggttcctgaaatctccaagcttctgggcaccaccatgttccctggtgcaagtcattgaagctgcttgcattgcacttggtctagctgtagcgtcatagagagctgtcacccattctggaacctggagctgcccaccacattgcagcagttggcgtgtctgactgtgcaatggccagaccccacacttgctcacacacccctcaccgctccatgcctgactcacccttagc

SEQ ID NO: 213176 - DNA, 522 bp, Homo sapiens
ctgggttgtcctaaaaatgtggccttaggctcctagaaacggttgataaagtattttaatttgtgtatgatgagtgacagagaaaggtggagaggtgttgtttaacaacacacaaaaagttataagagtacagtcacttgatattctaatttatttttaatttctattttataagtatcatttttgatagcttaacttgtgttaggcactgggttaagcattttttgtagatccaaatacaaatctatgagtatgtaatccaagaacaaaattctaagcctcacaaccaactgaatgaactcctcttggccacaggcattctaaagtaaacccgaaacactagttcaggccatgatgggaataggtggtcggacatgccttattatgccttcctytcattggaattctggcacagctgaccagtgttaacattaaaacagagacctaaactaacagaacagactagtgttgaaaaaaaaaaaaaaaaacttctgctgaattaaatttagaagagtttaatat

SEQ ID NO: 213177 - DNA, 583 bp, Homo sapiens
tgggttcaacctctaccaacacaatagtccactccacacaggctctttctgtctgagtagcagtgcccctccaggtggctttcagggcaaaagcttcttttaagaagtcagtacacacgcacttgtccatgttgtctcttgtggtctgcgcctgatcaattagaaataggcatgcacttcttctgcctcatctcaaaaatacagtaatttgtatcggtgtttgtaaaaatttgaaaacactgctttagttttaataaaattttgtcttaattttcattttacctaaaaaggaatatcacaatgaaacttttgttagctccaactattccacgcatttatccctgccatcacccaaatcattttaaaaataattctttccattacttctacccaaggccatggttaaagagagattagtgctgcttaaataaaaggtcctcaggttgtgtgacagttgattgctttaagattaaatttttacccaaactggrctaagtgaaattccttctagagattctggaatggggttaaaggattatagtttctctgtggctagttttacacacagaagtgtgaggcttgg

SEQ ID NO: 213178 - DNA, 630 bp, Homo sapiens
  misc_feature (1)...(630): n = A,T,C or G
tgaattatagctttgacttgcattgcgctctaaataaatgcaggtgagaaagaaggggttaaaattaataatttatactaaaaccagtaaacantagtaataaacttagtaagtacctaattcagcacaccatttacattttacatgtattagaggcaatttttgaaaaactgtgttgaatacacttgaatatcttacacagtcatgtattgtgaactgtgttgaatacacttgactatcttaygcagtcatatattttgctcatgactgcatttttaaaatccatattttatatttctctgtattccacatattttggtcttatttcttcctattctgttcacaagggattatagtccatgccatgatttatagatggattgtgtattttgtgatgcaaaactcttatataactggattttggcaccctactcccataaaaaataaataaataaaaggatgtgataagatctgtcaatgcattaggaaaaaatgttgtccactcagcattttggggatagaaagaagggaggacaacttaagggcagagaatatttattaatacttgggaattagtagctgaggattaaaatatgattatttgctatttggctttcagtgttctgaatg

SEQ ID NO: 213179 - DNA, 630 bp, Homo sapiens
  misc_feature (1)...(630): n = A,T,C or G
tgaattatagctttgacttgcattgcgctctaaataaatgcaggtgagaaagaaggggttaaaattaataatttatactaaaaccagtaaacantagtaataaacttagtaagtacctaattcagcacaccatttacattttacatgtattagaggcaatttttgaaaaactgtgttgaatacacttgaatatcttacacagtcatgtattgtgaactgtgttgaatacacttgactatcttatgcagtcatatattttgctcatgactgcatttttaaaatccatattttatatttctctgtattccacatattttggtcttatttcttcctattctgttcacaagggattatagtccatgccatgatttatagatggattgtgtattttgtgatgcaaaactyttatataactggattttggcaccctactcccataaaaaataaataaataaaaggatgtgataagatctgtcaatgcattaggaaaaaatgttgtccactcagcattttggggatagaaagaagggaggacaacttaagggcagagaatatttattaatacttgggaattagtagctgaggattaaaatatgattatttgctatttggctttcagtgttctgaatg

SEQ ID NO: 213180 - DNA, 572 bp, Homo sapiens
gtacatggtttatgctttcaaatggaaaatttctatcctttatttctggaatattttctggtgtgactgtgatggttaatattgtcaacttgattagattgaaggaagsaaaatattgttcctgggtgtgtctgtaagggtgttgacaaaggagattaacatttgagtcagtggactgggagtgcagaccctcaatctgggtgggcaaaatctaatcagctcccagctctgctaggataaaagcagcaaaggaacatgggaggactagattggctaagtcttctggcctccatctttctcctgtgctgcctgcttcctgcccttaaatattggtctccaggttctttagattttggactcttggacgtacaccagtggtttaccaggggctctcgggcatttggccacagactgaaggctgcactgtcagctttcttacttttgaaggttttgggacttggactgatccaccactggcttccttgctcctcaacttgcagatggcctatcatgggactttaccttgtgatcatgtgagtcaattctctgtaataaactccctttaatacata

SEQ ID NO: 213181 - DNA, 567 bp, Homo sapiens
agagtgaaggataacaaccatatgattactgcaactgatgctgaataagcatttgataaaattcaacatttgttcatgataaaaactctcaaaaacctggggatagaatgaacacaactaagcmcaataaaagacatatataatattcccacatcaactatcatattgaattggaagaaactgaaaagctttcctccaagatacgcttatctccaaaatgtaatcccatttatagctggacatggtggctcacgtgtataatcccagcactttgggaggctgaggcaggtgtatcacttgaggtcaggagtttaagaccagtctggccaacatggaaaacccctgtctatactaaaaataccaaaaaaaaaaaaaaaattagccaggtgttgtggcacacacctttaatcccagctactggggaggctgaggcaggaaaataacttgaaccaaggaagcagaggttgcagtgagctgagatcatggcactgcacttcagcctgggtgacaaagtgggacttcaactcaaaaaaaaaaaaaaaggtaatcccatttataatagccacc

SEQ ID NO: 213182 - DNA, 554 bp, Homo sapiens
aggctggacatttatgtggtgtgcacacagcttttctgacatctatatttggccaaatatttatgtgacaaaggacgcaaactatgggtttcagatgctggagactgagcaaatgcattaaagaaactgaaggctgactaaatgtcagaacccacccaccctcatctataatgcatacttcacaccactacacattttagtaagtatgaatttaacagaaaagtcacttcacccaaatcattcacaacactcctctggaacgtgaaaagcacattatttttcttttctttttttgagactgggtctcactctgttgcccaggctkgagtgcggtggcacaagtacagcccactgcacctttgacctccctgggctgaggtgatcctcccacctcagcctcctgagtagctgggactacaggtgggtgcaccaccacacctggctaatatttgtattacatgttgtttttcaatattttatgaacaatcattttgcagcttgctgaaactgaaaacctgaatgtaagaatgttactttctcagatgaataactgt

SEQ ID NO: 213183 - DNA, 594 bp, Homo sapiens
gccttattccatcttgtattccctgcatgggacactgggccctgacacacagcaggactcagaaaatatttgctgaatgaataaatggacaaaagaaaatgggattcattttatcttcatgtcatggggtcaaattctcattttgtggtattttgggagaacacttctgaagaatgtccaggtcatactgtgtctctgtgactgtaaatagggctctgccctaattaactactagctagagggygagagagccccaggtgcgcacagggcagtgtgtggtttgaagccggtccatggagtagcgtccacgcaggacagccttgctggaaatctgcggatgctaacgtggtcccacactgttcttccccagcctgagatcctgattaggaagtagcagcttcttcctttaaaacaacaaaactgtcctgtcttcataggaaaatgggaatcctagctgaagacagaagggggtggggcaagaatctcctggaggggttgggagtagaatacctgctattaaaccagagcagctcctagtcggcttctctccactttgagatcaaagcatgctaaggttaccaggtaataagatct

SEQ ID NO: 213184 - DNA, 351 bp, Homo sapiens
gggaacagaattccatggtctcaatgacttaagtttatgggaagtcattgtggccataatggtagcagaagtagcgagcacgctcaggtgataggacgactcctgagacccagcgacygtggagacagcctcgggaagccctggcccgtggatggatcccttggctgtctgaggactgctccagaagtgcgggaatccagggcccacccagaagaccgtgaacagttccttagcctcccaccccccaaggcagctcttttcatccaactcagtttacaggcgtggtttgtttttcaaactgggcttcctggatgtacaaatggaactgtggtgagggtgcgggctggggtt

SEQ ID NO: 213185 - DNA, 460 bp, Homo sapiens
ggggccaaggctgcacataaatatgaaggtcagtatcaagtggcctctgtcttagccagtagagcccaaaaagcagagcttcaggcagggtgtggatgcaggtcacttattttggaaagtggaatcrgaaaagagtaatataagaaaggaagtagaggtaaactaggggtgtttaccaagctgattactgccggtggtgactggggatacctgggggatcccccacagtgcaagggttggacaagggtatatttatgaactatcttccatcctcgtttgtttaagggttgccccctggggtatgaactttctcggacttctagattagtccaggcatcaggaagactggggagttgccttacgactcccacttggcagtgacggagaagccctagggcagaaagcaagaagtggcaaagtgtgcacctaagtagcaaaatgtgctaaacgtggtttcaac

SEQ ID NO: 213186 - DNA, 460 bp, Homo sapiens
ggggccaaggctgcacataaatatgaaggtcagtatcaagtggcctctgtcttagccagtagagcccaaaaagcagagcttcaggcagggtgtggatgcaggtcacttattttggaaagtggaatcagaaaagagtaatataagaaaggaagtagaggtaaactaggggtgtttaccaagctgattactgccggtggtgactggggatacctgggggatcccccacagtgcaagggttggacaagggtatatttatgaactatcttccatcctcstttgtttaagggttgccccctggggtatgaactttctcggacttctagattagtccaggcatcaggaagactggggagttgccttacgactcccacttggcagtgacggagaagccctagggcagaaagcaagaagtggcaaagtgtgcacctaagtagcaaaatgtgctaaacgtggtttcaac

SEQ ID NO: 213187 - DNA, 453 bp, Homo sapiens
tgaattctgttctccaaaaattcatatgttgaagtgctaacagtgccacagaatgtgactgtatttaagaagagtctttaaaggggtaactaaggtaaaatgaggtgattgggatggtctctaattcaatatgacttgtatccttataagaagagatcaggacacagacacacacagagggaggaccatgaaaagtcccagggaggagatggccctctaggagacaaagagagagacatcagaatgaaatccaactgacggcaccttgatcttgaacttygaccctccagaactgtgagacaagaaatttatgttgttttaagccacctggtttgtgggactttgtatgtcctagcaaattaatacagtggttgaacactgggaagccagagtttccaggtggcatctcagctccatccttaatagctctgttcctgactccatccaccctgc

SEQ ID NO: 213188 - DNA, 597 bp, Homo sapiens
ttaaattagccaggcatggtggcatgcacctgtagatacagctactcccagaggctgagatgcaagaatcgtttgagcccagaaggtcaaggctgcagtgagctataatggcaccactgcactccagcctgggtaacagatcaagactccatytatttatttatttatttatttatttatttatttatttgaaataaggtcttgctctgctgcccagactggagtgcagtggcgtgatctcggctcactacaacctccacctcccaggttcaagcatttctccttcctcagcctctgaagtagctgtgatcacaggcatgcctcaccacacccagctaatttttctgttttagtagagacaggatttctccatgttggccaaactggtctcaaactcctgaactcaggtgatctgcctgcttcagcctcccaaagtgctgggattacaggcatgagccaccatgcccagcccccatctctttaaaaaaaaaaaaagagagagagagagtttccatgtccaaatggattctatacttaaatcaacctggacaattatgtgggtctctccagtcacacaaagagaagtgaaacagtccc

SEQ ID NO: 213189 - DNA, 571 bp, Homo sapiens
agaattgcccagtcttaaataaacagaatataactattcaagcaactacaacaggtagagagccacctgacttatgtccaagatgtaaaaaaggaaaacattgggctagtcaatgtcgttctaaatttgataaaaatgggcaaccattgtcgggaaacgagcaaaggggccagcctcaggccccacaacaaactggggcattcccaattcagccatttgttcctcagggttttcagggacaacaacccccactgtcccaagtgtttcagggaataagccagttaccacaatacaacaattgtcccccgccacaagcggcagtgcagcagtagatttatgtactatacaagcagtctctctgcttccaggggagcccccacaaaaaaccccacaggggtatatggmcccctgcctaaggggactgtaggactaatcttgggacgatcaagtctaaatctaaaaggagttcaaattcatactagtgtggttgattcagactataaaggcgaaattcaattggttattagctcttcaattccttggagtgccagtccaagagacaggattgctc

SEQ ID NO: 213190 - DNA, 571 bp, Homo sapiens
agaattgcccagtcttaaataaacagaatataactattcaagcaactacaacaggtagagagccacctgacttatgtccaagatgtaaaaaaggaaaacattgggctagtcaatgtcgttctaaatttgataaaaatgggcaaccattgtcgggaaacgagcaaaggggccagcctcaggccccacaacaaactggggcattcccaattcagccatttgttcctcagggttttcagggacaacaacccccactgtcccaagtgtttcagggaataagccagttaccacaatacaacaattgtcccccgccacaagcggcagtgcagcagtagatttatgtactatacaagcagtctctctgcttccaggggagcccccacaaaaaaccccacaggggtatatggacccctgcctaaggggactgtaggactaatcttgggamgatcaagtctaaatctaaaaggagttcaaattcatactagtgtggttgattcagactataaaggcgaaattcaattggttattagctcttcaattccttggagtgccagtccaagagacaggattgctc

SEQ ID NO: 213191 - DNA, 560 bp, Homo sapiens
ttccccaaacagagtctctctctctctctctctgctgagccacatggaactgggggtgtagtgattcaaggacacatgtggccaccaccactgacactgcactgggtcagacctgagccaggacagcactggaacttgcccaagacctgttgtaactactacttgctaccacctgtgttcactgaaggccctagggctttacaatcagtaggtgtctaagccatccgtgtttgtgcccttccttcagggcastgagttctcccaggcccaggtgggtccacatatgctctcgggaagccaggtattagagtcaaaaactttaaaaatttgtttgatgttatattgtaccgtggctaagctgccactcaaaccacaatataaagtctttccagcttttccttcccctttccacagacagaggagcctctcctgtgggcaccaccaccataggcccacaaggaagttcttccaagccaccaccgaagttcacttaaagctcaagggctcttcaatcagcttgtggtgaatactgtcaggtctgggactcacccttcagggta

SEQ ID NO: 213192 - DNA, 581 bp, Homo sapiens
aaagtcccatttaatttttcctctgcttttctcaaacagaaggagtctttcactgtagccatcacaaccagtaacatgctggatcacacctgtagccagcatgccttagagcacaaggcccatggcatactwcctgggtatcactggtggttactcagggcccaggggctgtttagtcaacagtgatgaatccctagggcctggaataagggtctcacgactctgccagatgccctgtcctaccgtgactgagctggtatccaagatgcaagacaaaatcctttccagtctttgctttcttccacttaagcagaaggaaggagacacttttgttgttgcgagctccacagcttggagttgggttagagtgatgcaagcccttctttagctacctcagctagtgtctccctaggtcacatgccaccctagtcctctggctttcagcccagcacaaggagttgcctaggaatcagtccctgagtgctagagtgccttttcagtttgtttagtgacccagagccctttgacctgtggttgtgagactttccaagaaactcaagttctgaccaatggaatggatg

SEQ ID NO: 213193 - DNA, 581 bp, Homo sapiens
aaagtcccatttaatttttcctctgcttttctcaaacagaaggagtctttcactgtagccatcacaaccagtaacatgctggatcacacctgtagccagcatgccttagagcacaaggcccatggcatacttcctgggtatcactggtggttactcagggcccaggggctgtttagtcaacagtgatgaatccctagggcctggaataagggtctcacgactctgccagatgccctgtcctacygtgactgagctggtatccaagatgcaagacaaaatcctttccagtctttgctttcttccacttaagcagaaggaaggagacacttttgttgttgcgagctccacagcttggagttgggttagagtgatgcaagcccttctttagctacctcagctagtgtctccctaggtcacatgccaccctagtcctctggctttcagcccagcacaaggagttgcctaggaatcagtccctgagtgctagagtgccttttcagtttgtttagtgacccagagccctttgacctgtggttgtgagactttccaagaaactcaagttctgaccaatggaatggatg

SEQ ID NO: 213194 - DNA, 594 bp, Homo sapiens
gtatacttatggttactgttgttttaagccataagattgacatacatgcacctgtcagctgagtgtcctttgtaccattgttgtgacccttcacgtcacttctcacaatgtaaatcagattgccaccactctttacttgctatgtaataaatatattaaaattatgctcacatccttgaatagattataaaagctttgtaaacattccttttctctttaaagtttttttgtgtatacgtgattgtgcatgtgtatgtgtgtgtgcatgtgtgtgtatatgagagagagagagagagagacagaaaaacagagacaggcagagtcaaactaagacatgaaggagagagaaaaattccaaacatctagaagagtacttgacatgtgacatatttttggttaacagatatattacatctctttatamaaatgtaataatatgaatgctttttagtttatgctaataatatcataaaatccctttaaactgtaaatatttacttttaaccaaataataacaaaacaattctggcatattctatctctaaattgatttttcaattttgcttttttattatttttcagtttgaaagctgt

SEQ ID NO: 213195 - DNA, 565 bp, Homo sapiens
tattaaaggcacaaaaagaatttctaaaataaatatcccagcggaataacctagataattagttaatatttataattaaagattattaataattttttaattattacggactatactaaaagccttcagaatatatcatggaaagagcataaccttcagaatctcatgagttcaacctctgcttcactgcctttgaaataattcttaactcatccaggtttccatgttctcaratgtaaaaataggaaaatgaattcctgtcttttatgattactctaataattaaataagataatggagtcaaaaatattagatctttacaattttaggtaaaatattaacagatctccaagttttttatttgcttatgattttcataattataggtagctagtagccttgttcctttgtattttaataaaaaaactctttttaggaaattaatattgttaaagtgtatattgtgaatttaaatcaatattttatctcttgaggaaatattcatgtattttagactcatcactgtttgaagaataaaagttttgtctaattacatacatttcaa

SEQ ID NO: 213196 - DNA, 461 bp, Homo sapiens
gatgttgaaaaattgtatctatagaatcttttcttaggtttgtttttatttttgttttttttttaagctgagtgctttagagcctacttagtttcaaaaattaatttaaaatatattaatatatggtcaagtgtacttatgtctattcataacatttttttcttttctyatataaatctatcaaataggcacactgacatttgtattgttaaaatttatttcactcaacttgggttataaggtcaggaatagaattcagaaaataatttgtctctttagcaattatgtacatttgttgcgatattgaattagatatgctgttgtaaaaagaaagagctttactcaggaaactgttccctagacactaaatgtattgtgctcagtgtcagtttcacagtggtttaggtagtgaactacagagataagtttgaatcattttgagggtttaatttcattcagaa

SEQ ID NO: 213197 - DNA, 579 bp, Homo sapiens
gatctataatagatgtataattgttatctaatagataactatttgttcaaagttgtaatgttatacaaataagtaaataagtggcatcaatattataagagaggtgctgcataggtagctagtcagacatgaagaggacacgagagggccacctctaccagcaggaaagtcaggtgaccatcagatgatggtcaggcacttaactgtctctcttaaataacaattggcaatagcctgtgccagagaaaggcaccaatagctagaaaaacctgaaactgttgatcagcttcccaataagatctcaggagctgggcaagtgggctcaagcatgcatgctaggaggcaaaatggcagagtttaactggtatatgactttataggaacacttgactggtaagggaagaatgcctcaagtgagcatgcatacaactgcagtaaatacactgcacatgcagtcccctccaagtgctggcaggccactgggcattcggacagccyacccaaagggaagaatcaggggagaagagacccaagaccacagaagcatgccaacatataaaattctaagtcaaaggtcaa

SEQ ID NO: 213198 - DNA, 508 bp, Homo sapiens
aataaacttcagagcaaataaatagacaagaataaagagagtcattacgtaatgttacagaggttaattttccaaaagtacaaaacaaaatttactgtatatrcccctaacaacacagtgccaaaatatatgatgcaaaactgatagaagtataagaagaaatagacaaattcactattacggatgaagaattcaatcatctctttcagtaatggccagataaagcaggcagaaaaattgaagaataacactcatagaatgtatcttcacagactacaaggaattaaacaagaagtcaataacagaaatagggctgaaaattttaaaaacagagattagacaacatacttctagtaaaacatgggtcaaaaaagaagtttcaagagaaattaacaagtattttgtactaaaagtgaataaaaatacaaaattggtgggataaagtaaaagcagtgcttagagagaaatttatagaatagaatactataaataaaaatcgcagttgaaa

SEQ ID NO: 213199 - DNA, 607 bp, Homo sapiens
ctctatattaattagatataaaatcatagatgcttaactctgtccccatattgaaggtgaagaaaataaagctcaataccattaacaaattcagctaggtcagtatcagaactaaacattgaaccaagattcgtgatttcatacaccatagccagtccagctggacaaataggatctgaatttggatagaatagcaactggtartaataggcaaaattcagccaaagacaactagtgagcattttaacagatgagtagggaacactgacataggaccaataagcttcaaagatccagacaagtgaatagtgtcagtgggcccaacagcaggcatcaagattccagtgatgcgacaggattttgagggtacatttttaaggttttaagaaatactgataaggacagggtaagattcaaatcttagaggaagcaataagtgtccaaagtaaaggagaatatcaagacaagagctgacaaaaagtaactaactagtataaagccaacaaaagaaatgttgaggcaaagatttcgttttaagaatgatggacttgtgtattcaggtggtcagacaaagcagacttatttgcaaagtgactggacactgtaa

SEQ ID NO: 213200 - DNA, 607 bp, Homo sapiens
ctctatattaattagatataaaatcatagatgcttaactctgtccccatattgaaggtgaagaaaataaagctcaataccattaacaaattcagctaggtcagtatcagaactaaacattgaaccaagattcgtgatttcatacaccatagccagtccagctggacaaataggatctgaatttggatagaatagcaactggtaataataggcaaaattcagccaaagacaactagtgagcattttaacagatgagtagggaacaytgacataggaccaataagcttcaaagatccagacaagtgaatagtgtcagtgggcccaacagcaggcatcaagattccagtgatgcgacaggattttgagggtacatttttaaggttttaagaaatactgataaggacagggtaagattcaaatcttagaggaagcaataagtgtccaaagtaaaggagaatatcaagacaagagctgacaaaaagtaactaactagtataaagccaacaaaagaaatgttgaggcaaagatttcgttttaagaatgatggacttgtgtattcaggtggtcagacaaagcagacttatttgcaaagtgactggacactgtaa

SEQ ID NO: 213201 - DNA, 607 bp, Homo sapiens
ctctatattaattagatataaaatcatagatgcttaactctgtccccatattgaaggtgaagaaaataaagctcaataccattaacaaattcagctaggtcagtatcagaactaaacattgaaccaagattcgtgatttcatacaccatagccagtccagctggacaaataggatctgaatttggatagaatagcaactggtaataataggcaaaattcagccaaagacaactagtgagcattttaacagatgagtagggaacactgacataggaccaataagcttcaaagatccagacaagtgaatagtgtcagtgggcccaacagcaggcatcaagattccagtgatgcgacaggattttgagggtacatttttaaggttttaagaaatactgataaggacagggtaagattcaaatcttagaggaagcaataagtgtccaaagtaaaggagawtatcaagacaagagctgacaaaaagtaactaactagtataaagccaacaaaagaaatgttgaggcaaagatttcgttttaagaatgatggacttgtgtattcaggtggtcagacaaagcagacttatttgcaaagtgactggacactgtaa

SEQ ID NO: 213202 - DNA, 525 bp, Homo sapiens
aaagatattctatgttcacaaattgtgagaaatcatgttattaaaatatctctgttactcaaagtgatctacaggttcaatgcaatacttatcaaaatactgataacattttccatatraataaaaaataaaatttgtaaacagtcacaaatgaccctgaatatctaaagcaatcaggaacaaaaaagacaaaactggaagcaaagcattccctaacttcaaaatataatacaaagatatagtaatcaaaacagcatagtactggtataaaatcagcacacagactgatgaaacagaatagagagcccagaaataagtccatgcttttatggtaaattgattttcaggaaaggtgccaagaccttacaatggggaaaaaactgtctgttcaataaagggtgctggaacaactgaatatccacatacagaaaaatgaaagtagaccctcatcatataccatatatgcatgtcaatcaaattaaaatagattaaatacataaatgtaaatcctgaaattgtaaaact

SEQ ID NO: 213203 - DNA, 604 bp, Homo sapiens
ttcaacagtaagacaacaacccaattaaacattggtcaaaaaatctgaatagatatttcttaaaatttacaaatggtcaacagcaatctgaaaaaaaaatgctcaatataactaataatcagagaaatgcaaatcaaatccacaatgagttagcactatactaatgttagaatggttattatcaaaaagacaaaagataacaagtgttagtgagacatggagaaaagggaacactgaacccagttggtgagagtgtaaattagtatagccattatgaaaaacagaattgaggttcctccaaaaatcaaaaacagaactaccayatgatccaacaatcccaccactaggcatatttccaaaagaaatgaaatcagcatatcaaagagatatctgcacttccatgttcattgcagcattattcacaatagcaaagattggaaccaaccaaagtgtctgtcaaagaataaatggataaagaatatgcgttatatacacgatggaatactattcagcctctaaaaaggaaatcatgtcatttttgacatagataaactttgaggacattatgtttagtgaaccacactaggcagggcaagataaattc

SEQ ID NO: 213204 - DNA, 604 bp, Homo sapiens
ttcaacagtaagacaacaacccaattaaacattggtcaaaaaatctgaatagatatttcttaaaatttacaaatggtcaacagcaatctgaaaaaaaaatgctcaatataactaataatcagagaaatgcaaatcaaatccacaatgagttagcactatactaatgttagaatggttattatcaaaaagacaaaagataacaagtgttagtgagacatggagaaaagggaacactgaacccagttggtgagagtgtaaattagtatagccattatgaaaaacagaattgaggttcctccaaaaatcaaaaacagaactaccacatgatccaacaatcccaccactaggcatatttccaaaagaaatgaaatcagcatatcaaagagatatctgcacttccatgttcattgcagcattattcacaatagcaaagattggaaccaaccaaagtgtctgtcaaagaataaatggataaagaatatgcgttatatacacgatggaatactattcrgcctctaaaaaggaaatcatgtcatttttgacatagataaactttgaggacattatgtttagtgaaccacactaggcagggcaagataaattc

SEQ ID NO: 213205 - DNA, 535 bp, Homo sapiens
tttcaatggagtgttttgggctttgcgtaagtacaaatataagtgtgagattggacctcctaatacagtcaaatgctcacagtgtacagtgtagcagctaataacagctcaaaatctagagtcatctcctytatctgaattctagtttcgccccttgtgaactggatcattgtgggcaactaagtgtttaactacttaaaatcaactttctaatcagtaaagttgtaataataatagtaaaatcagcatggtttgggaaagattaacatatgtaacataatagcatattttattagctattatttgtattattatggttgttaattttactctggaagacaatgggagagttattcttacccctcattgaccataaacaacaactgaacataaacattattacatgtatatcgtccatacatgtaaacactgagatgagactcaatgcaaaatatatttccatatactaaaatatcacaaatatccctaacatttaaaataattcagaagaccaatttcagaagacccttcctaa

SEQ ID NO: 213206 - DNA, 568 bp, Homo sapiens
gctctctctctctcttggattcctaccattctgtgagcccaagcccaagctaccttgaagataatagactatgagaagtgctgagtgcctcagccaatagccgtctttcctcagaaacagaccacagatgcctgagggtgcccagtcagatcagaaaatcwggccagctaagtccggcataagtaacccacctatagatttgaataatgtttattattgtgtgttactgagcattatggttgtcttatagcattattttgttactagataacacatacattccaaatctatgtcatgttttgttactttcttccaattttcttcatgttgatctctcattatctgagaggactgaattgtgtggataaagcaatgctggctagaaaaagagagaattaggactagcccccaagttttctatatgtgcaaacaaagaaaatatattccaatttccagggtctccttttcttcgtctgtatgatgtatatgtattatgtgttgtgaatgatggaagtgaaatgaaacgtttcatgtctcagtgttccactgctctaatattcgatgattc

SEQ ID NO: 213207 - DNA, 516 bp, Homo sapiens
ttggtcctggttaaatacaagaaaagtcttaactcaatgttcactggctacatatatttaaaaagacaatagaagtatagatgataacgctaacttctttctggcaccataatgaaaattacatatttttgaaagtagaacatgcagcttgattcattaaagggtgaaatatgtttacattttttcctcttttagtaccatgcaaaaaaattaatatgattttccattagtcaatgtcttaatattrtaatggagtaaatggtccccatttgtattttatctacttccatctttacttgctttatttttattttgattctttaaaatcctaaagaaagaccattaccaaaaattttactataatgttgtttttactattcctctactgatttataataaacatacaataagaagcaatagccttgtgagtatcttttcataaagttgacccgtactcagctacaactccaaacctatatagcacagtatttaattacagatattctagaggaattc

SEQ ID NO: 213208 - DNA, 420 bp, Homo sapiens
ggggtattattcaagatatttttgccaagaccaacatcctggagtttccccaatgttttcttgtagcagttttatagtttgatgtcttagctttaaggcctttattcacttttatttgatttttgtttacactgagagttaggggcctagtttcattcaatttcatgtggatataaagttttatccrcaacatttattataataaagagactgtcctttctacaatctatattcttggcacctttgtcaaaaatgagctcactataggtgtgtggatttgtttctgggttctatattgtattccattggtctatatgtctgtctttatgccaatagcatggtgttttgtttactatagctctgtagtataatttgaagtcaggtaatgtaatttctctagttgtcctctttttgctcagg

SEQ ID NO: 213209 - DNA, 606 bp, Homo sapiens
tctgggttctatattgtattccattggtctatatgtctgtctttatgccaatagcatggtgttttgtttactatagctctgtagtataatttgaagtcaggtaatgtaatttctctagttgtcctctttttgctcaggagagctttggctcttctgggtcttttgtggttccaaataattttagaattttttttttctgtttttggggagaatgtcattgatatgttgatagggattgcactgagtctgtagattgctttggatagtgtggacattttaacaatattgattcattcagtccatgaacatagaatatctttccattytttggtgttcttttcaatttcttttatcagtattatataatttttattatagagatctttcactttgttttggttaattcctaagtatttaattttatttttggctattgtaaattagattactttattacttctttatttatatttcagattgttcaccgttggtgtataaatatgctactgatttttgtatgtttatcttgtatcctacagtgttactgaattcatttatcagttctaatagttttttggttgagtctttaggttttctaaatataac

SEQ ID NO: 213210 - DNA, 470 bp, Homo sapiens
ttttatatagacaaacttcaagccatcaaaagaaaccattatgtgtctgctgctaaattcaaggtttacaaggaagcaaaattttgcctcttctcacttttaatgtcttaggaaaacagctctctacaagtttgggtggagatagctgtcatccactcattttttccaaaggatatgcaaaacctgaatattatgaaaaataacagattaacacatgatactctaactttaaagatgctatcatatatttgaatttacagagagtcatcagaaaggaatttcctctttctcccaatatacacctacttctttttctattaatctgtacttttgacaactacctgtctgtatgcaatacataaacacacacacggtcatccacaacagttgtaaacacacatgcatatatagtcatgcaattgaagtttttttctcagygatccatacacaaagtaaagtagtaaatacac

SEQ ID NO: 213211 - DNA, 419 bp, Homo sapiens
ccaaaacacctaatatacttgccaacattctctatgctgggtcgatgcctacacaagtaatcaattatagaattcctttttcctaatctacatgcagtcccagaattctcaaacaatattccacacaaccactaccacttcgacggcattaacamaagaaaagatacctatttaaaatcccaggtttagatggtttctaagatctagtctatctacagcacactaattccaatactatactatacatgtgagtaagttacaaataattacacactgtgctataccaaaaatttagtataatagatgtttaatttaaggaatgtgtctggtggaggattattgtatacacttttaaatcagcatgatgctattattaacatgcctgctttaggaatatgatagcacagattatttgacaa

SEQ ID NO: 213212 - DNA, 350 bp, Homo sapiens
ctctataactaaaggtacagtagaaaaacaagaaaatgaggtcaccctggtttctgactcactaataagatcaatgcatgtgataaaaggatatttaccacaaatctctttatgatcatggtttgagcagagtcaagacagtgatacagaaaaggtgacctgaatgcagtcagcagagagggatggcaatgaaaaatgactaagagcaaagtgtgagtatatgctgggaactggaaccacggtccccttagcacaaaagacgacggagtctaaagtcagagaaagtgagtttacattcatgttatgacyctattcatcattcatcagttgcacccaaggactactgggta

SEQ ID NO: 213213 - DNA, 536 bp, Homo sapiens
agtacatctaccatacttgtgtctaaaaagtaagaacactgatagtttggtggatggagtcaaggctgatggtaggcaggagatactgtctcctccaaagaatgtcattggggatgatggtgaaaaagcagatttgaaatatatgtgagttgatagaagcaaaaagatwtagtgacagattaaagttagagggcatcaggagatgccaaaaagaggtcactccttcaacacctaagatgattttttgagagccttccatgtgccagggactgtgcttattgccaaggataaaatggccaaccaaaataaagatggcttctgtggttttggaaaacagtggcagaagttagaaatatatttatttatgtaataatcattcaagtgtttgtattgtcagggcaggcaggtagatggggctggagactgaaagcctggattcatgaatgtccatttgacacttttattcatggcttagtgaatttttccagggaaagtatgtagaaacgaaaaagaagagagtttggaatggaacccca

SEQ ID NO: 213214 - DNA, 536 bp, Homo sapiens
agtacatctaccatacttgtgtctaaaaagtaagaacactgatagtttggtggatggagtcaaggctgatggtaggcaggagatactgtctcctccaaagaatgtcattggggatgatggtgaaaaagcagatttgaaatatatgtgagttgatagaagcaaaaagatatagtgacagattaaagttagagggcatcaggagatgccaaaaagaggtcactccttcaacacctaagatgattttttgagagccttccatgtgccagggactgtgcttattgccaaggataaaatggccaaccaaaataaagatggcttctgtggttttggaaaacagtggcagaagttagaaatatatttatttatgtaataatcattcaagtgtttgtattgtcagggcaggcaggtagatggggctggagactgaaagcctggattcatgaatgtccatttgayacttttattcatggcttagtgaatttttccagggaaagtatgtagaaacgaaaaagaagagagtttggaatggaacccca

SEQ ID NO: 213215 - DNA, 525 bp, Homo sapiens
ttgtgcctatgattaacaatattgtatcatacacttaaaaattaagagggtagatctcaggttaagtgcttttaccactaytatcagacacacacacacacacacacacacacacacacacacacacaggctgacagcctcacttaatcctggccctgcttaggagtcttccaatccagtactttttatgtctttagatggatttccttctcacctacaaatatccttacgttttccaaccccaccatatctgtcctcaaaatctgtaatttgaaacaaatctaaaacatattcacccagtataaaataactgccaaccacttaacactatactcccagcactgttcaatactgaaagtaagcttttgccaaagaaggagcagtaagagtagaatctcaaggattctaactagaattctacgcttcatgtgaaatacctgaaagagaatttatggttgggagggacactgataaaatacttttatgacacataaaaatcagaccactccatattaccagatacca

SEQ ID NO: 213216 - DNA, 452 bp, Homo sapiens
ctgttctgataaaaaattatatattcctcaraaaaaccctaatgacaaaaatgctaaattgttcacacttgccacctccagcaagcatggaagggtgcaagatcctgtagcaacatggctgctattctttgatttctgaacccagttgctatggccatagagtaacttctgacttctctgttagtagattctattttgagagacttcttgagaagtggttggctgtaagatttcaggggctgcctgggtaatattggagccaggtgcttctcttccctgccctctcactactggtaattgcttagcccccctcactgaggttttacacagatgacaacaagcctttggatgaaaacatattcttctttgttatctttaactcatagttatccttagcttaggagaagtcaccgggatgactctgaccattatccaatggggaaaaccacaac

SEQ ID NO: 213217 - DNA, 631 bp, Homo sapiens
tttttttttacatcttcaaacttgaatagggttttgggttttccttggttttttatttaggatgatttttatttatttattgataccttgctattctcaaatttctattcaaaatacagctgtttcattttttaaagacaagcaaaaaaaaaagtaaaattttaaaaaatccttgtaaagacatcaaactatttaaggactctttagaaaatgtgtccctagattgctggttcaagggctgcaatattgagtgtagatgtgggtctctagaaaggtaaaactagcataaaaccattttgagagaagcggccaccctctcttcagattacatcattacacttagcacacaccagtctcaaacatgaggactctcaggcattaccccgtaactactgtcaagcaatcttttctatacatggcctagactatgwtcctagcttttcccttttaaagtcccctccacaaataaaaacaaaagcctttgtacactacccacttattaattcctacatgtcaaacaacagtttactgtcctaaatgcatgatgaattaatctcacaagacactgggtagctgtgtcaagcctattgctatggcacccaagagacaaagatttctgaggttgtcagtg

SEQ ID NO: 213218 - DNA, 475 bp, Homo sapiens
tatttagttttataatgatagtaaattgttaggttaggtttttttttttagtgacagatgacattttgactttactttcttatctgtattataatatttgtgagaaatcactaccctactgatatggtttgtctgtgtccccacccaaatctcatcttgaattgtagctcccacaaatcccatgtrtcatatgaggaacccggtgggaggtgattttattatgggagtgggtctttcctgcactgtttttgtaatagtgaatgagtcttatgagatctgatggttttgaaaatgggagtttccctgcacaaactctctttttgcctgctgccattcatgtaagacatcacttgcttctccttgccttccaccatgattgtgaggccttccagccatgtgaaactgtgagtccaaataaacctttttcttttgtatattgcccagtcttagatatgtctaatcagcagcatgaaaa

SEQ ID NO: 213219 - DNA, 647 bp, Homo sapiens
caaggagtataataaacagtggcactaatccaggagtttggtttgtgttaattttaggatagcagttgtattagcagatctgaaaaacaatagttccaaagagtaagtcatagcattttaaaggagaaattttaaatgtatatagttaagatgctggatggttaaagatacagtgacaaaagcgtatgttagtttccatcaacaagaaaataaaaagttcagctccataaaaarcaaagctgtgggtcaagtgtgagggaatcgtaaatggggcatgatgctgagcaagggatgtggggtaagtgaatgttttcttttgcatggcatagaggtaatgccattggacctacaaagaaggaatgtactcctaacacgttacttggctcttctgtgaaggaaatatttataaacaagtaccagtcaggtttcagtgtggaaaaaacactgaatagtcttttaaggagaatgaattttatggcaggggatgaggtacttacataatcatcgaaggggctgaagggtgaagattacggcaccgccagtaggatctttggtcccacttttacaatttggacttagaggtttggcagcttcaactgtctcctagggaagaaagctgcaggaaatcctcacagaagtcacaaggc

SEQ ID NO: 213220 - DNA, 364 bp, Homo sapiens
ttcagggagaccacgagggttagaaattgtggaccagaggatgggttaggcatagaaagggttacatactgaaagaactacagaaatatgcatagggttttccttaagtctttggctgaatgccaatttacaaacacataaagtgacattccaggaggccagagaagaactactgctgggaaagaacaaatatcaagaatctrtaaactaaacaattcactgagttcacacagggctgggaattgtttgagtttccaccagccagagtgaagagacctcattgaacatacgaacattcacaagaaatcccttgggtcacaccttaatagtgagactaaactgccctagaataaaagctatacca

SEQ ID NO: 213221 - DNA, 463 bp, Homo sapiens
aagtgggtattcatgagacaagagtagatgagacatcaggagataaagagacttccacaacctaaatttaatataggttacaatgagctagacaatccaactggaaccatcatcctttccccacacatgtatgcaatttaatgaaacaaacagtacaataagcctgcttagggaacacatcagaaaggttccccaagataaaagaagagtattctaaataccttccataacttcataagaaacacatacattgctacatgagggagttaaaataacatgcactggcttccaaggtcacaggtacaatgtcaagtttacccattgatctccatattgagawaacatttgttatagagccacagtcagtagctctgattttatccaataatgttaacattgagtaccagaacattttattaaagtaaataatacctgggaaaattgtcttttatatgactgaaat

SEQ ID NO: 213222 - DNA, 592 bp, Homo sapiens
taggttacaatgagctagacaatccaactggaaccatcatcctttccccacacatgtatgcaatttaatgaaacaaacagtacaataagcctgcttagggaacacatcagaaaggttccccaagataaaagaagagtattctaaataccttccataacttcataagaaacacatacattgctacatgagggagttaaaataacatgcactggcttccaaggtcacaggtacaatgtcaagtttacccattgatctccatattgagataacatttgttatagagccacagtcagtagctctgattttatccaataatgttaacattgagtaccagaacattttattaaagtaaataatacctrggaaaattgtcttttatatgactgaaattaaatttgtaataatcattcacaatgaccaaaccaccttaagtcagtaacatccctgttgatattatatatatgaacaaataagcaattaacaatagctatgggtatacaatttggtctttcttattgctttagatttaaagttgcatgtttcaaaatcttctggcatatgctcacccttcctcagctaaacaatcttgtga

SEQ ID NO: 213223 - DNA, 592 bp, Homo sapiens
aattaacaatagctatgggtatacaatttggtctttcttattgctttagatttaaagttgcatgtttcaaaatcttctggcatatgytcacccttcctcagctaaacaatcttgtgaatttttcatagtctttttcctgctcctgcaggaaaccttgtaaatagctgttggctttagcagagtgaaagtgcaattttatctccttgacttcttacatggtctggaagtacacattcaattctattctacacctgtttttaaaaaggatgttttccaatgacagatttccagttttaaacttcttgcattctcacaagagacaaaagcaaaaaaaataaaaccatagagattttttctggcaaatgcaccaaaactaatgatgtttccctttacaacatatgactataattcaagagtagatctagctcttggtccagctaacctcctttgaatcttcctgtttatatacaagctaatatgtttagaatgctagggatttcactttacctaatttagctaaggaactaaaactatataaacaggaagactgaaaaaaaattgatttattagctagatccaggttagatatacc

SEQ ID NO: 213224 - DNA, 592 bp, Homo sapiens
aattaacaatagctatgggtatacaatttggtctttcttattgctttagatttaaagttgcatgtttcaaaatcttctggcatatgctcacccttcctcagctaaacaatcttgtgaatttttcatagtctttttcctgctsctgcaggaaaccttgtaaatagctgttggctttagcagagtgaaagtgcaattttatctccttgacttcttacatggtctggaagtacacattcaattctattctacacctgtttttaaaaaggatgttttccaatgacagatttccagttttaaacttcttgcattctcacaagagacaaaagcaaaaaaaataaaaccatagagattttttctggcaaatgcaccaaaactaatgatgtttccctttacaacatatgactataattcaagagtagatctagctcttggtccagctaacctcctttgaatcttcctgtttatatacaagctaatatgtttagaatgctagggatttcactttacctaatttagctaaggaactaaaactatataaacaggaagactgaaaaaaaattgatttattagctagatccaggttagatatacc

SEQ ID NO: 213225 - DNA, 592 bp, Homo sapiens
aattaacaatagctatgggtatacaatttggtctttcttattgctttagatttaaagttgcatgtttcaaaatcttctggcatatgctcacccttcctcagctaaacaatcttgtgaatttttcatagtctttttcctgctcctgcaggaaaccttgtaaatagctgttggctttagcagagtgaaagtgcaattttatctccttgacttcttacatggtctggaagtacacattcaattctattctacacctgttyttaaaaaggatgttttccaatgacagatttccagttttaaacttcttgcattctcacaagagacaaaagcaaaaaaaataaaaccatagagattttttctggcaaatgcaccaaaactaatgatgtttccctttacaacatatgactataattcaagagtagatctagctcttggtccagctaacctcctttgaatcttcctgtttatatacaagctaatatgtttagaatgctagggatttcactttacctaatttagctaaggaactaaaactatataaacaggaagactgaaaaaaaattgatttattagctagatccaggttagatatacc

SEQ ID NO: 213226 - DNA, 592 bp, Homo sapiens
aattaacaatagctatgggtatacaatttggtctttcttattgctttagatttaaagttgcatgtttcaaaatcttctggcatatgctcacccttcctcagctaaacaatcttgtgaatttttcatagtctttttcctgctcctgcaggaaaccttgtaaatagctgttggctttagcagagtgaaagtgcaattttatctccttgacttcttacatggtctggaagtacacattcaattctattctacacctgtttttaaaaaggatgttttccaatgacagatttccagttttaaacttcttgcattctcacaagagacaaaagcaaaaaaaataaaaccatagagattttttctggcaaatgcaccaaaactaatgatgtttccctttacaacatatgactataattcaagagtagatctagctcttggtccagctaacctcctttgaatcttcctgtttatatacaagytaatatgtttagaatgctagggatttcactttacctaatttagctaaggaactaaaactatataaacaggaagactgaaaaaaaattgatttattagctagatccaggttagatatacc

SEQ ID NO: 213227 - DNA, 452 bp, Homo sapiens
cccatacagtgggaggggaaccaaagggggttgcccactcctggctcaaatgcctggggtttatatcccaatcattgtccctccccctgtgctttcagatgacagatgatttgattatttctttacctcctgcatttagcctaactggtattttagtgagccctctttactacctgattggtcgggtgtgagctgagttacaagccccgtgtttaaaggtgggtgcagtcaccttccccagctaggcttaggaattcttagcctagaaaatccagctagtcctatctctcagtatcactgagaaaaggatgcaaaatattgaccaattttttcaaatrtggaagtgttatttataaagaggattgcgatacataaaaaggagaaaatctggactaaaagaatattggtacaaatgtacagccacatgtactcaattctacattgcctggctg

SEQ ID NO: 213228 - DNA, 488 bp, Homo sapiens
cctcgcagcccatcttaccttgtagcccactcttctcctgcctaacactgtcctagaaccctcagggtacctttcgtatccatccatcccactctggcactccacccaggctggtgtcaygagacgtgtcccgtgttccaggtagctacttctccccatctacctccccattcacccccattgtcacagttgttgaggaggcttagagaaaaggtgctcaattgtccatttaacagagacgtgagactgactcacaacccctgaattctttagacatttgcattttgaaaatattaatctctcatttgttctgaattttgctgctaaagacccaaattaatttaaaaccagaatccctagatctcttaatctcttcttcacctgtaaaatgaccctatcagactctaaggattaatttctaaagtcttatctgaccaaaaggattaaacgtgagaaagggaatggaatgaagagaacagtgtcggcag

SEQ ID NO: 213229 - DNA, 625 bp, Homo sapiens
aacaaggtaaagtttaaacaggagccttgccataattcaaggagaaatttcatccttttcatagatgtcatattgatcagcagtcagaaataatcataactgaactctgtctttcctcgttagtttgatgactaaaaatgctagaacaattaacaagaaaaaaattcaagggcccttcaccaaacaacatttgtgagagtagcattatttggagcaaacaaactatgcactgaatgagacaaaaattttatccttgagagccacatcaccaaacaggaggcaaagaaacaagtgtcatgtgtggatagtgacacatctgggtgttaggctgtagtctcatcattcaattgcacagcatcctgaacaacaaaatgccttaaagcttgcacaagcaactttctgacctctctgcmcttgatgtggagccatcggcatgtcccaaatcaaatgacaaagctgtcaagtctgccaaatagtgttctcattttggaagacaattgccagccacttactgtgccatagttaaaacagcagttcataaacagaacatcaaattcgtttgctacccccattaattgccttatacctgaaacctcattactctcaaggaggaatgagcaaatga

SEQ ID NO: 213230 - DNA, 588 bp, Homo sapiens
gagatgttaaaggaaataacttttttttttttgccagttttatactaatttggccatgagttatctctgtatttatgatggagttttcctacacagtagtacacagcaggaacagcttacctaatatgtaaacatggaatcatttctgaaaaaaaaaaagtttagcctgagatcaaacatatttctttaaaggcttttcctttattctcccctattctccatagatttgtctgatgtggttgcattgtgggttgactcacctgtttatgtatgattattaaaaagactggctttgaaggtgataccagaaagrcaaagtacctccaagtctttttatgggacactgggcattagaaaatctatctaaaatctgtgattacctcttaaggaaagtttttcatgtctactctttgtaaaggaattagcttagttgctacctcatattataaataagaaagacttgtcaaatctcatttaagaatcaaatgattacaaattactacgtggtatactatttcctcaaggagaaaaaggatcagaatttaaaagtgtgactaaaatctttaagaggaacacacacacaaaaca

SEQ ID NO: 213231 - DNA, 386 bp, Homo sapiens
tttgaatgagacaattggtagtagcctaaaggagttttgaaatacctaagaatgatgtggatatctaaccagaatatacaattaatttatttttaaaagtgtagccagagcattgaggacacagaatgatacacatccaagatatctttgtaatccacagagaagccawagaactaacaaaagggcaatgtgttttagaggcacgtattgcaacacagtaacataaccaactaaatatgaggattagatacctattcagcaggtatactgtaacgcacattttctaaaaatactgatgtattttccacatttgtatatcgtaaaagaatatgagcaaaatcttcttcactgatggtattcattccatttgagtaggaaaggaattc

SEQ ID NO: 213232 - DNA, 385 bp, Homo sapiens
tttgaatgagacaattggtagtagcctaaaggagttttgaaatacctaagaatgatgtggatatctaaccagaatatacaattaatttatttttaaaagtgtagccagagcattgaggacacagaatgatacacatccaagatatctttgtaatccacagagaagccatagaactaacaaaagggcaatgtgttttagaggcacgtattgcaamacagtaacataaccaactaaatatgaggattagatacctattcagcaggtatactgtaacgcacattttctaaaaatactgatgtattttccacatttgtatatcgtaaaagaatatgagcaaaatcttcttcactgatggtattcattccatttgagtaggaaaggaatt

SEQ ID NO: 213233 - DNA, 635 bp, Homo sapiens
tacagtttaacaagattcccaggtgattcttatgtacacttaagtttgagaaatatcgccaatagttctcaactctggttgcatgttgaaaatcacttggagaactttaaaaatgttacatgtgtctactcctagcccccaggaaagattctgatttaattggtataatgtaaggcctgaatattagtgcttkttaaaagttcccaggtgattctaatgtgcagtcatcattgaaagtctcgctcctgccccaggtgtgctttcatgcagtaatgcttagaaatacctcagctcccttatcaataaggacttaaatacttaaacagctttactcatttagcaacatcaaaaaggctaaacaaagagatatactcaaaaaccctccctgtattattacttacaaccgcatgtgagcatacaattaaaaaacagataacaatttttaaagttcacatggacacacacattttgttctgcatatttgtataataaaacctaggtctacagactcacatatctcctattgccatttaaaaaaaataaatacagttacattaaaggactcagaggattccaaatgaaaagtgtaagtctctcttctccaataaatctatcttcccaaacataataactat

SEQ ID NO: 213234 - DNA, 635 bp, Homo sapiens
tctacagtttaacaagattcccaggtgattcttatgtacacttaagtttgagaaatatcgccaatagttctcaactctggttgcatgttgaaaatcacttggagaactttaaaaatgttacatgtgtctactcctagcccccaggaaagattctgatttaattggtataatgtaaggcctgaatattagtgctttttaaaagttcccaggtgattctaatgtgcagtcatcwttgaaagtctcgctcctgccccaggtgtgctttcatgcagtaatgcttagaaatacctcagctcccttatcaataaggacttaaatacttaaacagctttactcatttagcaacatcaaaaaggctaaacaaagagatatactcaaaaaccctccctgtattattacttacaaccgcatgtgagcatacaattaaaaaacagataacaatttttaaagttcacatggacacacacattttgttctgcatatttgtataataaaacctaggtctacagactcacatatctcctattgccatttaaaaaaaataaatacagttacattaaaggactcagaggattccaaatgaaaagtgtaagtctctcttctccaataaatctatcttcccaaacataataact

SEQ ID NO: 213235 - DNA, 502 bp, Homo sapiens
caacgatccccattcacattgtagtctatgagaatgcacttccagaacacaagttgtgatatgaatgatgcctcctccaattaagaataagacagtgctggtgaggactgtgaaccatgaaaagggcacatgagtcacataaaagacgttatttcttacttcagtgggttgttgccataagataattcaggatgtatattgactgattttctaaatttcaagaaaagcctggacatcatagtgagaccatgtctctacaaaaaattaaaaattaaaaattaatcaggtatgatgatgcacggctatggtcccatttacttgggaggctgagatgggaggatcacgtgagcccaggaatccaaggctgcagtgagctatgattgtgccacygcactccagcctgggtgacagagcaagaccccatctcttaaaaagaaattaatacatttcgagataggccagatttttaaattaagcattgcaacatttacccagggttggc

SEQ ID NO: 213236 - DNA, 603 bp, Homo sapiens
atagcagtccagcaaaagtttatcctgctttcataaaatgtttcaatagcatttattttctgaagtatactgaacagcaagatgtggccctcgagtatgctggcaaacacaaaagaattaggctttcagtcattttccaggttgttaagccagtccatataataacacaaaagaaaatctatttggatcagaaatctctggatactctactaaatcactatagataaaccaatgtcttgctacacaaaatgtgccctcatctcagtggttcaacataccctgggaacttaatagacatgaagaatcacaggccttgccccagacgtgctaacataaaatttacatgttaacagtatcctcaggtgatttatgtgcatatgaaatttgaaaaattgaaattccatcaaagctaaaaattttggatagtactttgcgaraacaaggtaaaataacttttggtgttgccatccaaagagctgagctttaagtttccctttgtacatataggccacattctgtcttttacatttgagaaaagcaaattaaggataatgagaagattcatttgcttttgtaaagtgctgcacacacatacacacaaat

SEQ ID NO: 213237 - DNA, 606 bp, Homo sapiens
tgtccacacaaaccaatttcaagatggccagaatttcacaagtgaaatgattgatgatgctattaccacagagagacagtggcagcacagacatcatttccaccatggcagtgagacagcctgtcatccaggagccagctgcaatctgcacacaggttctcctattcatgatgayagggtatctcagggggttgcagatggccacataccggtcatatgccatcatgggcaggagcacacactcagtggagcccatggcaagggagaggtacatctgagtggcgcaccctgagaatgaaatagtgtttctccctgaaacaaagtttgccagcattggagagagggcagaagaggagtaccagatgtccagaaaggagagattgctgaggaagaggtacataggggtgtgcaggtgggaatctagaatggtgatggagatcagaaaaatgttgcccagcaaggtgatcaggtacatcagcaagcacaccgcaaatatgatgacctgaactttggggtagtgaaaaaatcccaggaagaaaaatacttttacagatgtccaatttgccgggaacatttttttatgttatgttcacctgtacgtatgca

SEQ ID NO: 213238 - DNA, 606 bp, Homo sapiens
tgtccacacaaaccaatttcaagatggccagaatttcacaagtgaaatgattgatgatgctattaccacagagagacagtggcagcacagacatcatttccaccatggcagtgagacagcctgtcatccaggagccagctgcaatctgcacacaggttctcctattcatgatgacagggtatctcagggggttgcagatggccacataccggtcatatgccatcatgggcaggagcacacactcagtggagcccatggcaagggagaggtacayctgagtggcgcaccctgagaatgaaatagtgtttctccctgaaacaaagtttgccagcattggagagagggcagaagaggagtaccagatgtccagaaaggagagattgctgaggaagaggtacataggggtgtgcaggtgggaatctagaatggtgatggagatcagaaaaatgttgcccagcaaggtgatcaggtacatcagcaagcacaccgcaaatatgatgacctgaactttggggtagtgaaaaaatcccaggaagaaaaatacttttacagatgtccaatttgccgggaacatttttttatgttatgttcacctgtacgtatgca

SEQ ID NO: 213239 - DNA, 502 bp, Homo sapiens
tgtgttctgttcttcaatggttctctaggttagtgatagtaatatatattgaagaaatttgtcactaataagaaaaatttaagcaggaagtcaacagatacatccttaaaatgttacttttgctgtaagattttcttttggcaatgtgagggtaggaggatggtgtatttaatcggtatcacaaaagaatgagaaaagaaacaatattttgcattctttctttttccaaaaccacattttaactgatctatttacctctgtaccattrgcatgattttcttcctctgatttggtaataatcttcttacttaggaactgtttggatttccaagttcacagtttcttctgccattcctagagatatatccaaaataatttggaagtctcagggaataaaggcaaaaaaaggtatagatttctgcagccataaagtaacagagactttggacacttagaaacaagcccagagtttccttctcaaactcaggaaaatggtgacatg

SEQ ID NO: 213240 - DNA, 561 bp, Homo sapiens
gggaattccaatatttttccaaatcttagaagaatgtccaagctcttaatttttagtaagaatactattgatgtcttgtctctgttactaactagtttgatttgaggaagaagaggattggggaaagtcagatactaccttgcttttccttggtttttacgtcaacwtttttctctattgaaggacattttaaatttacagcccaagatgaatgatgaagtgtgttcaggagtgaaccacattctaggtaatcagtttggctgaatcaatttttattaatggaccagtgaatttagattatattgggcataaacatattttgcacaggcaaataagaattacctgcttgtggaatcttttgggtttagtcactcatttaatcttcccaagttcacttgttaattttagttgaaggaatattaaacagtcacaaactatatttaaatatatccatcatagctgtttacagattaaatctgatggtaagagttgagatcattgataattaaatttacatcctgacaaaataggctatgagaatctattagttcccatacacca

SEQ ID NO: 213241 - DNA, 561 bp, Homo sapiens
gggaattccaatatttttccaaatcttagaagaatgtccaagctcttaatttttagtaagaatactattgatgtcttgtctctgttactaactagtttgatttgaggaagaagaggattggggaaagtcagatactaccttgcttttccttggtttttacgtcaactttttwctctattgaaggacattttaaatttacagcccaagatgaatgatgaagtgtgttcaggagtgaaccacattctaggtaatcagtttggctgaatcaatttttattaatggaccagtgaatttagattatattgggcataaacatattttgcacaggcaaataagaattacctgcttgtggaatcttttgggtttagtcactcatttaatcttcccaagttcacttgttaattttagttgaaggaatattaaacagtcacaaactatatttaaatatatccatcatagctgtttacagattaaatctgatggtaagagttgagatcattgataattaaatttacatcctgacaaaataggctatgagaatctattagttcccatacacca

SEQ ID NO: 213242 - DNA, 541 bp, Homo sapiens
tagtaagaatactattgatgtcttgtctctgttactaactagtttgatttgaggaagaagaggattggggaaagtcagatactaccttgcttttccttggtttttacgtcaacttttttctctattgaagracattttaaatttacagcccaagatgaatgatgaagtgtgttcaggagtgaaccacattctaggtaatcagtttggctgaatcaatttttattaatggaccagtgaatttagattatattgggcataaacatattttgcacaggcaaataagaattacctgcttgtggaatcttttgggtttagtcactcatttaatcttcccaagttcacttgttaattttagttgaaggaatattaaacagtcacaaactatatttaaatatatccatcatagctgtttacagattaaatctgatggtaagagttgagatcattgataattaaatttacatcctgacaaaataggctatgagaatctattagttcccatacaccagttcattggactttttgcacccactaagaattc

SEQ ID NO: 213243 - DNA, 541 bp, Homo sapiens
tagtaagaatactattgatgtcttgtctctgttactaactagtttgatttgaggaagaagaggattggggaaagtcagatactaccttgcttttccttggtttttacgtcaacttttttctctattgaaggacattttaaatttacagcccaagatgaatgatgaagtgtgttcaggagtgaaccacattctaggtaatcagtttrgctgaatcaatttttattaatggaccagtgaatttagattatattgggcataaacatattttgcacaggcaaataagaattacctgcttgtggaatcttttgggtttagtcactcatttaatcttcccaagttcacttgttaattttagttgaaggaatattaaacagtcacaaactatatttaaatatatccatcatagctgtttacagattaaatctgatggtaagagttgagatcattgataattaaatttacatcctgacaaaataggctatgagaatctattagttcccatacaccagttcattggactttttgcacccactaagaattc

SEQ ID NO: 213244 - DNA, 590 bp, Homo sapiens
gcaaaccttcctctacctgctcagctcgtctgactgtggtgataacattctgtgggaccatcttcctcatgtacatgaagcccaagtctcaagagacacttaattcagatgacttggatgccactgacaaacttatattcatattctacagggtgatgactcccatgatgaatcctttaatctacagtcttagaaacaaggatgtgaaggaggcagtaaaacacctactgagaagaaaaaattttaacaagtaaatgagaaaggtgagagtaattttataatcacaatatggaaatcaattagagaaaccaaggttaaacagataggttctcgttgctgtttcacattcatctctcgaagttctaaagctccaaaatacacttctctgattgcgatacrtaatgaaaagaagtaaataaataaatttcagtgtttggaaataagtttctattctgttccattggttgatatgtctatttttatctgagtaccatgctcttttgattacaataactttataacatattttaaaactgcagcatatggtgctctcagctttgtttttgcttcagattgctttgcccaggcag

SEQ ID NO: 213245 - DNA, 547 bp, Homo sapiens
aattataagaagaataggatagcacaaggcagccagcactggtacactctaaagtgctaaacatatgcagagcaataaccagaagcaatcttccttccaccacagatccaatatcaggtccccaaaacatagttgttttgtagtcttttaggaaatcgttagtcaggtgcagccacatgaggagacacagaagagggtcaggaaagcaaagtttattatacccacaagtcttagagataaggggcatgatatatcatacagggccacatggggaagccaccaggatggtcaggaggcaaaaaacaggtgtgcagggaaggtttaggccactgcctttattggaatttccacaggaaaggcaagtcaaggcacaatgaacagtttaggattggaaggtttgaataatttctkcaggctttgggctaaaggagtgatctctggttgtctggcaattgtcactgggaactggggtttgagggccagataaagaaggtatggctctggattcgttagtttccatgtcagaggcatgctcctacctgagctt

SEQ ID NO: 213246 - DNA, 575 bp, Homo sapiens
gagttcctaacttaatcagaggatctcaaaggagattgcagaccattaatgcctagaacagaattgttactagaagatgaagtttgtatttgcagcaggctttaaactagctggaatcctgccacctcaaatccctctctcccagcccctgtaagaaacaaccagtctatgattcaatgctctggggctgctttagtgttgcaataggcctaagcaaagtttrtgactttttaattcaagccagaagtcaaactctaactttctagaaaaacatctaaccttgttttgctttgctttattaacttagctacttgaaggcctaatatttaaagtactaatttttttttcagcaaaaccgtgtaacatctgtatcctaaatactccctagaagaaacaatcttgtaatctccagcttttctaaagagatcagttaagaccattgatattacacaaagtttaatggacatgccaactatcaatttatagatatactctaaccctcaattaatacaccatgaggaaagacatattattttagctcacaaagggaagggcaatttataacatgtgaagta

SEQ ID NO: 213247 - DNA, 575 bp, Homo sapiens
gagttcctaacttaatcagaggatctcaaaggagattgcagaccattaatgcctagaacagaattgttactagaagatgaagtttgtatttgcagcaggctttaaactagctggaatcctgccacctcaaatccctctctcccagcccctgtaagaaacaaccagtctatgattcaatgctctggggctgctttagtgttgcaataggcctaagcaaagtttgtgactttttaattcaagccagaagtcaaactctaactttctagaaaaacatctaaccttgttttgctttgctttattaacttagctacttgaaggcctaatatttaaagtactaatttttttttcagcaaaaccrtgtaacatctgtatcctaaatactccctagaagaaacaatcttgtaatctccagcttttctaaagagatcagttaagaccattgatattacacaaagtttaatggacatgccaactatcaatttatagatatactctaaccctcaattaatacaccatgaggaaagacatattattttagctcacaaagggaagggcaatttataacatgtgaagta

SEQ ID NO: 213248 - DNA, 574 bp, Homo sapiens
tagccccactttgtcaaacactgcttctatgatcttaggaaggttactgcacctctataagcttcaatttcctyatatgtgaaattagaaacttaaaaatgcctacctgatgttgttatcctgagaattaatgaggttatgcatatgaagaatttaacatcgttatggaggcatagtagatactcagtaagagtgcttgccactcttctaattatattgattagaaaagtattgatgactgtaaatatgcaccttgcttttacagaaggagaatgactttggagttggaaatacatggattaggacctcagtttcctgatttgtagcttgatgacctctaataagctataaaattagtgttataataatcttgcaggactgttatgtggtaaagtttaaagggtgattatcttgattcttggcatttaataggaattccttaaaaaacggttaacattgttacatttgattataaatcagtgaatctgagtatagtttgcttaatattgatgccaaaaataatcactttcaattgattttggtaaataaaacagacatgaaatcattttgtttc

SEQ ID NO: 213249 - DNA, 531 bp, Homo sapiens
cattcaaatttaagttctcaaatttcatcacaaatttgagcaatcatgacaaaaagttaagcagcatgatcaacccttgaacacttgctcacatttgtgttatattcaatataatatactctcaatgaagcatctcatagatacttatgatacaacctctgctagaaagcttgggtatcctcacttaatagaatatcacctatatagattcagatgaataaacagtttgttgtttgggggtggkcatagtttccacagtgattctgaatcagcatgatggatagtcagattacaaaggcatgctgattagtatgatcatttacttaccattctttgtttatttgccagtcatcttactggccctgtgctcttactttgtgccatctttaagtgtctttgtagattacgtaaatcagagttgggaaaaaaagtcttaatgaatcctatccttggtgctgcaggattgtcctttatattgttccatcccatggctgtcctggatatgtgaacagtgcaggagaaaaaactctc

SEQ ID NO: 213250 - DNA, 531 bp, Homo sapiens
cattcaaatttaagttctcaaatttcatcacaaatttgagcaatcatgacaaaaagttaagcagcatgatcaacccttgaacacttgctcacatttgtgttatattcaatataatatactctcaatgaagcatctcatagatacttatgatacaacctctgctagaaagcttgggtatcctcacttaatagaatatcacctatatagattcagatgaataaacagtttgttgtttgggggtggtcatagtttccacagtgattctkaatcagcatgatggatagtcagattacaaaggcatgctgattagtatgatcatttacttaccattctttgtttatttgccagtcatcttactggccctgtgctcttactttgtgccatctttaagtgtctttgtagattacgtaaatcagagttgggaaaaaaagtcttaatgaatcctatccttggtgctgcaggattgtcctttatattgttccatcccatggctgtcctggatatgtgaacagtgcaggagaaaaaactctc

SEQ ID NO: 213251 - DNA, 531 bp, Homo sapiens
cattcaaatttaagttctcaaatttcatcacaaatttgagcaatcatgacaaaaagttaagcagcatgatcaacccttgaacacttgctcacatttgtgttatattcaatataatatactctcaatgaagcatctcatagatacttatgatacaacctctgctagaaagcttgggtatcctcacttaatagaatatcacctatatagattcagatgaataaacagtttgttgtttgggggtggtcatagtttccacagtgattctgaatcagcatgatggatagtcagattacaaaggcatgctgatyagtatgatcatttacttaccattctttgtttatttgccagtcatcttactggccctgtgctcttactttgtgccatctttaagtgtctttgtagattacgtaaatcagagttgggaaaaaaagtcttaatgaatcctatccttggtgctgcaggattgtcctttatattgttccatcccatggctgtcctggatatgtgaacagtgcaggagaaaaaactctc

SEQ ID NO: 213252 - DNA, 531 bp, Homo sapiens
cattcaaatttaagttctcaaatttcatcacaaatttgagcaatcatgacaaaaagttaagcagcatgatcaacccttgaacacttgctcacatttgtgttatattcaatataatatactctcaatgaagcatctcatagatacttatgatacaacctctgctagaaagcttgggtatcctcacttaatagaatatcacctatatagattcagatgaataaacagtttgttgtttgggggtggtcatagtttccacagtgattctgaatcagcatgatggatagtcagattacaaaggcatgctgattagtatgatcatttacttaccattctttgtttatttgccagtcatcttactggccctgtgctcttactttgtgccatctttaagtgtctytgtagattacgtaaatcagagttgggaaaaaaagtcttaatgaatcctatccttggtgctgcaggattgtcctttatattgttccatcccatggctgtcctggatatgtgaacagtgcaggagaaaaaactctc

SEQ ID NO: 213253 - DNA, 660 bp, Homo sapiens
catttttaaaaataaagtttttcatctaggtaaaagaaaaaagtcagttgtagagtagatggtcagcaatggaggagaataaagggaattttccaaggtctgggaaggcagggttcacccaaggaatttaagtcttgtcatcccactggaacggttatccttagagtggaggaaaacgaatctggcatttgtattagcccaatgccatgaaatatgccattcacataagtaatcctcttgatctgactgtgtgttcccttccaatgacaagcccgcattcaggtaacttggatataaagaaagaatgagcagagaaatttggtggttgctccccataggcctctgtttctcattgtaaagcttggcactctacttcctagtcatatctgtgagctcrtgtgaatctacacctgtgaatgagatccagtctcttcttacttacaaatcaattttaagtctgtggtactaagggacagaatgtggaccttggtaaaatcaccaagcattgccataggtgtgttggtaggcaatcagtcaccattcccggggaagcctctgaatcactacacattttattcaaacacccagattaagtacagatgcatttcaaagaaggagaaatcatctgagaggggtagcacaagatttcatcatattcat

SEQ ID NO: 213254 - DNA, 566 bp, Homo sapiens
tctttgtttgtttctttttttaaatttttactttaagttctgggatatttgtgcagaatgtgtaggtttgctacataggcatacatgtgccacagtagtttgctgcacctatcaacccatcatctaggttttaagccctgcatgtattaggtatttgtcctaatgctctccctccccttgaccccaccccccgagaggcatggtgtgtgatgttccctttcctgtgtccatgtgttctcattgttcaactcccatttataagtgagaacatgtggtrtttggttttctgttcctgtgctagtttgctgagaatgatggtttccagcttcatccatgtctctgcaaatgacacgaactcattcttttttatggctgcatagtataccatggtggatatgtgccacattttctttatccagtctatcattgatgggattccctttatttctttctcttgtctgatcgctctggccaggatttccagtactatattgaatagaagtagtgagaatggtcatccttgtcttgttctagttatcacggggaatgctttcaacttttccccg

SEQ ID NO: 213255 - DNA, 635 bp, Homo sapiens
tctacagtttaacaagattcccaggtgattcttatgtacacttaagtttgagaaatatcgccaatagttctcaactctggttgcatgttgaaaatcacttggagaactttaaaaatgttacatgtgtctactcctagcscccaggaaagattctgatttaattggtataatgtaaggcctgaatattagtgctttttaaaagttcccaggtgattctaatgtgcagtcatcattgaaagtctcgctcctgccccaggtgtgctttcatgcagtaatgcttagaaatacctcagctcccttatcaataaggacttaaatacttaaacagctttactcatttagcaacatcaaaaaggctaaacaaagagatatactcaaaaaccctccctgtattattacttacaaccgcatgtgagcatacaattaaaaaacagataacaatttttaaagttcacatggacacacacattttgttctgcatatttgtataataaaacctaggtctacagactcacatatctcctattgccatttaaaaaaaataaatacagttacattaaaggactcagaggattccaaatgaaaagtgtaagtctctcttctccaataaatctatcttcccaaacataataact

SEQ ID NO: 213256 - DNA, 559 bp, Homo sapiens
tcttctcctgtttttatctttacaatttattttaattttttttaagtgttgttgttgttctgcttgccagagtcctattttttgcttttctgaagactccctaaacaatcatttctccaatatttcatgttattgtacattccattattacaggtatacacaacatgagarcttatctctgactctagaaaagaatcatcttaatctgcataaattcattcgaatacattaaataccctctaagagagagtaaaggtttaatttcggtaaacgcagtactgttttctcttgtctacaaattccttggatacctggttagatgtaatatgtgcctgttttcatgggttttgaatttttgggtgactacataaatatctataatcatatacttcttcctctaccttatgaaagccagtctctgagacaggcttcctggtgtattgcatactgattttcatgtcaccccagactacatttttttccttctgctattcctcattgccattttatcctaaaacattaaatgagttggtgagaaaatgcagatcttctgagtgct

SEQ ID NO: 213257 - DNA, 495 bp, Homo sapiens
cacctgacaaaggtctaaatccagaatatatgggaaagcaaacaccttaacagtgaaaaagttagtagtccaactaataagtgggtaaaggctctgagtagattatttttcaaaggaagacacacaaatggccaatatatgaaamagtactcaatatcatctcaccacagttagaatggctactatcaggaagacaaaaagtaaaaaatgctagtgaggttggggagaaaaagggaactcttatgcactggtgtaggaaatagcaaattactataaccgttatgaaaaacagtgtggaggcttctgtaaaaactaaaaatagaactgtggtgtgatccagcaatcctactattgagtatttatccaaaagaaagaaaatcaatgtatcaaaggacaccagcacccccatgtttattgcagcactattcacaataactaagatgtggaattaaccttaatgtttatcaacagatgattgtggttgatgaataaaga

SEQ ID NO: 213258 - DNA, 606 bp, Homo sapiens
gaaagaatttcagagcttcaagaaaaggcttttgaattagcccaatcagacaaaataattttttaagtttttttaacttgaaaaaatgaacgaagtctcaaaaaaagtcagattatgttaaaacatccaaacgcaagaatcattggtgttcctgaggagaagaaaaagcagagtttggaaaatatatttgaaggaataattgaggaaaacttccctgacctttagacatccagatacaaaaagcacaaagaactcctgggagaatcattgcaaaaggacatcatcaaggcatatagtatcaggctatctaaagtcaatgtgaaggaaagaattgtaagagcagtgagacaaaagcatcaggtaacctataaaggaaaacctatcacactaatggtaggcttctcagcagaaaatttttaagccaggaaggactggggtcctatctttagtctctttaagcagaataacyatcaggcaagaattatatatccagcaaaactaagttacataaatgaaggagaagtaacatctttctcagataagcaaatgctgagggaatttgttactacaagaaatggtaaaaggagttctaaattttgaaacaaa

SEQ ID NO: 213259 - DNA, 606 bp, Homo sapiens
gaaagaatttcagagcttcaagaaaaggcttttgaattagcccaatcagacaaaataattttttaagtttttttaacttgaaaaaatgaacgaagtctcaaaaaaagtcagattatgttaaaacatccaaacgcaagaatcattggtgttcctgaggagaagaaaaagcagagtttggaaaatatatttgaaggaataattgaggaaaacttccctgacctttagacatccagatacaaaaagcacaaagaactcctgggagaatcattgcaaaaggacatcatcaaggcatatagtatcaggctatctaaagtcaatgtgaaggaaagaattgtaagagcagtgagacaaaagcatcaggtaacctataaaggaaaacctatcacactaatggtaggcttctcagcagaaaatttttaagccaggaaggactggggtcctatctttagtctctttaagcagaataaccrtcaggcaagaattatatatccagcaaaactaagttacataaatgaaggagaagtaacatctttctcagataagcaaatgctgagggaatttgttactacaagaaatggtaaaaggagttctaaattttgaaacaaa

SEQ ID NO: 213260 - DNA, 601 bp, Homo sapiens
atggtaggcttctcagcagaaaatttttaagccaggaaggactggggtcctatctttagtctctttaagcagaataaccatcaggcaagaattatatatccagcaaaactaagttacataaatgaaggagaagtaacatctttctcagataagcaaatgctgagggaatttgttmctacaagaaatggtaaaaggagttctaaattttgaaacaaaaggtcaatgctccctggaatagaaacttttgggccaggcatggtggctcacacctgtaatcctagcactttgggaggccgaggtgggcagatcatctgaggtcaggaattcaacaccagtcaggccaacatggtgaaaccccatctctactaaaaatacaaaaattagcctggcatggtggcacatatctgtaatctcagctacttgggaagctgaggcatgagattcgcttgaacctgggaggcagaggttgcagtcaattgagattctcccagtgtactccagcctgggcaatagagtaagactacatctcaaaaaaaaaaaaaaaaaacttttgaaagcataaaattcatagggcatataaagcaataacaaggaagaaaca

SEQ ID NO: 213261 - DNA, 601 bp, Homo sapiens
atggtaggcttctcagcagaaaatttttaagccaggaaggactggggtcctatctttagtctctttaagcagaataaccatcaggcaagaattatatatccagcaaaactaagttacataaatgaaggagaagtaacatctttctcagataagcaaatgctgagggaatttgttaytacaagaaatggtaaaaggagttctaaattttgaaacaaaaggtcaatgctccctggaatagaaacttttgggccaggcatggtggctcacacctgtaatcctagcactttgggaggccgaggtgggcagatcatctgaggtcaggaattcaacaccagtcaggccaacatggtgaaaccccatctctactaaaaatacaaaaattagcctggcatggtggcacatatctgtaatctcagctacttgggaagctgaggcatgagattcgcttgaacctgggaggcagaggttgcagtcaattgagattctcccagtgtactccagcctgggcaatagagtaagactacatctcaaaaaaaaaaaaaaaaaacttttgaaagcataaaattcatagggcatataaagcaataacaaggaagaaaca

SEQ ID NO: 213262 - DNA, 603 bp, Homo sapiens
agatgggcccaatattcttattacaggaatggatgtatcgtgttcttctgttgattaatggatacttaggtttataattattygctattaaactctccttatatattaatattttgtgtatatttaggtaatttttataggatagttacatgtcaaagtatacacattaaaaatttgatacaaactgtcacattatgtcttagtaaggctgtgtaacaatttatgcacccagatgtatgaaattgccttaacagttttggatagtgtcaattttgacagtctttaaaatatgtaattaattttgcatttttctgataataaggtatggtattttcttgaatgtttattggttgtttattatttttctggtgaattgcttgcttgtattctgtgctggattttccttaaagttgtttccctttttcgaattgatgtttagtagatatgttagggatgttgacctttgcttctcagagtctgttgcttatttttgacatttgttttgcttttggttatatgaatgttttccatttttatctagtcaaatctattattctctttcctttaaaacttctaggtttataaaatttaaaaaggttaagt

SEQ ID NO: 213263 - DNA, 571 bp, Homo sapiens
gagatgggggcaggggcgtttctgagtctgtggcggtaggtacgggccctgactttcttcttctttcgccgccgccgccgccgccagcagaggtggcggagctacccctttcctccgctccccccctccacgaggaggctcctggtgtgcgcggcctgccccggctcgctcctccccttccctctccgctcctcgtcaggaggagggagagcaacgggacttgctggttgggccctaacctccacaacccctccttctcgcctcgctctttcggcttttcccctcagccctgacgtacgaccgggagcgcgcccgcaattcacgctcagagaaagccgaagatgagaggtggccggggcaagagaggcgggaacaaagttrccgcgcactggcgtgctcgctcccgccatggggccggcaggccgcaccggaagtggcatgatgtagaaaccgctcggcttcccggcgagggtgggactccgtgtgaagaagggttaaagaaaggagaggattcgtgtgccgcccactgctgttgcttgagactctgcccgtggtggcgcgcctgtcgtgc

SEQ ID NO: 213264 - DNA, 605 bp, Homo sapiens
tgcttttctgaaacttgtcttttagtaacaaagattcacgattgcatttttaaaaaatctccctgctatggccatttgcaaatagaatcctggcaactatttttcccctctaaatatacattaatttttttttaaatagacccctagaatctcatttcattgtaggacattctccctctaaaatttagcctcctaattctccttagatgcggctaaccaggaagatggttttagcctctgggcaggtctgaattaagctgrgtacgcatacactgggtatgaccgtgctgattggtcatatcagaaaggcctggtgctggtgggtaaagagccactatgctgagccccatcagctgcagcccccgcccccaccgagatattctccctttccacagatccagcaacaccacttagcatccaggaaaggaggggtaccctggaggaatggtacactgggggagtggtacttcctgcagtgccactgcatctgttctgattgaggagggaagtgctgtgctcatagttaactgtgttgctgatcacctaggcatctaggagttaactcacaaagcctgcactgagagaacgagttgaggatttaattc

SEQ ID NO: 213265 - DNA, 583 bp, Homo sapiens
cagttggcgaatagcaaagatcatcccctagagcatacagggtcattatttggagaagggattcagctttcctgagatcctgggggcagttkcctctgtggatttgctccctatttctgttgacactcattcatgacctgcggcttctaaattcgtacctctgctcctattatatggctcttgcagaacttgaaaaaatatttaatcagagtttagtcgggtcaaattttaaagtgccaaggcttttgtttaatattgaaaaatatggatgaacttagaaactgaccaaaagatattattaggagtgtaagataactggaagtaaaacaggtgtttgccttcatttggttatatagatgagaaaggatgtagaggtctcttcttgtattaattttagattaatttataaccatttagtaaccattttagctaaaatcagcgtaaaaagaaagggcaataagaatttaagagttttaaactttcctctagcttgttttagtattacatttttgttactacatagttaaaatcacaaagagatacatgaattggaacataattacatgtaatttaaacagaaaca

SEQ ID NO: 213266 - DNA, 404 bp, Homo sapiens
tgcaagtcactatagatacagaaatgcatgaggcatatgccttgccctatataaacttacagttcaagtgggaaagagagayggagagacaagataacacgtaaactgctatataacatggtaaatgtaatgaatgtctgtttaagtgtcactgtgcccagaatattagacaacaaatggtgaatagttacacaggtaccataagacattgtttctgcctgaggaatatggatcttactggagagtgtattagtgaagtggagataagtgtgggtgggcagatgccaggagagttatttcagaggcttttaagagtgtcgtcattgagaacagatagggtggtggttaccagaatagcagaatgtatatttgagataggtcatggagaaagaatgccagaattc

SEQ ID NO: 213267 - DNA, 398 bp, Homo sapiens
aatagttacacaggtaccataagacattgtttctgcctgaggaatatggatcttactggagagtgtattagtgaagtggagataagtgtgggtgggcagatgccaggagagttatttcagaggcttttaagagtgtcgtcattgagaacagatagggtggtggttaccagaatagcagaatgtatatttgagataggtcatggagaaagaatgccagaattcagtgaaagggaaaaatagaggcagttgcatagttggcktacaggaataggcagacagctttgctactgactgtgatggagagattacacatttccttgcagtgttgccaaattaatctgcttgtttcatggttaggtagaacataatctgcacagtgtcatctgagagacacagtg

SEQ ID NO: 213268 - DNA, 387 bp, Homo sapiens
gcagcacccctggcctctactcactagatgccagtgacactccacgcacagttgtgacaaccaaatatgtctccagacattgccaaatgtcccccggggtaggggwattatccacacttgaaaaccactgggctaatagaaggctgaaggaaaaatgtttctggttgcaagaggcttgcattaaggatgtgagtaaggatattgctctataacaaacacaaatgggactaactcagatttaggggccctgtcatgtgttccagtcctcctttgcacatgtccttacttagctattctcattaatgtaccataatccctggttttcttattttacttgcccattattttacatataataagaatgtaatcaatgttggtgagttaatg

SEQ ID NO: 213269 - DNA, 387 bp, Homo sapiens
gcagcacccctggcctctactcactagatgccagtgacactccacgcacagttgtgacaaccaaatatgtctccagacattgccaaatgtcccccggggtaggggtattatccacacttgaaaaccactgggctaatagaaggctgaaggaaaaatgtttctggttgcaagaggcttgcattaaggatgtgagtaaggatattgctctataacaaayacaaatgggactaactcagatttaggggccctgtcatgtgttccagtcctcctttgcacatgtccttacttagctattctcattaatgtaccataatccctggttttcttattttacttgcccattattttacatataataagaatgtaatcaatgttggtgagttaatg

SEQ ID NO: 213270 - DNA, 589 bp, Homo sapiens
tgagagtgctgtaggtagcattggttgcattttaaatagggtggtcagggtagaccttactgaaaaggtcaatgttaagcaaagtcaaaaaaaaaaatagccttgcaaatcatgtgaagggttgtctctggagttgtgccacacagcaactctggagccagggtccagaaagtagccaagtaagaaatgagattttagtgatgaggaatcattgtgcagatcataaggcccttgtaaaatttgggggtttacttgaatcaaatggagatccactggaaagttttgagcagaagggtgatataatgagactttaagttttaaaaggatcagtcaggctgcttgcaaggtgctagggagaggggtagagggtaggtgtggaagcaagggatatggttaggagaccactgcagaaatataggcatgagatgacagtaactcagarcagaattatttataactagtccaaaacatttttatccctgtggctatgtctcaaaaatatgtcagctatttccttttggttgtgtttactacagagaaggataattcttcagtgtttttaagaacatgtaaatatttttgacccaag

SEQ ID NO: 213271 - DNA, 589 bp, Homo sapiens
tgagagtgctgtaggtagcattggttgcattttaaatagggtggtcagggtagaccttactgaaaaggtcaatgttaagcaaagtcaaaaaaaaaaatagccttgcaaatcatgtgaagggttgtctctggagttgtgccacacagcaactctggagccagggtccagaaagtagccaagtaagaaatgagattttagtgatgaggaatcattgtgcagatcataaggcccttgtaaaatttgggggtttacttgaatcaaatggagatccactggaaagttttgagcagaagggtgatataatgagactttaagttttaaaaggatcagtcaggctgcttgcaaggtgctagggagaggggtagagggtaggtgtggaagcaagggatatggttaggagaccactgcagaaatataggcatgagatgacagtaactcagagcagaattatttataactagtccaaaacatttttatccctgtggctatgtctcaaaaatatgtcagctatttccttttgrttgtgtttactacagagaaggataattcttcagtgtttttaagaacatgtaaatatttttgacccaag

SEQ ID NO: 213272 - DNA, 566 bp, Homo sapiens
tttgtggctgcccgttgtccaaaattctgaatgcctttcctttcagtattgaggaattatgcaaagaagaaacgtattgcatgatacctcatgcttggaatactaatagaaagttctgaattgagatttctgtagacaacagtgcatccttttggtttttttccatcaggttattttcacagaagcaagtaaatttcattgttgcccttgcagctgactatgggatgmactttaatatatcagagaaacgaaaggtgaatggtctaactagttaaacttttgaagatctttttgctgtgaaatcagatttccctgtttcattctctgctagctttctgtgtgtttactttagacaagtaaccatatttgaatgcttcaggtttctcatgtgtaagggcagatagcaaagcgagtttggttgggaacttcaaaaaagctttcttaaactgcagcgtgagaatcacatgcattctaataagacaagatttaaaatgtggatggggaaacacctggcttttcagaagcatctgcactgttattgacatgcagcatggcttctatgatcg

SEQ ID NO: 213273 - DNA, 566 bp, Homo sapiens
tttgtggctgcccgttgtccaaaattctgaatgcctttcctttcagtattgaggaattatgcaaagaagaaacgtattgcatgatacctcatgcttggaatactaatagaaagttctgaattgagatttctgtagacaacagtgcatccttttggtttttttccatcaggttattttcacagaagcaagtaaatttcattgttgcccttgcagctgactatgggatgaactttaatatatcagagaaacgaaaggtgaatggtctaactagttaaacttttgaagatctttttgctgtgaaatcagatttccctgtttcattctctgctagctttctgtgtgtttactttagacaagtaaccatatttgaatgcttcaggtttctcatgtgtaagggcagatagcaaagcgagtttggttgggaacttcaaaaaagcyttcttaaactgcagcgtgagaatcacatgcattctaataagacaagatttaaaatgtggatggggaaacacctggcttttcagaagcatctgcactgttattgacatgcagcatggcttctatgatcg

SEQ ID NO: 213274 - DNA, 572 bp, Homo sapiens
ttttcttcagacaccagcaactgttccatgaggaagacctagtaatattttcatagatagcaatgtccccataatgattttgatgaaatgtactgaggggtaacgtmctattttaaaaattaaaccattgttttctaagaattgctaattaatttatctgttagtggtttatcccttataaatatgagtactattatcatcccaacatatgatttccaactttccatgagtcttagagatcatatatattccttcaataagaaggaacaggctgacataatatttaagtcttgagtagagacaaggtattggaagggaggaattgaagataacatggtattttatgtctgagtaaatgagagaaaaaatcttcattggcagagagattgattttctgtatacatgttctatcaactactatgagagaggtgttgatgtctcctattacatgtggaaagatctatttctcctttcagttctatcaaattttgctgtatatattgtgaagttctgtgatgagttcatttatgtttcaggtttttatgtttcttagagagctgatccttttatta

SEQ ID NO: 213275 - DNA, 605 bp, Homo sapiens
tttttaaaaacagtaaaaataaaattaaatactttcagctgatgaatggataagcaatctgtgctctatcaatactatagaatactgctcagcaataaaaaggaagagaatacagatacacacagcaacatggataaatctcaaatgttatactgaatgaaagcagccagattaaaagtttacttcgtatatgagtccatttatatgacattgaagaagaggcaaaattttagtgataaaaagccaatcagtaggtaataggaactgaggattggagttggtttgtcttaaaagagcacaaaggaattcttatgtgatgacacttttctatattttggttgtggtattatgtctggctcaatccatttgtcagactataataaaaaggataatttttactgtatgtaaattatgattcaataaacctgacttaagaaataatatgattattctattactttaaatcctcaattattctgttatccaaaggtgaaattcacactctatgaaatgacatatgtgtcttttagtttattagtttgttagcttataatttgtcctagttagsctttcctatgctcctctttccatattctttagccaaa

SEQ ID NO: 213276 - DNA, 605 bp, Homo sapiens
tttttaaaaacagtaaaaataaaattaaatactttcagctgatgaatggataagcaatctgtgctctatcaatactatagaatactgctcagcaataaaaaggaagagaatacagatacacacagcaacatggataaatctcaaatgttatactgaatgaaagcagccagattaaaagtttacttcgtatatgagtccatttatatgacattgaagaagaggcaaaattttagtgataaaaagccaatcagtaggtaataggaactgaggattggagttggtttgtcttaaaagagcacaaaggaattcttatgtgatgacacttttctatattttggttgtggtattatgtctggctcaatccatttgtcagactataataaaaaggataatttttactgtatgtaaattatgattcaataaacctgacttaagaaataatatgattattctattactttaaatcctcaattattctgttatccaaaggtgaaattcacactctatgaaatgacatatgtgtcttttagtttattagtttgttagcttataatttgtcctagttagccttycctatgctcctctttccatattctttagccaaa

SEQ ID NO: 213277 - DNA, 545 bp, Homo sapiens
agactttgtaggcagcatatactttggtattttttaagtccatttagctggtctagatattttaattggggaatttatatcatttaaattcaaggttattactgatagatgggaacttcctcattttgttacttgtttttttattcttttatatatattcttcatcattcttcttctcttattgtttatctttgtaatcttttgattttctgtggtgataacrtttgatttctttatccttctttaggtatctgttctaccagttaattttatacttttatgtgttttcatgataataaatgtcatcctttttcttctacatgtaggactcccttaagcatttaatgtgaggtcagtctaatggtgattaattccctcagtttttgcttgtttgggaaatactttttatttatcttcatttctgaaggagagttttgcttagtatggtactcttggctgactttttttttttctttcagcaccttgaatttatcatcccattctctccagactcctgaggtttctgctgagaaatatgtcattag

SEQ ID NO: 213278 - DNA, 530 bp, Homo sapiens
tggggttttctagatataggatcatgtcatctgcaaacaaaaacagttcgacctgatgtcagtgggaacattcctatataaggtgtctggcaaccccttttgggtggtctcacccaatcaggaggcaaaggatcagggacctgcytaatgaaggattctggctgccccttggtggaggaggtgtgctatgctggaggaatcccattcatctggactgcctggatttttcagagccagcagggtgaaagtctgctgatttgcagagacagcagctgcccctcccaacaggggctcaggttccagggagctcagagttctatcactaaaaccctggctggagttgctaaaattcctgcagggaagccccacctggtgaggagggatgggtcagggtctggcctaaagaggcagtctggccacgatcttccacaactgctgtgctgtgctgtgggggactcctccttggtccaaaccatccagtctccccagcaccggcagagaaaaaaacgactgacttgagctgcagtgat

SEQ ID NO: 213279 - DNA, 590 bp, Homo sapiens
ttgtttaattctaatctccttggtctaacacccttggaatccaccctcatacctgttctcaaggtgtctgttgacatatatttgcaaaatcttgaaatattttgtgtgtaagctatttcctcttggatcatagtgtgtacctggcctccaggatcatgctgatatttgattttagctatgagtctggtgcaaagaggaggtgatagtggtgagtttgagaaaaataagtatccctctacaaaacatatgccctgatgaggttatcaatgagttttcaggaaagtaagaccagtctccttagacacagatgacctgctacttccactgtcaagagaggctcagagtgactgagtctcagtttcagtggagtcctgttaaagcttttatttcagttttcaaggtctcattcctttccaatcaaaactctaaatttcatatgagaaactggacaatattataagttaaatcaacattctaattctgtaaccascacaattaattttatgtttgataattaataatcttggctctatggctgtaggaaatgagagattagccaggcacgactaattagctcacaccagtaatcc

SEQ ID NO: 213280 - DNA, 590 bp, Homo sapiens
ttgtttaattctaatctccttggtctaacacccttggaatccaccctcatacctgttctcaaggtgtctgttgacatatatttgcaaaatcttgaaatattttgtgtgtaagctatttcctcttggatcatagtgtgtacctggcctccaggatcatgctgatatttgattttagctatgagtctggtgcaaagaggaggtgatagtggtgagtttgagaaaaataagtatccctctacaaaacatatgccctgatgaggttatcaatgagttttcaggaaagtaagaccagtctccttagacacagatgacctgctacttccactgtcaagagaggctcagagtgactgagtctcagtttcagtggagtcctgttaaagcttttatttcagttttcaaggtctcattcctttccaatcaaaactctaaatttcatatgagaaactggacaatattataagttaaatcaacattctaattctgtaaccaccacaattaattttatgtttgataattaataatcttggctctatggctgtaggaaatgagagattagccaggcacgrctaattagctcacaccagtaatcc

SEQ ID NO: 213281 - DNA, 582 bp, Homo sapiens
atcttgtctgtgctcttgttaatatggtacaaatacaaaagttttttatgtaggttcattttgactgataagaggatgtaaaggcataaaagtcattattacctagacaattatacaaaatttattctttttaattagtttccattatcttttatgaaggagctgcctatttttttattttatttttatttttggacaatagtcaaaaccactagttttaaaagagcagctycagttttgctttacctgtctgagatatgtaagtgtttcagaaaattttggagctgatcatccctaagactatagagctgttgacaaattacaaaatgctctaaggataatgtttttttgaaaataaagttgactgtatatcctcccttttcacaggtcatttgcagctcttaaaaaaaaaaataccaaaatatattaggctcaaggaaagctgctcagtccacttttgctgctctctgcatctatccatacaaagaaaaatggatgtggtaaaacattttctgactaacacataaatgcttcagctcttatctcctagaaaaactgtagaaaaaacctgtattttaagtg

SEQ ID NO: 213282 - DNA, 567 bp, Homo sapiens
atcatgggggtgggtctttcctctgctgttctcgtgatagtgaataagtttcatgagatctgatggttttatgaagaggagttaccctgcacaagctctctttctttgcctgctgccttccatgtaagacatgacttgctcctccttaccttccacaatgattgtgaggcctcccaaccatgtgaaactataagtccattaaacctcttttgtaaattgcccagtttcaagtacrtctttatcagtgtcatgaaaatgaactaatacacagtcatttgtaaaaatctctcataagagagaaataagacatagttttacacatacaaattgagaagtgaccacaaaagaaaagagtataattaccaaaatatacactgacggagcactctgtgtaaggcaaggaagttgttttaattattggctatgttgaggggttagtgtaaaaaacagaggtcaaaaatcttttttgtaaaatgctaaatattcatgattttaggctttgagaaccagaaggtctctgtaattaactactctgtcattctagcacaaaagcagctatagataaca

SEQ ID NO: 213283 - DNA, 572 bp, Homo sapiens
atttttaaactaatcatggcagcaagaagaataaaaaaaaagaactcaacagctgggatgccctttaagccgagagtagttttggatccttcttaaccataaagctactatgcacttggtgaaagggggataaaatcacaataccarcaacaaaattacttgtattttaatggaatatttccaagccttgaacaattctgggtgcttaatagtgcatagatttttcttgaaatgaaaattatgtaaatataaggcctggggttttctatttgctcatggattttcaaagttcactaatgaaatatcccagcaagatttacttgttttacaccacagactcgtatttttatataatagagtattatatacctgtgcaatataagagatcatattacctgtgcgtgtgtatgatgctactgacctacaaaatacagaattatgctttccataacaacaaccctcacaaaagcattataacataggttataaatataacttgtcattaggtaactgcgttttattttcctttgagtatattaaaataaatcacattaaattatatgctttatttc

SEQ ID NO: 213284 - DNA, 614 bp, Homo sapiens
gatatctggctttttttttcttttggccttcacagggtttttaaaaatttgtgtgtgtgtgtgtgtgtgtgtgtgtgtgtgtgtgtataaaaccaacatttaaaaatggagagatttcacattgtcttgatactccacccccgccaaaaaaaaaaaaaaaaaaaaaaaaaaaaatagtaacactctaatgtcacatttgctgccactgaagttgaraaattgcttactgggtaaccataatcccttttctccctactaaaactgaagtttgaatcagtaacaataaatgttcattttatttttacaacgatagaataatattttatatgcctatatctctgtaatacatggaaaattcaaagcaggaagtggaagagaaggagagaaagataaattcatgtaggcatttgactttaatctttcctcagatcagtttcttatctgatctatcagccgccaaaagtagcaattgagttgattaggtggcaaattgtcatgtaagtagtgcacacaaccacatgattctccagaccattttaacgcaacagaattctttacacttgtcttgatttcttgtgtgttttattagaagaaattggagtctgaattttttt

SEQ ID NO: 213285 - DNA, 574 bp, Homo sapiens
tgtgctgaaactagaaacccaaaatgatggtaactgaagtggcactaaggccctaagttttgtcacaccgttacctaagtgagaatgtgatggttaatactgagtgtcaacttgactggattgaaggatgcaaagtattgatcctgggtgtgtctgtgaaggtgttgccaaaggagattaacatttaagtcagtgggctgggaaaggcagacccactttaatctgagtgggcacaatctaatcagctgccaatgtgatcagaataaaagcaggcagaasaacgtggagagatcagactggcttagcctctcagcctacatttttttctgtgctggacgcctcctgtcctcgaacattagactccaagtccttcagctttgggactcaaactggcttccttgctccttggcttgcagacggcctattgtgagaccttgtgatcgtgtgcattaatactgcttaataaacttccctttttatatgcatctatcttattagttctgtccctctagagaactctgactaatacagagaagttaatcaaaatggaggaatttttttaaagaaaattatg

SEQ ID NO: 213286 - DNA, 574 bp, Homo sapiens
tgtgctgaaactagaaacccaaaatgatggtaactgaagtggcactaaggccctaagttttgtcacaccgttacctaagtgagaatgtgatggttaatactgagtgtcaacttgactggattgaaggatgcaaagtattgatcctgggtgtgtctgtgaaggtgttgccaaaggagattaacatttaagtcagtgggctgggaaaggcagacccactttaatctgagtgggcacaatctaatcagctgccaatgtgatcagaataaaagcaggcagaacaacgtggagagatcagactggyttagcctctcagcctacatttttttctgtgctggacgcctcctgtcctcgaacattagactccaagtccttcagctttgggactcaaactggcttccttgctccttggcttgcagacggcctattgtgagaccttgtgatcgtgtgcattaatactgcttaataaacttccctttttatatgcatctatcttattagttctgtccctctagagaactctgactaatacagagaagttaatcaaaatggaggaatttttttaaagaaaattatg

SEQ ID NO: 213287 - DNA, 574 bp, Homo sapiens
tgtgctgaaactagaaacccaaaatgatggtaactgaagtggcactaaggccctaagttttgtcacaccgttacctaagtgagaatgtgatggttaatactgagtgtcaacttgactggattgaaggatgcaaagtattgatcctgggtgtgtctgtgaaggtgttgccaaaggagattaacatttaagtcagtgggctgggaaaggcagacccactttaatctgagtgggcacaatctaatcagctgccaatgtgatcagaataaaagcaggcagaacaacgtggagagatcagactggcttagcctctcagcctacatttttttctgtgctggaygcctcctgtcctcgaacattagactccaagtccttcagctttgggactcaaactggcttccttgctccttggcttgcagacggcctattgtgagaccttgtgatcgtgtgcattaatactgcttaataaacttccctttttatatgcatctatcttattagttctgtccctctagagaactctgactaatacagagaagttaatcaaaatggaggaatttttttaaagaaaattatg

SEQ ID NO: 213288 - DNA, 574 bp, Homo sapiens
tgtgctgaaactagaaacccaaaatgatggtaactgaagtggcactaaggccctaagttttgtcacaccgttacctaagtgagaatgtgatggttaatactgagtgtcaacttgactggattgaaggatgcaaagtattgatcctgggtgtgtctgtgaaggtgttgccaaaggagattaacatttaagtcagtgggctgggaaaggcagacccactttaatctgagtgggcacaatctaatcagctgccaatgtgatcagaataaaagcaggcagaacaacgtggagagatcagactggcttagcctctcagcctacatttttttctgtgctggacgcctcctgtcctcgaacattagactccaagtccttcagctttgggactcaaactggcttccttgctccttggcttgmagacggcctattgtgagaccttgtgatcgtgtgcattaatactgcttaataaacttccctttttatatgcatctatcttattagttctgtccctctagagaactctgactaatacagagaagttaatcaaaatggaggaatttttttaaagaaaattatg

SEQ ID NO: 213289 - DNA, 584 bp, Homo sapiens
ggtgcttctctattatagatattcactggacactataaatggtttgcttatsagctggaaagagggcattaacacagctttcaaaagtttactttcacaataaaatacatacactaaggaaacaactcagtaatgctggtgaaggaatcctatcgataggaattcaacttctaccagataaattctcaaaaatttactcccataagtatcataactttaaatcctgatgctccaagcaaacattttcttcctttactaatttcaaaatagataactctccagcagtgaggcacttctttctttagctttgagacttgtcacaaagattggtttttaattatttatgcctacggttcagattagtttaattatccaccttttcatcatagcatcagcgatcacatgaagaccctgcagctctgaagtttagcttctacgaagtgatctcagcagggccccgtgcaccctcggagctcagagccttgcagaagagatgtttggtcccagggtggtatgccagccacatcgagagatggcttgtttatttccccccatttcaggtatggagtaataaggatttacat

SEQ ID NO: 213290 - DNA, 613 bp, Homo sapiens
cccaacagctagtttttcaactcttgcctctctcccttcctcccctctctggcagtccccagtgtctactgctgccatctttatgaccatgagtatccaacgtttagcttccacttataagtgagaatatgtggtatttggttttytgttcctgcattaattcacgtaggataatagcctccagctgcatctatgttgctgcaaaggatatgatttcattgctttccatggctgtgtaatattctgtggtgtccctctttgagtggtacaaagaagtacacagatcaacttaggagacaattcagtagcctgttcaaaataacccactaaatgccaggaagtaacagtttggagacaaatttggttagataggtgacttttcaatttagctttggtttaatcttgagtcttctcagagcctagataaaagcctaagaagaaagcaccacaggattgggtcatgtagtgcatctacagtgtacctagttgtacagacattttctagaggctggtgggtgacctaaggtcaagtagcccatttcttgaccagcttatacttttacagtcatcttatttttcagtgatgaacactctaatatctcctaagtgccct

SEQ ID NO: 213291 - DNA, 613 bp, Homo sapiens
cccaacagctagtttttcaactcttgcctctctcccttcctcccctctctggcagtccccagtgtctactgctgccatctttatgaccatgagtatccaacgtttagcttccacttataagtgagaatatgtggtatttggttttttgttcctgcattaattcacgtaggataatagcctccagctgcatctatgttgctgcaaaggatatgatttcattgctttccatggctgtgtaatattctgtggtgtccctctttgagtggtacaaagaagtacacagatcaacttaggagacaattcagtagcctgttcaaaataacccactaaatgccaggaagtaacagyttggagacaaatttggttagataggtgacttttcaatttagctttggtttaatcttgagtcttctcagagcctagataaaagcctaagaagaaagcaccacaggattgggtcatgtagtgcatctacagtgtacctagttgtacagacattttctagaggctggtgggtgacctaaggtcaagtagcccatttcttgaccagcttatacttttacagtcatcttatttttcagtgatgaacactctaatatctcctaagtgccct

SEQ ID NO: 213292 - DNA, 404 bp, Homo sapiens
tattaaagcagtgagaatatacaatttttaaaatttttttaaggattaatacgctaacaaacatgttcaaaaacaatgctatattggaacatatgctactggatccacataaagtgtaaatataatggaatttccgtcatgactacttagtctatctcaatgaatttaactgatctcaacacattctctatcaacaatctacgaacaatatgctcatatgctagactttgtcagacattatgtaatgcatcaataaataatgccttttactttctgttyactttaagcatatctgtattagttaccattcacatttccttttttattatctcatttctgtctttcccattatgaaaaggctttctaataccattttgattctcagtatttccaaggactaatcc

SEQ ID NO: 213293 - DNA, 616 bp, Homo sapiens
acattgccaggaggccttcatacttctagaagggcatcatttgttaggtccttyttccatggtttggagtaaaaacggcaatgattagaagtgtatccttaatgataggctctatagcagattctactgtaatatgtatagttacacaacagactttaaattctcttatgaaaggtatgctaaataacacaattggctacacagaaaagtatctctgcagctgctggcatttgtggtctaggagaaatacatcaaacgtagattatagagattcagttttagggcattaacggagagactgcttagttaagtgagtagactctttatctagctcattctttaatctatttgattttaggtgatttggtttatggggaccctgggtaaggagcatattccaaactcttcatattgtcctcctgatagtcataataatagtctccttggtgcgctatattttctcaaaggttttaaatgtttacaagtcagccatctctaaaatgtcaaatggtctctcttcaactggaatgacaagagctgaaagaaatgtgtgaccatgaggacaccgtaacctatgactgacatgctgagaccagaaacccaaaatgatggtaac

SEQ ID NO: 213294 - DNA, 585 bp, Homo sapiens
tttggtcacactctcacctaagtgagaacctgactaaaagggggaaatttttttaaaagttatgggtggccactgttttggactgagatcatgcgctaggccccaacagaccacaaaaaatggagctgcttgtgctaaatgggacaataaaactaagactttaaggaaacacacaaatcctagaacagaccaggtttgtyttcctcctgttaacaagacgttccaacatcaggaggtaccctctactcagtccttggtcctacctttgcaaaactcactgttctactgtttcccagtgggtttcaagaccaaataagtacatttatgatagtgacagtgacattaatgattaaagttttggtcaatctctcaaaattgagaaaataaccaaaaggggggaattggtaaagtgaactaaatgtggtctgagaaggactctgctacatttgagtccttgtggacaaactgcaacctaacttaataggtagacaacactgaaaacctaatttaggagtatgctcctgtaacaatagctgagtcttgaccaatcccaggagccatacttcactcttatactgctgagtg

SEQ ID NO: 213295 - DNA, 627 bp, Homo sapiens
attaatgaaggaggcccagggctctgttaaatttttctgagtccactataagccttgatgggttaatttcatatgtatgagtatataaccagattgactgagaactgagaaggatattcatagcatgttctctttaagaatggattaccactatgtttgactatatttgaagttgtatttcaaataatgaagctactgattattgcataagtctgcattctgtcagtaccaactatgagaaggggaactcccttcccttctgcaaataaaatacagaaaataaccattcctacttcataggtgtgtaatgaggattaaatagatgaatatatatatatatttatttatatagaatatatatatttatttatatagtgtgtatatatatatatatacgcacacacatatatatatatgtgtatatatatatatatcccaaagcttggcataccatcaatcatcaggcatcagtgsagtgagtgagagaatggaaagtaagttatatgactcctcagcttcctcttccgcttctgcaagccaacacaccccacttaggactctcacttgcccagatactctggtagtggcttcctcccctaagtgacccgactgtgagcaactgtcagc

SEQ ID NO: 213296 - DNA, 631 bp, Homo sapiens
aaaattaatgccaactctctttgtgtaaacactttaacctctatttctgggctaaaggcagacttgggccatagaggttaatgcattttcactgtatcactgaattaaagggtatgcttgagtagtcaagatttctagtagtgtttgaaagaagcaattaaaggtgggtgcttgatgatgtcaaacaaactttgagccctctgacaggcttctgagtagtytctctgagatgccagctccttggggcttgtctgcagccaagtgcacaaggagaaaagtagatgatggaatttgcctgcacattaatctcattttaaagcaatttattaagggtaaaaggacaagcatggaaaagatgagaagcactcctcaccagaaaaagacattatttaaaattaaaggaataaaattaaaggaataaaatgtggtgatgatggtaataccaagagtgagttttagcaacgatatttaggtttatgaggaccccaaaatgaaaacgttgttcttttcctgtaacatgactgtccttacagggagacagaagtgggctttccaatagttcactcatacagtcaagagagtttctgtaggctgtattcctttgtgtctcactatttttttttcagtactt

SEQ ID NO: 213297 - DNA, 631 bp, Homo sapiens
aaaattaatgccaactctctttgtgtaaacactttaacctctatttctgggctaaaggcagacttgggccatagaggttaatgcattttcactgtatcactgaattaaagggtatgcttgagtagtcaagatttctagtagtgtttgaaagaagcaattaaaggtgggtgcttgatgatgtcaaacaaactttgagccctctgacaggcttctgagtagtctctctgagatgccagctccttggggcttgtctgcagccaagtgcacaaggagaaaagtagatgatggaatttgcctgcacattaatctcattttaaagcaatttattaagggtaaaaggacaagcatggaaaagatgagaagcactcctcaccagaaaaagacattatttaaaattaaaggaataaaattaaaggaataaaatgtggtgatgatggtaataccaagagtgagttttagcaacgatatttaggtttatgaggaccccaaaatgaaaacgttgttcttttcctgtaacatgactgtccttamagggagacagaagtgggctttccaatagttcactcatacagtcaagagagtttctgtaggctgtattcctttgtgtctcactatttttttttcagtactt

SEQ ID NO: 213298 - DNA, 591 bp, Homo sapiens
gtgttatggtgctatggttttagaacactgtagtggyctgcaaatttcctattatgaatattgacgtaagccaaaaggtcattctatgtgactcacaaatgtagctttccttgattactaagatatctgcaatacatacatatataaacttgataatattttggtaatagataatcagatatcttggaaatatacatgtatttctcttttttctttttctatgtatgtatgtatgtatgtatatacgtatgtatgtatttatttatttgagacaaggtctcactctgtcacccaggctgaagtgcagtggcacaattactgctcactgcaacctggacctcccgggtccaagtgatccttttgcctcagcctccctagtaggtagaactacagatgtgtgccaccatgcctggccagtttttgcatttttttttttttgtaagacagggctttgccacgttgcccaggctgatctcaaactcctgggcttaatcgatccacccgtctcatcctgtcaaagtgctgggattacaggcgtgagccacagcgcccagcctttttttttttttttttttttcttatagctcgact

SEQ ID NO: 213299 - DNA, 591 bp, Homo sapiens
gtgttatggtgctatggttttagaacactgtagtggcctgcaaatttcctattatgaatattgacrtaagccaaaaggtcattctatgtgactcacaaatgtagctttccttgattactaagatatctgcaatacatacatatataaacttgataatattttggtaatagataatcagatatcttggaaatatacatgtatttctcttttttctttttctatgtatgtatgtatgtatgtatatacgtatgtatgtatttatttatttgagacaaggtctcactctgtcacccaggctgaagtgcagtggcacaattactgctcactgcaacctggacctcccgggtccaagtgatccttttgcctcagcctccctagtaggtagaactacagatgtgtgccaccatgcctggccagtttttgcatttttttttttttgtaagacagggctttgccacgttgcccaggctgatctcaaactcctgggcttaatcgatccacccgtctcatcctgtcaaagtgctgggattacaggcgtgagccacagcgcccagcctttttttttttttttttttttcttatagctcgact

SEQ ID NO: 213300 - DNA, 392 bp, Homo sapiens
acatcttcgggatccacttctaattctagttcttttgctatttgtaccacatgtgcagttacttcctctactgaagtctggaaccccctcaaagtcatccaactttccaaactcctggtaatgttgatgttttgccctcctcccataaatcataaatgttcttaatggcatctataatggtatatcctttccagaaggtttttaattaaccctgcccagatccttcagttgaattactgtctacrgcagctatagccttggaaaatatatttcttaaataagacttgaaagttgaaattattccttgatccatgggctgctgaacagatgttgtgttaacaggtataaaaacattaatctctttgtacatctctatcagagcttgggtgaca

SEQ ID NO: 213301 - DNA, 609 bp, Homo sapiens
taagcttccaagaaatggcagagctatgatttgaaagatccaaaacccctgaataacggtatggagtagaaactccatttcccattctgctgacccatattggtctgagctgtgaattagaaataaaattttattttgttaatcttttcaaaattcaggcttttttattatagctgctagcatttccttatacatacttataatccattcctgaaaggtcttttgtattaaatttcagatttaaaaaccagcgtcatttatgtagtaaatctggctcattttcccactatgtctgcctttaattattatacatatatttattatatgtttaatattatatattattatacatataattattaaacatagtcaaagctgtatttaaaatgagctcatattttcaatatgagacatacacctatcyggtgatttccttaactattaggaattatcagaaagaaaacaaataacttcttgaacaaagagaaaagaaaatttggccttcatttttgtaaaggatccataatatttcatttttattaaggtgcaatatttatgttactcaaggtgtattgctattttttatgctgctggtatttttgaaacaat

SEQ ID NO: 213302 - DNA, 626 bp, Homo sapiens
ttaattctatattcaaatcctcacataaaaaaatttgaggtctgataaaattgtaaaacgtaaatggtctctattgactttaagcagaataaaactggaaagaaaataaaatcttccccacawtagcgccacagggagaaagaaacacagtttgaaggcaaaagagaaattacagatagtaatttttagtggaaatatgaaaagctgaaacagagctgagaaacaacgtagcaactgaaaattacttattaaaataatcagattaaataagatactgatggaaatgtaagtctgaattcagttctcatgtacttagtctatgaattgaagcaatttttctctttaaaaaaaaaatgcagcttctgttgactgagtgaccgtccatagcaagcacagaaccacaggggtttataagaatttctaatcctcttccaaagcatacttagaaaccttattttcccaacctgtccctcacagacccttcacttttcctatgattgcttcttccttttatgcttatgtagatttccattttcctcttcttcaaagattcctgcttaacagatattttgagggataactcaaatgccacctccaattctaagactctcttgaacctctcagag

SEQ ID NO: 213303 - DNA, 550 bp, Homo sapiens
atatggtaattatatttttaatgttttgaagagttgccatactgttttccatttctaattcagaggttcttttttaaacagtaaaatacataaaattcaaaaatgaaaaagcaaattagcatgccactgtggattgcaacattgatttgctaaaagagacttgaggttaattattaacctacccaattcttttataatgagataagtaaaccagggggaatttgtgagatgtctaaccctggtactcaaatttgcaggccagtggttgccccataagcctgcatttcaaatgggtgcttaaaacttagttaggattttagaaaaaaaaattaatacataaacttatatawctgtagaaataatttactttagtttttgtagcatctgagatttatatatatatatatatatatatatatatatatatatatatatatatatatatatatatatattgcaggggcaatgtggcataattatggcttttgatgttttctattaaaatctcttacatgtggtgtttaagaactgttgttgtgtgtagagagtt

SEQ ID NO: 213304 - DNA, 550 bp, Homo sapiens
atatggtaattatatttttaatgttttgaagagttgccatactgttttccatttctaattcagaggttcttttttaaacagtaaaatacataaaattcaaaaatgaaaaagcaaattagcatgccactgtggattgcaacattgatttgctaaaagagacttgaggttaattattaacctacccaattcttttataatgagataagtaaaccagggggaatttgtgagatgtctaaccctggtactcaaatttgcaggccagtggttgccccataagcctgcatttcaaatgggtgcttaaaacttagttaggattttagaaaaaaaaattaatacataaacttatatatctgtagaaataatttactttagtttttgtagcayctgagatttatatatatatatatatatatatatatatatatatatatatatatatatatatatatatatattgcaggggcaatgtggcataattatggcttttgatgttttctattaaaatctcttacatgtggtgtttaagaactgttgttgtgtgtagagagtt

SEQ ID NO: 213305 - DNA, 660 bp, Homo sapiens
tttcactacaaaaaacaacacaaataagaaaataatgcaggaaattagggaaaactactatagggaaaatagaagacaaatagaaaagtgacagaggtacagttgacccttgaaaaacacgggtttgaactgttgaggttcactcctatgcagattgtttttcaaagttacacaaaatgtttctgcctctcctgtctccttttccacctcgtccacatcttctgcrtctgccatgcctaagacagcaagaccatcccctcttctttcttctcctcagcctactcaatgtgaaattgaccaagatgaagacctttatgatgttccacttccgtttaaggaatactaaatatattttcacttccttatgattttgttaatagcattttgttttctctagcttactttattattagaatatagtatacaatacatacaatatagaaaatatgtgttaattgcttatgttattggtaaagctcccagtcaacactaagctattaatagttaaggttttgtagagtcaaaattatacacaaattttcaactgcatggggggttagtgcccataactccattgttgttcaagggtcaactaaaaatccctacttattggtaattactttaagtgtaaatagattcaattctccaataaaaagattg

SEQ ID NO: 213306 - DNA, 569 bp, Homo sapiens
tttttttttttttttgcttggtgatttgggtaagtttcctatagattatggatattagacttttgtcagatacataatttgcaaatattttctcccattctgtatgttgtctactctgttgacagttacttttgctctgcagacgctcattagtttaatcaggtcacaagtcaatttttgtttttgttgcaattgatttggaggacttagtcataayttctttcccaaggccaatgtccagaatggcatttcctaggttttcttctaggattcttctagttttaggtcttacgtttaaatctttaacccatattaagttaatttttgtataaggtgaaagataggtatccaatttcattcttctgcatatggctagccacccatcccagcactatttattgaatagtgagtcctttccccattgtttatttgtattgagttcatcaaagaacagatggctgaagtgtacaactttattaggggttctgtattctgttccattggtctttgtgtctgtttttgtaccagtaccatactcttttggttacagtagtcttatattattgttt

SEQ ID NO: 213307 - DNA, 543 bp, Homo sapiens
cctcatccagcaatctcttaaaaacacaggttgaatgccccaatctgaaaatccaaaatctgaaatgctcaaaaatccaaaattttctgagcaccaacatgagatagtgacacttttgctttstggtagttcagtgtacacaaactttgtttcatacacaaaatcattataatatcgtataaataatcatataaatattatcgtataaatataataatcaatatcatataaaattaccttaaggctatttgcagaaggtgtacatgaaatataaatgaattttgtgtttcgatttgtattccatccacaagatatctcattacatacatgcagatatatcaaaatctgaaaaaacctgaaattcaaaacatttctgatcccaagcatttcagataagggatactcaacctgtactcacaaacaaaggtcttatttctctagcctagtgatcccatttgtacacttgccaaaggctgttctcagttataatgggcacataaggacccaggatctggaattcccaggcttcgctttgctaacagt

SEQ ID NO: 213308 - DNA, 543 bp, Homo sapiens
cctcatccagcaatctcttaaaaacacaggttgaatgccccaatctgaaaatccaaaatctgaaatgctcaaaaatccaaaattttctgagcaccaacatgagatagtgacacttttgctttctggtagttcagtgtacacaaactttgtttcatacacaaaatcattataatatcgtataaataatcatataaatattatcgtataaatataataatcaatatcatataaaattaccttaaggctatttgcagaaggtgtasatgaaatataaatgaattttgtgtttcgatttgtattccatccacaagatatctcattacatacatgcagatatatcaaaatctgaaaaaacctgaaattcaaaacatttctgatcccaagcatttcagataagggatactcaacctgtactcacaaacaaaggtcttatttctctagcctagtgatcccatttgtacacttgccaaaggctgttctcagttataatgggcacataaggacccaggatctggaattcccaggcttcgctttgctaacagt

SEQ ID NO: 213309 - DNA, 489 bp, Homo sapiens
aagacaaacatcacatgttctcacttactttgggatctaaaaatcaaaacattgaactcataaacatagagagtagaaggttggttaccagaagcttggaagggtagtaggggttggaaaatggttaatggrtacaaaaaaaaatagaaagaataaataagacctactatttgatagcacaacaggttgactatagtcaataataacttaattatatattttaaaataacaatgtaattgaattgtttgtaacacaaaggaaaatgcttgaggggatgaatactccattctttatgatgtgcttattgcacatcacatgcctgattcaaaacatctcacgtaccccataaatatatacacgcactatgaacccagaaaagttagaaataaaattcaaaaatttgaaatacaaaaacaattaattaaaaattaaagtctgaggaaattggtgaactgtttctagcaaagttacataaatgcacacaagca

SEQ ID NO: 213310 - DNA, 573 bp, Homo sapiens
catagcactcaaagtacttaattctccctagttgtgggatgggaggcttaaaatagaaaaagagacttaacttcaatcttgagccataaatgccagtttgataattgaataaagagaataaataacattttcagacaaaaggatcagcatgtgtagagcgcatagagctgagaaacaaaaaaatcacaatagattctaggatctattgcagttgagaaaggttgaaatgtggggagcatgtgatggatagacagaagaaggagagacgagatcagagactgtgtaagcttattaagcrttttggtatttatcttgacaaccctgacatattgttgaaggtttttaaacaagaaaattaaatgggcccttagtcatgttagaaaaaccacttcggcagtaatgtcaaacagagcttgcaaactatggcttatgggccaaatccatcctgctctcgtttttgtaaataaaatttgattagaacacagtcacacattgatttatatgtctatgtctgcttttgcaccttagtggcagagttgcttagttgcaacagggtccctgtgcctgcaaagt

SEQ ID NO: 213311 - DNA, 573 bp, Homo sapiens
catagcactcaaagtacttaattctccctagttgtgggatgggaggcttaaaatagaaaaagagacttaacttcaatcttgagccataaatgccagtttgataattgaataaagagaataaataacattttcagacaaaaggatcagcatgtgtagagcgcatagagctgagaaacaaaaaaatcacaatagattctaggatctattgcagttgagaaaggttgaaatgtggggagcatgtgatggatagacagaagaaggagagacgagatcagagactgtgtaagcttattaagcgttttggtatttatcttgacaaccctgayatattgttgaaggtttttaaacaagaaaattaaatgggcccttagtcatgttagaaaaaccacttcggcagtaatgtcaaacagagcttgcaaactatggcttatgggccaaatccatcctgctctcgtttttgtaaataaaatttgattagaacacagtcacacattgatttatatgtctatgtctgcttttgcaccttagtggcagagttgcttagttgcaacagggtccctgtgcctgcaaagt

SEQ ID NO: 213312 - DNA, 565 bp, Homo sapiens
ttctgtctgtctgaaaacaaagcaaaatccatgttctatctctaacaggaagtcaaagagttatttgtagattgttaaagctggatgagaggtatatcagagtccatagtattcagtattttttaagttttcttcttaataaaaagttaaaattgctatttgcagacataytatcagatacccagctgagtttcaggcctaataattctgctaacctggacttaactcttgaagtagaggatagaggaataagagattcactgtgcatggattccttctaattctgggtttaggatggaatgtggttgaaccaaaaaatccactatctttcttcctgccacctggctttcttggatctcttacttagggaatcctggtcctacttgggacagtgttgaagactggatgtcaggcacgtcttgacctatgtggatttagtaagccacttcagtctcagctcacccaatactgtaagttgtgctcctctaaaaggctggagttctgtgagctgtcaaatatattgtcgtcttcttcatcaatcccaaatttatggaagcactatatt

SEQ ID NO: 213313 - DNA, 565 bp, Homo sapiens
ttctgtctgtctgaaaacaaagcaaaatccatgttctatctctaacaggaagtcaaagagttatttgtagattgttaaagctggatgagaggtatatcagagtccatagtattcagtattttttaagttttcttcttaataaaaagttaaaattgctatttgcagacatattatcagatacccagctgagtttcaggcctaataattctgctaacctggacttaactcttgaagtagaggatagaggaataagagattcactgtgcatggattccttctaattctgggtttaggatggaatgtggttgaaccaaaaaatccactatctttcttcctgccacctggctttcttggatctcttacttagggaatcctggtcctacttgggacagtgttgaagactggatgtcaggcacgtcttgacctatgtggatttagtaagccacttcagtctcagctcacccaataytgtaagttgtgctcctctaaaaggctggagttctgtgagctgtcaaatatattgtcgtcttcttcatcaatcccaaatttatggaagcactatatt

SEQ ID NO: 213314 - DNA, 497 bp, Homo sapiens
tgtgtacctcctatgtgcaaaagactgccacagtggtgtggaccctaaggaacttactgtctaatcttctaaaagttagaaaattagagatacagcctcttaggacaattttgaatgggagctcttctttgccaaataatgttacactgactttaggtgcttagatgtctttcgttttcccgttttgttcatycattgagcagttctatagaccaaactgtactaggtgctgaggttataaacaatgaatgaagtattgtccctaacgtgcagacccttcctccctggttttcaaccatttgccagaagggtaggttccagttaccaaaagtctgaccgcctgacccatcctccaagttgaaaatagctacttaaatgtgcacacacacaaacccgcatacctattaatgtaacacattatttccacttaaagctaccaaaatataattcctatgaacattagcaataaaaagaataagaataaaatgtaagacaag

SEQ ID NO: 213315 - DNA, 212 bp, Homo sapiens
gaattcaactcatctttaaagtttccttttcagctttgtcrttctatgcactaatttccaaagcttatttgtcagaaatgtagtcctgtaggctatttgacctcaaagtgagggtttcatgattaactgcatttggaaatctcacacttcattcatttaatgtacatttacgtaacactctattgtgtgacctaagactaccttggagagtc

SEQ ID NO: 213316 - DNA, 524 bp, Homo sapiens
aagtcccaagaattgaaggttctgtactgcaaagatcagtgaggagacactcacacatggttaagcatcactttgggaacccctgtctaaaatgggcaaactctatcaaatggcatcttcaacttcttttagaattaataagcagaactttttgcttttctgcaaagatgaatttcacaaagaggaacatttctgttcaaatgctgatacatgtttgttttcaaacaatgaaaggaattaaagcaaagtaaaaatatttytaagtacttcagagttgctagcagagttgagaagagacacaaacttctaggggaagatctggagcatccattcaaaaatctccagttctgataaggagactaatggagaagtcagagaatgagtgacttgagcagaaattaatatgatgtcccaaattttaacctctacatttggagttactaaaacccctggtaggagcccaagaggctctagagtccatagctcccagcaccgaagtgaggagcaggcagccaaaccaagag

SEQ ID NO: 213317 - DNA, 372 bp, Homo sapiens
catctaaaaatattaattttactgtatgtaaattatgctttgataaccctgacataagaagaataaagctagagacagcctcattttcagatgtagtataaatgtaacacatctgaaaattatcatccatagataattgtacataaattctgtcttccycatgctttttcaatgaatagaaacctctatataaaatgtctattttagagaagacaatgtaatgaataaaaattggaccaatacatagaagtgagcttgtggaatatgtgttgaagaaataatttttcatctttctataattaaaatgatctaatgagaattttatctattacatgagtttagcctcaagacgaaaaactttcattttccttt

SEQ ID NO: 213318 - DNA, 372 bp, Homo sapiens
catctaaaaatattaattttactgtatgtaaattatgctttgataaccctgacataagaagaataaagctagagacagcctcattttcagatgtagtataaatgtaacacatctgaaaattatcatccatagataattgtacataaattctgtcttccccatgctttttcaatgaatagaaacctctatataaaatgtctattttagagaagacaatgtaatgaataaaaattggaccaatacatagaagtgagcttgtggaatatgtgttgaagaaataatttttcatctttctataattaaaatgatctaatgagaattttatctattacatgagtttagcctcaagacgraaaactttcattttccttt

SEQ ID NO: 213319 - DNA, 572 bp, Homo sapiens
actacacttaatattttagtgaagaagtcttaggctgaatatatttattatcttacccatctatatcctaattctctgccttagtgccatctttcatctaacttgtaaaatttccattaactttatacatataattccaaaagactgaactcaggaagaaagtgataatgtaatggatgctattctattaataataaactagcttatacaaacataaaatttcatttgcatttcttttgtttgatgatcataattctgtgagagaaaatcaaatcckaaaacagagcttaatagaagaatggtgtaatttttctatttctaaatctataggtgtagaagttgtgactgagatttcctgattctaagtctagtgccttcaatgtatcctcatttcattttaacatgtagacatgtccagtggcaggatcagagggcgaggcaagtgcatctaatgtttttacagtctcactcacaatcatgccaaaacagttttgaataattttgggtctccacaaatcaacactcactactattctcaggggatattataataaaatgcaaatcactcaaag

SEQ ID NO: 213320 - DNA, 572 bp, Homo sapiens
actacacttaatattttagtgaagaagtcttaggctgaatatatttattatcttacccatctatatcctaattctctgccttagtgccatctttcatctaacttgtaaaatttccattaactttatacatataattccaaaagactgaactcaggaagaaagtgataatgtaatggatgctattctattaataataaactagcttatacaaacataaaatttcatttgcatttcttttgtttgatgatcataattctgtgagagaaaatcaaatccgaaaacagagcttaatagaagaatggtgtaatttttctatttctaaatctataggtgtagaagttgtgactgagatttcctgattctaartctagtgccttcaatgtatcctcatttcattttaacatgtagacatgtccagtggcaggatcagagggcgaggcaagtgcatctaatgtttttacagtctcactcacaatcatgccaaaacagttttgaataattttgggtctccacaaatcaacactcactactattctcaggggatattataataaaatgcaaatcactcaaag

SEQ ID NO: 213321 - DNA, 583 bp, Homo sapiens
  misc_feature (1)...(583): n = A,T,C or G
ggcggagttgagaaagttgtgaaaaattcctcctatgggtcataggcctaaaatgtttgatatcttctttatagacaaagtttatagactatagtgtggttgctaaactgatagcattattattatcacttgggcatttgttagaaatgcaaactccagagccccaccccagagctactgactcrgtaattttgggggtaggcccagcaaatctgtatatagataagaccgccatgtaagtctgatttaggccaaagtttgagaatactgctgtagagtactgtattcttatcacacagactagcatatagaccagaatacagttcatcgtgtgatcattattccttttcttttcttttgagacagggtctacctgcacccagactgaagagcagtggtgtgaacatgcctcactgcagattcaatctcccagactcaagcaatcctccttcctcagccttctatgcagctgggaccacaagcacatgctagcatgcttggctaattttttgtagagatggagtctcgctttgttgcccagacttctcctgcccttctgggctccagtgatcctcccnnnnnn

SEQ ID NO: 213322 - DNA, 591 bp, Homo sapiens
tggggcatagtttcaatagcttggctttatttttctgattgaggcagataaacatattaagtagataaagattttcaatgtgttatgatttatgtgtcatttattttagtactaatatagttagcattggmgcatatgaatgctaaatcctctgaaagttagtgggttttcatcttaagtgatattatatgttgtggaatcctttaaaaactctgaattttccatttactaggatagttgactaactacagtgtgtgattatttcagattcctacattaaaaagccaaaaataaatattttaatttccacttctcttcttttgacactagaaattattttctttctgggcctttcatgtcaaatcatgtgaagtgccacttagtactgcagcctagagcatataaatagagatttttattcattaggttcaaggtgggaatcagaaatctgtattctattaagactgggaagaaaaatagttgcacgttctacagtttgttggtacttcagcctattataaagcagtaccacatttgtgtagtgacctcagattcaggtggtatctgtaagagcaggacataaagaaacac

SEQ ID NO: 213323 - DNA, 577 bp, Homo sapiens
gctgtataagagagaaataagtcttcatactgcagtattaaatggattttagagagcaaataatttctcttaccttatcctaaagtacataactgaaaagaaattatttatctctttacccagaaagtggatacatggagaagggttagcatggatcagaaaataaaaaggaatgtatttatcattttgcaccctggtatatttattgcacaagattctctctaacccacacacacaatcttctgaggtaatgttgcagaaaatagagaggtaagaggagagtgaagtcgggcttttgcatagtcagcttccctktggcctctgtggaaagggaagtgctcatgtccaggtaatgaccagtagccagtatggagtgggtgtctgcagagccaatcacagacaaggtgcacctctgagcaggtcctccagggatggttgaaaatagacctaatttccacatttattctagaagacagaatattaactcatcaaagtgtgtgtggataggagaggctggtggatgggatagggatttacttgacagatacatcttagcctctgttactttgaatatttg

SEQ ID NO: 213324 - DNA, 577 bp, Homo sapiens
gctgtataagagagaaataagtcttcatactgcagtattaaatggattttagagagcaaataatttctcttaccttatcctaaagtacataactgaaaagaaattatttatctctttacccagaaagtggatacatggagaagggttagcatggatcagaaaataaaaaggaatgtatttatcattttgcaccctggtatatttattgcacaagattctctctaacccacacacacaatcttctgaggtaatgttgcagaaaatagagaggtaagaggagagtgaagtcgggcttttgcatagtcagcttccctgtggcctctgtggaaagggaagtgctcatgtccaggtaatgaccagtagccagtatggagtgggtgtctgcagagccaatcacagacaagktgcacctctgagcaggtcctccagggatggttgaaaatagacctaatttccacatttattctagaagacagaatattaactcatcaaagtgtgtgtggataggagaggctggtggatgggatagggatttacttgacagatacatcttagcctctgttactttgaatatttg

SEQ ID NO: 213325 - DNA, 458 bp, Homo sapiens
atgggaaaaaatagcaaacatcgttttgtgaaggtatatctgtgtgtcaagagaacaaaaagataggtaaatagaaagaaattctattcttccatagtagggaaaagagaaargtatttgatacaatttgatcaaagctattagatacaattagatgtcagagatagcccatgccaggtaggaggtgtgaagaattcgtatggagatgtgttatggatagaatgtttgtgtccccccatcaaaaaattcctgtgtagaagcagtgacctgacatgtctgtaattggagatagggcctataaggaattaattagggttaaacgaggtcataaagttaaggccttaatctggtagaattgggggcttataataagaggaagatagtctctctctctctctttctctctctctccacccacacaaagaagagatcatgtgagcacacagcaaactggcagc

SEQ ID NO: 213326 - DNA, 501 bp, Homo sapiens
ttcatttgattttcattctctctcttgccactaccatgtaagaagtgcctttcactttcaccttctcatrtgattatgaggcctccctaaccacatggaacttaaagttcattaaacttctttcttttgtaaatggaccagtctctggggttttttttttattagcagcatgaaaacagactaatacagtaaactggtgccaatagagtgaactactgaacactactaaaaggataaccaaaaatgtggaacaactttggaactgagtaacaggcagaggttgaaacagtttggagagcttagaagatgacaggaaaatgaaggaaagtttgcagcaccctagagacttgttgaatggctttgatcaaaatactgataatgatatgaacaatgaaatccaggctgaggtggtctcaaatagagatgaggaactttttgggaactagaacaaaggtgactcttgttatgttttagcaaagagagctggtggcatttgcccct

SEQ ID NO: 213327 - DNA, 501 bp, Homo sapiens
ttcatttgattttcattctctctcttgccactaccatgtaagaagtgcctttcactttcaccttctcatgtgattatgaggcctccctaaccacatggaacttaaagttcrttaaacttctttcttttgtaaatggaccagtctctggggttttttttttattagcagcatgaaaacagactaatacagtaaactggtgccaatagagtgaactactgaacactactaaaaggataaccaaaaatgtggaacaactttggaactgagtaacaggcagaggttgaaacagtttggagagcttagaagatgacaggaaaatgaaggaaagtttgcagcaccctagagacttgttgaatggctttgatcaaaatactgataatgatatgaacaatgaaatccaggctgaggtggtctcaaatagagatgaggaactttttgggaactagaacaaaggtgactcttgttatgttttagcaaagagagctggtggcatttgcccct

SEQ ID NO: 213328 - DNA, 389 bp, Homo sapiens
gaattcttccacactcaatctatgaagctagcattgcctggatacyaaaactaaacaaatacagaacgacaacaacaaaactatgtgccaatattactgatgggcatacatgcaaaaactctcaataaaatactagtaaactgaatccaacaacatatcaaaaatattttatacccatgatgcaaaagtggtccaacatatgcaaatcaataaataagatacatcaccacatcagaataatgaaggacataaatcatatgatcttctcaataaactcagaacaagcatttgataaaatccaacatcctgtcataataaaaattctcaataaatagatataaaagtaacatatctaaacacaataaaggccatatatgacaaacccacag

SEQ ID NO: 213329 - DNA, 559 bp, Homo sapiens
gagctttggaccattaaatagtgctttaagtactttagcaaggcattcatacactgtgtttctaatcaggaaaacatacaacaagatctgtccttaagctgttttactttgccttataatggtctccatttcctttcatgcagcattatcttgatgaattgctgtttttaaagatcaccttttgcctggaaagtgtgcaatagatcaggcatgatgagggtctgtgtggaggctgagattttggtcaaattttgtataaccccrttgcctgctgtattaatataccatgctattcctgaatttcctctttgtttctagtttgtatactgtatattttagcaaatttgactgggtggattcttccaacaataaggcatattcagtagctaaactagtactaaaaatcatacaagattatcataatccaaaaaaatctgtagagtacggaaactgttgaaagaaagaagaaagagaaaaaggaaggaaggaaggaagggagggagggagggagggaagagttctataagtcaggtcacattccttgaattcaaatgttaat

SEQ ID NO: 213330 - DNA, 603 bp, Homo sapiens
caccccaaatctatctacttacaaaaagaggggtttatgattcaaatgctatagaaggaggaaatctaattttgaccttgagtcaaactgatgccaaagggagtttatggttttctctactttataagctgtaattgcaaatacagtttccttcatctaaaaaaccattccaccctgaaattttcaaacaaaaatagttttcagaaacattggcaaaagayatcttcaaaggaaactaactagtttgaattaaaaggaaagggaggagagagatggtggattttttttttttttgatggtggatatttttaaagggattatgttttcaatattttgggcacaagatgtctaattcctattttttaaagcatttctcatttaaaatttaaagtagattagtaacttaaatgtgcttaatttgtaaataagataaaaatagcaaaaacgcgtataagataactttaagagaaaaacagtaatataaaatcctttctctaaatattaaggagaaacaaagttatcagtaaatgccatgaaatactgaaatataagggtccatatcatataattaatacaaatgtagtaatggtatgaaatttagtg

SEQ ID NO: 213331 - DNA, 482 bp, Homo sapiens
atgacagaatttttatgaattttcagtgatgagatgatggacatgatatgaaaacctgcctgcaaacctgagctagctacgaagcctgagctctctctaggttaagatgattaggccaacgaatgatcctggcgaacaagccagtggatttattgaggragagcaccattatttgcaccagagcacttttagcttaaactctaaagtttaacgcgtgtctcagagttagaccactgtggttggtatccctcacacagggaacagtggttggtatccctcacacagggaacattacctgtcagaaaaagaccctcattaaatatttgttgaatgaattcatgagggcctcatctatttttagttatggtatttaaaagagaccaaagttatgaggtcctgaacttgaagagggaaattattttcttattattttaagatgttttaattcctttagatcatgaatatcatttgaagtatggaaa

SEQ ID NO: 213332 - DNA, 538 bp, Homo sapiens
agaacatgttttctgggtaggcaatcaatactgtctgccacaaacctcttatttcaaatgagtaaaattcatcaggtstttaaatatttttttctagataatcatcttaaacatggataacaatgtcaagcattttcaactgttaacattatatcttccatttctgatattattaaaacattatattttgagcagtatttcagtgtcactgggaataatttttattgacattttaatctaggttccaatgttagatgaatatgtggatttcttcagtcaacttctctgaaagtaaagcattgtcgctggtgaaatgattatgtcaataggtggcattttcttgattttctccagagggtgttttctatttgtgatttattttctttgaagttggtccttacaattgatcttgaagacatcacttctttcttttcacaagcttatctgtgggtaactaaatcccaatggcactgtagtagacttgtttttatttagttattattagttttttctattgactcactaaagccaaatctag

SEQ ID NO: 213333 - DNA, 624 bp, Homo sapiens
cactgccatgagaacagcatgggggacctgtcccggtgatacagtcgcctcccaccaagtctctcccttgacacctggggattacaattcaagatgagatttggctggggacacaaagcctaaccatatcaactagcaattttcaaattgctcccagaactctaacccaagccctacctgccatgcatgaagaagggaaataaagtggctcaagagtgggtgggatcttaaatgtgagccccccagagcaggaaatggagcatgaactccaggaagcttctttatctcttcccatctgccactcttgacataggggacaggtgtggggaacttaaacccttgtcctagagctaaagaacctggccaaaagaaaaaggtagaaaacagcaagaacccaaaagttaagcatctgacatttaagattggcccgcccggcactctatctttgtctaaataccttacccaatgacttccagataacgttaatggagtggatctctctgtgcaggaaaaaaaaaaaaaaawttttttgttgtgctctttacccttcaaatagaatttattgttaagggaagaaaaatacatggctctataggattgaagtgctccattgccagaagcctg

SEQ ID NO: 213334 - DNA, 532 bp, Homo sapiens
taaatttcaaccaaagaattttaaacctgagtgaaaaaaatcattatgataaaaaaggaaaaataaagtatgtaaacagaaatccaaggtctggttacctgagcgtgtggtgagccatagttcagtctgcaacagggatatctaagagtagtttttgatcaggaacstggtgtgtattgttatatttcttcaaggtgtcttttatttcccttgatgttcgttttggtttggttttgggtttttttttttttaaccttgttttgtttaagatggtgattgcttgtttttttccccttaagtttatctatatttcatatttgatatatttcttacctacttcacctttcatccctccattcttctaccctgactatagtataaatggcttttctgagtgtgtgttctacccttatagaaatttttattgagtacgaggtgcatagctcactttctgggattacttcatcagtgggccttttttctgtgttatagtacaatttatatacatcagagctatctgttcctttataat

SEQ ID NO: 213335 - DNA, 489 bp, Homo sapiens
ctgctgtgtctcagaataggagacccaagatcagggagagagacagggaaacagccagtyggcagaacagtcagaacacatatgacatttataaattaagttcactatcttctacgggcatggatcatggcaccccaaaacaattacaatagttacatcaaaaatcattgatcaaagtctggacatagtggctcatacctgtaatcccagcactttgggaggctgaggcaagaggattacctaagcccaggagttcaagatcagcctgggcaataaggtgagaccccatctctacaaaaacagctaaaaaattagccgggcatgttgatgtgcacctgtggtcctagctattcgggaggctgaggggaggctctcctgagcccaggaagtcaaggctgcaatgagctgtgttcatgtcactacactccagcctggatgacagagtaagaccttgtctcaaaaataaataaataaataaatacataaata

SEQ ID NO: 213336 - DNA, 489 bp, Homo sapiens
ctgctgtgtctcagaataggagacccaagatcagggagagagacagggaaacagccagtcggcagaacagtcagaacacatatgacatttataaattaagttcactatcttctacgggcatggatcatggcrccccaaaacaattacaatagttacatcaaaaatcattgatcaaagtctggacatagtggctcatacctgtaatcccagcactttgggaggctgaggcaagaggattacctaagcccaggagttcaagatcagcctgggcaataaggtgagaccccatctctacaaaaacagctaaaaaattagccgggcatgttgatgtgcacctgtggtcctagctattcgggaggctgaggggaggctctcctgagcccaggaagtcaaggctgcaatgagctgtgttcatgtcactacactccagcctggatgacagagtaagaccttgtctcaaaaataaataaataaataaatacataaata

SEQ ID NO: 213337 - DNA, 489 bp, Homo sapiens
ctgctgtgtctcagaataggagacccaagatcagggagagagacagggaaacagccagtcggcagaacagtcagaacacatatgacatttataaattaagttcactatcttctacgggcatggatcatggcaccccaaaacaattacaatagttacatcaaaaatcattgatcaaagtctggacatagtggctcatacctgtaatcccagcactttgggaggctgaggcaagaggattacctaagcccaggagttcaagatcagcctgggcaatawggtgagaccccatctctacaaaaacagctaaaaaattagccgggcatgttgatgtgcacctgtggtcctagctattcgggaggctgaggggaggctctcctgagcccaggaagtcaaggctgcaatgagctgtgttcatgtcactacactccagcctggatgacagagtaagaccttgtctcaaaaataaataaataaataaatacataaata

SEQ ID NO: 213338 - DNA, 563 bp, Homo sapiens
tatatgtgtgtgtgttatatataaactaagagacatagactaatctatattctggaattagaagaaaaatgattctaaatcaaatctcagaggaaaaaaagaaattaaatactaaagaaaaggatacgtatgttggaaagtctaaaagaatagtggctgtttactgcaaaaaatgatttgtatatttaaaagaaaattagtatatgtgacaacaatggcatgcaagttggaagaagagaagatagacttgaatgatgtaacgtctggacagatgtcaaaatcacaatttagcattatatttgatgaattaaggagacatgcagtaatactayggtaaataatgaataggaaaagaatgcataactttcaaattgagatcatgacaataatttttaaaacacttaaataaaaataaggcaagaaaatagaaagtaaagaatcataggcagatgagtcaaatagccctttgtaatgtggtagttataaattaaatatatgttatttatttattaaatgtaagtgggctaaatgttacaataatatgaaaaaaggttttaggttat

SEQ ID NO: 213339 - DNA, 453 bp, Homo sapiens
cagtaactttggctaatttggtccccaaaaatctttctttcactaagatttggatattttcttgaaatgatttagatgttgtattttttagggtgtggtgtggctgttacaaaaaatgaaaaaatagcagtggctcaggcaaacggcaaatatataaccctttccaagtggaagcaatctgtttcatgacatcaaataatacaggccctgccagtttatggctttgccagcttcctcatgcaggtcttatctcaggtctgagatggctgttctaacccccaccattacatccatactccaacaaaattacaatagggaaagaayaggaagaacctgccccttttctcgtaaaccacataactctgaaatagcgtatattgcttccttccagtccaagaaagtaatcttcaacttgatgtccatgtgcctagctaaaattcctattcctgtaga

SEQ ID NO: 213340 - DNA, 516 bp, Homo sapiens
aaatgtcatttctgaacaaatagcttatagtgaatacttacaattatgattactgcactttttgccyttttagtcatatgttaagaaagaaaattaaaatcttaaaaaattaaagtatttttgatggtagaaatatgaagagtataaaatagtataacaatatttatggtagtaaacaatagttacaaaaatagtaaagcagtaccatattgtttccaacatgtttaatgcctctgttggccaggttcatccatacataatctcttaataataatcttgtaagacaataccccaattattggagtaggaattctaataacaaatacatggaatagcttgtcttttgtttcacagttcagatgtgaactgtgacccagtttgacccagatctctctctatgctgataatcatgtttataaagactgtagtacattcattgactatgagccttagtttgtcatctataaaatgttgacagtatctacttcctaaagtatttatactaatgaaataaga

SEQ ID NO: 213341 - DNA, 516 bp, Homo sapiens
aaatgtcatttctgaacaaatagcttatagtgaatacttacaattatgattactgcactttttgcccttttagtcatatgttaagaaagaaaattaaaatcttaaaaaattaaagtatttttgatggtagaaatatgaagagtataaaatagtataacaatatttatggtagtaaacaatagttacaaaaatagtaaagcagtaccatattgtttccaacatgtttaatgcctctgttggccaggttcatccatacataatctcttaataataatcttgtaagacaataccccaattattggagtaggaattctaataacaaatacatggaatagcttgtcttttgtttcacagttcagatgtgaactgtgacccagtttgacccagatctctctctatgctgataatcatgtttataaagactgtagtacattcattgactatgagcyttagtttgtcatctataaaatgttgacagtatctacttcctaaagtatttatactaatgaaataaga

SEQ ID NO: 213342 - DNA, 516 bp, Homo sapiens
aaatgtcatttctgaacaaatagcttatagtgaatacttacaattatgattactgcactttttgcccttttagtcatatgttaagaaagaaaattaaaatcttaaaaaattaaagtatttttgatggtagaaatatgaagagtataaaatagtataacaatatttatggtagtaaacaatagttacaaaaatagtaaagcagtaccatattgtttccaacatgtttaatgcctctgttggccaggttcatccatacataatctcttaataataatcttgtaagacaataccccaattattggagtaggaattctaataacaaatacatggaatagcttgtcttttgtttcacagttcagatgtgaactgtgacccagtttgacccagatctctctctatgctgataatcatgtttataaagactgtagtacattcattgactatgagccttagtttgtcatctataaaatgttgacagtatctacttcytaaagtatttatactaatgaaataaga

SEQ ID NO: 213343 - DNA, 668 bp, Homo sapiens
aattaatgaggataatgtagaggtgacaaaagcagtgataatcctccttatatagtctttggaaactatccttcacatacattgagagttctattaaaataagacctgaatattaaaacttataatagaaatgtgtctgaacttgcagttggaaggtaataaactgccatttttaaagacaacttttggaggttggacaaaatgaagacaactcaaggaaatattgttactattattacaactgccactaaacgttttatagcaaatacatcaggaaaacaaaataattgtataaatgtattgagaaacatatagaaagagataaatgtagatattacctcaataaagacagcttcagcagaggaacagcaataacaaaacacagatagttttaaataaaatgaactattgcttgccaaggctgctgaaaaacaatatctgataggagcatatgtatgactatgttattggtaagaaaattatatgtaaaaatatgtgtatagatacatatacacacacamtgatatgattgcgatagagatacacatatattatacaattgtaatatatacacacatatatattacaattgtatcctatgccttacatagcagtggtaaaaggatcacctgattacatgattacatatccactggaaaattgttttt

SEQ ID NO: 213344 - DNA, 626 bp, Homo sapiens
cataatagatctatttggtgtgagaaaaaaaaactctaaaggtaattagagaaaaattcaatcaaataaaaaatgaaaaggaaatatgaagctcaataatataaatataagtataagcaatataaaatataataagaattatataataaatagaatataaatcaagaaatgtaaatcatgtatattagtcaaatccctgaatgagaatgaactgaagtcttacataacaagacactatcagattaggttaagaatataaatcagccatagtctttcrataagtaatacagctaagtcagaatgagagtttaagaattaaaaaattggggcctgacatggtaactcactcttgtaatcccagcacttagggaggctgagacagattgcttgagcctgggagttcaagaccagccagggcaacatagcaagaccccttttctacaaaaagaaaaatacaaaaagtagccaggcgtggtggtgagtgcctataatcccagctacttaggctgagatgagaagttaatgctacaggaagccatgtttgtgccactgcactccagcctgggtgagagagcaataccctgtctcaaaaaaaaaagaattggtatgcataatactataccaga

SEQ ID NO: 213345 - DNA, 622 bp, Homo sapiens
ttaattaactcacagtttcacatggctagggaggcctcaagaaacttaaaatcgtgacagaaggggaagcaaggcacatcttacatagtggcaggtgagagagagagaggacaagggaaactgccacacacttttaaagcatcagaactcatgagaactcactcactattatgagaatagcatgggggaaactgccctcatgatctaatcacctcccaccaggtycctcccttgacacatggggattacaatctgagatgagatttcgatgtggacacagggctaaaccataatattctgcctggggtccctcccaaatctcatgtcttttctacatttcaaaaccaatcatgccttcccaacagtctcccaaagtcttatttctgcattaactcaaaagttcacagtccaaagtctcatctgagatcaggcaagtcccttctgcctagaagcctgtaaaatcaaaaacaagttagttacttccatgatacagtggaggtataggcattaggtaaatattcccattccaaatgggagaaattggccaaaacaaaagaggccacacgcgtactgcaagtctgaaacccagcagagcatacattaaatcttgaagctccagaat

SEQ ID NO: 213346 - DNA, 639 bp, Homo sapiens
taaataaaaaagaatttttaaaaatgaataaagcctccaagaaatttaggactatgttaaacatccaaacctaagaataattggtgttcccatggaagaagaaaaatctaagtttggaaaacgtatttgagggaataatcaaggaaaacttccccaaccttgccagaaatctagacatccaaatacaagaagctcaaacaacacctgggaaattcatcacaaaaakgtcatcgcctaggcacatagtcatcaggttatcaaagttaagacaaaggaaagaatcttaagagctctgaggcaaaagcatcaggtaacctataaagaaaagcctatcagatttatagcagatttgtcagcagaaacccttcaagctagaagggattggggttctacttttagcctccttaaacaaagcaattatcagccaagaattctgtaaccagtgaaactaagttttataaatgaaggaaagatatagtctttttccagacaaacaaatgctgagagaatttgccactaccaagccagcagtacaaaaacttctaaaagtagctctaaatcttgaaacaaattatcaaaatacacaaaatagaacctccttaaagcataaatctcacaggacttacataacaacaacac

SEQ ID NO: 213347 - DNA, 437 bp, Homo sapiens
ttaagataactgtgtatattcacttttttgttgcatcaacactgatttgcaataaatacagaaatgcagtagttctatgtatttacaggatgtttcaggagacgtagagaccacaaatgttctgtgagagaaacacacaggactcccacctagtcatccttagagtgctggttatactccgcctctgtggtataggattatcgagacatcctgcccctcaaagctcatttaggccatatttgccagcatagatatacaatctcctttcaaatgcctagaaaccactacacaaartgcatttcatttaattgattcacaaataatacataattttcttttcttctcacctgacctgcatgcatgtaaaattttgaagcaaattggctattaacaaattggagtaataaacattgtgtagtcaacagtgtagggaaggg

SEQ ID NO: 213348 - DNA, 433 bp, Homo sapiens
aatggaagagcataagatgatttccacattcatccatctttttccttgaaaacatttttcaattcactgcatcatagagcagagcccaagcagaacccagcgtctcacttggctgaaagtcagtgactggaatttaaagctgccaaattggataagactcaagaagcaaaaatctttgaaatgaggaaactactataatgagtaaaaaaaatctacaggcaaatccccttctagtttttgattaattacccatccttgcacatgaaaaatgaaactgaaaaaagaatgatgaacaaaggaagaagaaggaaggaaggaaggragggagggaaggagggagggacggaaggagggagggaaggagggagggaagcagggagggagagaggaaggaaaggaggggaggaagaaaaggaaagaaggaaaaaaggaa

SEQ ID NO: 213349 - DNA, 538 bp, Homo sapiens
aagcttcccatttggaccacatctaagcactacagagctgtggcagtgtcccttatcctttaacccttttgtcatctttaaatgatggcttaacatcatttaaaccacagtccctttaatctccaaaatggggggcatggagaggagggcaaggatccttartatctatgtaaccatcagatagccaccaaaattttattttttaatgaaggaaacagaaaattatcattagaatgtcacagtaaaaattgctgcggcaagatcccttgatgggtactaaaattactaattgaaaggtaaactgtaaacaatacttgcatattcttaaattatctctccaaaatatctgataattgccaagggaaaatagtaattttattttattttaaaaatttttttgtagaaatagggtcttgccatgttgcctgggctggtcttgaactcctgggctcaagtgatcttctcacctcggcctcccaaagtgctgggattccaggcactttagtgtcaccatgcctggcacttctagtgagccact

SEQ ID NO: 213350 - DNA, 372 bp, Homo sapiens
cgctccttattgcttctaaataatggaaagtggttataaaagtttctttgttcatagtctcatccttacctatggatggaggagtcactgggctgctttttatcacccaaatgatctaaggaaaggaaaatagttactgttactatataacttgattctcaactaccataatttatcaatggtcaaaaatgagccagcagtatattattgcttaaaaaactaaaaaagaaaggaagtaaaagttacagtgattttgtrttataattagaatttacaagtgatgtctcctccatattatccactaatcataaatttatgaaactgctatatttactttggatcactgttcctctgggaaaaaaacaggaagaa

SEQ ID NO: 213351 - DNA, 330 bp, Homo sapiens
ttccacttttgatttgtatgtcttttgtttcattgccaagctctttctgagatgaaattctgaggtcattttcagaaatttgaggctatagctgattcttgctcttactattataatgctttttggtcayaaacttcacaacaatcatggaattataccttctacagacaggagggacttaaaagctaccccttcgactggtctcatataaatcaaaccagcagttttattggtgtctctctaaagggacttgatttcctgacccctcctgctttagcaataagcaacattacaggagaatactaaaactggtttactatctgtcccccg

SEQ ID NO: 213352 - DNA, 564 bp, Homo sapiens
tcagtcattgaaagtcctttgagggttcatgttctgcacaattctaggctagcacaggtatatatcattgatcttattatttttaacagctactaattatggaatattggtaccaggctctgtcttaggctgtctgcataaattattataaatccttacaacaatgaatggcaaaaattattttctaagattttacaaatagggatagagcctcagaggggctaagtaactctgcaaagatcacccaataggagcagtggcagcagaatcaggtatgagtgtgtgggattctctataacatgcccatgtatatagtacactgctttcaagtgttacaacatggcataaattaatattttagtcacagtaaaactttctcttctctcagaattctctttagaaaatggcaatgttcttaattttgttttgtcstgtaaatggggcataaacattatccagactatttttactgtgatatttttaatattataaacattcaactctagaataaaaaattttttgcgtattgttggcatctagatcaattttatttccaagacataa

SEQ ID NO: 213353 - DNA, 503 bp, Homo sapiens
cttatctactaaactaagggtgtttttttgctttccattctggagcaggctacttaggtcatcactggctggtatcaaatagtttgcaaactggcatttagggtagcactgctggaattttttgttgtggaaaacagtaaatgcctttattgtttaggtcattaatatttgggttttctgtggtyggcaactgaaagcatttggaccaaaggtgatatcaaatatggtatgttcaaataaccggatgttatgcacccatatttccagatattattttgtgatacacctacaaatattacattaaaaagtaggatacaaaactacttatgcagtatgacctcacttttctacatacatggtaacatacaacaagagtaaaagggatatatcaaaatgttattagtgagttagctaactaaatagcattaagtgtgtgctattagttaatgctaaaagtcatgggcatagttcccaaagtgtttgtacatattttccaaaagtgc

SEQ ID NO: 213354 - DNA, 503 bp, Homo sapiens
cttatctactaaactaagggtgtttttttgctttccattctggagcaggctacttaggtcatcactggctggtatcaaatagtttgcaaactggcatttagggtagcactgctggaattttttgttgtggaaaacagtaaatgcctttattgtttaggtcattaatatttgggttttctgtggttggcaactgaaagcatttggaccaaaggtgatatcaaatatggtatgttcaaataaccggatgttatgcacccatatttccagatattattttgtgatacacctacaaatattacattaaaaagtaggatacaaaactacttatgcagtatgacctcacttttctacatacatggtaacatacaacaagagtaaaagggatatatcaaaatgttattagtgagttagctaactaaatagcattaagtgtgtgctattarttaatgctaaaagtcatgggcatagttcccaaagtgtttgtacatattttccaaaagtgc

SEQ ID NO: 213355 - DNA, 584 bp, Homo sapiens
ccatggacagatgggacatggaaaggggcagagaatagaagatagatcacataggaccctgtaggattctagtttctctctggatgacatggggagccactggatggttttgacaagaagatgacatgatctgacttaacttaaagatccctcyacttttctaaaaatagactgaaagtgggatgcaaaggcagaagtagaaaggcaacttaggaagcctctgaagcaagtcaggagataaatgatataactctgcccaaggtggtgacagtggcagtagcaagaactggtcaaattcaggattagctcagagtagagagaaaatgtgagagaaagagaaaaggcaaaaatgactccaaggatttttacctgagtatagaatagataggatatttggaaggatagaattgccaggaaccaaaatgaaaaatgctcagggagaacagtcttagaacaaaagattagaaattgactttcgttcctgttgagttggagatgtttatcagacaagcaagtggaaatgtcaagtggggaatgccgacaagagtctagagttttagacagagggtctaagggagagatgg

SEQ ID NO: 213356 - DNA, 577 bp, Homo sapiens
ttctgtgtgtgtgagtgtgtgtgtgtgcatgtgcatctacctttctttctttcctgtgtcygtgtgcacacgtctgtgcacatctgcctctgaatctctgtcttgtctgcatgtgtgcctatgtttgtgtgcatttgtctttatgtatgtctgtccttttgtgtgtctgtctttcttctgtgtataggtctgtctgtatgtgggcatgtgtgtgtctgtgtgtctttccttctatctctctgtctctctacgggtctctgtccctctttgtgtgcatgtctgtgtgtctcctatttgtgtatggctgtgttgtttctttctctttgtgtcactcccttttcatgtctgtttctctgtgtctttctctttattgggggctgtatgtctgtgtgtgtatgtgtgtctcttcctctctgtgcatctctccatgtatctctctctgtgtgtctctgtccctctgtatgtgtgtgactctctctgtgtttctctctgggtatatgttccctccctctcttgcctgtctatcctccctccctcctttttcccttcacactcctgatacaaaacacatccccat

SEQ ID NO: 213357 - DNA, 577 bp, Homo sapiens
ttctgtgtgtgtgagtgtgtgtgtgtgcatgtgcatctacctttctttctttcctgtgtccgtgtgcacacgtctgtgcacatctgcctctgaatctctgtcttgtctgcatgtgtgcctatgtttgtgtgcatttgtctttatgtatgtctgtccttttgtgtgtctgtctttcttctgtgtataggtctgtctgtatgtkggcatgtgtgtgtctgtgtgtctttccttctatctctctgtctctctacgggtctctgtccctctttgtgtgcatgtctgtgtgtctcctatttgtgtatggctgtgttgtttctttctctttgtgtcactcccttttcatgtctgtttctctgtgtctttctctttattgggggctgtatgtctgtgtgtgtatgtgtgtctcttcctctctgtgcatctctccatgtatctctctctgtgtgtctctgtccctctgtatgtgtgtgactctctctgtgtttctctctgggtatatgttccctccctctcttgcctgtctatcctccctccctcctttttcccttcacactcctgatacaaaacacatccccat

SEQ ID NO: 213358 - DNA, 604 bp, Homo sapiens
taatcaaatgcagacaatcaaatagagaaatgagcaaaagtctggaacaagcattttgcaaaagaggatatacaaatarcaaataaaaatatgacaatatattcaacttcattatataaagaagacttgaatctacaacataccataccaaatgactaagatgaaaaagaaagaacttgtaagtgttgacaaggatgtgaagccactgaaactttcattcattgataatgagagtataagttggtacaaccactttggaaaactgcttagaattatttactaaagttgaacatattgtatattccgtatgacccagaaattacacacctattatagagacaaaataaatgtgtacatctcttcatcaaatggcatgtataagcatattcatggaatcactagaactggaaatagctataaacaactgaaatgtctacaaatatgttgtggtatattctcatatttgagtaccttacaaaaatgaaaagaaatgggaaatgaaataagacacaaacttaatggatctcaccagcacaatgttgaacaaaagacattatacacaagaatacatattgtaattccatctattgtgatagaaatcaga

SEQ ID NO: 213359 - DNA, 591 bp, Homo sapiens
gtggctgagcaacttttgctaagattagtagagagaaggaaccatcaaggtggtagaagaagaccctggaagcatttctgagatctttgaggctctctcttccatcacaggcccagaggcttaggaggacaragtggctttggggacagactcaggcctgctgcccagggttacctcaggtctctgctcccttcattccaacatagtcctcctcagccaccccagctgtggctcaagtggcctcagacactgagcagctcactgcttaagaagatacaagtcgtcaaccttagtggcatccatgtgcaaattctgtaggcttgcagaaagaaagagttgtgaagggttggcagcattcacccaaatgtcaaaggatgctgcagaaagcctgggggctcaggcagagacttgtcacagggcaaggcccccaataaagggctccaactagagcaatgctgagtggaaatgcggggttagagttgccacagagagtctccactagggcaatgctgagtggagccatggaagcaccactgggactccagagctgtagagtcaccagtagcaagcaacatctgcctgggaaagctt

SEQ ID NO: 213360 - DNA, 588 bp, Homo sapiens
aataccaagagtgaggcccaatgtaaaccacagaatttgggtgatattcatgtgtcaatgtaggttcatcagttgtaacaaatgtaccactctgctgcaagatgttgataatggggaggttatctatgcatgtgtggggaccagggtatgcaggaactctgggtacctcctgctcartttggctttgaacctaaagctgctctaaaagataaagtctactttaaattaatgtttttcctctgccttttgaatactttattctccattttattgtaaaatcttttcataggctccactttgagtttttcaaaggtggaggactatctatgcctgataagagctccacaaaaatagggcaggagattctttgtaggcttcctcattttctactttcatgctgttagagaagttcttttaaaacccaatctaaaggacttgcttctcatgtgttcacatagtaagtaagacgagtgagtggagctgctaaggcaatgaatgatcccagcaggccaactttgtctctgcatgctttcttccctgtctttgcagaaacctctgggtcagtggctggatttggtgagacctgga

SEQ ID NO: 213361 - DNA, 597 bp, Homo sapiens
attttccagcctgttgatggcagattatgagaattcttggtcccctaaccacatragccaattcttagaatctctctctctttctctgtctctcctgagccaattcttatagtctctccctctttctgtctctctgtctctgtctctctctctctcctctctctgtctctctttttctctgtatgctcacatacacatactttattggttctgtttctctagagagccctgaataacagattttgttgccaagagtggttctagaggaacagaattttaaggataagttttctgaattggttctgggatctctggatttagctctctaatctgattagatttattggtgctaatttaatgccttatttccactggtaaagagaacactgagtataacaatacataaaatactgcactggatacttccaatcaaccacttacaagaaacaaagagctaagggactctgtacatgatactttcaaatatttttgaaaactaagggatataatcatgttgctagacaaagtggtgagctctgggatttgaattcccagctcaagtgctgcataaacgacttaagagcttcttcttctccc

SEQ ID NO: 213362 - DNA, 600 bp, Homo sapiens
tgtttctttcattttcattgtggataattaattgtactatccactcaattggctatcaaagtacatggattttccctaggcagcagcataaaggacattacagtttcatgccaaagaattctctgttgtccaaatataaaaattgcagttataagaaataatatgggaaactgcctgaaggataagcagttcatttattcctcctaataacctaaattttatccttgctttagttaggccaccaataagttgcacatgtatactgcattctctgagatcctcattgaagtgttttctctggatcataatttgggggtatgccatcacttttgctctgaagaaaatagcactactactgataataatgatgataatgttgatgccaatattaatttccccaaaactggctcctacaatcttcccataatgcccctcttacctcatctagttagtatcaactccattcttctatttgctcaaaccaaaagctctggggtcatcacttcctctttttttcctctgacatccracatggaatccttcatcacagcttgttgattctaacttcaaaaaactccagatgctgactatctttcacca

SEQ ID NO: 213363 - DNA, 600 bp, Homo sapiens
tgtttctttcattttcattgtggataattaattgtactatccactcaattggctatcaaagtacatggattttccctaggcagcagcataaaggacattacagtttcatgccaaagaattctctgttgtccaaatataaaaattgcagttataagaaataatatgggaaactgcctgaaggataagcagttcatttattcctcctaataacctaaattttatccttgctttagttaggccaccaataagttgcacatgtatactgcattctctgagatcctcattgaagtgttttctctggatcataatttgggggtatgccatcacttttgctctgaagaaaatagcactactactgataataatgatgataatgttgatgccaatattaatttccccaaaactggctcctacaatcttcccataatgcccctcttacctcatctagttagtatcaactccattcttctatttgctcaaaccaaaagctctggggtcatcacttcctctttttttcctctgacatccaacatggaatccttcatcacagcttgytgattctaacttcaaaaaactccagatgctgactatctttcacca

SEQ ID NO: 213364 - DNA, 646 bp, Homo sapiens
atgtaacttaactattttttccccttaagcaatgaaagcaaaatttgtaatctgacctcaactasatctttccagtgaggatgtgatggactacccattgcttagcattggatcttcttagggaaagtggtcaacattccccagaattctctactggatagagagacaagagaatagcctctcattcgtattaccatattaccttgtagaaatcaattctattgcatataggacacatttttgaggattaagtgaataagatatcttagagattagttacaggtttgtctgttatgtgttcggctctgttcagcaagaggcatctgcaattctattaagaattgaaaaatcaaccattgtcaacgactttacatctgggaaaggcaacacagttctttccatttaagtacatagactgaccctgaaggaatttgatcaaaaatttgagcaagtccttgccaaataaaaaaaagaaaacaccaccctcttctcccctgagcaagactaggatccttcatgggatatttatcaaatgcaatgtctaccttgctaacatccctttacactagtctagtcattctttaaatcataaataggactctctggagtgtttcaaggtatagcaaatcaaatataacaggacttc

SEQ ID NO: 213365 - DNA, 646 bp, Homo sapiens
atgtaacttaactattttttccccttaagcaatgaaagcaaaatttgtaatctgacctcaactagatctttccagtgaggatgtgatggactacccattgcttagcattggatcttcttagggaaagtggtcaacattccccagaattctctactggatagagagacaagagaatagcctctcattcgtattaccatattaccttgtagaaatcaattctattgcatataggacacatttttgaggattaagtgaataagatatcttagagattagttacaggtttgtctgttatgtgttcggctctgttcagcaagaggcatctgcaattctattaagaattgaaaaatcaaccattgtcaacractttacatctgggaaaggcaacacagttctttccatttaagtacatagactgaccctgaaggaatttgatcaaaaatttgagcaagtccttgccaaataaaaaaaagaaaacaccaccctcttctcccctgagcaagactaggatccttcatgggatatttatcaaatgcaatgtctaccttgctaacatccctttacactagtctagtcattctttaaatcataaataggactctctggagtgtttcaaggtatagcaaatcaaatataacaggacttc

SEQ ID NO: 213366 - DNA, 646 bp, Homo sapiens
atgtaacttaactattttttccccttaagcaatgaaagcaaaatttgtaatctgacctcaactagatctttccagtgaggatgtgatggactacccattgcttagcattggatcttcttagggaaagtggtcaacattccccagaattctctactggatagagagacaagagaatagcctctcattcgtattaccatattaccttgtagaaatcaattctattgcatataggacacatttttgaggattaagtgaataagatatcttagagattagttacaggtttgtctgttatgtgttcggctctgttcagcaagaggcatctgcaattctattaagaattgaaaaatcaaccattgtcaacgactttacatctgggaaaggcaacacagttctttccatttaagtacatagactgaccctgaaggaatttgatcaaaaatttgagcaagtccttgccaaataaaaaaaagaaaacaccaccctcttctcccctgagcaagactaggatccttcatgggatatttatcaaatgcaatgtctaccttgctaacatccctttacactastctagtcattctttaaatcataaataggactctctggagtgtttcaaggtatagcaaatcaaatataacaggacttc

SEQ ID NO: 213367 - DNA, 611 bp, Homo sapiens
tttagaacttgattatttcttgtagggctggtctagtagggattaatttccttagctttggtttttctgggaaagactttatttctccttcatttccaaagaataattttgctggatatagtatccwtaactggcagtttttgttttgtttttttttttcctctttcagcctttgaatctatgtcccattctctcaatggcctgtaaggtttctgttgagaaatctgctgttagtctgatgggggttaattaatagatgatacttttgtctttctgtttttagaagtctgtttttgactttaggcagtttgaccataatgtgcatggagaagtcctttttttgccttgtatctgtttggacacatctgtgcctcctgtatcttattgtctaaatctcttgctagacttgggaagttttcatccattattttgttaaataggttttctaaccctttcattccttcttcactctaggaccctgataattcatatatttggttgctttatggtgtcccatatgtcacaaaggcattgctcattctttcagattcttttttgtttatttttgtctgactgggttattttaacagacctctgttcatgttctgaga

SEQ ID NO: 213368 - DNA, 618 bp, Homo sapiens
gtctgtgaacattataaaatttgaaaatcctgtagtagtcagaagtagctttgtatttttgtttaattcttccattatgatggatgaatcttaacactttaagtgggaagcaggttgagtgaaaaatggaaatagtaaccagggaaagaggaaaagaggaaacttgctttatgacattagataagttggggtctgttatagccatttattccaaacatgcaaagagttatttcttctgttgacacttaaattttaggaagatgtttattataaagcagtaaggtgatataatcaatgttaaataaaagcaatttatcactatgaatatatttttctgagtttgacaaattgtaacactcagggaatgtctttagttacaaacatcagaaaatcagttacaggtggtttaaacaaacatggactcattttaagcaackacactgacatgatggctaagcaatgtcagaaggaaccaggctttttctagctcctgattagccattattatgattatggggaaagaaaaacctctttttttcctgcttagcatgatactctgctcttaacctgtgtaggctgatatcttcaaagaaagcatgcccattgtcctccctcata

SEQ ID NO: 213369 - DNA, 420 bp, Homo sapiens
aacaaacatggactcattttaagcaactacactgacatgatggctaagcaatgtcagaaggaaccaggctttttctagctcctgattagccattattatgattatggggaaagaaaaacctctttttttcctgcttagcatgatactctgctcttaacctgtgtaggctgatatcttcaaagaaagcatgcccattgtcctccctcatattcctccccctagaaccccaactttaatttctttatgtttttattagtaaatataggaggaagaaaaaagatatagattatgagcttgtgattaccattggagtttttattgttatgcttgcatgatgacctctgtatcttcaggttttrgttctctttttcaggctgtattagaaggggaaagatggaagaagctaaaaggcaaaagata

SEQ ID NO: 213370 - DNA, 615 bp, Homo sapiens
agaataaaaaattctgaattttatttgaaattaaccttccgtctttccttgtccctcttccttcagcaggataacctaaattttcagctcaattggwgtttgaagaaagcaagagaatgatagtcttggattctctgagtttagcagatgtttgaaactgactctctcaatggaaacttttgtgaattctgtgtagagttccacattgggtccttctgtcttcaactgccttgagataggcagtgtttctcctttgccagacttctcctgagctccctacagtgtaatatacaggctcttacccttggggtcctctttccctagcaggctgccttctttaacaagacctttttcacaatgaccctcactaattcactgcatccccaactacaggagatccatatcaagttctctgagttatcccatagaattctctgtcacttttgtttgggattagaagtctcagctctattctcttcaaagaaatccttctttaaaatttcagcagtcatgatgatctctctcagaatcctctttggccagcatcagctatggccttcaagcctcagccaaaaccgtgaagggaagagtcacattttaacagcctgttatgta

SEQ ID NO: 213371 - DNA, 615 bp, Homo sapiens
agaataaaaaattctgaattttatttgaaattaaccttccgtctttccttgtccctcttccttcagcaggataacctaaattttcagctcaattggagtttgaagaaagcaagagaatgatagtcttggattctctgagtttagcagatgtttgaaactgactctctcaatggaaacttttgtgaattctgtgtagagttccacattgggtccttctgtcttcaactgccttgagataggcagtgtttctcctttgccagacttctcctgagctccctacagtgtaatatacaggctcttacmcttggggtcctctttccctagcaggctgccttctttaacaagacctttttcacaatgaccctcactaattcactgcatccccaactacaggagatccatatcaagttctctgagttatcccatagaattctctgtcacttttgtttgggattagaagtctcagctctattctcttcaaagaaatccttctttaaaatttcagcagtcatgatgatctctctcagaatcctctttggccagcatcagctatggccttcaagcctcagccaaaaccgtgaagggaagagtcacattttaacagcctgttatgta

SEQ ID NO: 213372 - DNA, 656 bp, Homo sapiens
ttaatagtgaacttgctgtttttctctcaaaaatgagaaagcttttgggagcttctttttatcttaagtgttctgaaatttcaagacagtatgcctgggttctttttaaattccttttgctggatactcaggtttcaaatcagaaggtttatgtccttcttcatttctgcaaaattatcttcaattatttcttgtactatctawtcttcatctgtgttcttactgagataccgaatcatctgaatttgttccttttttgtatttttttctttcttcatattttataagaattattcagctttattttaaagtcctatttttattctctaagtgactattcttgtatttaactttttatagcatggtctacattttaatggttgtcatatatttttgaatgtttatttacagagcatcacttttaaaattgttttctttccataaattgggtctgtttgttttggaacaagcttttccatgtatttttctttttcactctctttagtgatctccagctgtcaattcatgttgtagaaggacagtgatgttggtcacagattccccaaatgctaaggttaggtgagaaccagcatactcatcaaagatcttcattttccccaaagacaaaatgcagtgcttttagaaaaaaattaatt

SEQ ID NO: 213373 - DNA, 345 bp, Homo sapiens
ccatagtacaacagaacaccaggtagacttatwaggtttttgactcgtccctgactcctggatgacacctctggacccacctcaggcctgggaagcactgccctgaaggaaagaacacaggcctggctggctttgccagtagctgactgtagagccccaggcccttgagcaaatataggcagtagcaaaggagaggttacagcaggccttaggtgagacccagtgctgtgttggcttcaggtctgacccagaagagtcatagtggtggtggccacatgggtgcttgtgtcactccacccccagttttaggtgacttagaacagagagagaaaccctgtttgtttg

SEQ ID NO: 213374 - DNA, 345 bp, Homo sapiens
ccatagtacaacagaacaccaggtagacttattaggtttttgactcgtccctgactcctggatgacacctctggacccacctcaggcctgggaagcactgccctgaaggaaagaacacaggcctggctggctttgccagtagctgactgtagagccccaggcccttgagcaaatataggcagtagcaarggagaggttacagcaggccttaggtgagacccagtgctgtgttggcttcaggtctgacccagaagagtcatagtggtggtggccacatgggtgcttgtgtcactccacccccagttttaggtgacttagaacagagagagaaaccctgtttgtttg

SEQ ID NO: 213375 - DNA, 405 bp, Homo sapiens
gtgaggactcaaagcctaaccacatcaactcatatctcttggaatgcacagaagtctaatcaaarttaactaaagacttaaatctaagacctcaaactatgaaactattactagaaaacactgggacaaatctctaggacactggtttgggcaaagatttcttgagcaataccctacaagcacaggcaaccaaagcaaacatggacaaatggaatcatgccaagttaaaaaccttttgcacagcaaaggatacaatcaagaaagtgaaaggacaacccacagaatgcaagaaaatatttgcaaactacccatctgataagaggttaataatcagaatatacaaggagctcaaacaactctatagaaaaaaatatataatgaactgatcaaaacatgagcaaaaga

SEQ ID NO: 213376 - DNA, 422 bp, Homo sapiens
ttacttgttctcactcatttgtgaaacctaaaaatcaaaacaagtgaactcatggacatagaaattaggagaattgttaccagaggctggaaacagtagtaggggactgggggagaggtggagattgttaatggatactaaaaaacagagttagaaagaatgaataagacctgmtgtttgatagcataacagggtgactgtagtcaataataacttaattgtacatttttaaataacttaaagagtgtgactggattgtttataactcaaaggataaaagtttgaggggatggataccccattctccatgatgtacatatttcacactacatgcctgtatcaaacctttccatgtaccccataaatgtatatacctactaagtacccacaaactgtttttcaaaaattttaaaaagaaactc

SEQ ID NO: 213377 - DNA, 450 bp, Homo sapiens
aggctggaaacagtagtaggggactgggggagaggtggagattgttaatggatactaaaaaacagagttagaaagaatgaataagacctgctgtttgatagcataacagggtgactgtagtcaataataacttaattgtacatttttaaataacttaaagagtgtgactggattgtttataactcaaaggataaaagtttgaggggatggataccccattctccatgatgtacatatttcacactacatgcctgtatcaaacctttccatgtaccccataaatgtatatacctactaagtacccacaaactgtttttcaaaaattttaaaaagaaactccttggataatccatgaaagaaaaagatgataaactggatttgarccaattaaaataatttgctctgttgtcaaaaagaggatgagaaaacagcccacatgccataagaaaa

SEQ ID NO: 213378 - DNA, 566 bp, Homo sapiens
ttaagtattatagatatttttccagtctatagcttacctattcattttcttaataatgtcttttgattgatttttaatttttaactttggtgaattccagttgtatactttttttatgattagcatttttgtgtcctatgaaactgttgccttcctcaatgtcactaaattctcttaggttttcttctagcaagtttatgtttcaaattttcacccttaggtctataattcrtcccaaatttatttttgtctgtaaagcaatgtcacgattcattttttttctcaatataattacccagttgtttcaaaactggttattaaagtttttctcttaatcattgaattttcttggcaccaaattattaactcttgacaaaaataattgacccttaagtaagcagacagacaagcagtgcttctattttatagcaatgtaaataatacacaacttacacaaagactttttagaagctaactaacagtggtcctatctaagtacgtacaccagattttttataaccacttttaaaataaaagtatttagattttaacacatagattaggac

SEQ ID NO: 213379 - DNA, 566 bp, Homo sapiens
ttaagtattatagatatttttccagtctatagcttacctattcattttcttaataatgtcttttgattgatttttaatttttaactttggtgaattccagttgtatactttttttatgattagcatttttgtgtcctatgaaactgttgccttcctcaatgtcactaaattctcttaggttttcttctagcaagtttatgtttcaaattttcacccttaggtctataattcgtcccaaatttatttttgtctgtaaagcaatgtcacgattcattttttttctcaatatarttacccagttgtttcaaaactggttattaaagtttttctcttaatcattgaattttcttggcaccaaattattaactcttgacaaaaataattgacccttaagtaagcagacagacaagcagtgcttctattttatagcaatgtaaataatacacaacttacacaaagactttttagaagctaactaacagtggtcctatctaagtacgtacaccagattttttataaccacttttaaaataaaagtatttagattttaacacatagattaggac

SEQ ID NO: 213380 - DNA, 401 bp, Homo sapiens
tgcagagatgcccaggtggttgggattcaatacaacgagctgtcacgctgcacattcttggagtacaaccttaatgggcattttcccacctgtgcaattcctctgttttcaccccactccattcatatttcacaaactactctaattatagtatttattattgacctcaggaaaaagaagtttgaaagggtggaaaaaacatgcattttgtctccatggatagtaaatcactgagctattgttccttgggaatcccaattcatgagaaattacatagacttttgccctaacactaatcagctgcctgatctgtaaatatttcagmtccttgcctgtatctatttctccttgcagaaaactgtaatttatctagatttttctaataattcactgacatttta

SEQ ID NO: 213381 - DNA, 605 bp, Homo sapiens
agtaaatcactgagctattgttccttgggaatcccaattcatgagaaattacatagacttttgccctaacactaatcagctgcctgatctgtaaatatttcagatccttgcctgtatctatttctccttgcagaaaactgtaatttatctagatttttctaataattcactgacattttactgctakccaatgagtaaatcattgttgcttttggtatcttatgattttgttcttttgtgtcaaagtttagctagtttcatctatcaggttggaataaaaaatgcaaattatgactataccacttatatagttacatgatctactgaccaaagttaatcatcactttaatcttggtaactcattcagagccctaattgtaatagcctttgcctgagttacctagagagtggtctcaataatccccttttatttttcatgtagagaaaagggcacacaaaatgatattatctcgatcacccagcacatgtattaaactataacagactttttaaatcatgtgtgatcttttattttttgactgaaagggactaagtttgctgcccagagaagtctttagggagcaaggaaaggtaagcaaataaac

SEQ ID NO: 213382 - DNA, 605 bp, Homo sapiens
agtaaatcactgagctattgttccttgggaatcccaattcatgagaaattacatagacttttgccctaacactaatcagctgcctgatctgtaaatatttcagatccttgcctgtatctatttctccttgcagaaaactgtaatttatctagatttttctaataattcactgacattttactgctatccaatgagtaaatcattgttgcttttggtatcttatgattttgttcttttgtgtcaaagtttagctagtttcatctatcaggttggaataaaaaatgcaaattatgactataccacttatatagttacatgatctactgaccaaagttaatcatcactttaatcttggtaactcattcagagccctaattgtaatagmctttgcctgagttacctagagagtggtctcaataatccccttttatttttcatgtagagaaaagggcacacaaaatgatattatctcgatcacccagcacatgtattaaactataacagactttttaaatcatgtgtgatcttttattttttgactgaaagggactaagtttgctgcccagagaagtctttagggagcaaggaaaggtaagcaaataaac

SEQ ID NO: 213383 - DNA, 580 bp, Homo sapiens
atgcaagtctgctgacgctcccagccaaataaagcctcttccttctttaacatggcatctgaggggttttgtctgtggctcatcctgctgcatttcttggttccctgaccaggaagtgaggtgattaackgacagttgaggcagccccttaggtgacttacacctgccctgcagagcatccctgcagtgaactccagccagcttgagcgatggggatcctgagaccgctcctgggtaggtgtttgtcctggtagaactcctcgtcagagtggtgcatggcaggcccccgcagatgatcaatgcaatgtctgaacactgggaaggaaccattgcttggagtccagacatctggaatacagaaggaccggtcctgggaacttgcccactgcatttgagtggaagcgtggcctgatcacccactgtgtgcccttatgggcactttggtctcagtattgattttgatttggcttgacctgtttgcaaaaaggaaagtgaaagtgagtgagtgcttgagttttagatgtgcgaggtgagcgagtgacctctttaccctttccttcttgtggtgtgagtgttgttt

SEQ ID NO: 213384 - DNA, 580 bp, Homo sapiens
atgcaagtctgctgacgctcccagccaaataaagcctcttccttctttaacatggcatctgaggggttttgtctgtggctcatcctgctgcatttcttggttccctgaccaggaagtgaggtgattaacggacagttgaggcagccccttaggtgacttacacctgccctgcagagcatccctgcagtgaactccagccagcttgagcgatggggatcctgagaccgctcctgggtaggtrtttgtcctggtagaactcctcgtcagagtggtgcatggcaggcccccgcagatgatcaatgcaatgtctgaacactgggaaggaaccattgcttggagtccagacatctggaatacagaaggaccggtcctgggaacttgcccactgcatttgagtggaagcgtggcctgatcacccactgtgtgcccttatgggcactttggtctcagtattgattttgatttggcttgacctgtttgcaaaaaggaaagtgaaagtgagtgagtgcttgagttttagatgtgcgaggtgagcgagtgacctctttaccctttccttcttgtggtgtgagtgttgttt

SEQ ID NO: 213385 - DNA, 580 bp, Homo sapiens
atgcaagtctgctgacgctcccagccaaataaagcctcttccttctttaacatggcatctgaggggttttgtctgtggctcatcctgctgcatttcttggttccctgaccaggaagtgaggtgattaacggacagttgaggcagccccttaggtgacttacacctgccctgcagagcatccctgcagtgaactccagccagcttgagcgatggggatcctgagaccgctcctgggtaggtgtttgtcctggtagaactcctcgtcagagtggtgcatggcaggcccccgcagatkatcaatgcaatgtctgaacactgggaaggaaccattgcttggagtccagacatctggaatacagaaggaccggtcctgggaacttgcccactgcatttgagtggaagcgtggcctgatcacccactgtgtgcccttatgggcactttggtctcagtattgattttgatttggcttgacctgtttgcaaaaaggaaagtgaaagtgagtgagtgcttgagttttagatgtgcgaggtgagcgagtgacctctttaccctttccttcttgtggtgtgagtgttgttt

SEQ ID NO: 213386 - DNA, 580 bp, Homo sapiens
atgcaagtctgctgacgctcccagccaaataaagcctcttccttctttaacatggcatctgaggggttttgtctgtggctcatcctgctgcatttcttggttccctgaccaggaagtgaggtgattaacggacagttgaggcagccccttaggtgacttacacctgccctgcagagcatccctgcagtgaactccagccagcttgagcgatggggatcctgagaccgctcctgggtaggtgtttgtcctggtagaactcctcgtcagagtggtgcatggcaggcccccgcagatgawcaatgcaatgtctgaacactgggaaggaaccattgcttggagtccagacatctggaatacagaaggaccggtcctgggaacttgcccactgcatttgagtggaagcgtggcctgatcacccactgtgtgcccttatgggcactttggtctcagtattgattttgatttggcttgacctgtttgcaaaaaggaaagtgaaagtgagtgagtgcttgagttttagatgtgcgaggtgagcgagtgacctctttaccctttccttcttgtggtgtgagtgttgttt

SEQ ID NO: 213387 - DNA, 381 bp, Homo sapiens
ctatacaagtggggcaccagcatctgctcagcttctggtgagacctyaagcagcttttactcatggcaggaggcaaagagggagcaggcatgtcacatgacaagaaagggaatgagtgagaggaagaggtgcaacactcttttaacccatttctcatttagaaaaaaaaagtgcagctcactgccagtactcatttaattttacacaaacatgctctttgaggtaggagcaaatctaattgattttcaatgtgaaaataaaatctaaaaactgttcttggagttatttgtaaacagaacttgtctctaatcttaatgtaatagaaatgtatatgacgatcagtatttaataatgtttatctgttagtaaatttcaaatttt

SEQ ID NO: 213388 - DNA, 466 bp, Homo sapiens
gttgcatgacgcagttcccagtttaaattttccttttgactgagggagtttggaatcctgagatttattttcctttcacatatyttgctcaatttattcatgaactgtgattttattcaaaattattttattttcaaattcattgcattcaaataatcataaaatgtgtacctgcattaaatgaggcagtgttgttctttttcttccttcatttacaaaagcttttttccacttttttcattgaataaaaaagaaacttagttatggctaggataaataatgtaatatgtgactattttgccagttatgtttcttctactgtgaatagcctatgccataaataacccatttttcaaatgagcaggcatttcttctattattagtttgcatgagctctttaaatatatcttatgtagcaattttcagttggttagatacatgagtttatccctagcttttctaatag

SEQ ID NO: 213389 - DNA, 450 bp, Homo sapiens
aatggtccctctggtgtatatagaggaaccttccttgcctcttcatagcttttggcagttttctgcacacctttgctgtcccttgaagctgcaaaatccagcctcttcgttgccacattgttccttccttgtgtgtatattggtcttctcatggccacttcttacaaagacaccagtcgcattggattaggaaccstccttactctggtatgacctcatatttaccacttacatccacaacaaccttttctacaaataaggtcacactttgtaatactgaaggttaggaaacactgggtgtttggacttcagtatatctttttgttgttgttggggggatacaattcaactgataatactgtggggctaatataactcacattttacagatgaagaaatttgtgcatattgagtcatttacatagtatcacaagtaacagagccaggatt

SEQ ID NO: 213390 - DNA, 450 bp, Homo sapiens
aatggtccctctggtgtatatagaggaaccttccttgcctcttcatagcttttggcagttttctgcacacctttgctgtcccttgaagctgcaaaatccagcctcttcgttgccacattgttccttccttgtgtgtatattggtcttctcatggccacttcttacaaagacaccagtcgcattggattaggaaccgtccttactctggtatgacctcatattwaccacttacatccacaacaaccttttctacaaataaggtcacactttgtaatactgaaggttaggaaacactgggtgtttggacttcagtatatctttttgttgttgttggggggatacaattcaactgataatactgtggggctaatataactcacattttacagatgaagaaatttgtgcatattgagtcatttacatagtatcacaagtaacagagccaggatt

SEQ ID NO: 213391 - DNA, 446 bp, Homo sapiens
aagctcttgtggccttagtgcttatcatgcattttcagtagggaaagaaaatcacaatgaagaacaaaacattttcaacttttaaaaactaaaagasggaaaatttaaggcagaactaaattaagtagcaataaattagggctggtttagttggtggtttccaataagctctacagccacttccttcaccaagtacatgagtgttgcttcagcaatcattcctttaattcatgtcctttctctctctagaaaaactcatatattcattatcctaggagtatcaggtttgcaaagctggaccaaactaaagactcttcgaggtgcactttggcttcttaaaagagctaccaagattttggctgaggcatgtgacttaaaactcagcaggtatgattggcaagctatcctgtgaaacttgtaatcaatcaccatcggttttagtgaat

SEQ ID NO: 213392 - DNA, 510 bp, Homo sapiens
gcttcctttgtgtttctgtccttgaatccagttgttttacttgagattatarcaaagtcttctctgtcttttatataatgattctttaatatttgacctattcctcttcccccacctcatttatgagttatgtctattccatcttaaacattctcaggttcttaactgtatctgctactgtaaatggtagtttagtttttgttattttgattttttttgtttattttgcgtttttttctagctttattgctgtataattgacaaatagaaattgtgtgctacgagttgatgtgtagctattcatatatgttctgaaatggttatcacaatcaagttaattaacatatctattactttatgtagttaactctgtgtgtgtgtgagtgtgtgtgtgtgtaatgagaatatttaacacctaccctattggcaattatctccctattttcctttcccccaaccccacccttctactctgtgctgctataaatttgactattttagatttcacat

SEQ ID NO: 213393 - DNA, 586 bp, Homo sapiens
aagcttatgacatgtgtagggatgtgactagtaatcttacaaaatagggacctgaaagatttactgcaatttacctgaatgaaaactgatttaacactcactacccacattaagatgattttttaaaaatagctgttaccataattaacccagatttataaatcatctctaaaaaaatctggccccattgatccaatyggtttctgcacactcaattactaaagctgaacattctaaatagacttgcctgcccctttgtggttctgttgtgttgaccctacccttgttaaaagtatgtattctttattagactgctcatctttaaatgcctctcttcagcatttgttagttgtgtgacactgatattcccattttgagaccttcattcttcaactataaaataaaaatttaaaaagtactgcagttgaaaatgtcagttgtcttccaaacatctattcatccctttttcattgccaacagaaccccaatttgaggtctggaaatatgatcagctaaatgtatactacatctttctggctgccttaaagctaagggttgccatgtaacagttccaaccaacaaggtg

SEQ ID NO: 213394 - DNA, 401 bp, Homo sapiens
aagctgaacattctaaatagacttgcctgcccctttgtggttctgttgtgttgaccctacccttgttaaaagtatgtattctttattagactgctcatctttaaatgcctctcttcagcatttgttagttgtgtgacactgatattcccattttgagaccttcattcttcaactataaaataaaaatttaaaaagtactgcagttgaaaatgtcagttgtcttccaaacatctattcatccctttttcattgccaacagaaccccaatttgaggtctggaaatatgatcagctaaatgtatactacatctttctggctgccttaaagctaagggttgccatgtaacagttcyaaccaacaaggtgtaagtggaagttggctgtgggtttttgagaaagctt

SEQ ID NO: 213395 - DNA, 574 bp, Homo sapiens
tatgttttcttatctttcagaacaaaaaagtagacaagtttcctagtcaagatattccttagctacagcagtcacaggaaaattatagcacatgttacctctaatcatatatctgtctatagaatgattcatcctgcatgtttctaacagagcgatcattgctcagcacaaccctgctcatttaattactcctcagaatcctcaagtggctctcaatacttccaaaatacaagtcaaatcaggtttgcctgtcttccaaactcctcaacaattcaactctcagccatctttcattttgaaacacagrttgttttgcgtagaatttacataaaataaaatttactctttttgatgtataattctatgagttttactaacgtatatagtcatgtgactacaaataaaatcaatatatagaacattttcatcacctgaaaatgtaaccttctgcctctttgtaggcattcatctccctcagtcctagccagtggcaaccactgacttatttcttgtccttcaacttgactcctagaaactcatgtaaacggaatcataaaggatatagccttttaag

SEQ ID NO: 213396 - DNA, 546 bp, Homo sapiens
ctcctagaaggatcccctctggtcagagaagcatatgatatggtgtcaaaaaacctggtggacttagccactactaaaaagctcagagtttccaccacagtaaaaattttcttaaaatctttcttgggaggccgaggcgggcrgatcatgaggtcaggagatcgagaccatcctggctaacacagtgaaaccccatctctactaaaaaatacaaaaaaattagccaggcgtggtggcgggagcctgtagcccagctacttgggaggctgaggcaggagaatgatatgaacccgggaggcggagcttgcagtgagtcaagatcctgccactgcactccagcctgggtgacagcgtgagacaccgtctcaaaaaaacaatccttctcaggggtctgaaaaattttaacaagaaaaacacagttgtgaaaattttttatttaaaaataatttccatttaagaattgtctaccaagatattggacaaatcaaacccatgtttctctaaagttgtgtaaactgcaataaatcataaaataaaaacactgtt

SEQ ID NO: 213397 - DNA, 546 bp, Homo sapiens
ctcctagaaggatcccctctggtcagagaagcatatgatatggtgtcaaaaaacctggtggacttagccactactaaaaagctcagagtttccaccacagtaaaaattttcttaaaatctttcttgggaggccgaggcgggcggatcatgaggtcaggagatcgagaccatcctggctaacacagtgaaaccccatctctactaaaaaatacaaaaaaattagccaggcgtggtggcgggagcctgtagcccagctacttgggaggctgaggcaggagaatgrtatgaacccgggaggcggagcttgcagtgagtcaagatcctgccactgcactccagcctgggtgacagcgtgagacaccgtctcaaaaaaacaatccttctcaggggtctgaaaaattttaacaagaaaaacacagttgtgaaaattttttatttaaaaataatttccatttaagaattgtctaccaagatattggacaaatcaaacccatgtttctctaaagttgtgtaaactgcaataaatcataaaataaaaacactgtt

SEQ ID NO: 213398 - DNA, 546 bp, Homo sapiens
ctcctagaaggatcccctctggtcagagaagcatatgatatggtgtcaaaaaacctggtggacttagccactactaaaaagctcagagtttccaccacagtaaaaattttcttaaaatctttcttgggaggccgaggcgggcggatcatgaggtcaggagatcgagaccatcctggctaacacagtgaaaccccatctctactaaaaaatacaaaaaaattagccaggcgtggtggcgggagcctgtagcccagctacttgggaggctgaggcaggagaatgatatgaacccgggaggcggagcttgcagtgagtcaagatcctgccactgcactccagcctgggtgacagcgtgagacaccgtctcaaaaaaamaatccttctcaggggtctgaaaaattttaacaagaaaaacacagttgtgaaaattttttatttaaaaataatttccatttaagaattgtctaccaagatattggacaaatcaaacccatgtttctctaaagttgtgtaaactgcaataaatcataaaataaaaacactgtt

SEQ ID NO: 213399 - DNA, 468 bp, Homo sapiens
agctctgtacaacaatgtgaacgtacacttaatagctctgaactgcacacttaagggtaagatggtaaattttatatgtatttgaccacaattaaaaaaacaaaccaaaaacccccagtgtttaaaagcatcaagagtaacaaaggcaacctagacttgtagggccaagattccggagaaaaggcaaacatactgagaggagccccataccagccttcactggttcccttcagtcacttgctgtctttggaggactggaaataagagcccaaccagaaagacaaaagtggagttggttaccaagcagctaggacttaagatgtcaaggttytgaagaggagagaaacacaaagagccgcaatttctgcaagaaatttttcactgagatgtttactgatacagcaccctaagcaaggggtgatgacaccaagaatccaaacagaaactatcaaagggaggctgaagatc

SEQ ID NO: 213400 - DNA, 431 bp, Homo sapiens
gaggaaccacaaaagcagcaccagtaaaagaaaatataataatgcaccatgtctcaatgaagatgagagtttcacaggaagtgtgaagatagagatggaagccttttaaaattgtcctttaaaattatattcttttttatttaatagttatcctcatgtcaaaaatttctcaaataatttaattttcatcaggattgtgattagatttgaattcattgattracttaaatcaattaatatcttgaaatgtttcaacatggtgcgtggcctcgtttatttatgtcttcttttatgtccttcaatggaaatgatagaaatgtgtaacttcattaacaaagtgtttcatattttggtaaagtttattttggaatatcttaggaaatgttactctttaatttgcctgctaaaattttgatttggtaactgctgat

SEQ ID NO: 213401 - DNA, 487 bp, Homo sapiens
acaaatttggggactacaaaaacaaaattattgaatgcacagtgttttcttcttttttttcataagaagttgaaaagggaacaataataaaaattgaagacccaatgtgtgcacataattaaagttgactcaccatttatcaaacatctataaagtgttacagaccatgctatgtgtgctagggaatatatayacacacacacacacacacacacacatatatgtatacacacacatacatatgtttgctcatatatagaattaccttctaattgaagagatttaaatgacatgttagctgatccccttttaaagacaatagtcatattcattcatttaatgaatatttattacctactgtgagtcatacacacattgttctaaatactgacaatacagcagtaatgaaacaaagtcccagtgctcagtgagattacattctaaaaaggagagagaaataggaagcaagcaaacaagcaagttagca

SEQ ID NO: 213402 - DNA, 420 bp, Homo sapiens
gttcatacagaaaatgttatttagacattcaaaactaagcttcaatttgggaacctttaatggtgattctatagctttgagagagcactacctcaaatatttataatatttactcaccaaaataaaatgttcactggtctctaaaagtgtttagggtrgtgtgttgaggctgatgattaaggttggtcagggatgtgggagaagaggttggatatcaaaattaaaaaacaaattgaactggaaactccatgtacatacaaatatacatataaacaaagaaaatagtaaaacaatgtggctgactaatattttcttgacacttagaagccaggagactttcaacactaattaaaacctaggaacataagctactcaatcaaattaggaattaaattaaatgtatgatttggttctgattct

SEQ ID NO: 213403 - DNA, 480 bp, Homo sapiens
atgttaacagatcagagggacacccaaaactgactagatgagcttactgtgactgtcctccctttrtagctcatttataaactgtaaaactcgcagtaatatagctcctgaggttatatgcagcaatttacctcattttcttttctcactcataatatagtattaaaaagaaacaaagaaacaaaaaacaaacttctattcctgaatttagctggatttactttgcttcccctttgtgcttcccattccaccattgcgtcattttccaaatactacaaattcagattagatgtcatgacaagtgatactataattaatttatttggtaaactgtgttgttagcaaaataaattgttgtagcaaagtcaaatgggatgctagaaagcacattggtttaagtaggtgttgggatcctaagttcagagttttagagctgttatttatttagtgacttagtttatacaaattgctttacctctc

SEQ ID NO: 213404 - DNA, 525 bp, Homo sapiens
agacaattaaaacaaaattaagtcaagacaaacactaaactaatagtgaagccaaattggctttcagttccaagtcaacacaaaaacacaaaaagaaaaactaaactggttacatgacctgagaggaacacatttgccctctctctatctctctttctctctctcttccttcctctctctctgtctctctgtcacacacacacacacacacacacacacacacatagtcccacatacacacattagaccttcctataacaagtcattaagttgtctaaattagaaatgtggtcctcattgtgagctgctatagaaatgcagrtatcttttctgtcatcttctcttaggaattgcaacaacatctagcttctcacaaaatcaggtaaagttgtgttcctctgccattcctctgctccagtgttgtaacatattttaatcaaaatgtatctaaaactatgaacttcaaaatacatagcttctcatatggtgacttcattatgtagtgtcaaaagagccgtatgccaa

SEQ ID NO: 213405 - DNA, 525 bp, Homo sapiens
agacaattaaaacaaaattaagtcaagacaaacactaaactaatagtgaagccaaattggctttcagttccaagtcaacacaaaaacacaaaaagaaaaactaaactggttacatgacctgagaggaacacatttgccctctctctatctctctttctctctctcttccttcctctctctctgtctctctgtcacacacacacacacacacacacacacacacatagtcccacatacacacattagaccttcctataacaagtcattaagttgtctaaattagaaatgtggtcctcattgtgagctgctatagaaatgcaggtatcttttctgtcatcttctcttaggaattgcaacaacatctagcttctcacaaaatcaggtaaagttgtgttcctctgccattcctctgctccagtgttgtaayatattttaatcaaaatgtatctaaaactatgaacttcaaaatacatagcttctcatatggtgacttcattatgtagtgtcaaaagagccgtatgccaa

SEQ ID NO: 213406 - DNA, 524 bp, Homo sapiens
cagaggctaggaagggtagtgagggtgtgtgtgtggcaaggagtgggattgsttaattggtacaaaaaataggaagaacaaatgacacctagtattttagcacaacaggatgtctatagtcaataataatttaattgtatattttagagtaactgaaagagtataattggattttttgcaacacaaaagataaatgcttgaggaagtggataccctatttaccatgatgtaattatcatacattccatgcctatatcaaagtatttcatttaacatataactatatacatctactaagtacccacaaaaattaaaaatcaaaaatttaaaaattaattaaattgaaatgaagaaaacaatacaaaaatcaatgaaccaaaaagtgagttctttgaaaagataaataaaattgacaaacttttagccaggctaactaaaaaaaatccaaataaataaaattagagatgaaaaaaggagacaatacaactgatactataaaattcaaaacatcattagaggctaat

SEQ ID NO: 213407 - DNA, 524 bp, Homo sapiens
cagaggctaggaagggtagtgagggtgtgtgtgtggcaaggagtgggattggttaattggtacaaaaaataggaaraacaaatgacacctagtattttagcacaacaggatgtctatagtcaataataatttaattgtatattttagagtaactgaaagagtataattggattttttgcaacacaaaagataaatgcttgaggaagtggataccctatttaccatgatgtaattatcatacattccatgcctatatcaaagtatttcatttaacatataactatatacatctactaagtacccacaaaaattaaaaatcaaaaatttaaaaattaattaaattgaaatgaagaaaacaatacaaaaatcaatgaaccaaaaagtgagttctttgaaaagataaataaaattgacaaacttttagccaggctaactaaaaaaaatccaaataaataaaattagagatgaaaaaaggagacaatacaactgatactataaaattcaaaacatcattagaggctaat

SEQ ID NO: 213408 - DNA, 524 bp, Homo sapiens
cagaggctaggaagggtagtgagggtgtgtgtgtggcaaggagtgggattggttaattggtacaaaaaataggaagaacaaatgacacctastattttagcacaacaggatgtctatagtcaataataatttaattgtatattttagagtaactgaaagagtataattggattttttgcaacacaaaagataaatgcttgaggaagtggataccctatttaccatgatgtaattatcatacattccatgcctatatcaaagtatttcatttaacatataactatatacatctactaagtacccacaaaaattaaaaatcaaaaatttaaaaattaattaaattgaaatgaagaaaacaatacaaaaatcaatgaaccaaaaagtgagttctttgaaaagataaataaaattgacaaacttttagccaggctaactaaaaaaaatccaaataaataaaattagagatgaaaaaaggagacaatacaactgatactataaaattcaaaacatcattagaggctaat

SEQ ID NO: 213409 - DNA, 547 bp, Homo sapiens
ctgatattcttgactgattcatgaaatcataggcaatttatttgcattgtgcaatgagccaagttttattatatgagaaagacacaaaaaaagttttaaatctctttatatattattcatttcaacgttgtttactataacctattgtaggtttataagtccttgcactttattccagttgttactatgcttcctcccaaatacatttacaatttatatttcctctttctttgtagaatttagatattaaaaattatttatcaaataccacatacttacaaatamgttttaatcatgagtgtccagatttatccatttatcttaatgtagccttgaatgctgtataaaaaaagatttatgcttcatgtcttttattcttaattagtaagggctccacagatgaaagcatttttgtaattgggctcagaagtgtttaaattgctaaattagcatatattgaatacattaagtaacattgaaaaattataaatacatggtaatagacctctaacaaaaatgctcaaattattttatatgattagtacaa

SEQ ID NO: 213410 - DNA, 517 bp, Homo sapiens
gatccatgacaacagtgacttattaatgcagttcaataaatgttttcttatatttataataagagatacggtaatagcattaaataatttgtttcgtaatggacggttgaattcattcttgtatttttcccatataattgtggaagagagagamatcacaagtgtctgtgcatttgatcatatagacttgaattgtcctataggataaaattgatattgtggtcacattcatttattcaatttatgtttatttatcaccagcattttcagttccttttttgggtaatagatacacacacacacacacacacacacacacacacataaaaaaaactcctgccctccagctaccttctaatgaaagagattggtaacaaatatataattatggaatataatgagagataataaatgcaatgaataaaaattatggcacaataaggagatagggaaatggaggcttattatatagggtggtcattgaagaagactatgaggaaatgacatttaagtatgg

SEQ ID NO: 213411 - DNA, 474 bp, Homo sapiens
gggtggtcattgaagaagactatgaggaaatgacatttaagtatggtcctgggggacctatgcagcaatmtagagttaagagtattaaaggcagagggaaagacaaatggggtggtcctgagacaggaatgtgcttggtcctcagcatgttcaagggttatttagaaacttatgtcacttctttacttttctattttgatttttttcaaagttaacactcaaatccattaattgactcagatggctagaaagtgggaaacataaaagttatgttcactgatgtatttgctttcagacatacttgtgttttgtcatgttagaaagtacttaaagacaaaggctgtaagaggtggatgtcagaggaaagacaggatcaatcaagataggtagaatagtgacacaaaagtataaattgtttttgtagaaattttaagaataacatttcagtggtgttactaataatttgtaacaatg

SEQ ID NO: 213412 - DNA, 568 bp, Homo sapiens
aaacagacaaacaaacagtaaaatgaagtagctatcaaaaatggccagaaatatgcttcctgaagttaaacaactgtgtatgaccaggggttaactttgctgagactgtagatcatgtaaatattacacagtgtccatggagtaatcctggacatttgctccagtatctgaagtataagagttggggacatcggcgggaaggctgtttactgttgataaaaaataagtatcaccagggtatccttgtttctgcccaacagagacaaaattacartttagactccgtatattaaaacaactggtttttacaaataggattgaaaatgccacatctcttgacagtgaaaggaaatgctgatagtgcagagtaaatagattgtagattgaaggaggaaatatgttcctgaagtatgttccaggacaacacaaataccaacatgaaggaattcagctcagagacagggaagcctgcagagtcatagggccacaagcacttgtaagagaaggaaaaccaaggccttactcagaatttaaaggcctcttaagcaagaaactaagtacctactgt

SEQ ID NO: 213413 - DNA, 600 bp, Homo sapiens
taaaacactggcaataagttctggatatacagayatttgctgcactgcatgtatagtctttggagatacagttttgttattgtgtgccagttcataaacacctctttcaaatgaaggtgcctttaacatatctttatgataggtctaataaatggcactgtcaccctgaaacgtgattccccgttcaagctcgttttggagctctttcaggaattggaatgtcattgattgttctcttctttagcggattccttattttctgaagactttggccttttttctttggcgcagctctgcagttgatctttcttcctctgccctggtctccgcggaggccaggacatacctccagctgcatcgaggcaggagtctccctccctctgaatctccgaacccctcagcctctccgggtccgctctcgcccgccgccgcaaacataccttttaatcattgttttcctagtaataaaaatcttacacaaaagctaaacgaaattttatgcaattccctggttaatgtttcttgatgacataagttgctccgtatatacttacctgagtgcagctaaccttgttacactggaactcgatcttgacacac

SEQ ID NO: 213414 - DNA, 600 bp, Homo sapiens
taaaacactggcaataagttctggatatacagatatttgctgcactgcatgtatagtctttggagatacagttttgttattgtgtgccagttcataaacacctctttcaaatgaaggtgcctttaacatatctttatgataggtctaataaatggcactgtcaccctgaaacgtgattccccgttcaagctcgttttggagctctttcaggaattggaatgtcattgattgttctcttctttagcggattccttattttctgaagactttggccttttttctttggcgcagctctgcagttgatctttcttcctctgccctggtctccgcggaggccaggacatacctccagctgcatcgaggcaggagtctccctccctctgaatctccgaacccctcagcctctccgggtccgctctcgcccgccgccgcaaacrtaccttttaatcattgttttcctagtaataaaaatcttacacaaaagctaaacgaaattttatgcaattccctggttaatgtttcttgatgacataagttgctccgtatatacttacctgagtgcagctaaccttgttacactggaactcgatcttgacacac

SEQ ID NO: 213415 - DNA, 420 bp, Homo sapiens
gtttctccaaaaacaaaatagggcatcattgtagtgtattgaagacattcctttgatgaactgtaaactattgccccaaatggggtcaatataagagctctttagaagcatagtgtttttgtttgtttgttttctttcttttttgtttgttttttagtgcattacttttaaakcaattattctaagacttatgtcatatcaggttaaattatatatacaatagtacatttttgaatattaatcacatgatagatttctgcttaagtttcatttcatgcaaaaggttatccttttttgtctaaccttctatttgttgttgaaccaaactttcatcatcattttataaatcagtgtatctcacactcctgctagtatctatcctctctgtctctataagatgaactttgcatatttaaattt

SEQ ID NO: 213416 - DNA, 575 bp, Homo sapiens
aaggcttcatttatcataggtgtcaattaagcatgaatgctgttttatttgggggttagagatacaacacagaagaatcagaaaatatcaatctctcaccaatttctaaaacattcttatatgccagtatgcatgaagatctgccttttctgttttatragaaaagcccaaatctaatgaatgggaagaaactgaaattggaatattgttaattatgcagtgtgatagcattttaaaaatgtatgatattgagtagaaaagtcaagagtggataatggcactgatgatgtttcataattgtgataatagacatagtcttatgaagcgatcctatggaccaatgttggcatcgtttaaggttttaaataatcagtatgaaatatggatgaaatagtttacgatattgaaaagaactaataagaacaacagccatgtcctaaacgatctcagattactccagtaatatagtctttatgtagtttgataacagatattgcaatgatcagcatactaaaacaaagtatgtagttgtaaaagggaagactttgtactatgctttaaaaatggattgaatc

SEQ ID NO: 213417 - DNA, 613 bp, Homo sapiens
agactgacatttgcatccgtggattgggagaggaagactcaccctcaatgcgggtgggcaccatccaactggctgccagcacaataaaaataaagtaggcagaagaaggtagactcactttgtttgctggatctcctggcttccttctttttcccgtgctggatgtttcctcctgctcctcctgcccttggacattggactcccggttctctagcctttggactgtgggacttacaccaatggcttgcagaggggctttcrggccttcagcaacagactgatggctgcattgtcggcttcccctggttttgaggcttttggactaggacagagccactactgtcttccctcttcctaagcttgcagaccagttgtgggactttgccttatgatcatgtgagcaaattctccctaataaacctcctttcatacatacatatatcctattagttctgtccctctggagaaccttgacaaacacagtacatataatagatacaattaatctacagagataaaaaagttaatgtcattcaatcccagcttcttctgattcttcctttgccaatctgccctagcccaggttataggcatggggatttaacagcaataa

SEQ ID NO: 213418 - DNA, 598 bp, Homo sapiens
tagaatgagctttttttttttaattttttatttttatttatttatttttttgagacggagtctcgctctgtcgcccaggctggagtgcagtggcgcgatctcggctcactgcaagctccgcctcccggattcacgccattctcctgcctcagcctcccgagtagctgggactacaggcgcccgccaccacgcccggcttattttttgtacttttagtagagacggggtttcaccgtgttagtcaggatggtctcgatctcctgacctcgtgatccgcccgcctcggcctcccaaagtgttgggattacaggcgtgatccaccgtgccyggcctacaatgcacatttttattgtcatgtgttaagttgaagattggtactctgtaatcgatacaatatagttttatatatatacaaactaaactttgaaaagtttttagtaaattgtgtcattacaattgactcctaatacgttcaaaaactgattcataatagtcagccagacgtcacaatctttcaatgctactgctcctatgctctttctcagttatgatatgcaaccctcagtcaggaaagtgtgtatagcaactgcccaggatc

SEQ ID NO: 213419 - DNA, 531 bp, Homo sapiens
agatctcagaattaatgtaaggaggcggaggtagctacaatcaattgggaagagactagaaagaaaggagctatgcagataaaaaagatacagaaacytgtagaatgttccccttgagtgcattgcttaataaaaatgtatgcatggttagggtgaaagataacagagaaagaaatgccaggaagatgtaaagaaattaaagcaattcctagactcatacagggctaggagataggtgagtgcttaccagaacaagagcaacataaacttataatatcacagttctatagaggccctgggtaaaacttactttcaatctcatgcacattattagcagaatctaatttccttgccaactgtcatctggcggccacatttcacctcaagaagccacattccagtccttgcacatggaccagttctcaaaaacagtggtggtgtttcaaacccttattgctctggaaatctccatgaaattccaagagacaagggtcatgagagattctccacatctctctctgcctccagcca

SEQ ID NO: 213420 - DNA, 515 bp, Homo sapiens
gcaatatggcataccctgtctccacaaatttgtttttttaattagccagacatcatgacacatgactgtagtactagctactagggaggcagaggtgggaggatcacttgaggccagcagtttgaggttacagtgagctatagctatgattgtgccactgcactccaggctgggtgacagagtgagaccttgtctccaaaaaataaaaataaaaaataaaataatgagtgggctttgtaatcatcagtttatagtctactaaattaacaaatgtcacacacacattttaagactactttcctccatacttatcagtgctatttgagaatgaaaccaaacttargtactcacacacattgtcaggtagctgaagatgttcactagactccaccttaaatatatatatatatttttttttttaacagaggttttaggttttaacagagtcttattgtcaagagtcttatagtcacatccttagtaaaatatttatgctaaggccatttcttatttgg

SEQ ID NO: 213421 - DNA, 509 bp, Homo sapiens
caggacacaaatcaacacagtgctaaatattaataatagatacacagtaggtgcagattgatgaatgaatgaatgcacgcacatgtcakatgtacagaagaggatgttcttaactctgcaggggattcaagggctggattccagaaagaggagaacgagatgtctggattctattcggtcttcccagtgcaatttctcatggctacctgtgaagtcagcatcatcatgattatccactttttaacctatgtagacacagggtagatgaatgcctcgaacccagggctttctgattcaaaaatctatattgttttctgctgtactatattgctgccaaaaaagcaggggaaagagaaccatgctttttcattttaaaaagaatatgctagccgcggtggctcatgcctgtaatcccaacattttgagagggtgaagcgggcatgtcacttgagctcagaagttggagaccagctgggaaacatggtgcaaccctgtctctacaaaaaata

SEQ ID NO: 213422 - DNA, 512 bp, Homo sapiens
ccaaggcaaccaagtgagttgaattccaaagacagcagttccctccaaggaaagatgggctacataaactgttctgctgttggcaggatatggggaaacttggtaataagaaagtggcttatgttttatgaattcttaaagactgagtgtgtgttagcatcacaattaaaaaaaatcaggagccccagacatraggaggattcacacacacctgcaactctctactgcatgattatgaacaagattgagggccagggagaagtctgggggcaatagcacaaccatgcaggaggtaactggctgccacttgagtcaatgcagcagctcctcctcttccccagatgcttcttgtatgtgaagaaaaagccttaagctgctaggggaagggtaggcaatcctcctgttccatggcagagccaaagatccaatgattttgggggaagaataaaagcaaaattcctgtcatgtgtggaggggtgtaggaaatgctcatggacctaaaatcctgcact

SEQ ID NO: 213423 - DNA, 512 bp, Homo sapiens
ccaaggcaaccaagtgagttgaattccaaagacagcagttccctccaaggaaagatgggctacataaactgttctgctgttggcaggatatggggaaacttggtaataagaaagtggcttatgttttatgaattcttaaagactgagtgtgtgttagcatcacaattaaaaaaaatcaggagccccagacatgaggaggattcacacacacctgcaactctctactgcatgattatgaacaagattgagggccagggagaagtctgggggcaatagcacaaccatgcaggaggtaactggctgccacttgagtcaatgcagcagctcctcctcttccccagatgcttcttgtatgtgaagaaaaagccttaagctgctaggggaagggtaggcaatcctcctgttccatggcagagccaaagatccaatgatttkgggggaagaataaaagcaaaattcctgtcatgtgtggaggggtgtaggaaatgctcatggacctaaaatcctgcact

SEQ ID NO: 213424 - DNA, 569 bp, Homo sapiens
tttcccaaaaacctatggaaataaaaaattaaaaaaaaaactattaaaaaactaaaacatggttagattatggagagaatgcaagaagtgcttgagtttttaaaattaaaacaaacaataaaataaaaactgcctgtttagggcaatccttctgtagctcagcgcccagaactcagggtagaagcaggcgtgacacttgaaaagactgggcgaaacaggtgccttttgttccagaccagttagtcgattggtgtggtttgtatgtggggttcctggagggtttacatgaatcctggtgattatccgcatacatatcccaggcctgagaagggcccagggtctccmagggataatggaatcagtctgctcatatttagtgcttcatgtggacatggtgtttccactgtttgggtatttagtcgtcatggtaaatgctgccacttccatttctgatgctttcgtaatgttaggatcactcagtattagtgccaggagggactcatgtttcatttagtctaactctcatgctaccaaataaagtcaacactggcactggaagaagtcatatt

SEQ ID NO: 213425 - DNA, 620 bp, Homo sapiens
ttccttttttttttcaaggaaataattttgggtccaccaagagtttactggacattttctgatctatgtttttgtaaataattgcccccatcccctcattatgtagtagaacactgatttagcctttgtaactagtgtgatttttatgccatttagatcagctgtatagtcttgaaamattacttaccctttcagttttcagatttctaaaatggaaataatattggtacctaccttgtaaggtccttttgaatattaaaaagaaccaatgccttaaaataaaaaattaaggcattggctaattgtggtggctcttctctgtaatctcagcactttggaaggccaagacggcagggtcgcttgaagccaggagctcaagaccaacctgggcaacataacgagacactgtttctatgaaaaaaaaaaaaaaaaaaagaaagaaagaaaagaagtgaagccatatgaagtacttagcatactgcctggcacataaatagcactcaaaaatatttgctgttgttgctgtgttgctgttgctttgttgttattctattcctcttcttcttcctcctcttctttctttctctaggtctttaccaaaggaaaaagtactttaggtc

SEQ ID NO: 213426 - DNA, 620 bp, Homo sapiens
ttccttttttttttcaaggaaataattttgggtccaccaagagtttactggacattttctgatctatgtttttgtaaataattgcccccatcccctcattatgtagtagaacactgatttagcctttgtaactagtgtgatttttatgccatttagatcagctgtatagtcttgaaacattacttaccctttcagttttcagatttctaaaatggaaataatattggtacctaccttgtaaggtccttttgaatattaaaaagaaccaatgccttaaaataaaaaattaaggcattggctaattgtggtggctcwtctctgtaatctcagcactttggaaggccaagacggcagggtcgcttgaagccaggagctcaagaccaacctgggcaacataacgagacactgtttctatgaaaaaaaaaaaaaaaaaaagaaagaaagaaaagaagtgaagccatatgaagtacttagcatactgcctggcacataaatagcactcaaaaatatttgctgttgttgctgtgttgctgttgctttgttgttattctattcctcttcttcttcctcctcttctttctttctctaggtctttaccaaaggaaaaagtactttaggtc

SEQ ID NO: 213427 - DNA, 468 bp, Homo sapiens
tgctcgccgtatacctggataaatttgtctcaaaaaaaaggaagccagtggcaaaaatgaaactttattagagtyttaaaaatactatttacagtccatggatgttttacttcttctttgaacagatgtttcctgccagtcaattattgttccacatctttgtgtgtgaaagggttaataataaaggctgttgtattcccctgcccaggatttgttcaaaatacttatcgactactgaatgaaaggcctggtaaatattttcagcctatgaaaacatatagttcctcatgaatgaaaatattatatttgtggtccaacagatattgctggtaggtttgcttgtttgttttccctaatgttgatgaagtttctgtaatccagtcacaggctcttggtaaggacccaaatagacaggggacaagagaacttctagttcctttaagcaacttgagataaatgaattacaat

SEQ ID NO: 213428 - DNA, 468 bp, Homo sapiens
tgctcgccgtatacctggataaatttgtctcaaaaaaaaggaagccagtggcaaaaatgaaactttattagagttttaaaaatactatttacagtccatggatgttttacttcttctttgaacagatgtttcctgccagtcaattattgttccacatctttgtgtgtgaaagggttaataataaaggctgttgtattcccytgcccaggatttgttcaaaatacttatcgactactgaatgaaaggcctggtaaatattttcagcctatgaaaacatatagttcctcatgaatgaaaatattatatttgtggtccaacagatattgctggtaggtttgcttgtttgttttccctaatgttgatgaagtttctgtaatccagtcacaggctcttggtaaggacccaaatagacaggggacaagagaacttctagttcctttaagcaacttgagataaatgaattacaat

SEQ ID NO: 213429 - DNA, 518 bp, Homo sapiens
ttattattattattattattattattattattagagatgaggtttcaccatgttggccaggctggtcttgaactcctgacctcaggtgatacacccaccttggcctcccaaagttctgggattacaggcatgagccaccacgcctggcctttatgattttcttaataacattttcttttatctggcttgctttaagagcacagtgtgtaatacatataacacaaaatatatatgatcaactattttctatggtaacccaaagtgaaatttcaagtttattttatacacattaaaagagataagaaatgcagttttttctaaagcatgattactctaattctaaaagaaataattctgaatatggttttatttctgcatayatttatacaacactacaagtgccacctgaagttttcaaattacaaagttttctacagattattgtgcagtgataacgataagctctctagtttagcatactacagtacacaagtactgtatcaagctggatattatta

SEQ ID NO: 213430 - DNA, 572 bp, Homo sapiens
gttttgtaattgagtaatgaatgtaagttttttgttgtttttttttgagacacagtctcgctctatcgcccaggctggagtgcagtggcgcgatctcagctcactgcaagtccgcctcctgggttcatgccattctcccacctcagcctccctagtagctgggactacaggtgcctgccaccacgcccggctaattttgtttttgtttttttagtagagatggggtttcaccacgttggccaggatggtcttgatctcctgacctcatgatctgccctcctcggcctcccaaaatkctggaattacaggcgtgagccaccgcgcctggcaatgaatgtacgcttttattctagcatatcttgaaaacaattttcattaatgagtcacaaacttcttttctgttcccaccctccacattctactgcccagctgatatgtagtaaggacttgtgttcctccaatacaaaatcctctatcattatcttacatttcattttgctaagttttcccagaaaccctctgatggggctattagtaacctcacttttcagataacagaacagactggaaag

SEQ ID NO: 213431 - DNA, 572 bp, Homo sapiens
gttttgtaattgagtaatgaatgtaagttttttgttgtttttttttgagacacagtctcgctctatcgcccaggctggagtgcagtggcgcgatctcagctcactgcaagtccgcctcctgggttcatgccattctcccacctcagcctccctagtagctgggactacaggtgcctgccaccacgcccggctaattttgtttttgtttttttagtagagatggggtttcaccacgttggccaggatggtcttgatctcctgacctcatgatctgccctcctcggcctcccaaaattctggaattacaggcgtgagccaccgygcctggcaatgaatgtacgcttttattctagcatatcttgaaaacaattttcattaatgagtcacaaacttcttttctgttcccaccctccacattctactgcccagctgatatgtagtaaggacttgtgttcctccaatacaaaatcctctatcattatcttacatttcattttgctaagttttcccagaaaccctctgatggggctattagtaacctcacttttcagataacagaacagactggaaag

SEQ ID NO: 213432 - DNA, 627 bp, Homo sapiens
agacctgttttgagaagaagttctaaaaacacatctcaatacatatttcttcataatttataggaagggagggatgaggaagggacaagaggagaggaaagaacagaagaggaaggagatgaaaggggaggcaagggaagagtaagggaggagagaagaggggaaaactgactacagcttacccttgtctcacccttttctttgtcatacatactacttttgcttggaaagataaagaaatagcaytgaatttgggtgacagttctgttcagcttctaccccatactctgtgtacaagccaccaaatattatatcacccttgggccctagtttcccccaaacactcttggatagacactatgatctcttctaccatttaactttttcctgctcctacagcttatgcatgagatttcatgatacagggtcattccctttccagatgatgttggctgacccagctctgctgccgcttgcttgcaattctcaggcagaatttaccaagaatgcaacatcctaagataatgaggaggtatccagaacaacccaggttatgtcctcattcttcttagaacaagatgtagatgttttacagcactcgactcggcaaaccaagtggaacccagg

SEQ ID NO: 213433 - DNA, 554 bp, Homo sapiens
aaactgggcaggcagtcctgaatgtcctattcttttcgtgtgtgttcaaactaacctttggttattctcccatgggaaggtcatccccatttgtgggtaggaaggaggagaagaagagaaatacttcgtgagtgataactgtgtaccagacctttgctaggcactccatggcacgatgtcaccgactctcacagcacgtgtgtaaaccaggcctcatcacccccaatttgtaaatagtgcaatttaggctcagctaacttgagtaaaattcccagaatcccagatccagtgggggtcagggccaggggtccagtgcaggggcatctgatgcctaggagtgtgttctgcaggccaaaagcactcatctaacctaggagctcaatagagatgcaaactctcagatccctgccttgctgagccygtgaaagggtgagaagcatgccttagactccaagccatgaagctggcaggggatggaaagtttcctaacacttggggccattaggtcatgctcctctctttactgtccagagggactgctatgttatgtagca

SEQ ID NO: 213434 - DNA, 576 bp, Homo sapiens
attccactaatcttgaaaccacagctatcacctgggcatgttggattcttcatttgtgtggaccaagaggcaaaaaaaaatcaattttagaagaaatattgtattaatactttcctgattaccatgagaaaatgaggctatggctacacattagtgagcagaaaatgagcaataagattcttcttggtgcttctatgctcagagatagctggagatggcaagtgcagcaaaccyggttcaggaagagcaaagcaaagaaggtttcagaccccttgcacaaaaagatcttgtagtaagtattccagacttactaaggtgctggccgaagtgaagagtgtttaaaagaatggtcgattgaagagatagatctattgcactctcaagaccagttgcaatagcaggaattgtagcttagtccattaacccactatattaaagattgctgccagctgtctgccaccttataaaggtctgagacagactgaagttagtggtgagcttgagcagtttgtagtcatgcaactatactgggaatacactgtgccccagtttacatacccttagttcatcttctgc

SEQ ID NO: 213435 - DNA, 512 bp, Homo sapiens
ttgcaatagcaggaattgtagcttagtccattaacccactatattaaagattgctgccagctgtctgccaccttrtaaaggtctgagacagactgaagttagtggtgagcttgagcagtttgtagtcatgcaactatactgggaatacactgtgccccagtttacatacccttagttcatcttctgcctcatttgtccgtatataaactgacagtaccttgagtcaggtgcactgcaggggtcttgcttttgcatcaagagcttctttgatgttgcagcatgggacccatagaggaatcctgtggacacttatgtgtgcatattctggaggtttgaaaacattaacaccccatggggcaatccttaaccaactaagaagtggaccagtgaattaatgcttttctgactctcaggttaccagtcctaaagttcatagcccagccccaatttcccttagcagtgactagcttgataaatcacccttgtattgattttgcttctgtattagatag

SEQ ID NO: 213436 - DNA, 512 bp, Homo sapiens
ttgcaatagcaggaattgtagcttagtccattaacccactatattaaagattgctgccagctgtctgccaccttawaaaggtctgagacagactgaagttagtggtgagcttgagcagtttgtagtcatgcaactatactgggaatacactgtgccccagtttacatacccttagttcatcttctgcctcatttgtccgtatataaactgacagtaccttgagtcaggtgcactgcaggggtcttgcttttgcatcaagagcttctttgatgttgcagcatgggacccatagaggaatcctgtggacacttatgtgtgcatattctggaggtttgaaaacattaacaccccatggggcaatccttaaccaactaagaagtggaccagtgaattaatgcttttctgactctcaggttaccagtcctaaagttcatagcccagccccaatttcccttagcagtgactagcttgataaatcacccttgtattgattttgcttctgtattagatag

SEQ ID NO: 213437 - DNA, 552 bp, Homo sapiens
cagaagtttactgggtttaggtaataatttgagataaattttattgtgagctattttaaaggcttctgcctaatttttctttttccatccttttatagtcacgttctgtatgtagctcccctgtgatggtagctcagcccatttatcagcaacctgcatatcactaccaggtaaacataaattacaattaaaattctctctgaaastttcagtcctttcttagctaactttcatttatttctttctcatgcaactactttgctaattacaaagagatagttcattagagaaatgtgaatcaaaaccacattgatataccatctcacaccagtcagaatggctattattaaaaagtcaaaaatagcagatgctggcgaggttacagagaataggaacacttatacactgttggttggagtgtaaattagttcaaccattgtggaaagcagtatggagattcctcaaagaactaaaagcagaactaccattagacccgttactgggtatatagccagaggaatataaatcattctaccataaagacacatgcat

SEQ ID NO: 213438 - DNA, 521 bp, Homo sapiens
gcaaagtcatcttcagcatttagtaaactccagctttgaaatattttggaagtattgatttcatatcataattaaatattatatatttagaaatgttattaatagtaagtagctttatttttatgtttaatctaatatataaaacacctagtaacatcttgaattggttttcctactgagcaattttctttataataatagcaaatactaatataatttgtatgatgagtctagcattgttttgagcattaacgtgtgtcaaataatttaattctcacaataaccatatgatatgcatattattattatctcgatttttacagatggagagatgttaagtgacttgcctaaggtcacatagctaataaacgcagagccaagaagtaggtccaaataatctagctccagaggttgcttttaatctttatgctatatgtkcttatcctctaaaacagtattgatttgaagcttagctggtgtggataaaatagcagattttttattgttatcttaaacactaa

SEQ ID NO: 213439 - DNA, 398 bp, Homo sapiens
cctcacttcctcccctgctaagagtcttctcacttcagaagataagcaacagttgatggttgttcatcagagaaaattttggggacctagatcctcacacttcttgggatgtacccataagattccagtataccgttaggtctgaagaragaatgtctaagaagaaagttctttgattagactcctacttttttcttctccatttcttcctgcatgagatggtgaagataaaaacacatctctaagagtttttatttcctgggaaaaaaatatcattttaaaaatatcattttgtgttgttattttgttttataatgagtcaggtttctttccagaggtataaagccttcaaagtaactgcccctaatgtcttaatatttattttctccctttactaa

SEQ ID NO: 213440 - DNA, 654 bp, Homo sapiens
atgtgaatgcaaattcaataagcaaacgtgcctctcaygttattaactccatcctggtcatgttcctccctatttgcgttttgcttcctgcttacatttgttttcacataagtaaacgtagtagatgtaatctttagaaactgacttatttgaaatttcctatttttaaaacgtgaaaagcaaatctatgatttttccatggtggcagtggatatataaatattttcagggtggcccagaagcatatccacacaatggaagcatgtgagcgcatggccacagggtggtttgtacaagtggggaaactttgctgggtccataatcctattaaatgcggagagtttgtggcattttcctccttgtgtattttcaaatgggatatagtagtcttatctgtttataattgctaatattttatcttgtccaaaattagggcttctcagtattgtccaactctgcagacttgctctgaagaccctgctctggactgaggatgggggtcacagtggaagtgtgggcctttgtcccctctttctgctttcactgagtatcttcactgttctttgctctacatattaaaatctctcctaataagttgatgaaaagggaaatcaggtgttcaaactttgaaaattgtggctttagacccagaat

SEQ ID NO: 213441 - DNA, 587 bp, Homo sapiens
cttttacaccaattttaaagcattgagggaatgatttaccctttctaagcttccaataactcatctaaaattagtggtttggatttgaggactcccaaattccctgtccactgcactttctataagttacactagtatgtgagtgagcttcaggatctttcagatttaatacacttctcctttccagaaacaaaccagatcaaaacaaaagagtcaaatttcaaaggtaaaatagaatggatgcctgttctcggtttgtttctgtagtctcttttattttccaagtcgataggtattatcattctgtaataatctttacttttaaaactccaaattgtagactgtgttgttacaatgggtttaactgtaccattttaaatcctttggtatttgaaaggaaaactttagtggrtcctttccttattgaaagatttgggacttggattcatttttccaccatcccaactatgaatgggtttagatgtccaaatgaaataggtgccaaccagtaccataaaatgggtaaatatacttaagaagggaaatgaaataggtaccaactagcaccataaaatgggtgaatatac

SEQ ID NO: 213442 - DNA, 567 bp, Homo sapiens
aactgcagaaatgaattttctaacttatatcttttattcttatgtcaaatcttgctgtttcacttcaaattaccatggtcaaaatgaagagatgaaaatctctaggtcctaaaattataataattagaaagatatgctagagagcagaacacgggaaaattttgtctttctgccaacagaatttagctcccaaaacaaaacaaaacaaaaaaagttccttaagaatatggctgcaaaaaagcataatacctaatgacaaggatgagggtatagaaactgtgataaaatttacatttagtggaaaagtgagagttgagtgttagtcttcactttatttgttttaacctctttcccacacatctcaaatgaaattttctaaaaaaaaaccttcacaattatgaaaatttgttttttaaagatagtgacaaawattctaaagaaatcacggtaaattttctttaaggagcattttaccagagtgaaaaggtaagctttgaattggggaaaaaacttataaagaactaatgagtcaaatgtgataaattttgtcagaaaattatcagttta

SEQ ID NO: 213443 - DNA, 300 bp, Homo sapiens
tcccaccaaacagcagtagttagaattcaaaattcatggaatgccacagaatcctgaatytggaagaaaattcagaagttgttcattcaaacttcacactaaaagcacctttcaactttacctgttaatcattctaaaccaaacttcctcaagtgtctccttaaataaaaggcacacttctggatttaaggaaaacaaagataaaaaggtcacaatctctaccttgcagaaattagttagggcagcctaagtacaatgaagaaaaactcataattttagtaatttagcacaataaaagct

SEQ ID NO: 213444 - DNA, 497 bp, Homo sapiens
tataagttgagaatagaacaaaggaagtttgatgtggaggaaaaagaaatctttagcaagagttgtagcaagaaccctttagcaagacaaagatttctgaacgtgagtctgccactaagtagccgcagtggcctacgcaagtcatttcccttctctgggtgctggccctcgtctgtgaaatgaaggactttgacgaggtrtgtagggtccttctagttctaatagtgttgtattatagatcaaatatgatgttttgtcatacctggctaccaggtaaaagaagggccctaaaagaaaattagaacaatggaaaacaaacacaaaaatcaagcatcactgttataaaagcaagacacttaagtcgatttaaattatactactttcatctgtgttcacaactataattaagacatataaaaatctaagcagtgagaggagaaaaacaaaaccaaccaactaaccaaaaataacaacaaactgagattagtgggtagtcc

SEQ ID NO: 213445 - DNA, 519 bp, Homo sapiens
acgtcattatataagttgagaatagaacaaaggaagtttgatgtggaggaaaaagaaatctttagcaagagttgtagcaagaaccctttagcaagacaaagatttctgaacgtgagtctgccactaagtagccgcagtggcctacgcaagtcatttcccttctctgggtgctggccctcgtctgtgaaatgaaggactttgacgaggtgtgtagggtccttctagttctaatagtgttgtattatagatcaaatatgatgttttgtcatacctggctaccaggtaaaagaagggccctaaaagaaaattagaacaatggaaaacaaacacaaaaatcaagcatcactgttataaaagcaagacacttaagtcgatttaaattatactaytttcatctgtgttcacaactataattaagacatataaaaatctaagcagtgagaggagaaaaacaaaaccaaccaactaaccaaaaataacaacaaactgagattagtgggtagtccggaagtaccattt

SEQ ID NO: 213446 - DNA, 599 bp, Homo sapiens
gtctatgttagtgtatctcccaccaggcctttttttctaagacataaatgtattaacagatgttaatttattcatcattctgctccccccaaatccagctaagattgtctcaaattcccataccatggcccatagaagtatgtctggaaattcctagaaaggcccatgatctccctcctctgtyccataagatttctaagttgcaagccacagaggcaaactcaggcaaaaatgaaagttatcaggaagtgtgggatagctcactgaattgagaaaataacctaaaaataccacctcagaaaggacagaaactaagtatcaaaaaataatggatgatttagagcctattaccattgtgataaatggacttgtgcctttttagtctttctttcaatccacccaagattcaaattccaggtacagtatctgattggtctggattgttttatctgctcacaacttagccacggcaagtcagggctcctggcttgacaatctcaccaatactgcattcaactgcagacactggccagatgggattgctatgtaactaataagtggaacaacagaaacttgactcccttgtctcaaaaatctat

SEQ ID NO: 213447 - DNA, 599 bp, Homo sapiens
gtctatgttagtgtatctcccaccaggcctttttttctaagacataaatgtattaacagatgttaatttattcatcattctgctccccccaaatccagctaagattgtctcaaattcccataccatggcccatagaagtatgtctggaaattcctagaaaggcccatgatctccctcctctgtcccataagatttctaagttgcaagccacagagrcaaactcaggcaaaaatgaaagttatcaggaagtgtgggatagctcactgaattgagaaaataacctaaaaataccacctcagaaaggacagaaactaagtatcaaaaaataatggatgatttagagcctattaccattgtgataaatggacttgtgcctttttagtctttctttcaatccacccaagattcaaattccaggtacagtatctgattggtctggattgttttatctgctcacaacttagccacggcaagtcagggctcctggcttgacaatctcaccaatactgcattcaactgcagacactggccagatgggattgctatgtaactaataagtggaacaacagaaacttgactcccttgtctcaaaaatctat

SEQ ID NO: 213448 - DNA, 411 bp, Homo sapiens
aagaaggcagaatgtgataaaaacgtcaaagtgagggagacagatggcaagcatgataggaggagtttgcagaagaaggaaatgaatgtgaggtagatgtgcacagaacagtttgggaaaggctttagggaaaacggaattggaactagtcttgaaaaatcagtcaaagcattcagattgggagagtggaaatggaatgcattcattatggaaggaaaagaatgatcaaagcttggaattktaattatgaataaaatctagaaaacaaacgaatagcaccattgggaagttaggttactaaatcgtacattcaaggtacaaaatattgcagagagataatcgtacctacaacagtcttcctttgggtttaaggccattgatcatcggtcaaataaatatgagctgaaaaat

SEQ ID NO: 213449 - DNA, 553 bp, Homo sapiens
taatattatttcttttaattgaactttttctgtttcacttgagatatgtaattccaaaagaagttaagcgtctcttaatatgttcattgaatctatatctttttgtagaaaattcctttattgggccacatctatttttgtgactgtctgttagcatttttcttgctgaatactgagatttgtattttcttaaagttaccatatatataatttatatagtactcattatatatttagcaaaattttttaagttatctgtctttgaatgttatttatgaagtttttatgtaatagaaagttttaatctttagctaggctatttaatcaaccttttcctttatgacaacggcttagaaaaattgtctcctatatatgagtcttctaacactttgaggatatcactattaatatttaactctctttactacatayggaatttgtttaagcataaattataagaaaaagattaaagtttaatttaactttgttttcaatcacaagtcatttcattcaattttttgacaaatatttatgaagcatctactatgcgcca

SEQ ID NO: 213450 - DNA, 475 bp, Homo sapiens
acaagccttgctgagtagtattcatttgaagtctggcattcagtgagacaggagataaggctcctctgtttctgrtagttctactttgaaggatggaaaatgggaaggttgctagagaggatagaatgatgaggatggagcttagctacctggggctaaggcagaggcatctgatgtttgtgatttcctgtaagaggtgtgcttggatttgtgttctctgtacttactaagaagaaaatacaaccttgcattttgagtatgagtgtcactaaccactcatgcatttccatccttctcagaactatgtagcctgccaaaactcttcgaaatgagcttcaggggaagattgctagatgcgttcctcaattcaaagaggacaaaagctaggcagaagttacctgtagagggtgagactcctcccagcatggatttctccaggtcctcatccccatagatgggctggaactgagtcagt

SEQ ID NO: 213451 - DNA, 475 bp, Homo sapiens
acaagccttgctgagtagtattcatttgaagtctggcattcagtgagacaggagataaggctcctctgtttctggtagttctactttgaaggatggaaaatgggaaggttgctagagaggatagaatgatgaggatggagcttagctacctggggctaaggcagaggcatctgatgtttgtgatttcctgtaagaggtgtgcttggatttgtgtyctctgtacttactaagaagaaaatacaaccttgcattttgagtatgagtgtcactaaccactcatgcatttccatccttctcagaactatgtagcctgccaaaactcttcgaaatgagcttcaggggaagattgctagatgcgttcctcaattcaaagaggacaaaagctaggcagaagttacctgtagagggtgagactcctcccagcatggatttctccaggtcctcatccccatagatgggctggaactgagtcagt

SEQ ID NO: 213452 - DNA, 475 bp, Homo sapiens
acaagccttgctgagtagtattcatttgaagtctggcattcagtgagacaggagataaggctcctctgtttctggtagttctactttgaaggatggaaaatgggaaggttgctagagaggatagaatgatgaggatggagcttagctacctggggctaaggcagaggcatctgatgtttgtgatttcctgtaagaggtgtgcttggatttgtgttctctgtacttactaagaagaaaatacaaccttgcattttgagtatgagtgtcactaaccactcatgcatttccatccttctcagaactatgtagcctgccaaaactcttcgaaatgagcttcaggggaagatygctagatgcgttcctcaattcaaagaggacaaaagctaggcagaagttacctgtagagggtgagactcctcccagcatggatttctccaggtcctcatccccatagatgggctggaactgagtcagt

SEQ ID NO: 213453 - DNA, 520 bp, Homo sapiens
agtctctgtttgtgtctctcaacctttgacttgtttacttccagcttctcacgtttctgttggtcaattctgtagacagccgtcctttcccaagaacccaggaagttctcccaggggccagctcatgcttagtctcaggagaaagagtttggcagggagagaaaggatagacatgattggtttcttttcttctggggataatagcaaggtcccagatgtcagaggggaggctrggttgagaaattaggtgtctctaacccgtgacagtctgtctagggagggggctcttggcgaagccatgagcaaagagagaagagaaatatgattgagggaaagaaacaaagagatacaaacacaaaattccaatgcaacaaatatctgcgggaaaaggagctctgccatgtgtctgattccacagtagattacatgggaggagaggtaaccaagaggtagatctttccctagggacttgccctgtatgcagggagtctgggatgactcatatgaaaccaaaaggcat

SEQ ID NO: 213454 - DNA, 591 bp, Homo sapiens
ggagccttcagatgaagacccaaagacacaggagaaattgatctattttatgcttaggtttaacaaagtatggacagccatgtagaaatatgattgcaccaaaaaggtatgatctaatgctaataaactgagcaaggaagcccagccaggtctgtctgcctagattctccttcgcctctctgagcagcattccttccttctggggatgggacatgaccttctctggaatgggggtcttatgatctacaaacaaggtatgtcagataatttctttatggcctgttttcacagaaatagggcagaaggaawgttggagtaatatttttaggttttatgtctggctttggagaaaaaggcattttggtttctatgacccgccctggggaagagggattctagtttctgaggctagcctcagtggggcatgggactgagggacaggagggcaggagaaggtcagagaacaaacctacacctctgaggctgcttctgaggccttcattttggggcattgttttctgagccccaacagaggaacacagaaagagctacagaaattcagaaaagggatgtgttgcttgcacaggagga

SEQ ID NO: 213455 - DNA, 586 bp, Homo sapiens
ggctgatgagagtggggagaaaggaatgccatctattgctttaattcagccattctctacacaccggaattgaggatccagtaataacaagatgtgcctgtttgccaagagctccttggattagcaagtaaaacagtgctttgtcataggagtcaaaacagggatacagatgcatctcatcccacctggggacccagggaaktcttcttgaatagagtgatgacttcaacgagtctaaagaggattaggaattacccaagcagggatggggccacacacattccaggaaatgggaaaccatgcacagaagcccaagtaagagagaatagggatgagatcagaatgaggatggcaagtaggcagaggccacatcatgggggtggggtgttgggtgggccatggtaaaacatgtggacttcattctgaggatactgggaagctactggaggatttagacaagacaatggcagttagatttgcagttcagaaagactgccttggataagatggctgttgcagtaatctaggaaaccaataattattttctggactaagtggtagcagagtggatgaagagacatgggtg

SEQ ID NO: 213456 - DNA, 591 bp, Homo sapiens
ggagccttcagatgaagacccaaagacacaggagaaattgatctattttatgcttaggtttaacaaagtatggacagccatgtagaaatatgattgcaccaaaaaggtatgatctaatgctaataaactgagcaaggaagcccagccaggtctgtctgcctagattctccttcgcctctctgagcagcattccttccttctggggatgggacatgaccttctctggaatgggggtcttatgatctacaaacaaggtatgtcagataatttctttatggcctgttttcacagaaatagggcagaaggaaagttggagtaatatttttaggttttatgtctggctttggagaaaaaggcattttggtttctatgacccgccctggggaagagggattctagtttctgaggctagcctcagtggggcatgggactgagggacaggagggcaggagaaggtcagasaacaaacctacacctctgaggctgcttctgaggccttcattttggggcattgttttctgagccccaacagaggaacacagaaagagctacagaaattcagaaaagggatgtgttgcttgcacaggagga

SEQ ID NO: 213457 - DNA, 586 bp, Homo sapiens
ggctgatgagagtggggagaaaggaatgccatctattgctttaattcagccattctctacacaccggaattgaggatccagtaataacaagatgtgcctgtttgccaagagctccttggattagcaagtaaaacagtgctttgtcataggagtcaaaacagggatacagatgcatctcatcccacctggggacccagggaagtctycttgaatagagtgatgacttcaacgagtctaaagaggattaggaattacccaagcagggatggggccacacacattccaggaaatgggaaaccatgcacagaagcccaagtaagagagaatagggatgagatcagaatgaggatggcaagtaggcagaggccacatcatgggggtggggtgttgggtgggccatggtaaaacatgtggacttcattctgaggatactgggaagctactggaggatttagacaagacaatggcagttagatttgcagttcagaaagactgccttggataagatggctgttgcagtaatctaggaaaccaataattattttctggactaagtggtagcagagtggatgaagagacatgggtg

SEQ ID NO: 213458 - DNA, 530 bp, Homo sapiens
tgtgcacacatatacacatatatgtatgtaacaatgagttataagtgagggccctggtaaaaaacaaatggcatacttaaagaattctgaagagcatgtttaataaaaggaatgtttttagaggtgtgagcaggtaaagagaaccaacgaggaacccagggactagcaaaaacgagaagccaatactacccctagatggaataatggaaggcaacagcattatcagaacccagctgagagctggaaccatagaataggggccgccagcagaagctatgattgtagaaggatggagctgttgctacaaccatgaaaaagcaggaagggagccagagaaataaataccccaatctctgtcccctcttgtcctccagtctcctgtaagtatatyccattcaccaaaaccaacaaaaatgggatcgcaggtgatgaagtccatgaagatcagtcctccacagcttcaagcaagacagaaaatggtgaaacacgggtcttgggtacactaaggtgatacagccagaatgtaggag

SEQ ID NO: 213459 - DNA, 586 bp, Homo sapiens
ggctgatgagagtggggagaaaggaatgccatctattgctttaattcagccattctctacacaccggaattgaggatccagtaataacaagatgtgcctgtttgccaagagctccttggattagcaagtaaaacagtgctttgtcataggagtcaaaacagggatacagatgcatctcatcccacctggggacccagggaagtcttcttgaatagagtgatgacttcaacgagtctaaagaggattaggaattacccaagcagggatggggccacacacattccaggaaatggraaaccatgcacagaagcccaagtaagagagaatagggatgagatcagaatgaggatggcaagtaggcagaggccacatcatgggggtggggtgttgggtgggccatggtaaaacatgtggacttcattctgaggatactgggaagctactggaggatttagacaagacaatggcagttagatttgcagttcagaaagactgccttggataagatggctgttgcagtaatctaggaaaccaataattattttctggactaagtggtagcagagtggatgaagagacatgggtg

SEQ ID NO: 213460 - DNA, 586 bp, Homo sapiens
ggctgatgagagtggggagaaaggaatgccatctattgctttaattcagccattctctacacaccggaattgaggatccagtaataacaagatgtgcctgtttgccaagagctccttggattagcaagtaaaacagtgctttgtcataggagtcaaaacagggatacagatgcatctcatcccacctggggacccagggaagtcttcttgaatagagtgatgacttcaacgagtctaaagaggattaggaattacccaagcagggatggggccacacacattccaggaaatgggaaaccatgcacagaagcccaagtaagagagaatagggatgagatcagaatgmggatggcaagtaggcagaggccacatcatgggggtggggtgttgggtgggccatggtaaaacatgtggacttcattctgaggatactgggaagctactggaggatttagacaagacaatggcagttagatttgcagttcagaaagactgccttggataagatggctgttgcagtaatctaggaaaccaataattattttctggactaagtggtagcagagtggatgaagagacatgggtg

SEQ ID NO: 213461 - DNA, 572 bp, Homo sapiens
agataagcttctgtcaattttgtgccattatatgtgttggagttgttttgttacagcagctatagatatgtaaatagatctacctactgtcctttgaaaatgcctttcccttagaattctcattctctccttcagttactcacatccaaaaattatttaaggcctaaaccaagtccaatcatcttcaagcagctttcttccactcccacccaccatagagatagatctctctttccyttaccttcctgtagcactttgttatctatacctctcatgtgcacttaccccagctccaattctggatgtcttgttctcctagtgagattgtgagctcttcaaggtaaggatcatgtctttgtgcttccttcttttgtgactctgaagtgcataacatggtgatgtgccttgggaattttcaataaatattcatgggaaaaatgaacatatcaatgtattaagctcaataaagtccgttttcctaaaaacagtccttcattgctgaagtgtgaaagcatgtaaactataatctaatggatttggtatttttattattcttttttactaatatatac

SEQ ID NO: 213462 - DNA, 546 bp, Homo sapiens
ggagttgttttgttacagcagctatagatatgtaaatagatctacctactgtcctttgaaaatgcctttcccttagaattctcattctctccttcagttactcacatccaaaaattatttaaggcctaaaccaagtccaatcatcttcaagcagctttcttccactcccacccaccatagagatagatctctctttcccttaccttcctgtagcactttgttatctatacctctcatgtgcacttaccccagctccaattctggatgtcttgttctcctagtgagattgtgagctcttcaaggtaaggatcatgtctttgtgcttccttcttttgtgactctgaagtgcataacatggtgatgtgccttgggaattttcaataaatattcatgggaaaaatgaacatatcaatgtattaagctcaataaagtccgttttcctaaaaacagtccttcattgctgaagtgtgaaagcatgtaaactataatctamtggatttggtatttttattattcttttttactaatatatacattctaacactt

SEQ ID NO: 213463 - DNA, 561 bp, Homo sapiens
aacaaaagggtgaccatatgaggacacagcactaaggtagacatccacaagtcaagaagaaagatctcagaagaaaaccatcctgtcgacatcaacttgatcttagccgtctgttctctagaactgtgagaaaacacatttctgttgtttaaactacccagcctgtggtattttgtaatggcagccctagcaaactcatccactatgttttaaatccaggktttttttttaagtttctctttttttttcagaagtttctaaccttaattttaaatttgtttttctttcctcctttgcttgagctagatttctacaccctaagaagtcatactcaggtttctaaattcatccacatactggagtacaaagattccacaaattttaacagtattcgaagagtgctcagtctttgagatgagtcttgactggtactttggatataacttacattttatacctctgtaaattccttttcttattgctcacctgtgtcagttctcaaatagattatttaattttataacaaaccaacaaataaaacaaagcactgaactatgtaaa

SEQ ID NO: 213464 - DNA, 577 bp, Homo sapiens
ccagcctgggtgacagagcgagactctgtctcaaaagaaatagaaaagaaaagaataaaagcttcctcaccagaaataagaccaacatctagattcaggggaaaatctctcttcagtgaagacaggaactgtcttttgcatttaccactatatctcctgtgttaagtacagtgttaaatagctacacagatgagataatttgatataacagtaacagctaatctttattgagcacttagtgtatggctatgtgacatgcactattctgtgagttctgcatcaattaaataattgaatgcttacaacaatgttataagatatgtgcttgtgccatcctcatttgagagatgagaatactgaagtgtagaaaggccagatatcttgttcaaagttggacagctcttaagtgagagagccaaaattcaacaacagacacttttggattcaaaacctatgcttggaaagtaaagaaattagctttttttcactgtaacatgcatgaaaaatttaaagagaagaaccgaacttagtrttatgggctaaattgtgtctccccgaccccaaattcatatattag

SEQ ID NO: 213465 - DNA, 708 bp, Homo sapiens
tgcataacttatgttgaatgcattatatacttgcagacagtggyagtcttgtatttgtcgtaatcacattttcatgtgataatgtattatacatcaatagcctgttggcagtgcatttagttctagtgtgggaaacttgtaggaacagatcaggtatggtttttattttcctgctgatgaggattgtgatgtctacattcagtacaccctgaatgcctgactgttaatgtgtgggttttaagtgtaaaagcagaattggctttaccaaggacaaagagaacacttatctgcttagtgggtttttttgttttttggttttttgtttctgtttttataatgattttaataacttttaaagtgcacttattaactaaatagaattaatacttgtaaatgagaacaattaaaatatgccagagtcctaaagattataatttactgagtctgggtcaaaacttgggcatcttatttttaagaagcttccctaattctctaatgtactttaaagtttaatgattactgtttgtttgaaattagttagaaaacttagtataagtagggaacttattgctattactagtaactattgcacagttattcctaccctgcaatagaacaccagaacttattcttcctaattgtaattttgtgactgttgaccaatctcccctccccagtgtctgataaacactgttctactctctgctt

SEQ ID NO: 213466 - DNA, 708 bp, Homo sapiens
tgcataacttatgttgaatgcattatatacttgcagacagtggcagtcttgtatttgtcgtaatcacattttcatgtgataatgtattatacatcaatagcctgttggcagtgcatttagttctagtgtgggaaacttgtaggaacagatcaggtatggtttttattttcctgctgatgaggattgtgatgtctacattcagtacaccctgaatgcctgactgttaatgtgtsggttttaagtgtaaaagcagaattggctttaccaaggacaaagagaacacttatctgcttagtgggtttttttgttttttggttttttgtttctgtttttataatgattttaataacttttaaagtgcacttattaactaaatagaattaatacttgtaaatgagaacaattaaaatatgccagagtcctaaagattataatttactgagtctgggtcaaaacttgggcatcttatttttaagaagcttccctaattctctaatgtactttaaagtttaatgattactgtttgtttgaaattagttagaaaacttagtataagtagggaacttattgctattactagtaactattgcacagttattcctaccctgcaatagaacaccagaacttattcttcctaattgtaattttgtgactgttgaccaatctcccctccccagtgtctgataaacactgttctactctctgctt

SEQ ID NO: 213467 - DNA, 433 bp, Homo sapiens
gaattccgtcatttgcaaagtagcccaacttgtacatagaatgtcttatacttacaaggtgcccaataaacatatattggttatctggttggtttgatgtcagtgttttttctgtatcttttgcttgtgtactttgtactctataccatcattctcaataaggcttgttcaaaacaaagtctgcagtttgcctgtaataactaggtgmcctaaccccctatactggcatgaggaatatgtctgtgtttcagtttcctaatttataaaatatggcaaataataatagcagctacttatttagtatctactaaatttcaggtgctggtctaacacttaacatacattatcctaattcttatggcaactttatgagacatgcataatgatcctcattttatggatgaggaagctgagatgcaaatgaggttaaatg

SEQ ID NO: 213468 - DNA, 708 bp, Homo sapiens
tgcataacttatgttgaatgcattatatacttgcagacagtggcagtcttgtatttgtcgtaatcacattttcatgtgataatgtattatacatcaatagcctgttggcagtgcatttagttctagtgtgggaaacttgtaggaacagatcaggtatggtttttattttcctgctgatgaggattgtgatgtctacattcagtacaccctgaatgcctgactgttaatgtgtgggttttaagtgtaaaagcagaattggctttaccaaggacaaagagaacacttatctgcttagtgggtttttttgttttttggttttttgtttctgtttttataatgattttaataacttttaaagtgcacttattaactaaatagaattaatacttgtaaatgagaacaattaaaatatgccagrgtcctaaagattataatttactgagtctgggtcaaaacttgggcatcttatttttaagaagcttccctaattctctaatgtactttaaagtttaatgattactgtttgtttgaaattagttagaaaacttagtataagtagggaacttattgctattactagtaactattgcacagttattcctaccctgcaatagaacaccagaacttattcttcctaattgtaattttgtgactgttgaccaatctcccctccccagtgtctgataaacactgttctactctctgctt

SEQ ID NO: 213469 - DNA, 583 bp, Homo sapiens
aattgcctttcttctaggagttctactgcacataagttcttatttcggtctcttagtgcttcctaccttaagcttgaacataaagaaaggcttaagtatggatttggcctgacttaattaaaattaatgtataatgaaatatattgatgaaatgagctacttggtcttctggtaaatgaagatatttgtcaaaacataattttcwaatttatatatagcgaggtgaagcataaactttatgaagagaaatgtatttaagataatttttcacaaattacttgttttataaaatgtgtttttgttctgccctactttttaactttctcagcatcactaaccagtgtcttagaacaatagtaggtgtatatgcagtaccatttatactgaaaggagtagagttgatattaatgaaatatttcaccctgcctcaatttcaggtgtggttttgggtgaattccctaaaagtcagttcagaattgtcattaagaattgcaaccttactctgggcacagaaagggatctcaaagatgttagaacttcttacatatgtgtgtataatctttggaaagtcacatcaaattag

SEQ ID NO: 213470 - DNA, 490 bp, Homo sapiens
  misc_feature (1)...(490): n = A,T,C or G
nnnnnnnnnnnnnnnnnnnnnnnnnnnnnnnnnnnnnnnnnnaataaaatccattgatctaattcagacttacccagttttacttacacacayatatgtgtgtattaaatctgatacaattttaagatgagtaggtgtgtttatccacaaataggagtaaaaatgctaaacactaacaacaatgtcaggttcctttctattctttgataaccatacacacctcccaccatttctcccactcatttctaaacgttgccactaaacttatcttctatttctaaaatttcatcatgaatagaacaatacagaatataaactttggggattagtatttttttactttgtgtgattctctggagacttgcctaagttgatatgtacataaatgatcgattcctttttattgttaagtagtattccatggtgcatatgtactgccatttgtttgaccattcacctactgaagtacatcttgattgagccgaggttt

SEQ ID NO: 213471 - DNA, 490 bp, Homo sapiens
  misc_feature (1)...(490): n = A,T,C or G
nnnnnnnnnnnnnnnnnnnnnnnnnnnnnnnnnnnnnnnnnnaataaaatccattgatctaattcagacttacccagttttacttacacacacatatgtgtgtattaaatctgatacaattttaagatgagtaggtgtgtttatccacaaataggagtaaaaatgctaaacactaacaacaatgtcaggttcctttctattctttgataaccatacacacctcccaccatttctcccactcatttctaaacgttgccactaaacttatcytctatttctaaaatttcatcatgaatagaacaatacagaatataaactttggggattagtatttttttactttgtgtgattctctggagacttgcctaagttgatatgtacataaatgatcgattcctttttattgttaagtagtattccatggtgcatatgtactgccatttgtttgaccattcacctactgaagtacatcttgattgagccgaggttt

SEQ ID NO: 213472 - DNA, 490 bp, Homo sapiens
  misc_feature (1)...(490): n = A,T,C or G
nnnnnnnnnnnnnnnnnnnnnnnnnnnnnnnnnnnnnnnnnnaataaaatccattgatctaattcagacttacccagttttacttacacacacatatgtgtgtattaaatctgatacaattttaagatgagtaggtgtgtttatccacaaataggagtaaaaatgctaaacactaacaacaatgtcaggttcctttctattctttgataaccatacacacctcccaccatttctcccactcatttctaaacgttgccactaaacttatcttctatttctaaaatttcatcatgaatagaacaatacagaatataaactttggggattagtatttttttactttgtgtgattctctggagacttgcctaagttgatatgtacataaatgatckattcctttttattgttaagtagtattccatggtgcatatgtactgccatttgtttgaccattcacctactgaagtacatcttgattgagccgaggttt

SEQ ID NO: 213473 - DNA, 491 bp, Homo sapiens
gaattctgcatgaaaatttttagtttactctagatcacaacaaggtgacaactacaaagaattttagctgtggagataaattccagagaccaatatttgcagaatctacttcaaggtatcctattttctgataatcctcaagtggccctatttgagttacaaggaataagttctagataaatgtacataaaatggtggtgtttaaaaaattggaccctcagtttgacaagtgagggcttgaagtcatagtatgaatatagaaagacataggaccttatactgtattcacagaatggtgaggccaagatttttagattatactcagaaactcagcttagaatgcatttcttatgaaaccgtttatccaccattagtgttcttttgaaatctaattgtagactttaatgtcartggaaatgaaaaaaatcacagtcactctaacatggaacgataagatggagtaataaaaagaggaaacaatcatgccaaga

SEQ ID NO: 213474 - DNA, 491 bp, Homo sapiens
gaattctgcatgaaaatttttagtttactctagatcacaacaaggtgacaactacaaagaattttagctgtggagataaattccagagaccaatatttgcagaatctacttcaaggtatcctattttctgataatcctcaagtggccctatttgagttacaaggaataagttctagataaatgtacataaaatggtggtgtttaaaaaattggaccctcagtttgacaagtgagggcttgaagtcatagtatgaatatagaaagacataggaccttatactgtattcacagaatggtgaggccaagatttttagattatactcagaaactcagcttagaatgcatttcttatgaaaccgtttatccaccattagtgttcttttgaaatctaattgtagactttaatgtcaatggaaatgaaaaaaatcacagtsactctaacatggaacgataagatggagtaataaaaagaggaaacaatcatgccaaga

SEQ ID NO: 213475 - DNA, 485 bp, Homo sapiens
atattactattttaaatatatactttaattttcggcctgtgaatacggtatcatttgtgcaacaatttcctcatagatgattttaatattgtttccagtccatctctattacaaataagacgatgattattactagcatacatcttttgatttatctttggaaatgtaaatattaaaacaatccaatttaaaaacaggcaaaggacctgaatagacattttacaaaagaggacacgatggccaatagggatatgraaaaaaatctcaacatcactaaccattagggaaatgtaaattaaaaccacaatgaaacatcgtctggctcctgttagaatggctatcatcaaaaagacaaaagataacaaatgttggtgaggatgtggagaaaagggaccccttgcacactgttgatgagaatgtaaattggtatagctattatggaaaacaatatggaggttcctcaaaatattaaaaatagaattacc

SEQ ID NO: 213476 - DNA, 435 bp, Homo sapiens
aagggaagggaagacattgtgagaaataattgaaaggagagtggactcaaaggaaaatggaattgctgttggacaataaggagcaagggaaggaaattgtgaatggatataaacagaaaaaaaatagagaccaagagatgacttagtgggtgtgtattcagtctatatactctgcctctgtygttcactacatgggtggccttagaatatcatgtaaactatgtgagcctcagtttccccttatataaaagtggaaataggactgatcctgtctggatgataagttggttatgtgaaactctagacacaatttctagaactgcagatatgtgtcatgcgtatgtcagaggatgtcaatgagaattaaggaaagcttcttgacggagtgaagacggtttaataaaaagaatatgagctttggagtaagagagatct

SEQ ID NO: 213477 - DNA, 605 bp, Homo sapiens
ttactaataaccttctgagagtggtccttgggacatttttgtagaaaggttattagtaagttattttttcataarcaacaggcctagtcagattaactatttttcatgagttcgggtattattttatttacaaatatgttgtttcatctccatatatattagaatgttttaaagtcatctttccattattgatttctaattgtattatattgtggtctgaaaacatactttatatgatttgtatcctttttaatttattttaaatatgttttatttgtttaaatgtgcttttgaatccaggcgatagtttacttttctgaatgtttcatgtgagcttggaaagaatgtgtattatgttataaacataaagaatgtgtatgttatgttcttcagttctaataaaggttattttcagtttgcagttctatcagattttgcctcatgcactttgatgccatgttgttaggtacatacgtgttaagaactgtggtatcttcatggggaattgactcccttatcattatgtaatacccgtttcttatttcatatctttctaccagaggcccagacaaaagcaccagcaggggatccaccttgcatgggta

SEQ ID NO: 213478 - DNA, 666 bp, Homo sapiens
atgttaggaacaatatcacagaggggtgtacatcccctgcaatattaagagtaatatcatcctctcttccactggatattagtaacaatatgacagtggggtgcratattgagagtaatatcatcctctctcccactggctattaggaacaatatcgcaggcggggtgtacagtccctgcaatattggcagtaatgtcatactctttcccctaatatcagcctctatttcactggatattaggaacaatatcacagggcggtgtacaacccctgtgatattggaagcaatatcatcatctccccgtctggatattaggaagaatatcacagtgggggtgtatacctcctgcaatattgggagtaatatcatcctctgcccccctagatactaggaaaaatatcacagcgggggtgtacatccccctgtgatatttggagtaatatcatcctctccaaatttgaatataaggaacaatatcacagtggggtgtacacactgtgagttgttggaagtaatgtcattctctcctcctgtggatattaggaacaatatcacatgggggttgtatactccctgcgatattgtgagtaatatcatcctgtcccctcttgatattaaaaacaatatcacaggggggttgtacacatcctgtgatattgggagt

SEQ ID NO: 213479 - DNA, 579 bp, Homo sapiens
ctggtaaacatgaacacttaaatctaacagaggattttcagagtagtgaatgtaaggaaagcttaatggatctctcccaccttaataaatggragagcatccctaacactgagaaatcctataaatgtgatgtatgtgggaaaattttccatcagagctcagcccttactagacatcagagaatccatactagagagaagccctacaaatgtaaagaatgtgaaaagtctttcagtcagagctcaagtcttagtcgacataaaagaatacacactagagaaaaaccttacaaatgtgaagcatctgataaatcctgtgaagcgtctgataaatcctgtagtccaagctcaggcataattcagcataagaaaattcacaccagagccaaatcttacaaatgtagcagttgtgaaagagtcttcagtcgtagtgtccaccttactcaacatcagaaaattcacaaagagatgccctgtaagtgtactgtatgtggcagtgacttctgccatacttcatacctacttgaacatcagagggtccatcatgaagagaaagcctatgagtatgatgaatatgggt

SEQ ID NO: 213480 - DNA, 610 bp, Homo sapiens
cttctacaaggccacaggatagcttactcatttgacaaaaggttagatggtgagcttcctgaagccttaggccaggaagtggttgaccstcaaaaactaaccagagtgggatgggtaaatggacaaacatatctctcagcatcccatcctaaagagcaggagactgtctcaggatcctcatagcctctcacctcttctgtctgcagactggcttctttgcatatccagccagctatggctacccgtgcaactccctgtgcctcattcaaggggatgatagagactaactgtattcctccttcctgggggaaagaatctgaatggtttgatgtaggtcaggcgcccacccttgccagagtcacctgtggcccagggcacaaggtctacctggttagctgccgtcttaattctacttaatcttgcttggcaggactgggagagactctctgggtaagtggagtacagggcaggcagctggattaatgcccctgttattaataaatgctgcttttcaagttcttcaactttaataacactggaagagtcccagtgatgtaaataacttagttaccacctggtttatttttgagtacttatacccgctacaggg

SEQ ID NO: 213481 - DNA, 615 bp, Homo sapiens
tatgttataatttgtttggttgtagcatattattctgttagtatattgggtttcttgctatctctagcaaagtgaaatgtatttacaattattcgttccagtataatcagcaattatccctggaccaatctgttccgccagggagagtgtgaactggtttacatgtttgtttttcctttttacattgaaaaatacaaagcaagtttataaaatataaatcaaataaggtaattctgcattttgaagtgttgtacaactttatctagaaagatatttccatttatttagtaaagttttatttctttattttaataaaaggctcacatttaaaaaaaaaaaaaaaacaatctatacaagtaattttagtcctgtgatgatgaaaccattctcttgtggcaatttttgtttgcttctgccaggcacatgaraaatctttcagtctgagacctccttaagataattttatattttatccagttcattttagttgtttcattggaggttttgttcaaactacctagctcatcgttacctaataagttcagggcatggtagactaataaagatcataacctcttaactttaacatgaatacgaattactttgatgttaact

SEQ ID NO: 213482 - DNA, 550 bp, Homo sapiens
gagtatttcctccccaaacatctccctgaggttgagacttccctctgtctgtctctctctctgtctgttgtctgccagtccatctgtctctctccacttaccaatcattcaggttcaaaaccacaaagtcgtctggctccttcctcacccttagtcttccacccttaccactagtcaggcactcacctggctggctatggttggcaatagttttcctccctactctttgtttccgttctcactgccctcatctttctgtggctttcacctctgaagaggttttcyagccttttctctctccttatttgaacatgtcttgccaaatttatgccacaatattgattttatcattctcaggattctaaatcgcttctgggtacccattacctatcaagtcctcagcttggggtgcagggccttccatgatccagttctcatcctgcctcttagagtgatttatgtgtttcacatactccaggcacactggcttctttaccatggcatgggcatactttgccattttctgtccacacatcttcgtacataactt

SEQ ID NO: 213483 - DNA, 557 bp, Homo sapiens
gattccagagtcggtattttcaatcaccaaaatrctgtcactcgtgagaaatgggctgtcatggcagccacccctcctctcaaataaaaaccattatgacagtttgatgtcaacaaagcaccattgacctccacttattccagaaaatggccaccagagaaaaccttccacccatagcattgagcaatccttaaagaaactgccaaatgtacctgaagaccaattagaaaatcaccccacttccaaagctcctgtcttcatagaatgcttgttaatgagaggctgcctcacatttcctctttttactcaataaaacagattctcctctgaacctctgatcgcctgttgaaatgcaagtgacagcagatggtttccctgtctggtctcagacttacttttgtctgtgacaaccaaacagaaatcagtttgaccctttaggtttataatcatgtaaaagtaatcaaattcaaagtacttacaattattacacactgaatctactgaaaacacaataaactttattaaaacaaaaataatccatgtcatactctgatcag

SEQ ID NO: 213484 - DNA, 604 bp, Homo sapiens
atttttccagtccctcttcttgatgtttctacaccctaaggcaacaaaatgaacacacaaaagataagcaaatcatcagattttagagttgcatcaccatgttggttttaagtgtcagactcccaaaattccattgtgtttatttaagttaactggattttcttttgaggtagaattatctgacatatgaaccaaaaggatgatggaagcccaaaggcacttaaggccctattaacaaacaatacactggaaaatggcaacaactctaggtacaacataacaaatgtttataaagcaccccttaracagttgttttttatttggacaagcccaaaagtacaatatccaaagggttggttttccctaccttggacatcaaattgatttgttcttggattatacattaggatacaaatgcaataggagtaaccagaacacaaatgctaccttatttagtgaggaaatatctaaagtgattctattatctagcacctttgtaacaagcaagttgaagcttttatgttgagtttatatagcacacacagtctacaaagtttcatttgctgttagtatcattgtaaggatagtttcaaatgcagcactt

SEQ ID NO: 213485 - DNA, 460 bp, Homo sapiens
ttaaaaatatagagccaaagttttcataagagacaggaccagcataaagacaagaaaagaagaacataaagtaccatgtttttcaagaaaaagaaaataaggtctgttccattacatgtacagacaaagtgaaattaatcagaaagagaaatatccctgtggacaagggtgcttgtaagagattctatagtaacaaatttcttatccccatttcacagatgtgtaaaatgagattacacaacttgttsaaggtcacatagcctgtaagtaaggattcaaatccaaggacttgatttcaaatttcaggactatctctcctgaaaatggtaggatttgaactaacttttgaacaagtaaagaatttataaaagttaagaaattagcggggaaaagaaaataaacagcaaagccacagaagtagactggaatgtcttggaaggataaaataagggggatggaa

SEQ ID NO: 213486 - DNA, 317 bp, Homo sapiens
aactatctacaccaaaaaagcaccttcatgagaaccaaaaatcaggtgagcaatcatagtacctggttttaactttatatcgctgtaagaggcactttaagagcgtaagaaagacagtcttgaattgccagtctgccagcagcagtcatgtggtgcagagagagaatctgcatttgggggaggaagagcacagcaatygtgggactgcattggaaggcagtgctgccaacactggacagaactcagctggtgtccatggagcaagcattgagaccgacccaagccagacggaaatcacccagcccagcagttggaac

SEQ ID NO: 213487 - DNA, 536 bp, Homo sapiens
  misc_feature (1)...(536): n = A,T,C or G
aaccaggggccattatacactagaattaggagaaggaaaaagggtaaatatatatacagactctaagtatgcttacctagtcctccatgcccacgcagcaatatggagagaaagggaattcctaacttctgagggaactcctatcaaacatcaggaagccattaagagattgttattggctgtacagaaacctgaagagatggggtcatcagaaaggaaaacaaagggaaatagaagggaaccggcaagtggatattgaagccaaaagagccacaaggcgggaccctctgttasaaaagcttatagaaagacccctagtatggggtaatcccctccaggaaaccaagccccagtactcagccgaagaaatagaatggggaccctcacaaggacatagtttcctcccctcaggatggctagccaccaaagaaggaaaaatacttttgcctgcagctaaccagtggaaattacttaaaatccttcaccaaaccttttactcagacattgatagcaccatcagatggtcanatcattta

SEQ ID NO: 213488 - DNA, 633 bp, Homo sapiens
agcattttaaatcttaggaatttattttaataaaacaataattacttgtaaaatggaaacaatttaaatattcaagaatataaataattaattctttgatgaaaaataactaactyaaagtacattttaaacttttttatccaaataggtaacaagtaatatgaaataattagatgtggcaatttgcgattccagtttatttaggttaatcactataattgcttgtggatactaactggtggatttcattggtgctgtttgttggtataccatcctggtagctttgaattagaataatattgactcactttaaaacaagaagagcaataatgatttactctttccattttatatggccctttcaggaagaacaatttcataggctgatagaaacagaaaatagaagaaatgctaaatgacaagttaatgggtgcagcacaccaacatggcacatgtatacatatgtaacaaacctgcatgttgtgcacatgtatcctaaaacttaaagtataataataataataaaagaataaaataaaatctgtaaccataaaaaaaaagatgtgccatactaactgagaaaaaaaaaaaaaagaaaatagaagaaatggtcctatttgaaaagagagaagg

SEQ ID NO: 213489 - DNA, 535 bp, Homo sapiens
aatatacttggtttgtgtttgcatcacagaatagcaggagggcttttagctggataatacctagagtttaatcctggtgtatcagaagataaagcactcaattgtccaagagattataaagcgtatgtattagtaccttgtagacattaacaatatagacattagaccagataagagaatatgtacaatcttgagcacaaaaatataatactgggtgactcatttatgcttgttgaagatttttctcaagaaagcacataaaaatgactaaggttgcctacagtatgcaggcaagaaaatatatagcccagttataaagtcaggaaatatgttctatattaacaaattcactcctccatccataaattgtatgcaaggaagattaaataattccaacatgacagaacttgttaaaaataaaaggtatataaatcttcaccttcytttttaaactaatctccacatttgtccgggaaagatcaggaccaacaataattgccccatttatggctctcctacatacgtttccaatttg

SEQ ID NO: 213490 - DNA, 492 bp, Homo sapiens
ttttctttctttgtcttcttagctaatttatttaaatctatttttctgttcatgaataatcttttcagatatcctttaacttgccattttatatattattggtattttctatttaaaattttatattatttgtttcagttaaaaatctgtccacttgtttcaggcagttcatgttttatgaakttttgaattcaaccttttattctttcaaaaatttaaagcatacttatgttatattctgatacattagtcagaattctccagagagagccaacaggagacagagagatggatggatagatagatggacagatagacagacaaaagggtgtttattaggggaattggctcacttgattatggaggttgagaagtatttccataggctatctgcaaactggagaaccagagaagctggtagcatggctcacgtccaagtttgaaagcctcagaaccagggaacctgatagtgtaactctcagtttgaggctg

SEQ ID NO: 213491 - DNA, 394 bp, Homo sapiens
gtctgccatttttcagcaatgtcagaktatgttgtcatatttgcacgttagctatgtaaaaaggaaccacgtgaaaaaaatgcacagctgtgtaagagagtttaaggattgaggtctgaacagcaaagccatgtcagccatataacatatattccggcctcaccagcacaatcctagcttatttctgctgtcctactgtcccaatttttggggtttttttgtggggttttttttgttttttgtttgtttgttttttgagacaaagtctcactctgtcacccaggctagagtgcagtggcacaatcatggttatcacagcatcaacttcctgggctcaagtgatcctcctgccttaacctcctgagtagctaggactacaggtctgtgccaccac

SEQ ID NO: 213492 - DNA, 328 bp, Homo sapiens
cacctacagtttctagaaagttgcaagctactgttacaggcatgatwtatataggaactttagtggacatgggtttatgtttggctagaatcagaatctctttgggaaaagcaacgctgctgtccttggtcctgatacccctaggtatgggcatataattcaggcctggccacaggaattgagtcaggaatgaattgagtcaggaatgaccacgtaatccaagtcagtccaattaaggtcattggcaaggccttggctgagctacaaggaaagagatgatagctttaagaataatgtatgtctagagatgctggtggccagcctcacc

SEQ ID NO: 213493 - DNA, 552 bp, Homo sapiens
ttatgggtggaaaggattgtgttctatttagagtctgacggtctgctttcacattgctgtktcatcaaaaaaaaaaaacaaaagaaatgagtggtgtgaattcagatcctatttgtacctggtgctgggctggatgaagactggcttgactgtcccaccctgccctgttctcacagtccactgacagagccctacaatcagtccctttccagactgtcagaggggtgtgtagcaaatatggtcacggggttgcatagttttgtaaaatttgcaaaagaaagtacttaccacagttagttaagatcactgactgtctctttccattctggtttgcttgtctgcacacttatcctcacatggactggggtgcagttgacaaaggtgatcaggggatccagctcaggggaaattgagtcagagacccatttggttggggtttagcggatatgtgttcatggctgagagtcatttccacatgccatgatggcataggagtgatatccaggggttctccccctgcccactgtactggctctcttggcaagatcctcg

SEQ ID NO: 213494 - DNA, 585 bp, Homo sapiens
gagtggtacctctgtcttctgcacagtgtctggctgccaaggtgatgctgaagctcctttcaccactgctccttatttagtgctgtgctgctagcttttccactcatcccrtatgactcatgggtgagccatagcaccatgccttccacggtgtaccagcctttgctttgattcattctgtgcaggttacatagggtgttctaagctctccttgtcctttgagtctgagccttatttttccttgcctgatgaacatttggactataacactcacgctgaggaaattggccacattaagctaagttactgtctttgtttgtttgggctgctagaacaaaatgtcatagactgggtggcttataaacaacagaaattggaagtccaagatcagagtgctggcaagacttgctgtctggtgggggcctacttcctggtttacagacagctgtcttttccctgcaacctcacatggtagaaggggcaagggatctctctcgagcctcttttataggatactaatcccattcatgagggcaccactgtcatgatctgatcacctcccaaagcccccacctcctaatacca

SEQ ID NO: 213495 - DNA, 585 bp, Homo sapiens
gagtggtacctctgtcttctgcacagtgtctggctgccaaggtgatgctgaagctcctttcaccactgctccttatttagtgctgtgctgctagcttttccactcatcccatatgactcatgggtgagccatagcaccatgccttccacggtgtaccagcctttgctttgattcattctgtgcaggttacatagggtgttctaagctctccttgtcctttgagtctgagccttatttttccttgcctgatgaacatttggactataacactcacgctgaggaaattggccacattaagctaagttactgtctttgtttgtttgggctgctagaacaaaatgtcatagactgggtggcttataaacaacagaaattggaagtccaagatcagagtgctggcaagacttgctgtctggtgggggcctacttcctsgtttacagacagctgtcttttccctgcaacctcacatggtagaaggggcaagggatctctctcgagcctcttttataggatactaatcccattcatgagggcaccactgtcatgatctgatcacctcccaaagcccccacctcctaatacca

SEQ ID NO: 213496 - DNA, 557 bp, Homo sapiens
aactagcatggatatccagaagtttcagaggcagttttggaggaagagagcatagagagcaaagggaggaggcagtaaaatcaaagaagaaaatgtcctagaactgaaaaaggcttggtgtaagattgtaagagcctatttaagtgctaagcagagtagattaaaaagaaatcacatataaagatccaactttgaccccctttttttgtctctgttgagttttagtatcaggatgttcctggcctcatagaatgagttagggaggagtccctcctcctctatttcttggaacagtttttctatgaatggtaccagctcttccatgtacatctggtagaattcaggtgtgaatccgtctggkcctaggctttttttttttttttttggttgagggaattggtaagctacttattactgattcaatttcagaccttgttattgatctgttcacagattcaatttcttcctggcccagtcttgggagggtgtgtgtgtccaggaatttattcacaaaagtgttcataatagtctctgatggttatttgtatttctgtgca

SEQ ID NO: 213497 - DNA, 629 bp, Homo sapiens
tgatgtgggtcaaagggtacaaaactgtagttatgagtaagttgtagaggcctaacatatagcatggtgatgatagttaataataacccatcatatacttgaaattcactgagagtagatcttaagtatatgaatatgttgaatagcttgattacagaaatcattttacaatgaatatgtatattaaaacatcactctgtatgcaaatatgtacaakttttatttatcaattatacctcattaaagccaaaaaataaagaactttcttcaaagtcacattgaacaattttcatgtataggttttttgccaaccatatagataagaaagatttggaaatataatatttttagctgagaatattgcagtatttaaatacacaaggcttctgttttaaacaagagcaaggaattgataatggtgaggcaaccagcacataattagttgttaacatttatttagcacatattaaataccagacattgctctaaatgccttatgtacattagcccatttaatcatcacaataatcctagaaggtaaatgcttttattttcttctctgtacagatgatgaagctgattcaaagcatagtaacttcatgtctcagacttactaagtatcagggcca

SEQ ID NO: 213498 - DNA, 629 bp, Homo sapiens
tgatgtgggtcaaagggtacaaaactgtagttatgagtaagttgtagaggcctaacatatagcatggtgatgatagttaataataacccatcatatacttgaaattcactgagagtagatcttaagtatatgaatatgttgaatagcttgattacagaaatcattttacaatgaatatgtatattaaaacatcactctgtatgcaaatatgtacaagttttatttatcaattatacctcattaaagccaaaaaataaagaactttcttcaaagtcacattgaacaattttcatgtataggttttttgccaaccatatagataagaaagatttggaaatataatatttttagctgagaatattgcagtatttaaatacacaagscttctgttttaaacaagagcaaggaattgataatggtgaggcaaccagcacataattagttgttaacatttatttagcacatattaaataccagacattgctctaaatgccttatgtacattagcccatttaatcatcacaataatcctagaaggtaaatgcttttattttcttctctgtacagatgatgaagctgattcaaagcatagtaacttcatgtctcagacttactaagtatcagggcca

SEQ ID NO: 213499 - DNA, 553 bp, Homo sapiens
gaacacttccaaactcggttcatgaagctgacattaccctgataagaaaagaaaacttactataagaaaagaaaaaattcaaaccaatatccataataaatattaatgcaaaaattataaacaaagtactagcaattcgaaatcaacagcacattaaaagaattatacaccataaccaagcaagatttattcctggaatgtaaagatggttcaagatatgaaaatcaatcaatgtaaaacataacattaacagagtgaaggattaaaagcacatgatcgtctcagtcaatgaagaaaaagcatttgacaaaatttaatacactttcatgataaaaacacacaataagcaaggaaaaaaaggaatgtacctcaatataattaaggccatatatgcraagccttcagctaacatcatactcaatggtaaaaagctgagttttttcctctaagatcaggaatatggcaaggatgctcattctcaccacttctattcaacatagcactggaagtcctagaacaatgacacaagaaaaacatataaaaggcatccaaa

SEQ ID NO: 213500 - DNA, 565 bp, Homo sapiens
atctgacttcagaggcacttcatattgcagaagaaaataagaggggtgaaagaccttgcatttattttaaatttactgatactctcttaacaagaatatgtgaatcttagttcctgaattttttaaattgccctcatcactcttgcatctacagatataggactcaaataatctcatcacttatattccgaatagcatctctgtagtctcatatacttatggcaagaaattaacacaaaagtaaaatatttaattggtcccatggcttaaataagtcttccttaaagagtgacacctataccagcaacatcagtatcatttcagaacttgttagaaatgcaattcctggataccactcctgacctatagaatcagaaacatagcaatctgtgtttgawcaaaccctcctagcaattctgatgccactaacatataagaattgctgggaattctgccacttactcaatgtgactattcaaattaagcattctagaattgtggaaattaccacaggatggagggagagttccactcagcccactgtggagtcgatctgagctaaacc

SEQ ID NO: 213501 - DNA, 448 bp, Homo sapiens
tatcacattgggtattaggttccagcatatgaattttagggggatgttaacattcagaccataatacaacccaaataaaaatatgcaaaggacttgaatagacacttctttaaagaagatttacaaatggtttagctgggagtggtggcctgcacctgtagtcccagcttctcaagaggctgaggcaggaggatcacttaagcccaggagttcaasattgcagtgagctgtgcttgtaccactgcattctaccctgggcatcagagtgagaccctgtctttattttaaaaaaagaaaatatacaaatggtgagcaagaacatgaaaatgtgttcattatatataaaaatataataaaattcagaatataatatgttattattatatcataacagaatataataatataataataatgacagaatattatacagaatgtataccacaat

SEQ ID NO: 213502 - DNA, 448 bp, Homo sapiens
tatcacattgggtattaggttccagcatatgaattttagggggatgttaacattcagaccataatacaacccaaataaaaatatgcaaaggacttgaatagacacttctttaaagaagatttacaaatggtttagctgggagtggtggcctgcacctgtagtcccagcttctcaagaggctgaggcaggaggatcacttaagcccaggagttcaacattgcagtgagctgtgcttgtaccactgcattctaccctgggcatcagagtgagaccctgtctttattttaaaaaaagaaaatatrcaaatggtgagcaagaacatgaaaatgtgttcattatatataaaaatataataaaattcagaatataatatgttattattatatcataacagaatataataatataataataatgacagaatattatacagaatgtataccacaat

SEQ ID NO: 213503 - DNA, 518 bp, Homo sapiens
acaaaccttcacatgtacctctgaacctaaaataaaagttaaataaaaatagacactcagttgagcacattaaatgttcatatttgcaaacaaagcactatgaggaggattcggtctatacaacagatgaaagaattaataattcaaaactcaaaaaatacaggaattgaaataaaacattgatggataaattaaatagtagatgagaacagataaagaaaattgatacactgaaatgayggtcaatagatattgtgtctgcaattttttcacatttctccatttagctctttcttctgatacgataattaatttatgccttcaccgctctcaccaagtttcttaaccatcacagctctgtgctcattctttagttcatagaaaatgagatgactacattaaatgctcttcacaatgaagaaaaacacattgaaaattaaaatgtaaataaagctggaaaaagatttgtaatatttatattgagcaatgggctatttttaatgtaaagaaaatggttg

SEQ ID NO: 213504 - DNA, 518 bp, Homo sapiens
acaaaccttcacatgtacctctgaacctaaaataaaagttaaataaaaatagacactcagttgagcacattaaatgttcatatttgcaaacaaagcactatgaggaggattcggtctatacaacagatgaaagaattaataattcaaaactcaaaaaatacaggaattgaaataaaacattgatggataaattaaatagtagatgagaacagataaagaaaattgatacactgaaatgatggtcaatagatattgtgtctgcaattttttcacatttctccatttagctctttcttctgatacgataattaatttatgccttcaccgctctcaccaagtttcttaaccatcacagctctgtgctcattctttagytcatagaaaatgagatgactacattaaatgctcttcacaatgaagaaaaacacattgaaaattaaaatgtaaataaagctggaaaaagatttgtaatatttatattgagcaatgggctatttttaatgtaaagaaaatggttg

SEQ ID NO: 213505 - DNA, 636 bp, Homo sapiens
agatctgtcatggtttcgatctttgaaattcagatgggttctgaggttcaaacactgggcattgaaaattctctcctcttttttttaagtctytttctcttgttgctgaaaacctcagggattaatctaaataataaatgataagggtattccattaaaaatatcaaactgattagcaaagatgacaaaaagaacaaaactcaatctttatggaaatatgaggaagtagatgtcttttctttagtaagtgagaaaactgtcccatatcttcaggaggaaaacagtgcaataggaaccaaatctgtaattctttattgagtcaacattgatgttggtaggaatttatcctaaggatctaataagtcaagtgtctaaacagctaagtgtaagatgtactataaactttaaaaaaacctacatgtttaacagtgatggtattgtattccattctttaggtgttgttgattttatgtcctttaaaatgttgtgggagcatatttgacatagaaacatgttgtgttctttttcttactgacagttgaatatgaaaaacatttaagccctcagaaaaattgaatgaattgcacagaaaacacccatgtaattacacctagattctttaattaaactctcact

SEQ ID NO: 213506 - DNA, 385 bp, Homo sapiens
aattgaatgaattgcacagaaaacacccatgtaattacacctagattctttaattaaactctcactatacttgctttatcacagatctgtccatctatctttgtccatccatcaatccatcttttgcgtaatgcatttcaaaataacctgcagatatcagtttacttccatctaaatagtttgcatatgattaactgatatcaatttttttatacttttctaggtaaaattcacataaatgaaatacacaaaacytaagtgtatcattaaatgaattttgacaaatgcatacacctgtgtaacgcaaatccctgtcaagatatagaatgttacaatcacctagaaagtttcattgcctatttctcactttctgccttgtcctgcc

SEQ ID NO: 213507 - DNA, 454 bp, Homo sapiens
aagataaacacgaggaccagttggagaaggcagggcaaaatcaagaargcaagccagagtcagagaccagctgtcagcactgcactaacagcttgcaagggtatggacacatgaaagttaagccaaaaaagggaacaagcagagataattatttctagggtaatttttttaaaaaaatagtcatatttttaaaaaaatgtaatcagcctgcattcatagttatcctatgggatttcttaaagatacaatttgctaggtttgacacagtgtgtgtgtgtgtgtgtgtgtgtgtagctcagtaataaaaaatatacattttatatatctataaatatatatttacataaataaatacattttactattgaattttatgaagaaagttatagagtccaaaaaaatcattaaaaatgtacagtactagtctttcaagggagaagaaattctcagtttt

SEQ ID NO: 213508 - DNA, 454 bp, Homo sapiens
aagataaacacgaggaccagttggagaaggcagggcaaaatcaagaaggcaagccagagtcagagaccagctgtcagcactgcactaacagcttgcaagggtatggacacatgaaagttaagccaaaaaagggaacaagcagagataattatttctagggtaatttttttaaaaaaatagtcatatttttaaaaaaatgtaatcagcctgcattcatagttatcctatgggatttcttaaagatacaatttgctaggtttgacacagtgtgtgtgtgtgtgtgtgtgtgtgtarctcagtaataaaaaatatacattttatatatctataaatatatatttacataaataaatacattttactattgaattttatgaagaaagttatagagtccaaaaaaatcattaaaaatgtacagtactagtctttcaagggagaagaaattctcagtttt

SEQ ID NO: 213509 - DNA, 485 bp, Homo sapiens
tggccaacattgtgtatttattagatggctggtttggatttgggggtaacagagaatagtaacaragaattattatcaaagttactttttccagtcagcataagcttaagtccttcaaagcacaagtacagaatggaagatatctctctctctctctctgtctctctagtgtgtgcatgtgtgtataatactgcatatatacacattcggctcaagggaccagagaaacatgctatactaatacttcagtatactcaacatacaagagtgaaggaaagcaaatctaaggggaaatagctacaggaaaaaaaaattatttttaaactgaaatcataaaagttcttagagttcaaaaagacccaatcacttagttttgggggtataataaacaccaagtgtatgtgttaagtaaaatttaaatttcctaatggcctaactggcagactattaaaatatctgatgtttgatatctggtatcttctaga

SEQ ID NO: 213510 - DNA, 529 bp, Homo sapiens
gtgttatagattaatataacttaaatatttccaaactatcatcatagccatttttactacaaatattatctttacccaaatatgtttgatatggttatagaagaggaatgcttatgacgatataacacataatagcaaataaagccttttagaaattattaatctaaaaatcaaataatttttattaaaatgtcaagaaaaggtyagactttctagggaaagttttgagattaaaatgctttaagcccatcttacactggatcacaggacagctgattctgatatattaaaattgtaattttttaacaacggaaaattcattctttgccttcattagagtcttttcaaaactgcaaaagcaaatctattaatgaaacattattcaacttacatatatacacatatatttaacctatatcctttatattaatttctgtgttttacaaatattttcattaacattttaaaagataagttcataatagtgcttgtccatcaaacaatattttttaatatttagttttattga

SEQ ID NO: 213511 - DNA, 550 bp, Homo sapiens
ttgcatttcctcccacttttctggccttttcttttcagtttcctctggctgacctggaaatgttggcgtgtccattcttggccctctcctctttcctgtctacacttattccctacatgatctcatttaacttmacgactttaccatctagaggctgatgaatttcaaattcctttacctcttcgctgacccccaggctgcctagttgccatctcccattggctatctgatgagcatctgagtatctcaaatttaacatgtcctgacatagctccatgtattccttctacttcaaaccaccttttcagttctattttagtcagtagtaactccatccttctaaagcctaaaacctgggcatcatgattcacatcactttttttctcataccccacatccaatgccttagcaacttttattagctaatctcagtttacaagatacctaaaggatgaagagtttttgcataaagataaaaaagtaatgcatttaaaaacagaaatattaagacaatgccaatattgcctctgggcccactgaatatgggaga

SEQ ID NO: 213512 - DNA, 608 bp, Homo sapiens
tcagttgcttgccaaaggtcactgatggaataatatttcttttttcttcacagtcttaagaaagtcatctgactctacttatatcctagtgaagaggaaataaaatgatagacaaaagtcatccttttattaaaaataacagcattcaatgttacaacccatatgacaggacaaaccaaaatttcttcataataaagtccctaaacagcatacttaggcctataacctatacattgctcatgtgatatatagcaaaagtaaaatattgcattattttttagcaaacataagctaagaaaacacccaagttgaatcagtatttatctagcttgaaaatgatccaaatgagtagaattctcaaaatatgtttagaatccatatctgtttttaaattttcatagaaaaagagagygtaggtaggcttaaaaggatttttaagaagaaacaaagaaagagactcaatcctctcctctctaccacggagttaaggttttcagataggagagtaggtgaacgctcttagacatttcacacacctttactaattttataatttcctgtccccctgaagcggctcacattaagaactgtaaattaaaataaagaag

SEQ ID NO: 213513 - DNA, 299 bp, Homo sapiens
atggtgtctaggccatctctcacaacttggattgcatggaagaacctcaacaatatttcacctgttcttttcaatcaggaatctgtatttttaaatcccagaggaaaatgcatggatctctaaaatactcttttccaagtggttagcagtgctatcaattcagtaaaattagcttattaataagattattttgcagatcaaactgttatttgcagccaaagattaccaaaatcccatagattcttatgatccakacataaaacatagctattccattccagaaatacccccaagctgga

SEQ ID NO: 213514 - DNA, 421 bp, Homo sapiens
aattgaaacacttctcgtgtcaggaattttggataagggatactcaacctgtatgtaacaagcaataatggatatacartagactcttatgtcagtcaacaagtttctttttcctaaaaacttgtgatgatgtgtagccaaaggaatagttctggtctgaatcttcttctagaagaatcttctagaatctaggacttcttttgtatttgtgtctaatacttctctattttgtcctagaatgtttgctttctgcttcaggatttctattttaattgaaggtagtctatatctttgtatctacacctgcttgcaaatgtgttttttaagtagccttaccactgtgctatgcaatactgactgctttttttttttttttaacgtttatggaaatggcaatatgacgctgcacttccctgttctc

SEQ ID NO: 213515 - DNA, 504 bp, Homo sapiens
aatacaatctcttccccatgcagcaccttcttctggaccctctgacattgctgcatagatgcccgtggcaacctgcactgcactcccatgtataaaccagaaagcccaaggagtcacacttgaaaacrcttgatccggggggagggcaataaagcctctgggtaaatgcttcttttcttcttgttgcatagctttgagacctttcctcaagtttttctcaagacctttcctggagtttctgtgggatgaggcaggcagttgtcacagtggaggctaactcaaagcacctttgtctttccttatttcttgctccctcactcttgctgtgttcctaatagactacctgcatgctagcctcagcctcactttccccaaaagcagggtctgaagacatggggtcatctcaatcatgaaccactttatataccctccttacctacatatgccctatctttacatctctatgcagcctctaattgctagtatctacttccacctgattga

SEQ ID NO: 213516 - DNA, 605 bp, Homo sapiens
ctcagcagtgttggtagttctaggaaaccttgctgagccacacaaaggtactcatgatcaaccttctttcgtatagcctcattctgtcctttccagaagtgttctatttcttatgttctatagttctgggaaatctgtctcccattgcagagacattactatgcattctatgctgtgacctgaccctgttaactaaaacttctacctgactttaatcctgggtgttaagatagtacaaaataacacatcttggttagctgcctgggctggccactggctgtctcctggacatgcaatgaaggcctggatttaagattacttctgttaataactaagaatcaagcctgcagggacaggcattccttgcatcacccatgtgagctttcacagaacaagttcaacatggtccatgaaaggtctctggggctttctaccagcatctatctcagcagtttagttgctattcatgatagcttggtttagaaacttgtcytctatgaagttcaaataatatgatacaagaattactgttcaaagcaagaatgtccaaagtagctgacttttatactgttcatctgttggcataaaccattgaaggtcaattc

SEQ ID NO: 213517 - DNA, 608 bp, Homo sapiens
gttaaggatttaacatctcagaagtgatgactggttttacactgctgggatttctaccccctccaacaccactacaaggcttggatgttacaatggtttttacaagcaaggtataaattttagagctctatcagcagagcataactgtggagttcagatgctgaatagggtgggagtgatcttaaatcgtcacattcttacagagaactcacaagctatgttcctttgggtgggcttagaggacatatccttcactaaggcagtaagaaatgcatttgaggagaatgagaatcatgtaagctcagcatcagctgtcttctgtaggccaagagtgacaataggagatgctgccacaagacagggctccctagatggagatgagacaagaattggcacttatttaggggctagggtgattataattgtaatagtaaccgagtcttgtgtagtcagtttatctggtgtagtcagtttatcagggatctttgaccatggctagtaacaccatgttcayagagggtgaggaagatgggcagctgactcaggcacttgacttgtaaacaaaagagccagtaagaaggctagtgtcagccagccctatgtgaaat

SEQ ID NO: 213518 - DNA, 534 bp, Homo sapiens
agttagctctggaatgccaccacaagtgtacaagtattccatcaattctttgcccaaggaattctgtgttcatttactggaaatgtatactggggagccataagaggccacagatttaaggtccaagctgaagcccagagagactcaatgtgatcttgattctccagaacaggggccagataagtgacatatagcttaaggcagtctgagtccaatgggtccaaagacagaccctgctctccctgcccccatgaagtgttgtttcaagttcctcagttccacttaggatggatagactgaatctggcaggactcttagttggtttcttggcctgagtttagggcatgaggaggagcaactttaggggcttggacatagtgcttcctaaaatactggttccgagtaacattaaattcttctatcacttaggatgggaacttctagcactggatcctttatcacatttacaatctccgtacaaatatgcatcatggcawatattgacagataatatagatccgatatccccaattg

SEQ ID NO: 213519 - DNA, 567 bp, Homo sapiens
  misc_feature (1)...(567): n = A,T,C or G
ttgttcatccaattatttagtctgttaattttcttatagaaagtattcaaagcacgattttgaataaataaacccctgtgtttaaacaattcattaataaacagagttttttgttttggttttaaaaaatggagtttttacttttggagcccctacttttggaatcaggatccaaaaattcaacccccccagtttcctttwactcagttccttgagatttggtcatctgctctgtaaacagttataaataaaaacaaaaatggattttctattacaaattttgtttccatggtataatagtctgtcgtgtttatctttttaaaatcatttcaataggtttatggtgaacaagtggtattaagttttatttagtgatttctgagattttggtgcacccattcccttgagcagtgtacactgaactccgtgtggagtcttatccctcatgccgctcccacccttccctagtccccaaagtccatggtatcattcttatgcctttgcatcctcatagcttaagctcccacttgtgagtgggaacatnnnnnnnnnnnnnnnnnnnnnnnn

SEQ ID NO: 213520 - DNA, 382 bp, Homo sapiens
cctggctgattaaaatcttccatgaacaataaattttaggagtggcaagatgagtaagaagcagtgccaggctccccaaaagcaggaaaactgggaaggaatagtgtgttttcaaatcttgctggcaaagtgtgagctgatgaggaatgtctgcagtaaatggagacttccagcctatcttcaggtggggatgacgggaaaggatagaaagaccttctgactctatatatctctgcctgccaccttgtcctaaaagcaggacaaagttccccatgtcttaattgccttyagctgaaacaatttgtcaaaggcatattttggaaatagtttggctttcttcacccaaatgtaaaatagacaagataggagaataagttgactc

SEQ ID NO: 213521 - DNA, 486 bp, Homo sapiens
ggctgagctgaggcaagaactgagaccctctcttcctctgccattctccctcccagaatcatcctctataaagagaagggagagagagaccagaagggaaaaaatggagayggttgaagggcagatatggggaatggaggaaggggaactgtgaaaatgagaagtgagtataaagagcttaaaataggatcaaagggaatgggaagagccatagtaaaggaaagagagagaagcaaagaggagaggagaaatatggtaattcctaattggggttaggcctgaagaaaatagctgagaaacaggtggcagaggtctctgacctttttatcctttttatgctttattccttcttatactcccctgattggcaggaagggaggtgtcttagtccactcttgcattgctataaagaatcacctgagattgagtaatttataaagaaaagaggttcaattggctcatggttctgcaggctgtacaggatgc

SEQ ID NO: 213522 - DNA, 369 bp, Homo sapiens
gtctttgtatctcttctagttgtacaagttaagaaatcctaactgcccaccrcaaccctagaacagaatatgttagtcaatgccacaggtctctgaaggtcaaggcacgctggtggccatacagacccttgatgcctcttatagtaactattaagatataagatgaagtgctataccagctgaccctgcatatacattctttcctgatcagctatgggaacctaatctcatgagtaactcctagtgttaaatctggcccgtaaaggacagttcctcaatgttgctgccctcatgaatgcattattcattacttttgtcccctagaaggtcccagaagatattcccttaagtgtcacatcctctggtatt

SEQ ID NO: 213523 - DNA, 546 bp, Homo sapiens
agagatgccctgaaggtattaagactcctcacttccaggctgtgagtgcgtatgtgctgatctgacctctggcttcagaggaccctgaggtagaaagcacagacatacatagcttacttgaggccagacacagtcagcatgagtctacacctgcatacacctatccaaagcatctgccactggaaatggcagtgagtaagggggatgggaggggagttggtcagactgaaacatgcctgtaacagggaaagaagtaacgatgcaactggctcaatattgccaaacccttccctgaaactctctgtaatccatgcctctgatactttattcaagaagagggaagaaatgatctgccagttcccctcttccataaatcagacactaactccatgcaaaattatctttcctatacatcccacttacagacatgggcactgagcagygatctggagcatcctatgccctagtctgaattagggaaatccagggcaggagatgaggcaccagcacaaatacaatgcaacctgctactcagaaagggatctg

SEQ ID NO: 213524 - DNA, 639 bp, Homo sapiens
gcttctgtttagaaagtagtctgtagaatgaagagaacattcgtcccttaagggccaggtaattacacaattctatcttttgagtcctcagaactgaggttgcaaggcaaccaagtgaattaagttctgaagaatgctaagcccctctgagcagacagaaacagcacggtattacctttggcagaacacaggaggaagagaggcagcagcagaggtagctaagtagcagtcagggaagatgtgacggaattcttaaaggtagcctgtggctaaagtttgaaataatcgggggctcaaaaaatgaagagtttgcactcaagctctttgccaacagcccacactggctgcgcatgaagacaacaggcagagaccagagtgyctggcaggataggactagctgctggtggccaggcagacttctccattccctggattcttaagaacagcgagagtcttataccactggaagatgggtggaaaactccaccaaggactgcaaaagacccagacagcttccggagaagggagagaagcagaaggcatctgcacttgtaaggagtaaaatatgttctctcttccattgcctctgaaggtaaaaccctcagcttctgcgggggagaagaagagcagggaacccct

SEQ ID NO: 213525 - DNA, 348 bp, Homo sapiens
gttctagttctgtgaatgtcgatggtagttagattgaaaatagcattaaatcttcaaatttctttgggcaacattaccattttaaygatattcttcctatccatgagcactcaatgttttttctgttggtgtaatctgatttatttgaacagtggtttgtagttctccttgtagagatctttcacctcctttgttagctgtattcctaggtgttttatttttgtggcaatcgtgaattaaagttcgtttatgatttggttcattgcttgactgttgttagtatgtaagaatgctgcggatctttgcacattgatttttgtatcctgtgactttgctgaagttatttat

SEQ ID NO: 213526 - DNA, 613 bp, Homo sapiens
cttttcagtatttaaggggaatgcttccagcttttgtccattatgatgttggctgtaggtttgtcatatatggctctcattattttgaggtatgttcctttaatacctagtttgagatttcttaacatgaaggggtgttgaattttattgaagccttttctgcatctattcagataatgtggtttttgtctttagttctgtttatgtgatcatgttctccaagattgaaatcaatccagatactacttttgcttttcctatggtcttcacaacccacagaccaggagatttcccccgggtgcctacaccaccaggrccctgtgtttcaagcacaaaactgggtggcagtttgggcagacactgagctagctgcaggagtttttttcataccccagtggtgcctggaacaccagcaagacagaaccgttcactaccctggaaaggggattgaagccaggtagcccagtggtctagctcagcagatcccactcccatggagcacagcaagctaagatccactggcttgaatttcttgctggcaacacagcagtctgaagttgtcctgggatgctcaatcttggtggggggagaggcgtctgccattactgaggct

SEQ ID NO: 213527 - DNA, 366 bp, Homo sapiens
ggaacatgacaaggatgcccactgccaccactgttatttagcatagttctgaaagtcctagctagagcaatcagacaaaagaaagttatgaagggcatccaagttatgaagggcattcctgaaaaggaagaagttagattatccttgtttgcagaagatatgatcttatctatggtaaaacttaaagactctacacacaaaaarctattagaactaataaacaaattcaataaagttgcaggatacaaaatcaacatacaaaaattagcagcatttctatattccaacagggaacaatgtgaaaaagaaatttaaaaaagtaatcccatttacgatagtcacatataaaattaaatacctagaaat

SEQ ID NO: 213528 - DNA, 555 bp, Homo sapiens
atctagctaaactgcactggcatttctgacccacagaaaccatgagataataagtgttgttgttttaagccactgagttttggggtaatttgttacaaagcaatrgatagctattattattgtttattgttattatttatattattttattttattgttatttattgttgagaacaaataatagttaccacccatgactaaagttggtcctttgtatccatgggttccacatccatggattcaaccaaccatgccttgaaaactacaacaaaaactacccccaataataaaaaaaatacaacaatgaaaaataatacaaaattttctaggctctcaggcctccctggtaaaataaaataaaaaaaacccaacaaattaaaaaatacagtataacaaatattacatagcatttacattgtatttggtattataagtaatctagagatgatttcaagtacgtgggaggatagtacataggttatgtgtaaatattttatataagggacttgagtgtccatggattttgccacctgagggggtcctaggactaatccc

SEQ ID NO: 213529 - DNA, 605 bp, Homo sapiens
ctttctgttatatgaacaattttatttaatctgttcactgtgctctttcatggctacttcagtgtcatttataataattccatttttgtaatttagccatttaggatttcttcaattcctccaatgtgttctctcttgcctcgagccttcggacctgcagcgctccccaagtggagcacctctcctgcctccaatggctacatcctacacattcttttgctataaatttaaatgtcatttctgctgggaatcctttgtcaaccctctgcattacattcaactctcctcctgtgcactgccttagtagctgtattagtttcctaaggccgctgtgactaatagaccacaagcaggatggcttaaaacagcatgaatttaatcttgcacagttctggaggctggaagtttggaatcaaggtgtcagcaaggccrtgctccctctgaaacctataaggggggatccttctttgcctctccctaccttccagtagttgttggcaacccttggtattccctggcttatagatgcttctctccaatatcagccagtcttcataggaaaatctctcctgtgtctttctgagcctcctctcttctcgtaaagc

SEQ ID NO: 213530 - DNA, 605 bp, Homo sapiens
ctttctgttatatgaacaattttatttaatctgttcactgtgctctttcatggctacttcagtgtcatttataataattccatttttgtaatttagccatttaggatttcttcaattcctccaatgtgttctctcttgcctcgagccttcggacctgcagcgctccccaagtggagcacctctcctgcctccaatggctacatcctacacattcttttgctataaatttaaatgtcatttctgctgggaatcctttgtcaaccctctgcattacattcaactctcctcctgtgcactgccttagtagctgtattagtttcctaaggccgctgtgactaatagaccacaagcaggatggcttaaaacagcatgaatttaatcttgcacagttctggaggctggaagtttggaatcaaggtgtcagcaaggccatgctccctctgaaacctataagggrggatccttctttgcctctccctaccttccagtagttgttggcaacccttggtattccctggcttatagatgcttctctccaatatcagccagtcttcataggaaaatctctcctgtgtctttctgagcctcctctcttctcgtaaagc

SEQ ID NO: 213531 - DNA, 557 bp, Homo sapiens
caaagatcaagaaaactgacagtatcatgtgctgacaaacatatgaggaacagctgttcccatacatcactggagggagtattaaatttgtacaacctctacctgtctctgtctcaaaactgcccatatcctttgagtcagcaattcaatttctaggaaactatcacactaatacactcacatgtatgaaatcgcacatggacaagattattcattgccgctttagctgtaataacaaaagattggaaacaacctaaaattcccttaatgggggactggttaaatacatggaatwcgaaggctaaaaaggaagaagcaattctgcatctcctgataagaaatgattgctaaaacccattcaataaagaaagcaaaatgtagaacagtgtaactgatgtgccatcacttatgtagaagaataaaaataaatcctaggaaatatgaatattttgctaatacatgcatgaagtatttctagaaggaatcacaagaacccagtagttacccctaatggctcacacatggtggaagtgtaaattttttttgtaattttgtta

SEQ ID NO: 213532 - DNA, 616 bp, Homo sapiens
taatgttattgttgcagtaacttttatttgtcttctcaaatctcactaagatttttttcaacctttttcaaagataaatcaattatctgcaacctcccaaatattttatttaaacctatcacatttattcatttgtttgtttctagctattctgaaacacagattatgttagtatttccgtaacaatttcttatacaaaatgtaatacaaaaaaatacatatttaacacataaaaggaacttcttaataactattaagacttcagttaattctaaactttatgtaaacgttaaaatgagctcaagatgtgtagacgtattatgttttcttaggctaytgtttttttgcaacatttagcaaatgaataggatagtacagggctttttcatacttcttaagaactctatgtcattggccttacttttctggtaacttgttttctagtatattcattagcaacctcctggtacaacatatctgaaaacgcttgacaattaaaataacaataacaactttttatatgaattcataaacagaaaagtacgaagaaaagtcagagtccagaaactatgggaaatcataaattaaaaatgattttcaaacattagacttgatg

SEQ ID NO: 213533 - DNA, 616 bp, Homo sapiens
taatgttattgttgcagtaacttttatttgtcttctcaaatctcactaagatttttttcaacctttttcaaagataaatcaattatctgcaacctcccaaatattttatttaaacctatcacatttattcatttgtttgtttctagctattctgaaacacagattatgttagtatttccgtaacaatttcttatacaaaatgtaatacaaaaaaatacatatttaacacataaaaggaacttcttaataactattaagacttcagttaattctaaactttatgtaaacgttaaaatgagctcaagatgtgtagacgtattatgttttcttaggctattgtttttttgcaacatttagcaaatgaataggatagtacagggctttttcatacttcttaagaactctatgtcattggccttacttttcyggtaacttgttttctagtatattcattagcaacctcctggtacaacatatctgaaaacgcttgacaattaaaataacaataacaactttttatatgaattcataaacagaaaagtacgaagaaaagtcagagtccagaaactatgggaaatcataaattaaaaatgattttcaaacattagacttgatg

SEQ ID NO: 213534 - DNA, 611 bp, Homo sapiens
tttttgcaacatttagcaaatgaataggatagtacagggctttttcatacttcttaagaactctatgtcattggccttacttttctggtaacttgttttctagtatattcattagcaacctcctggtacaacatatctgaaaacgcttgacaattaaaataacaataacaactttttatatgaattcataaacagaaaagtacgaagaaaagtcagagtccagaaactatgggaaatcataaattaaaaatgattttcaaacattagacttgatgctgcctccgggtcatctgtcggtctctaaattacctacagcttacaaatagaagacaaaatttgagaccatgcagaatagtagatcttatcagagagtatgtataaaaccaggattaacaaatataaggaaaatatacttcttctacagaagaaaataaaatttctactcattttttctttaaattctaagkgtgtgtgtcatacacacacacactcacacacacaaaattctaatagcaatcttaccttcatgtgaatttgagaacctaatttacactatcaccatgttctaaacagctccacaatggctatataatttaaaatttaaaattact

SEQ ID NO: 213535 - DNA, 638 bp, Homo sapiens
tatataataggtcagtaagacccagaagtggcatactagttycaaataaacacagcaataaatgtgacctaagagcctttctggaatcaaaatagtggtagataagtccttgtttctgccctctggacaaaggctaagaaaagcttgttaattacagctattctagagcctgaccctcagttgactaattctataagttaagctgaccttttgaaggagatgtacataatggttcctatttgaaaatgtctctgaaataataattatatggagtggtgaaaatcatggtgacttacttagaatgaagtaagaaaatcatgacaaattagacagaaaactttacttcagtttagacatttactagaaaatacacagaaagaacactagaagtggttaggaataccttccaccaggtaagtgagcatagtgggaggtcattaagtctgctccccattatgcccgaggtgttagagaatgcagaatattcttgctcacccacagtattataatgctattttctgacatggtgcaattttagagagctggtactactcaaaatggtacagcatggatccaacactcacttcataattgctaaatcatttttttcaactggcactccaaatgttttgatgcta

SEQ ID NO: 213536 - DNA, 638 bp, Homo sapiens
tatataataggtcagtaagacccagaagtggcatactagtttcaaataaacacagcaataaatgtgacctaagagcctttctggaatcaaaatagtggtagataagtccttgtttctgccctctggacaaaggctaagaaaagyttgttaattacagctattctagagcctgaccctcagttgactaattctataagttaagctgaccttttgaaggagatgtacataatggttcctatttgaaaatgtctctgaaataataattatatggagtggtgaaaatcatggtgacttacttagaatgaagtaagaaaatcatgacaaattagacagaaaactttacttcagtttagacatttactagaaaatacacagaaagaacactagaagtggttaggaataccttccaccaggtaagtgagcatagtgggaggtcattaagtctgctccccattatgcccgaggtgttagagaatgcagaatattcttgctcacccacagtattataatgctattttctgacatggtgcaattttagagagctggtactactcaaaatggtacagcatggatccaacactcacttcataattgctaaatcatttttttcaactggcactccaaatgttttgatgcta

SEQ ID NO: 213537 - DNA, 638 bp, Homo sapiens
tatataataggtcagtaagacccagaagtggcatactagtttcaaataaacacagcaataaatgtgacctaagagcctttctggaatcaaaatagtggtagataagtccttgtttctgccctctggacaaaggctaagaaaagcttgttaattacagctattctagagcctgaccctcagttgactaattctataagttaagctgaccttttgaaggagatgtacataatggttcctatttgaaaatgtctctgaaataataattatatggagtggtgaaaatcatggtgacttacttagaatgaagtaagaaaatcatgacaaattagacagaaaactttacttcagtttagacatttactagaaaatacacagaaagaacactagaagtggttaggaataccttccaccaggtaagkgagcatagtgggaggtcattaagtctgctccccattatgcccgaggtgttagagaatgcagaatattcttgctcacccacagtattataatgctattttctgacatggtgcaattttagagagctggtactactcaaaatggtacagcatggatccaacactcacttcataattgctaaatcatttttttcaactggcactccaaatgttttgatgcta

SEQ ID NO: 213538 - DNA, 634 bp, Homo sapiens
gtgaaatacagaatgtcttccatagcatatgtttactaaattttggctttttcagaagtatgagtggagtacagatgggtatatagaattgtaaatctctctctatcatgcacaaacacacaaacacatatggacaccaaaatacgatttacacatctgtttagaacaagacattctttattgagagatcacaacttcattgaaaacttcaaaaatatttcatccacctttgcattaccaggccatgggtagttcttggtatttactaaggtggttatcaataagtgtttattctttaaaataaartagttaccatttcaaaattccaatccaaacgtaaaatatttaaggccatggaataaaataaggtctttcaaaatagcttttcagcattgattttatcaaaatttgaatctcttgatttcacaatgccctttcatgttgaggtttaaataaatttacacatataaataatttatataaagaaattagtataaaacttgacatgtaatagacattgaaagaaagttactttttcttgtttcttctctattttggattatataaccagaaatttacatgaaaaccctaaaatattaggatttttttgccatgaaaaagaagaagcttagtc

SEQ ID NO: 213539 - DNA, 634 bp, Homo sapiens
gtgaaatacagaatgtcttccatagcatatgtttactaaattttggctttttcagaagtatgagtggagtacagatgggtatatagaattgtaaatctctctctatcatgcacaaacacacaaacacatatggacaccaaaatacgatttacacatctgtttagaacaagacattctttattgagagatcacaacttcattgaaaacttcaaaaatatttcatccacctttgcattaccaggccatgggtagttcttggtatttactaaggtggttatcaataagtgtttattctttaaaataaaatagttaccatttcaaaattccaatccaaacrtaaaatatttaaggccatggaataaaataaggtctttcaaaatagcttttcagcattgattttatcaaaatttgaatctcttgatttcacaatgccctttcatgttgaggtttaaataaatttacacatataaataatttatataaagaaattagtataaaacttgacatgtaatagacattgaaagaaagttactttttcttgtttcttctctattttggattatataaccagaaatttacatgaaaaccctaaaatattaggatttttttgccatgaaaaagaagaagcttagtc

SEQ ID NO: 213540 - DNA, 634 bp, Homo sapiens
gtgaaatacagaatgtcttccatagcatatgtttactaaattttggctttttcagaagtatgagtggagtacagatgggtatatagaattgtaaatctctctctatcatgcacaaacacacaaacacatatggacaccaaaatacgatttacacatctgtttagaacaagacattctttattgagagatcacaacttcattgaaaacttcaaaaatatttcatccacctttgcattaccaggccatgggtagttcttggtatttactaaggtggttatcaataagtgtttattctttaaaataaaatagttaccatttcaaaattccaatccaaacgtaaaatatttaaggccatggaataaaataaggtctttcaaaatagcttttcagcaktgattttatcaaaatttgaatctcttgatttcacaatgccctttcatgttgaggtttaaataaatttacacatataaataatttatataaagaaattagtataaaacttgacatgtaatagacattgaaagaaagttactttttcttgtttcttctctattttggattatataaccagaaatttacatgaaaaccctaaaatattaggatttttttgccatgaaaaagaagaagcttagtc

SEQ ID NO: 213541 - DNA, 422 bp, Homo sapiens
  misc_feature (1)...(422): n = A,T,C or G
nnnnnnnnnnnnnnnntcctgatttggctccttctgagttatttttgttttytaatcttaaaaacatatttaaatatttttttccagttaatagtataaaaaagactacattgacatggttaaattcccaagaacctcggttctttagggatggactaaatggctggtgtcattacttacaaaggtgtcatgaaattgatggagattatgttgagaaatcatgtttatattttatttttttctggtttaattccatttttccacaaactttttgatgtccccatgtgtgtgtgtgtgtgtgtacacaactcttctattggttctgctttactagagaaccctgatgaatgcacaccattagattcctcaaaaaggaagtaatcatgtgatactttgattctaattcagcaatactaattgtc

SEQ ID NO: 213542 - DNA, 422 bp, Homo sapiens
  misc_feature (1)...(422): n = A,T,C or G
nnnnnnnnnnnnnnnntcctgatttggctccttctgagttatttttgttttttaatcttaaaaacatatttaaatatttttttccagttaatagtataaaaaagactacattgacatggttaaattcccaagaacctcggttctttaggratggactaaatggctggtgtcattacttacaaaggtgtcatgaaattgatggagattatgttgagaaatcatgtttatattttatttttttctggtttaattccatttttccacaaactttttgatgtccccatgtgtgtgtgtgtgtgtgtacacaactcttctattggttctgctttactagagaaccctgatgaatgcacaccattagattcctcaaaaaggaagtaatcatgtgatactttgattctaattcagcaatactaattgtc

SEQ ID NO: 213543 - DNA, 609 bp, Homo sapiens
ttttcttttctgaattctacttttaatgtcattatatttaatgagcaggatttattatgtgatattattaaatatagatgtaacactcaaaacaacaatgtgaaacccttgtatatcttctgtttcaggctactccaattttcaatgatttcctcctgcaaagaaaaattattaatgcatatttctcattttaataatatatgaataaattaattaaaattttgtaataaaaagtcttgtcctaaggaattcaaaaattagttcatgtaacaaatagttatttaacatatctgacaggaagcacaacatgatatttaagaacttgaatgctggatattcagayaacctgagtgcaaaacagccatgtggtctccccatgataaatgggatcatctctgcaccctaactgggtatgatgtcaagactgtttatgtcacagccgcacacacatcaaaagaatatggcattttgtaactgaaatcatgaggttttcttaggtaagaaaagtaggcatccaagcctgtctaatgccttgagctgaagaggccagtggctttggtttatactggactcagggtgtgggcctgggtgagggtttcaacaggcagg

SEQ ID NO: 213544 - DNA, 609 bp, Homo sapiens
ttttcttttctgaattctacttttaatgtcattatatttaatgagcaggatttattatgtgatattattaaatatagatgtaacactcaaaacaacaatgtgaaacccttgtatatcttctgtttcaggctactccaattttcaatgatttcctcctgcaaagaaaaattattaatgcatatttctcattttaataatatatgaataaattaattaaaattttgtaataaaaagtcttgtcctaaggaattcaaaaattagttcatgtaacaaatagttatttaacatatctgacaggaagcacaacatgatatttaagaacttgaatgctggatattcagataacctgagtgcaaaacagccatgtggtctccccatgataaatgggatcatctctgcrccctaactgggtatgatgtcaagactgtttatgtcacagccgcacacacatcaaaagaatatggcattttgtaactgaaatcatgaggttttcttaggtaagaaaagtaggcatccaagcctgtctaatgccttgagctgaagaggccagtggctttggtttatactggactcagggtgtgggcctgggtgagggtttcaacaggcagg

SEQ ID NO: 213545 - DNA, 609 bp, Homo sapiens
ttttcttttctgaattctacttttaatgtcattatatttaatgagcaggatttattatgtgatattattaaatatagatgtaacactcaaaacaacaatgtgaaacccttgtatatcttctgtttcaggctactccaattttcaatgatttcctcctgcaaagaaaaattattaatgcatatttctcattttaataatatatgaataaattaattaaaattttgtaataaaaagtcttgtcctaaggaattcaaaaattagttcatgtaacaaatagttatttaacatatctgacaggaagcacaacatgatatttaagaacttgaatgctggatattcagataacctgagtgcaaaacagccatgtggtctccccatgataaatgggatcatctctgcaccctaactgggtatgatgtcaagactgtttatgtcacagccgcacacacatcaraagaatatggcattttgtaactgaaatcatgaggttttcttaggtaagaaaagtaggcatccaagcctgtctaatgccttgagctgaagaggccagtggctttggtttatactggactcagggtgtgggcctgggtgagggtttcaacaggcagg

SEQ ID NO: 213546 - DNA, 609 bp, Homo sapiens
ttttcttttctgaattctacttttaatgtcattatatttaatgagcaggatttattatgtgatattattaaatatagatgtaacactcaaaacaacaatgtgaaacccttgtatatcttctgtttcaggctactccaattttcaatgatttcctcctgcaaagaaaaattattaatgcatatttctcattttaataatatatgaataaattaattaaaattttgtaataaaaagtcttgtcctaaggaattcaaaaattagttcatgtaacaaatagttatttaacatatctgacaggaagcacaacatgatatttaagaacttgaatgctggatattcagataacctgagtgcaaaacagccatgtggtctccccatgataaatgggatcatctctgcaccctaactgggtatgatgtcaagactgtttatgtcacagccgcacacacatcaaaagaatatggcattttgtaactgaaatcatgaggttttcttaggtaagaaaagtaggcatccaagcctgtctaatgccttgagctgaagaggccagtggctttggtttatactgkactcagggtgtgggcctgggtgagggtttcaacaggcagg

SEQ ID NO: 213547 - DNA, 535 bp, Homo sapiens
cactcataacaacaatgcacaagtgttccctgttctccacaccttcatcaacatgctatctttgtctctttaatgaaagccgtaataataaatgtgaggtgatatctcattgtggttttgattttgcattttcctgatcattagtaatgttgaacatttcttcatatacctgttggtcatttgtatgccatccttgaaggcatgtygattcaagtccttaaaccatgtttttaaatgtttgtcttcttaatattgagatatttgatttccttatatactttgaatattaacctcttatcaggagtgtgacttgcaaatatgttctttccttctgtaggttgtctctttattctgttgattttttcatttgtagtgcagaagatttttgcacagtcccatttgcctatttttgcttttgttgtctctgcttttgaagtcatttctaaagcattattgtccagattaatgtcaaaatacctttccctatgttttcttataacagttttacagtttctatcttaagtttacattttaa

SEQ ID NO: 213548 - DNA, 436 bp, Homo sapiens
ggagtgtgacttgcaaatatgttctttccttctgtaggttgtctctttattctgttgattttttcatttgtagtgcagaagatttttgcacagtcccatttgcctatttttgcttttgttgtctctgcttttgaagtcatttctaaagcattattgtccagattaatgtcaaaatacctttccctatgttttcttataacagttttacagtttctatcttaagtttacattttaatccattttagatttatttttgtataggatgtgagtcaagagtctaattttcttctgcatgtatatattccattttctccacacaatttatcaaagagactctttcctccattktgtatttttcacacatttttttaaaaaaatcaattaaccaaataaatcaggcatagtaagacaaatagtgcattatcttgcttatata

SEQ ID NO: 213549 - DNA, 534 bp, Homo sapiens
aaacattattgatgaaagaaagaagtaacattgaaagcatattataagtggttaggtagctaatgtcttgtggtaggttgtatatacacatatatacacacatatacacatgtatacatatattctgataactttcgatatatattattctgtgtatacctgggattgtgagaagaagatagttggccctcctgaaacaatgtttgtgtaaatggaagcagcctggattkggcctgtggaaaaaaggtgatgaaagaaaaagaaaacaatgtcttcttcctcaaagacatcatagtttgacagctaagactgacataatgacagtagtcttattgtaatctttgactaatcagaacaggattacaacttcctcaggttacttagctaagagttacataaatgtactgaggtaaaaaaaaaattgagcaaaacaatttaaaaatgttttgctcagttataatagtggctaatatgtagtgtgatacaaatggccttcttttgtagagagaaaacatttgaaagcactgcttgaca

SEQ ID NO: 213550 - DNA, 534 bp, Homo sapiens
aaacattattgatgaaagaaagaagtaacattgaaagcatattataagtggttaggtagctaatgtcttgtggtaggttgtatatacacatatatacacacatatacacatgtatacatatattctgataactttcgatatatattattctgtgtatacctgggattgtgagaagaagatagttggccctcctgaaacaatgtttgtgtaaatggaagcagcctggatttggcctgtggaaaaaaggtgatgaaagaaaaagaaaacaatgtcttcttcctcaaagacatcatagtttgacagctaagactgacataatgacagtagtcttattgtaatctttgactaatcagaacaggattacaacttcctcaggttacttagctaagagttacataaatgtactgaggtaaaaaaaaaattgagcaaaacaatttaaaaatgttttgctcagttrtaatagtggctaatatgtagtgtgatacaaatggccttcttttgtagagagaaaacatttgaaagcactgcttgaca

SEQ ID NO: 213551 - DNA, 580 bp, Homo sapiens
ttcctttctttccaattttgatgccttctatttctatgtttttgcttaacagttctggcgaggacctcccatactatgtcaaatagaagtggagaaggctggatttgttgcattgtttatcgtctcrgagaaaaatctttcaatctctcaccatcacatatggcctatgctgtggatttctaatatggatattattatgtagagatagtttccttcctttcctagtttattgtgtactttttattgtaaaagattatgcaattttgtcaaatgttattttgcatcaactcagataatcgtgtgtttttttaatttgttatgttaatgcagtgtattatatagattaatttttgtatgttgaaccatctgtggatttcggaaataaatcccattttgtcatggagtataattctttttatatgctgctgaatttggttttcaagtattttgttaaaattttttcatcaatgttcatacaaaatattagtctttttttatttaattgtgtattttttaatatttcttttttaaattttttatttcatttcaatacttttgggagaacaggtggtttaggtta

SEQ ID NO: 213552 - DNA, 625 bp, Homo sapiens
ctgtttggagttgattgagcttcttggctgtttatattcctgtcttttatcaaacttagacaattttcagccaaagatcttcaaataattcttctcctttcttctctcttctcctagcggaaccatcgctgtgtatattttgatctgcttgatgtgttccatatgttccttagcctccattcrctttcttcaatcattattctttctgtttctcagactcggtatattccattgttctatctttaaattcatggattcttccaccttctgttcaaatctgccttttaaactttgcacatagtttttcattttagttattttacttttcagctctagaatttttgtattatttcagcttttctgtctatttattgatatttttattttcctcatacttgtttttttcactttcttcatgtttctttagtttttaagcatttttcagatggttgttttaggactttgtctagtatgtatgtctatcatccaatcattctcagagagaatttctgttttgtttatgttttgttttgttttgcttctttgagtcatactttctcctttctttgtacgttttatcaatttttgttcaaagctgaacatttatttctggtaatcagaattc

SEQ ID NO: 213553 - DNA, 625 bp, Homo sapiens
ctgtttggagttgattgagcttcttggctgtttatattcctgtcttttatcaaacttagacaattttcagccaaagatcttcaaataattcttctcctttcttctctcttctcctagcggaaccatcgctgtgtatattttgatctgcttgatgtgttccatatgttccttagcctccattcactttcttcaatcattattctttctgtttctcagactcggtatattccattgttctatctttaaattcatggattcttccaccttctgttcaaatctgccttttaaactttgcacatagtttttcattttagttattttacttttcagytctagaatttttgtattatttcagcttttctgtctatttattgatatttttattttcctcatacttgtttttttcactttcttcatgtttctttagtttttaagcatttttcagatggttgttttaggactttgtctagtatgtatgtctatcatccaatcattctcagagagaatttctgttttgtttatgttttgttttgttttgcttctttgagtcatactttctcctttctttgtacgttttatcaatttttgttcaaagctgaacatttatttctggtaatcagaattc

SEQ ID NO: 213554 - DNA, 576 bp, Homo sapiens
gcatttctatacactaacaataaattgtgcaaaaaagaaattatgaaactgatcttattcactgtagtttccaaaaaaaatacttatgaataaagctaacaaatgagatgaaagatgtatatactgaaaaaagaaaacattcagaaagaaatcaaaaaaggcacagaaaaattaaaagatcctctgtgttcctgaattgtaaaaattaatattgttgaaatgtttatattgacmaaagcaatctacagattttatgcaatccttatcaaatttccattaaaatgttttgtaaaaataggaaataaatcatgtttttacaaaaccactgaaaatcctgaatagtgaaagcaagcttgaacaaaaatgaagtcagaggcatcacaccacttgtacctggactaaaatatattacaaagctatagtaatgaaaacagcttggtaccagcataaaaacagatacacaaaccagtggaagagaatagggagcccagaaataaatccacacatttacagtcaattgttctttttaagttttcctcatttatacatattaaatatatatttacacacacacat

SEQ ID NO: 213555 - DNA, 576 bp, Homo sapiens
gcatttctatacactaacaataaattgtgcaaaaaagaaattatgaaactgatcttattcactgtagtttccaaaaaaaatacttatgaataaagctaacaaatgagatgaaagatgtatatactgaaaaaagaaaacattcagaaagaaatcaaaaaaggcacagaaaaattaaaagatcctctgtgttcctgaattgtaaaaattaatattgttgaaatgtttatattgaccaaagcaatctacagattttatgcaatccttatcaaatttccattaaaatgttttgtaaaaataggaaataaatcatgtttttacaaaaccacwgaaaatcctgaatagtgaaagcaagcttgaacaaaaatgaagtcagaggcatcacaccacttgtacctggactaaaatatattacaaagctatagtaatgaaaacagcttggtaccagcataaaaacagatacacaaaccagtggaagagaatagggagcccagaaataaatccacacatttacagtcaattgttctttttaagttttcctcatttatacatattaaatatatatttacacacacacat

SEQ ID NO: 213556 - DNA, 576 bp, Homo sapiens
gcatttctatacactaacaataaattgtgcaaaaaagaaattatgaaactgatcttattcactgtagtttccaaaaaaaatacttatgaataaagctaacaaatgagatgaaagatgtatatactgaaaaaagaaaacattcagaaagaaatcaaaaaaggcacagaaaaattaaaagatcctctgtgttcctgaattgtaaaaattaatattgttgaaatgtttatattgaccaaagcaatctacagattttatgcaatccttatcaaatttccattaaaatgttttgtaaaaataggaaataaatcatgtttttacaaaaccactgaaaatcctgaatartgaaagcaagcttgaacaaaaatgaagtcagaggcatcacaccacttgtacctggactaaaatatattacaaagctatagtaatgaaaacagcttggtaccagcataaaaacagatacacaaaccagtggaagagaatagggagcccagaaataaatccacacatttacagtcaattgttctttttaagttttcctcatttatacatattaaatatatatttacacacacacat

SEQ ID NO: 213557 - DNA, 576 bp, Homo sapiens
gcatttctatacactaacaataaattgtgcaaaaaagaaattatgaaactgatcttattcactgtagtttccaaaaaaaatacttatgaataaagctaacaaatgagatgaaagatgtatatactgaaaaaagaaaacattcagaaagaaatcaaaaaaggcacagaaaaattaaaagatcctctgtgttcctgaattgtaaaaattaatattgttgaaatgtttatattgaccaaagcaatctacagattttatgcaatccttatcaaatttccattaaaatgttttgtaaaaataggaaataaatcatgtttttacaaaaccactgaaaatcctgaatagtgaaagcaagcttgaacaaaaatgaagtcagaggcatcacaccacttgtacctggactaaaatatattacaaagctatagtaatgaaaacagcttggtaccagcataaaaacagatacacaaaccagtggaagagaatagggagcccagaaataaatccacacatttacagtcaattgttytttttaagttttcctcatttatacatattaaatatatatttacacacacacat

SEQ ID NO: 213558 - DNA, 409 bp, Homo sapiens
gaattcttatgatttgtggagaagtaaataaatgtaatgttgttttatgaagtacttttacatttttactccttgaagctgttgaaataaagaatcttgaactgtgatttgaaaatttagaccatttttccctagcttcatattgtcaatgaatctaacagggtatcatttgtaacaacctcaattaaaatcaatttcatttcatagtttatacatatttttctttccttcagaaaagctttataataracatatatttcctatttatctctaattataaaattttatcttataaagtattcccaaaccaagataattatggaaaaaatcattatttaatttcactttatgttctacaccaaaacatcattcttttaatttccaataaaacctaagttgtatttcaaaa

SEQ ID NO: 213559 - DNA, 616 bp, Homo sapiens
gctatacttacattagatcctcagaacttactcatcctgtaactgaaaatttgtattatttggtcaatatcctcagcccctgtcaactattattctgtctgcttatataaattcatatgttttatattccacatataagtgggatcacacagtatttgtctttctgtgtttagcttagttcacttagcataatgtcctctaggtttatccatgtcattgcaaatgacaggattttcttatttttcactactgaatatattccattgtgtataataaatatgatatttttaatccatttattcattcagcaacacttaatttccatatcttgcctattstaaataacatcacaacaaatatgaggattcatatatcgcatatctcatatatctcgctttaagacactgatttaatttcctttggatactcaatagtgaaattactaaatcatatggtaattctgtttttaagtttttgaggaaactctaaacctgattgtcataattgttgttctaatttacattcccatgaatagtgcacaagagttcccttttgtccataccctcagcaatatttgttatctcttgtctttttaataaccactaagtgtgaggta

SEQ ID NO: 213560 - DNA, 616 bp, Homo sapiens
gctatacttacattagatcctcagaacttactcatcctgtaactgaaaatttgtattatttggtcaatatcctcagcccctgtcaactattattctgtctgcttatataaattcatatgttttatattccacatataagtgggatcacacagtatttgtctttctgtgtttagcttagttcacttagcataatgtcctctaggtttatccatgtcattgcaaatgacaggattttcttatttttcactactgaatatattccattgtgtataataaatatgatatttttaatccatttattcattcagcaacacttaatttccatatcttgcctattctaaataacatcacaacaaatatgaggattcatatatckcatatctcatatatctcgctttaagacactgatttaatttcctttggatactcaatagtgaaattactaaatcatatggtaattctgtttttaagtttttgaggaaactctaaacctgattgtcataattgttgttctaatttacattcccatgaatagtgcacaagagttcccttttgtccataccctcagcaatatttgttatctcttgtctttttaataaccactaagtgtgaggta

SEQ ID NO: 213561 - DNA, 616 bp, Homo sapiens
gctatacttacattagatcctcagaacttactcatcctgtaactgaaaatttgtattatttggtcaatatcctcagcccctgtcaactattattctgtctgcttatataaattcatatgttttatattccacatataagtgggatcacacagtatttgtctttctgtgtttagcttagttcacttagcataatgtcctctaggtttatccatgtcattgcaaatgacaggattttcttatttttcactactgaatatattccattgtgtataataaatatgatatttttaatccatttattcattcagcaacacttaatttccatatcttgcctattctaaataacatcacaacaaatatgaggattcatatatcgcatatctcatatatctcgctttaagacactgatttaatttcctttggatactcaatagtgaaattactaaatcatatggtaattctgtttttaagtttttgaggaaactctaaacctgattktcataattgttgttctaatttacattcccatgaatagtgcacaagagttcccttttgtccataccctcagcaatatttgttatctcttgtctttttaataaccactaagtgtgaggta

SEQ ID NO: 213562 - DNA, 433 bp, Homo sapiens
cttatttgctttcacttatggaagaacccaatatttatcacaattgtttcctcaagggttttgggattttcctacaatattttctagtcatttatagaacttagagaaatgtttccaaccagagggatttataattattcaaactatagatgatttgctggtatcctcagaaactacagagcattgcaaattgatactttagctttgttacagttcttggcttaacaggaacataagggttcaccaagcaaattgcagtattgcacaactaagctctaatatttcagtgctaygatccaggagtcaactaattttataataaaatgacctattacaaaaaagtaaaaaataaagaacatagacaattttggggactactacaatattgtagatagcagatttcagcttttgcaaagaaaacaaattctctgat

SEQ ID NO: 213563 - DNA, 444 bp, Homo sapiens
tttgctttcacttatggaagaacccaatatttatcacaattgtttcctcaagggttttgggattttcctacaatattttctagtcatttatagaacttagagaaatgtttccaaccagagggatttataattattcaaactatagatgatttgctggtatcctcagaaactacagagcattgcaaattgatactttagctttgttacagttcttggcttaacaggaacataagggttcaccaagcaaattgcagtattgcacaactaagctctaatatttcagtgctatgawccaggagtcaactaattttataataaaatgacctattacaaaaaagtaaaaaataaagaacatagacaattttggggactactacaatattgtagatagcagatttcagcttttgcaaagaaaacaaattctctgatggaacaattgcataa

SEQ ID NO: 213564 - DNA, 533 bp, Homo sapiens
tggtaggacccaccagaagcctgccaagcctattgaccaaaagatttcacaaattaaggtgttycgatgggacgaaaggcttttatctccttgagaaagacatttttaaatgctcccagttacctatagagctatcaaagtaaaaacaaactaagtaaaaataaaacaaaagtaaaaaacaagattcatactttccatgtgaagcaaacatcttaggaaaactggactgggggtcctacaaagactagaaactttacgttttctaaagtagccaattgttgtactgaacacagctgaaaggagatattctagcaaatttattactattcttacagattgcctcccatcttagtcacagtagggttatttcaatttcttctttaagaatcacattttgaactgggcacggtggctcatgcctgtgatcccagcactttgggagtctgaggtagactgatcacttcagtccaggagtttgagaacaccctggcaatatagcaaaactctatctctaaaaaaaacacaaaaattaa

SEQ ID NO: 213565 - DNA, 565 bp, Homo sapiens
tttctaaagtagccaattgttgtactgaacacagctgaaaggagatattctagcaaatttattactattcttacagattgcctcccatcttagtcacagtagggttatttcaatttcttctttaagaatcacattttgaactgggcacggtggctcatgcctgtgatcccagcactttgggagtctgaggtagactgatcacttcagtccaggagtttgagaacaccctggcaatatagcaaaactctatctctaaaaaaaacacaaaaattaactgggcatggtagcatgtgcctgtagtcccagatacttgggaggctgaggtgggtggatcacttgaactcaggaagcagaggttgccatgagtcaaggttatgtcattgcattgcagcctggatgacaaagcaaacgcctgtcaaaaaaaagaaaaaaagaaaaaggaaaaaaatcatattttactggaaagccaacatgttgtctrttgtacttctttttttctgcaatccaagtgttatgggttaaattgagtcccccagtatttatatgttgaagtcttaacccctag

SEQ ID NO: 213566 - DNA, 566 bp, Homo sapiens
aaacactacaaaacgtaatgtaatgtaatattcttttttgaaattttattgtatctaaattgtaaaatcattgtaattctcagtcaattcattaaaaagcactttacctcctctctggcyggagcactgggtcttccctatttgtatgcagtatcatatatactgtgttttgaatgaaatgtactgacatagtttaaatgctgactattttctcattgtatcattttctttttggtggatcctttgagaagtaaatttagcattttgatctattatttgacaacaagcttgattcttttattcagtcgtattgaaaacgattacctacataaattataaaccttctattactcttttgttaacatcttacatttttttgttttgatttaaactcatgagttacttttttttaggcaactaatcttcaaaccaaaaaaggaagcattcaccagaagatatgccttgaagtaactatttgttctcttatatccaagaaaccatttgcctccttttgtgcaagcagatgtaccagtttcaatccaccagtctttagttctacagcagat

SEQ ID NO: 213567 - DNA, 566 bp, Homo sapiens
aaacactacaaaacgtaatgtaatgtaatattcttttttgaaattttattgtatctaaattgtaaaatcattgtaattctcagtcaattcattaaaaagcactttacctcctctctggccggagcactgggtcttccctatttgtatgcagtatcatatatactgtgttttgaatgaaatgtactgacatagtttaaatgctgactattttctcattgtatcattttctttttggtggatcctttgagaagtaaatttagcattttgatctattatttgacaacaagcttgattcttttattcagtcktattgaaaacgattacctacataaattataaaccttctattactcttttgttaacatcttacatttttttgttttgatttaaactcatgagttacttttttttaggcaactaatcttcaaaccaaaaaaggaagcattcaccagaagatatgccttgaagtaactatttgttctcttatatccaagaaaccatttgcctccttttgtgcaagcagatgtaccagtttcaatccaccagtctttagttctacagcagat

SEQ ID NO: 213568 - DNA, 566 bp, Homo sapiens
aaacactacaaaacgtaatgtaatgtaatattcttttttgaaattttattgtatctaaattgtaaaatcattgtaattctcagtcaattcattaaaaagcactttacctcctctctggccggagcactgggtcttccctatttgtatgcagtatcatatatactgtgttttgaatgaaatgtactgacatagtttaaatgctgactattttctcattgtatcattttctttttggtggatcctttgagaagtaaatttagcattttgatctattatttgacaacaagcttgattcttttattcagtcgtattgaaaacgattacctacataaattataaaccttctattactcttttgttaacatcttacatttttttgttttgatttaaactcatgagttacttttttttaggcaactaatcttcaaaccaaaaaaggaarcattcaccagaagatatgccttgaagtaactatttgttctcttatatccaagaaaccatttgcctccttttgtgcaagcagatgtaccagtttcaatccaccagtctttagttctacagcagat

SEQ ID NO: 213569 - DNA, 380 bp, Homo sapiens
tggcaaaaacccatctttaaaaaaaaaaaaaaaaatacaggtcgggcgtggtggctcacgcctgtaatcccagcactttgggaggccgaggcaggtggatcacctgaggtcaggaatcgagaccagcctggccaatatggcaaaaacccatctttaaaaaaaaataaaaaaattagccaggcatggtggtgtgtgcctgcctctagtcccagctacttgggaggctgaggaacgagaagtgcttgaaccttggargttgcagtgagctgagatcacaccactgcactcctacctgagtgacagagtgagactctgtctccaaaataaataaataaaaatcacttggccacatttgtgtggttccatttatgaattctctg

SEQ ID NO: 213570 - DNA, 464 bp, Homo sapiens
ttggggctgcaggctgtgaccagatggtgacctaactccatgtcagaaaggccgagccatccaggctactgggctgcaagtaaaaggctcactgtggagcgggagctcaatacatgtgcgggaccatttcccactccttccttctgggctttcttgggcacctcctgccctgatcaagctgggggagacagaggccaatgtgtggctctgtcctcrggagaccatggcctagaggagactggcaaagcagccagcttcaatctggaggaggaattgtgatgatgcaagggatatgggacctctgggagccaacaggagggaccctaaatccaagaaggcttcctggaggaggtggaatcaacatggcttcctgacagatgagtaaaagttaggcgggccaagaggggagggaaaagtgctccaggaagaggaaatctacacataagaaggtctcaaagtgggag

SEQ ID NO: 213571 - DNA, 579 bp, Homo sapiens
taagcttgcctagagctaacggaacacaggctggccaccaaacagcccgttaccagtttccggatctgagagttctggtttcatgtgggaacgcaccatgttctaatcgctcatggactacacaggctgcgtgtgaatacctcgttcctctctattgaaatcccacccttcacaggaaagcaccaaagcaacagactattaaatttagttaaatattagatttctcatttaatgattgcccacacaactggttttatcagcagagagctgactgtcccacaggggacttgagttaagccattttatttgttcccataattgcattcaaagagggcaggagctcagcagagaaataagaaaagattggcatattccctgaaggactyttcttttgacttcagggcagtggggacctccagtctggagcacacaaatggccactctttaattaaatgtgagccccctctaatatttggtggaattagctattatcagatctggacacagtgagaccgcagagactcaggcctgctcatgaggctgcttccctcgctgcgtcccatgggcaggtcgtggtgt

SEQ ID NO: 213572 - DNA, 582 bp, Homo sapiens
attagtgatgctgaatatttttcatgtatctattttctatttgcatgtcttctttgacaaattcaggtcctttgcccatttttaatagsgttgtttgttttcttgctattgagtagtttgaattccttacatattttggttattagccccttatgtgatatatgatttgccagtattttcaacacaattcatgaaatgtcttttcactctattaattgctttctttgctatgcagaaatttaggatgatgcaatcccgttcacctagctttgcttttgttgcctgtgtctttggggtccaagccaagaatcattgcccagaccaatgtcatggagctttttcactatgttttcttccagtagttttacaatttcaggtcttacactgaagtctttaatcgattttgagttgattattgtataaggagtgagataagagtccagtttcctccttctgcatgtgaatagccagcttttccaacaccacttattgaagagactgtcctttccccagtgtgtgtccttggcatctttgtgaaaaataaattaactgtagatgaattggtttatttctgggctctct

SEQ ID NO: 213573 - DNA, 340 bp, Homo sapiens
tttgggcctgagattcagattttatttaagtaaatgaatttcatgctcagtgggactgatattgaagccgccatttagggctttaaggcaggagtttcgcgtcatttctctaaagattctgctattggcaggtttgtggtttcacttttctattaggttaagttttcgttcgtcttacttgctcttttgtaaccttttctctcattggacattttacttgctcaagtttgtaaccttttctctcatyggacatttttttacttgctcaagtttgtaaccttttctctcatttgacatttggttaaagagaaagcagttttctttgtaaaaggagaaagtg

SEQ ID NO: 213574 - DNA, 460 bp, Homo sapiens
aggatgacttcaaagtactatgtacaaggcacattaaaagtgcaagttctctattagtattaatccctttaatctccacaagaaaactatgacataaatgctgttagaatcattctcattacacagtggaggcacagacacttaaaggcataaccaggcagccagcccactttagagagtggctctaaccagccatgctattctgtctctaatgcaagtccgtcttgcataccaaaggagagaaaatctttctaggtgaaaatattttattcttttttcaattttgaattttgtacttcttctcagaacctcttttttctcttttataagcaggaaaatgagacccaggtaagattaagaccgtcttttgccaaatgctactctataaatcagyagccagtggggacttggacttagatgggaggtctgtgctttagaaagaaatctattagctgctaag

SEQ ID NO: 213575 - DNA, 559 bp, Homo sapiens
tttattctgcttgggtttcataagacttcttgaatatgtgcctcaatgccttttaattatttttgaaaatgattggtcagtactacataaaatcttgcttctgctgattctgctctctcttttggaatatatatatatatatatatatatatgtatgaatttctattcttatctgtattttccatacttttattctttaagctacagcccraatgttttctgctggcccgtcttctagttcattaattctaactctcttgtcttgccatggtaaatacttacattaagttgttgatatcttactatccattgttggatttttctgttccagaattggaattggaattttaaaatagattctatctctgtggtaaaattattcatatatcatatattttcttgaatatcttatcatattaactttaaaacccaagacagattatcaccaaaaactgggttatttatatgtttgttactattgtctgcttttctttcagatatatttcttagacttagtaatttttttcaatttcttaaaactattaaaaagtgtagatac

SEQ ID NO: 213576 - DNA, 559 bp, Homo sapiens
tttattctgcttgggtttcataagacttcttgaatatgtgcctcaatgccttttaattatttttgaaaatgattggtcagtactacataaaatcttgcttctgctgattctgctctctcttttggaatatatatatatatatatatatatatgtatgaatttctattcttatctgtattttccatacttttattctttaagctacagcccaaatgttttctgctggcccgtcttctagttcattaattctaactctcttgtcttgccatggtaaatacttacattaagttgttgatatcttactatccattgttggatttttctgttccagaattggaattggaattttaaaatagattctatctctgtggtaaaattattcatatatcatatattttcttgaatatcttatcatattaactttaaaacccaagacagattatcaccaaaaactgggttatttatatgtttgttactattgtctgcttttctttcagatatatttcttagactyagtaatttttttcaatttcttaaaactattaaaaagtgtagatac

SEQ ID NO: 213577 - DNA, 588 bp, Homo sapiens
ctgttgcctaggttggagtgcagtggtgcgatcttggcccactgcaacctctgccttctgggttcaagcgattctcctgcctcagcytcccaaatagctgggattacaaacatgtgccaccacgcgtggctaatttttgtatttttagtagaaacagggtttcactgtgttagccaggctggtttcgaactcctgacctcagatgatccacccgcctcggactcccaaagtggtgagattacagccctgagccaccacacccagccagttgtattcttcatacttcagggctcaggtttcctctaaatgctctgtgttccctaaaatacttgccacaacctcatggccaatgtgtccatagaatgattttgtatgatacaataccttcctaaaagtacacgttacttaaaaacaacatagagcagctcagggcaatagagtaataacgcagttaaatgttaacattatctgttattttgattcatttttatgccagataaaccacatcagagagatgttgcttcaattttagatttgcaactattttcctttcctctgttcccatagtttatgtggaaaatttattga

SEQ ID NO: 213578 - DNA, 588 bp, Homo sapiens
ctgttgcctaggttggagtgcagtggtgcgatcttggcccactgcaacctctgccttctgggttcaagcgattctcctgcctcagcctcccaaatagctgggattacaaacatgtgccaccacgcgtggctaatttttgtatttttagtagaaacagggtttcactrtgttagccaggctggtttcgaactcctgacctcagatgatccacccgcctcggactcccaaagtggtgagattacagccctgagccaccacacccagccagttgtattcttcatacttcagggctcaggtttcctctaaatgctctgtgttccctaaaatacttgccacaacctcatggccaatgtgtccatagaatgattttgtatgatacaataccttcctaaaagtacacgttacttaaaaacaacatagagcagctcagggcaatagagtaataacgcagttaaatgttaacattatctgttattttgattcatttttatgccagataaaccacatcagagagatgttgcttcaattttagatttgcaactattttcctttcctctgttcccatagtttatgtggaaaatttattga

SEQ ID NO: 213579 - DNA, 578 bp, Homo sapiens
aaaatatcccataaaataaattaggaggggtttttgtttattttttcctggaatagcttatgtatattttgacatatgtattacattatgttactatatattgaactcactckaaaaaccatctcagtctgaaattttcccctacagaagaattaccaattgctgtttcaattttgttaataattttaggactatttagtctttttgtttctcctgattcaattttggttaatgtggtttcaggaattgttcattatttctaatttttaaaaggatatatgttttttcttttaatcatctatgggaacattgtatatattgcattttacttttagctttttattatgtaaaaataagacatccacaaacgtagataaaatactgtcacaaactcccatgtatacacatctatcagtttatgtgcattgcatcaataaataaataattctacagaaattaaagttaattaactagaacaacttatatgaatagctatgattctcgaaagagttgtataacagatgcaaattcccagatgtgtatgatagaacatcatttaagtttagatgtaataattt

SEQ ID NO: 213580 - DNA, 352 bp, Homo sapiens
tctccagtttcatcttctgtcattctctctactctgcctctctctccattccaatgctctccagctatgctgacttttttctatgactcaaatatgccataatcttccccagttcaggacttctgccctttctagaccactcatatttctccttagaaggctgttttctcatcttcagaatccratatcatgctgtcagaggcttaccttcaccactaattaaaaatagctctaactttttcctctactcagtagtacatcacaggaagagtagtcattaagtgcatgaagtataaaagctgctgtagagtgttccaggttaaaaaaaaaagagggcatacacaaagattca

SEQ ID NO: 213581 - DNA, 379 bp, Homo sapiens
tggttttggttacatggatgaattatatagtgatgaattctgacattttagtgtacctatcacccaagtagtgcacattgtatctaatgtgtagttttttatccgttccctcttccaccctactccttccgagtctctaaagtccattataccactctgtatgcctttgcgtattcaaagcttagctcccacttrtaagtgagaacagtttgtggttttccactcatgtgttactttacttagaatagtgtcctccagctccatccacgttgctgcaaaatacattgttttgttccttttaatggctcaacagtattccaaagtgtatatataccacattttctttatctacccattagttgatgggtacttagattga

SEQ ID NO: 213582 - DNA, 609 bp, Homo sapiens
aaagatggtcttcatggtgagaaaaattaccagggaatatgcaaagtaagagtcaacaagaaagctttgaggcaatctgaaaggtgagtcactgcagaattgcattttgagcaactgtactacatagcatcttgtactgagcagtgggcagcagtgatattttctcctacaacaaatatagggtgcacgcactgagaccagagaaatataaaaatgggcccagataattactctcagaagaagcaagaaaccctcactgtcraaataaaaactatcagaatccccagataataatacattaatacattcagggtgctcatataattgcagaggcaggaaaggtatattgaactaccacccaaagaataggcagcaggaattctcaaatacaaaaattatatactgccaagaattggcaagcagttgaggaaaactagtatcatgaaagtcctcacacaaagaacatgaggaaacagagtaagtaaacacataaatattataattaatgtccttagatatatgaaagtgaatccccattaattggaaaaaccaaaataagtaatgaaaattgtgtgaaaggaaaaaatgtagatagaaccgaatgtcaga

SEQ ID NO: 213583 - DNA, 609 bp, Homo sapiens
aaagatggtcttcatggtgagaaaaattaccagggaatatgcaaagtaagagtcaacaagaaagctttgaggcaatctgaaaggtgagtcactgcagaattgcattttgagcaactgtactacatagcatcttgtactgagcagtgggcagcagtgatattttctcctacaacaaatatagggtgcacgcactgagaccagagaaatataaaaatgggcccagataattactctcagaagaagcaagaaaccctcactgtcaaaataaaaactatcagaatccccagataataatacattaatacattcagggtgctcatataattgcagaggcaggaaaggtatattgaactaccacccaaagaataggcagcaggaattctcaaatacaaaaattatatactgccaagaattggcaagcagttgaggaaaactagtatcatgaaagtcctcacacaaagaacatgaggaaacagagtaagtaaacacwtaaatattataattaatgtccttagatatatgaaagtgaatccccattaattggaaaaaccaaaataagtaatgaaaattgtgtgaaaggaaaaaatgtagatagaaccgaatgtcaga

SEQ ID NO: 213584 - DNA, 640 bp, Homo sapiens
ctacttttcttgaatgcatcaaagagttgcagtgtcaggaaaaccaattaacccaaaatctaaggrgagagaagaacctccaagaagagaaagaatgtgagccttgactcacttaaggcagactaccaaatgatgacagagttgccatagaaatgggtaggacaatttcagctaaaagaatgttggtacaaacttttaacaaaaccggaaaacaattttaattaaaattaactaatagtgtgtaaattaaaacaaatggaaaaatattgcatgtgatctcaaaataagaggtggagattgcaaaatgcaattgagcttctcatgtttccatttctgcattctttttttttttctttttttttgagacggagtctcactctgtcgcccaggctggagtgcagtggcacaatctcggctcactgcaagctccgcctcctgggttcacgccattctcctgcctcagcctccctcccaagtagctgggactacaggtgcctgccaccaggcctggctaatttttttgtatttttagtagagatggggtttcaccatattagccaggatggtctcgatctcctgacctcgtgatctgcctgcctacacctcccaaagtgctgggattacaggtgtgagacaccac

SEQ ID NO: 213585 - DNA, 401 bp, Homo sapiens
tatatataacattttatatttatgtgtttatatattttatatttttgtatatatttatatataataaatatttgtatacataataaactgaaaatgtctattaaatttgacaacagaccaaagttgcttcaaatcacttgagtgtacatttctgtgtgctaatgctagcaaattccagatgtacacctatagcccaaaagacwcaaacatatacactaaaacacagacataatatttttcagaaggagggaaaaaacaacttgtgaacacttcttggtgatatacagtatactgtctacattgtttagtagattaaagtgataaaaagactacagaatacctctagagtcatactaagtacaaatatatgattaagtttaaaatgatatagttgacaaaca

SEQ ID NO: 213586 - DNA, 563 bp, Homo sapiens
catccctcaaaataaatatgtgttttgtccgtgaggagagagagtggaatggacattgattaagtgaccagcattgtctgccctactaaaattattaaatgatgccagaaggaagggttacagttgttagtgttcaaccaagcatactgcttcttttttttttttttttttttttttttttttttttgagacagggtctcactctgtagcccaggctggagtgcagtggcacaatctcggctcattgyaacctccgcctgcatggttcaagcgattcttctgcctcagcctcccaagtagctgggactacaggtgtgtgccaccacacccgactaatttttgtatttttagtagagatggggttttaccatattggccaggctagtctccaactcctgacattgtgatctgcctgctttggcttcccaaagtgctgggattacaggcatgagccaccatgcctggcctctgcatattgcttctttaaaatctaaaactcctctccacatagtttaagtcactgaactgccaaataaaatacagataagtttctagatcatttt

SEQ ID NO: 213587 - DNA, 433 bp, Homo sapiens
tggcaggaaagttcaagtgcrtaagtctcatccagtctttactgatccatatgccacaattctccagtattatcaccagaacaccccaaaactctcagctgctctgctctggccaaccagtatagacagagcatgcttgtgaagggaagataaaatgaacttttagagcatgcaaaatttcttcaacattaattcaagggatgcaacatattttttttcctagtaagaaaataacctatttgaagagaagagcatcaaaaagtattatgtagcagattcaacagaattatattacatcttaatcagcaacagtttaaaaagccaaggcctagatcagggatcagtcatcaaagaacactcttcaatattaataaacctcatttatggtgattaaaagagaaggacagctctctccacatttttgtatttttaa

SEQ ID NO: 213588 - DNA, 433 bp, Homo sapiens
tggcaggaaagttcaagtgcgtaagtctcatccagtctttactgatccatatgccacaattctccagtattatcaccagaacamcccaaaactctcagctgctctgctctggccaaccagtatagacagagcatgcttgtgaagggaagataaaatgaacttttagagcatgcaaaatttcttcaacattaattcaagggatgcaacatattttttttcctagtaagaaaataacctatttgaagagaagagcatcaaaaagtattatgtagcagattcaacagaattatattacatcttaatcagcaacagtttaaaaagccaaggcctagatcagggatcagtcatcaaagaacactcttcaatattaataaacctcatttatggtgattaaaagagaaggacagctctctccacatttttgtatttttaa

SEQ ID NO: 213589 - DNA, 608 bp, Homo sapiens
acattcatttactcttgggagtgtaaacagatgcatgcagtccttttagagggtaatttggcaatagcaattacatttctatatgtatcatcatcctcattctgcagttccacatctaaaaatgcatctctcacctatcattacacatctgaacaatggctgttccttgtaatagtgatggaactaagtttgggggcaaaatgtctgtataattcctaaatctgtgttctaaaccgctactgaagttgcctgtgattgcttcttttggggaatgatatacaagttataaccatttctataaactgtattttcttcattcattkttatgtatcttccctacacccagtcctaaaattagcttaagttaacaaagaaagtcaactacataacttttgctgtttttgttgccttcggaaatatttgagtatagagcagaattcatcaaactcagtgctaaagtatcagtggcccccaaaattttacttctcaaggccagactcacataatttcacagctttcaatacttctagaaaaaataaaataaaagacacgatcagttgagatgacaatgttttaagcaactaaaattgaaaattcaatattatgtg

SEQ ID NO: 213590 - DNA, 569 bp, Homo sapiens
agtctcaaatgctattgcaagactggttagcggtgctccaaacagggtcagtcctcagccctccatctcttattgggaatccatgacaatccagaaatccaggaagctgctgttcctccaattaccacttcccagactrtgacctcacccttttcagcccccatattgatgtccttcatattcttcaggtgtcataaattcctaagccagaatgagaaattcaacccatgggcctattttgtgtttcatttgccacctgccactcagaaagcaacatctttctaccaggtttcagagacatcatgttttgaggctctccaatctaaaacatctcaagtcttggaatcagaggtcaaatggggattctaagataaactttgagtcaggagtaccccagttcatgcggcaggcttagcttcataccacatcgctggcatccttttcaaactggcctccaccacagcccccatttttgtgcccttgcccttcacccctcatcccaaaccctcttgcatttatcttcccaacctctgtccagacacttaaacttttaacacttagtttgtttt

SEQ ID NO: 213591 - DNA, 573 bp, Homo sapiens
attcatcagtgtttttgaggccttattaaactgtggattctgacagtaaggctgggtgggacctgagacttggcatttccagcaagctgccaggggaggccaatgttgtgattctgtgcaccgcgttttgagtgacaaagcattattctttcatttaatctttgtagaaatcctaacaaataaatgcaatcatcaccactttaaagatggtgaatctgatgtcaagagaggttgaataatttggcaaagacactgagctagcaaggacagcactaggattgggctgcaagtctgcctcccttcagaatcctcacctttaaacaccagacaaggccatttctccctccagagtgatgtgctaggtcccagtcttctctattggctagccagggcttgccacactcacgtgtatctacacatctcatctttccctgtcaagaggagaggcrcttgagaagtgctgtgggagaggatcagatatagaaagattcatacccccagatactgattcatacccccagatactcctctccagttttgataattggcactgttttttgatggggttaacta

SEQ ID NO: 213592 - DNA, 545 bp, Homo sapiens
ccaaaagagagcaggggtagctattcttatatcagacaaaacaaactttaaagcaacagcagttaaaagagacaaagagagacattatgtaatggtaaaaggccttgtccaacaggaaaatatcacaatcctaaatatatatgcacctaacactggagcttccaaatttatgaaacaattactaatagacttaagaaatgagatagacagcaacacaataatagtgggggacttcaatactccactgacagtactagacaggtcatcaagagagaaagtcaacaaagaaacaatggatttaaactataccttggaacaaatggacttaacagatatatacagagcatttcacccaacaaccacagaatacacattctattcaacagtgcatggaactttctccaagatagaccatatgataggccataaaargagcctcaatacatctaagaaaattgaaattacatcaagcactctctcagaccacagtggaatgaaactggaaatcaacaccaaaaggaaccttcaaaaccatgcaaatacat

SEQ ID NO: 213593 - DNA, 445 bp, Homo sapiens
ctggccacactgattttaaatatttataattatataagtggcagttatagaataagtgtacccatatatgtgtgttactcagctcctttttcatgctataattccctcctccttccaggagggtgtcattttccaaatcaactgcatttcctrtttttcaacttttgcagcattgcttgaagcacaagctatagggcaggtgatattacagttaccagtctttgtaatgacagggccatcagcattgcatgaaggaatgaatggactcattgaaacaatctaatgcagaaagagaaatcaggtgtgaaactatacatttaggatctcaaaatatactctaaagcagtggttctcaaacatggctgcatatcacaattacctcaggggcttagaaagcaaagcaaaacaaaaacagagacaaaaaacaactggcgagtgggtccca

SEQ ID NO: 213594 - DNA, 445 bp, Homo sapiens
ctggccacactgattttaaatatttataattatataagtggcagttatagaataagtgtacccatatatgtgtgttactcagctcctttttcatgctataattccctcctccttccaggagggtgtcattttccaaatcaactgcatttcctgtttttcaacttttgcagcattgcttgaagcacaagctatagggcaggtgatattacagttaccagtctttgtaatgacaggrccatcagcattgcatgaaggaatgaatggactcattgaaacaatctaatgcagaaagagaaatcaggtgtgaaactatacatttaggatctcaaaatatactctaaagcagtggttctcaaacatggctgcatatcacaattacctcaggggcttagaaagcaaagcaaaacaaaaacagagacaaaaaacaactggcgagtgggtccca

SEQ ID NO: 213595 - DNA, 448 bp, Homo sapiens
aattcactcttctcaggggccaccctgcaccattgcaaggacaaggctgcaggagaaagcagggaagtcacatgcttgggctttttctataattgtttatgggttcctagtcaagctaattttgaggataagaaagacatttcccagtggatctatgctgctagctgatgtgttgctttcccctttaaatctgacacagcgatacycttgcctttatttttcagtgttcttttcagttgaaccttcatgcagagtatgaggctttttacaggtatctagtccctcccagcattcagccaaagtttcaatattgtttaaaaagacataaatacagggcatcttggaatgatgaaagaaactctgaacaattatagctccctttctgaagtttctgctttgagaagactatttcatatctccctttagtgccttcatatagtcagtccaa

SEQ ID NO: 213596 - DNA, 488 bp, Homo sapiens
gagaattcaacaagaaaacaattcaaaaaaaatggagaccacgtatctacagacaagttttcaaagtccatgatcataaaaggaaaactccctaatcccaaagttgtcagaaggtacttgtcttgtcctagctttgtttctctgmtatcttcatgtggtgaatgtggtttacaaggagttaagatgcaaaattctaggttttaataaaaggagtatgtttgctgtactgcacagaaaggatcattaagcccaaagattttgacaacaattaggataactttttggcggtttagagccagagaaagggcaaggaaaagatccctttgaaaataaattgcctgaattaaaaagaggagaaatgaggaggaggaggaggaaaaatatgacaaaagtttttcgaagtgttttgtaggaaaacagaactttcttaagttttccatgataaagcccagaatataaggtggataaggattctcttttaaaagtcc

SEQ ID NO: 213597 - DNA, 488 bp, Homo sapiens
gagaattcaacaagaaaacaattcaaaaaaaatggagaccacgtatctacagacaagttttcaaagtccatgatcataaaaggaaaactccctaatcccaaagttgtcagaaggtacttgtcttgtcctagctttgtttctctgctatcttcatgtggtgaatgtggtttacamggagttaagatgcaaaattctaggttttaataaaaggagtatgtttgctgtactgcacagaaaggatcattaagcccaaagattttgacaacaattaggataactttttggcggtttagagccagagaaagggcaaggaaaagatccctttgaaaataaattgcctgaattaaaaagaggagaaatgaggaggaggaggaggaaaaatatgacaaaagtttttcgaagtgttttgtaggaaaacagaactttcttaagttttccatgataaagcccagaatataaggtggataaggattctcttttaaaagtcc

SEQ ID NO: 213598 - DNA, 488 bp, Homo sapiens
gagaattcaacaagaaaacaattcaaaaaaaatggagaccacgtatctacagacaagttttcaaagtccatgatcataaaaggaaaactccctaatcccaaagttgtcagaaggtacttgtcttgtcctagctttgtttctctgctatcttcatgtggtgaatgtggtttacaaggagttaagatgcaaaattctaggttttaataaaaggagtatgtttgctgtactgcacagaaaggatcattaagcccaaagattttgacaacaattaggataactttttggcggtttagagccagagaaagggcaaggaaaagatccctttgaaaataaattgcctgaattaaaaagaggagaaakgaggaggaggaggaggaaaaatatgacaaaagtttttcgaagtgttttgtaggaaaacagaactttcttaagttttccatgataaagcccagaatataaggtggataaggattctcttttaaaagtcc

SEQ ID NO: 213599 - DNA, 581 bp, Homo sapiens
caacttgaaatacttaatcaattttactttattttatggggaaacatcttayagtagtgcagcatttgtggattgaagattaaaaagttctccagtatatctctttcagatatcaagagtatattgtttctggtttatactagaatatgatattgtgaatgtatatttgaagggaaaatagaaaatattcaacaaaaatagtaatcttgagaaaggaaagcatgccatcttttcttcctttctaatcctaaatctcttttaggaaatcattaaaacccagccttctccttaaagacttctaacatactgaattttcatggtaagcgctccctttttataattgtgaaacatttgcaattattttggtgcctgatattacggtttctgttgttcttgaattatttcatttttaatttttctcaacaaatgatgaggttccttagagctgacagctttattaccttttacaatgttgagaatattatgcagcacgtcttaggtccatgaaacctatatattgaataaaataataacatctttctcaacaaagaaataattttttaaaagttttaactgaccaa

SEQ ID NO: 213600 - DNA, 554 bp, Homo sapiens
tacagtatttgttaaagaaatggcatcatacatactctcctccacctttatgaaaatggaattaaaatgtctttaaagaatacaacattcttttcattaaacttcacagaaaagctcagtgaaaataggcattcaccacaagttcctgtctccttatctttctttccagctgctctgattctcctaaaagtcaactaacttctcttggtggtttctgtgaataggtaataggacaagtgatttaaatcactgattactctcttctggctttcaaaccattctagcatgcttctggttagaataatgattgcagtgataggtcgatgtgagaagatggtaattttacacattaatggaatagagcttctgagatttacatttagctyttgcaataataaaaagtgctaatagtagaggaaatatttatgaatatctgaaatatatatgtgccctttagcaagattagaggactacacaggccttgttcggattcattatgctgcaacaaaacatttatttctagtatcagtaattggtaaacttagattacgctg

SEQ ID NO: 213601 - DNA, 648 bp, Homo sapiens
ccagatacatttgaatttcaaataaactatgaagaattgtttagtacattccatgcaatatttgtgtaatttgggtgagggaaaaagcttatgtatactggaatctttgcatatctgagagtgcaacaataaagtgttggtatgttttattgctatgtaaggttttaatttgtgatagactaatattttgatgcccataatttgttatggcaactattagttttgttcttctttcctagtgtgaaaggaaagatgcgttggtaaagcatgaaaagagggtagctgactttggcaaaaaaggagggagaattgggataaaatggagtgtttaagtttgttgctttttcctgccttctaccccactaatggacattcacacacacacatacacacacacacacacacacacacacacacacacaatgggagtggagacagaagaaaaccagatytccccttgttgtttgagaggatctaagagtaaggaagcctgtaggtaattctttaagggggaagctagttgaagtattcaaggacaataaggtatgaaagaacagaagaaatggctctttggctgtggagataggagaaaaaggatataggagagcatttcctttggcttctacaaggagtagagagagttaaatt

SEQ ID NO: 213602 - DNA, 645 bp, Homo sapiens
atgcctttctagactgttgtaaggattaaatgaggtaatgtttatatcaagcatctgaccccgggtragtgctcagtactccctagcgggcaaagtctgaaccaattatgtcaaaatgtttctcttaaaaaatggaatacaaacacattgaattctttccatgttgcagttctgtcagtttatccttgtacacaatatttctcaaagatgtttacaatttatctgtctctccagggtcttattcaagactttgtatgcaggaggaacctaataagtacttctttaaaataatttctatcaacacttcattctgagcttactttgattccaaacaactctgaactatatcaatatcactgacaagtttcatctgtatattgaattactgatttgaattgataatgcgtcaactctgaaaacattatccccaacagccttattaagtaagcaaacaccaatcatgtggtttgctgtttaaaaaagtagaacataaaaacttctcccttatatagggttctattgttttatcgattctgccaattgtaattttcgtgtgttatttaggttataatcatgtgttgccaaaatcagcaagaagcaagcaggtatttacagtacagtgggtctcacttaaatttgctgctg

SEQ ID NO: 213603 - DNA, 645 bp, Homo sapiens
atgcctttctagactgttgtaaggattaaatgaggtaatgtttatatcaagcatctgaccccgggtgagtgctcagtactccctagcgggcaaagtctgaaccaattatgtcaraatgtttctcttaaaaaatggaatacaaacacattgaattctttccatgttgcagttctgtcagtttatccttgtacacaatatttctcaaagatgtttacaatttatctgtctctccagggtcttattcaagactttgtatgcaggaggaacctaataagtacttctttaaaataatttctatcaacacttcattctgagcttactttgattccaaacaactctgaactatatcaatatcactgacaagtttcatctgtatattgaattactgatttgaattgataatgcgtcaactctgaaaacattatccccaacagccttattaagtaagcaaacaccaatcatgtggtttgctgtttaaaaaagtagaacataaaaacttctcccttatatagggttctattgttttatcgattctgccaattgtaattttcgtgtgttatttaggttataatcatgtgttgccaaaatcagcaagaagcaagcaggtatttacagtacagtgggtctcacttaaatttgctgctg

SEQ ID NO: 213604 - DNA, 576 bp, Homo sapiens
ctcactctgtaagccaggctggaggacagtggtgtgattaaggctcactgcagcctctacctcctgggctcaagtgatcctccctccttggcctcccaagtagctggaaatacaggcatgcaccaccatgcctggctttttttttttcttgtacagatggggtttagccatattgcccaggctggtcttgaactccagtcttcaagaaatcctcctaccttgkcttcccaaagtgctgagattacaggcatgagccaccgtgcccggccttttttatttttaaaaaattaaactctctttactttctccttaatctactatagtcaggactcttcctttatccaaaataaagtagggcataaataatgtataacccacagtggtctctctctttggacttctttagcatttgtcctctgcatcactcatttgtctcttaccctacactgctgggtattattaattatctttacaagcacaccacttattcacctatgataggagtttttttagtgatacactcatctctgtttccaactatatctagagtcttacacatcatagatgattaataat

SEQ ID NO: 213605 - DNA, 576 bp, Homo sapiens
ctcactctgtaagccaggctggaggacagtggtgtgattaaggctcactgcagcctctacctcctgggctcaagtgatcctccctccttggcctcccaagtagctggaaatacaggcatgcaccaccatgcctggctttttttttttcttgtacagatggggtttagccatattgcccaggctggtcttgaactccagtcttcaagaaatcctcctaccttgtcttcccaaagtgctgagattacaggcatgagccaccgtgcccggccttttttatttttaaaaaattaaactctctttactttctccttaatctactatagtcargactcttcctttatccaaaataaagtagggcataaataatgtataacccacagtggtctctctctttggacttctttagcatttgtcctctgcatcactcatttgtctcttaccctacactgctgggtattattaattatctttacaagcacaccacttattcacctatgataggagtttttttagtgatacactcatctctgtttccaactatatctagagtcttacacatcatagatgattaataat

SEQ ID NO: 213606 - DNA, 427 bp, Homo sapiens
attttctcttttaaaattaactagtgtctcaccctatctttactacacaggttaaaaatgtaggtagtgaaatcaatttagtgggtcaacaccatcaatttttttaatgaaacaaaacagaatcaaatagatgatgtcgggaaggctatcatatgctaaaggcagcatgattttctgaaacttttgtttcatttgtgttatgtgtgtcagtagacatgcaaatatatactgagttgytaaactgtatttcttagggtagattctggccaaaaaatgttaaagtcactgttcagatgacttctcaagaactaggatttttcctagcattatctgagaccaataaaaaggtaacagatccaaaataatttggtgatctcttaattctctctgtagtcaccagtgaaactatgtaattggtttatgttag

SEQ ID NO: 213607 - DNA, 641 bp, Homo sapiens
tacgcgttctttctctgccaaagtttcctatttactcttccttcctcacatgaatatactttactgggaacaccaaaccgtgagtgattcttggttttcaaccttgttatttcctacttctctttttgctttttgttatcccctctatttgatgcctggagtttcttcccaccatcctttcctctggttaattcctgcttattcattacttcctccagaaatcttcagtacttctccacctaatttttccttcattattaaattggatgtagctcttctgttttgtcacctgaagtatgtctgtcataatgtagttcaaagatacattgatatgttctctttgcattgacagttacatttatctttgtatatgcagtaatctaagaatatatacacactcgtgtgtagtggagtataagcttttaaggataggatctagaattacgtttatttggctcagtggttctgaatcctggctgaatgatcaaatcattgggccattaaaaaaaagtgcaggtctaccctaagagattaaatctaattgatctggaatgrggcttagtcatcaatatttaagagcttctggagtgattgtaatatatagtcaaggctaagaaccactgatgtagctcaaaatcaat

SEQ ID NO: 213608 - DNA, 549 bp, Homo sapiens
tatgcatctctgtcactactgtctaccatctccctgcacatgtattattattattttaattataaggaataagtagaaaaggaaagggaaaatgtttcatgctttagtaagaactgatgggcacagtggctcatgcctataatctcagcactttgggaggctgaggtggaaggatcacttgagcccaggrgttgaagactaagtggcacaaattagtcaggcatggttgcacatgcctgagtcccaagtactcaggaggctgagctgggaggatcacctgagcctaggagatggaggcttcagtgagctatgtcacgctactgcactccagcctcggcaacagagcgagaccctgtctcctaagagggggtgaggagggagaaaaacaaaaacaaaaacacactgatacgtaaaatggaaaatgcctcccatctcttccagctccgccagtcacttctctttagaagtctttggtaactgctccagatttagaggtagctcaccccttccttgcaaaccagctccactcacaagaagaatcccgaattc

SEQ ID NO: 213609 - DNA, 692 bp, Homo sapiens
tccaattttaaaaaaatgggcaaaggacttgaatagacttctctacaaagaatgcatacaagtggccagaagaacataaaacaatgttcaacatcactaattattagggaaatacatatcaaaactacaagataccacttcaaaccccttagggtagcaattattaaaaaaaaaaaaaaaaaamaaaaaaaaaacagaaaataagcgttggtggggatatggagatatcagatgcttgtgcactactgttgagaatgtaaactggtgcagcctctatggaaactgtatggcagttcctaataagattaaaagtagaattgtcatatgattttgcagttccatttctccatatatatccgaaaaaattaaagacaggaatttgaagagatatttgtacgccatgtttacagcagcattattcacaatagccaaaagctggaagcaacccaagtatccacagacacttgaatgaataaacaaaatgcagtatatacatacaatgagatattattcaccttaaaacaaggagataagttctgatacatgctacaacatggatgaaccctgagatattacgctaaatgaagaagggcaagtactgtctgattccacttatatgaggtaactaaagtggtcaaattcatagagatggaaagtagaattgttgtttgtcagggactgggagagtgaga

SEQ ID NO: 213610 - DNA, 310 bp, Homo sapiens
taaaaataaaaatatatttttaaaaatgcaatgcaaatgaagcttaaaaataagaataaaaatgttcttgatggcagttttaggtaccatttataatagcaccaaaaaccatgaaatatttagataaaaatataacagaatatgtayaatatgtatatgctaaaaactagaaaatattagtaacagaagtcaaaaacctaaattaaaaaaaaaacttatgtccatgaattggaagactcaatattgtgaagacgtcaattccccttactgatctatagattcaacacaaacccaaatcagtcttagcaat

SEQ ID NO: 213611 - DNA, 421 bp, Homo sapiens
gccatacaagcattttactcttgcgccacagactgaagcacctgctctggagcagggtagtagcctccacagcctccaccacttctgaggtggaaagcacctcagaagtaggtattggaattatactcttccctattgcaagcctggagtgggaggagagctgctacagttgcagtctctcctgggcaatgagacttgcagccagggccagcttggcaatctgaaactgaactgcatgtgccatcacttggtgcccctgctgttcccctgggatcgaggtgaagtggggtcccctctgctccaccccccaagcagaaatccaggcattcagggcacctgcttgcgtgaccagcagcctgagccactcatctttcatggacagagatcaygctgcagaagggtcatctccactccatgccca

SEQ ID NO: 213612 - DNA, 400 bp, Homo sapiens
agcactgaacaagagtttgttaatggcagcagggattatggaaggcttcctgagggaagtgatttatgctgagtcttgaagaacaggcaggagttgtctagacagagtgagaaaaagcaaagaagatagaatagctcatgtgaagacamaaaggcaagagacagtagatgaaactcactcagaaaaattgaaacatggacacatggaagaagatgagtcagaagaggaagccaaggagatgtgggccatgatggtctgagtgccaggcccggttgtttagaggatggggagccatgaagacttttaagcaagatgactcaaatttgcttttataaaataccactttgcagcaaggtagaggatggtttgggggtgagcaaagctggtgagagaacaatta

SEQ ID NO: 213613 - DNA, 400 bp, Homo sapiens
agcactgaacaagagtttgttaatggcagcagggattatggaaggcttcctgagggaagtgatttatgctgagtcttgaagaacaggcaggagttgtctagacagagtgagaaaaagcaaagaagatagaatagctcatgtgaagacaaaaaggcaagagacagtagatgaaactcactcagaaaaattgaaacatggacacatggaagaagatgagtcagaagaggaagccaaggagatgtgggccatgatggtctgagtgccaggcccggttgtttagaggatggggagccatgaagacttttaagcaagatgactcaaatttgcttttataaaataccactttgcagcaaggtagaggatggtttggrggtgagcaaagctggtgagagaacaatta

SEQ ID NO: 213614 - DNA, 524 bp, Homo sapiens
gggagtggcaggatttaagtatgttttattttgatttcctaaacacctactactggttctatcatgtgatactactacataaatattcattgattggttaaacaaataaaggaataaagtgcttgcacatctgccaagtycactgcaaatctaaggactacttaatattcatataaagtctgattataatgaaatagattgtttaaagcaaataagaattgggcattgtgtcaattacataattacatgatatcaccttatatttgcacacagcttcagagtttgcaaagctttcccacatgcaatatctctttcccttcttaccacaaccctgggagattattatggcagggcgaatcatgcttatctgacagataatgaacctctctaaacctcagagtcttcatctattaggggaacaaaaacatctgccctaggagaattgtgatggtcaagtgtgtgacagtattgagcaaacttgcaaaaaatgacgagttctgtgcaaaccaaagaatgtgttatga

SEQ ID NO: 213615 - DNA, 529 bp, Homo sapiens
gtctgagtaagtttcttaatttctctaagcttcagtttcttcatttgtaaagagggaaaaataatagtatttaccacagggttactgtaaaggtgtaattatctatacgcgaagcctttagcacagtatctggcatacagaagcacccaataaattaactgtttattttttagttttgctgtgtaatcagttttggttggtgtcttcacctgcttgggctgctataacaaaataccacaacctgggtggcttttagaaaacagaaatttatttctcacagttctggaggtggggaagtccaagatcaaggcaccrgcggattcagtgtctggtgagggcccacttcttggtttgcagttggagccttctctgcctcccatgatggaagaagcaaaggagctcccttgagcccattttgatcacggcactaatcccatgcatgagggctctggccccgtgacctaatcacctccctaaaggcctcactgcctaatatcatcacgttcagggttaggatttcaatgtgtga

SEQ ID NO: 213616 - DNA, 587 bp, Homo sapiens
agtcaccttcttgaaaagtctgcatttagacagctgatgaagccaagtctctccagcagcgtttgttacctgcgcaggacaggggagaggacccgtttctggggaaggcatttaattttctccagggcttgagactcatggaatgacctgatgttttagctctaagagtgtgatttctgtaagctcttggcagaaaacgtatttgcgaatcactaaatttcaggtatcaacaaacatctgtattggttcaaagtaagtttcagtagtcttagatgcattttttctctgcctgtgagaaatgggtaaaggaggaagaagagcaattaaattgttggagacaccattactccttgaaccagcctgacgctgctttgattgtcactgggtttctgggaggtgggatgggtgaagttcatagttttattgagttttcctgcccttttgtgcctttgtaattgtttttatatctaractgttggggagctttttttgtacattctgtagcttttaaattgctcattgaggaaagaactctggacagctagtttgcaatttggggatctagttctatcttgcctgctgaatga

SEQ ID NO: 213617 - DNA, 432 bp, Homo sapiens
gaagtgctctctctgtctctcctctctcttctctcctctttcttctctctctctctctctctctctstgtgtgtgtgtgtgtgtgtgtgtgtgtctgtgtttctctcctcttggtccactagtaaccttggcatctttagactaaccttggcatctctagactcccacctgcacctctccaactctgggagacaacaaggatcccttttcttgcattgcagcatggaaatgagtctctctaggcattaagctgggaactctcagggctcacctcatttatctcccatctcttagagatcactgttctgtgccagcaaagtccaacatctgaaaactactgttgcatgtattttgttttagttgtgtcaggtgggagggtaaatctaatcccttagcataacggaactacagtcaattccaaactacagtcaa

SEQ ID NO: 213618 - DNA, 396 bp, Homo sapiens
cttcccatggttctttgccctcagggcttcctcaacatggccgcggacttcatggcaccagcaaggagaatcttgctagggtatacaagcaagagggagtcatagatgatagaaaggtaaatagatagacagacagacatattaatagatatagatacagatagatctagatatatttacatgtagagatagatgatagatataaatagataatgataaattgatagacacatacatatctagatagataaatatagatagattatagaatgaataaatacatacatatatttatctaaatagatagagatggctggatggatagatggatgaatggatggatagatgattgatagayagatagatggtcctagccacactcaaagctaggagatt

SEQ ID NO: 213619 - DNA, 399 bp, Homo sapiens
gtagtcttgcaatgagatgggtcrggtcactgatgtgatcatttggcatctggtcagccaggccagtgtccatgagtggggtgaaatgttatagggtcttccttgctcttggcattaggaacacaaacctggtagctgttctgcgcaggaaagggaactagctcatattgaactgctcctatgtgctgggcactttgaataacccagtgaaaatcccattttacaagtggaaataccgaagccagacagagcttgctcaagtgcacatggggaatagcagggttggaatttgaaaccacctctaaagtcttgcaaccgcgctaagccatcagcctatgtaattggaatagaagtttccaggggaaagagaggaggaagcctgttctcccctttaaacag

SEQ ID NO: 213620 - DNA, 399 bp, Homo sapiens
gtagtcttgcaatgagatgggtcgggtcactgatgtgatcatttggcatctggtcagccaggccagtgtccaygagtggggtgaaatgttatagggtcttccttgctcttggcattaggaacacaaacctggtagctgttctgcgcaggaaagggaactagctcatattgaactgctcctatgtgctgggcactttgaataacccagtgaaaatcccattttacaagtggaaataccgaagccagacagagcttgctcaagtgcacatggggaatagcagggttggaatttgaaaccacctctaaagtcttgcaaccgcgctaagccatcagcctatgtaattggaatagaagtttccaggggaaagagaggaggaagcctgttctcccctttaaacag

SEQ ID NO: 213621 - DNA, 520 bp, Homo sapiens
tttgagctctggagtcaggaaggtctctgttcaaataccagctgcgtcggtccctgagtgctgaccttgtgctggtcacctggttcctggagcctcggttcctcatctgtgtaacaactaatggagtaaatagagtaatgggaattcaccatctcgtgaggtggtttctagcattaaataaattaatataagtgaagcacacagcatattcctaacaaatactcaatatgtaatagatattctagttttgttattaatgattacatatatgatgattgagaagtcaaatgagattattatagccagtgctttgtaaactgctcagtgctacgtacaggagtaaatagttctaagatgttatcaacattattagcatcactttgccagccagccaaagcaaaacggccctgggtgatctgtcaatatcacaatccagcartatcagatgctgtttggctctgatttcaggatcagaaatggcctacgaatagactcgttggctcagattgacttaaagctt

SEQ ID NO: 213622 - DNA, 678 bp, Homo sapiens
ggcagccattggcaggggaggccagagcctggaccctgggagtgggtgggggaacagtgacaaggccaggcaaaccctgtaggaagtggcaccttggagggtctgcacaacagaacccacccgctggagtgggtgttcaggctggcagtgctcctgtgaagtaagtgtgcagctctgagccccctttgatctggggattacgatgctgtttagaaagactaattatctccttacagccccaggaggcaggtccagttyccccctgttgtagacacgcgggagccgaggccacacagccaggtgaggagtcagtcacacactcatggagcccccagcctccccttgtaggcagcatgctagcaaccttaccctgcccaggcttggctctataatctgaggctcccactggcccaggcctgagatgtgcaaatttctaggtcactggctatggctgtccaacaagctgtgagaacctaattactttcccttaagtctacaaaaccttttaggagcagtttcctgcccatgggtcagaagccctggctctcagcaaccacagtggcctggccaccaactatcatggccttcccagcttccccccgcccccgcatcctcaccttcccaatgatggaaactggcccagctgcggaggctgccttagaacccctgccctgtcta

SEQ ID NO: 213623 - DNA, 445 bp, Homo sapiens
tataaaaacttaccatcatgttacaattatctacagtattcagtacagtgacatgttgtacataggagcaatagactataccatatagcctaggygtgtagtagctatctcgtgtaggttgggtaagtacgctttatgattgcacaatgacaaaattgcctaccaatgcatttcccagaacgtcattctgcctctgtccctgtccttgtcattaagtgatgcatgactattttaaaatcatagccaaattgggggtgggggaagggaaagagttcagtgggctcaaatattcaactttaagcagacaccaaacataatggggtctcttaataccatgtttctgggttttgttccttaagccaaatttatcttgtagtcttctccagtgatctaaaggatgttcctctgggaacgaggggatgctctggatgggacctgcactatt

SEQ ID NO: 213624 - DNA, 570 bp, Homo sapiens
attgaagactttattatttgaggtcttactgatttgtttggtttgagaaaagagtccaggatacacataatgaccgtgacaggtaaccacaaaaagctgaaggggttgcctgtgtcactgccctagtccaagccagtgttctcacccaaaccatgatacagtaagagcctcccactagtctccccacaacctctactgccacatgtccacactgaagccagaaatgtctttttaaaattttttttttattttttagagatgggttcttgctacattggccaggctggtctcaaactcctggcctcaggtaatccttccatctcggcctcccaaagtgctgagattacagacatgagccaccacgcctggcccmgatatatcttttcgatgtctgctgaatgtcaccattccttcaaaaaatattcccttgcccctcagatgaagcccttgagtagggtctcaggactgcatgctgtggccctgccttctcccccagcttccgtgatctctctgtgccctctagctctacaggctttctggaagtcctccaagtttgtcgtgctccctccc

SEQ ID NO: 213625 - DNA, 609 bp, Homo sapiens
aaagcataaggtgttacaaatgtctaactaatgccagtggttttcaaacactgctacatatttgaatcttctgggcccaggcccaatttagggggattcctattcaattgatcaggggtatttaaagctcctctgataattttgatatagacacagggatagatgcactagtttcagtgaacgtggttaggatrtccacatttgccagtaacagtgatgtccctttagaaatagaggcagtagaagtttgagtaaataaacaatgtgcttactaaagtgcaattacctaatttgcacttatttcacatttcacaattaccttatttcacattacttccattaaaacccacaagaaatctttctggtaatacagtgctgaattattgtatagttattttacagaatcaatttatttttagtaagaagaactgatgaaattgtatcactttcttttcaaggtgtgtgggagggtgggggtgctgaattcaaagagtgcatactcttcagtaagtcagttccttctttaaaaggaaatttactgagcactaggtaagcatgattatagacactaacctaaaaattagaggtacatggggaagactaataaaa

SEQ ID NO: 213626 - DNA, 609 bp, Homo sapiens
aaagcataaggtgttacaaatgtctaactaatgccagtggttttcaaacactgctacatatttgaatcttctgggcccaggcccaatttagggggattcctattcaattgatcaggggtatttaaagctcctctgataattttgatatagacacagggatagatgcactagtttcagtgaacgtggttaggatatccacatttgccagtaacagtgatgtccctttagaaatagaggcagtagaagtttgagtaaataaacaatgtgcttactaaagtgcaattacctaatttgcacttatttcacatttcacaattaccttatttcacattacttccattaaaacccacaagaaatctttctggtaatacagtgctgaattattgtatagttattttacagaatcaatttatttttagtmagaagaactgatgaaattgtatcactttcttttcaaggtgtgtgggagggtgggggtgctgaattcaaagagtgcatactcttcagtaagtcagttccttctttaaaaggaaatttactgagcactaggtaagcatgattatagacactaacctaaaaattagaggtacatggggaagactaataaaa

SEQ ID NO: 213627 - DNA, 500 bp, Homo sapiens
agtataatggaaaaaaatgtctgtaattataatcagttagatcattaaaatcctaaattytgatatcaaaagaacaacactttaaagaattctttatacaagatacaaaagtgtatttttgactacttattccatgtgtgatgaggctgatgagttagttttccttccaaatttcaatactgggatactaaaaaagagagaaaattgatggcccttagagattcactcagcaactactataactgctgtcaaatcgatcaaccaattaatcataactgtgaataaaatataagaaatgtactcaaaataattaagtatctctaaagttagttagagatatatatgtgtgacacacatatagtatggattgtatgtatgcatatgtatattacacacatataatatccatgtatatataaagatacatgaataataaaattttaaagttaagtaatagaaacataaaatttaggataggagagaaacgggattataagaaa

SEQ ID NO: 213628 - DNA, 500 bp, Homo sapiens
agtataatggaaaaaaatgtctgtaattataatcagttagatcattaaaatcctaaattttgatatcaaaagaacaacactttaaagaattctttatacaagatacaaaagtgtatttttgactacttattccatgtgtgatgargctgatgagttagttttccttccaaatttcaatactgggatactaaaaaagagagaaaattgatggcccttagagattcactcagcaactactataactgctgtcaaatcgatcaaccaattaatcataactgtgaataaaatataagaaatgtactcaaaataattaagtatctctaaagttagttagagatatatatgtgtgacacacatatagtatggattgtatgtatgcatatgtatattacacacatataatatccatgtatatataaagatacatgaataataaaattttaaagttaagtaatagaaacataaaatttaggataggagagaaacgggattataagaaa

SEQ ID NO: 213629 - DNA, 643 bp, Homo sapiens
ttagcagtgttcactaaagtcaaatatatgcaatcctatggaccagaaatgttcaacagaattgcttatttgtgtcagaaggcatgtacatgggtgtacatagcagaatcattctgagcagccccaacaaaactataaacaatccaaataatcattaacaagagaaatggrtaaataatttttgtgtatttatttaatagaatactataaaataatgaaaatgaactagctatttctacatgcaacaacatgcatgaatctcacagaactagtgcttgcatagatgaaggtaaacaccgaacagtagttcctatgtgattctattcccagggacttcagtaacagcaaaagtaatctatgataaatagaagtcacaatagaagttagggaaccttccaagattttgttgatgttctgtttccttcctgggtgatggtctacaaacatgttcaaatagcagatttatcaagttgtatgtttaagatttatgcatatatgtgtaatgtttttctgtatatatgttatgcttcaaaaattcactaaaatatccataggatagtgttttcactaatcggttttttcattattatgtaactgatatttgcacattagtaggtgaaatggaatggagcattcagatgga

SEQ ID NO: 213630 - DNA, 501 bp, Homo sapiens
ctgctgaaatgactgtatcatcgacttttggcaggccccagagatggtaggatctctgatcttggaatgtgaagtaataacttttaaagtcatgttgttatactgttttaactttaaacaaattattttaggttttacactggaactcaaataccaataggcaattgcacagagtgtcttgttattttagtgaatcccctgaatattatctataatgcttttctataaatgacaaaaagtcacccctcctgttagttggttcagtaaaattaacataattctgagctttggaaacagaaaagtagatagatttcacattccagttttcttattgcctagatgccctcctctaaagaaacaacaacaaatatgaamagaacgactgtttacagggtccctgagatttccttgataaaaatttgtatattgttcttattttcagcattgaagtttatttgctgtcttgttcatctcttttaagcatcaagagattttattatt

SEQ ID NO: 213631 - DNA, 501 bp, Homo sapiens
ctgctgaaatgactgtatcatcgacttttggcaggccccagagatggtaggatctctgatcttggaatgtgaagtaataacttttaaagtcatgttgttatactgttttaactttaaacaaattattttaggttttacactggaactcaaataccaataggcaattgcacagagtgtcttgttattttagtgaatcccctgaatattatctataatgcttttctataaatgacaaaaagtcacccctcctgttagttggttcagtaaaattaacataattctgagctttggaaacagaaaagtagatagatttcacattccagttttcttattgcctagatgccctcctctaaagaaacaacaacaaatatgaacagaacgactgtttacagggtccctgagatttccttgataaaaatttgtatattgttyttattttcagcattgaagtttatttgctgtcttgttcatctcttttaagcatcaagagattttattatt

SEQ ID NO: 213632 - DNA, 605 bp, Homo sapiens
ctctgggttttagacttactagaggtctgttattccttctgttttacttatttttcccttttggaataagaatatcttgttcctgtaccaccatctcatcatggaagtagataacttgtattgattttgcaggctcacagataaaactctggactttggacttttgaactggtgctgatgcaagttaagactctgggactatggagatggaatgggtgtaactgtatgtgagaaggacatgagttttatgtggctaggtgcaaaatgctattgtttgaatatttgtttcctccaaaattcatgttgaaatttaatctctaattttgcagtattgagaagtagggcctttaagaggtgaatggaccgtgaaggatctgccctcatgactgagttaattcattcatagattattcagttaatggattaatggattttcatgagagtgagactgattggtttataagaagataaaataggccaggcatggcrgctcacacctgtaagcccagcactttgagaggccaaagcaggcgcattgcttgagctcaggtgtttgaaatcagcctgggaaacatggcaaaaaccccatctctacaaaaacacaa

SEQ ID NO: 213633 - DNA, 520 bp, Homo sapiens
aataactcctacagttctaaaaattaatacgtaaaataaaggggaaggaaaaaacccctttttatgattttatcccttagagtttatcaaataagaagtagaaatttggaagtatgggttaaattctattttccatagaataatatgaaaagacagacaagaaatattagtgaagttaatgctctctaatttgcttctctatggataaggcaatacactaagaatttaataaaccctatggtgaagcctcataaccacaatcatcctgttttacagatgaagaaacccatgtttaggaaggttaagcaagctgtgcagtgccaaaatcttaatatatgaatggggtcaaatgaactcagttctcagcctttaaaatctatgcactcgtttttttccttcgtagttttatacaaaagatttgttctaaattagcagagtcagcatttatagataaaaggctaattcaaggagctgaaragtcacaatctttttactgttatttcacaatttggaagttagt

SEQ ID NO: 213634 - DNA, 520 bp, Homo sapiens
aataactcctacagttctaaaaattaatacgtaaaataaaggggaaggaaaaaacccctttttatgattttatcccttagagtttatcaaataagaagtagaaatttggaagtatgggttaaattctattttccatagaataatatgaaaagacagacaagaaatattagtgaagttaatgctctctaatttgcttctctatggataaggcaatacactaagaatttaataaaccctatggtgaagcctcataaccacaatcatcctgttttacagatgaagaaacccatgtttaggaaggttaagcaagctgtgcagtgccaaaatcttaatatatgaatggggtcaaatgaactcagttctcagcctttaaaatctatgcactcgtttttttccttcgtagttttatacaaaagatttgttctaaattagcagagtcagcatttatagataaaaggctaattcaaggagctgaaaagtcacaatctttttaytgttatttcacaatttggaagttagt

SEQ ID NO: 213635 - DNA, 499 bp, Homo sapiens
tttcttattctttcttcctytttatttctggaactccaactagatatatattgtaccttcctcactgtattgcatatatcccttatgctgcatgctgtattcttggttacttatgctctctgtgctttactttggttatttattgtcctgacttccagtttgttagtatacttttctgcaatatctaatctcctcttaaagacatctaatgaattcttaatttcagatttttttttaattgtagatttttcgatctgattctttctacctatcctaattctcttttgaatttctccatttcacccattggtttccattctctcctggtcatcagaatttctcatgctgttcttttatggacatacccacttacttgcctcccactcttacctccttctcaaactctggtaactatgaatctgttcttcattcctataattttgtcatttcaaaaattttaggtgaatggaatcatatggtatgtgattttgggggattg

SEQ ID NO: 213636 - DNA, 377 bp, Homo sapiens
tttttagggtaatggcattaaatggtgggatgtagaattttcttgaaaataccaaaagttcattttgcagattttctttgaaatgttttttccaaatctttgtcttaagaayaaatatttgaaatgaagattaatcacagtaagagtaacaatgtgcccatccagattggcattctaggacttatgcacagccattcattcactgtaatagagaaagacaaataacataggaggaagagggtcacagcctagcaagcagagaatgcactcttgagataacctgcttggcttcatcccagtcctgtcacctacttgctacaagcactgaatcacttaatttccctatgcttcagcttacacatttgtaaaaaaaaaaa

SEQ ID NO: 213637 - DNA, 532 bp, Homo sapiens
ctcattttatgtggtcagaattatcctgttaccaagacaaacagcacacaaacacacacacatgaatgcacacactcaggcaccggtgcacacacacacacacaagcacacacacccaacccctggagaacaatatctctcaagactatagatgcaaaaatccttagtaaaattttaccataccttacccatcaacatgtatatagtcctgtaccttctaccagtggactatattccagatatgcaagactagttcaatattttaaaatatatgtatataattgatcatattcacagggtaaagaaaaaaaatgtagccatatcaattgatgtggaaaaacaatttaacaaaactcaaattcagtcatgataaaaagtctgattacactaggaacagaggaaactttttctcaagctcagagcacttggagaaatctacagctataccattatacttgatagtaaaakactgaatgctgtttctttaatattgggaaggggagaggatgtgctgtctcaccatgcagattaa

SEQ ID NO: 213638 - DNA, 503 bp, Homo sapiens
aaatttaatttttttcttttccaaactgcatggcttctatttccttttcctgccatattgtgctggcaaggactcccaggattatgttgaatggcagcagtgagaactaatactttaactcattgattgatagcagagatccttggcttgttctcaatttaatgtggaaagtgcatttaatcttcaccatgaaacatgatgcaagttgtagttyttctgtagattgtcttcattaaggatattcccctctattcccagtttgctgagagttgctacaatcataaatgggtgttagattttgtaaaatgctcctgtgcatgaattgatatgatcgtaggatagctctccttttagcctgtggatatgggggatcacagtgtttgatttctgaatgctgaatcagccttgcatccctgaaattcaacttacttggtcacggtgtgttatatttttttcacattgtttcattaggttttctattattttgctgaagatttttgcac

SEQ ID NO: 213639 - DNA, 366 bp, Homo sapiens
ccagtgcttggccagcagccccagctggccacagttatgcactgtggaaggggagcaccaatgcagaggcgagaccacgccccctcccattcaatggaaagtcaaagggttgagccctacagtgcaccctgatggaaagacctgaggttcacatctgatgacagctgggcatcatggagggagaagagctgaatcccrggatactcttttccatgcacaggaccttggcctctatgggactggtggaggggacgtgggggccagtgcatgcctctgagcacagcctgggtccatgcttcctaccctagtgaggacagtcagggcaataagtaaagacgggaagaaacccatgcagaatcccagagc

SEQ ID NO: 213640 - DNA, 366 bp, Homo sapiens
ccagtgcttggccagcagccccagctggccacagttatgcactgtggaaggggagcaccaatgcagaggcgagaccacgccccctcccattcaatggaaagtcaaagggttgagccctacagtgcaccctgatggaaagacctgaggttcacatctgatgacagctgggcatcatggagggagaagagctgaatcccgggatactcttttccatgcacaggaccttggcctctatgggactggtggaggggacgtgggggccagtgcaygcctctgagcacagcctgggtccatgcttcctaccctagtgaggacagtcagggcaataagtaaagacgggaagaaacccatgcagaatcccagagc

SEQ ID NO: 213641 - DNA, 406 bp, Homo sapiens
gcttgactatagtgtgcctagagaagacctttttggattgaatatatgtggggatctttgagcctgctgtatctggttgtctatctctctctctcaagacttggagaaattttaaactattattttattaaataggttttttatgcctttgtccatttcttctctttctggaactcctgaaattcaaatatatgtttgctttatggtgtcctgcatgtcacataggctttctrtatacttttaaattatcttttttaaaaaaaatccgagttgtctcaaaagtcttgtcttcgagttcagaagttctctcttccactctaatctcttgttgatgctcttgattttattttttatttcattcattgaattcttctgttccaagatttctgatttggttctattttag

SEQ ID NO: 213642 - DNA, 406 bp, Homo sapiens
gcttgactatagtgtgcctagagaagacctttttggattgaatatatgtggggatctttgagcctgctgtatctggttgtctatctctctctctcaagacttggagaaattttaaactattattttattaaataggttttttatgcctttgtccatttcttctctttctggaactcctgaaattcaaatatatgtttgctttatggtgtcctgcatgtcacataggctttctgtatacttttaaattatcttttttaaaaaaaatccgagttgtctcaaaagtcttgtcttcgagttcagaagttctctcttccactctaatctcttgttgatgctcttgattttattttttatttcattcattraattcttctgttccaagatttctgatttggttctattttag

SEQ ID NO: 213643 - DNA, 515 bp, Homo sapiens
ggtaacaaggcactggagaagacaaggcaacatgaatgagaacctgcagaaatgacagacaacaracacacgcccacaggaactttagtcattggaattatcagatacaaaccataaaacaactcacttccagtactcaagaagataaaacccaagcttgaaaacttcagcagggaaatagaaattatacaaaatagcatttttgaaataaaccaagcagaaattatacaattaaaaaaacataaaatacaaaattaagaaattaatggttgaatttaatagcacaggagacacagctgaagcaagacttagtgaactggaagatgaatcaatagaaactacccaaaatgaaatatggagagatggagagacaaaagcacaaaaaatacaaatgagaaggcaagagatattaaaaaaatatgtaatgacgtctaacatatgtttaattggagtcctagaggagaacatataatgagaaagaataagtatttaaagaaataaagactaagaaattt

SEQ ID NO: 213644 - DNA, 515 bp, Homo sapiens
ggtaacaaggcactggagaagacaaggcaacatgaatgagaacctgcagaaatgacagacaacagacacacgcccacaggaactttagtcattggaattatcagatacaaaccataaaacaactcacttccagtactcaagaagataaaacccaagcttgaaaacttcrgcagggaaatagaaattatacaaaatagcatttttgaaataaaccaagcagaaattatacaattaaaaaaacataaaatacaaaattaagaaattaatggttgaatttaatagcacaggagacacagctgaagcaagacttagtgaactggaagatgaatcaatagaaactacccaaaatgaaatatggagagatggagagacaaaagcacaaaaaatacaaatgagaaggcaagagatattaaaaaaatatgtaatgacgtctaacatatgtttaattggagtcctagaggagaacatataatgagaaagaataagtatttaaagaaataaagactaagaaattt

SEQ ID NO: 213645 - DNA, 452 bp, Homo sapiens
atgcagctttaaataccaattatgccttaataaaattgtttaaaaaattttaaaaagcagaaaaacaatagaaaagactatttaaaatataaggcatatatctaacactataccaattatatttttagtataaataattttttaaggttaaaacaaagggcatgcaaaagtactaaaaattataggaatcatgccttcttgtctaggatacataatataagaggaaacgtcttatattatgatacctccaaggtcaaaacgtcagtrggatcttatagtgagagtcaaaataacttaatttcacattaggaaagaaagaagaaacctacttacagaattggaaaatagttgctatattaatttggggatatcaacatttctttataattcctaatcatcaatgttttgggataatgaccaggaataaaatatcagagtctgaaataccaaca

SEQ ID NO: 213646 - DNA, 577 bp, Homo sapiens
ctttgtcagtaggctggagtcatcccacacaatatgtaatttatcattctttctctcagaaggaattcagttgtcaaggcaagaccaacgtcttggcctactggtattctataaacttaatattcatactgatttcagatccatttagttcatggaaacaatccgtatttcatttattgactcataacagagtaacacaatttataaatccttagaataactactctagagaaagagagaaggacagagagatggacacacacacacacacacacacacacacacacacacacacacacatacacacagagagagagagatagagagagagagagagaacaaattaccagaagcagaaggagggaaacataaaaatactaaaaggatgaggcrataaaatgacaatatcatgccaatatcactgacatcttggatgaaataagaaaattctttggcaaagcatcctacagaaattgacaaaagaagaaaatagatctgaatagccttatatctgcttaggaaattaaatcttttataggaaaccttatcttataaaaacagatataattgtttccac

SEQ ID NO: 213647 - DNA, 573 bp, Homo sapiens
tttggacatatttttgtatcttccmaaattaactatcaactagttattgcacacacaaaacatattccttgagaatttgtccatgtatttttttctactttatacatccagcttctcaaatatacccactcctgttccaactcatactcaaattctctccatattaccagacagaaatcaaataaaatcaagttgcataaagcatactcctgagtaaagggagagctcattaagttcttttatcaaaaccagtactttataattttgtactacacttatgatgcacttccaactttttattataaccatttgtataaaaaattcttatactgtacaatttttcgggcagtttctcaaattgcatgctgtattctactgcatgggaatggtgacacaaaatgagtaagaattaaagtacatatagatattgaggcaagatcgtttgtgtagttaatgataaaaatgactatatcaagcagctgttgtatacagagttatggcctaaaggttatttacctttagcctaaaggcctaaatatttctagggaacaaggatttctatcacatgtgaca

SEQ ID NO: 213648 - DNA, 573 bp, Homo sapiens
tttggacatatttttgtatcttcccaaattaactatcaactagttattgcacacacaaaacatattccttgagaatttgtccatgtatttttttctactttatacatccagcttctcaaatatacccactcctgttccaactcatactcaaattctctccatattaccagacagaaatcaaataaaatcaagttgcataaagcatactcctgagtaaagggagagctcattaagttcttttatcaaaaccagtactttataattttgtactacacttatgatgcacttccaactttttattataaccatttgtataaaaaattcttatactgtacaatttttcgggcagtttctcaaattgcatgctgtattctactgcatgggaatggtgacacaaaatgagtaagaattaaagtacatatagatattgaggcaagatcgtttgtgtagttaatgataaaaatgactatatcaagcagctsttgtatacagagttatggcctaaaggttatttacctttagcctaaaggcctaaatatttctagggaacaaggatttctatcacatgtgaca

SEQ ID NO: 213649 - DNA, 571 bp, Homo sapiens
tggaaaaatggttaatagttaaaatacatttaaaaattcgacagcttacaactcaatagcaaagacaagataataacccatctttaatcaacattttttaaaaaatacaacataaaaatgactaccagattcatgagaaaatctaaaaatcatggatcatcagaaaagtgtaactcaaaactaaattagatgttttatcacaccagttagaatgttcattataaaaataaaataacaagtgctggtgaggatggggagaaaaaggaacactcatacattgcatgtgtgaatgtaaatgagtgcactcattatgaaaaaacagtaaataaatttctcaaaaaaataaaatggaattacaatagatctccactctttcaggtttttgcttcccttgtctcagttatccccagtcaacctcagttttaaaatattcaatatacaattcctgaaacaattcataaattttaaattcaatgtttttctgagtaatgtaakaaactctcatgctgtcccactctgtccctcccagaacattagttatccctttgtttagcatatgcatgccgtatgt

SEQ ID NO: 213650 - DNA, 576 bp, Homo sapiens
acagccattttaaattctctgtctgaaatgttgcatatctctgtttctccgggattggttccttgtgccttatttagttcatttggtgatatcatgttttcttggatggtgttgatgctagtagatgttctgtggtgtctgggcattgaagtgttaggtatttatagtagtctttactctctgagcttatttatagtcattcttctttagcagagtttccagatatttgaaaggacttacatgttgttatctaagctctatctgctttaaggggaaccccaagcccagtaaaactgtggttcttgtagactcatagaaggaccaycttgatggtcttagacacgatctgggagaattatctggattaccaggcagagactgtggttctttcctgtttctttctcccagacatacagagtctctcactctgttcttagccacctaaaactgcgggtggagtgacataagcaccctcagggccactcttgataatactttgctgggtcagacctgaagccagcacaattctgtgtcttgcccaaggcccactgtaacccctccctggctattgcttat

SEQ ID NO: 213651 - DNA, 287 bp, Homo sapiens
tattatatgaaatactttgrttttggcaacatttatccaattttattttctgtcactatgatacataaatcttttgttttttcaaatttcacctttacaattttagtcatttctcttgttgcaacacctaaagaattggtaaacattatagatgatttaaaacaaacattttatcttgcaggcataatttaaaaagttcaactttctctctctctttctctctctctccatatatatatatggccataaaacatattgaatctggtgacccacatgaatttcaaaat

SEQ ID NO: 213652 - DNA, 532 bp, Homo sapiens
tgtcattgactcttagcagaaagaaaagatacaggggtcatatatgactgttagggttgccataacaaagtaccacaacaaggtgacttaaacagcagaaacatagagtctcacagttctggagtctagaaatccagttgctggtaatattggttcttcccaagtgctctgagggagaatcttttctatgcctctctcctactattttgtgtttcttggcaagctttgacacgtgaatgtctgtcttcatgttcacaaagtttactccctccgtgtgtgtgtgtgtgtgtgtgtgtgtgtgtgtgtgtgtatgtccaaattgtttctttttataagggcacaagccatattgtatcagaaagcttatcctactccaatatgacctcttcttaacaaattatgacattcagatgtaccaaaatgtagaacttcaacatatgaattttarggacgggacatacaattcaaccgaaaacaagccacaaagacaaaactctcttagttaatacatctgaagcctgtcccgctatga

SEQ ID NO: 213653 - DNA, 513 bp, Homo sapiens
atcccttattttcttcttcaaaatgtttttgtgtatccttggaccattattcttaataataattaaggattgccattctaagtttcattcatattcctttgagaaattatatgggaagaattctgagtctttaaattattttgggaaattttgtcatcattgaagtttttcatatatgaaagcaatattccattccatttggtcaaatatttgactttcttgaaaaatgacttctaattttcttaattaaagttttgtacaccatattaaatttatttctttgtaccttatgatattagttgccaggataaataataactcttctaaattagatttctatattactttgttgctggtctatagaaatgcaagtgatttgtttttattgttgttatatatagccaccttactaagctttctgtataattctagcaattttcagattttcaggkttttatggaagcaaattaaactacccttgaagaaagacaattcgattaatttcttcctaat

SEQ ID NO: 213654 - DNA, 475 bp, Homo sapiens
taagttttggtgaggatgtggagaaaagaaaatccttgcacactgttggtgggaaccaaaattagtattaccatcatagacatggggtttctgaaaaaaaaaaacgaaaatagaatcaccatatgatccagaaatcctatttccgggtatttacccaaaagatttaaaatccgtaaatccaagagatatctgcactcccatagtcattgtagtgttattcacagtagccaagttatagaatcaacttaagtgttcatcaacagatgaacacataaagaaaatatggtatacataaacartggaatactattcagccatggaaaaagaaagaaatgctatcatttgcaacaacatggatgaagttgtacactataatgttaagtcattatagtcacagataagacaaataagccagtcacagaaagacaaatactgcctccttttacttctctgtgaaatcttaaacaatcgaact

SEQ ID NO: 213655 - DNA, 399 bp, Homo sapiens
cctgggacctggaagtgctcttcttatgaagatcacaggaaagcagatgagtaaaccaaactgtgcaagcacatttaagccctgtgctgcatcatgtttgctaatactcaattcaatattattgaaaatgaataaggaaacaagatgacagaataagatttgaatgtttggaatcttgggatctgaccraaatgctttaacaaaattagctattttactgaagtggtgataatttttgtcagatatatgcaaatattttctcaaaggttttttttaatagtttttaactatcattcataacattttagcttttctgaagatcttaatttttatgtaggttaaatgactttttttttcttttatggtttgtgcatttgggttgttgcatatacagactat

SEQ ID NO: 213656 - DNA, 606 bp, Homo sapiens
aagcttgagtagaggttcttctagaaactaaaaggaaagagcatttcaaaaaaaaaaagtagttgattgtatggaatactttcaatatatcaaacaagatgaagaaagaagtgtggctattgaatttttcagctgcatgttcactaatctttattcagagtaatgtcagtgtaatggaaagagaagtcataatagagtggagcagaaataaggaagtatgcagcagatcctcttaggaatttgggtagaaaataaagtagggacatggaatggtagctggaagacaaagtggtatcaaaggggggtatatttttaaatatggcaggaagaaattggagtatgyttgtgtgtccttggaaatgattatgtggaagagagacaaaagaagacagatgagagaaaaaacggtgactgagaatttaaatctttagaaggcaaatggagaagggaggcagaacacagaagttcttcctgtgttcagaggaataacaccttcattacagtaatagagatgaagaagaataatacagagacaggtataggaaggtgaaaactgtgcttatgttatttaattcataatgcatgaagtgaggtcattcattaagg

SEQ ID NO: 213657 - DNA, 659 bp, Homo sapiens
acatcaccaaaagaaaataacaagtctatggcaatggtcccagaagattgaagacctatgaaatgcttgaccaagaattccaaataattctcttaaagaagttgmggaatcacgagaaaatatgaatactaaattaaataaaatttggaaaacaatacaggaacaaaatgaaaaacttgacaaaaaatagaaactattaaaaaaccaaatggaaatccaagaaataaataatacaataactgaactgaaagacttattagaaagcttcaacaagatttgatcaaacagaggaaaggaccagcaagcttgaaaacagaacatatgaaattatccaatcagaggaacaaaaagaaaaaataataataattaaaaagagtgaaaaaggcctgagagaattatgggacatatcaagtgaactaacattcacatgatagaaattcctgagaaagatgagaggggataaaaaggcctagaaagcatatttaagaaaataatggttaattctttttaatttggagaaagatgacaacatccagatataggaaggtcagagctgatcaatcaaattcaactcaaattaaatttccctaagtcacataataattaaattatcaaaaatcaaaagcaaagaaataattcaaagcaacaagaaaataaaa

SEQ ID NO: 213658 - DNA, 659 bp, Homo sapiens
acatcaccaaaagaaaataacaagtctatggcaatggtcccagaagattgaagacctatgaaatgcttgaccaagaattccaaataattctcttaaagaagttgcggaatcacgagaaaatatgaatactaaattaaataaaatttggaaaacaatacaggaacaaaatgaaaaacttgacaaaaaatagaaactattaaaaaaccaaatggaaatccaagaaataaataatacaataactgaactgaaagacttattagaaagcttcaacaagatttgatcaaacagaggaaaggaccagcaagcttgaaaacagaacatatgaaattatccaatcagaggaacaaaaagaaaaaataataataattaaaaagagtgaaaaaggcctgagagaattatgggacayatcaagtgaactaacattcacatgatagaaattcctgagaaagatgagaggggataaaaaggcctagaaagcatatttaagaaaataatggttaattctttttaatttggagaaagatgacaacatccagatataggaaggtcagagctgatcaatcaaattcaactcaaattaaatttccctaagtcacataataattaaattatcaaaaatcaaaagcaaagaaataattcaaagcaacaagaaaataaaa

SEQ ID NO: 213659 - DNA, 364 bp, Homo sapiens
acagacacagaaacaccaggraggatcctatgtgaaaatgaaagcaaagatttgagtaatttgggccaagtaatatcaaggattgccagcaataaccagaaaccaggagagagacatagaacagattttctttctgagcactcaagaaggaaccaaccctgccaacaccttggctttggacttctggcctccagaactgtaaaagaataaatgtctgttgttttatgccaccaggtctgaggttgttacagtaaccctagggaactaatacaaaagttatactgcccaatatcctctagcctggactaaaagagactgacttttcaaatgttaaaatgacccctagcctgcaatctttacaagc

SEQ ID NO: 213660 - DNA, 529 bp, Homo sapiens
aatactttaccaagtctctaggtattcctttatccagtcaagttgacacctaaaattaaccatcagacccagtttattccattccttcagaggaggttcttggacaatacagaagtgactgcctgagaagtccagaaactcttccagaaaaatgaccatcacctcttcatattttcatcagctgtagaactgacccataggctgccattgttaycacagcttccaggtatgacatccaagcaggaagcagctccacgtgtggtaagctcttggcagctcaggtgcctagaaggtatctcagcacacattctgcccaatgtacatgatttatactacttagtaacaatctttttggaaaccaaaattatcagatgcatacagaaggcaggtcacaaaatgaagtagttactttcagttttctcagaagcattctctgtattctcattgttaattctgggacccaggggatgatcttgaagttcatgagataatttttagttctcttacaacctcttgtgtcattcatatt

SEQ ID NO: 213661 - DNA, 634 bp, Homo sapiens
gtccaaattagtttttcatcaaaacttcatgaatgatacatataataagaatgggaatgttcaaaggagaaggagaccattaggcttgaaaaggcaggaaaaatgttttgaagtcaatacgatctgcaatggattggaatgtattgaatggagtgagggagaaagacatatttaattattttctagtcacttttcttatttttcacttaggctgttttgaaagtactattsccaagacacccacgttggcattttcctctgtctaaaaaaattatcattgatggatttttcatggtctataaatctgtttcagttgaataaatacatttaacctaagatactggatcacaggaagtttgctgacaaattgtatagctgacaaccctctatatgtaaatataaggacagtagtgttttactttgccaacttgaaataagtaaagtttatgttccttattttctcacctacctggagacaaagccaggatatgcatatgagcaaatgactaacagcgatttttgaaaagaggtagttcaccaaggcagaaaatctctaaaaccatcagtgaacaagaatgtatcaaacgcttgcatatatattattttatttaattgccgcattacattgtagaaa

SEQ ID NO: 213662 - DNA, 548 bp, Homo sapiens
taaaactttgtaccttgtggagtctacaagtctatttctcctctcatttaccatttttaagaaaccatgaacacagggtcagggccaacctgttgagtcaatccataacaataaacaccctgaccatccaccatagaccttctcagaagggagaaagttgataaacaactcttggctgaagataagtgaagaggctgactagcaatggccactagcctacttctcttgcattctttatcgaaatgtcactattctataactaatgttataagtcttatcagaaaaggaggttaaattatatcaaaactattttgccrtctatcaaggtatgtttttgtccttttaagtactaagatgaaaatgtatgccatacctttccagtgactgactcattcttgaattcctaaaataaacccttgttagtgatgtattttacttttgttatagtcctagattagatttcttaaaacttgattttgtactctttaagtacgcatactctgtttcccagattttattattggaattatgctaatttatacagttaa

SEQ ID NO: 213663 - DNA, 509 bp, Homo sapiens
taaggcgcagtcctatagttttattaactccttttattctaattgttgtctgtcacaagtctgcacttcaattagcttgtaaaggattaattgataacctcacaaagtgcagacatcaaaagaaaaaaagaaaaccaaattctgcatggcagtttaggccataacataatcaagctaaaagtcctactatttataaaatctgatcctagtttaaatgaaaccaatacattytcattaataataagtttttttcttagcatcttcttttttccaatatgcctatcaagaaaaacattaatttcagttggtacatgggatttgctgttcatggtcagacctatttctgttcttcatttttagatttctccatctactttcagatgcctgaaaattttagagaaacaaaacttttcattttataagcagagactaagaaggaaaaatacacatgaacatgctaggcaattccataagtgttaaatgtatgaacggtacctctaaaggaaata

SEQ ID NO: 213664 - DNA, 605 bp, Homo sapiens
tgtagccaatagtttgggagtttttcaagggaactgacttgaattgtgtgttccctaacatgacgacagggagaacatgatttgcacctctggagcagcttctgtggctcccttccctatgattgcctccccttcatgacttttcttcttagactcttacacgtgttcgtcttcttctaactagtcctttagtaggggtatttccctcaaggttctgtccctggccctttctccactctgcataatcattccaaacacctgacttctgcaactacccaacacggacaacttccgtacttgtctcttcagatctgcagtctgtcctgagctcaagtcacatgctacacctgcctgctgtctctctgcctgatgtcctcatccaccacgagcccagcatgtccaggctgatttcaccatattcatccccaccactggtcttcccacttacccttggcttaccactagcagacccaaaacctggtaggcatctaattagactgctgyttttgtctgtattacattttggctcttacttgaaatttcatttgaaatgcaaatctcagttgcttaaaaaacatgttaaaacatcaagtatttaaaatctt

SEQ ID NO: 213665 - DNA, 414 bp, Homo sapiens
tgcctatgttacccaaatgacaccctttttacaaattcagtgcagtgtaggggaccactctatagagccaggacacagactttccatccaaaagccacaactgtggggggtaggggggtggggggtcatgaagacatttctgaccagaactactaagtgctgacctaatagcctttttcyccaccttcctcacaaacagaagcttgattgtatgcctggcaatgtatccagcttacacagtacattttccaggtttccttgaagccaggggtgaacaaggtacttaagtgaatatctgagaaattttgaaggagcactgactcagttaagagagggaacttctcaccctttttccttctcctccttcttccttcctattgcccaaaactcagatgtaatcaccgatactccagc

SEQ ID NO: 213666 - DNA, 633 bp, Homo sapiens
tggcacatctataaaactacaaaagtcacagcaacactgggctttattatctcccaatgcagatagagcttcagcgaccaaagatttagaccacaacattcaattcccttggaatacataaaaagcccttcttaagaaggacagatacaaacaagcccagactgagagtattagaattaatacctaacacttcaatgcccagaaatcaacaaacatccacaagaccaagaccatttataaaaacatgatttcaccaaatgaactgaataaagcaccagckatccatcctggaggaacagagatatgtgacttttcaaacagaattcaaaatagactttcagacagataagtcaaaacagctattttgaggaagctcaatgaaattgaagataacacagagaaggaattcagaatcctatcacacaaatttgatgaaaagattgaaataattttaaagaatcaagcaggaattctggagctaaagaattcaaataacacactgaaaaatgtattacagtctctcaacagcagaattaatcaagcagaagaaagaattagtgagcttgaagacagactatttgaaaatacacagtcaaaaatgacaaaagaaaaataataataatgaataaagca

SEQ ID NO: 213667 - DNA, 577 bp, Homo sapiens
gtgtccatacactgtctcttacctcttcttcatttttgcatataagtagtccactagactgcaattacaatgagcattagatattccgaactctctattaatcaagaacatattggaaatattttcaattacaaaatctaatattggataagagctaatgaagagagataattaaatctcctgttacattgatggggattaaaatatttccaatttcaagatctaatattaaaaaaactaatgaaaaaagatatttaaaactctgaatatgaaactaggatgttacatgaaatcaccacttacacaaraacaggttcaaacagatgttcgttttcaattcacagagtcctcgagtactccttctttaaagaagacccagccttcaaaaaacaaaaaaggaatgtaaaagcaatttaaatctctaattaagattctcaaagcatttccaaagagaattttactcataatatacaacaaaaatgcctctaaaaatcttcatccatttttctccccgtgtcttacattgaacaaattcagctgcccaattttctctctgccttctataaaataccccaaa

SEQ ID NO: 213668 - DNA, 577 bp, Homo sapiens
gtgtccatacactgtctcttacctcttcttcatttttgcatataagtagtccactagactgcaattacaatgagcattagatattccgaactctctattaatcaagaacatattggaaatattttcaattacaaaatctaatattggataagagctaatgaagagagataattaaatctcctgttacattgatggggattaaaatatttccaatttcaagatctaatattaaaaaaactaatgaaaaaagatatttaaaactctgaatatgaaactaggatgttacatgaaatcaccacttacacaaaaacaggttcaaacagatgttcgttttcaattcacagagtcctcgagtactccttctttaaagaagacccagccttcaaaaaacaaaaaaggaatgtaaaagcaatttaaatctctaattaagattctcaaagcatttccaaagagaattttactcataatatacaacaaaaatgcctctaaaaatcttcatccatttttctcccmgtgtcttacattgaacaaattcagctgcccaattttctctctgccttctataaaataccccaaa

SEQ ID NO: 213669 - DNA, 414 bp, Homo sapiens
tagtgccttggtagagaggctcatctgcccactgacaatggtctcgaccatgcttctgaaagttgccttccatggatctgctccagtccccacttcattgagtttycagttcagagctgcttttgtaaggacccagagggagacttgaccatatctcacagcctggcagtctgagtctccctaatgggctcaccaatctctgtcccacagcagatcccaaggggactccgtttcggctctggcccttcccttagcctcagggaactatccagttttgctagaagacatgtgctcctctgagcaaatcagaccaggctctccagcctctgccacacagcagattctgagaggccgactgttagctccagcgcacctcgctgcagtcaggaaactattccatctatgcagggaatt

SEQ ID NO: 213670 - DNA, 471 bp, Homo sapiens
tatcctaccggtgcagaaacttgcggggaggcacacctctctgggtcaccagaacagtttcctgtactcaggtccctggygaccatttctacacagctctagtatcctccttgggtcttccctaggtccatctggccccaaaagccatatcagcctcagagtcctcctgatactctcagcaagcctggtcttagactgtcccctagtgctgagagaggtgcagtggtcacaggctcagggaacatagtggtcagtctgcttagaatccctgaaaggccctctgaaaaaggacaggcacaaagcaagactttcaagactaaattaagtacctaatccctcgatatacagacattgtggcacatccacaagcatctgtgcaaggagcattaagaacattcagggaaatatgatctcactaaatgaacaaaataaagtgccagagaccaaccctaaagtgatggagatgtgtta

SEQ ID NO: 213671 - DNA, 565 bp, Homo sapiens
ctacagcagatgtttattcaaggcccaagggatctctagtaatcaagtgatatattctgccaggactgggtccttctttcaaggagtgtgttcccttctggcctaagatgtgtttaggaatgtcatctgggagctagggcctagaataggagcctcacaactctgcctggtattctattctactgtggctgagctagtatccaagttgcaagacaaagtcctctttccactcccttctcctctcttcaaatagaaggaatgagtctctctcagagcttcaagctctgctgcctgkggttggggtgggagtgttacaagcattcccttggccaacatggctggtgtctccataggtcacatgcaccccatgtgtgctggctccaatcccagatggcacctgtacttgtccaggaatatcagtccttgtggcctagacagggtttcaagtttatttagaactacagagcactttagctggtggtggtggggctagctggagctcaggttctgccagtggcagaacgtttaccgtctggctggggctggcctaaatgctccctccata

SEQ ID NO: 213672 - DNA, 567 bp, Homo sapiens
ctgtcctgtttcagcttcaacaactcgccaagatctttcctaccttgaaaggtgtttttacatattccttcctctacctgactcactcttccacacagtattcccatgattagcccctcatccctgaaatttcagctaacacatgacctaaaatgtcacctccatagataagctttcctgrtgtttctaccccaaaccattgttcctctctctattgttttctagctcagcatcttactttgtttgttgatattatcaacatttgtaattattttccttatctatttactgggtttgagtttgactccctcccccttgttaactgtttttctgtgtctgtcctgtttagcataatatccccagcacatggcctggtgtctagtacatattagacttcaataaatatttgctgcatgaattaataaatatgtgatggagttgagactaagtctctgttttcttttatgtaacacctgtgaagtgtgtgtatcatgtgcacagattcttaatacatagagataatgacctaagctgagttaatggaaggagtagaagaaggttaaccct

SEQ ID NO: 213673 - DNA, 567 bp, Homo sapiens
ctgtcctgtttcagcttcaacaactcgccaagatctttcctaccttgaaaggtgtttttacatattccttcctctacctgactcactcttccacacagtattcccatgattagcccctcatccctgaaatttcagctaacacatgacctaaaatgtcacctccatagataagctttcctgatgtttctaccccaaaccattgttcctctctctattgttttctagctcagcatcttactttgtttgttgatattatcaacatttgtaattattttccttatctatttaytgggtttgagtttgactccctcccccttgttaactgtttttctgtgtctgtcctgtttagcataatatccccagcacatggcctggtgtctagtacatattagacttcaataaatatttgctgcatgaattaataaatatgtgatggagttgagactaagtctctgttttcttttatgtaacacctgtgaagtgtgtgtatcatgtgcacagattcttaatacatagagataatgacctaagctgagttaatggaaggagtagaagaaggttaaccct

SEQ ID NO: 213674 - DNA, 551 bp, Homo sapiens
gaattctgttctatatctaccattacgtgctcttgtttgaagcaatcacttccaagccttctctacagtctgcctttatcttctccaggagggagaaaatataggggtagagtaggcaagcctctctttttaggcagtgttttgcaaataccttttacctaacacagaaggttaagtgaaacagatttgatgagaaacaaatgatgacatgaatcccaccctctgcatgttgtgaaggttccttagaaataagagtgcagcagcttcctccatattccttcataaaaacaaatccgaagtatttcacaattacttccctgggaaaatgctcctaccccgactcccaaacccaacattttcaattctgccaagtcagagaattatttttaatsttcagagtaatttcctttttatcagctgggtcagttatacaattacaatgattgactagtttaaaagttgaaacatgaacattttctttcattagcaattattgataaacaactgccatctcattaccataataaatttcttagtcctgtgtctctgga

SEQ ID NO: 213675 - DNA, 551 bp, Homo sapiens
gaattctgttctatatctaccattacgtgctcttgtttgaagcaatcacttccaagccttctctacagtctgcctttatcttctccaggagggagaaaatataggggtagagtaggcaagcctctctttttaggcagtgttttgcaaataccttttacctaacacagaaggttaagtgaaacagatttgatgagaaacaaatgatgacatgaatcccaccctctgcatgttgtgaaggttccttagaaataagagtgcagcagcttcctccatattccttcataaaaacaaatccgaagtatttcacaattacttccctgggaaaatgctcctaccccgactcccaaacccaacattttcaattctgccaagtcagagaattatttttaatcwtcagagtaatttcctttttatcagctgggtcagttatacaattacaatgattgactagtttaaaagttgaaacatgaacattttctttcattagcaattattgataaacaactgccatctcattaccataataaatttcttagtcctgtgtctctgga

SEQ ID NO: 213676 - DNA, 581 bp, Homo sapiens
ttgggagggatacacataaagtgcaaacagaagatagagatacttgtttaataaatgagagaaaaaagttcagccctgccatcacttagatcatctttcaaaccatatcctgcatttctgttatttctgttgttagttgtagtggtaagaaccttgtaggtccctgagataagcctcttgctgaatgtttttccttgtgctttatatgtagaacctctatgtcctggtcttctctgtgactaaaaaagaagttacattaacttttaatcactgctttgataataggatcacataaccccaagtatactccarttatttgtgaagttccccaacggttatctctcagttaaaagtggcatattattgtttttctcctgctggcttctactggcccatgtctcacatctataaaatccacagagaagcattgtgactggctcagctgagagtgctcatgatcagaactcctatggggatgacagtggtgctatttccagatgctctcctggttgccagccctgagtcaaagctaggttccattgagaggcagacagagtcacctattccctgcctaccacttt

SEQ ID NO: 213677 - DNA, 581 bp, Homo sapiens
ttgggagggatacacataaagtgcaaacagaagatagagatacttgtttaataaatgagagaaaaaagttcagccctgccatcacttagatcatctttcaaaccatatcctgcatttctgttatttctgttgttagttgtagtggtaagaaccttgtaggtccctgagataagcctcttgctgaatgtttttccttgtgctttatatgtagaacctctatgtcctggtcttctctgtgactaaaaaagaagttacattaacttttaatcactgctttgataataggatcacataaccccaagtatactccaattatttgtgaagttccccaacrgttatctctcagttaaaagtggcatattattgtttttctcctgctggcttctactggcccatgtctcacatctataaaatccacagagaagcattgtgactggctcagctgagagtgctcatgatcagaactcctatggggatgacagtggtgctatttccagatgctctcctggttgccagccctgagtcaaagctaggttccattgagaggcagacagagtcacctattccctgcctaccacttt

SEQ ID NO: 213678 - DNA, 580 bp, Homo sapiens
atactttcatagaaaaggcatctgtttggtttttcagtttcttagtactttgttcctatctgatttcagttggagaaagcagaaaaccattaagaaaagttatatggcttttgacattggtaaagtagttattgtttcccctctgatggaaaatcatctttatttgcgtatatctctgagttcttgctcctcctcatctggcatttgctatgcatttataygaattggcacacttgtcagtcagatctaacctagaggtgtaggtggacactgcctcctgcttaaagccttaattacaaaagtctcagtttactagaataccataattagacaaaatttcgaagtatttaatgatatatttcaattacaaagtagtttctccatagcccaacagaaataaacttttttaaaaagcatgctgtatcataataaaagtttcttaattctgtcatatgtgcaatatataaaaatttctttctttccattctttggatcggcttgtaatgtttaataatgctttcaatgatatgatctagaaattaattagctgtttataaaagttaacttaattgacaaagaa

SEQ ID NO: 213679 - DNA, 580 bp, Homo sapiens
atactttcatagaaaaggcatctgtttggtttttcagtttcttagtactttgttcctatctgatttcagttggagaaagcagaaaaccattaagaaaagttatatggcttttgacattggtaaagtagttattgtttcccctctgatggaaaatcatctttatttgcgtatatctctgagttcttgctcctcctcatctggcatttgctatgcatttatatgaattggcacacttgtcagtcagatctaacctagaggtgtaggtggacactgcctcctgcttaaagccttaattacaaaagtctcagtttactagaataccataattagacaaaatttckaagtatttaatgatatatttcaattacaaagtagtttctccatagcccaacagaaataaacttttttaaaaagcatgctgtatcataataaaagtttcttaattctgtcatatgtgcaatatataaaaatttctttctttccattctttggatcggcttgtaatgtttaataatgctttcaatgatatgatctagaaattaattagctgtttataaaagttaacttaattgacaaagaa

SEQ ID NO: 213680 - DNA, 494 bp, Homo sapiens
ttttaaacagttttttaatgatggttcagagctactcaactaatttttactgaatgactattcttaatgtttttctttatttttttaggcagagtctcactctgtcacccaggctggaatgcaatggtgtggtctcagctcactgcaaccaccgcctcccrggttcaagcaactctcatgcctcagccacctgagtagctgagattacaagcgtgcaccaccacacccagctaatttttgtatttttagtagagacggggtttcggcatgttggccaggctagtctcaaactccaggcctcaagcaatctgcccgcctcagtctcccaaagtgctgggataacaggcataagccactgtgcccagccagagtgactaccttttaaagtcaggtttactgatgtataatttatatacgataaaattcatcttataaaatgtataatttcattagttttgacaaatgtatatatttacataactaccaccacaatc

SEQ ID NO: 213681 - DNA, 494 bp, Homo sapiens
ttttaaacagttttttaatgatggttcagagctactcaactaatttttactgaatgactattcttaatgtttttctttatttttttaggcagagtctcactctgtcacccaggctggaatgcaatggtgtggtctcagctcactgcaaccaccgcctcccaggttcaagcaactctcatgcctcagccacctgagtagctgagattacaagcgtgcaccaccacacccagctaatttttgtatttttagtagagacggggtttcggcatgttggccaggctagtctcaaactccaggcctcaagcratctgcccgcctcagtctcccaaagtgctgggataacaggcataagccactgtgcccagccagagtgactaccttttaaagtcaggtttactgatgtataatttatatacgataaaattcatcttataaaatgtataatttcattagttttgacaaatgtatatatttacataactaccaccacaatc

SEQ ID NO: 213682 - DNA, 498 bp, Homo sapiens
ttttcttattctatgattctcaagagcataactgttacaagatcaatttttacagcaatttctctttcaaactagatgatgtacaggcccaatatagagattttcttttctttttttaaccactcaaagtccatgctaaaataaatgtccttgyattctccctatgccaataaatgtgcttgtagtctccctatccctctccctatgtttttattttctgtttttaaccttttggttgagtgcaggctcttgaggtcccaactttatattggtggtctcattccagatccattctgagccctacattctctgctcctctttcggtgcattaaaacccaaaatttagcacatccccaagagtagagttgcagcttatgttcttattactgacttatctctttatgttccctgtcatttctggtttcccaatgactttaaagaatgcctaagaggaacctttatgttctttgctccctatgttcttggaaaacagaagtc

SEQ ID NO: 213683 - DNA, 600 bp, Homo sapiens
gtatgtaagttaccgtcacaaggcacagatacatgggaagacatgacacattcagattttagcaatacttataaactccaacaacaggtgacggagggaaaagagccgcgggtaaatttcgatagygatttaggctggccgaatgtgaaaattttctctttagtattcaaatttgtcaagtaatttactctgaactcccaaataataaacaaaatgtgaaataaataagactggccaggttgggcgaggtggttcacacctgtaatctcagaactttgggaggctgaggcacacagatcacttaaggtcaggagttcgagaccagcctggccaacatggtgaaaacctgtctctactaaaaatacaaaaaattagccaggcgtggtggtgggcgcctgtgatcttacctactcaggaggctgaggcaggagaattgctggaaccagggaggtggaggttgcagtgagcccagatcatgccattgtactccagcctgggtgacagagtgaggctctgtctcaaaaaaaaaaaaaaaaaattaagtaaggctggccagagacccaggggagggatgcatgccagccactccgcccaggcacc

SEQ ID NO: 213684 - DNA, 604 bp, Homo sapiens
ctcagtaatttataagaaaagaggtctgagtggcaggctgtacaggaagcatattgctggcatctttttccaggaaggcttcaggaagcttttactcatggttgaaggtaaagcaggagcaggcacttcacatggtgaaaaacagtaggaagagagggggatggggaggtgccacacactcttaatcagatctcacaaagacttttgcaaggacagaacaaagccatgaggaatatgcccccatgacccaaacaccttccatcaggccccacctccaacattgaggattacatctcaacatgagatttgggtagggacaaatatccaaactatattagcaggcataaaagctatggctcactatttaaaatattaccatttgtgattctgatagtgaccaccaaatataagtatttatatgttcaatatgggatacttcagttttctaaaagttagctaatttctcacggtcacacaactrttaataaattgctcacgcctgtaatcccagcattctgggaggttgaggagggcagatcacttgaggccaggagttcaagatcaacttggacaacatggcaaaactccatttctactaaaaagt

SEQ ID NO: 213685 - DNA, 585 bp, Homo sapiens
gatatgtttataggttttttttcttttcaaacctgaaaggtatttaaaagaaaacttgcaaattgtaatttttaatgcttagaatgtatttaatgtagtatataagaatctcttatgtataatgttcttaatattcttyatatttaaaatttttaacttattacactctttgcacttgtcaaaaactattttgcccaaaatcttaatagattataatttttgagttaataattgatagagtctggatatttgtccctgctgacatctcatgttgaattgtaatccccaatactggaggtggggcctggttgtgaagcaggatttttccctgacccctatgtggaactccaacagggtgcctttgttgctcagcccaccgctctcaacttcttgtgggaggcagcatgtgagccaggcaaaactggagtgccggagtgctagaatcagctggttgcttcggtgccagcgggatcaaactccactcactcagatctgctgcattccacccctcacaggagtgaccacacaggtgagtgaatgcaggagccagagcaagtgcttttgggtgctggcaggagtgaactc

SEQ ID NO: 213686 - DNA, 517 bp, Homo sapiens
gataccataacattttacatataaaagaaaacacacatattggaaatcgtaaagcacaataaaaataagcatcattgaattagtagacaagagaaaattgaatcctagttcagcagtgaggacattgaaaagcaacctgaatcttaagggaaaatgaaccacaaatacagaagattggtataatgtctgtttagaaacatgatcgaattcccctcctcaatccctgagatccttttccctactctggagagtatggcaactgtccctgcattcaaatgcatgcatgcacactagcagaagactagagatttattctctgaaggaagaaaaacagaaattgtctttactagasatatctaagccttacaggaggaggagtttctacagtaaattaaagaatttgtggaaaaatttattgactaaatattgtgactgctgatctttattctcggcaagctgaatagtattctctaagaagagtatagaaaattcaactctggggattgggccaaataaa

SEQ ID NO: 213687 - DNA, 634 bp, Homo sapiens
actacccttcaagataaagaaatcctgcaaatatggggcctcagaccatttgccctcaggtttacagaaaacatcaactgcaggatggtatcaaactgaatggttccttcctgaggccaagacactccttcctgcagatcattatttggccaaatctttgtgcaaagggctaaaggcattttttctttacagcctgaggrccaaagcagtcccagtgattcaggatacactccagaggagtatagactgaagatgatgaagatatttggttgcctattctcaaagaaagggaaatagacatccctcatgtcccttccctctttcagcaaaaacttggggtgtgaggagaaagaaaatgggcattcccatttatctcttttgtcttttttcccctgagtcctggtactcttagatggatgccacccatgtgtgccattgtggcctgcacctatgaagcagggagggcctagagaataggaattatgcacactcacctacgcctccatgttccctactgttgacaatgtttgggttccctggaccttatctatgccatggagcatggcctccttccatgaaatgggaccttcattgccaggaattagtcctgcccatttacatcatgcctggtgcc

SEQ ID NO: 213688 - DNA, 417 bp, Homo sapiens
agtagcttaacaatcaaccttttgaatttttttatctggcatttcagaaatttcttattggtttcgatccattgctggagagctagtgtgatcttttgggggtgttatagaaccttgttttgtcatattaccagaattacttttctggttccttctcatttgggtagactgtttcaatggaaatatctggaactaaagggctgctrttcagattactttgtcagactcttgctatgctttagaattttgaccctgccctagagatctgtggaacttttaacttgagggagataatctagggtatctgatggaagaaatttctaagaagcaaagcatttaaggtgtgacctgggtgctgtgctcatcaaagcactctgttttatgcgttcacaaagagatggtttggaattggaacat

SEQ ID NO: 213689 - DNA, 417 bp, Homo sapiens
agtagcttaacaatcaaccttttgaatttttttatctggcatttcagaaatttcttattggtttcgatccattgctggagagctagtgtgatcttttgggggtgttatagaaccttgttttgtcatattaccagaattacttttctggttccttctcatttgggtagactgtttcaatggaaatatctggaactaaagggctgctgttcagattaytttgtcagactcttgctatgctttagaattttgaccctgccctagagatctgtggaacttttaacttgagggagataatctagggtatctgatggaagaaatttctaagaagcaaagcatttaaggtgtgacctgggtgctgtgctcatcaaagcactctgttttatgcgttcacaaagagatggtttggaattggaacat

SEQ ID NO: 213690 - DNA, 548 bp, Homo sapiens
atgtagaatttgtggctattcatattaatatactacatttagaactttagtaatataaaaagaatgactccaagtgatgtcaaagtataattgaatttctatcaagactgaatggaaaagaatctcattttctaccttctttttagttcatcctcctcctgctctatttaattcttctccatttcaggacttaaccttatgatcatagttatcttttttttttttttttttaccctttactctcacwtcccacatactttatatataaataatctgttattaacaaggtttatttttagatttacagaaaaattagtgtagtagtttccatataccctaaacctagtttcccctattattaacatcttatattaatatgaaacattagatataattaatgtaccaatattaataaattattattaaataaaatcaataaagtatcatataccttttgttttcacctaatattctttgctggttctacaattctatatagaatattatatatagttatgtctctttaggttcttcttgactttggcagt

SEQ ID NO: 213691 - DNA, 548 bp, Homo sapiens
atgtagaatttgtggctattcatattaatatactacatttagaactttagtaatataaaaagaatgactccaagtgatgtcaaagtataattgaatttctatcaagactgaatggaaaagaatctcattttctaccttctttttagttcatcctcctcctgctctatttaattcttctccatttcaggacttaaccttatgatcatagttatcttttttttttttttttttaccctttactctcacatcccacatactttatatataaataatctgttattaayaaggtttatttttagatttacagaaaaattagtgtagtagtttccatataccctaaacctagtttcccctattattaacatcttatattaatatgaaacattagatataattaatgtaccaatattaataaattattattaaataaaatcaataaagtatcatataccttttgttttcacctaatattctttgctggttctacaattctatatagaatattatatatagttatgtctctttaggttcttcttgactttggcagt

SEQ ID NO: 213692 - DNA, 575 bp, Homo sapiens
ttgttccagtgtgttgcacataaggctgacaaactgatccatgtaaagcattgaacaatcataatttctgcttactctattgatgatttcctgccacacacyacctaattttcttacctgtcgccatttcaattttaactgaaatgtgtttggtagcaaaaagtccaatgagatactctaaacaggggagggcattgttccatgattatgtaagttcaggaagtgtatacagcgtgtatccttcttcgaaaacaatggatcatcacatatgaaagcccacaatggcctgcaataaagaaatttgtttagttttgaccagattttccaaactcattggaccatacaattcgttttagtgcaaacaattccttaatatgatgcatgcttctgttcagggtgttccttctgcctggcttaaacttgttgcctctgcttccctgtgtaattgacagcatctatctcttcttgaaaacttatctcaaatgctccctcttttacaaatatcatgttgaatcactatcaaacacaggtctccttgatgaaaactttgtcataattcttgagtaactttctta

SEQ ID NO: 213693 - DNA, 575 bp, Homo sapiens
ttgttccagtgtgttgcacataaggctgacaaactgatccatgtaaagcattgaacaatcataatttctgcttactctattgatgatttcctgccacacactacctaattttcttacctgtcgccatttcaattttaactgaaatgtgtttggtagcaaaaagtccaatgagatactctaaacaggggagggcattgttccatgattatgtaagttcaggaagtgtatacagcgtgtatccttcttsgaaaacaatggatcatcacatatgaaagcccacaatggcctgcaataaagaaatttgtttagttttgaccagattttccaaactcattggaccatacaattcgttttagtgcaaacaattccttaatatgatgcatgcttctgttcagggtgttccttctgcctggcttaaacttgttgcctctgcttccctgtgtaattgacagcatctatctcttcttgaaaacttatctcaaatgctccctcttttacaaatatcatgttgaatcactatcaaacacaggtctccttgatgaaaactttgtcataattcttgagtaactttctta

SEQ ID NO: 213694 - DNA, 575 bp, Homo sapiens
ttgttccagtgtgttgcacataaggctgacaaactgatccatgtaaagcattgaacaatcataatttctgcttactctattgatgatttcctgccacacactacctaattttcttacctgtcgccatttcaattttaactgaaatgtgtttggtagcaaaaagtccaatgagatactctaaacaggggagggcattgttccatgattatgtaagttcaggaagtgtatacagcgtgtatccttcttcgaaaacaatggawcatcacatatgaaagcccacaatggcctgcaataaagaaatttgtttagttttgaccagattttccaaactcattggaccatacaattcgttttagtgcaaacaattccttaatatgatgcatgcttctgttcagggtgttccttctgcctggcttaaacttgttgcctctgcttccctgtgtaattgacagcatctatctcttcttgaaaacttatctcaaatgctccctcttttacaaatatcatgttgaatcactatcaaacacaggtctccttgatgaaaactttgtcataattcttgagtaactttctta

SEQ ID NO: 213695 - DNA, 575 bp, Homo sapiens
ttgttccagtgtgttgcacataaggctgacaaactgatccatgtaaagcattgaacaatcataatttctgcttactctattgatgatttcctgccacacactacctaattttcttacctgtcgccatttcaattttaactgaaatgtgtttggtagcaaaaagtccaatgagatactctaaacaggggagggcattgttccatgattatgtaagttcaggaagtgtatacagcgtgtatccttcttcgaaaacaatggatcatcacatatgaaagcccacaatggcctgcaataaagaaatttgtttagttttgaccagattttccaaactcattggaccatacaattcgttttagtgcaaacaattccttaatatgatgcatgcttctgttcagggtgttccttctgcctggcttaaacttgttgcctctgcttcyctgtgtaattgacagcatctatctcttcttgaaaacttatctcaaatgctccctcttttacaaatatcatgttgaatcactatcaaacacaggtctccttgatgaaaactttgtcataattcttgagtaactttctta

SEQ ID NO: 213696 - DNA, 569 bp, Homo sapiens
aatgaaatagcaagttaaacctagccagattaacaattacattaaacataaatggactaaacatactaattaaaagacagagattgtcagactagataaaataaaataacattatttgcatactgtttacaagagatacatrtaagtataaaagcacaaatagtaaaaatgaaataatggacaaaatataacatgcaaacacttaaatcaagtcttgagtgcctatgttagtatcagacaaagacttcaagataagaaatattaccaaagataatgagggacattttatagtaataaaaggtcattttattaagaagacataaatatgcttgcaccaaatgacagattttcaaaatacataaaagagaagctgactgatcctaagaaaatatataaaattcccaaaaattgcaggaaattttaacttttctattgataattctctcaatattaactgatttaggagtagaaagaaaataagcaaggatagagaaaatgtaaacactatcaaccaatataaccaaattgatacatatagatatatagctatggtaaattatacttaaaaa

SEQ ID NO: 213697 - DNA, 569 bp, Homo sapiens
aatgaaatagcaagttaaacctagccagattaacaattacattaaacataaatggactaaacatactaattaaaagacagagattgtcagactagataaaataaaataacattatttgcatactgtttacaagagatacatataagtataaaagcacaaatagtaaaaatgaaataatggacaaaatataacatgcaaacacttaaatcaagtcttgagtgcctatgttagtatcagacaaagacttcaagataagaaatattaccaaasataatgagggacattttatagtaataaaaggtcattttattaagaagacataaatatgcttgcaccaaatgacagattttcaaaatacataaaagagaagctgactgatcctaagaaaatatataaaattcccaaaaattgcaggaaattttaacttttctattgataattctctcaatattaactgatttaggagtagaaagaaaataagcaaggatagagaaaatgtaaacactatcaaccaatataaccaaattgatacatatagatatatagctatggtaaattatacttaaaaa

SEQ ID NO: 213698 - DNA, 569 bp, Homo sapiens
aatgaaatagcaagttaaacctagccagattaacaattacattaaacataaatggactaaacatactaattaaaagacagagattgtcagactagataaaataaaataacattatttgcatactgtttacaagagatacatataagtataaaagcacaaatagtaaaaatgaaataatggacaaaatataacatgcaaacacttaaatcaagtcttgagtgcctatgttagtatcagacaaagacttcaagataagaaatattaccaaagataatgagggacattttatagtaataaaaggtcattttattaagaagacataaatatgcttgcaccaaatgacagattttcaaaatacataaaagagaarctgactgatcctaagaaaatatataaaattcccaaaaattgcaggaaattttaacttttctattgataattctctcaatattaactgatttaggagtagaaagaaaataagcaaggatagagaaaatgtaaacactatcaaccaatataaccaaattgatacatatagatatatagctatggtaaattatacttaaaaa

SEQ ID NO: 213699 - DNA, 569 bp, Homo sapiens
aatgaaatagcaagttaaacctagccagattaacaattacattaaacataaatggactaaacatactaattaaaagacagagattgtcagactagataaaataaaataacattatttgcatactgtttacaagagatacatataagtataaaagcacaaatagtaaaaatgaaataatggacaaaatataacatgcaaacacttaaatcaagtcttgagtgcctatgttagtatcagacaaagacttcaagataagaaatattaccaaagataatgagggacattttatagtaataaaaggtcattttattaagaagacataaatatgcttgcaccaaatgacagattttcaaaatacataaaagagaagctgactgatcctaagaaaatatataaaattcccaaaaattgcaggaaattttaacttttctattgataattctctcaatattaactgatttaggagtagaaagaaaatmagcaaggatagagaaaatgtaaacactatcaaccaatataaccaaattgatacatatagatatatagctatggtaaattatacttaaaaa

SEQ ID NO: 213700 - DNA, 502 bp, Homo sapiens
catcatgggccaaaagtaccccactgccttgaagagaaagaccaagtcctggcgagattaattatcttctgactaaagagctcttgggccctgaaatccaccagtaatacccaagaagcacactgtggaaacttgggttctgagacrtactggtttcaggagagactcagcacattcccacctagctatggtgaaagactgtttctgtttgaggaaagcagagggaaaagtcttgcaccctaggtaacagtttggctacaatggggtagagtaacaagcagctcttggagtcccaagttcaggaataggctcttgggtggcatttctagacctatcctaggctagaagggagcccattgcccggaatggtgagtcctaggcctggcagcattcacaagctgagagaagagcccctgggctttaagctaacattggcagtggcctggcagaaccccccataaaccagtagtggttctggccacaggaagaggctcctctgcct

SEQ ID NO: 213701 - DNA, 302 bp, Homo sapiens
tacctggaaaaccttcctgagaagaacgrggacaaacaagcccagactatgaagactacaataaatatctaagtcttcaattctcagatgctgatgagcatctacaagcattaacactatccaggaaaacatgaccttaccacataaactgaataaggcaccagggacaagtcctggagaaacagagatatatgacatttcagacagagacttcagagtagttttgaggaaacacaaagaaggaattcagaatctatccaataaatttaataaagaaattgaaataattaaaaagaaccaag

SEQ ID NO: 213702 - DNA, 616 bp, Homo sapiens
taaactgtttatatgagttcaccttttttcagattccacatataagtgagatcatgcagtgcttgtgtttctgtgtctggcttatttcacttagcataaagtcttccaagttcattcatgttgtcataaatggatttccttttttaaggcttaataatattccattgtatatatattccatacatatgtgtgtgtgtgtgtgtgtrtgtatatatatatatatatatatatatatatatatatatatatatatatgtatttcatctgaatttcatctgatgacttacacttaggttgtttccaaatcttggcaattgtgttgcagtgaaatgagaatccagatgcatctttgagatggttttgtttcctttggatatatgttcagaagccagaagtgagattgctggatcatatgagttttatttttaattttttgagggattcgtatactgtgttccattattactgtataatttacatgtccactgacaatgtacatgggtttcctttactcctcatctttgtcaacatctgttatcttttgacttcttggtaatagccatcctaacaggtgtgaggtgatagctcattgtggttttgattgacgttaccctta

SEQ ID NO: 213703 - DNA, 616 bp, Homo sapiens
taaactgtttatatgagttcaccttttttcagattccacatataagtgagatcatgcagtgcttgtgtttctgtgtctggcttatttcacttagcataaagtcttccaagttcattcatgttgtcataaatggatttccttttttaaggcttaataatattccattgtatatatattccatacatatgtgtgtgtgtgtgtgtgtatgtatatatatatatatatatatatatatatatatatatatatatatatgtatttcatctgaatttcatctgatgacttacacttaggttgtttccaaatcttggcaattgtgttgcagtgaaatgrgaatccagatgcatctttgagatggttttgtttcctttggatatatgttcagaagccagaagtgagattgctggatcatatgagttttatttttaattttttgagggattcgtatactgtgttccattattactgtataatttacatgtccactgacaatgtacatgggtttcctttactcctcatctttgtcaacatctgttatcttttgacttcttggtaatagccatcctaacaggtgtgaggtgatagctcattgtggttttgattgacgttaccctta

SEQ ID NO: 213704 - DNA, 616 bp, Homo sapiens
taaactgtttatatgagttcaccttttttcagattccacatataagtgagatcatgcagtgcttgtgtttctgtgtctggcttatttcacttagcataaagtcttccaagttcattcatgttgtcataaatggatttccttttttaaggcttaataatattccattgtatatatattccatacatatgtgtgtgtgtgtgtgtgtatgtatatatatatatatatatatatatatatatatatatatatatatatgtatttcatctgaatttcatctgatgacttacacttaggttgtttccaaatcttggcaattgtgttgcagtgaaatgagaatccagatgcatctttgagatggttttgtttcctttggatatatgttcagaagccagaastgagattgctggatcatatgagttttatttttaattttttgagggattcgtatactgtgttccattattactgtataatttacatgtccactgacaatgtacatgggtttcctttactcctcatctttgtcaacatctgttatcttttgacttcttggtaatagccatcctaacaggtgtgaggtgatagctcattgtggttttgattgacgttaccctta

SEQ ID NO: 213705 - DNA, 542 bp, Homo sapiens
caggtctttttatgtatcttgggtaaataaccaggagtaaaattactgggtaatatggtaagtattawgttaaacttcaaaagacactgtccacatgttttccaagacgactgcatcttgcattcccaatagcaatgcatgaaagttccagttgccgcatatccttgttaacacttgaaatagtcagattttttcatgttagccatttcagttaatgtgttttggtatcacattatgggtttaatttgcatttccctagtgacaagtgtatttatttgccaaacatatgccctcttcaagtatttcacccaagcttattgtcttgtcttcctatttttgagctataaatgttctttacatatgttggatgtagacattgcaaatattttcacccagtctatggtttgacatttcattttttaagtgcttttgaagaaaaaaatatttcaatttctataaatttcaatgtattattttttattgtatagattttgcgtttatatgattgttctattagaaacaaaatgcctaactcaaggtca

SEQ ID NO: 213706 - DNA, 529 bp, Homo sapiens
gggtaaataaccaggagtaaaattactgggtaatatggtaagtattatgttaaacttcaaaagacactgtccacatgttttccaagacgactgcatcttgcattcccaatagcaatgcatgaaagttccagttgccgcatatccttgttaacacttgaaatagtcagattttttcatgttagccatttcagttaatgtgttttggtatcacattatgggtttaatttgcatttccctagtgacaagtgtatttatttgccaaacatatgccctcttcaagtatttcacccaagcttattgtcttgtcttcctatttttgagctataaatgttctttacatatgttggatgtagacattgcaaatattttcacccagtctatggtttgacatttcattttttaagtgcttttgaagaaaaaaatatttcaayttctataaatttcaatgtattattttttattgtatagattttgcgtttatatgattgttctattagaaacaaaatgcctaactcaaggtcacagagat

SEQ ID NO: 213707 - DNA, 638 bp, Homo sapiens
tttaaaacatttattttgcatcctttgtcaggtaatttgtatatctctgtttggggctagttactggaaaattattgtgttctgttgatgatgtcatgttttcttggcatttcatgtttcttattgctttgtgtagatgtctgaacatttgatagagcagtcacctcttcaagaatttatagattggtttcattggagaaagacctttacctatrggtgggtgtgaggatgctggctggataaggtgtagcaatcctggctctagtaggggtgcagagacatagtctgcatgaagtttcattcactgagatcagcattgtcaaaggttacaggtcccaggctgtggatgtatgcagcagagagtgttgttggaatatttggtggcaaagcctgctgggatcctcttgatatccttttctcccacagaggaaattgtggccaagagtttctctcttagcatggctcaagctcgctcctgggtgcactttaagtggcagtagtgccagtatctgatgtatagcacccatggagcagccttggagctgaggtctggattataagtacacataaagggacttcaggatccgaggtggtagttgcaccagtccctggggtacaagtacacctgctgcagtgtc

SEQ ID NO: 213708 - DNA, 638 bp, Homo sapiens
tttaaaacatttattttgcatcctttgtcaggtaatttgtatatctctgtttggggctagttactggaaaattattgtgttctgttgatgatgtcatgttttcttggcatttcatgtttcttattgctttgtgtagatgtctgaacatttgatagagcagtcacctcttcaagaatttatagattggtttcattggagaaagacctttacctataggtgggtgtgaggatgctggctggataaggtgtagcaatcctggctctagtaggggtgcagagacatagtctgcatgaagtttcattcactgagatcagcattgkcaaaggttacaggtcccaggctgtggatgtatgcagcagagagtgttgttggaatatttggtggcaaagcctgctgggatcctcttgatatccttttctcccacagaggaaattgtggccaagagtttctctcttagcatggctcaagctcgctcctgggtgcactttaagtggcagtagtgccagtatctgatgtatagcacccatggagcagccttggagctgaggtctggattataagtacacataaagggacttcaggatccgaggtggtagttgcaccagtccctggggtacaagtacacctgctgcagtgtc

SEQ ID NO: 213709 - DNA, 638 bp, Homo sapiens
tttaaaacatttattttgcatcctttgtcaggtaatttgtatatctctgtttggggctagttactggaaaattattgtgttctgttgatgatgtcatgttttcttggcatttcatgtttcttattgctttgtgtagatgtctgaacatttgatagagcagtcacctcttcaagaatttatagattggtttcattggagaaagacctttacctataggtgggtgtgaggatgctggctggataaggtgtagcaatcctggctctagtaggggtgcagagacatagtctgcatgaagtttcattcactgagatcagcattgtcaaaggttacaggtcccaggctgtggatgtatgcagcagagagtgttgttggaatatttggtggcaaagcctgctgggatcctcttgatatccttttctcccacagaggaaattgtggccaagagtttctctcttagcatggctcaagctcgctcctgggtgcactttaagtggcagtagtgccartatctgatgtatagcacccatggagcagccttggagctgaggtctggattataagtacacataaagggacttcaggatccgaggtggtagttgcaccagtccctggggtacaagtacacctgctgcagtgtc

SEQ ID NO: 213710 - DNA, 493 bp, Homo sapiens
caaggtccttgtcagtaacagtgataactccaatagcagacgctgagaaaagtagggcggaacacctctatgacttctaagtagaagtttcatactatgtttaataatggctgcaagccttgtctgatttgggataaaaaaaagcttgagaaggtggcaaagatttcagrtctctttaggcctttgttttcaggttgagagtgctgcctactgtttaagggcctgtgtctgtaaagaaaagtaaaagaggtctctctctctctatgtctctcaacttaactcttctgatggttccagtgtgtgactcattcattcatccatgaaacagatgtacaaggtacattagcatacattaggcacccattccagaaaccttgacatgttaacatccaataaaaatacgggttgccacagtgctgttctatcctgtgtggtcttcaggcagcaatgagctttgaaggtatctgccttctggtttaacctaatacctaga

SEQ ID NO: 213711 - DNA, 561 bp, Homo sapiens
taatgtgtagaacattaaactgttattatataccacagatataccatttaataatatgtacatatattttattactgattttaaaataaataatttcattagccaaatcccactagaaaaacttttggtaattttcttgcagggtcaaaataattttttatatgctaatcacctaggtgacagagaaaatgtttatgatgaaacataaatctaaaatgctttaagatgaaaaatgtatcccttgagcacttaaaatacacaattttttaaaactagttaggcttcaaaactgattcgatttttttcacattttgtgatctttccaaaataagctcctttatttccaatggaaagaagaaaaacatgtaaatgttaaaaaactattaaaagcaaaagacatgtttctcttaaagttgactttaattttagcatgttacctgctgtactgtacatttcattgaacataaaagcttagcaaagacaggtttcaaagctcctaactcaaactgycatgagaaattaaatattagaggaaaaataaatgaaaattaaagcaattac

SEQ ID NO: 213712 - DNA, 627 bp, Homo sapiens
gagttcattgagttcacatgaatttttgttaattctttttaaaatgattaacatttgaatagtatgtgttgatatagcatttctacattgcctttataatttaaaatatatttattatatctgatgcactttatgagcagacattaaagcatgctcaatgaacytacagatcattttaaattcagagtcttaataactgcatgctttaatatcttctcataagaaaatgtgtcaatgtctgaatatgcagctgctttttaaaaaataagtaaatataaagcaaaaaaaaaataaatgaacataaatgctttgaaaatatccttaaacattaaagaaaaatattgaacctgagctctttggaaaaatgcagagaagctgtactctttccatttggttcatggttggaaaaggcttggagaatgactgagaagcttccctggggctggaagaacatcaggcagaagcctctagactagggggctgaagcaagtgcactgagaagacccatattagagtctccttgctattcttgaggaggactctctcctgaggtactcccctgggggaagtcttgcggcttccagcctgtgcaggctggtcagagaatcacccagtgtcttgaagacc

SEQ ID NO: 213713 - DNA, 627 bp, Homo sapiens
gagttcattgagttcacatgaatttttgttaattctttttaaaatgattaacatttgaatagtatgtgttgatatagcatttctacattgcctttataatttaaaatatatttattatatctgatgcactttatgagcagacattaaagcatgctcaatgaacttacagatcattttaaattcagagtcttaataactgcatgctttaatatcttctcataagaaaatgtgtcaatgtctgaatatgcagctgctttttaaaaaataagtaaatataaagcaaaaaaaaaataaatgaacataaatgctttgaaaatatccttaaacattaaagaaaaatattgaacctgagctctttggaaaaatgcagagaagctgtactctttccwtttggttcatggttggaaaaggcttggagaatgactgagaagcttccctggggctggaagaacatcaggcagaagcctctagactagggggctgaagcaagtgcactgagaagacccatattagagtctccttgctattcttgaggaggactctctcctgaggtactcccctgggggaagtcttgcggcttccagcctgtgcaggctggtcagagaatcacccagtgtcttgaagacc

SEQ ID NO: 213714 - DNA, 647 bp, Homo sapiens
aaagaaagcaagattattttattatgcatcccctaaatattaaccgttttaatattagtgttgtataatattaaattgtaaagtagtacatgccttaccattaatacatacatggtgactctgaattcagtggataataaatgcaaaatttcagtcagtacttatagaataaaatgttttccttcttatataatatttagggtctacgaattacctccaattatattaatgtcagcaaaagaatgttggaaatctataatcaggtaagataattttcaataccctaatgctgtatacatctttaatacaacctaattatatacaaaaaataatgactgaaatttataggctaacaccacaacaatacgtattaatatttaatctgtaagaatttaccagatamaagttcactttgaagaattatggatttttgtataaagggaaaatctatttattatttgctttgtttcctcttctggggataactggaaatatttcatggcctggagtttcaatccatagccattatatactctaatcaatgtgggagctaatattctatagtgaactaagaatcattatctccttttaataaacaaaaaagaaaaatgactgaagacactgtattttcttccaaataaacatga

SEQ ID NO: 213715 - DNA, 538 bp, Homo sapiens
atcaccatctacatcaggtcagctgtctcagtttggggcaagtttatacgggcaacaaagtaagaattttgtatttattctgggatactttatttaaagagaaaaataagtaactaccaaataaagaacaaccagtacttcctttgtgggtttattgtatgacttaaaaggaaaaatgtttaattttcagagttttattttacttacatagcaraacctcattatttcagaccttattgatcctatggttgctattacttggatatagcatagattgaaatttatttcaacatcttttacatctgtaaattttttgcagtatttttgaagaatttgctaaactaaaaatagacattctctgtgttttcaattaaaggaagttaaaagcttttttagtttatttgactggctactctgtgtgtgtgtgtgtgtgtatgtgcacgcctgtttattaagtaaactcattacttagcagtttgtaaaatgttctttgtttcacaagtatttcttaaatatttcttcttttgctttagctcag

SEQ ID NO: 213716 - DNA, 495 bp, Homo sapiens
tagagtgtacttgggagatccacacagctattccacaggtaaagattctgtggcactcctctaaagatccagccagatgttgagactctcagctgattcgagcacagcagccacttctcatagttgtggaagccacttagctccatccatgtttcttgtcttatacattcttagcacctagaaggcaaagcctgttcctccgccaggtgtataacttgtcctcattttcatatatctcgtcattctctcagactgaactattgtaacatttatacccacctgactccccaccactgccaccaccaaacacctggctgagtctcataygttatttaattcatatactatcttctgtctcctccaggaaaatttttctgcttccagactcactctattcccaagtctgagttagtgtggtccctcctacaagcagtcaagcacgctatgtctactgcatgtaaacaccttggtcatagcacttatttatttttaagt

SEQ ID NO: 213717 - DNA, 572 bp, Homo sapiens
tgggatgtgccacaagcttttaaacgaccagatctcatgagcactctactatgagaacagcactaggagaaactgccaccatgattcgatcacctcccaccaggccctcccttcagcattggggattaatagttcaacatgagatttgcaggggatacagatccaaaccatatcatatgccctctacctttccattccacagcacatgttattaattggatgaatgtcaatcctatctatagatttggaagtcagaaaaacaaaataactaagatatgtcttttattgaatataataaattagtaaacaagaaaatgggtttcaaaaatctttagggatttcttcttttatgaggttctatcgacagataatcacttcactcacacaygcacatgcatgcacacacacacacaaattccatgtaaataaattttactgaacaatgaatagaattacagtagccataggttaacataaagctagtttgtaattatgtcattatatttcaacataatctattactatctactttccttcactaaagtaaaaatttctagatggtctcattgtcc

SEQ ID NO: 213718 - DNA, 595 bp, Homo sapiens
agtagaatggtggttgctaggggcttgagggtaagtggggagactttgctcagagtacaaagtttcagttaggcaggatgaataaattctgtagatctattgtatggtaactatagttaatgacactgtattgtatacttaaaaattgttagcaaagtagattttaatgctttcacaacacacatacaaacacagatacacgcaaaggataagcatgtgaggtgatggatatgttaattagtttgattgtggtaattattccacaaagtgtatacatatatcaaaatatcacattgtatgccataattacaatttgtgtttgtcaatcatacctcagtaaagctggaaaaattaatgtaaaatacatttttaaaaaaggaagataaaagagaagtccagagtgaggatsacattattctttgtttataagaaaaaattagcataaatcagaaaatgtttattgttaaattaaattcaatgaaagcaagattttttatgcatcttagtaataaatatgcatcatatgtataatgatcagagaaaataataaaaaaattgttcttgatgtgacattgtttttaaatcttatttatgc

SEQ ID NO: 213719 - DNA, 386 bp, Homo sapiens
atattaagcactaagtcactgagattccagaggaacacacagataataacttctcccttycgaagaagtaatagtgagaacaatgcattagaagtcgagtttaatttcaagtgttagtacctttacttgctacactaccttcagttatatacttaagccactaaatcttagtttcttttactttttgatagtaataacaatattctatcatcttactcacaaggaaactaaaatgaattaaaattaaatatcatgtatagagaaataagcacatgagctagcatattataaaagctcagtaagttgtagctattgtttttattggtaataacaaaacttccttgtgagattgatattgttatgcaaatgcttttaattagtattcc

SEQ ID NO: 213720 - DNA, 634 bp, Homo sapiens
actaacctgtacattgtgcacatgtaccataaagcttaaagtataataataataataaatttaatatattcctaagaattgaaatcatatgaatcatgtattttcaccaataaaaatagaatcaatctataaaatcggtaacagaccgataataccaaagacctgaaaattaaacatcacatttgaaaacaatctgtaagttaaaaaggaaatatcacagaaaattaaaatatatatttagctgagttaaatacaaattaaaaatatctgccaattgtagctaaagcagtgctttgagaaaaaatgatagagatagatgcttttattgaaaaataaaatgtactcaaattaatgatctaatttctcaatataacaaaccactaaaggagaagcaaactaaacccagaatgagcagaagtaaaaggaaaaaagaatagtamctattagaacagaactcaataaaattgaaaacagaaaaataacaaagttaattaaacaaaaagagtctctttgaaaagaccaataaaatcaataaaagaccaacaaaatcaaagctttagaaaatggaaggataaaaaagaaaaaagaccaaatcaccattatccaaaatgaaagaatggtagcttatagcacc

SEQ ID NO: 213721 - DNA, 445 bp, Homo sapiens
attattaaccaatgacttaaaattgaaataaaaatcatttctccccaaaatgatctctaggctcaaagcaatttcacataaaatcattaaagttgggtttctgactagtttttattaaaactcacttggaaactcacaaataacaaggaacattttgatggaaaagaagaaagttactggatttatgctactagttatcaaagaacctgatataatattaattcatacattttgctattgtcattatgacatttaaactgatcaataaaacaaaatgaagaatgtggaaacagtacaacacatayaaattcagcaccagagcaggcccacttttcaaaagatttaggtattgaataacctaaagtcttagaggataagaggcatactgctgttttttataaatgaacaagtcccaagaacaagaaaagaagaatagaactaaact

SEQ ID NO: 213722 - DNA, 445 bp, Homo sapiens
attattaaccaatgacttaaaattgaaataaaaatcatttctccccaaaatgatctctaggctcaaagcaatttcacataaaatcattaaagttgggtttctgactagtttttattaaaactcacttggaaactcacaaataacaaggaacattttgatggaaaagaagaaagttactggatttatgctactagttatcaaagaacctgatataatattaattcatacattttgctattgtcattatgacatttaaactgatcaataaaacaaaatgaagaatgtggaaacagtacaacacatataaattcagcaccagagcaggcccactyttcaaaagatttaggtattgaataacctaaagtcttagaggataagaggcatactgctgttttttataaatgaacaagtcccaagaacaagaaaagaagaatagaactaaact

SEQ ID NO: 213723 - DNA, 554 bp, Homo sapiens
tggtttatccattcacccatcgatggacacctggccacttccacctcccagctactgtgaatagtggtttcgataataacccattactgtgaataacgtgtgcaaatatctgcctgagggcctgctttcacttcttttgtatatatccccagaagtggaactagctggatcatayggtaattgtatttttaattatttgaggaacaatgatggcttaaaaaattttattgatcaatgtaccattaggtgggacgcttaaattaaacaagctattagctctgcactgccagtggaagcttttgatggcgaccagagctcctcgggatgttcaggagtgaccgtccccgagtgacttaggagggtcacataaaatgtgtttcatgaagtcacatctgctcattctagaaggctgtatgcataatattcaccccaaagtataagagccaatcaaatttaggtaagttaatatgctttgaatacttagtctaagtatttggataacatgtatttaagtctgagctctaaatttgttggggaaaaaattataaggatgc

SEQ ID NO: 213724 - DNA, 493 bp, Homo sapiens
ggcacatagaagccttctatcagtagacgtttgtaggccgtttggggatgtgcattgcagccagggcccaatgctaaaattatctgtcattagttaactgggtcttggtcattagaaaccaggaggacatccctttatgaaaacaaagtcaccaagaccaagcacaggggctcatgcgtataatcccagcactttgggaagccaaggcaggaggaacrcttgaggccaggagttcaagaccagcctgggcaacatagtgagatcctatctctaaaaaaaaaatttttttttttaatttgctgggcatggtggcacacatctgcagtctcagctactcaggaggctgagatgggaggatcactagagcataggagtttgaggctgcagtgagctatgattgcaacactgcactcgagcctgggtgacaaagggagaccctgtctccaacaaaaacaaaaacaaaggtacaaattccaggaccctggctggcaat

SEQ ID NO: 213725 - DNA, 599 bp, Homo sapiens
atagatctttcccattaacataatattaactgaaaaagggactgaggcatgagtccccattgactgaggttgatgcagcagtttgaggacacgcccrggaggaacatcagccacaggagcatctgtgacctgtgagtttccaaagagggtttggggacttcactatttaaaggggaaagagcaagcaggagggataaaggaagggagggtaggcagagaggcaaatggtcccattctctcaaggctctgattagcgatcaataaatctacattttacatgtcaatgaggcatttgtctccagctcaggaaatctacattttacataaggtaaagtaaaacatgtgaaaaaaggagtaaagagtccatgatgcattcatcttgagctcagtaaatctgcattttacataagataaacatatgaaaacagggagtagaggagtccatgttgcgttcatctcaagcccagtaaatctacattttacataagataaagtaaacatgaaaagagggagtaaagagtccatgatgcattcatcttgagctcagtaaatctacattttacgtaggataaacatgtgaaaagagtagaggagtccat

SEQ ID NO: 213726 - DNA, 591 bp, Homo sapiens
gactgaggcatgagtccccattgactgaggttgatgcagcagtttgaggacacgcccgggaggaacatcagccacaggagcatctgtgacctgtgagtttccaaagagggtttggggacttcactatttaaaggggaaagagcaagcaggagggataaaggaagggagggtaggcagagaggcaaatggtcccattctctcaaggctctgattagcgatcaataaatctacattttacatgtcaatgaggcatttgtctccagctcaggaaatctacattttacataaggtaaagtaaaacatgtgaaaaaaggagtaaagagtccatgatgcattcatcttgagctcagtaaatctgcattttacataagataaacatatgaaaacagggagtagaggagtccatgttgcgttcatctcaagcccagtaaatctacattttacataagataaagtaaacatgaaaagagggagtaaagagtccatgatgcattcatcttgagctcagtaaatctacattttacgtaggataaacatgtgaaaagagtagaggagtccatgaygcattcatctcgagcccagtagatctac

SEQ ID NO: 213727 - DNA, 438 bp, Homo sapiens
ctttctccctccctttaccttgagtctgtaggtgttgttacatgtgrgatgggtctcttgaagatagcagaaagttggatcttgtctctttttattcagcttgccattctgtgtctttttaatggggcgtttagccaatttacattcaagagtagtattggtatgtgagattttgatagtgtcattgtgtggttagttgattattatgtagacagggagataggctacactcttttcaatctggttccctgaagggaggcacacacatctcctgtgctagcccacagacacaagcatctcacccctctcagtgctctgagatatgggctccaccccagattgggtgctggccattgatcttggcttggcactccaaagctgtgtgctgaagccctggggcacggggaccaactctagactctatcctctagactcttg

SEQ ID NO: 213728 - DNA, 578 bp, Homo sapiens
gagatattatgggaagatcatggggacctttgtcttctattctcttcttgaccactggcttacacacatatttccaataaacctttttttacccatgaaatgtgatgtagaatttttataaaccaataatccaggacagatagacacccagggatcyacctggcataaaaatgcaccctcacttcttttgcttgaaaatatttacgaaggtgattcttcttcaagttttttatactggatttatatgtgggcaatgccggtaaagtgtgcttttcttcttccaaaaagtaacattttgagatgatcaaatggaagtggcctattctatgctcttataagcctgggagaattctgtttttctgttgttataattgacttattggggtttgaaggtgctaagcatgggaaaacttatgttcctgaataagatattaaatttcttagctttggttctttttagaagatacagttaaactgcagggaagtgatttttcaaattatgccatataaggtgattttagtggtctttaaaacacatgtggtagattttaaatgcctcaaataatctagacttgtga

SEQ ID NO: 213729 - DNA, 568 bp, Homo sapiens
attaaaaccagtggttggctttgggccaggtacagtggctcacgcctgtgatcccagcactttgggaggccgaggtgggcagatcacttgaggtcacgacttcgagaccagcatggccaacatggtgaaaccycgtctctactaaaaatacaaaaattagccgagcatgatggtacatgcctgtagtcccagctactccggagctgacgcaggagaatcacttgaacccaggaagcagaggttgcaataagccaagatggagccactgcactccagctggggaaacagagtgagactccatctcaaaataaatacataaataaataaaaatagaaataaaaaaaccctgaaatgagatactttatctcattttagcaatcctataatatttctttatgacgacaacatgtattattaatgctgatatatctgaatgctcacagtaatcaggcactgttataaacatcttacatgtcctgattcatttactcctcacatcaatcttccctatgagttccataaattcatgttaatattaattgaatagatgcacaggcttagtttgagt

SEQ ID NO: 213730 - DNA, 568 bp, Homo sapiens
attaaaaccagtggttggctttgggccaggtacagtggctcacgcctgtgatcccagcactttgggaggccgaggtgggcagatcacttgaggtcacgacttcgagaccagcatggccaacatggtgaaacctcgtctctactaaaaatacaaaaattagccgagcatgatggtacatgcctgtagtcccagctactccggagctgacgcaggagaatcacttgaacccaggaagcagaggttgcaataagccaagatggagccactgcactccagctggggaaacagagtgagactccatctcaaaataaatacataaataaataaaaatagaaataaaaaaaccctgaaatgagayactttatctcattttagcaatcctataatatttctttatgacgacaacatgtattattaatgctgatatatctgaatgctcacagtaatcaggcactgttataaacatcttacatgtcctgattcatttactcctcacatcaatcttccctatgagttccataaattcatgttaatattaattgaatagatgcacaggcttagtttgagt

SEQ ID NO: 213731 - DNA, 395 bp, Homo sapiens
acaaatagatcaggtccacaccacttggtagttatattttattggacaagataaataataaacagatatatgagtacataaataatgaaatttcaagtgatacatgacataaagaaaaatataaaagtaggggaaagtagaatcagaagaagtgcagttttaataaggtagtcaaggaaggcctttctgagagggtggcatttgagcagatgtctagaagacatgctaaagcaaactgtgctactatttgagaagcctccagaagataaatcacgcttccctgtgcgggaagtgtgtctgaggagtagcaaggaggtcagtgtaattgaagcacatagaaagaaagagaaaaagagawactgaagttaagagtgatagtcaaacataagattaca

SEQ ID NO: 213732 - DNA, 548 bp, Homo sapiens
cctccaataagaaggagctttcctcaacagaccaaggtacatattgggtagaatgaaagatttttaaaaattgagtgttgaatatgtaagtatcttccccaaagagaacttgaggtccagaaacagaaataatgtgttatgcaatttttagtgttctgcagactttgaggcttaggaaatatctgcttatcaaaaagtttgttgcctgaatatttaccttaaacactaattggtgtgaactttttctgatgccatgatgcctaaacaaatactatgaacagaagaagaaagagtccttattttgaatttctacagttagatgaatcaaggagattgtgtstgctggaattagatggtgtgcattgtcaaaataaaagactgcatatttaaatgcaagcaggaaccagactaatagtatgtaggtatggaaatggccttctgggaaccagtgagtacatgattatctaaatggagcactctctaatcagctccagttcattgtagccatgaataaattattatgaagacccacttatagactggaattc

SEQ ID NO: 213733 - DNA, 631 bp, Homo sapiens
catgtattataacgtgtaatccattttctctaacaaagccacttcagtgaaggctatttggttagattttgacaggaaacaaagggtttgaatgaagaaattttaaagataggcctccttacagaattatatgcagggttaagaaaaaataaaaaacaaataccaacaaaaacaagagcactgtatccatagctaacaacaatctgaagtccttactacatctatggttgaatgggcaagaagagtaaaccatatcatcagagcacttgagattgaaaccatggagaagagggcatctgctgggggtgggagttatttagaaattcaacaaatacttaaggaaggtgccacagcaaggaagaagtagagcagtaatactctaaatttctcttctgttttctcttttctcctaccctctgatgttctgtggtgctctacattggcaaaatcacatggcaagccagtcagcaggggktccaggtgaagcagattccaaggtctgcctctcatgacccaaaacagggcagggaaaggtggaaagcagatacctggggccgaaagaatgtaaccagtataaggaattagtattttccttctaaacatgagaggaaaaatagaaatcactagtaca

SEQ ID NO: 213734 - DNA, 567 bp, Homo sapiens
tctattgataagcagtggaggatttccccccaatttttctactgaaaaaaaaatgttccttgaatagctcaattaaagcacatgtatatttctttcccaaaatctcctccaaaaaatgctgaggttacaccttctccctacagtgtttgtgtgtgccttcttttctttatatatcaaatcattgtcatctgataaaaaagtagtatatgcaatttttctcatgtgagtgggtgtcagtatcccatatgcacctttacctagattgcttctcatcttttttgcatacatttatatgcagttgtgtgttattttcttattaatacaaaagtcctttttctatgtgagatgctaaataatcacacctccaaagatgttaatatcctmatcctcagaatctgctaatatgtttccttccatagcaaaagggacttcgcaggtattattaaattaaatatcctggggagattatcctggataatctggatgactcagtgtaattcaaagtgttcattagaaagatgcaagaagacaacagtcacagcaggagatgtgatgacagaagcagaa

SEQ ID NO: 213735 - DNA, 557 bp, Homo sapiens
cacaaggtgaagtcccataataggccatctgcaaattgaggagcaaggaagccagtggtggaccagtccaagccccaaaacctcaaaagtagagaagctgatagtgcagtcatcagtctgtggctaaaggcctgagagtcccttgcaaaccactagtgtaagttcaagagtccaaaaactgaagaacttggagtctgatgtttgagggcaggaagcatgcttcacggaataaagatgaaggccagaagactcagcaagtctgctcttccatcttctcctccctgctttattttagccacactggcagctgattagatggtgataacccagattgaggatgggtctgcctctcccagtccactgactcaaatgttaatstcctttggcaacaccctcacagacacgccctggaaacgtgctttgtatccttcaatccaatcaagttggcacttcgtattaaccatcacagtcccatttatttattttttgttttgtggcatttgccttagggttcttagtcatgaattatttgcttaaaccaatgttcagaagagttt

SEQ ID NO: 213736 - DNA, 253 bp, Homo sapiens
ataccccttttactttagccagtatgtttacacacagaatttcttttacaattaacattttaaagcttgcttaagcctttaaaacaaatttttaaaccttttaatgtaggtaaaaatccacattcttatgcctccttataatccttttaccaaaagtgtattttactttccttgcacaccttgcacataaactgtttcttcratagttttacattcaggaggcctaattacttgtacattatacaatatctct

SEQ ID NO: 213737 - DNA, 573 bp, Homo sapiens
ttcttcaccttcattagttggtttaattttctatttcagacagactccaataagttattcttgtattcttttgttcatgtttaatatgctgcattcagtttgtgagagccatattggaacaattgaacattttcatcactccaaaaggaaaccctgtacttattcagcaggctcacctgacttccccatccccactccccattctaagccctaagcaactatgaattgactgactgtatatttgactattctggattattcatgtgagtgaaatcatacagcatgtggtctttttcaactggcttcttttacttaacattcatgttcatctgtgttgtatttaatagcatgtgtcagtacttttttttattgctggttaatcttttatgggtattaccacgatttattttccattagttagtggacgtttggattgtttccaccttttggccattatgtgtaatgctgctgtgaacattcacctacaastttttgtgtggacatcatgttttcatttctcttgcgtatgtgcctaggagtgaaatggctgggtcatatggtagctctgtttaa

SEQ ID NO: 213738 - DNA, 525 bp, Homo sapiens
aaagttttcctataaaagtggcctacagaacattacttatgaactttattgttttcctacataatctggggaaagcaaaacaaaagaaaacaaacaaacgaaaggatgtggagagatgcatatgcacgagaaagaagcctaaatggaactcgtacactgggcatcagggggtgtaccacctagaataagtggcattgctgtttatttgtttatttttcagggtcagggttttgttctttaacacagactggaatgcagtggcacgcatgatcacagctcactgcaacgtcgaactcctgggttcaagtgatcctcctgcctcggcctccyaaagttctgagactgcgagcatgagccactgcacctggccacattgctgtttttaaagcacagttggcaggggtaccccagctagttgctcacagagctgtgagtgagctgcaggacctgccatggtcacataactgtaacggccagacagatcctttctgtgctgtttccccttctgctacaacgctcccgtac

SEQ ID NO: 213739 - DNA, 531 bp, Homo sapiens
tgaaaagtagttgccccagtgactgttcaaacagcacctcgagcgaccgctctcagttctattcaggcaggaattcagcaagctagacaagagggtgatatagatgcttggaagttccctgttagaatacacccacctaatcaacagggaaatattacacctaagtttgagtcttttccttttaaattactcaaagagtttaaacaagctatcaatcagtatgaaccaggtctatgcccgaagtgtaaaaaagggaagcattgggccaatcagcgtcattctaaatttgagaaggatggaaatgtgatttcgggaaatgccatgaggggcccatcccgggagcccattgcaaaccggggcatttccggctcaggccrtcccttcacccatgtacaatgtctgtcccccgccacagctggtagtgccgtggtagatttatgctgcacaaaatctgtcagtcttctgcctggggaaccctgcaaaaagttccaacaggggtctgtggacattgccagcggggatgataggatt

SEQ ID NO: 213740 - DNA, 582 bp, Homo sapiens
ctcatttttattttggattgaataggtagctaaaaacctgtagtctaagtagaggtgatttttttctttctacacttataactggcagaataatcctggtccaggcctagtgcttcctcaagggagatgtccctgctcctgacccttttgtctccagtccattgtgtgcctagggaagacattattcctcaggttctgactgattgaggtgggcatctcatccaagtatggggggtctacatgctttgtaagtggtttatgccaagacctgctggactaatctgaatctctctcttggaaatttaagctgaaaaatatgaagagatagaagaagctggaacttggctctgaaactaataggatgcttcaagaaagaccatgaggtagaatatgagtctaaggaaggtgaacttagragaaaacaaaaattatggctaatcagaagccgtgatgtagggtgaatgtttggatagaaatagaagaagtcagaagggaggaaacagtataattaaactaaagaagcagaagcacagaggaactgagacacataaggagcagaggaaaactcagatttttgatgac

SEQ ID NO: 213741 - DNA, 590 bp, Homo sapiens
gcgtttcttgttgactttttagatacaacaccaaaagcatgatatgtgaaatttaaaaaaatgaataagttggatttgattaaaatgaaaaagtttagctctgtgaaagacactgtaaagagaatgagaagacatccatggcctgggagaaaatctctgcaaaacacatatcagatgaaggatgggtatccaaaatattcatagaactcttaaaactcagcaataaaagaacaaacaacccaacttttaaatgggcctaacatctgaacagaattcaatactgatagtagcggtgytgggactctctaaaaagcattccttcattattaaaaggtggcatgaagaaggaccattctctttctaggtcttggatgttgctatgtgaagataggatgcttcaccttgcttcagccttcttgcagccgtggaagggacaagtgaggtggtaaaagtcaaatagcagaacaagaagtggaggaaacctgagtccttggggcagttgtgattctcagccaattgtcaaacttctttgcacctggacttctcattttatggcatagtaaatctgtttattgtttaagctaaatggc

SEQ ID NO: 213742 - DNA, 601 bp, Homo sapiens
atgtttcacacacctaatcagtgaggcaccatyggggcataaagttttgtttttggaaggttattaattattaatttaatttcacatatatatatagctagatagatatttgactatctttttctccttgcatgagttttggtatattgtgtctttcaaggaattggtccatttcatgtcagttatcaaatttataagcatggagccattcaaaatatttacttttttcattgtctacgggatcaatagagatccctattttattgttgatattaataattcatatctttgctcttttttcatggttggcatggttagaaatttattagttttattgatctttttgaaggattggcttttggtttcattgacttattttccaattgttttcaatgccaattatttctgctttaattttaatctttttctcttgcattttttgatttaattttatatgtttttctatttccatatatatattaaatctccctaatatatgcatttaatgctgtttctctctaaaataactgctttttgtgcatctcacatattttgataagtaatatttttatttaatttagtttagaatatttttaaaatt

SEQ ID NO: 213743 - DNA, 601 bp, Homo sapiens
atgtttcacacacctaatcagtgaggcaccatcggggcataaagttttgtttttggaaggttattaattattaatttaatttcacatatatatatagctagatagatatttgactatctttttctccttgcatgagttttggtatattgtgtctttcaaggaattggtccatttcatgtmagttatcaaatttataagcatggagccattcaaaatatttacttttttcattgtctacgggatcaatagagatccctattttattgttgatattaataattcatatctttgctcttttttcatggttggcatggttagaaatttattagttttattgatctttttgaaggattggcttttggtttcattgacttattttccaattgttttcaatgccaattatttctgctttaattttaatctttttctcttgcattttttgatttaattttatatgtttttctatttccatatatatattaaatctccctaatatatgcatttaatgctgtttctctctaaaataactgctttttgtgcatctcacatattttgataagtaatatttttatttaatttagtttagaatatttttaaaatt

SEQ ID NO: 213744 - DNA, 521 bp, Homo sapiens
gcagacttaacccaaataggactatctcaaagcatttaataatcaaactctcaaaggtcaagaataaagagaggatcctaaaagcagcaagataaaggcaacaaataatatacaaccaaactccaatatatctcacagcagacttttcagtggaaacctaacaggccagcagagagtagcatagcatatttaaagtgctaaagaaaaaaacttgagtagtatatccactgaaaatatcctttatgcaagaagaagaaataaagaacttctcagacaaacaaaagctgagggatttcagcaacaccggacctgtcctacacraaattctagagggagttcttccatttgaaagaaaaggatgttaataagtaagaagaaatcttctgaaggtataaaattcactggtaatagtcagtacacagaaaaatacagaataatataacactgtaattatgatatgtaagcttctcctcatttaagtagaaaggctaagttatgaaccagtcaaaaataactactaa

SEQ ID NO: 213745 - DNA, 521 bp, Homo sapiens
gcagacttaacccaaataggactatctcaaagcatttaataatcaaactctcaaaggtcaagaataaagagaggatcctaaaagcagcaagataaaggcaacaaataatatacaaccaaactccaatatatctcacagcagacttttcagtggaaacctaacaggccagcagagagtagcatagcatatttaaagtgctaaagaaaaaaacttgagtagtatatccactgaaaatatcctttatgcaagaagaagaaataaagaacttctcagacaaacaaaagctgagggatttcagcaacaccggacctgtcctacacaaaattctagagggagttcttccatttgaaagaaaaggatgttaataagtaagaagaaatcttctgaaggtataaaattcactggtaatagtcagtacacagaaaaatacagaataatataacactgtaattatgataygtaagcttctcctcatttaagtagaaaggctaagttatgaaccagtcaaaaataactactaa

SEQ ID NO: 213746 - DNA, 551 bp, Homo sapiens
tggcttcaacttaaggacaagcagtgcctctctgaagatttgatttggcaggtgagcaatatggatgattaaattaatacttaggacctggtgttctaaagcaaatgcctgggaggcagagctctatccttcctgagccactgaagkttgtggggaaaataatttaacacttcagttcttcatcaagagattggaaaaaatatgaaccaccacacaggggcattgtaagaatcaattaaaatataattgtttaattttccctacaatcacataggatgatttccttgctggggaccctatgatgctttgtaagagggaggtaccatttctgctccttggttgctgcaagccttagaaacatgtaaacatatgaagaaatgtatggaagagactgtgtcccctatttcctaaagagtaacagcaactttaccctttctgcatgttttatcttagcctgaaatgtaagattatggaatctgacaaggaacacccttttaaatgccataagtgtatctgtcaaaatactcgcatggttagaaacatcttaccct

SEQ ID NO: 213747 - DNA, 458 bp, Homo sapiens
tttacagttgttaggaggcatataaagtacttagcctgggcatgttctacctactcgataaatgtttgttcttatgatcaggaggccacagatcatcttgaccttagagcacaaatcgctttaagcctggggaaagaatgagagttgatttaatgacactaccgtgtttccggcttctatgtagcagtctattctgtccctatgtacattttgcttatgtgtgtgccctctcccttttaattctttgctcaagcatccccttcatagtgaagcctacgttgactctctcatttaaaattctcagtcctaccagtttcatctaaccccatcccaattctgccccckccccatatcctgcttcatttttctcagtggcatttattgctttttaaggacaccatataactaatttatgtgttaggctgtcgtctgtctcagcatttgcatgtgagctccac

SEQ ID NO: 213748 - DNA, 424 bp, Homo sapiens
ctcctctgtgcacaaccctcttcttgagagctcaggttataagcatggggtgggcacccttttctgttaagggccaggtaataaatctcttaggctttgtgggctacatggtctctgtggcmacttctctactatgctgcgtccaggatgtggccactgaggatattgtaaatgaatgtacctggctgtgctccaatgtaactttattaacactgacatttgaagttttcatgctttatgtgtcatgaaattcttgtttaggcatttttaagcatttgcaaatgtaaaagctttttatcttacaggccatacagaaacaggtggctggtgtggactggcggcgggctgtcatttgcccatttgtgatccagcatttttccatgagagcaagtgaaaaggaagggtgggacagttagagagataa

SEQ ID NO: 213749 - DNA, 644 bp, Homo sapiens
aggagccaataactccctttcctctaacctataaagttcatcaccctgagctaatttactttcyaaatatatctttggttcatccatttctttcatttccattgagagtaacttttctcctctaagctgtcatttgtctctcccttggaatgatgtcattcagtttgccaattagcaatcaaatgattactctcaaaattattgagcattctctttataaaatacaaatataaacatgacacttcactgattcaaaacaaacagaaaacattctccattgttcttaaagattgaaatccttaatgttgcctaaaagtaaaatatccataaaatgtattgtcaaaaccagtacacttttaagaggagtgtgtgcgtgcatgagtgtgtgtgtgtttgtgtgtgtgtgtgtgtgtgtgtgtgtgtgtgtggtggggaaatattaaaaattattccaaggcaaatgtaaacagggactgtccctgtttacatttgcataccctgttgctacttgcataccctgttgataagtcctttgttgcttcaccctgcctgcctctcaaaattcatctcatattattttcctttcccttttgactttccagataaattggactttatatgatgctatcttctatgtgcctctt

SEQ ID NO: 213750 - DNA, 644 bp, Homo sapiens
aggagccaataactccctttcctctaacctataaagttcatcaccctgagctaatttactttctaaatatatctttggttcatccatttctttcatttccattgagagtaacttttctcctctaagctgtcatttgtctctcccttggaatgatgtcattcagtttgccaattagcaatcaaatgattactctcaaaattattgagcattctctttataaaatacaaatataaacatgacacttcactgattcaaaacaaacagaaaacattctccattgttcttaaagattgaaatccttaatgttgcctaaaagtaaaatatccataaaatgtattgtcaaaaccagtacacttttaagaggagtgtgtgcgtgcatgagtgtgtgtgtgtktgtgtgtgtgtgtgtgtgtgtgtgtgtgtgtgtggtggggaaatattaaaaattattccaaggcaaatgtaaacagggactgtccctgtttacatttgcataccctgttgctacttgcataccctgttgataagtcctttgttgcttcaccctgcctgcctctcaaaattcatctcatattattttcctttcccttttgactttccagataaattggactttatatgatgctatcttctatgtgcctctt

SEQ ID NO: 213751 - DNA, 578 bp, Homo sapiens
ggggtctagtgtcattcttgtgcatagggatatccagtttttctggaaccatctattgaagagactgttttttccccagtgtgtgttctgggaacctttgtcaaaaatgagttaactgcaggtgtgtggatttgtatctgggttctctattccagtgaccctcaacctttttggtactagaaactgattttgtggaagacaatttttccatggaccggggtgggggtggaatggttttggaatgaaattgttccacctcagataatcaggcattagatagattctcctaaggagcacgcaacctagatcccttgcatgctcaattcayagtacggctcacactcctatgagaatctaatgccaccactgatctgataaaaggtggagctcaggcaggaatgctcacctgcctgcagctcacctcctgctgcatggcccagttcctaacaggccacagaccaatgccagtttatgacccgggagttaaagggctctctctgttatgctccattgctctatgtgtctgtttttatggcagtaccatgctgttgtgattactatagctttataatataatt

SEQ ID NO: 213752 - DNA, 432 bp, Homo sapiens
aaattcaacaaaataagaatagaaggcaatttctttaactttactaatgacatctattaagaaaatacacagctagcatcatatttagtgatgaaagwctgaatgtttccccccaagatcagaaatgatacagcatgtctgttattgcaacttctactcagcattgtactagaggttctatccagggcaattaggcaaggaaataaaataaagaacatccagattggaaaggaagacatgcaactattgctattgctcttaatacagaaaatctaaatacagaaacctaggaaaagataattctatggaatctactaaaaaactattataactaattaagaagctcagcaagtttgcaggatataagattaccatataaaaatgaactgattgtctatacgataataataaacaaagtgaaatcaaaattaa

SEQ ID NO: 213753 - DNA, 606 bp, Homo sapiens
caactcttaactatcaaaccattttagcttttggtatcacaatgtgattattacaaattctgacttttttcaggtcttctaaatgtgacattacataaaagtaacatggtttaaaacattaccatttttatgaaaaaattttaaatcattttaaaaagtcatgtttttgaaaacttatgcctacacagaaacttgcacctgaatgtttatagcagacttattcataattgccaaaacctggacacataattgccaagatatccttcagtaggtgaatggataaataaactgtggtacatccagacaatggaatatcattcagtactaaagagaaattagccatcttgccatgaaaagacatgtaggaaagttaaatgtatattaataaataaaagaagccaataagaaaaagctacatactgcgtgatttyaactatatgacattctggaaaaggcaaaactatggagacagtaaaaagatcagtggttgtcggggattagagggaagggaggaatgaatagacagagcacagagggattttatagcagtgaaactgtatgataccataatggtgaatatacatcactacacatttgtccaaaccc

SEQ ID NO: 213754 - DNA, 556 bp, Homo sapiens
agcctaccagggagactatctctgcagacttttctgtacagcataggatcttcaagtaattcaagaaacaacgctgactgcatgaaaattatcagtgccttctcagttcggtgtttaacgtacacccatctggaaatcaataaccataattttgtgtatgtttgaacagcttaatcagagggcttgttttggaccatggagcatagcatcttgataggaagaaaagggtggaggatgcatatatcctcatttgtaacgtgtcattagaatatgaaaaaacttaagtttatagccccttaacttaaatggaggagcttcgtgttttaggtgagttacttttttgtgaaacttcgtttcccactgtaaggacaataatcctcaaattggtttgggagagttataggaaacagcctctgaagatgtgcaaggggyaggattggagctcagtgagctgtttgttaaatcttaggactaatccagtttcagaagctattttctcaaaaaataaatgtttccctgctttctgtaactttttttttttcttaatagagaagtg

SEQ ID NO: 213755 - DNA, 222 bp, Homo sapiens
gaattcaagtgtttcaaagatatcttatttttaaataccaaaataggaatagaatatgaagggctggttatgagtaatatgatacacwtttatgagaggatgagattacaataacaatacctcctctcatagaataaccagcaagtctccactaaataacagtgccttgattttatagatgtttaatcttggatattgagttaatgtgaaccatttgtagac

SEQ ID NO: 213756 - DNA, 348 bp, Homo sapiens
atgagtaatatgatacacttttatgagaggatgagattacaataacaatacctcctctcatagaatarccagcaagtctccactaaataacagtgccttgattttatagatgtttaatcttggatattgagttaatgtgaaccatttgtagacacaggagtttattaaagagttatataatatctttcaagtatttagaatagtgttgaaattaagcctgcatccccacgattttcagcggtgctgatgcctaataaactcaaccccttgcatgccaaaattggcttaaagcccacccgttacccaagctacacttcaagcatcaaggctcaaaaatgtaattttaaa

SEQ ID NO: 213757 - DNA, 348 bp, Homo sapiens
atgagtaatatgatacacttttatgagaggatgagattacaataacaatacctcctctcatagaataaccagcaagtctccactaaataacagtgccttgattttatagatgtttaatcttggatattgagttaatgtgaaccatttgtagacacaggagtttattaaagarttatataatatctttcaagtatttagaatagtgttgaaattaagcctgcatccccacgattttcagcggtgctgatgcctaataaactcaaccccttgcatgccaaaattggcttaaagcccacccgttacccaagctacacttcaagcatcaaggctcaaaaatgtaattttaaa

SEQ ID NO: 213758 - DNA, 489 bp, Homo sapiens
gaattccagccataagtagttmtaaaggtctggagatcaggagaaatcagagctaagggtaggtattcggagccatcagtatttagggagtatggggctacccagaaagagtgagtggattgaaacagaggccaatgatttcagaccaaggtaaacagaagtgtgcgctttgatttttacagggggaggaaaaacccataattggtgtttgagcctgtgagaacagtactgtgggctcccagcatgctttgctgggtttgatctgttctagatgtttttatgccgtcagtctgtgattctccttccagatgtggggtagagtgcatagtcagaatatagccagagcagctgacagaggtcaagattcatttttaagcaaagattcaagaagttaaaaccacacacaagtgttttactgggcatccttatccaactaccctatatcttcactttgaaaatagtttaaacattgcctgagaggacacagaa

SEQ ID NO: 213759 - DNA, 381 bp, Homo sapiens
ttatgccgtcagtctgtgattctccttccagaygtggggtagagtgcatagtcagaatatagccagagcagctgacagaggtcaagattcatttttaagcaaagattcaagaagttaaaaccacacacaagtgttttactgggcatccttatccaactaccctatatcttcactttgaaaatagtttaaacattgcctgagaggacacagaactaatagacttttggaattcttctttgcaggcctgtaaattactctctgatgactatgaacaagtgcgcagtgctgcagtctagcttatctgggttgtcagtcagctctatcctgaaaggtcagtgcgggtgtaagctggcttttgttgattgtgaagccgttttcctc

SEQ ID NO: 213760 - DNA, 509 bp, Homo sapiens
cctcaggtgatccgtccgcctcagcctcccaaagtgctgggattgcagacatgagccacctcgcctagccagtcacgattttaaaaaaccaccatagcctagttaatgatgtttaatagctcatcaycacgaatcattgtgcacactcgctataccagaggctctaaactacccaattttttttttttttagattgagttttgctctattgcccaagctggagtacagtggcacaatctccgctcactgcaacctctgcctcctgggttcaagggattctcatgcctcaacttcccaagcagctgggattacaggtatccaccaccacacacagctaattattgtattttttagtacagatggggttttacattgtcagccaggctggtctcaaactcctgacctcaagtgatctgcctgcctcagcctcccaaagtgctgggattataggtgtgagtcaccatgcccagcctaaactgcccaattttaaagggataattgggaaaaca

SEQ ID NO: 213761 - DNA, 509 bp, Homo sapiens
cctcaggtgatccgtccgcctcagcctcccaaagtgctgggattgcagacatgagccacctcgcctagccagtcacgattttaaaaaaccaccatagcctagttaatgatgtttaatagctcatcatcacgaatcattgtgcacactcgctataccagaggctctaaactacccaattttttttttttttagattgagttttgctctattgcccaagctggagtacagtggcacaatctccgctcactgcaacctctgcctcctgggttcaagggattctcatgcctcaacttcccaagcagctgggattacaggtatccaccaccacacacagctaattattgtattttttagtacagatggggttttacattgtcagccaggctggtctcaractcctgacctcaagtgatctgcctgcctcagcctcccaaagtgctgggattataggtgtgagtcaccatgcccagcctaaactgcccaattttaaagggataattgggaaaaca

SEQ ID NO: 213762 - DNA, 560 bp, Homo sapiens
aagcttcaccaggatagtgagatgagaggccaccacaaagaccaagacgttcagaaggaaaggcaggacagtgagaagacaagctgtcctgaagccaagtaacacatgcttaggttgagaggtggaggagaaggtgttttatagcatggtgacacattctgcaaaagcactgagagctgcacaagacagtggtgtgagcctccgcaaggagagagtgccaggtcagcgagccctgggggaatacagtctcctttaaaatattctggacagaggagagcagctagcaaagtgagtctgatttctactcttygtttcacctcctaactctagtataaagtgacattgtatatgctggtgctctgatctcggtctgtggatattagatattaagattggggagaaaataaaacagccagttaaagtgcaccatttttacaggcactgtcagtagcatataagaaatagcatgtttctcaaaagtaaattggttcatagtagtcagttggcacattcagcgtgtacttctatgagatttttttggtatctttaaactcttcatt

SEQ ID NO: 213763 - DNA, 560 bp, Homo sapiens
aagcttcaccaggatagtgagatgagaggccaccacaaagaccaagacgttcagaaggaaaggcaggacagtgagaagacaagctgtcctgaagccaagtaacacatgcttaggttgagaggtggaggagaaggtgttttatagcatggtgacacattctgcaaaagcactgagagctgcacaagacagtggtgtgagcctccgcaaggagagagtgccaggtcagcgagccctgggggaatacagtctcctttaaaatattctggacagaggagagcagctagcaaagtgagtctgatttctactctttgtttcacctcctaactctagtataaagtgacattgtatatgctggtgctctgatctcrgtctgtggatattagatattaagattggggagaaaataaaacagccagttaaagtgcaccatttttacaggcactgtcagtagcatataagaaatagcatgtttctcaaaagtaaattggttcatagtagtcagttggcacattcagcgtgtacttctatgagatttttttggtatctttaaactcttcatt

SEQ ID NO: 213764 - DNA, 560 bp, Homo sapiens
aagcttcaccaggatagtgagatgagaggccaccacaaagaccaagacgttcagaaggaaaggcaggacagtgagaagacaagctgtcctgaagccaagtaacacatgcttaggttgagaggtggaggagaaggtgttttatagcatggtgacacattctgcaaaagcactgagagctgcacaagacagtggtgtgagcctccgcaaggagagagtgccaggtcagcgagccctgggggaatacagtctcctttaaaatattctggacagaggagagcagctagcaaagtgagtctgatttctactctttgtttcacctcctaactctagtataaagtgacattgtatatgctggtgctctgatctcggtctgtggatattagatattaagattggggagaaaataaaacagccagttaaagtgcaccatttttacaggcactgtcagtagcatataagaaatagcatgtttctcaaaagtaaattrgttcatagtagtcagttggcacattcagcgtgtacttctatgagatttttttggtatctttaaactcttcatt

SEQ ID NO: 213765 - DNA, 599 bp, Homo sapiens
tgctaaataaattgtaactactgctgtgactgactaaataaaaattatatatgtataagtataaaacctcttacaaaacatgtaataataaaagaatgagtcataaaagacaagaatcaatgagtgttaatggtcacctttgttgctcacctctaccctccatcccctggccttaacaaatatggcaggacatcttcaggatttggcaggcagatgatttattttacactagtgacttggatgccattcctcttccttccactcagtaacagayggcgccctggacagcagtgacatctgcagccccaagggagaagggtcagcacaaattttaattttgcttttggtttggggctttaagtacacaaagaggtttttttttttccctgtcagtttgcatctagcttcgcatctgacattttttaatgctttatgtatttggattgacctagaaatttatagcttcaggtttttgcttattttgctctgtctctaattcaacctccttgatttaaaaataaaagccaaaatataacatgaacaaatactctatttgtctgtatcactaagggggtaaggaagaggtcattctgctcttt

SEQ ID NO: 213766 - DNA, 598 bp, Homo sapiens
tcattctgctctttttgagctacttcttattaccatatattaacatttgaatatcttcaataacaagaaacaagaatactagggataacctataaaaatctgagtaaaatttgactcatcgctaaaaaaaaccttaaaagctaagaggagaacatttacaaaaattgttatgttcactgacaaggcattagatttcagactaattgctgctatgagaataatagatagatacacacatacataaagctttattttcagaaggtcaagtatctacaccaaatgtttcatcctccagagttcagtttcagggaaatctctacaatagcagagcctcctgatgtttgttgtggccacatttggagccatcaaaatttcctactcaggcatcccacagagaaaaagcatctacccctaagaatgtgaaatagtatcctcattactgagttgattactcatcaaccttaatagtatttgtaattygcctttaccctggggcagttttcaaaggtcatggggaaggctgaaggctgtgtctataagacagtttgatcaaaatagaactaaaggctggcctcaggtagctgtttctaatctgagt

SEQ ID NO: 213767 - DNA, 532 bp, Homo sapiens
tgaattattgtctgtctgggttgcaagtagcacacccccaccatctgtaaaataatattttggtagactagagggcatgttgttaaaggaacccaaaggagaattattttgataaagttagggacaatctctagtatgtgtgttttataattctgcaacttatgtagaaatatatctgaatgaaatgttgttgaaaagctgtatatcattttaattttaataaatcgagtcacattttatattcactgactgagaagttggtatttaggaaacctgtgagaaattactttaataatttgtgtgtrtggcaaacattcaccttctgacttaattcagaatttctatataaaaacaaaaatttaattctttaatatcatcttaaaatgagggatgttcatgccatgttaaataaatcatttccacttatttttaatacatagtattagttaggatgcttgcagctgcaaatgatagaaaatccaatccaaaatggctttaaaaattgttgttctttaggtctatcaccctagac

SEQ ID NO: 213768 - DNA, 381 bp, Homo sapiens
gaagcccctggggaacgtttcagtcccactctgtacttctgtcacatgctcatcacagtctggtaagtgctggcatacgattcctagattagtacattttgcattgctataaggaaacacctgaggctgggtactttataaagaaaaacagtttatttggctcacagttctgcagactatacaagtagcatggygccaggctgggcacagtggcccacacctgtaatcccagcactttgggacgctgaggcaggaggattgcttgagccccgaagtttgaaaccagcctgggaaacatggtgagacattgtctctactaaaaaaaaaaaaaaaatcagccaggcatgatggtgcactgatgcatgcctaatgcatgcctat

SEQ ID NO: 213769 - DNA, 440 bp, Homo sapiens
ttggggaaaaaaaaagtgaacaagaaaaggtgtcaggagagtactgtgaatgtgggtcatgtcagtagagtgtagggacttgggcaggagcagctggaccccaagagtagattggtggagaccaggtcattcatcctaagcagtttgccttgtagcatgtagatgaaatatcccacgttggctgctggtgactgaactgggcttcctgtttctgtgtttggtttgaccatcacagtgttgaagaactgttgaagtgaataccttgcagtttgctacrgtttccccccttctcccacattactccagcctccttccctcacgtaggttgcctgacccgctgatacctgtgtttgctatccctgcagatgggtgggtaggaggcaatttaaggaggaagatttaatatgtgagttatagaaagataaatagactgggcacag

SEQ ID NO: 213770 - DNA, 440 bp, Homo sapiens
ttggggaaaaaaaaagtgaacaagaaaaggtgtcaggagagtactgtgaatgtgggtcatgtcagtagagtgtagggacttgggcaggagcagctggaccccaagagtagattggtggagaccaggtcattcatcctaagcagtttgccttgtagcatgtagatgaaatatcccacgttggctgctggtgactgaactgggcttcctgtttctgtgtttggtttgaccatcacagtgttgaagaactgttgaagtgaataccttgcagtttgctacggtttccccccttctcccacattactccagcctccttccctcacgtaggttgcctgacccrctgatacctgtgtttgctatccctgcagatgggtgggtaggaggcaatttaaggaggaagatttaatatgtgagttatagaaagataaatagactgggcacag

SEQ ID NO: 213771 - DNA, 513 bp, Homo sapiens
aagccataggcctttttatttactgccactccacagtgatcccagaccttgacactcctagaggcaaccaatttaatgagatgttggctactcagcagatagtggaaaaccagttgatagagaattatctatatttcccctgtactcagttgtttcaatccttgctttgcttttcaaagagaattaccaaaaagaggagaaagcttaaagttgacatctaatgaaagaagacattttgcattttgtaacctccaaaaaggaggttacaaaccagccattatgagatacagctgatctgaaaaatgtgctgttactttgatataatttacaggaaaaaccagmtttccactatttttgtaaaataattatcagagagcactcggctggtagatgtgtgtgggtggcaacattaggctagagctgaatgatggattcctcctgttatggactgaatgcttaatgttctccctgaaattcatactttgaagccctaactcccattgaaacggtatt

SEQ ID NO: 213772 - DNA, 513 bp, Homo sapiens
aagccataggcctttttatttactgccactccacagtgatcccagaccttgacactcctagaggcaaccaatttaatgagatgttggctactcagcagatagtggaaaaccagttgatagagaattatctatatttcccctgtactcagttgtttcaatccttgctttgcttttcaaagagaattaccaaaaagaggagaaagcttaaagttgacatctaatgaaagaagacattttgcattttgtaacctccaaaaaggaggttacaaaccagccattatgagatacagctgatctgaaaaatgtgctgttactttgatataatttacaggaaaaaccagatttccactatttttgtaaaataattatcagagagcactcggctggtagatgtgtgtgggtggcaacattaggctagagctgaatgatggattcctcctgttatggactgaatgcttaaygttctccctgaaattcatactttgaagccctaactcccattgaaacggtatt

SEQ ID NO: 213773 - DNA, 531 bp, Homo sapiens
atgtcatctgcaagcaatgacaatttgacttgttctcttcctatttgaataccctttatttctttatcttgcctgatttccctggccagaacttccaatactattttgaataggagtagtgaaatgtaatggttaattgagtgtcaacttgattggattgaagtatgcaagatattgtccctgggtgtgtctgtgagggtgttgccaaaggagattaacatttgagtcagtgaactgggaaaggcagacccacccttaatctgggtggcaccatctaatcagctgccagtgtggccagaataaaattaggcagaagaaactgaaaagactagactggcttagcctgcagcttacatctttctcctatgctggatgctttctgtgctcaaacatcagactccaagttcttcagctttgggactcggactggcttccttgctcctcagcttgcagacagcctactattggaccgtaccttgtgattccrcgagtcaacactccttaataaactcctctttatatatgcatcta

SEQ ID NO: 213774 - DNA, 362 bp, Homo sapiens
tgagaatgttacagttccatatacacataagaaactgtatttctatccctgtaataaaaatagttgtaataaaattcttaattgttttctaaaggaattttcccaaggtattctaattttcttgtaatcataccccacttcaaaaattaatatttttaaaatcattttctgaaaaaccktcccttcactcccctctttctgactaccttccttccttccttctccctttttccttctttctttgacaaaataataacaacggcatatggctttgttccatactcttcattttctttttttcaatttaaatttttagtttagatacaggggacacatgtgcaggtttgttatataagtatatt

SEQ ID NO: 213775 - DNA, 409 bp, Homo sapiens
ccactacccaccttcagttcctgctgctcttttagatccagctaagagcctgtcttagctgatactcacatacccagcrtcagacccctgtgctcggaagccacagcagttccttgtgccactagatggtgccattccagttcctctactgccctggccttcctacatcttacatattctggttcctggtttgatccacacaattgaacaatagtagtaataagtctacacacatttttaaatgtccttaatcatttcttttaagaattttcaatttgaactcaaccagaagagacttcaggaaagatgaagatttttgcatcagactttttttttgtctcaggtgagagtgcccaaatgcaattgttctcattctcttcctagagtgattttttttttttaaggagaa

SEQ ID NO: 213776 - DNA, 399 bp, Homo sapiens
gaggggtacaaatgcttgtttgttacacagatatattgcatactgctgaggctggacttgtagtatacccattaccsaatagtgaacactgtatccaataggtgattttttaacccttgctcccctcccagtttttcctcttttgaaatccccattttctattctttccatctgtatgtgcatatgtacccattgtttaactcccacttataagtgagaacatatggtatttgggtttttgtttctgaattagttcacttaggttaatgaccttcagttccatccatgttgttgcaaagacataattttattctttttcatggctgcatagtattccatggtgtttatttatctatctatctatctatctatctatctatctatctatctatctgtcat

SEQ ID NO: 213777 - DNA, 399 bp, Homo sapiens
gaggggtacaaatgcttgtttgttacacagatatattgcatactgctgaggctggacttgtagtatacccattaccgaatagtgaacactgtatccaataggtgattttttaacccttgytcccctcccagtttttcctcttttgaaatccccattttctattctttccatctgtatgtgcatatgtacccattgtttaactcccacttataagtgagaacatatggtatttgggtttttgtttctgaattagttcacttaggttaatgaccttcagttccatccatgttgttgcaaagacataattttattctttttcatggctgcatagtattccatggtgtttatttatctatctatctatctatctatctatctatctatctatctatctgtcat

SEQ ID NO: 213778 - DNA, 609 bp, Homo sapiens
gcaactgttcagtgttacagggtcttttgggggagggttgtggtaaacaactctagatgtttgtgatatctgagaggaaagggtaaactagcccagcaagccctccagcaataaaatattcctttttgaatgcctcttttccccttgtctgcttgttttgataatgactacacataaaccatatacaccataaattacactaaatttcaaatatttggaaactaaggtaggcattcccatttggccatgctaagtcttaccattaggaatcagtgattattttggaatagttgacgtcagtatttgaaagtaaaatgggcaaaaatccggagcccagccttactaaatcatgtatgttgtcttgctaatattaattctcacattgaataaaatatatrtgctcatgtggaagcataaaaatatgagatgttttcacagaaagctggtaagcaacatgaagccaaattacacacttcaggatgatcagttccagctgtaatggtaaacatattctgtaacactctatagtttacacatccagaggttttaatagagagactatatacagaataactcagaattaaggtggaagaaatttcactttagatg

SEQ ID NO: 213779 - DNA, 602 bp, Homo sapiens
ctattgcaaataataatcaggtaaaaaaatatttattctgtttcagcatagtgttataaatattgaaatgtaaattaaaggcagtagggcacacctatatcttgtttctagtttttgctgatagctgtatataatcaactattattgctttgataccaccatataacgtgggttataagattttcagataaaagcaactcttatttcatttgtttttcttgaattactccatataggaagaggctttggaatcgtatttcttgctttgaaattttatttcttgcatttatatgcctttgcaataaaatcgtgttaacttataatctctcacgcaatggtttctcctagtgtttaataaaatggtattaagggtaactgctactattttttctaaaattagaaggtaacattgaatggacacacagcagatacatgttacattctgaaatgtatgctttgcyggagcagaatgaatgcaatcaatgtaatggaaatgctgcactaatggctcattaaacatggaaagtatgcatagatgaaaaaagtctgtgcatatgtttcagttcactgaaggaagcaatgaactataatgtggaaagaaa

SEQ ID NO: 213780 - DNA, 565 bp, Homo sapiens
gcatgtgtttcttaatgctgcagacaaagagctgaagaatctccagggactgactaactatgagtatgtattacagatggcctcttctttatttttttstttcctgttggcaagatttgaggcctttcactccggattaaccgcctttccaccaaacactggcaggggagcttaatgttgctgttaaatcaatccacttggtttggcatgttggcagttttgttgggtgggaggtgttggtgagcaaagcaggctttcggatttgaacattatgttaaaccaaagagaaaatattaaatatttggattattggatcttacataagatttttaaatccatgctatgttctctactttgaattaaataaataattatttactttcatttctgggaagttagcctatttatttattgttggatgatgtactaaacatttccatggttactgataaaacgtaagatattacaccagtggataaaaggtagaccatcataaaccacactcatagaacaaaccaatgtattacaaattactaggtgttattttagaaaagcaaacatgcac

SEQ ID NO: 213781 - DNA, 565 bp, Homo sapiens
gcatgtgtttcttaatgctgcagacaaagagctgaagaatctccagggactgactaactatgagtatgtattacagatggcctcttctttatttttttgtttcctgttggcaagatttgaggcctttcactccggattaaccgcctttccaccaaacactggcaggggagctkaatgttgctgttaaatcaatccacttggtttggcatgttggcagttttgttgggtgggaggtgttggtgagcaaagcaggctttcggatttgaacattatgttaaaccaaagagaaaatattaaatatttggattattggatcttacataagatttttaaatccatgctatgttctctactttgaattaaataaataattatttactttcatttctgggaagttagcctatttatttattgttggatgatgtactaaacatttccatggttactgataaaacgtaagatattacaccagtggataaaaggtagaccatcataaaccacactcatagaacaaaccaatgtattacaaattactaggtgttattttagaaaagcaaacatgcac

SEQ ID NO: 213782 - DNA, 539 bp, Homo sapiens
ccatgtcacatttagtttttatgcctctttcaatccagaacagttgcttttctttctgttaccctcacccaaccttgttccttttttttttttttttttttttttttgagatggagtgtcattcagttgtccaggctggagtgaagtggtgcaatcttggctcattgcaacccccgcctcgcctcccaggttcaagtgattctcctaccttagccttccaagtacctgggattataggcatgtgycaccacgtcaagctaatttttgtatttttagtagagacggggtttcatgatgttgtccaaaatggtcctgaactgatgacctcaggtgatccacctgcctcagcctcccaaagggcagggagtacaggtgtaagccatcacacccagccttgatagttctatatcacaggccagttctcccattgacaatgcatcaatttgggtttgtcttttgattcctcaggatgaaattcagggtaggtattttggcagaaatacacggtggtgaagcttcctcagatggggcaggatatt

SEQ ID NO: 213783 - DNA, 263 bp, Homo sapiens
gaattcggctgatgagcctcagttaatcagtcactgtttttagtatgatttatcacaatgcctgccaactaatagaaatatacatatgtatatatgtgtgtatataaatctgtgtgtgtgtgtatatatatatgtatgatagttcacatcttctgttaattccacaaaatcatgtcaatcttctaraaacaggccaggcgcagtggctcatgcctgtaatctctgcactttgggaagctgagatcactggaagtcaggagttt

SEQ ID NO: 213784 - DNA, 591 bp, Homo sapiens
  misc_feature (1)...(591): n = A,T,C or G
caaaaagggaggaaaattgggaagctaaagtgttttggcaaagggccaacaatgtgcctcatggagaggaktcctattccactaggtggcgctgttgaccttgaaataccatgtgctctccagaccaagcgcagagaataagctcactgtggggggtgggggaagatcctctgttactagaaaatcacaaaaacagcgttctcttgagttatgttcccagttactatggcatttgctgacctttcctaacaggactatttcgctgaactgtaaaaatttccggagcattgcatatatagagatgataggagacatgacaattgccggtaganaaggaggaaattgtgatagaaaagctggagatcctattgccgacggttggttgggcagttgaaggctggagttggtccagaagccctcagataacaccagggtgtagtcctggccagaaattcttagttgctccgggacctctttaagccccatacgatggctgggtgctccaggaagggaaactggtttgaaacatagccaatatgccagcaacctgagggtgctgggggattctccatgatctccgccagcaagctt

SEQ ID NO: 213785 - DNA, 521 bp, Homo sapiens
gcactccagtgacacctaaatattgatctagttgcaaaaagggaattttctgggaaaggacatgaggcctttggtgaggtggctttctgcaacttctacagatattgaaaggsctaatatctgaaagttgtctgtgaacagcgtgcccagcaactggaaatatatatccttctttcctaaaggaagggcaaggaagtacatccttttatctatcacagcctacctattatgtcacttgaatccatttcttcatatacacttgagaacagcttctttaagattctcttcctgggggaaaattaaaagagaaaggttaagggacaaatattgtctcttgccaccatggctgatcatagagttgcaactgctatgtaccatcttattcctttattgtcaattctatttctcccacttcaccttttactagcaccgctactggtctcatgacttacttaaaggtgtagcttagaccttcatctccaaaatatctcatcctggtacactataatcattcagaacct

SEQ ID NO: 213786 - DNA, 420 bp, Homo sapiens
ggttgctgacttaacttttctattttttaaatatactcatgacaagtatcatataaaacctaaccagcaactttgcaccagcaaaagtttttcaacatttcaattcttacaaaatcaartgatataatttcctatgtagcaaaaaattcacacatctgcaaagcttggtttcactaccacctgttaaaatcttacctttgggaagcttatttatgatttgaaaaacatattacctcactcaaagagctggaagtctctcttcaatccaatatgcacacagaagacaaaaagctgtatcattccatggtatatttgaaatcatatggccatgtctgtccattgtcttcagagtttctaagtatttcagaaaattatgacttgcattgtagaactattttaaagaaattccatggtgcaaac

SEQ ID NO: 213787 - DNA, 420 bp, Homo sapiens
ggttgctgacttaacttttctattttttaaatatactcatgacaagtatcatataaaacctaaccagcaactttgcaccagcaaaagtttttcaacatttcaattcttacaaaatcaagtgatataatttcctatgtagyaaaaaattcacacatctgcaaagcttggtttcactaccacctgttaaaatcttacctttgggaagcttatttatgatttgaaaaacatattacctcactcaaagagctggaagtctctcttcaatccaatatgcacacagaagacaaaaagctgtatcattccatggtatatttgaaatcatatggccatgtctgtccattgtcttcagagtttctaagtatttcagaaaattatgacttgcattgtagaactattttaaagaaattccatggtgcaaac

SEQ ID NO: 213788 - DNA, 420 bp, Homo sapiens
ggttgctgacttaacttttctattttttaaatatactcatgacaagtatcatataaaacctaaccagcaactttgcaccagcaaaagtttttcaacatttcaattcttacaaaatcaagtgatataatttcctatgtagcaaaaaattcacacatctgcaaagcttggtttcactaccacctgttaaaatcttacctttgggaagcttatttatgatttgaaaaacatattacctcactcaaagagctggaagtctctcttcaatccaatatgcacacagaagacaaaaagctgtatcattccatggtatatttgaaatcatatggccaygtctgtccattgtcttcagagtttctaagtatttcagaaaattatgacttgcattgtagaactattttaaagaaattccatggtgcaaac

SEQ ID NO: 213789 - DNA, 617 bp, Homo sapiens
ttgtttgtaaaaatttgtagaagatctcaatttcctggaatgagatttggtagatatacagacatgcctttaatcagaaaagaagtggtcttagggatatactatttgaatgactgaaagactgaagagttctgcttctgcccgtaagaaagctttgtcattgactttttcacaaagttaaatcccagcatttccttgttagctatagagctaaacagctgggcacatgaatgttataaatccttgatcacagtaaaatattaatgattgtttcaccataattgacagagaagatacaaattcaagaaacaaattttggtgttgacgaattttttgtttgcttacttgggtcaccagataatgggcgtgtccaggttaatttccactaattaggtcaatatttatatagtcatgcaaagaaattatctctgtttttctatgaagaaattttccaggggatgtaaaattttaactacctttrtacagtagattctggcattatgtttaagtgtctttatattttggacatctgctctggatacctttatacttttctgaaagattgagataatagaaagcctgtgtggaaatatggaaattgtcacactaggagatat

SEQ ID NO: 213790 - DNA, 195 bp, Homo sapiens
agtgataatgtgaatgaggcatgtggaacgtttatcacaaatggcttctaaggaagctcaaactctctctgcacacatcctcctccatggtcagatctaygtaaacggaatcatcttgtctacatttgaggtttagtaattctgcagttttcctcagcagtgaatatcacaaagtttgggtttgtatctctactt

SEQ ID NO: 213791 - DNA, 555 bp, Homo sapiens
cgttaaataagttatgagatcagtagagatgctagcagaggtaagtggaaaaaaattgataaggaggaagattgtaaacagtagttgcaactcagatcagcttcagtggcaagatacatagtttggccttcagcttttctcttctaattcccctcaagtaagagaatcctaaatgagctgttctgatcatatataagaatatgtaaattcacayggcataagggatatattatggtatatatgaggagcctctgccctgcccttcatttaggaaagaaggatttatttttccagctgttgggtgtgctgttagtagacagcattcagatgatgtccccttaggtatctttagaagttgcagaaagccacctcaataaaggtctcatgccctttctcagagcagtccctctttgcgtccaggttaacatttaggttcaggtatcattagagtgcaagtcagaaatatggtacttttctagaaaaaaaatatttcattttgttatgttaaataacataaactatactataaaactacagtaaccaaaacagcatggt

SEQ ID NO: 213792 - DNA, 570 bp, Homo sapiens
gtatatatgaggagcctctgccctgcccttcatttaggaaagaaggatttatttttccagctgttgggtgtgctgttagtagacagcattcagatgatgtccccttaggtatctttagaagttgcagaaagccacctcaataaaggtctcatgccctttctcagagcagtccctctttgcgtccaggttaacatttaggttcaggtatcattagagtgcaagtcagaaatatggtacttttctagaaaaaaaatatttcattttgttatgttaaataacataaactatactataaaactacagtaaccaaaacagcatggtactggtatcaaaacagatacatagaccaatggaacagaacaggggcctcagaaatgacaccacacatctgcaagcatctaatcttccacagttctgtagacaactgggctttaaggttattgggttccaatggcattgtgtgagtaacttccmattataaatctcctggagtcattgtcatttcttttgtgttaccatatacagatggtatatttggtaaggtttgtaaaatgtctctgatggtcatga

SEQ ID NO: 213793 - DNA, 576 bp, Homo sapiens
attgcatcatcatatggttcacttcctgctgaaatgaaataaagatttgatgaagggtaaaatattacccccatgattctaacaagaagtaatacactgtgggaattctgccgacgggctgacacttacctctgaatccactgagcctgtccagmagtccagtgatgggccctgcactgagctctggattcacaggctcagacacttgcagcagcagggactcatacctgcaaggagaaagatacagctaccacatctacagccaaaaaaaatacataaaaatcaccattttcatttaaaagacatttcatgagaagccctttaacccacacatttgctaattccaaaattatcattttctttttcaaattcattcttattcacagttcctgattttcaagcacgatggtaaagtctctctgactgagaattcattcggatctttctttgtattgctccaaattagtaaggatcattagtcttaagactgggagaatattcaaaaatgaaattctgggttccagacctcaccagaaattcctgaaatcactgtctggaaaagtggggttattttta

SEQ ID NO: 213794 - DNA, 500 bp, Homo sapiens
agaattcttctcaagtccttagagttctccttatattaaatactagttcccatatttctcagatatttctgtcttcatcaagacacaagtctacatttcttgccacttttcccattatgtgttatgacttattcaattttaattagtgctgatatttaatttcatgctttccctaaggttgcactcttgctccttctgcctraaatttagctcacatttcaatatgcttgcccaccaggattcaaattcatactgactcagccttagaagggtcacctgaaatttccatgactgacaaataactcttgtgtccagaatttatccaggcagcccattgggaagcatgtgaaatggctcagtttcttgtatttgttgggggtattgctataggtttgtatggaaacagatgagcatgcttgggtaacatctgtggtctgattagaaatcctaccaaagagtcacactaacttatataaaaaattagggtgtgtttttctcaa

SEQ ID NO: 213795 - DNA, 495 bp, Homo sapiens
tatattaaatactagttcccatatttctcagatatttctgtcttcatcaagacacaagtctacatttcttgccacttttcccattatgtgttatgacttattcaattttaattagtgctgatatttaatttcatgctttccctaaggttgcactcttgctccttctgcctaaaatttagctcacatttcaatatgcttgcccaccaggattcaaattcatactgactcagccttagaagggtcacctgaaatttccatgactgacaaataactcttgtgtccagaatttatccaggcagcccattgggaagcatgtgaaatggctcagtttcttgtatttgttgggggtattgctataggtttgyatggaaacagatgagcatgcttgggtaacatctgtggtctgattagaaatcctaccaaagagtcacactaacttatataaaaaattagggtgtgtttttctcaagtgttttttccttgtttattgaattc

SEQ ID NO: 213796 - DNA, 591 bp, Homo sapiens
ttactcttttttactaaacactgctgaatttaagtgccaacagtgaaaatttaagaattgcaaatatttttcagaagtcatctaagccatttcaaggaattgttcatagtttcacgtgaggtaagcctcaattaaaatgacaactggtatcaagtatcaagttattccttatgcagttatctgctaaacaattgtgttttgatttctaagctaggatattttggagagcattcttatttctttagtatcaccatttttaactcrtcattgcctcagtaactttaaatcctgtctaaaagcttcaggttatgaaagcacaacatttacagtattcaataattatccttttttacttaattaagtgtaccaatattagtacatgcagtacacatatatatgttttaatgtgaattccatatattcatgatgcatacatatctattgcagcaaacactagatatctaaaatttttcaaaaatatattaaacacttttggaacacacaaaataacaattaaaaacctcatgtcataaaatgaatagcaataatatgagttaaaaataagatcattaagtaagtttagacagttag

SEQ ID NO: 213797 - DNA, 591 bp, Homo sapiens
ttactcttttttactaaacactgctgaatttaagtgccaacagtgaaaatttaagaattgcaaatatttttcagaagtcatctaagccatttcaaggaattgttcatagtttcacgtgaggtaagcctcaattaaaatgacaactggtatcaagtatcaagttattccttatgcagttatctgctaaacaattgtgttttgatttctaagctaggatattttggagagcattcttatttctttagtatcaccatttttaactcgtcattgcctcagtaactttaaatcctgtctaaaagcttcaggttatgaaagcacaacatttacagtattcaataattatccttttttacttaattaagtgtaccaatattagtacatgcagtacacatatatatgttttaatgtgaattccatatattcatgatgcatacatatctattgcagcaaacactagatatctaaaatttttcaaaaatatattaaacacttttggaacacacaaaataacaattaaaaacctcatgtcataaaawgaatagcaataatatgagttaaaaataagatcattaagtaagtttagacagttag

SEQ ID NO: 213798 - DNA, 591 bp, Homo sapiens
atgtgttacagtgaccagctggattagaattagattaggtttaaaacgatgaaagaatctgggagagggggcagagtgttggttgttaattagcacatggatcaaaggagattactgatgtgtttagaagccacaacattgacagaatgaaagccagaactaacaatccaatggtaaatctctttactgtggtattttctgccatttctgctccataagacacaccttaaccaccttgtcatggtatccgcagtattygattttagtctaaatagcattttctctcaaatgcactctgtttctctctccttcatcttccctcacttcttccttccagctctattttttcactagagaacactaatagaatgttctcccaaatttcagatttcagatacgcatctgtaaaataatcttatggagacacattttagttgctactgcatacttggttgttttcataagttcacagcattactactgtcctccaaaaaatggtttcccatttccacagctaatctcatcattgactctgccatccaagtttattctatgccactctggaagaatctggaaaaatacttaaaatac

SEQ ID NO: 213799 - DNA, 419 bp, Homo sapiens
gatcatatcacttagctctgcttctttttgatgataagaacaccaaaaatctagtccctcagaatatttcccaaaaacaatayaagattatctaatatacctacaggttgtacatcagattcatttattctacattactgcacctttacaacttttgcccttcatttacctattttcttcccaccaatgtaaccacctttttgaatgtattaaacttataaaaataaatttcaaatatgagtgggaccatgaagtatttttctctgtgtgtctgtcttatttcacttaggaaacctgccatttacatgtctcctaaatttagtacagatataaagtgctagtcaagaatgtgtctctgtttggttagattattttttttccaagttatcctctttatcaatttttactttttgtactgt

SEQ ID NO: 213800 - DNA, 419 bp, Homo sapiens
gatcatatcacttagctctgcttctttttgatgataagaacaccaaaaatctagtccctcagaatatttcccaaaaacaatacaagattatctaatatacctacaggttgtacatcagattcatttattctacattactgcacctttacaacttttgcccttcatttacctattttcttcccaccaatrtaaccacctttttgaatgtattaaacttataaaaataaatttcaaatatgagtgggaccatgaagtatttttctctgtgtgtctgtcttatttcacttaggaaacctgccatttacatgtctcctaaatttagtacagatataaagtgctagtcaagaatgtgtctctgtttggttagattattttttttccaagttatcctctttatcaatttttactttttgtactgt

SEQ ID NO: 213801 - DNA, 419 bp, Homo sapiens
gatcatatcacttagctctgcttctttttgatgataagaacaccaaaaatctagtccctcagaatatttcccaaaaacaatacaagattatctaatatacctacaggttgtacatcagattcatttattctacattactgcacctttacaacttttgcccttcatttacctattttcttcccaccaatgtaaccacctttttgaatgtattaaacttataaaaataratttcaaatatgagtgggaccatgaagtatttttctctgtgtgtctgtcttatttcacttaggaaacctgccatttacatgtctcctaaatttagtacagatataaagtgctagtcaagaatgtgtctctgtttggttagattattttttttccaagttatcctctttatcaatttttactttttgtactgt

SEQ ID NO: 213802 - DNA, 419 bp, Homo sapiens
gatcatatcacttagctctgcttctttttgatgataagaacaccaaaaatctagtccctcagaatatttcccaaaaacaatacaagattatctaatatacctacaggttgtacatcagattcatttattctacattactgcacctttacaacttttgcccttcatttacctattttcttcccaccaatgtaaccacctttttgaatgtattaaacttataaaaataaatttcaaatatgagtgggaccatgaagtatttttctctgtgtgtctgtcttatttcacttaggaaacctrccatttacatgtctcctaaatttagtacagatataaagtgctagtcaagaatgtgtctctgtttggttagattattttttttccaagttatcctctttatcaatttttactttttgtactgt

SEQ ID NO: 213803 - DNA, 383 bp, Homo sapiens
ctaaataatgatcttgataacagcatactatttagggcatacaatgwgcaaattttgctttgaaaattggattgaaagaagttggtcttacatttggctctcaatatgtaagttttcaaaacatttttaatacctgtggttagtgttttgtttgtcttgtagttaaaattaatcatctctatgctttattagaggttacaagcaaaattgtccttgtgactttacatttcctggtaaattaacttcttgatagaacaatttttgcttattgacacatgtctatgtatgttttgtttctttctcttttatttatttatttattttcacagtggatattactctgaatcatgatgagccaacagtcatatctttcgatgtggaga

SEQ ID NO: 213804 - DNA, 565 bp, Homo sapiens
caataaataaatctaaaggatatttttataatgataaatagttttctatatggacctttgctcaaatggcttatataccagaatcatctttgacatgcagtattcacttggcccttagttttagatattatattcttttctcttcaccattgaaagagtaaaatcatcttatgtttggattatttctctcttcaagtcatcttttgacccagaagtttctcaacacttttcacctctgcatttctgagggttagactaaagggtttaatgtaggcgttatcatggtgtaaagcacagccactgctttactgactggggaagggtcactgggcacagatamacaagtatacagaacacaaagaattagatggccacggtggtgtgagagacacaggtagagagagctttgtatctttcctccaagctgtgggatttcaaagtatataggatggccacttaagaaaccatcaagaagatgatgtttaacaggcagttgaacccatcattggcagcaacaaagagaccaagtgtatcatactacctatgcagaggagcttcaacaaag

SEQ ID NO: 213805 - DNA, 645 bp, Homo sapiens
ggggtttttgagtagaagagtggtataatattaaaaagattttcaaaagatcgtctgggctacttcatgaagtaacattattaaggccaaaatatgagtggagagactttgcaggagactattagagtaggccagggggtaacaagattgtagtgagaaggatccaattggkatattttgaagggagagttaacagggtttgaaaaaaatgtattgataaataatatgaaaaaatagagaagtgaagtagagtgtaaaatttttagtataaacaataacgtggtaggtagtaacatttaatgtaatgaaaataagaaatgggttaatttggaaaattaaaaattgatatcatttgaacacatcagttgttgtcacctacaaaagatccactcataattagctcttctcactttaaaaatgtaagttatcttaagtggtttcttgagtattatacatctgtgaatttatacaggatgcatctttatgtggaactcccttcccatcctctcttgtagttaccacctttcctttatagctcaactaagacattgtttcctctgaaaagtctttcctgatcctagtttgatttaagtgttctagagttgtgaacacttacaataatgtgaatatatttattatgatacc

SEQ ID NO: 213806 - DNA, 645 bp, Homo sapiens
ggggtttttgagtagaagagtggtataatattaaaaagattttcaaaagatcgtctgggctacttcatgaagtaacattattaaggccaaaatatgagtggagagactttgcaggagactattagagtaggccagggggtaacaagattgtagtgagaaggatccaattggtatattttgaagggagagttaacagggtttgaaaaaaatgtattgataaataatatgaaaaaatagagaagtgaagtagagtgtaaaatttttagtataaacaataacgtggtaggtagtaacatttaatgtaatgaaaataagaaatgggttaatttggaaaattaaaaattgatatcatttgaacacatcagttgttgtcacctacaaaagatccactcataattagctcttctcactttaaaaatgtaagttatcttaagtggtttcttgagtattatacatctgtgaatttatacaggatgcatctttatgtggaactcccttcccatcctctcttgtagttaccacctttcctttatagctcaactaagacattgyttcctctgaaaagtctttcctgatcctagtttgatttaagtgttctagagttgtgaacacttacaataatgtgaatatatttattatgatacc

SEQ ID NO: 213807 - DNA, 438 bp, Homo sapiens
tgtatatagtgcaagttcaattggatgaaaaagactgcattggtataaaatattccattaactattttaaatagtataagaagaagaacttaaatgacaagaatctaactaaaaatgaaattaagtctcagaaaggcaaaaagatacatgcataacttgatyaaaaattaatgtaactctaaaatgtcttaactaattccctacatgttattaactccttgctttatgcattacttctttacagataaaaaggaaaacaagacattatagatcttacatgctagcagggagataaactgttattaataacacaatcatatagttctttaatcataattgtaaatggtttgaagaaagggaatatggcctcagatttaagaaaactcctgggtcccaaggagacagactgtaaagtcaaatgactctcttcatggtggg

SEQ ID NO: 213808 - DNA, 277 bp, Homo sapiens
ggaaccaatacacatggttgcagtgttttcaccatatttaatagaaacactataaatgagttttgatgacattagaatgcaactaaagacattaaatataacttatttatcctgtttgatgaggtgcgaaaaaaaggctttcttagctaaacaggttcccagagcatatagacccatttctgacttttctctggtcagaagtgactacagcamaagataggcctgagaggaggtgagaaggagcaattagggatgatgtatatcaggaaactttgat

SEQ ID NO: 213809 - DNA, 609 bp, Homo sapiens
aatccaatctccaatgtaaaagtgaaatattttatgccctgaatgccctttagctatcaaggtcattattattaaaatatttcttgttcttaaatactagtgatacaattttgrcaagaatgagaagattttagcttactcaagcaccactccagataactggataaaagtccatatgttcaaattataagttgtaacttaaggcagatttttgcaaaaaattttaccagtcactttgcggacatccctgctagctctagactgaaaccgaattttagattttacatgtagctcttcatgttgtaactaaactgaaattatcatttccatttttacttcctatttacataataatttcttctttctttttacatgttaagtccaaattttacattatatcaataatatgtatttattgtaagaaagtacaaatactccaacaaactttagtgaactctattccccaatgaaatatgtttaacaattcaaatgaaatacagtaaagaaatgtaaatgtttatgtaaccttggattattacacttccttctgagcattgttccatttattcaattttttatttcttatgtcattccatttacccaatatat

SEQ ID NO: 213810 - DNA, 609 bp, Homo sapiens
aatccaatctccaatgtaaaagtgaaatattttatgccctgaatgccctttagctatcaaggtcattattattaaaatatttcttgttcttaaatactagtgatacaattttgacaagaatgagaagattttagcttactcaagcaccactccagataactggataaaagtccatatgttcaaattataagttgtaacttaaggcagatttttgcaaaawattttaccagtcactttgcggacatccctgctagctctagactgaaaccgaattttagattttacatgtagctcttcatgttgtaactaaactgaaattatcatttccatttttacttcctatttacataataatttcttctttctttttacatgttaagtccaaattttacattatatcaataatatgtatttattgtaagaaagtacaaatactccaacaaactttagtgaactctattccccaatgaaatatgtttaacaattcaaatgaaatacagtaaagaaatgtaaatgtttatgtaaccttggattattacacttccttctgagcattgttccatttattcaattttttatttcttatgtcattccatttacccaatatat

SEQ ID NO: 213811 - DNA, 524 bp, Homo sapiens
ccagtttttctaacaccatgtattgaaaagactcttcttcctcctactgtgtgttcttgacacctttgtcagagatgagttaatagatgtgtgggtttatttctatgctactatagtattagaatagtctgtctttaccaatgagtttatgctttcatatgttttcatgttgttagttactgtcctttcatttcagctcacttttgtttcaagtgtgaagaatttcctttagtattccctttaaggcaggtccagtggtgatgaactcactsagattatgtttgtctgggaaagttttatcacttttttatttctgaacagtttttctgagtgttctgtgttgatagttctctttctttttctttcagcactttgaatatatagaaactgcaaggtttctgctgaaaaatctgctaatagttttattcctttgtacgtgataagtcattttttccttagtgctttcaaacttctctctttgtccttaattttggcaatttgattctattgtgttttgatgaaga

SEQ ID NO: 213812 - DNA, 491 bp, Homo sapiens
tcccaagactaaagagtccctcctctccatatatattgccattctgattcttccctttccagtacttattacaaacaccgaaagcccaattccaagagtcccccacatggacctcccagtaatacttgccagaggtgaaagtctgagcaccccatgcaagaaaacttgtaggtgttgcagtgatatggggcgcattttgacggtcacatccaatacaaatgcttctcaaatctccacatcagaagatatgactgttggcttcattataatgcagagtaatatccactgcaaaataaataaataaataaataaataaataaataaataagaaagaaagaaagaaaacatgcataggcatgtgtaaataagcaaaaattgttctatcaagaagttaatttamcaggaaatgtaaagtcacaaggacacttgcttgtaacttctaataaagtatagagatgattaatattatctacaagacaaaaaaaacgcta

SEQ ID NO: 213813 - DNA, 491 bp, Homo sapiens
tcccaagactaaagagtccctcctctccatatatattgccattctgattcttccctttccagtacttattacaaacaccgaaagcccaattccaagagtcccccacatggacctcccagtaatacttgccagaggtgaaagtctgagcaccccatgcaagaaaacttgtaggtgttgcagtgatatggggcgcattttgacggtcacatccaatacaaatgcttctcaaatctccacatcagaagatatgactgttggcttcattataatgcagagtaatatccactgcaaaataaataaataaataaataaataaataaataaataagaaagaaagaaagaaaacatgcataggcatgtgtaaataagcaaaaattgttctatcaagaagttaatttaccaggaaatgtaaagtcacraggacacttgcttgtaacttctaataaagtatagagatgattaatattatctacaagacaaaaaaaacgcta

SEQ ID NO: 213814 - DNA, 589 bp, Homo sapiens
caacaacgatgaaacgggtgcgtttaacacactgacagcttttaaaatgtgccctgaggcaggtggctgagcttatgtgtgatattgatccctccaggggtagatgaggcagcaccacagactgaatgctcacccggcatcagcatcacgcatcctaattctcgaagtcatcattcgagtggggttgtatctactttttaaagatgaggaaatktagtaatgtttttgcagacatggtagagctagtggatggcaggagcccctatctctgctcaagggtgtctgtcttagtccatttagtgttgctataacagaatgcctgagactacgtaatttataaagaaaagagggtttttttttttttggttgggggattgctttccagcaaaacctgaaaagcctgctagacaaattctaaaagagctctaacacttaagaaaagaggttgatttggctcatggttctggaggctgtgaagtccaggaagcatggggctggcttctcatgaggaccttgtgctgcaccctaacatggcagagaagcagcaggggaagcaagtatgtgcaaaaggccagccatgagaggcttc

SEQ ID NO: 213815 - DNA, 484 bp, Homo sapiens
acttctttcctaattttattttaactccattacaggctcattagtatgaatgctccctctttttttccctctctctttttccccctctctttttaaatgcttttctaggcttaacaatgtacatcttaaacttatcacagactatcttctatgctgtgctgtttcataaacagtgtgagaattttacaaaagtgtactttcatgtccttccagtcctccctaatggcacaaattttatttaaaatatattatatttatttactgtacaatgtcaattagcacttaaagaaattttaaaatgagaaaaaagtattttttatccccctctagcatatttatagtttccaatgtcttccatttatttgtgtgtactgtaatttccatctggaatcattttcctcccacttaaagaacttctttaatatttttggtaatgttgkttgactggcagggacttctgcaagtttctgaatgcctgggaaga

SEQ ID NO: 213816 - DNA, 438 bp, Homo sapiens
ttcattttatggaccatgcttttggtgctgagtctgagaccttgccaagtcttagatcctaaaaattttcttcattttcttttctaaaagcgttttgcattttgtttacttttaagtctgtgattcattttgagttaattttcatataagatttgaggtttaggatgagattcttctttttgttgttattttttcttctggatgtccaattgctccaacatccatttattgcgaaggttgctcttctttcattgaattatttttgcacctttgtcaakaatcaattgacatgacaaaacaaattctggcaaggatgtggaataacaggaatgcctattcattgctggtgggaatgcaaaatggtacagccatgttggtagacagatagatggtttcttacaaactaaacatacttttactatatgatccagcagtcat

SEQ ID NO: 213817 - DNA, 579 bp, Homo sapiens
catggtaaatgatgagaatagaaggaaattatcaaactgacaaagggcatcttgagaaaaaactacaactaacattatatttaatggcaaaacactcaatgttttcctactaatattgggaacaaggaaaagttctactcttgacactcctattaaatttgagaagtattagtcaatgcaatcaagcaagaaaatgaaattcaaaaacttattgtttggaaacagagaactaaaactagttctattcagacagcataattttgtaygtagaaaatttcaaataatctaaaaaaatatacaaaaaataaaattttccgaactaataagtttaataaggtggcagaatacaaatttcacaatcaaataatcatatttttatgtattaacaatgtcaaattggaaactgaaattaaaaatcaacattatttattatattccaaaatatgaaattattaggttataaaaatgaaaaaaacatgtaaataatctttatcctaaaaactatgaaacaccaacgaagtaaatcatagaagacctaattaaataaagaaatacactgcttacatggcttaaaacatt

SEQ ID NO: 213818 - DNA, 579 bp, Homo sapiens
catggtaaatgatgagaatagaaggaaattatcaaactgacaaagggcatcttgagaaaaaactacaactaacattatatttaatggcaaaacactcaatgttttcctactaatattgggaacaaggaaaagttctactcttgacactcctattaaatttgagaagtattagtcaatgcaatcaagcaagaaaatgaaattcaaaaacttattgtttggaaacagagaactaaaactagttctattcagacagcataattttgtatgtagaaaatttcaaataatctaaaaaaatatacaaaaaataaaattttccraactaataagtttaataaggtggcagaatacaaatttcacaatcaaataatcatatttttatgtattaacaatgtcaaattggaaactgaaattaaaaatcaacattatttattatattccaaaatatgaaattattaggttataaaaatgaaaaaaacatgtaaataatctttatcctaaaaactatgaaacaccaacgaagtaaatcatagaagacctaattaaataaagaaatacactgcttacatggcttaaaacatt

SEQ ID NO: 213819 - DNA, 355 bp, Homo sapiens
aagcttagagagtctttcttcagccatgctcagtgaactaaagatcccatcgaagacattcttaatttctgttacggtggttttgatttctagcatttcttttyggtttttcttaggattttcatttctctgcttacgttgttcatgtgttcttgtatcttgtctacttttcaaatttaattccttagcatattagttataagttgttttaattttttaatttcaaatctgatatttctaacttatctgtcatatctgactttggttttgacacattttcagcctcttcaaactggttttttttttttttttttttctttttcctttctctctctttttgtttgggccttttagt

SEQ ID NO: 213820 - DNA, 597 bp, Homo sapiens
ttgcttttattaatatagaattaggatattggatcaaatgtattccacccataaaaaatgtgccacaaatgtaaatttgctagaaacatttattctagtgctaactcatttttttaaaaaaaagacaaagcaatattctaatgaaaaacaagtaacaatataaacaattttttaaatgaaaatctgcctttttaaaaaatgaagaggaaaagaagttaaagagaactgaaaaaaatgctatctgcaagaaaactcatagcaaatatcaagagcaggttagcatctgctttgtgtatctcagtatttctccctatgccctagaacagaaatgtagttattgagaatcatatctgccagttaatctcaaaggccaagtgtaagatctggcatttatcctttctactttttgtgacttatcaaaccacacagaatakttgattagtaggtggtagaaatatattacctgtgatatacaaaatcaacctttgatagcttttattctcagaataattataacctgccttaggcaaataatttggacctttagaatatctgacttattataacttgagataccaatgattataatgctatcaa

SEQ ID NO: 213821 - DNA, 583 bp, Homo sapiens
tgatacctctcccaactactcagttgtgctgttatagcaccagaaaaaccataaataatatgtaaaacaaatgagtgtgactgtgttccaacaaaattttatttatggacactaaatttgaatttcataaaattttacatggcataaaatctgattcttttgattttttttcaactctatraaaatgtaaaaatatttttagcttgtgggctgtacaaaaaaaaaaaaaaaaaacgctgtggggaggaattggttcacaaaacacaatttgccaaacccatgttttgataaataacttgattagattacatataatattgattaactactgcaggctaatcaaagaagtattatatataaaacaattaactttgaaagcatactaaatatatgtatgttatgagactggtagtgagtaaataaaatagagatcacttttatagtagtatctaaaaaattatgccttaaactcctatctgcttgattacatagcaatcttttcttcctgaaaattgttctccacaaacatttctcacaattttcattgatgtttaaatgtgtaatctaatgccccttaaatatc

SEQ ID NO: 213822 - DNA, 545 bp, Homo sapiens
ttgaactatcttaaatttctctatttaatgtcaaagtctatgttgttgcttacttgctccaaattattgaaatctttttgactcccagtactcrgttgtctcagaagacaaatgactaacacgttttcagctcaattgcttcagaaattggccactcaaatagcactttgggttcataatgacaaaactacagaggacaatttggtaatttaaatggaaaacccaaatatattgtaaaatcttttgaccaccattaaatttctagaattcatcttaaattaacaatcctggatagagcacttatttattttgctgaatattcagaataacattttttacaaatatttaaaattttaagctacaaaattttccagcaataaatacagttaaaatatagtacatgagtacacatcatccaaaatggtgaaactttagagatataaaataagtttatttacaaagtgtttatcatcaacactactcaacagtgctctggagagcttagcaaatacatgtgaatgtccattaaaataaatgatttctag

SEQ ID NO: 213823 - DNA, 545 bp, Homo sapiens
ttgaactatcttaaatttctctatttaatgtcaaagtctatgttgttgcttacttgctccaaattattgaaatctttttgactcccagtactcagttgtctcagaagacaaatgactaacacrttttcagctcaattgcttcagaaattggccactcaaatagcactttgggttcataatgacaaaactacagaggacaatttggtaatttaaatggaaaacccaaatatattgtaaaatcttttgaccaccattaaatttctagaattcatcttaaattaacaatcctggatagagcacttatttattttgctgaatattcagaataacattttttacaaatatttaaaattttaagctacaaaattttccagcaataaatacagttaaaatatagtacatgagtacacatcatccaaaatggtgaaactttagagatataaaataagtttatttacaaagtgtttatcatcaacactactcaacagtgctctggagagcttagcaaatacatgtgaatgtccattaaaataaatgatttctag

SEQ ID NO: 213824 - DNA, 514 bp, Homo sapiens
tagtatcatatgaaatagttacatttccctaaaaatcctctgtgctcttcctgttcatccccccttcctccaaatccctggcaatgactgatattttaactgtctgcatagttttgcctttcctattatagttggagtcgcacagtatgcagccttttcagattggcttgttttcacttagtaatatgtacttaagttttctccatgtcttttcatggctcaaaacttcatttcctttaggcactgaataatattccactgcctagatacaagacaggtttcttaaatccattcacctactgaagaacatcttggttacttaaarttttggcaattatgaataaagctgccataaacattcacgtgcaagattctgcatagacagaagttttcaactcctttgggtaaatatcaaggtgcaccattgctggattgtatggtaagagtatatttacttttgtaagaagctaccaaacggtctttcaaagttattgtaccattttgcacttcaacc

SEQ ID NO: 213825 - DNA, 484 bp, Homo sapiens
ctctcacatcttttgcctttgttttgattgttatttgtttgttgttctcttttttcctgcctcattccagtggaatatagtatttttaagtattctattttattctaaaacattttagaaataacttacttgtgattttcgtttccttttcagtgtttgccccagtgattacaatatgcatctttaaattatggaagtttcctgtcacataatttcatatttatgaattatgtatgtaccttataaccacatcattctatctatcccctattactccttttggtattcttatatatgttgcaaaacctacaattttttattaaatttattttaacttaaagaatcatagtttatgaaattttataatgtatatttacttccataatattctttctagtgattttcatwttcacctgttgaatccaacttccaggtgctattattttttttcagcttgaagatttttaccacttttttgaaatgc

SEQ ID NO: 213826 - DNA, 607 bp, Homo sapiens
cagatacagctctgatggctgtctttagatagtaacttgtttaatcctcacagcaaccttatgagataagccctatactcatctccatttgacaaatgagagaacagaagcagagtttaagtgactttaggaagaagtacaaccagtaaaggagttagcaaatattcaaagcagagccctcactcttaactacttcaagtrgttaatctccaagtttctatttagtctttagtcaagcattcatttagtttttatccttggaagcaccctgtgctggttgctggcatagagataaatataaaagacatgtaaatcaataaatcacattttaatgtgtgttgtgatgtgaacacaatgaagggattatcacttgccaagtaacaaaagggaaaacaagaagcagttaggttaatggtaaacagttctatgtatttcaacttcctattgtagtatagcctttgaacacattgacattgtaattatattcataatgaagacctccaattgccaaagattgaatgtatgttcagagaagtttgcttaagaaagaaggcatataggcagtgtatttacaaacttttattatagatagtttacctgttttgaa

SEQ ID NO: 213827 - DNA, 480 bp, Homo sapiens
cattttataactacagaagtacctataacaatgttccttattttttgtatagatttgaatttcatctagatatacttacttacaaaccaaagaactttctttagtatttcttttaagtcttgtctgaaattataagaatgtctcagtgagacagcctagtataaaggggyccccagagaacctctgactggcctgctcactgtgagaatggggtggaaccacggaagttcctgccatttgctcaggggaggagcctggcccctcctgttctagtgtgggaacctcggattcaatctgtgagatgagggactgctaaaggaactcctctcttgctttgctgtgttgcttttccttgttccttttgcccagtaaattctgttattcccaacccttccatgtgtccacaagcctaatttttcctggtcatgtgacaagaacccagctttcagatgaactaaggagaaagtcctacaacatcag

SEQ ID NO: 213828 - DNA, 434 bp, Homo sapiens
ggttaactttttcaccatatacagacatgtacgtaaaattatatggagtatataataaatagtatttcctaaaacagattagtaatttctagattcaactagagaaatgaaaccagtttataaaaactacctctatacaaagtctgatgaaattagtgagcatagaaaataaaaatagaccaaggaaaatattaaaaactatcaarctaaagaaaaaattaccatcaaataaatttatatatgttctttaatgaaagtagagagacaacttcaaaagtaaacagacagttcttaaagcagagctgggaaagaaaataatttttattagcgaaaatctcattgattcatctcatcagttttatgggtaaaagaggatgccctgatggaaggttttctgaaaaccacagtttcattaaaaaaaaaaaaaaattaag

SEQ ID NO: 213829 - DNA, 573 bp, Homo sapiens
aaagctttctatttgaagttttaaaatctttcatgcaacaatttaaaaattaatataaagcgtcctttctttttttccacgtgctctaaaatgcctgacccacacctccttccatgctccaagccctgcttggcagctcacatggttgaagcctggagaatgtaggactgatactatccagcaggtggaggtgttggaatgacaaatattcttaagtctcatggtattaaggatagcagtatatttaatcatatttctccaagcaagaatttgtacatkattttccatggggaaaagaagcaaacataaaaagcctcgtgatgcttgtagatgccaggatgtcacacttttatgtggcttcctccagccagcacagggactgggactgcccggctccttctgcttttgaaggctgctcaagtcactgctggcatttctacactccaggccagaagtcaagaaagcaatgtgtttccagcaaaaaagaaaagggagggaaaaaaaaggtgttaatactactcacaaagtagtatgctggagatatacgatgactttcaatcacttctgaggccc

SEQ ID NO: 213830 - DNA, 573 bp, Homo sapiens
aaagctttctatttgaagttttaaaatctttcatgcaacaatttaaaaattaatataaagcgtcctttctttttttccacgtgctctaaaatgcctgacccacacctccttccatgctccaagccctgcttggcagctcacatggttgaagcctggagaatgtaggactgatactatccagcaggtggaggtgttggaatgacaaatattcttaagtctcatggtattaaggatagcagtatatttaatcatatttctccaagcaagaatttgtacatgattttccatggggaaaagaagcaaacataaaaagcctygtgatgcttgtagatgccaggatgtcacacttttatgtggcttcctccagccagcacagggactgggactgcccggctccttctgcttttgaaggctgctcaagtcactgctggcatttctacactccaggccagaagtcaagaaagcaatgtgtttccagcaaaaaagaaaagggagggaaaaaaaaggtgttaatactactcacaaagtagtatgctggagatatacgatgactttcaatcacttctgaggccc

SEQ ID NO: 213831 - DNA, 605 bp, Homo sapiens
gaaatagggagtggagggtggggaggttggagagggcggagattaaattggtgttgctgcctatatatagccttagattagcctcttaatccaaccttcattcaactgtaatatgtagcctggagcttcgaccataggtagatgggggtaaatacaagtgtgtatttcagaataagatttgcttgctaaaatgcgggaatcagtcatttctccagggtgcagatttatatttacatcatcaatgaaagtttctttggaaattagtgtttatgttttactgttgtttccctacagagtagtattgatgtttctctcaatatgtgtgtcaaagagacgtgtatgtgtcaaagagaaatatttgartaattatgtaggtggtttttgttaagcatccccaggaccactgtttcttctcatagcgccatacgaaaagcgaaatgcattttcctctggccttaggcatttattttgcgtgaagctttcactaacatctgaaatctcctggaatatgtttatcattatttcctgcctttagcaaaaatctttcctaaactccagctgtttttcccccctaaagcttcagcattaaaggctgggacagatct

SEQ ID NO: 213832 - DNA, 346 bp, Homo sapiens
tacattccaatgaacaaaagtgctgaggcacttgcagtcartaacaataacgtctacaagaagatcaaaagaaaggtgaatatggaggtaaccattctaaactgataaattccaaggctacaattatatattatttactcatttttgtggttgaatttcattatccttaatcctgggcacagatgtttaaataatttttaatcagagagaaaaaaatatgtatgtgtacgtatacaccaaaagcaagttttttttattctgtatgaggcaaggtaatttggtctttaaagaactatttttaaatgattctttgaacatgaagaattagtatttcataggtttccta

SEQ ID NO: 213833 - DNA, 346 bp, Homo sapiens
tacattccaatgaacaaaagtgctgaggcacttgcagtcagtaacaataacgtctacaagaagatcaaaagaaaggtgaatatggaggtaaccattctaaactgataaattccaasgctacaattatatattatttactcatttttgtggttgaatttcattatccttaatcctgggcacagatgtttaaataatttttaatcagagagaaaaaaatatgtatgtgtacgtatacaccaaaagcaagttttttttattctgtatgaggcaaggtaatttggtctttaaagaactatttttaaatgattctttgaacatgaagaattagtatttcataggtttccta

SEQ ID NO: 213834 - DNA, 346 bp, Homo sapiens
tacattccaatgaacaaaagtgctgaggcacttgcagtcagtaacaataacgtctacaagaagatcaaaagaaaggtgaatatggaggtaaccattctaaactgataaattccaaggcyacaattatatattatttactcatttttgtggttgaatttcattatccttaatcctgggcacagatgtttaaataatttttaatcagagagaaaaaaatatgtatgtgtacgtatacaccaaaagcaagttttttttattctgtatgaggcaaggtaatttggtctttaaagaactatttttaaatgattctttgaacatgaagaattagtatttcataggtttccta

SEQ ID NO: 213835 - DNA, 463 bp, Homo sapiens
cttctcataaatacatggatttgtctccggactgtctattctgtttttcgacatgtttatctaattctttcccaagaattcattgttcgaatcagaggtcaagaagctttttcagtgaaggatcatatagtaaatagttaaggctttgtaggcaacacctcagtgaatgaaatgtggcatctcattggtggaattgacatcasaacccatgtgaagttcccaggcttctagcccttccattgagtacaggggaatttaactgaacagtttattcagtgtgtacttccagtggcaccctgccatccttagaataaaatgcacaatgcttagaatctttgcacgtaatctagccaagataatccagacccaaaatagaatcatagacatttttgttatgtgtaggtatcatggtataagtacaacttttgatataactgggcacataccaaagcacagtttatta

SEQ ID NO: 213836 - DNA, 463 bp, Homo sapiens
cttctcataaatacatggatttgtctccggactgtctattctgtttttcgacatgtttatctaattctttcccaagaattcattgttcgaatcagaggtcaagaagctttttcagtgaaggatcatatagtaaatagttaaggctttgtaggcaacacctcagtgaatgaaatgtggcatctcattggtggaattgacatcagaacccatgtgaagttcccaggcttctagcccttccattgagtacaggggaatttaactgaacagtttattcagtgtgtacttccagkggcaccctgccatccttagaataaaatgcacaatgcttagaatctttgcacgtaatctagccaagataatccagacccaaaatagaatcatagacatttttgttatgtgtaggtatcatggtataagtacaacttttgatataactgggcacataccaaagcacagtttatta

SEQ ID NO: 213837 - DNA, 597 bp, Homo sapiens
gtggggtcagttctcctaaagtttcaaatgtgctgtaaattgcagagaattctcagacttaataggaatattatttttgtatacatgtgctggggttttggagaaagatttatttaaaaatgaaaaaaggccaggtgtggtggctcacacctataatctcagcacttttggaggccaaggcaagaggaccgcttgaggccaggagttcaagaccagcctgtgcaacatagtgaaatgctgtctmtaagaaaaattttaaaaagtggtatgtgcctgtagtcctggctacttgggaagctaatgtgggaggattgcttgagcccaggaattcaaggttatagtgagctataattgtgtcactgtactctagcctgggcaacagagcaagaccttgtctcaagaaaatgaaattaaaaaaaaaatccccttactcctagaaaagaaaaagccaatcaaaaacctttcttggacaatgaaatgccagagggttttataccacacagggatagtgccacatcatgtcttgtagaagaagcatccgtttttatagaatctaaattgcagtgaatattatagcatgccataaaaatatgccgg

SEQ ID NO: 213838 - DNA, 597 bp, Homo sapiens
gtggggtcagttctcctaaagtttcaaatgtgctgtaaattgcagagaattctcagacttaataggaatattatttttgtatacatgtgctggggttttggagaaagatttatttaaaaatgaaaaaaggccaggtgtggtggctcacacctataatctcagcacttttggaggccaaggcaagaggaccgcttgaggccaggagttcaagaccagcctgtgcaacatagtgaaatgctgtctataagaaaaattttaaaaagtggtatgtgcctgtagtcctggctacttgggaagctaatgtgggaggattgcttgagcccaggaattcaaggttatagtgagctataattgtgtcactgtactctagcctgggcaacagagcaagaccttgtctcaagaaaatgaaattaaaaaaaaaatccccttactcctagaaaagaaaaagccaatcaaaaacctttcttggacaatgaaatgccagagggttttataccacacagggatagtgccacatcatgtctygtagaagaagcatccgtttttatagaatctaaattgcagtgaatattatagcatgccataaaaatatgccgg

SEQ ID NO: 213839 - DNA, 543 bp, Homo sapiens
gtcttttagggctgggctcggtagctcatgcctgtaatcccagcactttgggaggccaaggcgggcggatcacaaggtcaggagttcaagaccagcatgatcaatatggtgaaatcccatctttactaaaaattcaaaaattagctgggcgtggtggcgtgcacctgtaatcccagctactcaggaggctgaggcaggagaatcgcttgaacccaggaggcgggggttgcagtgagccgagatcacaccattgcactccagcctggatgacagagcgagactctgtctcaaaaaaaaaaaaaaaaaaaaaatcttttaagtatgccatatgaataaaaaacttttaaaaaatccattacctcaagcatttatcccttgtgttatactcttttagttatttttaaatgtacaattaagttgtgaataaaaactttgagagctttagagtttagaatcactatcacatttactgtctcattttatgatcctcacaacaaccctgaaagatagatgggkcccattttacagatgagaaaactgagc

SEQ ID NO: 213840 - DNA, 617 bp, Homo sapiens
ttgtcctcacacctttctcttcttgcttctgactgatagcatctgccttcgttttcatttgtgatggcaaaagcctccagagtctagaagagccacgtgctttggagcaaggagaaccaggaagtggatgtcacacgtgggtttatctctagggagtgaaatgtcctagaaatgctcaaaaaaataagtatgtctctctcagtcctctcggatttgacttgccaaattagagccgtccctgacaatctggcctcacgtaaggcccccagatcactctgttgataacagratccaccttatgagataatgttgcctgtgcaaacttcatctggtatggtcaaccctaatcagcatttttctcaggatatactaggtgctcaataaatgttttttattgtctatcaaatttctagtagacataaacaaacctaagtaatgtggggaagcagaagatagtcaaatatttttcaaagaggaaaatgtgtccaagtatttaaataaagcaaatagggaaataatacacagatgtgaaaaaaatgtatttccacaaacctcttagattggagatcgtggcaaacagtagtatttgtcatccccgaggttacctgctcacatct

SEQ ID NO: 213841 - DNA, 560 bp, Homo sapiens
gtgtgagcaaataccaccttgctatggaccaaaattgcttcaaaagatgtagagatccctgggttttaaaacatcagagttggaaacacttaggtcaagtagagcaccccttcatcttgttcctgatttctccatttgcctccagactaagtgagttcacctgtgccttggatgcactaaattgccaacccctagagtgagcccatgctagccttccctgttcccagttagctgggatggcatgagctaagttcttccraacaaacgctgagaagaaggtggttacttgttaatgaaaataaccacaggcagatggtagcactgaccctgacaaagcagtagacttcagaaagaatgaaatgagttgtataactttccctcccgtgttccaagcagtggagatgatggcttggggaataactgcagagagatgcacttgcataatgaataggctctcaggcaatgctaattgttagaatagacatttgcatatatgaatatgtttaatggagattcataaacatttgtcttaggctttaaatctcacgtaggtggagata

SEQ ID NO: 213842 - DNA, 562 bp, Homo sapiens
gactctttcctcctcctactgacacattcagaagcagagcagtcatcagcttttgtgaaaatcccaaaagcaattccagaagatcatgtgccagccactcaggacacgcaggcttgtgtggttgtcatggggaaggttttgtaattgaaataaaaatactcatgctcagtctgccaccacacagaaaatgcttttcactcatgcacaccagataattcgcctaagtgacaggttttactttggaggaagcaccgagctaagctggtttacacagtcaatgatggctcattccatgaaaaaggaactgggaaggaaggcagggtggtgaaggttagctagacaatgtggaggtggctgccagccagtcagccaagggcacagctcctcctgctgcttctaatgctgtggagacacacagggatttcatctttacctcctgacagttcctcaaaacacgcgcrcacacacacacacacacacacacacacacacactctctctctctctctctctccaatcttagtaagtgaaaaaacaaaaaccaaaaccaaccaaaccaaac

SEQ ID NO: 213843 - DNA, 202 bp, Homo sapiens
gtctccacaagtctgccgttttcagcacmctcgtggatggtctggaggcattctttgggttgttgcggagcatgtgtgtatatttcagtgtagtagtatcctgccaaacctctgcaggctctaaatatgatagagcacggtagtctcgcaaagggaatgtgctgcacagcacagaaaggagatgaaaggtacaaggccttgg

SEQ ID NO: 213844 - DNA, 627 bp, Homo sapiens
cttcctttctttaaagccaaaaaagtgaacaattaccagctctcaaatacatatctttaaaaaaatttactttttatattttctgcaaacccacctaggaatgtactcaagaaatgtagggaattgttttaaagaatagcaacgagttataccagaacatctatgaacaaaacgataaactcactataattctgaaggaaaaattattcatgatttattcttgtatgttagctgttagcacagctgttattttttgcttttctgtaatatggtgatttctcataaagaatactgattaaaaaaaacttggctgcatttacataaccaatttaagagtacaccaacaaggtttggggggtaattttcacatcttatctgtgcattactastgttttgtctactcaggatgcagcttgatatatgaacgtcaaatctttgttgaaaaatgatgtatatcaattttgtttattcccaaacctgtaggatgagaataaaataatgcaaattatgtccatttgggggtttgcaatacaccaaatggtgtatttatatatacactaatatttatatacacttttactataaaaatacttagcactcttcaattcatttagcaatggctgccaa

SEQ ID NO: 213845 - DNA, 584 bp, Homo sapiens
ggaaggaatgccttctggagagagcacatgactcccaggttgccctgatccttattactctcaactacctgatttccaccaggaccaaatgtcccgaggcagagcctagagagatgatggycaaactcattttctctttttcctgggcaggcacattctatgttctatttcctattctacttgagttaagaaggccatatgattaggtcaggtcagtggaaagtcaacagaatgagcttccaggtctggctcataaaacctatgctggcagtattcttagcacgctcttttcttttaccttcaaggcaaaatgcaaaggatataatggagcactctgaggtcctaagagaggtggtcactagatacagaaagaatctgtgccctggtgtggagcaacccttcctcaaccagcaccagactcaagtgggtaatggcttatactgtgctgagcctctagattggtagcctaccctaacccatggatcttcactggcatttctcatccattccaactgctgtcatacctggcccactttacttactgatataatttgcctggccctagaaaacatttgagtttataa

SEQ ID NO: 213846 - DNA, 566 bp, Homo sapiens
gaatgccttctggagagagcacatgactcccaggttgccctgatccttattactctcaactacctgatttccaccaggaccaaatgtcccgaggcagagcctagagagatgatggccaaactcattttctctttttcctgggcaggcacattctatgttctatttcctattctacttgagttaagaaggccatatgattaggtcaggtcagtggaaagtcaacagaatgagcttccaggtctggctcataaaacctatgctggcagtattcttagcacgctcttttcttttaccttcaaggcaaaatgcaaaggatataatggagcactctgaggtcctaagagaggtggtcactagatacagaaagaatctgtgccctggtgtggagcaacccttcctcaaccagcaccagactcaagtgggtaatggcttatactgtgctgagcctctagattggtagcctaccctaacccatggatcttcactggcatttctcatccattccaactgctgtcatacctggcccactttacttactgatatwatttgcctggccctagaaaaca

SEQ ID NO: 213847 - DNA, 428 bp, Homo sapiens
tagcacaaagaaagagcaaaaatgaacatgatatgttttatctcattttattcatcattaccaccctatgaaatagcattttgatccttattgctgttaactgaaaayaaaacactacaattttttttttttttttttgagacagagccttactctgtcatcaaggctgaagtgcagtggtgtgataatgcctcactgcaacctcctcctcccaagttcaagtgattctcatgcctctgcctcccaaatagctgggactacaggcgtgcagggtgccaccaagcctggctaatttttgtatttttagtagagatggggtttcaccatgtcgcccaggctggtcttgaactcctgacctcaggtgatccatgtgcctcggcctcccaaagtgctgggattacaggcttgagccaccacaccccgtcaaa

SEQ ID NO: 213848 - DNA, 566 bp, Homo sapiens
ataaaaaaagaataaaccaaccttcatgttggatggagattccaaatacctttgaaacaagaatctttcttgaaaaatcatcctgcccaggtggaatgggagctaggatctcattataaccagtttctgattatgtcagtgaataagggtttcagcccagggccaggatggcaatagagttagagttggagaaaataactgggagaaaacaaatacttaataagcactggtaatagagaattaacattcctgctctgtcttaggtgctaaccctgctttaaccagaaccagcttcactttaatttattttgtatattaggattctttctggggaataccatattactgaaaaaaaaatttaaaaaaagtaaaaaagaaaaagttaaaaaaggattctatcaacattccactagayaaaaacattctatgtttataaataaaacaaaattgaaagaattcaatgatcttttaaaatataaggatcaccaatatccctgatgaacatcgacgcaaaaatcctcaataaaatactggcaaaccaaatccagcagcacatcaaaaagctt

SEQ ID NO: 213849 - DNA, 566 bp, Homo sapiens
ataaaaaaagaataaaccaaccttcatgttggatggagattccaaatacctttgaaacaagaatctttcttgaaaaatcatcctgcccaggtggaatgggagctaggatctcattataaccagtttctgattatgtcagtgaataagggtttcagcccagggccaggatggcaatagagttagagttggagaaaataactgggagaaaacaaatacttaataagcactggtaatagagaattaacattcctgctctgtcttaggtgctaaccctgctttaaccagaaccagcttcactttaatttattttgtatattaggattctttctggggaataccatattactgaaaaaaaaatttaaaaaaagtaaaaaagaaaaagttaaaaaaggattctatcaacattccactagataaaaacattctatgtttataaataaaacaaaaytgaaagaattcaatgatcttttaaaatataaggatcaccaatatccctgatgaacatcgacgcaaaaatcctcaataaaatactggcaaaccaaatccagcagcacatcaaaaagctt

SEQ ID NO: 213850 - DNA, 605 bp, Homo sapiens
taataattttatatcctgctactttgctgaattttcttataatcattttcatttggtatctgttggatttttcaggtatacaatcataccatctgaaaatatagaaatatattttttcccaatttttatacctctaattttctatggtattggaggtacagccaatcaattagacaatgttaactagtagtggtgattttgggcatctttgtctagttccagactttaggaagaatatcttcagtgtttctccactaggaaatgggctagccttaaagttaagataaaatatgtataatagtataatgttttcatcaattcttattttgagtgctttttaaaaaatcaagaatagttttggtttttattaaattccttttagcaactataaatataaamataattttccatcataaatttattaatatggtaaattacattaatatattttgtattattgagttattcttgcattcttacataagcattgagaaggaatctcacttgatcatggcatattctcttaatgtgctaatctgtgaatatgtcagtaagtcttctcaattgacattcataactaaagttgataattcttttttgcagtc

SEQ ID NO: 213851 - DNA, 547 bp, Homo sapiens
gttttgttttccccagcaagttattttccccccataaacttagtctatttgtgggtattcttgccactaactaccaagatctgaagctcttaaaacttaatggaaacactgtccattgaatttaagtattttgagtaatatgaaattttttctggccaaaaaaagagaaataaatatccaccaattatatatttattgagtagagttgaagaaaaatggaatcacgtcagtgctcagtaaagcaaggtaaggttattagctgagactgagagaactaagaattttagagaaaggcttgtatttttttgaacttataaaaaaactttacaatgcagattgattatacttgtagtcagaaaaaaagtccaataaaatgattttcattttgaaaagttgaatagaatagttttggaggacctctaagaaaaccatgatcattttaaggggttgttaggtgggaattagctactagtgcagttttcctacctcttttggcttcattttcaggccttccytcaccttcagtaaaatattttaaatagtatga

SEQ ID NO: 213852 - DNA, 617 bp, Homo sapiens
gtatttctgaaatttggaggcattttgcctgccacaagtgaggtcacttgtgatacacttgtttttatgtaaactaggcaaacatagtgacagataaaatacatattcatctgacagtcaccacacttatttacattgatagcaccgcatgagattaaatctgatttcaatttggataccaaatttgtagttcagatgcctgcaaatattatagcagtgaggtaaaaaatgtctgtatactatacctatttattttcacatgacagaaaatgaaaatacaactaaatttcttgaaatagttcataagatgttcttagctatgtagtctacaatggataactcaatcattccaaagtcaagaacagatcaagtcctttttctgtcaaaagttacctgttgacctttaagagaagccattatacttctggaaacatacaatttaataaaaggggaaaaagtttgttaattcaaccaaattcaaaattctgataaaacattracattcttcaatataactcaaaattacaaagataattctaaatatgataaaaagatcaagattacaaaaacaaaaaatacaaaataggccactgtgatattcaaaagtaattcagaac

SEQ ID NO: 213853 - DNA, 626 bp, Homo sapiens
tgaatttctgctgcatgcacttggcctccctgggaattagattaattgtcatgctaggagatattctcctattcagtctgaaggcctaggaagtcacacaggatagtctttgttttgttgggaggatgggcactctgtggttaatgagaatggttacaaatggggcaaacaagagaaaaataacaatcttataaacttccctttgctactgctattatagtcttaatgaaaagccgctagatgctactggcccaagtgagaagtagtcattgtatcaatttagtcccataataagttggcacagtccattttttaattatttattttattatttatttatggcccccccccccgagacggagtctcgctctgttgcccaggctagagtgcagtggcgccatctccgctcactgcaagctccgcctcccgggttcaggccattctcctgccttagcctcctgagtagctgggactacaggcgcctgccaccatgcccagctaattttttgtatttttagtagggacgggatttcaccgtgttagccaggatggtctcgatctcctgatcttgtgatccgcycgccttggcctcacaaagtgctgggattacaggcatgagccaccgc

SEQ ID NO: 213854 - DNA, 582 bp, Homo sapiens
  misc_feature (1)...(582): n = A,T,C or G
tcatctcaccctagttagaatggatattattgaaagagaagaaatagcaggttctgatgaagatgggaagaaaaggaaacccttgtacactgttggtaggaacataaagtaatgtagccaatatggacattatggaggttcttcaaaaaactgaaaatggaactgcaatatgatccagcaatccactgctaggtatatatccaaaagaaagaaaaacagtatattgaagagatatctgcactctcatatttattgcggcactattaataataaccaagatatggaggcaacataagtgaccatcaacagatgaatggataaagacaatgtggtatatatacataatggaatattatctagtcattaaaaaagtgaagtctcaccatttgcagcaatatggatggaactggaggtcattatgttaggtgarataagatagagaacaacaaatatcacatgttctcactcccacatgttctcatgtgtgggagctgaanaagtgcatctcacagaggtnagagatagaatggtgactgttagaggctgggtagggagtgagagaggaggtagctgaagagaagt

SEQ ID NO: 213855 - DNA, 410 bp, Homo sapiens
aattattttagtttaatatgaccaattatttggtgcttgtatatgcaaataaaattcaatttaataccattgtatcctgaaaacttgtcaaattcacttattaggtaggtttttttcttggtagatatctcaggaaacaggtcaattatcagtaaataaaatttggctccatgattttcaatatttacacattttattttttttgtcttgcttcattacactgtgtaggacctctattacaaagttaaatagtagtggcatgtgccaggttattgatttattgcctctcagctccaaatccacacttctttgtcctattctgtgawactgtagctggaccataaaaacctttctcctttggcagctggcagaatggtttacaacctacttctgaagttttaaatattcag

SEQ ID NO: 213856 - DNA, 410 bp, Homo sapiens
aattattttagtttaatatgaccaattatttggtgcttgtatatgcaaataaaattcaatttaataccattgtatcctgaaaacttgtcaaattcacttattaggtaggtttttttcttggtagatatctcaggaaacaggtcaattatcagtaaataaaatttggctccatgattttcaatatttacacattttattttttttgtcttgcttcattacactgtgtaggacctctattacaaagttaaatagtagtggcatgtgccaggttattgatttattgcctctcagctccaaatccacacttctttgtcctattctgtgaaactgtagctggaccataaaaacctttctcctttggcagctggcagaatggtttacaaccyacttctgaagttttaaatattcag

SEQ ID NO: 213857 - DNA, 409 bp, Homo sapiens
gttgcagagctttacggtgcgtgttacagcacttaaaggtgttatatccagagtttgttccttcagatgtgtccagagtttctttcttcttgcaggttcatggtcttgcacacttcaagaatgaatgaagctgcagacttttacgttgagtgttacagcttataaagstgttatgtccagggtttggtccttcagatgtgtccaaagtttcttccttcgggcaggttcatggtcttgctcacttcaagaatgaagctgcagaccttagtggtgagggttacagcacttaaaggtgttatgtaaggagttttttccttcagatgtgtccagagtttcttccttctggcaggttcatggacttgctcacttcaagaatgaatctgcagacctaggtgttgagtgttacagc

SEQ ID NO: 213858 - DNA, 409 bp, Homo sapiens
gttgcagagctttacggtgcgtgttacagcacttaaaggtgttatatccagagtttgttccttcagatgtgtccagagtttctttcttcttgcaggttcatggtcttgcacacttcaagaatgaatgaagctgcagacttttacgttgagtgttacagcttataaaggtgttatgtccagrgtttggtccttcagatgtgtccaaagtttcttccttcgggcaggttcatggtcttgctcacttcaagaatgaagctgcagaccttagtggtgagggttacagcacttaaaggtgttatgtaaggagttttttccttcagatgtgtccagagtttcttccttctggcaggttcatggacttgctcacttcaagaatgaatctgcagacctaggtgttgagtgttacagc

SEQ ID NO: 213859 - DNA, 474 bp, Homo sapiens
agaaggaaatactgatagaactamcaagtattactttatttttgtccctaagttaaagtgtgacaatgatatggccatcactcaccgtatgttgtatgatgggccttcactacaccaacatttgatattcacaaccaggtccttcagtgtaggtattggccttgtttacttatgaagaaaatgagagtcaaagagatagtttgcccaaggacatacagctggcaaacggtaagtggtagagttaggattttaccccagcttcctaactttaaaccttgtactctttctcttccaaacatttagaaaagtttacctttagtagattttaccttttttccacaataaactttatattatagcctttttagtttgggcagtaattacatacatacatacatgcatgcatacatacatacactttaatgttctataggttatttgggccactggcactgtgaccaaagtgatagtctt

SEQ ID NO: 213860 - DNA, 604 bp, Homo sapiens
gccgggcgtggtggcttactccttgtaatcccagcactttgggaggccgaggtgggtgaatcacctgaggtcaggagttcgagaccaatctgatcaacatggagaaaccccatctctactaaaaatacaaaattaaccgggtgtggtggcgcatgcctgtaatcccagctacttaggaggctgaggcaggagaaccacttgaacccgggaggcgtaggttatgatgagctgagatygcgccattgcactccagcctgggcaacaagagtgaaactccgtctcaaaaaaaaaaaagaagccaaaaatctgtttggaatcatacctaaaatagtaatagtcattaaccaccaataaaatttacccatgtctgtgttttaactttttattgtatgagtctacattcagttattaaaatatttgctatctccttttctttttcagagcatgaataatctttcatttagtgagctatgttgcctcttctgctgtccaccttgtccagggaagattgcttcaaaattagcgtttttgccacctgatccaacttacacactgatgtgtgatgaaagcggaagccgttggactttacatctgtctgaacgag

SEQ ID NO: 213861 - DNA, 604 bp, Homo sapiens
gccgggcgtggtggcttactccttgtaatcccagcactttgggaggccgaggtgggtgaatcacctgaggtcaggagttcgagaccaatctgatcaacatggagaaaccccatctctactaaaaatacaaaattaaccgggtgtggtggcgcatgcctgtaatcccagctacttaggaggctgaggcaggagaaccacttgaacccgggaggcgtaggttatgatgagctgagattgcgccattgcactccagcctgggcaacaagagtgaaactccgtctcaaaaaaaaaaaagaagccaaaaatctgtttggaatcatacctaaaatagtaatagtcattaaccaccaataaaatttacccatgtctgtgttttaactttttattgtatgagtytacattcagttattaaaatatttgctatctccttttctttttcagagcatgaataatctttcatttagtgagctatgttgcctcttctgctgtccaccttgtccagggaagattgcttcaaaattagcgtttttgccacctgatccaacttacacactgatgtgtgatgaaagcggaagccgttggactttacatctgtctgaacgag

SEQ ID NO: 213862 - DNA, 391 bp, Homo sapiens
acaaattttcatctatttttgctaaacataatgtgaaggtggttgaaagctggatgccccaggaagaagtgcatcaatttacatgtaagatctcggctctgagggaaggaaacactagagaaccctcctctcaaaaccacctatgatygctttttcctgaggcatgcaaaaatcagactttctagttgattagccaggcatgaagttctatcttgacaagaagaaagtacatcctgttgtcttcttgtctcgatctcaaatgtgctcttgccagatattaatacattgcctttctttaaacacaggaagtgggtaaggcaaattttctcaaaggctcagaacggcacaatatttctcccctttgcttacatgcagaagatatctgagaata

SEQ ID NO: 213863 - DNA, 448 bp, Homo sapiens
gtgtagtcacatatttggagaagagagatccattatgcaattcactaaaatgtgttgaatgtctactaagtgttaccaaagcactgaatttcactcattaaagactcatcccaagtatcgtaagtcacgtttcagtcctccctaatacggttttcttgtattatgtattatgactcttgaatggtcagaaatgagagtaaacttaacagatgaagatggagacaggattattatatacatgttgtttctrtaagaacttttctctaaatctaatgtctttgtaattgatcgattcactgtccatggcctttttgagagtaaaggttttgtgttctctttcacctccctaccctggctttttttcaaagcatttttccagccccacttacagtttagaacagatgtagatgctggcctgctcccagaatcttgctgcaaaatcataact

SEQ ID NO: 213864 - DNA, 501 bp, Homo sapiens
ttaatccaatctatctcaacatgtttatcccttaactcgctgacagttctacgatgctccctacaccccacattgcctctgactgaggagggcacaggcaaaattgtcagtgtcttcttcggagataattttttccttgttaatatttggcatatcatagattgattttaaggaggcacagagaaataagccggagaaagtatttcctataggatgagccacttgaacaagctgagtttcttctcttctccaagatctgtctagaactgatactggaggagtgctgagcgaggacccttccccacaaatatcaaagtattgtctgtcattccacattaaacatttatttctttgggtcttgaaatttgaaagtacatctgaaattgaagcttcccagggagggatggggaagatgtaacaggaaaaaccacctttctgtctacccgtaggcaaggattmgttaactagctgcagaaagatgggctaaggccgcagcaaggt

SEQ ID NO: 213865 - DNA, 595 bp, Homo sapiens
aagcttatcgcttctctcaaaatctttgtcaacctaaaggacgaagctgaggcacacaatataattttgaagaatttacttaagccaaagtgaggacagctgcccaggacacacttccaactttggggaatgctctgttcagcctttgccacaagcaggttttttaaaggcaaaaggaaacaaagaattctttcttttatcttcactgtcactactctggaccaaaccaccatcatattttgcctaaaccatrtcctccttttggtgagtcctgcctctactgcccttcaaataatcatttagcctgaaactagaaggatttttaaaaaaacacaacttcggccacaaaatttccctatctcaaactcttcaatggcttttttgttgttttttgagatggggtctcactgtgttgcccaggctggagtgcattggttaatcacagctcactccagctcaaactcctgagatcaagtttttttgaggagacagggtctccttacgttgcccaggctgacctcaaactcctagcctcaagtgaccttcctgctttggccctccaaaatgataggattataggcgtgagccatcgtgc

SEQ ID NO: 213866 - DNA, 577 bp, Homo sapiens
cctgcttctgtctatgtaaggtaatatgcacaagttccaggacttagaacctgttatctctggggagggaacatttttcagcctagcacacgggtgacacagtttctatctttattaagcacaatccaaaacacctttggaccatgaaaacagtcttttgtcccttccatcttgttattcaaaactatgttccttattttaaaaacctttcctccctgcctatcccagaagggacagcggctctcaaaggcagctgggtgaagtttctgtaagatctcagcactagctcgcgctgctgttttggaggcatctttccaaggctttaattaattagaggatgcattctagccctgtttcccaaacttacatattcccgatacctctgattcagtagattgcgcgacgtctggcaatccaattttttctaagtgccccaggggattcttatcatcagccaagatttggaaacagtaatttcttatacaaagtcctraactaatacccttgaaataggggattccccttcactgccgggtgtgtcgcggttacaggactgagtttgttgagggaggaggaa

SEQ ID NO: 213867 - DNA, 422 bp, Homo sapiens
atgacattatagtagaagatgaaaattaagggtaaagagtctataagctgtgccaagcaaactaatttgggtcagaagtcctatttattttaatgcagtgctttttattacttttgttttccctcagtttcttgatactgctagacactgcactagctaagcactcactctccacatatgattatttaaatttaaattacctaaaattaaatattcacttcttcaatcccaccagccactgtggctacaagttacacagcatagtatgaatatttctttcactacagaaagccctaatgggcagtgctgaacgaaaacctttgaaacccagacaatccagaacaaacrgttccatgctttaaattcatactagcttcaaatgctaaagagcaccttccttcctggcttttccatcaaagtac

SEQ ID NO: 213868 - DNA, 581 bp, Homo sapiens
catatgtcaggccacaaaataagcctcaattaatttaaaataatttaagtaatacagagtatgttctcttactgcaatgaaataaaactggaactyaaaaatagaaataactggggaatttaaaaaatgtggaaattttaaaaagacccccacacactgctaaattatcagtgagtgaaagaataaatcacatagggaattataaaaatattttgagatgaacgaaaatgaaataaaacatagcaaagcttctgtgaaggagctaaagcagcgataagagagaaatatgtagctgtaagcaacctgtactttaaactgtcttaaaaaaaactttaacattccacttaaagaaactagaaagaaaagaacaaactaaatacaaagcaagcagaaagaaggcagaaacaaagattggaaaggaaataaatgaaatagagagtagataagcaatagggtacatttaaaaagccaagttatttattgaaagaccaatgaaatggacaaacctttatcaagattaattttaaaatgtgaatgatgataagttttggagactcaaattgttaaaatcaagaatgaaa

SEQ ID NO: 213869 - DNA, 581 bp, Homo sapiens
catatgtcaggccacaaaataagcctcaattaatttaaaataatttaagtaatacagagtatgttctcttactgcaatgaaataaaactggaactcaaaaatagaaataactggggaatttaaaaaatgtggaaattttaaaaagacccccacacactgctaaattatcagtgagtgaaagaataaatcacatagggaattataaaaatattttgagatgaacgaaaatgaaataaaacatagcaaagcttctgtgaaggagctaaagcagcgataagagagaaatatgtagctgtaagcaacctgtactttaaactgtcttaaaaaaaactttaacattccacttaaagaaactagaaagaaaagaacaaactaaatacaaagcaagcagaaagaaggcagaaacaaakattggaaaggaaataaatgaaatagagagtagataagcaatagggtacatttaaaaagccaagttatttattgaaagaccaatgaaatggacaaacctttatcaagattaattttaaaatgtgaatgatgataagttttggagactcaaattgttaaaatcaagaatgaaa

SEQ ID NO: 213870 - DNA, 606 bp, Homo sapiens
tttcttattggctcctatttctgacaaatgctaaggctaaagaagaaaatcraggaaaattatctattcctataacctacaatgtgtttgtgtgaatactaattttaacaaataataatttggtgatttggtttcaatgtgtgcacaaattttaccatcagaaatggttttagttaccatatgaactcctttagaaaagaaattgctcagtagatttccacatttgtattttaaaatggccctaagtgtacagcaatgcattgtcaggaaagataaccacaaagaagagtatcatattaagtgaaatatgccaggcacagaaggacaaataccatatgatctcactcatgtagaatctaagaaaactgatatcataaaagtagagaacagactagtggttgcaaggggcttcgtgactggaggtggggaattggggagatattgatcaaatgatacaaaatttcaatgacataagaggaataagttcaagagatttattgtgtagcatagcgaccatagttaaccatttgttgcagtcttgaaaaatgctagaaaaatgctaagccagtggatagaaagtgttctcagtacacaaatgatcacatg

SEQ ID NO: 213871 - DNA, 606 bp, Homo sapiens
tttcttattggctcctatttctgacaaatgctaaggctaaagaagaaaatcaaggaaaattatctattcctataacctacaatgtgtttgtgtgaatactaattttaacaaataataatttggtgatttggtttcaatgtgtgcacaaattttaccatcagaaatggttttagttaccatatgaactcctttagaaaagaaattgctcagtagatttccacatttgtattttaaaatggccctaagtgtacagcaatgcattgtcaggaaagataaccacaaagaagagtatcatattaagtgaaatatgccaggcacagaaggacaaataccatatgatctcactcatgtagaatctaagaaaactgatatcataaaagtagagaacagactagtggttgcaaggggcttcgtgactggaggtggggaattggggagatattgatcaaatgatacaaaatttcaatgacayaagaggaataagttcaagagatttattgtgtagcatagcgaccatagttaaccatttgttgcagtcttgaaaaatgctagaaaaatgctaagccagtggatagaaagtgttctcagtacacaaatgatcacatg

SEQ ID NO: 213872 - DNA, 464 bp, Homo sapiens
ggcctttctcaccataatagccctcaccctaccagtcagggagccartgtgggggttctgtcagctgctaagtctgtctatgccgattatgcattctggcactggggaaatgaccacaggatgagttcagggatccacaggacccactgtaagtcaggcctgggctaaaacttcattaattacctgacctccataaaccgctatgttaactggaagaacacaattacattttgggtcccctggaatcaacatcagctcagagccaatggccagtagtccctgaaatgtctgatcatttccctgttccctatgaagagttagcctggtaaaaggctggaggtctccttggggaaggatgggacaaagactcactgcataaattgttggtaaggtaacaggatccttcctcaaggggacctggtctccccttcattcaaggggttctgggtctgtaaactggctca

SEQ ID NO: 213873 - DNA, 464 bp, Homo sapiens
ggcctttctcaccataatagccctcaccctaccagtcagggagccaatgtgggggttctgtcagctgctaagtctgtctatgccrattatgcattctggcactggggaaatgaccacaggatgagttcagggatccacaggacccactgtaagtcaggcctgggctaaaacttcattaattacctgacctccataaaccgctatgttaactggaagaacacaattacattttgggtcccctggaatcaacatcagctcagagccaatggccagtagtccctgaaatgtctgatcatttccctgttccctatgaagagttagcctggtaaaaggctggaggtctccttggggaaggatgggacaaagactcactgcataaattgttggtaaggtaacaggatccttcctcaaggggacctggtctccccttcattcaaggggttctgggtctgtaaactggctca

SEQ ID NO: 213874 - DNA, 463 bp, Homo sapiens
ttcatttaaatgtacactttcatttttctgtccctcacacattayattttcttttttattagtcttataaatttgaaattttaccagcatatgtgaaccatttttcattttttattctctcctgtcatgggctttcacatcaaaagctcagtgtgcttctttctatgtggccataatatgatgatgatgatgatcatgatggtgatgatcatggtggtggtggtggtgatgatgatggtggttgtggtgataatggagatgattgtggtggtggtgatgatagtgttgatgatgatggttgtgttgatggtggtgttggtgatggtgatgatgatgatggtggtgatggtggtggtggtgatggtggtgatgatgatgatgatagtggttgtggtgaggatgataataatttctatcattcttttctttcatcttcttctgtactactcatagaaaaatacct

SEQ ID NO: 213875 - DNA, 634 bp, Homo sapiens
tcgtagtgattttccatggacatctgctggtccttgcagctgttgactgggaattgcaatttctctggatctcatgggtcagcaccctctgtgcagcagcaaactcagacatcctcaggcttggatttgctctattctagtctgtctgttgatttgataacatctttcttccttattaaaacccttggaaatgcttggtttgctggttgtatccattcttatcttccaatagttgtataatggtcatgaaaaatattttccctgctctctaaactctaggtagaaagaaaagagaagcaagcatgttggctcaatctattatcttgagcagaaaacatgtttagacaattttaaattattctctgtatagaggtaattcaccattgcattcacttggtagtgatgtgattattaytcagataatatttgatttctggggaatggatcaagttgtgaaatgcaaacgtgtaaggtgagataagaactcaaaataatgtgttgtcagaatgcttcgtgtaaaaggcagggtggggtgaccacggagaagagcaagagagagattagaaatagaagtgacgtataacacagggtccacagaagtggaaacggcagaaaaccttcctgtgttaaaaat

SEQ ID NO: 213876 - DNA, 674 bp, Homo sapiens
ctggtccttgcagctgttgactgggaattgcaatttctctggatctcatgggtcagcaccctctgtgcagcagcaaactcagacatcctcaggcttggatttgctctattctagtctgtctgttgatttgataacatctttcttccttattaaaacccttggaaatgcttggtttgctggttgtatccattcttatcttccaatagttgtataatggtcatgaaaaatattttccctgctctctaaactctaggtagaaagaaaagagaagcaagcatgttggctcaatctattatcttgagcagaaaacatgtttagacaattttaaattattctctgtatagaggtaattcaccattgcattcacttggtagtgatgtgattattattcagataatatttgatttctggggaatggatcaagttgtgaaatgcaaacgtgtaaggtgagataagaactcaaaataatgtgttgtcagaatgcttcgtgtaaaaggcagggtggggtgaccacggagaagagcaagagagagattagaaatagaagtgacrtataacacagggtccacagaagtggaaacggcagaaaaccttcctgtgttaaaaatacagcagcatctttttgtttaacaatcgaagcagttttttactcctgctgtgaattttggtgctag

SEQ ID NO: 213877 - DNA, 490 bp, Homo sapiens
aacatttaattgcttttttcccccacaatccaatttgcactcagtctggggtgcaccttgcttgatggtgaggttgaaaagagagcactgtgacagtagagataggagctgaagatctcttaaaggctcagctctggcctcagtcacattgtattagtgaaaataaggccaggctctacttatcttcaaggacagtggaatgagactttacctaacaatatgaagagtggcaaaaaaattcctgtcacctttatttcatcacaaggamcatgcaattgggctggacttagtatgtattaaatatatctggaatatatatatgaataaaagaataaatactcttagaatagattcatttttaccttcactctgtcaatgtaaaaagtattcatttttcaaggtctagtttactgctgcattctctgggaaggtttttttttttttcctctactagaaatgataactttcacttaattttaattgcattata

SEQ ID NO: 213878 - DNA, 490 bp, Homo sapiens
aacatttaattgcttttttcccccacaatccaatttgcactcagtctggggtgcaccttgcttgatggtgaggttgaaaagagagcactgtgacagtagagataggagctgaagatctcttaaaggctcagctctggcctcagtcacattgtattagtgaaaataaggccaggctctacttatcttcaaggacagtggaatgagactttacctaacaatatgaagagtggcaaaaaaattcctgtcacctttatttcatcacaaggaacatgcaattgggctggacttagtatgtattaaatatatctggaatatatatatgaataaaagaataaatactcttagaatagattcatttttaccttcactctgtcaatgkaaaaagtattcatttttcaaggtctagtttactgctgcattctctgggaaggtttttttttttttcctctactagaaatgataactttcacttaattttaattgcattata

SEQ ID NO: 213879 - DNA, 466 bp, Homo sapiens
ggtatgcaagaagtttttaatttttaaattctattacctgttttttttgaaagtattcatattgatatctcagaagatgtaccctgttgcttcagttccttgtctcttttgagaaggcctgggatggtaactctctcctttaatttttgttgtaacttttaaaaattaatactctaaagtaagggagataatatttgaaaayaggcaaataaatcttttgaatctgtttttgtctgatgtttgttgtatctatatgtttatgtgtgtcatgtggaagtgatattttaggattaaactgtatgaaagagctataatcaattgacttaaagaaaagtaagggcttatcagactcatggaagctagctcaggtctcttttaactcacatgacttcggtaatcttcagtaagattaatttggtaaatttaatctcaaaattatctccaatagtttaaaatcttgaagtca

SEQ ID NO: 213880 - DNA, 576 bp, Homo sapiens
aattcaggcactgcaactctgaagaatttcctgcttttgatacaagtagttaracaggcacgaaccaccaggaatattgggtgatgttttggcaattaccacattgcctatctaaatgtgataaattggcagctggtgccagggagaggccatttcctgatggtccacacctgttgcactaaagtgttaattgaatccagatgccagggagaagcaacttcccgggcatgtggaataagagacaaaatggcgaaatatgaccttacgaggtcacaccactgaaaaagggaagaaagcctcagatgggcatgcacacaacttcctaaacacactgcacatgctcacctcccaagagtaaggagggaactgcacatgtgggcagtgcaccctaagggaagaatcatgggaaaggggccaccctctaaagtcctaggatcaaggctaaccaccgcacatgttcttcaagtcacctgcttgggtctcttccaagcatactttcttttctttcttattctaaagactttttaaataaactcccactcctgctctgaaacttgccttgctctctttttctgt

SEQ ID NO: 213881 - DNA, 451 bp, Homo sapiens
aacaaaattaacaattaaaaacctacattaatttgctgatataagcattttaaaacttactgacacaaataattatttgtgtatatcatgcagctttgcctcttattttgcctgtcaaaatctcttcatggagaatcatacttctcttttctttgctagtgaatagtattattcatttcatttccctytctatacagagcactgcccttacttttgtggtcgttagtaaagataaataaagcatagtaagagacgattgaaaggaatttccaagaggtggtatatttgaatacaaatacctatgctaaggaagtgaaaaaaggataagatggtagagaaaaataaagacaaagatcacagaaaaggatgatcattgattaaacctgacttggggcccataaagactaccagtgattagagtctacaaaatcacatacgcatgtggccacat

SEQ ID NO: 213882 - DNA, 643 bp, Homo sapiens
aagtgttcatcagtgaatgaggacgtgtgtgtatgtctggaaattgggcaatcatgctatagggtaccgagaatgcaggagacacagggctcaagctggaatttccaggcagaagggcagtggagacaccaagtcccagcctcttagcaccccataaagagacctgtttgggcttcagtctggttggaggctttctgctccaagaggaagacatcagtaccctattgatcttttttgatggggttgctgtgatggtcacattgcacaggcagaatgcttagttacagacaatctggacttatgtacatcaatcactggtaaagtcatgtgactagttcataaaatccatggggcatatgaggaagttgccgccccacaggccagcaggaggatgcctgcmtgaggctctgttcaagcacacctcctcccaatgggacaaaggcaatccatgtatctagctgcaaagcaaaccaaccagggcgagtcctgattccacctgcttctcgttacaagtggaactttgtccttctttctgaggctcaccctgttttgcctcctgaaccttggtgggaaatcaggccttgcttcccagacctccttgcaactggcttctcagcccttgagaccacacactctggacttt

SEQ ID NO: 213883 - DNA, 544 bp, Homo sapiens
accttatggcaaggaaggactggactggaaccctkgtcgacagactcttaaccatttaggcttcattttcatctgcagtctttttttagtaatagcaaggtttttttttctccccacttcttccagcattttagccatttttcagtgtttggtttgctctcagcatgggtcagaaagagctcctgaagcatgtcaaccccttggaaataactcaattaatattaaacaaataaaacattttgcaccaagtatatactgagatagctatattttgtccttgataaagttatagaataaaatgaagataaatagcatggaggttataatatatattaaaccactaaaatatctcatctcataattcatcatcagcaaaacagaatgtcgacttttgagcttaacttaaaataggcgtttcttttacacatttttattaaagcaaagatagtgcagttaaaaataatttaatttatgttagaaaaatatgtttcacaaatcttagattaaaattagggatgatgtgttgaaatcaaattattctaca

SEQ ID NO: 213884 - DNA, 544 bp, Homo sapiens
accttatggcaaggaaggactggactggaacccttgtcgacagactcttaaccatttaggcttcattttcatctgcagtctttttttagtaatagcaaggtttttttttctccccacttcttccagcattttagccatttttcagtgtttggtttgctctcagcatgggtcagaaagagctcctgaagcatgtcaaccccttggaaataactcaattaatattaaacaaataaaacattttgcaccaagtatatactgagatagctatattttgtccttgataaagttatagaataaaatgaagataaatagcatggaggttataatatatattaaaccactaaaatatctcatctcataattcatcatcagcaaaacagaatgtcgacttttgagcttaacttaaaataggcgtttcttttacacatttttattaaagcaaagatagtgcagttaaaaataatttaatttatgwtagaaaaatatgtttcacaaatcttagattaaaattagggatgatgtgttgaaatcaaattattctaca

SEQ ID NO: 213885 - DNA, 461 bp, Homo sapiens
ggatgtgcagagacaggaaggggcttattagtaagtcaggagaatatatattttattcattgcacataaaatcttatacaaataacataatgacaagttttgtaaatatttttagagtgtcttttgttttccttccgttttttctgcagggagttccaggtacccagaatagtttcttcaaatacgtatctctgattattgttttcccaactctgatcgagtgtaatgcagtttcccaaatctcctcttggttgatgataagaaagacatactctggtgaattcttataattttatgtttcttcagcattgattttgagtgcaggtttgactttctcataccagaagcagggctctatcacccttgacacatattccatttctatactacaccacatggctyaagccggtgctcataaataaacacttagaggcatctctcctgtctagcagactgggcac

SEQ ID NO: 213886 - DNA, 402 bp, Homo sapiens
gcatcaattgtcctaatatccatggaacaagcagmtgatgttgtgaggggtccagtcagcttctgcccaggaccagggaacagcacacacctaatttgccttcctacatcctcctgctttatccttgccctttgcctaggagtcccctgctcttcccaactcatttctcaagagtcgtttgtgcccacagtaactccctgccttcagcataacttttctcgcctgactttaatattcaacttcatgtttttgcccctacatttaggagtttctgctccttccctgaccttttcttttcttacctcttagtaagacttcttcacccacacaacctttggaaagcctggccccactagtcacttcttcccacaacatcacagagtgtaatgctgtgcccccttt

SEQ ID NO: 213887 - DNA, 402 bp, Homo sapiens
gcatcaattgtcctaatatccatggaacaagcagctgatgttgtgaggggtccagtcagcttctgcccaggaccagggaacagcacacacctaatttgccttcctacatcctcctgctttatccttgccctttgcctaggagtcccctgctcttcccaactcatttctcaagagtcgtttgtgcccacagtaactccctgccttcagcataacttttctcgcctgactttaatattcaacttcatgtttttgcccctacatttaggagtttctgctccttccctgmccttttcttttcttacctcttagtaagacttcttcacccacacaacctttggaaagcctggccccactagtcacttcttcccacaacatcacagagtgtaatgctgtgcccccttt

SEQ ID NO: 213888 - DNA, 548 bp, Homo sapiens
aagctttggagcctactgttygaaagcgtactctttgaaacctactcttccaggaagatagatccccaatctccccaactctgtgagtttttagcctgggcacctggttccacatcataaagatatttttatttttcctctggataaaggcaattagataacaaccaccccaattaccagtaaattcaggataaactacatgtagcaaatggtactgtcaagtcctcttacctaaggacaaattattttttatcttgagaacacgtatgtaatatgaaatcggttctatctgtccagctacatttaaaggaattagaattcttcctgctatcccattagcaaattgcccgtgatgtgtgaggcaatttagtttgtgcttattcaacaatgaagctgtttagctctcttctacaattgtggacaggagtttcttggatggcagatatgatattttaaattatttccctaacagcttccatgatgtgaaacatgcctttggagggttttaatgtaccgatcaacttttggacagaaaccgaatcatgcat

SEQ ID NO: 213889 - DNA, 472 bp, Homo sapiens
atttaacccatgatgtgggctaagaggagttttgactgattatgaggcgacatatataccattaaagtttctcacctatgttgggccttcatcttttatccawcaaagtataaagttattcatgtataaggctggtgcaaaatccttcacgaataaaagtataccctataagtgcacataatagaccccctcatcatttctattggctacagaggcataaataaggaaaaaatattcaaagataagagtctcacaatagtagatgtcttgatctgtgatctcgggaaaagctgtttacatcaaggatgccatcttattctggggagaaactttcctggttagttttaccttaagggttccaatgggtgtacagttccaatagtgtggagggacccttctcagttgtgagattatgaacttaaagttcaaggttccaaagttttgttgcagtgtggatggcaagcacagtctt

SEQ ID NO: 213890 - DNA, 497 bp, Homo sapiens
tcctggcaatgttctatttaacccatgatgtgggctaagaggagttttgactgattatgaggcgacatatataccattaaagtttctcacctatgttgggccttcatcttttatccatcaaagtataaagttattcatgtataaggctggtgcaaaatccttcacgaataaaagtataccctataagtgcacataatagacyccctcatcatttctattggctacagaggcataaataaggaaaaaatattcaaagataagagtctcacaatagtagatgtcttgatctgtgatctcgggaaaagctgtttacatcaaggatgccatcttattctggggagaaactttcctggttagttttaccttaagggttccaatgggtgtacagttccaatagtgtggagggacccttctcagttgtgagattatgaacttaaagttcaaggttccaaagttttgttgcagtgtggatggcaagcacagtctttctctgatgt

SEQ ID NO: 213891 - DNA, 528 bp, Homo sapiens
gagagtgcaacactggacccaaactgctcaacagtgtcctcacagggacatgagggtggggaaggattgctgacctgctaaggagcaccctgatatggggatctgggagcacaagaggcccaggaagaatgtgccccctgcaccttacttacataccctgcctggactcagagagaccagaatccagacagtgagtctccgggccctcctccgccacccttttcccagccgcgcctcctggccccacctgctccccggggcgctgggctgggctgagctgggtcttgcccaggattactcctctgagtgcctcctgtctctgcagacagttgctgctgggcacggccactcgtcctggcttgtggcagagggctcaggcacaaggtgggcggttagagctctggcaccagagcccttctcgacatccccactgcttmcaaccagtccaagccccatctctgacttagaagatggttgttattcctcactggcttaccagctgtcacctcatcccccttcagccagttc

SEQ ID NO: 213892 - DNA, 518 bp, Homo sapiens
tggcccatccgcgggtaactggttaaggatttttgataggaaggctatgggttgtcagtggcctcagtgcttttgggctaygccctgatttacactgacaacaaagtggcattggagtgttatagggtcatggagaagaccttcaattatcaattataggttttaaatttaccctggcttttaaaggaatagggcacactgttttttttactatttttatcttttactctttcactccctctttacctctctgtctgtctctctctctgtctctctctctctccatctctctctctctctctctctctctctccctctccctccgcgtctctctcttagccattacaagcttggggccctggcaagggtggtggggaacgggtcccccataactgcccatgttgagagctgtatacctaaatcgggagggactccagggataaaactccctgggttatagcctgggtgcctaaggacacagcgtagcttccttagatccctttggagatacaacttgc

SEQ ID NO: 213893 - DNA, 612 bp, Homo sapiens
cacaccaacatggcacatgtatacatatgtaactaacctgcacgtcgtgcacatgtaccctaaaacttaaagtataattwaaaaaaaaagaataaaaaaaaaaagaaaaggagtccaattttaaatgaaggccaatttcattaaccggtaatttgacagattctttggtttaatatgagaatttattttcattttaaattattccatactcattgtaaaaaatcaattttttttgagatagggtgtcattcttttgcacaggctggagtgcagtggcacgatcttggctcactgcaacctctgcctccaaggctcaagcaatcctcttgcctcggcctcccaaagtgctgggattacaggcatgagtcactcagctttgctccaaactttcttttaaaaacaaacaaaaatggactttcctctttgcattattatataagctgttcttttaggagactttgtctagtttttaaaataacaaaatgacttttgccaatttgattgaaagagattccaaagattggcatgagtagagtgaagtgggtattttgatacgttgttggtggaactgtaaattgattcaggctttctggattgcagtctgtcataatg

SEQ ID NO: 213894 - DNA, 460 bp, Homo sapiens
taatattatacagctatttacaattacactccaagattgtctaaagaaacaagaaaacataagataaaaacagcaaggttcagaactgtgacgataggacctcgacacatacacacacacagataaaagacagggccaaatacaccagaatgttgctggttcttatgtctggttggtgaggttatggacaatttttattatatatgtttttcccattttctatagtatatatgtaatttttcatagtgaagaaagaaaaaaaataaatggtttaaaaaaccacccactatcatttcattwaaaaaaaatagtttttaaacctatctgcaaaaagctgaaaacaacttaaatgctcagcagcatgtggactatttaagtcagccccagccacaggacatataccatgcaaatgtttaaacagacagaagggcatctgcatgtgctcatgtggaaaagacca

SEQ ID NO: 213895 - DNA, 601 bp, Homo sapiens
ttattaataattaaaaggtctcttccatgaggtctgaagttattatttgcttaaatatttatgcatttgaaatttataagcttggccaagcgtggtggctcacgcctataatcctagtactttgggaggcgaaggcaggtggattacttgaggtcaggagttggagaccagcctggccaacatggtgaaaccgcctctctactaaaaatacaaaaacattaactgggcatggtgacgtgtgcctgtaatcccaggtactcaggaggctgaggcgggggaatcgcttgaacccaggaggtagaggttgcagtgagccgatatcaggccactgtactccagcctgggcaacagaatgagactctgtctaaaaaaaaaawatatatatatatagatatatatctatatatctatatatatatatagatatatatatatagatatatagatatatatatatctatagctatatatctccttgtttaaatatatttatttgttactgtattgttagctacttagatttatgtgtgttatttgtggttaccaaaactttgactctccactgtatacttcagtcctataataatggagccagtttatt

SEQ ID NO: 213896 - DNA, 645 bp, Homo sapiens
ttacaaaaaaaaataggtttaattggcttatggttctacaggctgtacaggaagcattgtggcttctgctcagcttctggggaggtctcaggaaacttacgatcatggtggaaggcaaaggggaggcaggcacctcttccatggccagagcaggaggaagagagacaggggaggtgccgcacacttttaaacagtcatgagaactctatcacaagaacagtactagggggatagtgctaaatcattagaacccgcccccatgatccagtcgtcttccaccaggttccacctccagcatttgggattgcaattctacatgagattttggtggggacacagatccaaaccatatcacctagcttgccaacacttttaatatatgacatccatagttggatagaatattccaaaatagtctgagtagtgtgaggttaccaaaatggttctttaggatttayacgtgtggagaagatatcagagggatgaaatagagagagttattcatctaatgacacagggaaacatatgggcaaagaaagttgattgtgttcaataattgccttctctccctgtgaatggtctctgataacgaatgaagatattcaaatataaagcaactgcagatagaattttaagaacaaataa

SEQ ID NO: 213897 - DNA, 604 bp, Homo sapiens
ttggtgactttaaaatgtgactcagatcttgtcattcttttgcttaaaagactttagttgctttctatggcatttccaatctgagctcccagccattttctgtgtggctctgagctcccttctcccacttctgcaaactcagtggtgtgtcccctcatctgtgggcttctggagccactttagggctcacatgctccwtgctctgccctggcacttgtggttccctgggctgtgtcttccctgtctgtgtgcagctccctcccttccctccctgagaccctttctcaggctgagcttctctgaagtccatctatagtgcttccagccatctatgttccttccacttcctttgtcagagctgggaaagtctgcttacttgaaaaccatcagtgtcttttatatttatgacagtatccacagcaagcatttctagcctgaatcttagaaggggctccacgggtatctgttggttgaaatagtcaacgggataggttacctctctcagttgacctaggttatgctgtgggcctgttgtcaggtgctgagagcctggactggccagctaccccggggccatctgatgacctttacaattcttcactgg

SEQ ID NO: 213898 - DNA, 604 bp, Homo sapiens
ttggtgactttaaaatgtgactcagatcttgtcattcttttgcttaaaagactttagttgctttctatggcatttccaatctgagctcccagccattttctgtgtggctctgagctcccttctcccacttctgcaaactcagtggtgtgtcccctcatctgtgggcttctggagccactttagggctcacatgctccakgctctgccctggcacttgtggttccctgggctgtgtcttccctgtctgtgtgcagctccctcccttccctccctgagaccctttctcaggctgagcttctctgaagtccatctatagtgcttccagccatctatgttccttccacttcctttgtcagagctgggaaagtctgcttacttgaaaaccatcagtgtcttttatatttatgacagtatccacagcaagcatttctagcctgaatcttagaaggggctccacgggtatctgttggttgaaatagtcaacgggataggttacctctctcagttgacctaggttatgctgtgggcctgttgtcaggtgctgagagcctggactggccagctaccccggggccatctgatgacctttacaattcttcactgg

SEQ ID NO: 213899 - DNA, 404 bp, Homo sapiens
ggacaggcttaacactgtaggcggccatttatattaatggaattcagagatcagtatattaaataaactggcattcagctcccygggatgacaccactggggctcctagatcaatggagagacagaaatacaaactcctacaccggatttggatcgcttagccagggcttgaatattgataaagacatggcagcatttcttgtgctgctatcgctctttaactgacgggactgcctgagttctccttctgaaactgggaactgagcattttggatgaaatccaaatgtctggacttcgacttaagtaagtccaaggggattctgttaggcagaagaagaactttaagaaaagattatctttagctacgagtacatcatagacatctatcttagcttcagcggca

SEQ ID NO: 213900 - DNA, 588 bp, Homo sapiens
tcagcatagacttgaagcttaattaactcgagcaaattggatggagagcagaggaaaatgagaaagatgtgaaaatgatgggagagaagacaagaagctccagcctcctcctgaaagctggagcaggagagacggcaggaaacacaggctcgagacggaaggcggaaggcggaaggcggaaggcggaactcaacccaggagcctcccgccggaagttgtgmgatttctttaatcagagtggcttcccacaaatgtatttcctgcctgatcccgctgtctgtgtccttgcagtgtgagtggcagaatcccttgaagaagaccgagccagtgacctcgtttctgaaataaaaggcgggaagtgagggagccagtggtcaccgggcagccaacccagaaggaaaaatctccaagagtgggaacaggtgagggtagtgttaaggaacagagagcaggccacatgcacttcacgacgccgtcagcaatgacagtgacaacgtgtactgtgctgaccacactccatcgggaacacagggcaacctcccttggtggaaggtgtctaccgggtcacactcccaagcccaaacaggc

SEQ ID NO: 213901 - DNA, 593 bp, Homo sapiens
aatatccagctttagtgagcgggcttcacatcagccagattaagagaagcctactagactctcaaaaatttgaaaaggtatttttcaaacagataatatgtggatatgtacaaactcaaaatgtcctgaaggatagaagggaagaagaaaaayctcccttcccagaggcatctcatggtagctgagagatagataactagagagaggataggcaggtggataaagatagacaaatcccttgagaaattgtatatgcatatattcatatacaattatatgcatatatacattcttttttataaaagttgtagcaaattacacacactatcctgcatcttccttctctacttaaagtcaggggggatcgtttcatataagtgcagaagtccctctctagctatgtgttctaaattcccaggggttgcctaaaactggatagtaccaaaccctatatacatatattatgtgtcttcctatacatactgtattagtccattttcacactgctgataaagacatacctgagactgggcgattaacaaaaggaagaggtttaattgaacttacagttccacgtggctggagaggcctca

SEQ ID NO: 213902 - DNA, 601 bp, Homo sapiens
ttttttttttagcctgtcaattatttgtaatgccacatattatttctcctcagccttgtcacagatgcacttgatgaatgtactttgcagtagtttacccaaattgttgataagaatatccgtcagaacagggtcacacatggagccttctggcagagccctggaggcttccctccgggagggccttcatcaatacatggaccttccacaccattcagtccatgatttatgtttcccaggagcttggttgaaattaagaatttgattggtggtttactctaattagaaacccagttgtttgtgcagattgcttttttggttagtacactgtgacaagatgttggatcaatcaatgatatacttttgcatcttctaataagtaccttgtatctttgctcaaatagaagkagaagcatgacaattactctggttaaaaagaggaagccttcagcactctccgtccaaccccagaagctttcagagactccaaaatttgtagaaaaccagaaatttttccatggcatgttgagaaactagaattaggtgtctgaagaagagcttttttacaagagattaattctgaagatccagttattaatag

SEQ ID NO: 213903 - DNA, 512 bp, Homo sapiens
aacactggaaatgttctgttcagagtgttacattaaataccctgtcattgacttctttaagaaatataatacagttttatagctartgaaagcattggtatgcagaaaaacatactgtagccatatattttctttctcataccctcaaatttctggagaaacatagtctgcctatttaataaggaatgcagaattctccatttggttgaaataagccactttttcatgtcaagagattttataattcctgagtgtcatgtacaaatggcagagagttactcccacagctcccctgccaagccctctcctgtagtagatgagacgtatcattccttttcttatcttgcatatagggttggccactgacaacttataatagctccagctgacatgggtttctcatatctggccagatatttgtccctcttttcctttttatatgtagtggtcttaagacatgtgtccaaatttgttgacatttctacccatcaagtctaattctcctcccctgg

SEQ ID NO: 213904 - DNA, 635 bp, Homo sapiens
aactgtcttattcttccaatctccatggggtgcatctccattttccttttgagaaatctattaggttggtgcaaaactaattgtggtttttgtcattagaagtaatgccgtttggctgggtgtggtggctcatgcctgtaatcccagcactttaggagtcagatgtgggcagatcacttgaggtcaggagttcgagatcagcctggccaacatggcaaaaccycgtctttactaaaaatacaacaattagccaggaatggtggtgtgcacctgtaatcccagctactcaggaggctgaggcagtagaaacgcttgaagccaggaggtggaggttgcagtgagccaagattgtgccattgcactccagcctgggtgacagagcgagcctctgtctcaaaaaaaaaaaaaaaaaaaagtaatgccattaaaagtaatggcaaaaactgcaattagttttgcaccaaactaatatctccctatcctcagggaaatctctgaatcttaagatccattactactttcctctatcctaccccagaggtgcattgatccaacagtagctcattaaattcatgataacacctagttcagggaaactactgcttctgctatcccaaggcagaaaaaccacagat

SEQ ID NO: 213905 - DNA, 507 bp, Homo sapiens
gaattcagcaatatttctcctacacactttctgcaagaagaaaaatatggctgtattctgcctgaccccgcaacaattaactaagaatctagcaccttttaaagatctgaataggaagcacttgtcatctattgtctctaagggcagccactatgagagtttaaaagaaccttggtctccacaatcttttatctcaccctgaacatttcctttctattgattccaggtctttagacaaactcaacccattgtcatccaaaaaatgtttaaatttgcctatagcctggaagtctccctcccctcatccccctgccctgtsccctctccctcttccccctccccctttcccttcccctctcccccactttgagttgtcctgcctttttgaacaaaaccaatgtatttctgaaatgtatttgattgatgtttcacgcctccttaaaatgtgtaaaaccaagctgtgccctgaccaccctgagcacttggagagctttgtcacgggccatg

SEQ ID NO: 213906 - DNA, 507 bp, Homo sapiens
gaattcagcaatatttctcctacacactttctgcaagaagaaaaatatggctgtattctgcctgaccccgcaacaattaactaagaatctagcaccttttaaagatctgaataggaagcacttgtcatctattgtctctaagggcagccactatgagagtttaaaagaaccttggtctccacaatcttttatctcaccctgaacatttcctttctattgattccaggtctttagacaaactcaacccattgtcatccaaaaaatgtttaaatttgcctatagcctggaagtctccctcccctcatccccctgccctgtcccctctccctcttccccctccccctttcccttyccctctcccccactttgagttgtcctgcctttttgaacaaaaccaatgtatttctgaaatgtatttgattgatgtttcacgcctccttaaaatgtgtaaaaccaagctgtgccctgaccaccctgagcacttggagagctttgtcacgggccatg

SEQ ID NO: 213907 - DNA, 226 bp, Homo sapiens
aaaaccaatgtatttctgaaatgtatttgattgatgtttcacgcctccttaaaatgtgtaaaaccaagctgtgccctgaccaccctgagcacttggagagctttgtcacrggccatggtcatcatatttggctcagaataaatctgttcaaatattttacagactttgactcttcaacaacactttttagcaacacaaatggatgaagaagataagacttgaattc

SEQ ID NO: 213908 - DNA, 625 bp, Homo sapiens
tccatttccttcttatgattttgcttcctctttgatcaaggcagtcttcctgcaactgttgtggtcaccaaacagttttctaaaaggtcgtctttgttctttcagtaaatattttcggaactatatttttctacttagtacaccaagaacttctgcccttttcttattcttcagcattttttccacctascctatgtgaattatcctttaatgttctcatcctgaaaataggaaagcatacctatattgggggcttctcaagaggtttcatgtgaacttctttgggctttactcacaagccccataagtgccaggatgtccccttttctttgtatcagaatgacctgaatgagattcccttaatcagtggctacttttacattgtttagcctgtagatttaatatattgatcccctgcaaaatgcaaaatatgttcgaagctactttgaggttatagttttaagaataattgtaacagtagtagtaaggagactctcccatccaaagccccttgacattatcttaggtaatctttacctaggtttagatcagagaaggggacgtcctagcccttacggggcttgtgagtgcctaaatgatcccacctcattcttaacgatcttag

SEQ ID NO: 213909 - DNA, 554 bp, Homo sapiens
aaaggcattcattcattcattcattcattcattcattcagcacttattctctcaaaagcactggaatgtgttcaaaggtggatctactttgaagctgatgaaactgaagcttcaaactcctttcttgcctcagtttttcttccagggtgttgggtaagcctcagcaatgtgtttgcattctcatatgtttttcctaaattcataaacctaatacattataactgtcattgttaccgaatcaaacttgggttcccccacccaatgcagcagagccaaacactgacatggggattttcagtgagagaaagcgaagtggttattgcagggtgccaagcaaggagaagcaggtaactcatgcataagacctgaactctctgatggcttgcaaggaggggtttttaaagatgggaaagcagaggttacaggcaaaaccatwcatcaatgcatggaggctctacattggtttgacctaaaaagatggtacatctaaaaatgggggcatgggggcacaggtaataggtggtttctgatttcaaaggttttctgatttgaaa

SEQ ID NO: 213910 - DNA, 475 bp, Homo sapiens
cagcaccactgaaagaacaatctatgacgtattggtaaatgagggtcattgtaaaattgtgatttataataagacatatatattacattcccccatctccttgcacatggctcctaaaaggctttgtaatctccaaagtgattttttttttttgaaaccgagttttactcttgttgctgaggctggagtgcagcagtgccatgttggctcattgcaacctctgtctcccgcrttcaagtgattctcctgcctgggattacaggtgcttgccacacacctggctaatcttttgtatttttagtagagatggagttttaccatgttggccaggctggtcttgaactcctgacctcagatgatccacctgcctcagcctcccaaaatgctgggattataggcatgagcaccgcgcccagctgcagtgtgtctttttgtaggctaatatgatgactggtggctgctggctcctgcacag

SEQ ID NO: 213911 - DNA, 475 bp, Homo sapiens
cagcaccactgaaagaacaatctatgacgtattggtaaatgagggtcattgtaaaattgtgatttataataagacatatatattacattcccccatctccttgcacatggctcctaaaaggctttgtaatctccaaagtgattttttttttttgaaaccgagttttactcttgttgctgaggctggagtgcagcagtgccatgttggctcattgcaacctctgtctcccgcattcaagtgattctcctgcckgggattacaggtgcttgccacacacctggctaatcttttgtatttttagtagagatggagttttaccatgttggccaggctggtcttgaactcctgacctcagatgatccacctgcctcagcctcccaaaatgctgggattataggcatgagcaccgcgcccagctgcagtgtgtctttttgtaggctaatatgatgactggtggctgctggctcctgcacag

SEQ ID NO: 213912 - DNA, 427 bp, Homo sapiens
ctctgctccatggattgaaaaacaaaaaggggccaggtgtggtggctcacacctgaaatcccagcactttgggaggctgaggtgggtggaccacctgaggtcaggagtttgagaccagcctggccaacatggtcaaaccccgtttctactaaaaatacacaaattagccaggcgtggtggtgggtgcttgtaatcccagctacttgggagactgaggcaggagaatcacttgaacccaggaggtggaggttgcagcgagggaagatctcaccacttcactccagcctggacaaaagagcaaaactcaattaaaaaaaaaaaaaaggaagagaaaaraaggacagatccattcaccaaaaggacagatccattcatcaaagagctaaagaaaccttcagatagtctcccccatttctcacttttccat

SEQ ID NO: 213913 - DNA, 422 bp, Homo sapiens
gatggtctttaatgacctgggaagagcaaaactaatgtattatgatcaattcatccatacattcatcaaatatgaattgtacctggagctgttctaagtactaaagattatagccatgcagctgggtgcagtggctcatgcctacaatctcatcactttaggaggccaaggcaggaggatcacttgagcccaggagtttgaggctacagggagctatgactgcaccactgcactccagccctagtgacaaagcaagacactgtctttaaaaaataaaataaatagatayagcagtgagcacaattatggggaagacagatagtcaacacactaataaatatataacatgtcaagtgctatgaagaaacataaagtgaagtcaaaggaatggatgattgatggtgttacttagcagggtgatt

SEQ ID NO: 213914 - DNA, 602 bp, Homo sapiens
tgcatggagacaaaagtaaatccagtcattcattcattcatttgataaacatttcataagatatttatttgaagaacattattctagatatttgaggctacagaatttgaaatgaagaaaatgaatctactttctaatagctaagtgaattattctacacataaagaatgaaatcagaaatatgtacattacccttactgggatgaactggttcctaggtaaaaataagacctagtgggagttaactgattttattgtattaacttatccagagaaagaatgtattagaccaaagggaaatgtgatcacagaacatagaaaagggagtatgggagaaatgtattttggcaaagcccatctaagcactcttttggtatcctagaagtgcataggaacacatgatttgtttgatttctctgcagacatagatgcatccaactatccctgcctgatgatattaaacattcaaatctgccaccaaggccccttgctcagatctctcgtaatccatgcaamcttctgatgatttggctctctatgtagttttcctagatggagaaaatgtgcagatcaggcaaatgcaaatgtctcctcctcttgta

SEQ ID NO: 213915 - DNA, 649 bp, Homo sapiens
catattgtgacagtcacatatctgccatgcagattcccttctattcaagtgctatcttaaaaaaaaaacacataaaaagacatagcttactaatttttaaaccagaaagcttccctccaacaaatctttcttcccccacagaaacgagcacaatgtatacactttatcagttattacagtgactttttaaccttttaaggttattcctccaaaatgctttacccccaaactgcccttgctgtaatgacaattattgctgtttgcagttaataccagtacagtgaaatgtcccagggcagttgcagggtcaatccaatgaaagtagctactgaaatttagtctgtacctttgcctgcttagacggactagctggcttcaaaggttgcttaaaaaacstgtcttccacataacaaagtgctgctctagcacaacctgagaacttccctggccacggtcccctccaaaataaacctactttattctagcaccaacctcttacagttatgccttcccttgaaataactttttaagaatgtcgattctgagtataaatcacggattgcactgagaaaggcaaaacctacatatgtattatgaaacacaggaactaccacttcattctgagctataatattatgttcttatttga

SEQ ID NO: 213916 - DNA, 649 bp, Homo sapiens
catattgtgacagtcacatatctgccatgcagattcccttctattcaagtgctatcttaaaaaaaaaacacataaaaagacatagcttactaatttttaaaccagaaagcttccctccaacaaatctttcttcccccacagaaacgagcacaatgtatacactttatcagttattacagtgactttttaaccttttaaggttattcctccaaaatgctttacccccaaactgcccttgctgtaatgacaattattgctgtttgcagttaataccagtacagtgaaatgtcccagggcagttgcagggtcaatccaatgaaagtagctactgaaatttagtctgtacctttgcctgcttagacggactagctggcttcaaaggttgcttaaaaaacctgtcttccacataacaaagtgctgctctagcacaacctgagaacttccctggccacrgtcccctccaaaataaacctactttattctagcaccaacctcttacagttatgccttcccttgaaataactttttaagaatgtcgattctgagtataaatcacggattgcactgagaaaggcaaaacctacatatgtattatgaaacacaggaactaccacttcattctgagctataatattatgttcttatttga

SEQ ID NO: 213917 - DNA, 649 bp, Homo sapiens
catattgtgacagtcacatatctgccatgcagattcccttctattcaagtgctatcttaaaaaaaaaacacataaaaagacatagcttactaatttttaaaccagaaagcttccctccaacaaatctttcttcccccacagaaacgagcacaatgtatacactttatcagttattacagtgactttttaaccttttaaggttattcctccaaaatgctttacccccaaactgcccttgctgtaatgacaattattgctgtttgcagttaataccagtacagtgaaatgtcccagggcagttgcagggtcaatccaatgaaagtagctactgaaatttagtctgtacctttgcctgcttagacggactagctggcttcaaaggttgcttaaaaaacctgtcttccacataacaaagtgctgctctagcacaacctgagaacttccctggccacggtcccctccaaaataaacctactttattctagcaccaacctcttacagttatgccttcccttgaaataactttttaagaatgtcgattctgagtataaatcacrgattgcactgagaaaggcaaaacctacatatgtattatgaaacacaggaactaccacttcattctgagctataatattatgttcttatttga

SEQ ID NO: 213918 - DNA, 568 bp, Homo sapiens
cacattttaaattgtaaaatacattctaagtaacattatctcagaaatgccatcaagttgagtctgtttgagtttctttttcgtacatattgactcattaaagctacatattttgcttctccctgacctcaccatgtatattaatacaygctcctcaacctataatgggcatcctgataaaccattataagtataaaatattgttaagttgaaaatgtttttaatacactgaatctaccaaacatcgtagttaggctagcctacaaagaaagtacacttacattagcaaacaattgggcaaaatcatcaaacacaaactctattttataataaagtgttgaatcttataatttattgaataccatacttaaagtgaaaaacagaatgagtgcatgggtatacagttcctattgcatgcttattgctctcactccactgtaaagccaaaaaattgtaagaataacccactgataagttgggaaccatctgtatggttccttcctatccaaaccaatgttataaagtcaccagatctcaactggaagcaattgagttagttgactgttgg

SEQ ID NO: 213919 - DNA, 568 bp, Homo sapiens
cacattttaaattgtaaaatacattctaagtaacattatctcagaaatgccatcaagttgagtctgtttgagtttctttttcgtacatattgactcattaaagctacatattttgcttctccctgacctcaccatgtatattaatacacgctcctcaacctataatgggcatcctgataaaccattataagtataaaatattgttaagttgaaaatgtttttaatacactgaatctaccaaacatcgtagttaggctagcctacaaagaaagtacacttacattagcaaacaattgggcaaaatcatcaaacacaaactctattttataataaagtgttgaatcttataatttattgaataccatacttaaagtgaaaaacagaatgagtgcatgggtatacagttcctattgcatgcttattgctctcactccactgtaaagccaaaaaattgtaagaataacccactgataagttgggaaccatctgtatggttccttcctatccaaaccaatgttataaagtcaccagatctcaaytggaagcaattgagttagttgactgttgg

SEQ ID NO: 213920 - DNA, 325 bp, Homo sapiens
tgttacaaatatattctcttagttagtggcttaccttttaactcttaagtgtaggtctgtttctggactgtctcttctgtgctgttgatcgttttgcctattcttgctccaataccacagtgccttaattactatagttttaaaataagtcttgatatctagtttatcctccagttttgttctatttattatttaagatcgtcttggttattcttacctgtttacatttccaamcaacattttaaattatcttgccaattaaaaaaatttgctaggattttgattggaatatcactacatttatagatcagtttgggaatacttg

SEQ ID NO: 213921 - DNA, 611 bp, Homo sapiens
cagcaggaggccagataaatcccactatgtaaacatgggtacagaatgataatgatatcaattatgagcaggcagattatttcctatgttccctttgacttctctacagtattaacttaagcatgagaactgaacctagtcttcattgatacaaagtgaagagacacctcatgttagtcaaagataattatgtcaggttcttggcctttctgtggcccaatttaaataccaaaaaattatgggagataactctgagccagttttagtctatctaaaaggaaataaaaattttctcaaaggtaggagaaggaggtttggggatctaagagtgacaggagacttgtaccccatccttgtctggaacaccaggagggaaggtccttcacaggagttgcgactggcatcacagcatcatgggaccagtgaagatgaagtaggagagctgaggcaatcccaccaatttcctgtagctccagagagcaacggaggagaagakgaaattaccctgaaaagtacacagctgtaagttctgagagagacctatgggacctgaagagatctcattggttgtaacaagagcatacaccagcagatggcagcagatggttgta

SEQ ID NO: 213922 - DNA, 600 bp, Homo sapiens
ttaaagaatcgcctttgaattatttttcaggaatagacaaaactaacggtaagaggtcaacatcctcaaagccactgttacgtattccaggctttagtacattattcctaatggtgtcccagaagtctagatattttcaacttaggatgattaataaacattaacaaattttttagcctagtgtggtggggtgtgcctgcagtcccagctacacaagaggctgaggcaggaagatggcttgagctcaggagttaagggatgtaatatgctataatcccacctgtgaatacccactgtgaaataaagaaaaagtaaagaaattaaaaattttaaattcgttattacatatttgcacccattcttcaaactatcaaatattactgtgaatgtatcataatttatccagttatccatcatttaactgaaatgtgttttttcctcattaatrtacttattaaaaaggggtaaactttttttagatatattaatatatgttatctacattttttctatttttaccttattttaactttgctatacaactatacccctttgtcatagatttaagatagttcgacttttgccctgcatcccttacac

SEQ ID NO: 213923 - DNA, 600 bp, Homo sapiens
ttaaagaatcgcctttgaattatttttcaggaatagacaaaactaacggtaagaggtcaacatcctcaaagccactgttacgtattccaggctttagtacattattcctaatggtgtcccagaagtctagatattttcaacttaggatgattaataaacattaacaaattttttagcctagtgtggtggggtgtgcctgcagtcccagctacacaagaggctgaggcaggaagatggcttgagctcaggagttaagggatgtaatatgctataatcccacctgtgaatacccactgtgaaataaagaaaaagtaaagaaattaaaaattttaaattcgttattacatatttgcacccattcttcaaactatcaaatattactgtgaatgtatcataatttatccagttatccatcatttaactgaaatgtgttttttcctcattaatgtacttwttaaaaaggggtaaactttttttagatatattaatatatgttatctacattttttctatttttaccttattttaactttgctatacaactatacccctttgtcatagatttaagatagttcgacttttgccctgcatcccttacac

SEQ ID NO: 213924 - DNA, 545 bp, Homo sapiens
ttctgtcttaccaagagcttttgtgagatggaaaaatgccaagtattatgttagagctgttccacttttgaaaaaatgaccatgtgcgagaacaaatctgactaacacaaagtctcaaagccttagtgaggagggttggaagctcatatgtaatgtctattatgtgctaactttgaatacaaatatctcttttaataagcattgctttcccaatggtgtttatcagattcataactctgccttttttcaaagcaaaatcttgtaacatgaattatataagaaggccctggatgacttcagagcactttcttaccygctcagtcatcctcagtggcaccctatctcccactgggtcaagtttgaacaattctgagggctttcaaagtctttgctaatttctctacataaccagccaatttctccttcctccccacaaatttcttctgaacaatgtgggtcattcttcttactaacctgaaatatattatgctcattgccacctccaagggccttttgttcctttctgttccctatgcaaatgtcac

SEQ ID NO: 213925 - DNA, 539 bp, Homo sapiens
ttttgcttctttcaagtgggtaaggcatgctggaaaagcctctaatctgccatcttgaaaaaaatatatctatatatggttatttttatatatgttcaaaataccttctgaaagtccctgtgtattcatttattatgttcattcatttctttatattcttaagcatatttatagtagcaactttaaagtttctgtttgatgattttaacatctggatcatctcaaggtttctattattttttatataaactgttttttatttctttgcttctttgcattattttagattgtatgtattttagattttaaacgttacacttttagagtttagattgcatgatttttatctaygtattttatgtatgtattttggactttaaattttatattttatgacactgcagggactcctgattatgttcttttttaaaaggatactgagttttgctccactaggcagttaatttactagactttctttgatctgtcagtcttagatttatgttttatttaagcaggtttatttctgttttgtcttt

SEQ ID NO: 213926 - DNA, 539 bp, Homo sapiens
gaattcattgccacacatgtatgccattatataacaaataaaggacatcacatcatccttacagtgtttggattggttgagttactaagcaatcttaaataagaaaaggacattttytttaaattaagagttttccctcaaagactcagttatgaaatattccaaagctaagggagaaactgtcattagatcagaaaaagagatattcatgatcactattttttaactttgccaaaacgtctcttgactttttatccaagttttgagaagcagcactataaaacaaatacatagataatttaattatttcacttataaggaacataagtgatatatccatatatttgcatatttatgtctatttatgtatctgtccttatcctcattaatctttatgccaggtcaatatactctgaaacactttgtaataatctcataaaactaaagtgaataatttcaatactattaagtacaagtatcattggtgatatgtaatttgagactgcacaggtaagaatatcacaaaaacaaatcctttg

SEQ ID NO: 213927 - DNA, 510 bp, Homo sapiens
gtccactgggctgctgtggctgttcctgtccaatctcagtggctgctaaaagtgaatgtagttgttccactaagcgggtagractcagggtgattcttatcacactggcccacattaccctgagaagccttgttacatatttacggattcatcagctgccttcagtggactagttatttggtcttctttccctctttgttgtcatgtgtttgtacatctttcagtgagacagtgactatccttttctcccagactatattttcatggatgtttatatagcaaacatctttggaaggcagagatattgtcttcctctggaacaaagttcacattttctacttgtactactatttcacattcactacttctactgcatactatatatgcaagtataataacagtcatatctccctccagagccatgagttagcctgctttgcaacccttagataagtttcaggttccctaagctagggtttcattccttatacctcacggcatacacaggta

SEQ ID NO: 213928 - DNA, 510 bp, Homo sapiens
gtccactgggctgctgtggctgttcctgtccaatctcagtggctgctaaaagtgaatgtagttgttccactaagcgggtagaactcagggtgattcttatcacwctggcccacattaccctgagaagccttgttacatatttacggattcatcagctgccttcagtggactagttatttggtcttctttccctctttgttgtcatgtgtttgtacatctttcagtgagacagtgactatccttttctcccagactatattttcatggatgtttatatagcaaacatctttggaaggcagagatattgtcttcctctggaacaaagttcacattttctacttgtactactatttcacattcactacttctactgcatactatatatgcaagtataataacagtcatatctccctccagagccatgagttagcctgctttgcaacccttagataagtttcaggttccctaagctagggtttcattccttatacctcacggcatacacaggta

SEQ ID NO: 213929 - DNA, 366 bp, Homo sapiens
gtgtaatccacactttggtgagaattgatgctgaggtttagcttggttaaaaaaatcttttgagwgaagttaagattttcattgtattaattgtatgaaatagagaaggacatatataatataatataattattttgcttattattttaaacagaaaagttaaaattatttaaagttttctttcgctttttcagtgtcaatagtgcctttattttgtagttgaaaaacatcactaatgttggaacagaatccataatgggaagactaaacactgttaatactccgaagtttggtgtcaacctcctcttagctgcattttttaaaactatgtctaaggagccaacagttcattaagacatcatgagt

SEQ ID NO: 213930 - DNA, 607 bp, Homo sapiens
tgacttgtaattaagaacatgcattwgtataaacatttgttagaaatctataaaaatgattcttaggttatttagaaatccaatatcttcaatgattttgtctacattattaatttgattcacaatcactttttcttagtatatatcccagttttaaatataaattttaaatttgtgtagttcaaatgaatgaggtctcactgtattttaaaatgattcttttaaaataaaaataatctccatctacaaaaataaatgaaacatagatctctagaaaaacatgtttttgtcataatacttgttactgttatcagctgttttgactaggatggactcaaaagttagatatgccagtcacatgcatagaagcatacctttccttccaactgtatatttattattcattcactaattcattcaataaatattaatattaacactgcctttggatgtcaggcactcttgtgggaagataaatgtgtatacacagctgacaaacttcccactctcatgggctttacagtctaatgaaaagacatagataataagcaagataaataagtaaaaatagtatggtagatgatcaaaagggctaaggagacaaggt

SEQ ID NO: 213931 - DNA, 607 bp, Homo sapiens
tgacttgtaattaagaacatgcattagtataaacatttgttagaaatckataaaaatgattcttaggttatttagaaatccaatatcttcaatgattttgtctacattattaatttgattcacaatcactttttcttagtatatatcccagttttaaatataaattttaaatttgtgtagttcaaatgaatgaggtctcactgtattttaaaatgattcttttaaaataaaaataatctccatctacaaaaataaatgaaacatagatctctagaaaaacatgtttttgtcataatacttgttactgttatcagctgttttgactaggatggactcaaaagttagatatgccagtcacatgcatagaagcatacctttccttccaactgtatatttattattcattcactaattcattcaataaatattaatattaacactgcctttggatgtcaggcactcttgtgggaagataaatgtgtatacacagctgacaaacttcccactctcatgggctttacagtctaatgaaaagacatagataataagcaagataaataagtaaaaatagtatggtagatgatcaaaagggctaaggagacaaggt

SEQ ID NO: 213932 - DNA, 607 bp, Homo sapiens
tgacttgtaattaagaacatgcattagtataaacatttgttagaaatctataaaaatgattcttaggttatttagaaatccaatatcttcaatgattttgtctacattattaatttgattcacaatcactttttcttagtatatatcccagttttaaatataaattttaaatttgtgtagttcaaatgaatgaggtctcactgtattttaaaatgattcttttaaaataaaaataatctccatctacaaaaataaatgaaacatagatctctagaaaaacatgtttttgtcataatacttgttactgttatcagctgttttgactaggatggactcaaaagttagatatgccagtcacatgcatagaagcatacctttccttccaactgtatatttattattcattcactaattcattcaataaatattaatattaacactgcctttggatgtcaggcactyttgtgggaagataaatgtgtatacacagctgacaaacttcccactctcatgggctttacagtctaatgaaaagacatagataataagcaagataaataagtaaaaatagtatggtagatgatcaaaagggctaaggagacaaggt

SEQ ID NO: 213933 - DNA, 607 bp, Homo sapiens
tgacttgtaattaagaacatgcattagtataaacatttgttagaaatctataaaaatgattcttaggttatttagaaatccaatatcttcaatgattttgtctacattattaatttgattcacaatcactttttcttagtatatatcccagttttaaatataaattttaaatttgtgtagttcaaatgaatgaggtctcactgtattttaaaatgattcttttaaaataaaaataatctccatctacaaaaataaatgaaacatagatctctagaaaaacatgtttttgtcataatacttgttactgttatcagctgttttgactaggatggactcaaaagttagatatgccagtcacatgcatagaagcatacctttccttccaactgtatatttattattcattcactaattcattcaataaatattaatattaacactgcctttggatgtcaggcactcttgtgggaagataaatgtgtatacacarctgacaaacttcccactctcatgggctttacagtctaatgaaaagacatagataataagcaagataaataagtaaaaatagtatggtagatgatcaaaagggctaaggagacaaggt

SEQ ID NO: 213934 - DNA, 504 bp, Homo sapiens
gatggttttaaaaaacgggagttttcctgcacaagctctctctttgcctgccaccatgtatgtaagacgtgacttgctccttcttgcctttcaccttctaccatgattgtgaggcctccccagtcatgtagaactgtaagtctaataaacctttcttttgtaaatttgccagtcttgggtatatctttatcagcagcgtgaaaacagactaatacaaccctcctcccccattcaaagatgtccagttggggttgtggaaacagtaaaggagaatcagtcatatctagcyacttggcctgggaagcctccttgttctttatggcttgcaactctcctgtactccctagagatacttgggcaatcagggtacactggtaacagggatcccaccataccacttcctctcagagagacacctggaagccaggggtggggaaattcatcctcccttcccacacacacactttagtcaacattagcagggaccagtgagaactgcagtag

SEQ ID NO: 213935 - DNA, 504 bp, Homo sapiens
gatggttttaaaaaacgggagttttcctgcacaagctctctctttgcctgccaccatgtatgtaagacgtgacttgctccttcttgcctttcaccttctaccatgattgtgaggcctccccagtcatgtagaactgtaagtctaataaacctttcttttgtaaatttgccagtcttgggtatatctttatcagcagcgtgaaaacagactaatacaaccctcctcccccattcaaagatgtccagttggggttgtggaaacagtaaaggagaatcagtcatatctagctacttggcctgggaagcctccttgttctttatggcttgcarctctcctgtactccctagagatacttgggcaatcagggtacactggtaacagggatcccaccataccacttcctctcagagagacacctggaagccaggggtggggaaattcatcctcccttcccacacacacactttagtcaacattagcagggaccagtgagaactgcagtag

SEQ ID NO: 213936 - DNA, 513 bp, Homo sapiens
ataatgttctaaacctgattgaaccttcatattcccattctcagattacttgtttctggctattcttctccacagttgctttttcttcctaacattcaccaattcttgacacttcattaaaaataaaagaaaaacaatgagggagatggtttkttttttttttttttttttttaacctggagctttctaagtattctgtagctgttggtttttaacaaatattggctgaatggatcaataactcttaacactcaattcccttctccacccctctaccctccagattgagacagagaaaagcagtgtcggaaaaggtagttagagttgctaattatacaactccatggtcatatttctgttcttcattttacttgtcctgataaataattatactcttaatagtctccttctagtaaaaacagtttcctcagttgactttgaaaacactaccactgcacctctctactttttttgaggatgtattgctagcctattttatcagggttttttttt

SEQ ID NO: 213937 - DNA, 279 bp, Homo sapiens
tttgttcacagaaaatactttctataattttatttttaaaatatgttttatgtttagttatattgcctagaaaatggttyatcttaatgaatgttccatgtggtcttggaaaaaatctttttctacaattgtggagtaaaatgtttcataaatgttaattagggcaagttgactaatagtgttcttcagatcttcaatattattgctgattttctgcataattgttttatttattgctgtgaaagaatagttgaaatatccaaaaacgattgtaggttt

SEQ ID NO: 213938 - DNA, 544 bp, Homo sapiens
tatctatctcatttcttaggtctagtagtaactattttacaaatttgggagctctagtattaggtgcatatatatttaggattttgatattttcctgttagactagtctttttatcattatataatgtccctctttgtcttttttaactgctgttgtcttaaagtttgttttgtcygatataagaatagccacttctgcttgcctttggtgtctatttacttggaatatatttttccacccctataccttaagtttatgtgagtccttatatgttgggtgagtccttgaagacagaggatacttggttggtgatttcttatctattctgccattctgtatcttttaagtggagtatttaggccatttacattcaatgttagtattgagatatgaggttctattctattcatcatgctatttgttgcctgaatacctttgttttatttttttcattgtgccattgtgttataggtcttataagatttgtgctttaaggagattctatttttgtgtatttcaaggatttgtttcaagatttagagc

SEQ ID NO: 213939 - DNA, 545 bp, Homo sapiens
aaacacaaaactatcaaacttatagaagataatacaggacaaaatctagatgaccaagggtttagatacaaccaaaggcataatacawgaaaaacagaattaataagctgtcctttattaaaattaaacatttctgttctaataaagacactgtaaagggagtttctaaaaagccacaaaatagaataaaatatttgtaagagtcatatcagtaaaggattgttatgcaaaatatacaaagagttcttaaaactcaacaataagaaaacaaagaactgatttaaaaaatggcccaagggttgaacagatatctcatcaaataagcatataaaaagcatatgagaagattctccccattatatgttatcatggaaatgcaaattaaaatgacatgagctatcactacatgcctattagaatggccaaaatccagagcactcacaccatcaaatgctggggaggatgtgaaacaacagaatctgatgaaaatttgaaatggtagaaccactttgagagaagtttggcagtctctagcaaaactaaac

SEQ ID NO: 213940 - DNA, 545 bp, Homo sapiens
aaacacaaaactatcaaacttatagaagataatacaggacaaaatctagatgaccaagggtttagatacaaccaaaggcataatacatgaaaaacagaattaataagctgtcctttaytaaaattaaacatttctgttctaataaagacactgtaaagggagtttctaaaaagccacaaaatagaataaaatatttgtaagagtcatatcagtaaaggattgttatgcaaaatatacaaagagttcttaaaactcaacaataagaaaacaaagaactgatttaaaaaatggcccaagggttgaacagatatctcatcaaataagcatataaaaagcatatgagaagattctccccattatatgttatcatggaaatgcaaattaaaatgacatgagctatcactacatgcctattagaatggccaaaatccagagcactcacaccatcaaatgctggggaggatgtgaaacaacagaatctgatgaaaatttgaaatggtagaaccactttgagagaagtttggcagtctctagcaaaactaaac

SEQ ID NO: 213941 - DNA, 504 bp, Homo sapiens
tgagaagattctccccattatatgttatcatggaaatgcaaattaaaatgacatgagctatcactacatgcctattagaatggccaaaatccagagcactcacaccatcaaatgctggggaggatgtgaaacaacagaatctgatgaaaatttgaaatggtagaaccactttgagagaagtttggcagtctctagcaaaactaaacatatcttgtgatccagcaatcatacttggcaattactcaaaggagttgaatatacaaatgcagacaaaaaactgcacacagatgtttatagcaactgcatttataattgctaaaatgtagaagcaaacatgtccttcaatagggaaatagataatctaggtaaatctaaacactggaatattactcakgctaaatggaaatgaactatcaagccataaaacaatatgcaggaaacttaaatgcatattactaagagaaacaaaccaatgctatatagcgtatgattctaactatatga

SEQ ID NO: 213942 - DNA, 551 bp, Homo sapiens
taagtccattttccccttcaggtcttcagtggattacttaaccactgctgtccctcggtccctttttcctaaacaggggttttgttcygtctttttctccttttttctaaatgtcggtaaatatctacagtcagccagggaagaggaggccagaggtcgggccagccgccccattcttttaacattgtagggcctgcccctggagcggaccctcctctttgggccttgtgagcttttttgcttatcatgttccattttgtgccgctttcccccttcaagaggccatttggagggtaggggatctgcttcccactgtgactgggctatgggattctgactaccttgcttacagattcatagtttgataaatttgttgtattcaaaaacttgaaatgcaggacgccattaagtgtctgtttatatttttggaatatttgtattacttacaattgattaataaaagggtgtttaaaaaaaaactaaagggtcaaaaaggaaatcacaaacgaaatttgaaaatatttagagaataaaaataataacataccaaa

SEQ ID NO: 213943 - DNA, 391 bp, Homo sapiens
ctggcatcacctgaaggctcaacagggctgcatccaagatgatgcactcacatggctgcagttgatgccgtcactggctgggggctcagctagggtgtggaccagctcatggcctctctgtggtgtggaattatcaaagcatggcagtgtcactccaaagaggcaggaagtagagactgctgtgccagtaaggccctggctgggaatgggtgtggcatctgttctgctaccttctattagtcaaacccattaaggaggtgtagcaaggtgaatgcagaaaagcatgtgagttgggagaaagtgctgagccatgattggaacatacaatccmgctccacaatgtttaataggataagtgaatgtgaacctactagaaatcatgtaattcact

SEQ ID NO: 213944 - DNA, 391 bp, Homo sapiens
ctggcatcacctgaaggctcaacagggctgcatccaagatgatgcactcacatggctgcagttgatgccgtcactggctgggggctcagctagggtgtggaccagctcatggcctctctgtggtgtggaattatcaaagcatggcagtgtcactccaaagaggcaggaagtagagactgctgtgccagtaaggccctggctgggaatgggtgtggcatctgttctgctaccttctattagtcaaacccattaaggaggtgtagcaaggtgaatgcagaaaagcatgtgagttgggagaaagtgctgagccatgattggaacatacaatcccgctcmacaatgtttaataggataagtgaatgtgaacctactagaaatcatgtaattcact

SEQ ID NO: 213945 - DNA, 613 bp, Homo sapiens
aggtcctcctatctctgatatgttatgctaaatttggatgcagtagtgaatttgggagtgaggcaggcactgggagaatttgcttttcagtgctaaatgtcctcattcaccctgtagcagatacgtatgtacacacatttattacttttgcatacattacataattttataaatatcgaataagcatttcctaatataagaagcgttgtaataggtgggttggaaattcaaagatgaataaagttatcatcactaagttcacagtctcttgggagacagatgtataaacgaatagcaatacaatagtgctcagtaccatactaaagatataagtaaaattcttcctgagcagaagaaaggatccactaaatacrtatacatgaaggacctcctggaagattgcatagaagaggtagcatttaaaagtgtgtcttgagaggtaaacattaatcaagcaagaaaggcgcaagatgaagggatgtatcatttgaagttaccaaggtataaagagcatacagtgttcgaaaagctacaaattaagttgcttaaaagattactttgagtataaagtgttggtttgaaagttgctggtatattgggctaatacattgtg

SEQ ID NO: 213946 - DNA, 508 bp, Homo sapiens
acttgtgtgtgtttatttaagaagttagtttttactttatgagcaaaaggaatgtatttactattctacttaatattcaaaaataaaaaggcattcagattggaaaagaagcaataaaactatctctatttgtagatagcatggtcttatacatagaaaattctaaagaatttgctctaaagctattagaactaaaaaaagagattaaaatgtaaacatagctttctgtgtaaaatattccataccttctttttkcccataaaataaaaattaacttatttaatttaataaacacacacatattcagctatagctgtaattttatgtgttttcaatgaagccagaatggggctaatctttgggaaagaaatcaacaatgaatagctgtactttaattaaggtcttttatgtatttctgttttgagaaatacacattttctaatttaagtaatactactgttactactaagtaatactacatattttacttgaaattgtggcatacaca

SEQ ID NO: 213947 - DNA, 618 bp, Homo sapiens
aatgctaaatttgctttaaatataactatggaattattgaaagtaatcttttcatttgtatcaaagatgaaagatgatttgtgataatgcataggctattttcctgtcatcataattgaacttattcactaaactgaattaacaaccaagagatgatcagggagcttgcccactggcatcctattacacatataactagtgataaaaattttagaatgcagcttatgctgtgaaaatacttttgcttttacaaaatgccatatgcattcatattttcatgtgaatatattattataagatcctggaatacagttactctaatttagccaactaggaataaaattctgacttggtaaaacttattcattgctctgtttgcttaaattaatactagtggtaaagatctatcttatccagtttaggarttcagcctgtaagtaagacaaatttgagttgagatattggttccagtaatagggttgccagatgaaatacaagatgctcagctacatttgacattcagatgaacaacaaataattttttggtgtacgtatgttccatgccatatttgagacatacttatactaaaaatattcatttaaaaaaatctgaaattc

SEQ ID NO: 213948 - DNA, 374 bp, Homo sapiens
gttattatgatgaataaataatttatataagatacttagaatggctcctttctggtacacagtatgcatttgtattagtctgttttctgttgcttataacaaaatatytcaaatggaataatttataaagaaaagtaatttatttcttatagttctggagattgagatgtccaaagttgtagggccacaagtggtgagaaccttcttgttagtggaaatttctagagagtccagagatggcacaggataccacatggagggaggctgagcatgcaaatgtgctatcttaggtctctctttctgttcttaaaaagctgcctgttcccatgataacccattaataacatgataacccattaatccattaacctatt

SEQ ID NO: 213949 - DNA, 632 bp, Homo sapiens
ttttcctttgtccttgaatcttatactttctatgcctattatctccatttttacttttgtcaagcaatttgctctttctttgtattcttatgatcttaatttattattttgaggatgcttacttgcgggtttgtaattcttattttgtctgatctattaattctgtttcatctgatacaaaatggtgtgtttwttgtctttttaaaataacaaatggattcttgggtttttaattatggagatacttagaagttgtgaaggttttaggctgggttttagattttaacatccattaagataatggtaaaactgaaattagggaaaaaagtagtcatgtaggtagatgacagaaatgagggatagtagtgttaaaggcaaacgcacagcctccaaaggaggatgtttctcatgtaacaaagaaaagtttctttctggaataagggaaacctaagcatgctttatagtcaacatgaaaaattaaacagaccgtgtcatttatgacgtaagcttccagagagaaaatagatgaatgacttatgtgtaacttttactgaatccactccaagtatccaaatgaaaagcactcctcataaattatgtttagcaatcttctttcctcaaatcttcttcac

SEQ ID NO: 213950 - DNA, 537 bp, Homo sapiens
gtgaaggcagcctgaaaccagtgactgacaagtactggagagtgtaaataccctagctcttttcctctctgyctgggaaacatctgaggcatgcattttacacaattttcagtgtgataaaactaagacagaactataacacaaagaagaaaatgttatggtccaattccaaaataagcacattttcaggatagaagacaaatgaggcaaaataatcgacaatacagtataacaattatctatatattatatgtttttaacatatggaaaaatattttcccagttttggttttgtgaaatttaaaaataattattttcttagagatttaatatttatgtggccaaaatttgtatttagtgattttttttctccactgtgtggattacaaagtagtcacatatttttctgagccacatttaaaaatttttatgtttaaatctttaaggtatttgaaattaaattcttggtaatcagaggtacggatctttctcttttccattctctttctctctctctctcaacaaattattagatat

SEQ ID NO: 213951 - DNA, 617 bp, Homo sapiens
aactacccgattatgccaccattaagaaataactgatattaacaaatagatgcttattctttcaggtgtgaatatgtatctatgtgcatgtttccaacttttgaagcccacatagtaatacagctttaaaatttaccttctgaagctcgcaaatgtatttcatacaaatacattaaatatgttaaacatgttgtatcatacaaatgtattaaactctaattcaatctaaagtattttctaatgagttaaaatcccaaatattttcttttctcacaatgtttctaatatcaatgttgtttatttctaatactaayctaaataaattgattttacacttaattatttactatttccattcaccttaggagatttagatgtatgataaaacaaccagaaaaggtaaggtgactcaaaaatgtgctattgatagtgacagaacaatttttttacttaatagctttgaagttcttacagaagatatagtgctgaaatattttcatataatctccacttcttgacaaacacaaatgtcaatttaattgcacaatttttagatcacaaaggcaagagaaatctgaatgtaaccttcacattaaacttcagtagcttgcataaat

SEQ ID NO: 213952 - DNA, 658 bp, Homo sapiens
accatcacatttttcccctgtgcatatacagagttcaagaagtttgaaactctaccctgttgtggccaagtcctaataaggcattatcctcttactcttctgaagcactgataatagatttataacagcaaatgacttctcagatattgggttaccaattcagtcatttgtaacttgtggtaagcaaagtcgaccttgcctttaatggtagtgctttttaagaagaagctatgaaagaaaacaaaaacaaatcccaaacaaaaccttttatkagaggaaagagaatttggttggaattattatttgcatggctttttaaaaggaaatgcttttatatatcaattcttatgttcctttagaaaatgtactttcatataagttcccaggtttgggcaagacaaaaataacaccataaggatggaaggaatgatttattctcacattatagtgttggattttatgaggagaacataatgaggttattgtctgttgtaagcacatttttataaagtctgttttatgttggctgaatattctaatgtattcatattgagagtttgaaagatcctgttattgtttgagagtcttattcatgtgctgctccttaatttgcctaaaattttaacttttcctgtgaatatgttttctaaatgttcag

SEQ ID NO: 213953 - DNA, 576 bp, Homo sapiens
aatattttctcttagagtcactttacgtattctatttaaaatttttgctgtgtgattacgacaaggaaaggaaacatgttagctttgctttgcaggtttatgctttctaattatattatgattgtttytagcaaagaagccctttgacctgaataaaagagagaactaaatcgaatcccacagtttaaagaatgctatagggagaccactagggtatatatttaaattttatgtgttatttacattatagaatcattattaataatgtttcagcgatcatcttgttgcttcaaatcttttacacattcagaactattttctttagctataaaaatgtactgtccaaatttatctccctaccagcaactcacagagcctattggattgctccctcctctgcacaaggtattctcatttagaaaaaaaatgttaatttggaaagcaaaagctttgttttcataattactaagtgattaggaacaaagactcagtagtgagtagtgagtgtggatttgaattatcgttttgcttcagaagtccttaacctatcctctggccccactttctcaggcatta

SEQ ID NO: 213954 - DNA, 507 bp, Homo sapiens
gtttcttgcaagtttaattatatcgctgggtagttttgatgttggtgatgtacatttgtttttctactgatctttactttgttataacccagctgaacatttgacaccctgtaaatgcttttgtgtttttgaacaaatggaattaaactagagcaggattcctgctcttaaggagatgacaattttattgaggagatagaaactgtgcttaggaaaagtaaatcaacactcaagataaaaggcacatcaccaatgccaaagacatgtgaggtcagcaatggaaacctgggtttgrggaggcaagggtaccagggcaggaaagtctgggaaaggggcagggagcaagttgcacgggatagggctaccaaaggttagaaaagccttagaatggcagccaatcaaaatgtgcccattattcctgtctgaaactggcagaaaacaaggtgcgtggtgctcaggaatacaaaccagagggttttatggatgatacttgcaaataaggttaga

SEQ ID NO: 213955 - DNA, 507 bp, Homo sapiens
gtttcttgcaagtttaattatatcgctgggtagttttgatgttggtgatgtacatttgtttttctactgatctttactttgttataacccagctgaacatttgacaccctgtaaatgcttttgtgtttttgaacaaatggaattaaactagagcaggattcctgctcttaaggagatgacaattttattgaggagatagaaactgtgcttaggaaaagtaaatcaacactcaagataaaaggcacatcaccaatgccaaagacatgtgaggtcagcaatggaaacctgggtttggggaggcaagggtaccagggcaggaaagtctgggaaaggggcagggagcaagttgcacgggatagggctaccaaaggttagaaaagccttagaatggcagccaatcaaaatgtgcccattattcctgtytgaaactggcagaaaacaaggtgcgtggtgctcaggaatacaaaccagagggttttatggatgatacttgcaaataaggttaga

SEQ ID NO: 213956 - DNA, 430 bp, Homo sapiens
gaattcaagctctccctacccacgtggttctccagcctcgcctcagcccagcctgttcctggcttggccctttctggagaggggyggggggactgtttgttcctttacacattctctctccatcccttcccttccctgattctcccacagcaggaatttcatgaaggggctcattttttaagtgcaaagtgtttctttctcaatgcacttgctgtgtgctctctcctggctaccactggcatagacgccctccaaacttgctagagacagggaaaagggaagtgaaatggggaaagaggcagagagaatgagcaggatttttccaattgatattcacttttgagtattaaaacatttgtctttcaaataacctatgcattaaataggtcattaatgaattaggggtaattttttttcatttgacaattgc

SEQ ID NO: 213957 - DNA, 429 bp, Homo sapiens
gttctccagcctcgcctcagcccagcctgttcctggcttggccctttctggagaggggtggggggactgtttgttcctttacacattctctctccatcccttcccttccctgattctcccacagcaggaatttcatgaaggggctcaytttttaagtgcaaagtgtttctttctcaatgcacttgctgtgtgctctctcctggctaccactggcatagacgccctccaaacttgctagagacagggaaaagggaagtgaaatggggaaagaggcagagagaatgagcaggatttttccaattgatattcacttttgagtattaaaacatttgtctttcaaataacctatgcattaaataggtcattaatgaattaggggtaattttttttcatttgacaattgctacagtgaaactggaagttgaattc

SEQ ID NO: 213958 - DNA, 606 bp, Homo sapiens
cacactgctctcaccagttcagaaattgtcttcacaaagaggcagwagataaggtggcagtggtaagagagttccttgtgttcacaagcctgcttatgccaggggttcgtattgttctgtaaagtaattaaatattaaggaaaccaattaagtatgaaaatttaaaaaaagaaaatgcaaattaggtataagcaaaaccactgtaaaagtctgaagaaagttccataaaactcgaaggattatgtcgttaaattgctttgcattccattttaaagcaaaatatctggaaattatatgtaaggcattatgtttgcgattttctctaagaaaaatgatgaataactccagctgacccatctatgctcaaagaaatattcttggccttatgtcagaactttggcaaatcaatgtaaatctatgcttttatgttataataaaatatatgagacttcatggactagaagaatctatggaattacatgcttcatagcctttcatgggacaggagttctttctttccatctcatgagacctagagatgatggcatttaacttataattgcagtgaaaaccctgaacaaccctataaaaagcagggagtaatca

SEQ ID NO: 213959 - DNA, 555 bp, Homo sapiens
agaacagcacgggaaagacccacccccgtgatttgattaccttcyaggaagtcccttccgcaacacatgggaattatgggaactacgattcaagatgagatttgggtggggacacacccacactatatcagaatccaaaagactggacactaacctgaagtgactcaataagcaaaatctttacccagaatcaagagacaggttttgggagatgaatacagttgttcaggtgagcaggggaattcagcgtattcaagacaaatgaaagaacaacatttggtaaaataaacacatgtcatagtgtacgttgttgtcatatgaattacacaggagagaggtgcctagtgatgctcagaaatagataagaaacagactcagaggcctcttctgccattgtgagttttttggttcacattgatgtagttgttctaacaaaaaaaagtatatctatacacacaaatacacatatatgacatacatgagatgatcatacatacctatgtgtatgtgtgtgtgtacatatgatatacatggaaacataattatttccctaat

SEQ ID NO: 213960 - DNA, 555 bp, Homo sapiens
agaacagcacgggaaagacccacccccgtgatttgattaccttccaggaagtcccttccgcaacacatgggaattatgggaactacgattcaagatgagatttgggtggggacacacccacactatatcagaatccaaaagactggacactaacctgaagtgactcaataagcaaaatctttacccagaatcaagagacaggttttgggagatgaatacagttgttcaggtgagcaggggaattcagcgtattcaagacaaatgaaagaacaacatttggtaaaataaacacatgtcatagtgtacgttgttgtcatatgaattacacaggagagaggtgcctagtgatgctcagaaatagataagaaacagactcagaggcctcttctgccattgtgagttttttggttcacattgatgtagttrttctaacaaaaaaaagtatatctatacacacaaatacacatatatgacatacatgagatgatcatacatacctatgtgtatgtgtgtgtgtacatatgatatacatggaaacataattatttccctaat

SEQ ID NO: 213961 - DNA, 548 bp, Homo sapiens
tatctgtttccttctaattcctatttctagttttttgaagtagagtttctgtttatttattacttgcttcaaacatgttttagtggaatgttcaaccagagggcattttatatggaatcttttttcygtgtgaacttacaatatggttttctcataattgaaccatttcaatcaagtggtcttaattggccaattttttttttttctggctgaaatttgtgggccattctcttagttacacagtacacagggcaaaacaagcaaaggctgcttctgcacacagagacttatgtgaaatacagcccagagaatctggctaagggacaacaataaaaacaatccttgcaaacgaccacattttaagacctaatgagggtgtgagcaagcactatgtaggcaggggtgctgcatccaacaagcagcctgtatggtatggcaggaacatggcctcagtctgtgtgagggatgcagcctggtccaacggcttcatgggaattggttgaccaagtggcaaacactagttcacattgagccagtgacggctcttc

SEQ ID NO: 213962 - DNA, 548 bp, Homo sapiens
tatctgtttccttctaattcctatttctagttttttgaagtagagtttctgtttatttattacttgcttcaaacatgttttagtggaatgttcaaccagagggcattttatatggaatcttttttccgtgtgaacttacaatatggttttctcataattgaaccatttcaatcaagtggtcttaattggccaattttttttttttctggctgaaatttgtgggccattctcttagttacacagtacacagggcaaaacaagcaaaggctgcttctgcacacagagacttatgtgaaatacagcccagagaatctggctaagggacawcaataaaaacaatccttgcaaacgaccacattttaagacctaatgagggtgtgagcaagcactatgtaggcaggggtgctgcatccaacaagcagcctgtatggtatggcaggaacatggcctcagtctgtgtgagggatgcagcctggtccaacggcttcatgggaattggttgaccaagtggcaaacactagttcacattgagccagtgacggctcttc

SEQ ID NO: 213963 - DNA, 638 bp, Homo sapiens
aaaaatgtaggatttttttcccttagtgccctcactcattataattatttccctatgcattgaaagaaaataccaacttgacctacataggaagcagaagagaaaataggcttatataatcaaatttggaaaaagttctctgaaatgaaataagcctcaataaaaatgatgggtgtgttgttttttgatgcttaaccccaaatgtgctatttctcatgacagtttatgagacaaccttgaaatgactgaaacttgctgggaaaagaaagcatctatgccactatctgagtaggaaagatgtctatactgtgcatgctgtgtacattcaggtgtctgggagtgrtgtgttccctgtgacccacagtttcttcttgtctagaactggcagtcacagttcttcctactctgtctgactaggagtcagggttagatccagagttcagatgcagagcagagtcatgagtgtgaacatgaggacatgcaggtatctacgtgccatatattctcatgattatccactgcatcttctctaatctcctagtctgtgggaggatcatttctggtgacccaggcagagagaagaaaggcacggtcctgtctcccagctctcaccacgtgccgcagatggataaacttgg

SEQ ID NO: 213964 - DNA, 638 bp, Homo sapiens
aaaaatgtaggatttttttcccttagtgccctcactcattataattatttccctatgcattgaaagaaaataccaacttgacctacataggaagcagaagagaaaataggcttatataatcaaatttggaaaaagttctctgaaatgaaataagcctcaataaaaatgatgggtgtgttgttttttgatgcttaaccccaaatgtgctatttctcatgacagtttatgagacaaccttgaaatgactgaaacttgctgggaaaagaaagcatctatgccactatctgagtaggaaagatgtctatactgtgcatgctgtgtacattcaggtgtctgggagtggtgtgttccctgtgacccacagtttcttcttgtctagaactggcagtcacakttcttcctactctgtctgactaggagtcagggttagatccagagttcagatgcagagcagagtcatgagtgtgaacatgaggacatgcaggtatctacgtgccatatattctcatgattatccactgcatcttctctaatctcctagtctgtgggaggatcatttctggtgacccaggcagagagaagaaaggcacggtcctgtctcccagctctcaccacgtgccgcagatggataaacttgg

SEQ ID NO: 213965 - DNA, 524 bp, Homo sapiens
aaaagtttaaagagataaatggagaagaaatgagagaactgtcagaacgagaatgcagtgttcattcccttcagttagagaccggggctgagcttctctctgggcactattgtgagagtggcagggccaaggatcaccagtgtctgaacccagccctcccctcaccagttctctttgagcgacacattagaaatgagaattgttgaaatgaattgtcatccaatgttggatgacagtgcttggctcagagctagagttgcaaatgagaacttggtcatctccaaccatgagtctaaggaagccatggacatagaagaacttagtccatcttatcaaygtatttgcagtaaaaatcagacagaatagttctcacccaacttggtcctcaggcaaaatattcaattttctagcatgtgtgcattgaactggaacagaaaggaggtcgtgaggtctgagctgagtgaataaggcaggagagcctattggagatgatgtcaaaaagatcagggtaggaggtgatgaga

SEQ ID NO: 213966 - DNA, 529 bp, Homo sapiens
tgcctcctacttagaatcatacgcagtggtaggaactccccaatatagaaaattgattctgattgtagttcaaaaaaaaatcctcatatcctgcaagtccctttctctgttatattcacctcttcyccaaaccctctaaatctccctaagactcccttagggagtctaaaaccagcttcctggttaaacaaagtaaaaaacaaaacgaaacaaaaccaaaaacaagaagggagaaaggcaaggaagagtgaaataaacagcggcatataaaaagaaattaatagcctaggttagcattccttattactatatattcagctcttatacccacactggagggtagccaactttgtgactgttgtctcagacattgacacttggggttaacgcacctagaatagttatttggtttattttaattaccaagttccaaaagaacagaacaatttgtttctttgtttgttttgtaatatactgttaggatgcatgagagatcaggaataagcattctgaggccaaattctgctct

SEQ ID NO: 213967 - DNA, 416 bp, Homo sapiens
ggtaggcaacttctgaaaatgtccccagagactctgcactatgtaggatcccctcccatttgagggtgggttggacctggtgactcccttctaatggctcgaatataggttctgggaagtcacttctgaggtggaactggcacctcgcttgctctctctcctgccagctctcatgctgtgagctgcaattatgcagagacccatctatcacggagcagaggcctcagtccaacagcccaagagaacctggatgtggccaacaaacaagaagagagcttagaagcagagctggccctagtcagacctgcagagcctgcagycccagcggacgctgattccagcccaagagaccccgccaccatgtgccacattgtctgaccacagaaaccatgagataataaatgtggtttggttta

SEQ ID NO: 213968 - DNA, 526 bp, Homo sapiens
aaaaatccttagtctttgccatgacggaaagataaggcttaagaggtaaaactcggggcttattctttctccaccctctcccactctgttcccagaaaggggtctctgcaggagtagagggtacaacaaaatcaaggacacactgatgctcttctctaatcaactctacagaaaaatgtgtgggagaaagacaggtgggaatatctcctgtgatgctgaaattacaggctgtgccttggagcacgaactgcagctgagcctagagcaatcctcctgctctaatatatataagaccttgaactccgacatcaaggaagaaagcaagtgtgttagccgatttatttccaagaatgaatggcaattatgtttaagtgatttctctgctctcattcctctttagrcactgagactctacaagctgaacctttctgaatcctgaaccagttctgaattcacttatttattcattgaacaattgtttgttgattatctactatacatcaagtactactctgcttgttaagaa

SEQ ID NO: 213969 - DNA, 564 bp, Homo sapiens
gtatataaagcataaataaatccaattttaaaagaaataagacttgggaaaatacaaatattcagcatgattctttctcatttttaccatttgagaaataatcagtaatttataatcctagagttttaggtttaaaaagaagctatatatttatgtatagtttatataaatacacataaaatatgaatataaatrtatattcatatgttacatatatttatatatgtatatgtacatatatgtatatatttatattctatatataatataaatataactatatacacattatatatttatatagatacataaatatattttatgtatttatatttatttacgataattgtttattggtattatttatattttatattaatatattattttaatatataaatatatattttatgcacttaacatatatttatatatgtatatttatatatagatacaaaaacacatatattagagaccagataaaaatataaataataggtaaataatatgtaaatatatatagttatttaaatttgttgtataatatatatattttttcagaat

SEQ ID NO: 213970 - DNA, 564 bp, Homo sapiens
gtatataaagcataaataaatccaattttaaaagaaataagacttgggaaaatacaaatattcagcatgattctttctcatttttaccatttgagaaataatcagtaatttataatcctagagttttaggtttaaaaagaagctatatatttatgtatagtttatataaatacacataaaatatgaatataaatatatattcatatgttacatatatttatatatgtatatgtacatatatgtatatatttatattctatatataatataaatataactatatacacattatatatttatatagatacataaatatattttatrtatttatatttatttacgataattgtttattggtattatttatattttatattaatatattattttaatatataaatatatattttatgcacttaacatatatttatatatgtatatttatatatagatacaaaaacacatatattagagaccagataaaaatataaataataggtaaataatatgtaaatatatatagttatttaaatttgttgtataatatatatattttttcagaat

SEQ ID NO: 213971 - DNA, 597 bp, Homo sapiens
ctaacaaagactggtatgcaataaaaacagtatatgtgagaggaacctgtaggattatgtaagaaacaaggaaccagtaaagtttttgagcacacaaatgagatagccagaactagacatttggaaatttattgcagcaatattgtgtgtagaatgaattaaaagacagccattgtacaggaagggagacccagtaggagagcattacactagtgcaggtttgaggcagtgaaagcctgaacagtgctgctgggaatgagcaggaggggatgtgggtaagaggcttcattggagaggaaatggcactgggataggcaccctaggacatgcaccgctgttcagaaaattagattctggttctgtggttctttcgtcaagtagacacgacctctattgagctacctctgtgaattctgtttgcacatctgtaaaataaagagattggaaaatccctaagtattcctagagcactaaaatgcttcatgyctatttgaatcaatagaacttgttaagatgcttaaatgagaaataaagagcataagggagatagaaaaattgaagataacctgaaacaagtggtaaatatgagtaagtggg

SEQ ID NO: 213972 - DNA, 597 bp, Homo sapiens
ctaacaaagactggtatgcaataaaaacagtatatgtgagaggaacctgtaggattatgtaagaaacaaggaaccagtaaagtttttgagcacacaaatgagatagccagaactagacatttggaaatttattgcagcaatattgtgtgtagaatgaattaaaagacagccattgtacaggaagggagacccagtaggagagcattacactagtgcaggtttgaggcagtgaaagcctgaacagtgctgctgggaatgagcaggaggggatgtgggtaagaggcttcattggagaggaaatggcactgggataggcaccctaggacatgcaccgctgttcagaaaattagattctggttctgtggttctttcgtcaagtagacacgacctctattgagctacctctgtgaattctgtttgcacatctgtaaaataaagagattggaaaatccctaagtattcctagagcactaaaatgcttcatgcctatttgaatcaatagaacttgttaagatgcttaaaygagaaataaagagcataagggagatagaaaaattgaagataacctgaaacaagtggtaaatatgagtaagtggg

SEQ ID NO: 213973 - DNA, 588 bp, Homo sapiens
ccagactgtattggttgttggtggtgttcagtggcttaattccaatcacctgcaaattattcacaaagttttgaagaggtaaatgtctgcaacaataattgtcattagtattctaagtcaaaaaagttactatggatgtgactgagttttatccagattttatttaaagaacaacttataatttatcattaagtacttaaagtctagtttaaaataataaagtaaaatagtcttgtatccagtcacaacatggttgttcattatccagatttacatttagtacagatcaaaatgtgtctactgacacctaaaactctatcttaaaaaaaccgtattatacatcaaatatataaaaygagcatttagacttttatgccaattatcacattctgaaagaattctatggtatttgtttatataaacaacaaacatctagaaatgtaattaaagttactgactttagaattataattatctcattcagggaaaatttactcaatatcctagtgatcatcaaaactttgggaattggatttcatctgccagtggatggagtacatttcttaacacaggtaagcacatttcctc

SEQ ID NO: 213974 - DNA, 588 bp, Homo sapiens
ccagactgtattggttgttggtggtgttcagtggcttaattccaatcacctgcaaattattcacaaagttttgaagaggtaaatgtctgcaacaataattgtcattagtattctaagtcaaaaaagttactatggatgtgactgagttttatccagattttatttaaagaacaacttataatttatcattaagtacttaaagtctagtttaaaataataaagtaaaatagtcttgtatccagtcacaacatggttgttcattatccagatttacatttagtacagatcaaaatgtgtctactgacacctaaaactctatcttaaaaaaaccgtattatacatcaaatatataaaatgagcatttagwcttttatgccaattatcacattctgaaagaattctatggtatttgtttatataaacaacaaacatctagaaatgtaattaaagttactgactttagaattataattatctcattcagggaaaatttactcaatatcctagtgatcatcaaaactttgggaattggatttcatctgccagtggatggagtacatttcttaacacaggtaagcacatttcctc

SEQ ID NO: 213975 - DNA, 562 bp, Homo sapiens
aaatgatgtgtgaatgacttcagttatgatattttgaaatggtttagaactctctcatttatttttttgtacccttccaacaccatagagggctattataaaatagctcaagtgatagttatctaatagcaaatatccataatgagaatagggagtgcatttatcagtaattatttaataaaaacctattagttttcaaagttgtactgtcaattaaatacctattttaatggttattagttaccttgcctacttcaatttaccagaggaatatgatttaatttttcaacaatacaatatgtgctatagtgaagtgctctcaactagtaacatttattaagtacccactatgcactttgttctgagaaatatgctatgtgctataggggaatacmaatagcagcaaagcagcagccgaggtaataggtgtagtagcaatgaagcatttgtagaacttttgttatgtgccaggcattatgttaggcactttaccttcttgccttatttaatctttaccccaaccttgaacataggtgattttttaatcctcctcttatttttt

SEQ ID NO: 213976 - DNA, 547 bp, Homo sapiens
ctctagctaggacttccaatactaggttgaatagaagtagtgagagggcatcctygtcttgtgacagttttcaaggggaatgcttccagcttttccccattcaatatgatgttggctgtggatctgtcatagatggctatctcaagagatgcagaaaaactttcaataaaattcaacttcccttcatgttataaactgtcaataaactagatattgaaggaacatacttcaaaattataaaattcccattttattgtgacagaaactgaggcagagagcatttaagtgtctcattacacaggatagtggatggattggctttcaaatgtaggtagtttggttccagaatcttatactcaaagccagtcttctattctaccttagctaaaaagcatcaatgttattactgaaataacacttatttcttgaattcaaatgggaatatttcaaggaagttccaaaattggagatgaattatatttaaaacaaaggtcaaatttttaagttaaaataaactttgaattaacagctaccacattttggaact

SEQ ID NO: 213977 - DNA, 630 bp, Homo sapiens
ctataatgtcatgacatgacattttgtaataagctatgcttctttccccctttttccttctgcccctaccttccttccatgcaggaagcatctgctgtgttctattcttatgaccagggggtaaagttgttatagcatgaatgcaagtaagaaaataaagtccattagataatctggattcttccctacaggaaaggattctaggatttaatcccttattgtcatccccaagatattacagttctctgaattggagaacagaaagaaaaagcaatggggaagtaaaggaggtaggtgctaggaagtattcacgaggaggggctcttgaatccagatctttttgtcagaagaaccacaaagagattgaggacctagtagcagagaggacctcaccctcactttttggcatgcagcctctgaggagggggcaatgaaccaccaactggtgaaaagaggagaaatgacagtaaggaatattgggaaaacagcatcrgagacaacaccactgaatgaaaaagcatctaaaagttgcccatcctgacttccttgaggaatgggtatttaactagaaattaaatttcttttcagagaaagaaagttacattttacacaccaagtttgtggtctttg

SEQ ID NO: 213978 - DNA, 548 bp, Homo sapiens
catttgactattctctcagtgaatgagattgcttggattttcagaatcttggaatagtatcacatggtggtcccaaagaccagatgataggtagctttcttcctgacaaattcccaacacttgggcaaactgcaagagatgtgtgtgatgattcttaaagtgactcattatattttcatgtgagtagattatcgcactgcaggagagacaagtgttttcagctgatggcctattttacctttttcctatgttttaaaaggtaacacacaaatggattccgaagattttagaaatatattttttcttggaaaatatcaacaatgaaataaaaatagacttttaatgtggtagctaatttgattttctttaaaaaaattctgrggctcttagtttttctgcattatcctttgaagccaatgggacaataatatcctgaaataattattttaatacatcatggaattcatgacaaaatctagaattacgtgatacattatctgtacactcttgtctccagggttctctcagtgggtcacaccttggcacac

SEQ ID NO: 213979 - DNA, 577 bp, Homo sapiens
tggactctggcatatgcttcagttcactggttagtctgtttttattcttaaagttttgggggtattcatgaaatgctttggaaagcttgtgacagacttgatagggcatgatgtctggctggtgtcttcaacagttaacacartgattcattcccatatgttcttcttagtgcactggcctcatctgtattacatgtgcctgtacctcacagcacctgaaagcctgtatagaagaatttaatatatcactgtgactggagaaaagtagaacttgtttgtaaatgtttgtttccttcaaatttcaaaatcccacagtgtaagggttactggaggtgtgtacctgtgtgtgtgcctgtgtagatgtgtgcatataggtgtgtttgtgtagcagttaccaaaatatttggttggtgcaaaattaattgtggtttttgccaattttttttttttttgagacagagtctcactctgtcacccaggctggagtgcagtggcacaatctcgactcactgcaacctctgcctccctggttcagatgattctcctgcctcagactcctgagtagctggaattacag

SEQ ID NO: 213980 - DNA, 368 bp, Homo sapiens
actacacagtcataaaaagagcaaaatcgcatcctttgcagaaacatgaatgcagctggaggccataattctaagcaaattaacacaggaacagaaaataaaatactacattttctcacttgtaagtgagagctaaacattaagcaracatggacataaacatgggaacaatagatgctacagactactggggacgaaagggaggggctataggtagaaaaattacctattgggtactgtgctcactatctgcatagcaggcactccatatctcaaacctcagcatcatgcaatatactcatgcagcaaacctgcacacatacgccatatctgcaataaaagttgaagtttggggaaaaaaagacaat

SEQ ID NO: 213981 - DNA, 614 bp, Homo sapiens
agatctgtggagctatgatctaaaaggagttatgtcactaatataatttgtagttctagaaatcccagttctccaagtactcaggtttactggttatttaattttaattttttgtagtgaaggctatcccctccctacctaacagggacctcgtgacagtttctataactcattagttataaactatgagaagctttctcatttatctgtgttcagcttaggaacagtcatggtgagtgttcatatgcaccttgagctcagcctcaccagaactgagtatacactggcctgctgyatccctcaccccaacaactctgcttttatattccgtctcagtgaatggttccgcgttcactcacatgtttaaaccagaagtgtgacagctaatataaattcagcctcccatctttccagttaataccttgccctggaaagccagaagcatttccagtaaatgatcctttccctgcatccccagagcagctgctgtagtcagcactttaccatccctctcctgaactattgcagtttctgactttgagtttccctgcttcaaacctcaccttctgtctctccaattctgtgtttgtttttgtgcttctagaatgatcatt

SEQ ID NO: 213982 - DNA, 571 bp, Homo sapiens
catgatgttgggatccttctggagtctgtggaatttgctttttaaagaggaaaggaacagaagaaggttcctgaccaggcatttttcatcctcacctatcacagtccaagaggaaatgagtttaaattgaagtcaatgaaatttgcagaaattcacgaaggtggcatttttaaatgtaaaattggtctttttggggaaagtaatggaattgtctttttaacaaagaggctttcaaccttttaaatgtactcaagatcccatgaggccactgctcwttgcagtgcctgtccccagaggctctggttctcctgggagccagtgcttcctggcatgtgccagggctctgaaggctttggttgatcttggagtcacacgctgaaccttgcctccctggagatgagagtgacacgcagtcagctggggcacaggtcactaaggtgcccaacaaaccgtggtgtgcaagcgcaggtcaggttcctgaggcttcacgtccccatttgcttatctttttcccttagcaggtcccggctggttgcataagagcatgatcgttcagtgtctgggtagcgcc

SEQ ID NO: 213983 - DNA, 459 bp, Homo sapiens
tcttattacagggtgccaaagttccacagaggatagtccaaactgtaagagttgcctggcatcatggaatgttcttgaggaaagggactcttggagcccttttctctgctttgatgtgcaggctcttcttccaacacttcctccccgacagcactacactagccagctatactacactactcaccattacacattaagtctctagaggtccaagttactgtgctctgtctgcagaggctgtttccttcacttggaattcccttctcgtcatctttacytggtgaattccatgtattcttctagattcagcacaatcaccacttttttttaatggaggtctacactatgattttcttaaagttggatattggttctcattctgttttgtgttgccacagtcatgtgggcacaaaggtgttaaatgaaggcttactggatggatgaatgaaggcatgaatg

SEQ ID NO: 213984 - DNA, 491 bp, Homo sapiens
aaagcccagggtttcctgaacagcctcattctagttggagagacaacagcaaacatagaaaaatacccataattggcaataagtcctttgcacagaattagcacgagataaagggatggagggactttgaacagaattagcacaagataaagcaaaggagggcctattttggatgatgtaatcaggaggcccatctgaggaggtgatgcttgaattgacacctgaatatgaaawgaggccgaggagttctggtggaaggcagaagggacagcaactgcaaagctgtgaggttggaacaagccttagtaagttccaagaacagcaagtgtggctgggcaggaggaggttctgactccaggatgaatgagaaagtaggatccaatcttggctggctggtccgagggcactgatgtaatcggatttgccttttcctctggttgttaaggagagcactgtggggtcagatggaaacagtccagcagcaagaggac

SEQ ID NO: 213985 - DNA, 481 bp, Homo sapiens
tttgatgaaagattagggcattagattgaagcttaagtaagcaaaggcattcttcaggtgatgtggttcattctaatcagtaattttatgatggtgttcatattccattccaatgatcaaatggactagtaagcttgagaaataagacaaactagagagagagattattttataaatatgaaggaggctagtgaaattttggtccagatggaaagccacccactctcccaggtcaggactgcatagatgaagtataagcaaaaccgtcattcacactttgaaggtgctgctttagagagatgtcattatatgtggtgtcagatttttcaccctgttcagtactgggcactgatttttaaaaccacttatctatattttttaaatgtcttctgactcattggattgattttgtggacctactggtagtytttggatatcccccagttaatctttgcttccatgatgagcatttattgaattc

SEQ ID NO: 213986 - DNA, 550 bp, Homo sapiens
aagctgagggatttgcgagttgggggatgctgccaaatgtatccactgaagataatgatcccatttcagatctgcaggtctattttaatgaaaggagacaggtgarggtgcagaacagaaatgttcatagcacctgaccctccttctttccttaggagtttctcaacccagcgaaattggtgagatttttaaaaataaatactttggagtatatcatgaggtaggattactgtagtgagacagggagcagtaatggcagtcaggaaaacctgtgtatgttaaaaagtgtttgctaagtctctcctgtgtgtttagtgttgtgggggttttagtcgaaacaaattagggtctcagccaacctcaaagggtgtattttctcagtctttattgattcctcttggtttcctcagggctcagaacatccaacaccttaggagcaaatgtcctttgaatgaataggtttgggatgaggttctggaagacactaacacaaacaaccttgataaattacatggtagtgacttcatcacattcttccatctagtcggag

SEQ ID NO: 213987 - DNA, 608 bp, Homo sapiens
ccttaagttaataatttatataagtcatcagtgtttttgatttttttgcttgtgttttgctacatataacatttttcattagtaaactatcaactacttctgaacccctgtacagagattaaaggaccaacatcttcctaaccacttgcaagrccaaagctcaagtggcagccatcttgtagaatttcactgggccttcaacatctgaagcaccagaatggattacaacttttcatatgacaaagctcctgggacacaggatgagttcagttctcctttaggcagaatgactacccatcaagatgctataagagaaattaaagcactaaaaacaacatttctacataaacttttcaggaaccttatagctctgaagtcatgctaatctaatattttggagatttcctaaattaacttttaaaaactgttctgcagaaaatgaggaagggagacaagatacagaaaaatctaagggattttatttctttaatttgcatctggacatattaaacccaaaaagggacagtgatttaacttgttttgtcatgtaaccaagtgatgtgggaaacttattctaaaagggggaaaattagtcctgaaataagctt

SEQ ID NO: 213988 - DNA, 443 bp, Homo sapiens
tgtgaggtaattaactagctcagtttggccaatctacaatgtatacatattttataacatgtacacaatatatacaatttttttttgtcaattacttttttaaaagctcaactttggggcagcatgattctttacatgtggtaatggcattttcacttactgctacataaacatgcataagctaagtgtacatgtatgrggacattattatgaagagttaaaagtgaaaaacgtgattgagttaaaagacttggaaagaaatcacagtgcagggtcacacctcttggacaagttataacacctctcaatcttggtttcttcatctgaaaacagtgataaaaacactggccatactaactttgacactcaaatgaaacaatacattggaaaggtatatagctattacacaaatgttataaaaaatttaaacataacaagtaaat

SEQ ID NO: 213989 - DNA, 300 bp, Homo sapiens
tttgtttttaggttgttgatattaaaacgaaagtaaatgaaaatgaaatatttggaggggattgctatttttcatttagtaaaataagcatttaacatttggcttttttttttttttttttttttttttttgcttgkctaaacactggagaggggaatccagcgtataaaaattctcacaaatatttcaaatccccgccccccaccatgtggcaagattccacccccctccctgggtcttgtaaaaaaaaaaaaaaaaaaagtgtcagcaggttttactgtatgggaatttttaaaaaga

SEQ ID NO: 213990 - DNA, 413 bp, Homo sapiens
cagtaaaataaagcaacggaaagttgtcctactcaggaaacactcaacaatgagatatcaacagagagctcagaaaaagacccaaatacatgctggaactgagtgtatgaaattaatggggcatttgaaattagggtaaaaaaacagactttcattaaatatatttttaaaagaaaaagtaatctagatttctacgctcaccccttcaactaaaataaactgcaaaggaataaaaaatttaagtttttaaaaatgaaatcacaaaataactaaaagaagatgtacataaatttctttttaattttacaaacttagtgacagtaaaccttttctggataggacaccaaactcagaagccataaaggagaagactgatacactcaactgtaygataattccaagcttctgtattt

SEQ ID NO: 213991 - DNA, 583 bp, Homo sapiens
tgggaacccctttaaaggtgaggaagaaagaagtttagggcacctttctttctccccagggatttccaagcaaagacttgtagactccaggaatcccgaggacagcactagtgtcttgttaaatcaggtagagaactctaaattagagactgatgaaagcaggtgatctcccaattgagagaagtctgagtgagccaggctgcactcaaggatatcccctcaaaggccattcctggggaggagatgttttgcacgtgtsgccaggagcagatgtcctgagccagagcggacacaaggtgatggttggtggggcagacccccacttgcaagagcagttccaatgaaccccgaggttatccatacacactgccagtctgccaagagaagctgcttctcactgtggcagatcagctgtgaccacatctcttctccagaggaaggacaaggagaaggtgccagccataggacaacagtgggcagccgtcccctctcctgcatgggcaaaggcactgggcactgtcagcagattttgaccccgtctcctttaccctgcattgcttgagctacaggaccacatcactga

SEQ ID NO: 213992 - DNA, 583 bp, Homo sapiens
tgggaacccctttaaaggtgaggaagaaagaagtttagggcacctttctttctccccagggatttccaagcaaagacttgtagactccaggaatcccgaggacagcactagtgtcttgttaaatcaggtagagaactctaaattagagactgatgaaagcaggtgatctcccaattgagagaagtctgagtgagccaggctgcactcaaggatatcccctcaaaggccattcctggggaggagatgttttgcacgtgtcsccaggagcagatgtcctgagccagagcggacacaaggtgatggttggtggggcagacccccacttgcaagagcagttccaatgaaccccgaggttatccatacacactgccagtctgccaagagaagctgcttctcactgtggcagatcagctgtgaccacatctcttctccagaggaaggacaaggagaaggtgccagccataggacaacagtgggcagccgtcccctctcctgcatgggcaaaggcactgggcactgtcagcagattttgaccccgtctcctttaccctgcattgcttgagctacaggaccacatcactga

SEQ ID NO: 213993 - DNA, 597 bp, Homo sapiens
acattaattcagatgacatttactgagtgtctatgatgtgccaggtctgtcccaggagctgggatacaaggatatgcagctcttgtagagtttatgtaagtctagttagagtattagacattaaataataaacacactcataattacaaattatgataagtgctatggaagaaaggacaagatgatgtgatacagaaaaatccagcttagatggggtggagacagaagaggaaggcaggaagcaagtaccagtgagattgagagctaagagtataattcaattatatatatatatatggagttggaagttactgttaggttgaaacacatgcaattactgatacttaactatttatgacctacaaaatggcaatttcatgtggttcaagctaacttatgtgtgtattccaggcagggtcagagacaaaagggtattctataatactttcatcagagcaggcacagatggctgcaagattagagggaactgtagcaatggaaagaaaactcgyaaccccacattataaaagtagcaccagaattttagcagtatgaattgaggtttatagtattcttttgattttaaatactcatgct

SEQ ID NO: 213994 - DNA, 420 bp, Homo sapiens
atagatgtttatgtctatcaaaaatgaagaaatttattacaatgacacgccattttgattctagtccattttctaaaatagaaaaacacacaatgcatactcgggtagttgctagaatactgaaagaaatacttattttacatatattttattaattatatatacaaaaccaaaatccaccctgtgcttgattctattacagcatttatcatactttattaaaatcttggattttcttgtctgattcctccattataaacttcctamaaagtcagcactgaggtcatggcttgccagcatccccattatctattatagtgcatgatatactcaacaaatggttggctgataaatagcatggtagaaagggtaaaagatctggaaatgttatattttgttttggggatgtgccacttgctg

SEQ ID NO: 213995 - DNA, 529 bp, Homo sapiens
agcaagcagttattgacacgaattatgtctcaggttgtcttataagctcaagggatagaggaacatataaaatattgcattctcaatggatagttttatatcttagacctaggrcctagagatgacctaggcaatactaattttttcggcaccctccaattcactcccaagtaatttacttgcatcctttagctccttgaatcctctttacccaaattttgtacaaaaggaacaaggaagagtagcaagctcatggcaggagctcaatcaatgggtttggaacaaataatgaggacattaaagtaaaaatttggaggtaaattgcctgtgctcacagagctattaattggcagtgctgaacttgaacccatatctatccattttcaaagctctttctatttgcacaccaaaaagctgctgatgactgataaaaataatgactaatatttattaaacttttgctatatgtcagacactattctaactgtttcatatgcattaactcaatgcttcatttgaattaaaaaac

SEQ ID NO: 213996 - DNA, 489 bp, Homo sapiens
tatagcttttccatatttgttctattttttcttagtggtggtatcaatttaaatttatgttttctgctcataattttatgtacacctgcattttgacctgtatttttgatgttctgtaccttacatgtctttcaaaatgatgtataatatgtgaaaattattgctaatatatcaagtgctcagctaggggataaaaaatgactaggcaactgctttggatctggacattcaagattcaytgatattccagaagaatagttggaacttgtctgttcaaagtgactttggcccatgctttcaaaaacatggctgtagtaatcaacttcccaggcatggtaacactgaatattctcatgtaattaacatttttaatttatagacaagcagtagtggcacttactgtcacaggtagaatttaattagccaagacaaataaattaagtttcacacttctatcaggatagtggaattgcagaggctggtctggaa

SEQ ID NO: 213997 - DNA, 489 bp, Homo sapiens
tatagcttttccatatttgttctattttttcttagtggtggtatcaatttaaatttatgttttctgctcataattttatgtacacctgcattttgacctgtatttttgatgttctgtaccttacatgtctttcaaaatgatgtataatatgtgaaaattattgctaatatatcaagtgctcagctaggggataaaaaatgactaggcaactgctttggatctggacattcaagattcattgatattccagaagaatagttggaacttgtcwgttcaaagtgactttggcccatgctttcaaaaacatggctgtagtaatcaacttcccaggcatggtaacactgaatattctcatgtaattaacatttttaatttatagacaagcagtagtggcacttactgtcacaggtagaatttaattagccaagacaaataaattaagtttcacacttctatcaggatagtggaattgcagaggctggtctggaa

SEQ ID NO: 213998 - DNA, 574 bp, Homo sapiens
atgactccctgaatattttgggctaaaaatgccaggtttaggagataactaaaattaagcgtatgtttctctttctttcttacacacacacacacacactctcgctctctctcacacatgcactctgtctctctctcactctgtgtgtgtgtgtgtttgcgtgtgtgtgtgtgtgtctgtctgtctgtctgtctttggggtggattatattagacaaagactggttytagtttaattggcttcagaaatgcaaattactctcttttaacagatggccatctaaatgaactttcagaaagttatactttgcaatttctcccacttcatctctctttgctattctcagtctatttcctccaaactcttaatcaggaaagaagaaaaagtctaggatccttgggagaacttagagagctgacttttgccattttacccacaactttgatgacggagggagtcaaataaatggataggatagtggcaactgtaaagaggaaaggctttcagaaataatctgcaacaagggaagaagaaaactttgaaaaattgatcctagaagatgaacagaggaaaa

SEQ ID NO: 213999 - DNA, 456 bp, Homo sapiens
aattaaaacataacatagcaaaacctatgtgacagcaaaagcagcactaaatgggaagttcatagtataagtggccatatcaaaaaagaagaaaaccttcaaatgaataacctaataatgtatcttaaacaactagaaaagcaagagcaaagcaaacccaaaattagtggaaaaaagaaatataaagatcagagtagaaataaatcaaattgaaatgaagaaaatgatacaaaagaccaataaaacaaaaaawttgctttttgaaaagataaataaaattaacaaacctttagccagactaagaaaaagaaaagacccaataaataaaatcagagattgaaaaagagacattatgactgatattgcagaaattcaaaggatcattagtggcttctattagcaaccatatgccaacaaattggaaaatctgaaagaaatggataaatttctagacac

SEQ ID NO: 214000 - DNA, 444 bp, Homo sapiens
catatatttccagtggcatttacaaacgtgcattgtaatagaacagttgttctacccttctctaaaacctttgacaaaaattgaaatgggtaagcaatgacttttctgaaattcaatgatgaatttttactataattcttactgtgttccttaacaacaatttctctttctcttttgaagtccttgagtagtttacactcaaatcaaaattgaataacacttttcaacaaatcagctgttagctctaactttaagtttaggcttctaagctgaatttttcactctgctatataattaaaaggtcttgttacccagggctgcgtccctcatttttatacctatccctcstgatgctctgatacctgagattggttttcatcgtggggtttaaatatgaaaatataaagagattttatgaaaccctagtgcaatttaaatgaattc

SEQ ID NO: 214001 - DNA, 424 bp, Homo sapiens
tacagaacagtgtgctcaaggatagttcccatctaattcattaatattctgaacatacctcttaagagatctctgggaacacaagcactctcttctttagaaacccatttcaaaccaggtttcttggcacaagaataccatgcattccctttgattttctaaacaaaytgccacaaaattatttttaaatctaatttagtttaacatattttaagtattttatttctttgtcaaaaatcaaatgctttaaaatattttcaatactgtaatcaattactataagtgttataaacaaatttcaattttataaaatttcttctttattaagaaagaccctaaaatgtgcagcaaaacccttcttctcagggaaacatgttgatatctaaggcatcaatattaattccctgaaacttcctagccggag

SEQ ID NO: 214002 - DNA, 424 bp, Homo sapiens
tacagaacagtgtgctcaaggatagttcccatctaattcattaatattctgaacatacctcttaagagatctctgggaacacaagcactctcttctttagaaacccatttcaaaccaggtttcttggcacaagaataccatgcattccctttgattttctaaacaaactgccacaaaattatttttaaatctaatttagtttaacatattttaagtattttatttctttgtcaaaaatcaawtgctttaaaatattttcaatactgtaatcaattactataagtgttataaacaaatttcaattttataaaatttcttctttattaagaaagaccctaaaatgtgcagcaaaacccttcttctcagggaaacatgttgatatctaaggcatcaatattaattccctgaaacttcctagccggag

SEQ ID NO: 214003 - DNA, 671 bp, Homo sapiens
tgactctttgaatctaaggactataagattgaatgatgtggttatagtcatttgaagtctaaattttctaacttttaataccttttgttcaaagtgactgcgtaatcgaaagaaaacctagaagaatcagtcaagtttttgaagatatatttggtactattttcagtagatttttaaactgtgcctacataaaatcagaacatcaggatgaaaattaaattcagtcaaccagaaagtgttgaatacaaaccaaaaatacagatgaaggataacaaagtataaatcctaaagcttcatggaaattttatttttgctttatttcttgtattagcaagcccttctgattctttaggctttcatctaataccatgccactgaatcattttactctatactctctctttgggatctcaaattttctgagagattacattcctgtttatccttgaaaagttttacaaaaaaaatcttactgttttctcttttaaatctgtcattctactccccaagattggttttattgctaaaaatctctcttttcctcataacttcccagctgccttcccactcaaaggaaacacaatwttccttccctgactttagattaggaaagcaaaactacccaaaataacttaaataatttaaaccaaccagcatcctcttttaagcag

SEQ ID NO: 214004 - DNA, 536 bp, Homo sapiens
atgaacttagtgttaatgtttttaaaacaccacatcacttgggaaggtattgtctgagacattcctgtagaggttcatctcctcccttttcttactcctctgtatagtctttttttttttttttcacgtggggctataattctgaatacagatcaaagaacttctcattcagttgcatacaaccgttacaattttaacatgtcgtttgctgtcaraacccctctgactcccctcccaattcacaacgaacagcatttaatactgtggttacattggaggaggcagtatcattgcatcagtaaataacactagcaaaaccactcaatttacttttctgtactttaagttgggacataatacagatgctttaaacaatcacacaaatgattaaaaaatattatatattttacttttttagtgtatttagtactatatcccacttcacacctttatggattacaatttcattgagtttggctattataaatatatcatttggaaaataacttctttcagaatgctttttcttgcattga

SEQ ID NO: 214005 - DNA, 410 bp, Homo sapiens
aagggggaagaaacaagaatgagctgaatagaaaagctgaaatgaaagagaaatgaagtgggaagtaagtgagcaagaaggaagggagaaagaaagaagaaatacatcaaaagtttcagtttacaaccctgtgtatcataaacactgttactaacaagttctggctgagttcctgccatgtgccaggccccactgccagacaggatgctaggtgttttcatccactgctaaggactaattgagacctcgagagcttgagaaaacagtagttcagttcttgcaaagcccttacccrgagaatctacaccacacagatgccaccaagaaattatacaatctgtcttataaccattttactctggatatctggaagtggaggggtcagagactgaatggtggagaggaagggc

SEQ ID NO: 214006 - DNA, 423 bp, Homo sapiens
tgtgtgtgtgcatgtgcacatgcacacgggtgtatatgtgtgtggaggggtcatgggattcatgtgaaatacttgccrtcattggtttaaggtgtttgttaactttttctataacaggttggcacatttacagcctttttttttttttctactttggagtttttttttttttttttcctgcagtagcttagagtcaggaaaacagctaaagcattggtagtttaaaaaaaaatacccttaaagagtccctggttagatattcaacagagacatgctgtgattccacccaggatgcagtagtcaggaagtggaaagcagtgacatcccaggaatgagcctgctagatggtgacagggagtgtctagctctgtagaacatgatggaacaccacccttagggggtactgccaaacacagcatgaaa

SEQ ID NO: 214007 - DNA, 423 bp, Homo sapiens
tgtgtgtgtgcatgtgcacatgcacacgggtgtatatgtgtgtggaggggtcatgggattcatgtgaaatacttgccatcattggtttaaggtgtttgttaactttttctataacaggttggcacatttacagcctttttttttttttctactttggagtttttttttttttttttcctgcagtagcttagagtcaggaaaacagctaaagcattggtagtttaaaaaaaaatacccttaaagagtccctggttagatattcaacagagacatgctgtgattccacccaggatgcagtagtcaggaagtggaaagcagtgacatcccaggaatgagcctgctagatggtgacagggastgtctagctctgtagaacatgatggaacaccacccttagggggtactgccaaacacagcatgaaa

SEQ ID NO: 214008 - DNA, 411 bp, Homo sapiens
ctttcaggcagtaagaaacatcacccaagagaccaggaatgccaaagatactgtcccccaaagtctctgaaccttaccacccttcacaaggtcacatgagccacgtacccccacctcatatacgtggatgccatcttacagaagaatcagggaaattatcagaacgctgatgagacactgagcactatctaaagggactattttagtgatcagctctyactgaagttttaaagtatgtagctaggactgaaagttattccccactcccccaccccctccggctatcagaaggcagattagaattagttatagataaaataataaaattgcatttcctctgcactttcaaattgttgggtgagtaaatttgtggccagctacctatgagaggtctattaggatttatggatc

SEQ ID NO: 214009 - DNA, 438 bp, Homo sapiens
agatcttcagggtgaagattaaaggcacaggctttacaatcagctagaacttggcctgcaatttggttctgctacgtggtcaccatgtgtcactgagcaatcattttatctctctgagcctcagtctccttgtctgtaaaactagagcrgttgtatctgcctcaaatcttgcttgaagagtcctaagcatgatgcctggtacactgtaaagacccagagaatgtgtattatcactaatatgactagtattattatgtcctttctaatttgggcatattttgattggcttaatctgaatgctcaatttattcagtgagagctcgaacctaaatctttgtctcatgatcctctgattcctatttctactccggctacacgtagccttgctaccaaatttctgaaaggacagctaacttgaccagggtaacccactgttac

SEQ ID NO: 214010 - DNA, 538 bp, Homo sapiens
gttgccttgcccaagttcaggcaccctccctgaaggagctcacatctactgatttgccggtaaaagggtacaaaacttaattcccttgcctggattcaggacattccttaaggaccatcctatcccagctacataattcattgtaggatcagctgaatcttctgaaacttcatcacagttcatcttttgcctctttccagttctacttcccttactccaacataggtgtgagtccccagggtctgcctctacacccccagtaaatatcatgcatgcaaatctctrcctgagggcctggttcctgtggaaatccaaataatgactctaagtcatcctaccagcagttaacagaaacagaacttgaaggcaaattccatattctctccagagaacaccaatctggcacctgtcaggtgaattttgtgggcccccttccgtcaaaattcaaatattgaaaactaatccccaatgtgatgatggggactttggaacgtgattaggtcatgatggttccaccctcacgagttgaattagtgcc

SEQ ID NO: 214011 - DNA, 400 bp, Homo sapiens
gccacgtaatacaggggctggaactccgtgacagtgtaattttggatggctgtcttctccagctccagggggagaagctttggcttctctgataagcagtactgtaggccccaagtgaaaagttattatcactgttaaatcaggatcagtattccctgctgcatcccataggccatttgtgccccttctctcatctcaccccgattccttctacatcacagcccaaatgctgtgagccaaattactttgcacatactaggttctacccttcatagctcatctaaaacctacagccaagggagaaaggagtaattcattccaattactttcaagtaargtggtcaatagatgacgtgggagccaaccacactttctggcatgtgtttgcatactcacaagg

SEQ ID NO: 214012 - DNA, 376 bp, Homo sapiens
gcaaatgcaatgatgatgctataaacgaaagaaacagagatgatggattgaagatactctgtgttgactgtgttcatctgcttctagacaccctggagggctgactacctctgcctttttcatgcagggaaactctgtgaacactccgcagaattctgtaacaattacattgcagggagtgtatggaaatgtagtctctaatgaaggccgcaactgacatgcaatgtcagtaagtgctgctgagcactactccttgagactttatcacacacacacacacatamaaacacacacacacacacctacaaacacacacacacacacacagtgttacaatgatctctctctctcccttttaatttgtgcatctgattcc

SEQ ID NO: 214013 - DNA, 624 bp, Homo sapiens
tactttcagttctttgagaaatccccatttgttttccaaagaggttatactaatttacattcccaccagcagtgtataagcattcactttcaccacatccatgccaatatctattgttttctgattttttaataattgccattgtggctggggtaaggtggtacttcagtgtggttttaatttgcatttccctgatgattaatgacgttgaayattttttcatatgcttgttggccatctgtatatcttcttttgagaagtgccagctcatgtcatttgctcactttttgatgggtttatttgttctttcttatactgttttgggctccctgtagattctggatattagtcctttgtcagatgcatagtttgcaaacattttctcccattctgtgagttgtccgattactctgatgatagtttcttttgcattgcagaagatttttagtttaattaggttccatttatttatttttgtttttgtttttgttgcttttgcttttaggttctgatatggtttggctgtgtccccaccaaaatctcaacttgaattgtatctcccagaattcctatgtgttgcaggagggactcagggggaggaaactgaattatgggggctagtct

SEQ ID NO: 214014 - DNA, 624 bp, Homo sapiens
tactttcagttctttgagaaatccccatttgttttccaaagaggttatactaatttacattcccaccagcagtgtataagcattcactttcaccacatccatgccaatatctattgttttctgattttttaataattgccattgtggctggggtaaggtggtacttcagtgtggttttaatttgcatttccctgatgattaatgacgttgaacattttttcatatgcttgttggccatctgtatatcttcttttgagaagtgccagctcatgtcatttgctcactttttgatgggtttatttgttctttcttatactgttttgggctccctgtagattctggatattagtcctttgtcagatgcatagtttgcaaacattttctcccattctgtgagttgtccgattactctgatgatwgtttcttttgcattgcagaagatttttagtttaattaggttccatttatttatttttgtttttgtttttgttgcttttgcttttaggttctgatatggtttggctgtgtccccaccaaaatctcaacttgaattgtatctcccagaattcctatgtgttgcaggagggactcagggggaggaaactgaattatgggggctagtct

SEQ ID NO: 214015 - DNA, 624 bp, Homo sapiens
tactttcagttctttgagaaatccccatttgttttccaaagaggttatactaatttacattcccaccagcagtgtataagcattcactttcaccacatccatgccaatatctattgttttctgattttttaataattgccattgtggctggggtaaggtggtacttcagtgtggttttaatttgcatttccctgatgattaatgacgttgaacattttttcatatgcttgttggccatctgtatatcttcttttgagaagtgccagctcatgtcatttgctcactttttgatgggtttatttgttctttcttatactgttttgggctccctgtagattctggatattagtcctttgtcagatgcatagtttgcaaacattttctcccattctgtgagttgtccgattactctgatgatartttcttttgcattgcagaagatttttagtttaattaggttccatttatttatttttgtttttgtttttgttgcttttgcttttaggttctgatatggtttggctgtgtccccaccaaaatctcaacttgaattgtatctcccagaattcctatgtgttgcaggagggactcagggggaggaaactgaattatgggggctagtct

SEQ ID NO: 214016 - DNA, 582 bp, Homo sapiens
aagagcaagtggagagtccaagaagacccggggtcttgtagtcacgctgcccacttacaagcagcctgggctttgacaagctgtcgatctcctgagtcttgtgttcctactgagccatgtagggtattgtcagcaggacartgataaacattttgtacccacttttagcaatcttctgaagaacgttgaaacagatattatccccattttatggatgggcgaatggaagtccagaggtgttaaggaatttgcagaatgtcacctcattagaaaagtggcatagctggtatctgaaaccacatctgtgtgccttcaaagcctgatctctctgtatcacccacactataaacaagagctgtgcatatgtgaggagcatggagttaattagcatgtgtcttgggtagaacactcatctcaaagagctggtgagtttctgctagccagaggagcctccataccttagaactgaatgaaatatagcttgtgtttcaagtgcttccctgtgactggtgtgtctgtgtttggctgacgtccttcagggtgtcctttgctcagcccacctccacggaggatgccacacag

SEQ ID NO: 214017 - DNA, 553 bp, Homo sapiens
tacataaaggggccccggccagcaattggcaagaaaacccaccacctttgtaagacattatagtaatgccagggagaaaacattatataatttctgctggagattagtgggcttggagggcaaaaataaagattcattccttgcagagcagtaagcagagagcactacagggcctcaygacacaggatccctccgtctccctgccatgtccttatctatgaattaacccactagccagtgggttaataagcactttaacacagtttgtaatgagcacttcctacatgctcagtccaattcaaggcaccacgaggccacacacacacacacacacacacacaacacttcacatattttttctttcacagctacaaagcagtttataatagccttcacatcacccttcttaggtagattttattactccaattttatggaagaggaaacaaaaacaccaaatgataaagtatccagtgagtggcagaattaggatttatgtttggctttgacttcaaatctatggtttcatctgtgtctcgggaaaaaaaaaaaa

SEQ ID NO: 214018 - DNA, 553 bp, Homo sapiens
tacataaaggggccccggccagcaattggcaagaaaacccaccacctttgtaagacattatagtaatgccagggagaaaacattatataatttctgctggagattagtgggcttggagggcaaaaataaagattcattccttgcagagcagtaagcagagagcactacagggcctcacgacacaggatccctccgtctccctgccatgtccttatctatgaattaacccactagccagtgggttaataagcactttaacacagtttgtaatgagcacttcctacatgctcagtccaattcaaggcaccacgaggccacamacacacacacacacacacacaacacttcacatattttttctttcacagctacaaagcagtttataatagccttcacatcacccttcttaggtagattttattactccaattttatggaagaggaaacaaaaacaccaaatgataaagtatccagtgagtggcagaattaggatttatgtttggctttgacttcaaatctatggtttcatctgtgtctcgggaaaaaaaaaaaa

SEQ ID NO: 214019 - DNA, 633 bp, Homo sapiens
ttgtgcagcagtggaaacctttttcaagtgggaaataaatccctgcttcttactcttgggctttgaggatgggaaatatttgggtaggaaagctaagtaaatggtgacagtataataaatggaagatctcagaagagaaaattgcacattttgtaactaatgtcatacagtcaaggcccttgcaaaccctttctttttttttgaaacagagtcttgctctgtcacccaggctggaatgcagtggcactatctcggctcactgcaagcttcgcctctagggttcatgccattctcctgcctcagcctcccgagtagctgggactacaggcacctgccactgtgccyggctaattttttgtatttttagtagagatggggtttcaccgtgttatccaggatggtctcaatctcctgacctcgtgctctgtccacctcggcctcccaaattgctgggattacaggcgtgagccactgcgcctggccaggcccttttaagttggagaaagtgatcaatttccttatattgattcaaactaggtcaaagacatatccttcttaggtggatattacttctcttgtttaaaattaggaaatcatagctcataagatgaagtgacttgctctgagccacat

SEQ ID NO: 214020 - DNA, 316 bp, Homo sapiens
ttctctgcaggatatctggatccacgaattcgctagcttcggccgtgacgcgtctccggatgtacaggcwtgcgtcgaaccccggatccggcgcgtccgccgtgatccatgcggtaaccgcgtacgagcagacggtgaaccaggagattaactttcaaaaaagctttaacaaccacgtgcgcacgcttgtggcgcgcgaggaggtggctataggactgatgcatctgtgggactttgtaagcgcgctggagcaaaacccaaatagcaagccgctcatggcgcagctgttccttatagtgcagcacagcagggacaa

SEQ ID NO: 214021 - DNA, 587 bp, Homo sapiens
ttaaatcaaccaaaagtttggaaataaatttctttggtggctgtagtcaaatatgctttaaggggagtaaaaagaaagttccattgtaacaatgtatggtttttaaaggacaatataatagaaagaaaatcattttaaagtgttccagctcaagacagatgactagcacaagactttacctctccctctccccataaaaattcccactggaaagaaagaataagcgttagaaaattagaaaaaawtcgtagaagtaccaaccagaaagcaaaagaatttctgaatataccaaagagttggaaaccaatgggaaaatttaacagatctaaataaccattagtgccatataggaaaaagagagatttgctatgaagtgagtattgccatcagaactccagaaaaatctagtctaagaggcagaaaaacgaaggaaataggtggtttaaatttgttaagggcaagagaacagccatgccaaccccttactctcaaatctgccagccatcactgctggagaaaccagaggtggtgctgtcatattctagctgacctccacttactaataaacaaacacttgatctatgaga

SEQ ID NO: 214022 - DNA, 407 bp, Homo sapiens
atcagttaatcaatatttatttattgaatgttcagcattagccttgattctgtgttaagggttaaagagactataaaatgcaaagcctatttcaaggagtttacactattgttgagaagatgactattatacttaaatcagtaggrcacaaatgcagataccatataatttaaatgctaaaattgcatgcaatctaaaatatacacacttttatacatttgtagtattttattttcatctaccttcctcttttgactctctggacatgcaattccttcccatgaccttaacaattgatctttttaatgtgagtaaattgccaagcctaatgtgctgcagattttgtctaaagctggcgtttgtgacattctctgactgcctttacaaagtccaaaataaaactaagc

SEQ ID NO: 214023 - DNA, 609 bp, Homo sapiens
aatttttaatgctatgctttaagataacaaaggaaaatttataaaaatgttagtttgagaagtaggaattttcagatgaattgaagtttttctatataaaaactatgtagcccaatcttttcattttgaactttcctgtaggcctcaaaagacaaaaaatggtttcccaagaggactatatttttagtcatcaaaatgttatcatcattactgagacatttatattgggacatgtaattaacattcaatgtagtataacaaatcccatagtcttaatgctttattcatttatttcttaccattatttgggtaactatagctatcaaaatattataaaataatatatgtaataataaattctagctacaattatgacggataataagcaaccactaacatatcaatggcttacaaaaacaaacattattgtttttccatttataaatatgtagggtggctgcagatcctctaatttcagctgggcttaccaggcaggacwcggctaggctcgactaaactccaggcctgggactgggttcaaacctgttccacctgtcttcatcactctgggactagaggctactcaagcatatttttctcacggagcag

SEQ ID NO: 214024 - DNA, 559 bp, Homo sapiens
taggcaggtcaaagatttttttaagaaaatgttttcatattaggattcatctttaaatttctaatttggtttactcttggggtgactatatacatcataaaattagcctctgattttctgctatcacttaaactttattttagttcctcttgatatctctgcctaaaagtagacaaaatagttttaatagcaatacaacttttccctgagtgattctttcccataaaatctcagcagtcagttaattagtataaattctaatcctccttgaccaagtcttcaaaagaaaaaaatcaatttagcaaactatttacattttgaaattgacaatwatacaaaaacacaaaatcagacacacacaaagacaaatatggaaaagtcctcagacattagacaagacaactgcagaataaaaatttaaataataagcaattattaaaacattttcaaaagaccatgatactaggctaaatattactacacaaatgcaaaacaggtctgaggagacattttgaactcggacagctttcttctgaccatttctaaatacacataccaa

SEQ ID NO: 214025 - DNA, 452 bp, Homo sapiens
actggggtgcagagcagcaagggaaggaaaggtacacccctcactggaatccaatttgttaaaggaaactgtacattctgtgaaactgtttaccctgatttggaaattagtggttgccttagcaacactcaaatcccatgaggctcacacacagtgctaatttcaattcatggacaccttcacrggtgaagaatgcaaacagtaacttgagccttccatttgccatgcctctcataggaaatgagactttcctcagcctgtaaaaatgtcctgataatagctcccatttttgataccttctatggatacgatgccagctacacatttgattttatttgacggtcgcatgcaagcctgcaaggctggcaatatgactccattttacagacgggaaatgagctacagataggctacataactttcccaagcttacccagtggtgatttgaagat

SEQ ID NO: 214026 - DNA, 607 bp, Homo sapiens
atttctaatggagcttctttataattagctctctaattaactattaacaagttggatatcattgtcttcaatgcattacatgctaattaacaacacttgtatcactgtctcatcaacttagtatacaatagctcagcagttatgtcaatgaattaattatgctttgtagcatatttacatatttacatatattgtacaaattaaatatttataatttatcattctgcttgggagatattccctttctgtgatttttgcttgtgttcttctctatcaaatgcatgccaatctagggagttgtgaagtatcatttagatagtgacaatggcaaaacgtcaaaaacaaagctacctaaataaatgaagatacaaacaggaaggtggaaatcagaagattcaactaacttcatacaggaaaacaccacaaatgtagcttacctggaatgacctgctagagaatgcatgcatcagttgattggttccttttatttgggagtgcctggcattayggattaaaagctggataccagacatgctgtatctcactacagcccatcctgcatttaggtcacaatgacccctggctgtctggggctttgcagggtgtg

SEQ ID NO: 214027 - DNA, 607 bp, Homo sapiens
atttctaatggagcttctttataattagctctctaattaactattaacaagttggatatcattgtcttcaatgcattacatgctaattaacaacacttgtatcactgtctcatcaacttagtatacaatagctcagcagttatgtcaatgaattaattatgctttgtagcatatttacatatttacatatattgtacaaattaaatatttataatttatcattctgcttgggagatattccctttctgtgatttttgcttgtgttcttctctatcaaatgcatgccaatctagggagttgtgaagtatcatttagatagtgacaatggcaaaacgtcaaaaacaaagctacctaaataaatgaagatacaaacaggaaggtggaaatcagaagattcaactaacttcatacaggaaaacaccacaaatgtagcttacctggaatgacctgctagagaatgcatgcatcagttgattggttccttttatttgggagtgcctggcattacggatkaaaagctggataccagacatgctgtatctcactacagcccatcctgcatttaggtcacaatgacccctggctgtctggggctttgcagggtgtg

SEQ ID NO: 214028 - DNA, 474 bp, Homo sapiens
agcatggatctttctcctgagaagcacatacctgctgtctttcatgtcctagggtctagattctctctccatgccctccaaactcaatgatctattgggaaataagaaggtatactccctccttgcaggttatattcaattaggaatgggaagaatgggggaaggttcaatcgyaggcttatttatcgccaaactattaagattgtattagttaagacataggcttaactaataaaataaaataactacagtatcttaaacaagataagtttattactgccttttctatcttgttctcaaacatccttaaaaggtgatttccatctcacagttcaagatgactcctctagttccagccatgacattcataatctagccagcaagaaggggaaaagaggcaaggggaagtcacatacattccctttgcattccatacatgcatttgagaacaaagtgtagcaattacacacatca

SEQ ID NO: 214029 - DNA, 474 bp, Homo sapiens
agcatggatctttctcctgagaagcacatacctgctgtctttcatgtcctagggtctagattctctctccatgccctccaaactcaatgatctattgggaaataagaaggtatactccctccttgcaggttatattcaattaggaatgggaagaatgggggaaggttcaatcgtaggcttatttatckccaaactattaagattgtattagttaagacataggcttaactaataaaataaaataactacagtatcttaaacaagataagtttattactgccttttctatcttgttctcaaacatccttaaaaggtgatttccatctcacagttcaagatgactcctctagttccagccatgacattcataatctagccagcaagaaggggaaaagaggcaaggggaagtcacatacattccctttgcattccatacatgcatttgagaacaaagtgtagcaattacacacatca

SEQ ID NO: 214030 - DNA, 627 bp, Homo sapiens
aatctgtgtgtgtgaaaatgctttactaaggaaagctctgttcaaatgctaatcattatccaactgactacattaaaagttccttcagagaattaataacctcttactcatctttataacaccatcctctgagaatcaaaggaaatttgtttattgcctaaacacaactaaagctcagctcttaggctaaacagcagagggctattggattctcagtccagayttcttaaaggagccatatatgcctggatattaaaaattgaaatgcaaggttcagtctcattattagtggccatcatctaaacgatgtgttagtgccttaaaggaaaagtattttaaaagtactagaatataagtatgctgttgaaattgcatagaagacccaagaaaagcctacaatacaaatgcttaaaactggatttaattatataatagatcatatatgtaaaccaatcatatgaattaaataaaatactaaaaatttttattatgttctattttttcccaaatggaagcctacatataagttatttgataatgtctttgtggggttcaagacatgaatcttagtaatatgcttaagtaattattgaaaaatacagagcttgactttctataataatacat

SEQ ID NO: 214031 - DNA, 627 bp, Homo sapiens
aatctgtgtgtgtgaaaatgctttactaaggaaagctctgttcaaatgctaatcattatccaactgactacattaaaagttccttcagagaattaataacctcttactcatctttataacaccatcctctgagaatcaaaggaaatttgtttattgcctaaacacaactaaagctcagctcttaggctaaacagcagagggctattggattctcagtccagacttcttaaaggagccatatatgcctggatatwaaaaattgaaatgcaaggttcagtctcattattagtggccatcatctaaacgatgtgttagtgccttaaaggaaaagtattttaaaagtactagaatataagtatgctgttgaaattgcatagaagacccaagaaaagcctacaatacaaatgcttaaaactggatttaattatataatagatcatatatgtaaaccaatcatatgaattaaataaaatactaaaaatttttattatgttctattttttcccaaatggaagcctacatataagttatttgataatgtctttgtggggttcaagacatgaatcttagtaatatgcttaagtaattattgaaaaatacagagcttgactttctataataatacat

SEQ ID NO: 214032 - DNA, 511 bp, Homo sapiens
atagaagactcttaaacacagacgactactattttataagtattgtgatcttaaacatgacatttgaagttagaaatcagaagtattactcctggttgaggaaattactaagtgtttgatcatgggttattcacaacccatacaaaatatctcttagtccattataaaatgcagataatctactctctgtgcctatctaaaaaaatgatttaagaacaaattagaaaatgcctggggaacagaatatcaatataaatttagtataattaatttcaaatakcattcataaaatactttttaaaattcaagaataagagcaagaaaaaattttagcaattaaatgtttagtctattaatcaactgtggtatcttttcattttcatagaccaatttattaccctatatttagctagaattatacaactacgtgctacatgccctctaagattctttccaactcataaggcttataatttttgatgtcctcttttaaaaactccttaccaagtct

SEQ ID NO: 214033 - DNA, 523 bp, Homo sapiens
tacatattgccacccacccatttttaaagtactttctcaggaataaaggatttaagactctaggagtattttgccagccttggaaatggataatggtttgggctctttagaattcatcaaggcctgcttgaggtaggagataggcctcactttttttctggttctgagcatgctaattggagtaggatctggtcaatgagtaagccaggtaaagcctggagatggtgacaaaaggaatctctagttgccctaactgctcattaacatgaagacactcccacttccctccagcaccatgacaatttacaaatgccatggcaatgcaccatagcaacatctcaaaacttaccttttatasttccagcaactccccatctcttttctagaaagttctaaatgaccttctcttaattggcatgtaactaagagtgagtatcgatataactagccgatagcccatatactgccactctggagacacggcctatgggttagtgctgctaggcaaggagaaacatctcta

SEQ ID NO: 214034 - DNA, 415 bp, Homo sapiens
gaattcttccttcattgtatagtttctgctgcataaatttactcaaaagcacatcaagttgcaygtcttattttccaactatttttttcttttcttttacctttagcagagaaaacagcatcattttagaggcatagagaacaagtagcagttgcttcaccaggaatgaggcagcacacataggtaaatgtcatccctttccattcttaagagtccattatgttcgtaagagcaaaagagtagtgcagaaggccaaaattctaagtactaaagtttcacaaccacagagatataaaaatatacataatccttggtctttgtatgtcactgcatgatctacttcatcacaaggattgtgtcagcctcatagtatcagccctgctgccaaagctacctttaccttgagctcatctgt

SEQ ID NO: 214035 - DNA, 480 bp, Homo sapiens
cccatcactggccacgcaggacacaggcccactcttctatcatcaatgctgaacagaaaggctgaaagccaaaacaagtaaactggcctccacacaaccgatccaaacagcctggggcctggcagtgccaggggaagagcttgaaaggaaaaacaaccaaaaacaacacacargcttatctttgtcatggctgacccagctcacagccaggcacggaaacagagtggctttataagaaaatgcctttctttccacgcagtaattgaatccagttgtggcttgaggttatacagtagtggggttttaaaaaggtttgtctcttagacaattctgctccagctgagcaatcttatatttctgttaaattcctgtgaagcagcgtgctaaatcatccatcatatcatataatcctttgggatctgactctcacactcacccaacagataagccaggaatcctttaggctctttaaaagctaaa

SEQ ID NO: 214036 - DNA, 480 bp, Homo sapiens
cccatcactggccacgcaggacacaggcccactcttctatcatcaatgctgaacagaaaggctgaaagccaaaacaagtaaactggcctccacacaaccgatccaaacagcctggggcctggcagtgccaggggaagagcttgaaaggaaaaacaaccaaaaacaacacacaggcttatctttgtcatggctgacccagctcacagccaggcacggaaacagagtggctttataagaaaatgcctttctttccacgcagtaattgaatccagttgtggcttgaggttatacaktagtggggttttaaaaaggtttgtctcttagacaattctgctccagctgagcaatcttatatttctgttaaattcctgtgaagcagcgtgctaaatcatccatcatatcatataatcctttgggatctgactctcacactcacccaacagataagccaggaatcctttaggctctttaaaagctaaa

SEQ ID NO: 214037 - DNA, 533 bp, Homo sapiens
ttttcttattggacctcaaatgtacagaattgagtaaatcataattgttggttcatgatagactctcattattggcacactcaaggcttagttttccttattttgttagtggctgaattactttgaataatataatgagtatctgtgaaccaccttgaaaaacaaaagccaaccatataatagcctaaatccaaccatatgacaactctcaacaactttgcccttaccttctgctgcctcaaaatcaccttgagtcttgtgttcatcattctgttgcttccttttctatagtcttttttttatcaatatgtctcattttattcattttcacttttaattttagttgkttttattcttagaaaaagaatctgaccacatgtaatctttttggtcttgcttttttcactttatattacttagatgtatccatagggttctgcatggcaaaggttcactcattttgaccatggtataatactctatgatatgaagtttccataatttattaattgtttgtcatttcactcttctgt

SEQ ID NO: 214038 - DNA, 436 bp, Homo sapiens
ggtatatgtttaaataaatgttgacagtaatgacattataagatacactaaaccctgctgcttaaaakggtgtgttctgtgtcttgatatgggtgggggttacatgggtataatgcaagttcatgacatgtgcatgtgtatgtgtgtgtgtatgtgtgggagagagagagcgagagatggagagaggggaagaaagagagagagatcttttaaaataatcatcttgttagtctacatatttatttgaaaataattctatttaactgtgttagttttctattactgttgtaacaaactaccacaccctcagtggtttaaaacaatactgatttattatcttacagtgttagaggtcaaaagttcaaaacagttcaccaggttaaaagcaaggagctgcagggctgcatttcttctggagccccatggagagagccat

SEQ ID NO: 214039 - DNA, 436 bp, Homo sapiens
ggtatatgtttaaataaatgttgacagtaatgacattataagatacactaaaccctgctgcttaaaagggtgtgttctgtgtcttgatatgggtgggggttacatggktataatgcaagttcatgacatgtgcatgtgtatgtgtgtgtgtatgtgtgggagagagagagcgagagatggagagaggggaagaaagagagagagatcttttaaaataatcatcttgttagtctacatatttatttgaaaataattctatttaactgtgttagttttctattactgttgtaacaaactaccacaccctcagtggtttaaaacaatactgatttattatcttacagtgttagaggtcaaaagttcaaaacagttcaccaggttaaaagcaaggagctgcagggctgcatttcttctggagccccatggagagagccat

SEQ ID NO: 214040 - DNA, 436 bp, Homo sapiens
ggtatatgtttaaataaatgttgacagtaatgacattataagatacactaaaccctgctgcttaaaagggtgtgttctgtgtcttgatatgggtgggggttacatgggtataatgcaagttcatgacatgtgcatgtgtatgtgtgtgtgtatgtgtgggagagagagagcgagagatggagagaggggaagaaagagagagagatcttttaaaataatcatcttgttagtctacatatttatttgaaaataattctatttaactgtgttagttttctattactgttgtaacaaactaccacaccctcagtggtttaaaacaatactgatttattatcttacagtgttagaggtcaaaakttcaaaacagttcaccaggttaaaagcaaggagctgcagggctgcatttcttctggagccccatggagagagccat

SEQ ID NO: 214041 - DNA, 552 bp, Homo sapiens
ttggaaagaaagactggtacttttcctggcttgtgagccccaggcaaaaagtcatctcaaaggaaaatgagtcagacayttacaggctgttttttttttcttttttctttctttgctttttaaaattctggatgcactcaggactgtccctgctttgggttgtcatgtccttttagtcctctttactctagaaggttcttgttttttatttttcatacctttgacattttcgaggagtccaggtaagttgtgtcattgaatgtgccataatctggatttgactaattgttgtctcataactacatttaggttaaatatttttggcatgaatactacaatagagatatgtatatttgatttcttcaggtctgtgagaatctgatctcccaagagccaacatctcaagaaattttatctttcacaaatgcagatgtacataaaggacatctctttatttattgataaagtttcaatgtttataaatacttgcacactgctcatacacgaagttaacatggtgataacacaatttcatgtggtcatatttgcaaa

SEQ ID NO: 214042 - DNA, 552 bp, Homo sapiens
ttggaaagaaagactggtacttttcctggcttgtgagccccaggcaaaaagtcatctcaaaggaaaatgagtcagacatttacaggctgttttttttttcttttttctttctttgctttttaaaattctggatgcactcaggactgtccctgctttgggttgycatgtccttttagtcctctttactctagaaggttcttgttttttatttttcatacctttgacattttcgaggagtccaggtaagttgtgtcattgaatgtgccataatctggatttgactaattgttgtctcataactacatttaggttaaatatttttggcatgaatactacaatagagatatgtatatttgatttcttcaggtctgtgagaatctgatctcccaagagccaacatctcaagaaattttatctttcacaaatgcagatgtacataaaggacatctctttatttattgataaagtttcaatgtttataaatacttgcacactgctcatacacgaagttaacatggtgataacacaatttcatgtggtcatatttgcaaa

SEQ ID NO: 214043 - DNA, 506 bp, Homo sapiens
ccatgaggtacccagatatttggtcaaacattattctaggtgattctgttagggtgtatttagatgagattgacatttaaattggaagactgagtgaaacagactgccttccctgttgtttgttgcaggaagtcagggaccccaaatggagggagctgctgatgccaaagccgtgacagaagaacataaactgtgaagayttcatggacatttatcacttccctaatcaataatttcctatgcctgtctttaatctcctaatcccatcatctttgtaagctgaggatgtatgtcgcctcaggaccctgtgatgattgcgttaactgcacaaattgttcataaagcatatttgtttgaacaatatgaagtctgggcaccttgaaaaaagaacaggataacagtgatgtccagcgaacaagggagataaccattaggtctgactgcctgggagccaggcaggacagagccatatttctcttattgccgaaaacaggtaagagaaatat

SEQ ID NO: 214044 - DNA, 506 bp, Homo sapiens
ccatgaggtacccagatatttggtcaaacattattctaggtgattctgttagggtgtatttagatgagattgacatttaaattggaagactgagtgaaacagactgccttccctgttgtttgttgcaggaagtcagggaccccaaatggagggagctgctgatgccaaagccgtgacagaagaacataaactgtgaagacttcatggacatttatcacttccctaatcaataatttcctatgcctgtctttaatctcctaatcccatcatctttgtaagctgaggatgtatgtcgcctcaggaccctgtgatgattgcrttaactgcacaaattgttcataaagcatatttgtttgaacaatatgaagtctgggcaccttgaaaaaagaacaggataacagtgatgtccagcgaacaagggagataaccattaggtctgactgcctgggagccaggcaggacagagccatatttctcttattgccgaaaacaggtaagagaaatat

SEQ ID NO: 214045 - DNA, 581 bp, Homo sapiens
tatgagaacataaagaatgatacaacgaattttggggacccggaggaaaaggtgggaaggtggtaagggataaaagcctacacattgggtgcagtgtgcactgctcgggtcacgggtgcaccaaaatctcagaaatcaccactaaagaacttacacatttaaccaaatactacctatttcccaaaaacctattgaaataaaagaaaaacaaacaaacaaacaaacaaataaataaataaataatagatttgtatgtggtgtgagatagggactgaagttcatcttctccatgtggacatctaattgcctcagaacgtttcattggaaacactttctttcccttattgagtttctttggcacattgtcaaataagtgtggccacaaagtataggtatatttccatactctattctgtttatgtagtataaatactccaatattttttctttttcaaaattattttgactmtactagatcctttgcatttccatacatattttatgtattttatgaatttccattcgaaaagcctactgatattttgattggtatgtttttcaatctatttatcaattttggg

SEQ ID NO: 214046 - DNA, 585 bp, Homo sapiens
gggaaagaggaaagccatctaaacaagtcatagaggtaaggaagagaggtaagggaagggtgtgtaggacttagcctgatgaaggtggtcattgtgttgttgcgttgggcagaacttaatggtgtgraagaggtcttccaaaaagagaggttactgggatagtttgcaaatgagagaaatggcatgttcagaaaactgcaattgttctttgggaagccgaggtgggtgggtcacgaggtcaggaccagcctggacaagatggtgaaacccctctctactaaaaatacaaaaattagtaaggtgtggtggcaggtgcctgtaatcacagctactcgggaggctaaggcaggagaattgcttgaacccgggtggcagaggtttgcagtgagccaagatcacgccactgaactccagcctgggcaacagactgagactccttctgaaaaaaaaaagaaaagaaaactgcaattgtttacacataacctgagctgggagttgggcaaaggagggaagagaagggagaggaggatgaggagaagaaaaaggaaagagaagagatgagagttaggagtggaagtgaagaaa

SEQ ID NO: 214047 - DNA, 585 bp, Homo sapiens
gggaaagaggaaagccatctaaacaagtcatagaggtaaggaagagaggtaagggaagggtgtgtaggacttagcctgatgaaggtggtcattgtgttgttgcgttgggcagaacttaatggtgtggaagaggtcttccaaaaagagaggttactgggatagtttgcaaatgagagaaatggcatgttcagaaaactgcaattgttctttgggaagccgaggtgggtgggtcacraggtcaggaccagcctggacaagatggtgaaacccctctctactaaaaatacaaaaattagtaaggtgtggtggcaggtgcctgtaatcacagctactcgggaggctaaggcaggagaattgcttgaacccgggtggcagaggtttgcagtgagccaagatcacgccactgaactccagcctgggcaacagactgagactccttctgaaaaaaaaaagaaaagaaaactgcaattgtttacacataacctgagctgggagttgggcaaaggagggaagagaagggagaggaggatgaggagaagaaaaaggaaagagaagagatgagagttaggagtggaagtgaagaaa

SEQ ID NO: 214048 - DNA, 561 bp, Homo sapiens
tggccttctgctctaatttttagcaagacttgcttttagaaagtgatctttaacccattcactgccragtggaaagaataataacaacacaaatgactttggtttctgggaatacaacatcattggggaatttatataaggttatttaaaagtttatatttctcaataccttaatttttgtgtgtgtggaggaaatggtgatcctttgaacagacaatctaataatctgtcctcaaaattattgtaaatcacaagtgtgtccatgtggctttggtgaaatcactgtgtgttaaatactccatgtgaatcgataataatatattttaaacatactgaacaggaagtattagaaaatatgaaaccagttaatatgttactagagtaagtcagggatgaactgtctgaacaaaagcaggagaaatatgaatggaaatgagccttaggctggagagaaattatagagttaaaaatggaaagactgtttccttgaatgtgggaacaaagtgaaaatgaataggatacattgggcaattgagtcaaagacagtacaatttaactcat

SEQ ID NO: 214049 - DNA, 587 bp, Homo sapiens
gaattccttttaaatttcagtacacataaagctttctggcaacttcttgaagtctgatttattttccagccttatgtattaatattattctttctaatatgtcaactctgagtcttttgccaccttcctctgccgtttgtcataggacaacactatattcaggcttccaagagtcttcrtagaaaacattaatgctatctctcagggtgttgaatctgatacaaaaaaagggtttctctctgatatgtcttctttatccaactttatgtgttatcttcctttaattcagcactcttagaacacagtatctttcctgaaatttcacactggctagcttctgcagctcttttggtatatggtggtccatggtctctttcttctgttagcaggtccagaacttgcctgactaggtatggtgtaagtagattacagttattaacttgttctccagaaggagaagaaaacatagatccccactaaggtttaaggtgcatgttatcttatgagacaagagcctgggcattggcttcatgcaagagggattgctagcctttaaaaaggaagtatgccacatcttccagcccaaa

SEQ ID NO: 214050 - DNA, 615 bp, Homo sapiens
gtaatgctgtttaacagctttttcagctcttagtgctgatctaaccctgatccctctgtaamttcttactttccttcattcccagatgttgtagaataaaacagtgtatcattttcagtctcctggctgacacatatcacgttttaaatttagctgggccaataattattttacttattcattttcttctaaaatgttccaaaggcagctcgtcgcacatttccaacatcactttcatcttgaatctccccccaacctcaccctagatgatcactaatatgcaacaaaacaattataaatgatcatctccaaatctcactaaacattcacgtattcttatattttcactagttttaaagaagcagtattccattttcatttcagattagtttcagcctttgtgctataaattctatcacctttcatatcttaaaatttttgttccactaattatttttcattttgtcatcttcaaaattatctattggctttttcttcatggcaaatacagatgtttctcttctttagcccaagaaaatttatttgacttcaacacacccttgaattcaccttatatagatatcttttaaaatgtttttatattgaaatacttct

SEQ ID NO: 214051 - DNA, 615 bp, Homo sapiens
gtaatgctgtttaacagctttttcagctcttagtgctgatctaaccctgatccctctgtaaattcttamtttccttcattcccagatgttgtagaataaaacagtgtatcattttcagtctcctggctgacacatatcacgttttaaatttagctgggccaataattattttacttattcattttcttctaaaatgttccaaaggcagctcgtcgcacatttccaacatcactttcatcttgaatctccccccaacctcaccctagatgatcactaatatgcaacaaaacaattataaatgatcatctccaaatctcactaaacattcacgtattcttatattttcactagttttaaagaagcagtattccattttcatttcagattagtttcagcctttgtgctataaattctatcacctttcatatcttaaaatttttgttccactaattatttttcattttgtcatcttcaaaattatctattggctttttcttcatggcaaatacagatgtttctcttctttagcccaagaaaatttatttgacttcaacacacccttgaattcaccttatatagatatcttttaaaatgtttttatattgaaatacttct

SEQ ID NO: 214052 - DNA, 610 bp, Homo sapiens
ctacaaaacactgatgaaagaaatcaaagaggatacaaacaagtggaaaggcatcttgtgctcatgaacccaaattaatattgttaaaatgaccacactgcccaaagagttctacaaattcaatggagtccatcaaaatgccawtgaacgcttttcacgaaaacaggaaaaaatatcctaaaatttgtaggaaccaaaaaagagctcaaagagccaaagcaagcctaagcaaaatgaacaaagctggagacatcacactacttgacttcaaaatacattacaactccataataacccaaagagcatggtattggtatgaaaatggacacatagatcaatagaatagaacggagaacccagaaaacaatccgcatgtttgtggtcaactgattttcaacaaaggcaccaggaacatacactggggaaaggatactctcttcaatacgtgttgctggggaaactaaatacccatttgctgaaaattggaactagaccctgtctctcatcacatacaaaaattaacccaaaatggattaaagccttaaacctaagacctaaaactataaaactaccagaagaaagatggaaaaaaacactacacaacattgat

SEQ ID NO: 214053 - DNA, 603 bp, Homo sapiens
ataatctgtacaacaaacccccatgatgcaagtttacctatgtaacaaacctgcacatatatcccctaaaattaaaagttaaaaaaatcatggattttatgtgttagaaaaaataaaattacatctgattattttataataaaaatgaaaaaaaaacagagagacaagaaggatatgcattcagggaagatagaaaaaagggcaaaaggtagcaataaggtaattcactaagggggattctgaataattgatagttatactcaattgcatttgtaacccgataaataaaattaaagcaaaaataaaatatacgtttattccatgaagcagccaagaatgaaaaatcttcaaaatacaaaattggtgaaggtataagttaagatgamctctcatcagaatgcaaattactgtaattcctttgtaaaacaccttagtactactttataattttgaagaaaaatatatcttacctacagacattatttttgacatgacttcatgtctgtgcataaagaacaagaaggttcatcaagctattgtgtaagtggaaaagtgagaccaacctaaaggaacatcatgggatgactggaaaaattaaggtct

SEQ ID NO: 214054 - DNA, 503 bp, Homo sapiens
ttaaaattccattccttagtcatactcacaacatttcaataaccgtacgtggctagcggctgccatattgacagcacggatatactatagatagaattatttgcatctcatcactggaagtcccattgaacagcactactctggtttttgcccttgcttcacatagcgtggtgcagaaaatagcaattctgaatcacttattagaactggagtcttagatctcacccagaccaactgaattggaatctgcgttatatataacaagattgccagggcactcagtgcatgttaggatttgagaagcgccgctgcatagtacacatccaccatgtttagtaacccagtccttcagtgatggacacctaggttcccttcactttgagygtgccacttatgtatctatacaagactcctcttgaccattcacacaggagtgggaccaaggggctaaaggcctattcttaatcaatttcaccgaatactggcaagtttttgtctaacaa

SEQ ID NO: 214055 - DNA, 421 bp, Homo sapiens
cctgtagtaccagctactcaggaagccaaggcaggaggatcacttgagcccaggaggtcaaggctgcagtgagccatgatcgcaccagtgcactccagcgtgggtgatagagtgagaccttgtctcaaataaaaaaagtgggattcgtttggctgctgtgtggggaggactgttggttgtcagggacaaggacagaaggctggaggtcagcacactagacaggagtgctggcagtagaggtgggaagaagtgaaattttggrtctattttgaaggtggagcccacaggacttgtataagactgattggagtggggactggggcaacgacgagagaaagtgatgaagggtaactttgaggttctggcctgagcattggagggacggtggggccattttgtgaggggagaagaccaggaattc

SEQ ID NO: 214056 - DNA, 559 bp, Homo sapiens
cagtatcctagaatattgagattcagataattctgtagtcttaaactatttgaatcccagactcttaaatttctaaggttatagatttatagaatgatgacattctagtctttctttttttttttttttttttttttgagacagagtctccctctatctcccaggctgkagtgcagtggcacaatctcagctcactgcaacctctgcctctcgggttcaagcaattctcctgcctcagcctcctgagtagctgggattacaggtatgcaccaccatgccaggctattttttttttttttttttttttagtagagacgggggtttcaccatattggccaggctggtcttgaactcctgaccttgtgatctgcccgcctcggcctcccaaagtgctgggattacaggcgtgagccaccgcgcccagccaaaattctagtctttttgtcctagaacattaaaattctatgttcaaatcttagatttaattcagataatgttagaatcctggagtttttttgatccaggggaatctggaatgttagaatcttggattcataaa

SEQ ID NO: 214057 - DNA, 500 bp, Homo sapiens
aaagaaaataatatgtttattgggttggaccacctgaaattgctgatacttgaccctttttgaccttcctaaaacaacttttgcagatggttcagtgtaataaatgttaggtggcctgatgaggcttctgtgtcctcctggctttgaaaagtgagctcagtgaggattagggaggtgttaaaaccatattagcaccatcctgagactttatccttgacaaaatcaggtttaaaagagaactggatgctggttcagcgtctgagtgtgcgatttaacgttacttaaatctcatcyctctaccatctaaaatgatcctgtgctcaccgacaacttctgtccctaactgcaaaccactgagctaatccaactgcttgccctgtagttggggaaactagctagggaggcagagggacctcctgttgtagctaataattaataataacatttcccactgactgagtgctctccatgccacctgctgtgctgcacggtttgaaatg

SEQ ID NO: 214058 - DNA, 500 bp, Homo sapiens
aaagaaaataatatgtttattgggttggaccacctgaaattgctgatacttgaccctttttgaccttcctaaaacaacttttgcagatggttcagtgtaataaatgttaggtggcctgatgaggcttctgtgtcctcctggctttgaaaagtgagctcagtgaggattagggaggtgttaaaaccatattagcaccatcctgagactttatccttgacaaaatcaggtttaaaagagaactggatgctggttcagcgtctgagtgtgcgatttaacgttacttaaatctcatctctctaccatctaaaatgatcctgtgctcaccgayaacttctgtccctaactgcaaaccactgagctaatccaactgcttgccctgtagttggggaaactagctagggaggcagagggacctcctgttgtagctaataattaataataacatttcccactgactgagtgctctccatgccacctgctgtgctgcacggtttgaaatg

SEQ ID NO: 214059 - DNA, 500 bp, Homo sapiens
aaagaaaataatatgtttattgggttggaccacctgaaattgctgatacttgaccctttttgaccttcctaaaacaacttttgcagatggttcagtgtaataaatgttaggtggcctgatgaggcttctgtgtcctcctggctttgaaaagtgagctcagtgaggattagggaggtgttaaaaccatattagcaccatcctgagactttatccttgacaaaatcaggtttaaaagagaactggatgctggttcagcgtctgagtgtgcgatttaacgttacttaaatctcatctctctaccatctaaaatgatcctgtgctcaccgacaacttctgtccctaactgcaaaccactgagctaatccaactgcttgccctrtagttggggaaactagctagggaggcagagggacctcctgttgtagctaataattaataataacatttcccactgactgagtgctctccatgccacctgctgtgctgcacggtttgaaatg

SEQ ID NO: 214060 - DNA, 488 bp, Homo sapiens
gcttggtgttcgcaactttgagtgatcagcccttctcctttgtgggagcaccaggacagagcagcctttgtccctccccagtctcagttccctcccactgcccctgtggacctcgaatgcagagcttatgcacctaccgaaggtcgtgtcagcacccaaggcagaacgaggctgccctgggaactagggtcaattaagacagcttgtgctggaggaccctttacagcagatgaaggcctctccccagccagaaaagatggagcacacgctgggtggtggycccgcttcctcactggaaggagatggtgctcttcttttttctttctgaattgtggccaccttcataccagtctgtcatggaacacttaagccgcttgagtgcctgctggtactcccagccctgccatgcctgagccccctgcacacaaggagccaggagtaatcagggcagaccctttagggcacggggacttctggattgtgaaatt

SEQ ID NO: 214061 - DNA, 560 bp, Homo sapiens
tgttataaagagaatttttcagtctttagactaataggttcatgtagtttgggattttcctctttaagaaaattaattatcactcacactccaagacaaacaccatttcagtagcaatatgaatttcagtagtaataggaatctccaaatatgacaaagtaattcagacattaattgcttttgttttggaattgctcttataagatgaaatatcactttcatgatgagagtcctagagtgcttggtttatatattgtatcttagttttaacaggataaaacacttgatcctaagcagtaaacatgattcttcagcttcaacttcatttctttataaataactatttatgaattggtgttgagcttagtaagtcaccaaacaccttctgctcagcagcataaaggacatttccatgaaacctcccagggataatcttatttactctataatgtttcccgggttcaattcctctcccaaaatyctttgttcttaagcccctatgatctgggtgatctaaatatgggtaagaagtccagggatagcactatgaatgaagtgaa

SEQ ID NO: 214062 - DNA, 619 bp, Homo sapiens
ccatgcacaaattcactgagagtttaaaaaaatacatgcatattgtggagatagaaatcaaatctatttgtytccatctgctgtattcttcccaaaatattatctcttcttatcccattgtactatattgcatttctttgaccatttattgtgtatctcttaatatttcccacttcatcattactaacctcactcactctgaacttgatgagagcacctgagcattaatttttcttataattatttaatgattaccagaattcgttcagtatggccagctctggtcaaagtgaggcaggcaagatgctttgtcaactgcctggatggaatgtctcaaaaggtttccatttcatggtagcattatgcaaagttcaagacgtttaatcaagacccttcacttacttaactatacctccttgagaatcccatctatgaaaaaattctagtcattataaaaatgattgattaaatgagggaagtagtagagttcttcatttctttagttggtttagtctcctatgagtcaatcctattttcaaaattcttaataaaccatttattccttcaactttctatgccatttgatgttttgtaaaaaaaaaaatataatatgtataca

SEQ ID NO: 214063 - DNA, 585 bp, Homo sapiens
ttacccacacccattttttccacttcttcccctttccycaatacccgcacttttcccctttacttactgaggtccccagacaacctttgggaaaagcacggaccacagtttttcctgtggttctctgttcttttctcaggtgtgtccttaaccttgcaaatagatttcttgaaatgattgagactcaccttggttgtgttctttgattagtgcctgtgacgcagcttcaggaggtcctgagaacgtgtgcacagtttagtcggcagaaacttagggaaatgtaagaccaccatcagcacataggagttctgcattggtttggtctgcattggtttggtctggaaggaggaaaattcaaagtaatggggcttacaggtcatagatagattcaaagattttctgattgtcaattggttgaaagaattattatctacagacctgctatcaatagaaaggagagtctgggttaagataagagactgtggagaccgtgcatagttgcttcctgatcagctctttatttgattgagagtgaggcagggaagattagagggaagcttacagtggaattcagggctgaggctg

SEQ ID NO: 214064 - DNA, 585 bp, Homo sapiens
ttacccacacccattttttccacttcttcccctttccccaatacccrcacttttcccctttacttactgaggtccccagacaacctttgggaaaagcacggaccacagtttttcctgtggttctctgttcttttctcaggtgtgtccttaaccttgcaaatagatttcttgaaatgattgagactcaccttggttgtgttctttgattagtgcctgtgacgcagcttcaggaggtcctgagaacgtgtgcacagtttagtcggcagaaacttagggaaatgtaagaccaccatcagcacataggagttctgcattggtttggtctgcattggtttggtctggaaggaggaaaattcaaagtaatggggcttacaggtcatagatagattcaaagattttctgattgtcaattggttgaaagaattattatctacagacctgctatcaatagaaaggagagtctgggttaagataagagactgtggagaccgtgcatagttgcttcctgatcagctctttatttgattgagagtgaggcagggaagattagagggaagcttacagtggaattcagggctgaggctg

SEQ ID NO: 214065 - DNA, 585 bp, Homo sapiens
ttacccacacccattttttccacttcttcccctttccccaatacccgcacttttcccctttacttactgaggtccccagacaayctttgggaaaagcacggaccacagtttttcctgtggttctctgttcttttctcaggtgtgtccttaaccttgcaaatagatttcttgaaatgattgagactcaccttggttgtgttctttgattagtgcctgtgacgcagcttcaggaggtcctgagaacgtgtgcacagtttagtcggcagaaacttagggaaatgtaagaccaccatcagcacataggagttctgcattggtttggtctgcattggtttggtctggaaggaggaaaattcaaagtaatggggcttacaggtcatagatagattcaaagattttctgattgtcaattggttgaaagaattattatctacagacctgctatcaatagaaaggagagtctgggttaagataagagactgtggagaccgtgcatagttgcttcctgatcagctctttatttgattgagagtgaggcagggaagattagagggaagcttacagtggaattcagggctgaggctg

SEQ ID NO: 214066 - DNA, 529 bp, Homo sapiens
acctttgggaaaagcacggaccacagtttttcctgtggttctctgttcttttctcaggtgtgtccttaaccttgcaaatagatttcttgaaatgattgagactcaccttggttgtgttctttgattagtgcctgtgacgcagcttcaggaggtccygagaacgtgtgcacagtttagtcggcagaaacttagggaaatgtaagaccaccatcagcacataggagttctgcattggtttggtctgcattggtttggtctggaaggaggaaaattcaaagtaatggggcttacaggtcatagatagattcaaagattttctgattgtcaattggttgaaagaattattatctacagacctgctatcaatagaaaggagagtctgggttaagataagagactgtggagaccgtgcatagttgcttcctgatcagctctttatttgattgagagtgaggcagggaagattagagggaagcttacagtggaattcagggctgaggctgctattcttttgctccttgtaacttcc

SEQ ID NO: 214067 - DNA, 529 bp, Homo sapiens
acctttgggaaaagcacggaccacagtttttcctgtggttctctgttcttttctcaggtgtgtccttaaccttgcaaatagatttcttgaaatgattgagactcaccttggttgtgttctttgattagtgcctgtgacgcagcttcaggaggtcctgagaacgtgtgcacagtttagtcggcagaaacttagggaaatgtaagaccaccatcagcacataggagttctgcattggtttggtctgcattggtttggtctggaaggaggaaaatwcaaagtaatggggcttacaggtcatagatagattcaaagattttctgattgtcaattggttgaaagaattattatctacagacctgctatcaatagaaaggagagtctgggttaagataagagactgtggagaccgtgcatagttgcttcctgatcagctctttatttgattgagagtgaggcagggaagattagagggaagcttacagtggaattcagggctgaggctgctattcttttgctccttgtaacttcc

SEQ ID NO: 214068 - DNA, 566 bp, Homo sapiens
ttgcaatttcataccatccttgaagttagagagagccacgtgactcatttagccaatgaactgtgagcagaatgacatgtcacttccagctgaagctttaacaatctgagagacattcatacattttccatgtgctgtagccttatacccaaagcctgggtcccaagtgaccatgacaggcagagctccctgktgagccacagagatttagagaatggctgttaacacagcataatccagcccatcctgactaatctgatattaacatgtataataaagaattctatcaatgctgagggaagatgactagttaaggtcctaggttgcaagtctcaaaacctcttctaaggattgtagacaggaaattaaatgacttctagtccctagagttcccaatctcctaccatcccatcctaatatgacagaagtaattcctgagttgcttctgaaaccagagcttccctcagaacccttagcctgccagatggcttcttggagagccctcactcacttttctccttctgctattgctgctcattcattccagtttttaaaaattcatcttt

SEQ ID NO: 214069 - DNA, 556 bp, Homo sapiens
ctgttaacacagcataatccagcccatcctgactaatctgatattaacatgtataataaagaattctatcaatgctgagggaagatgaytagttaaggtcctaggttgcaagtctcaaaacctcttctaaggattgtagacaggaaattaaatgacttctagtccctagagttcccaatctcctaccatcccatcctaatatgacagaagtaattcctgagttgcttctgaaaccagagcttccctcagaacccttagcctgccagatggcttcttggagagccctcactcacttttctccttctgctattgctgctcattcattccagtttttaaaaattcatctttatccaggaacctcgcttctagaaaagtcatacaggtgcttccaggaggctacatgggcacccatatttttctagccactttcattagaccaatgcagcagagaagaaaagcctcaataattattatgacatggcatgttaggataccaagtaaattgcatttgtaaaatgtgattttctgttggtgttcacttcagctctactgacat

SEQ ID NO: 214070 - DNA, 534 bp, Homo sapiens
atcctactgactcctcatcagacttctttctcactggaattttacacctgggctgttaacaccaggccaggtcaaattcaaaggagagaaaaaagctcattatgaagggtaaaatccaaaacactgtgcataaagatatggcacaatttttatacataaagatttcataaarccaaagcatcaggaaatgaaaagagatacagaaagaaaaatgatggtaaatgagacattaatttacccttctaatctctatcacagcaaaaagataattaaaaaatctatatgaggaccacaaaatacacaaaaattatgtagcaaagcctatagcctgaaaaagtaaacattgaaatttgtatgtccataaaatgtttacaaaattcagtacatattacacaccccaccctaaaaacatctaagcaaagtagagaatgtagaaatgctacagattatattctctgattatgacacaacaaaactagaaattacagcatggaaatttaaaagctttctcttaaataattctatgtcaaaaag

SEQ ID NO: 214071 - DNA, 595 bp, Homo sapiens
tgaagtcttatgcaagaccagaagccaatttgccatttaaggtgattctccatgtttctgctctaactgtgcttcacaatactcaaaacactaaatcaggatgtttcctggagttcagggagctgtccgtgttactgagcagttctcagcaacacaaagatcctactgactcctcatcagacttctttctcactggaattttacacctgggctgttaacaccaggccaggtcaaattcaaaggagagaaaaaagctcattatgaagggtaaaatccaaaacactgtgcataaagatatggcacaatttttatacataaagatttcataaaaccaaagcatcaggaaatgaaaagagatacagaaagaaaaatgatggtaaatgagacattaatttacccttctaatctctatcacagcaaaaagataattaaaaaatctatatgaggaccacaaaatacacaaaaattatgtagcaaagcctatagcctgaaaaagtaaacattgaaatttgtatgtccayaaaatgtttacaaaattcagtacatattacacaccccaccctaaaaacatctaagcaaagtagagaatgtagaa

SEQ ID NO: 214072 - DNA, 606 bp, Homo sapiens
gggtttttttttaaagtttgggctgggtgcagtcgcacgcctgtaatccaagcacttagggaagccaaggtgggcagatcatgaagtcaggagttgaagaccagcccggtcaacatggtgaaaccccatctctactaaaaataaaaaattagccgggcctgctggtggatgcctgtagtcccagctactcgggaggctaaggcaggagaatcgcttgaacccaggaggtggaggttgcagggagccgagatcgcaccactgcactccagcctgggcgacagagcgagattccgtctcaaaaartaaaataaaataaaataaaaaataaaagtttgatatattcagaatcagggaggtctgttgggtgcagttcatttgaaaaattcctcagcattttagtgatctgtatggtccctctatctgtcagggtcctagcaggaaattgttgcactctcaaaggattaagcagaaagagtttaatgaagggtctctttccagggttaagggaactgctagggtttggatatttgaccactccaaactcatgttgaaatgtgatccccattgttggaggtggggcctaatgggaggtgttttggtcctgag

SEQ ID NO: 214073 - DNA, 606 bp, Homo sapiens
tagcatctgttattttttgactttttaatgatagctattctgactggtgtgagatggtatctcattatggttttgatttgcatttctctaatgatcagtgatgttgaactttttttttgtatgtttgttggctgcatgcatgtattcttttgaraagtgtctgttcattccctttgcccaattttaatggggttgattgtttttcttttgtaaatttctttacatttgaaatgtttttattattaagttgagctgcctcattcttagtatggtttttcactttaaaaagcataaaggtggacatggtggcatatgctagtaatcccaactactggggagactaatacaggagggttgcttgagcccaggagttcaaggctataatgtgctatgatcatgactgtgaacaaccactgtactgcagcctgggcagagtgacatagtgaaaccatatctctaaaaaaagagaaaatgtaatttaaatatttaaatacatatgtatatgtgtgtatatatgtatatatattgcatatatcaaaaatggtttgtagtttccattcacagcacatagtaaaatgtcttaacctcctcgctcctccctatgtg

SEQ ID NO: 214074 - DNA, 606 bp, Homo sapiens
tagcatctgttattttttgactttttaatgatagctattctgactggtgtgagatggtatctcattatggttttgatttgcatttctctaatgatcagtgatgttgaactttttttttgtatgtttgttggctgcatgcatgtattcttttgaaaagtgtctgttcattccctttgcccaattttaatggggttgattgtttttcttttgtaaatttctttacattygaaatgtttttattattaagttgagctgcctcattcttagtatggtttttcactttaaaaagcataaaggtggacatggtggcatatgctagtaatcccaactactggggagactaatacaggagggttgcttgagcccaggagttcaaggctataatgtgctatgatcatgactgtgaacaaccactgtactgcagcctgggcagagtgacatagtgaaaccatatctctaaaaaaagagaaaatgtaatttaaatatttaaatacatatgtatatgtgtgtatatatgtatatatattgcatatatcaaaaatggtttgtagtttccattcacagcacatagtaaaatgtcttaacctcctcgctcctccctatgtg

SEQ ID NO: 214075 - DNA, 606 bp, Homo sapiens
tagcatctgttattttttgactttttaatgatagctattctgactggtgtgagatggtatctcattatggttttgatttgcatttctctaatgatcagtgatgttgaactttttttttgtatgtttgttggctgcatgcatgtattcttttgaaaagtgtctgttcattccctttgcccaattttaatggggttgattgtttttcttttgtaaatttctttacatttgaaatgtttttattattaagttgagctgcctcattcttagtatggtttttcactttaaaaagcataaaggtggrcatggtggcatatgctagtaatcccaactactggggagactaatacaggagggttgcttgagcccaggagttcaaggctataatgtgctatgatcatgactgtgaacaaccactgtactgcagcctgggcagagtgacatagtgaaaccatatctctaaaaaaagagaaaatgtaatttaaatatttaaatacatatgtatatgtgtgtatatatgtatatatattgcatatatcaaaaatggtttgtagtttccattcacagcacatagtaaaatgtcttaacctcctcgctcctccctatgtg

SEQ ID NO: 214076 - DNA, 631 bp, Homo sapiens
aatttattctaaacttcagtcactcataatatacccttttattcctccttcttctgtgatattgggagtgtatagttgtcattgtgacaaaccctttgctgtcagtatctatagtggatggggagaaaaggagrgctttgccagtcatcgtctccagtgcatttcccactgtcagtgtcattgtctaatgctgtttgcatccacacagcctaagggaaccgttcaagtgagtgactccctcccttcacttcagcccatcacttgagcatttctctcccttgaaaaaagacaagtggtgcttctaagacttgagtaattctgaatataattgaggactagatgttcctgttttatatcctacagggctggcatctctaatgctgaaagtacaacaaagtgcagtggtagtcactgagtgttcagccatgctgggtcatcaaaataaaaggagatcgtcttcccattcctatcaatggcctcatctctaccagatatataactggaaaaacaatgcatttgcttaaacatccacagtgagccacacttgttcggtgttgtggggaaatgatgcagaaacatccttgtttattaaggatccaatattgataggctgaggcatatttttcctccc

SEQ ID NO: 214077 - DNA, 631 bp, Homo sapiens
aatttattctaaacttcagtcactcataatatacccttttattcctccttcttctgtgatattgggagtgtatagttgtcattgtgacaaaccctttgctgtcagtatctatagtggatggggagaaaaggagggctttgccartcatcgtctccagtgcatttcccactgtcagtgtcattgtctaatgctgtttgcatccacacagcctaagggaaccgttcaagtgagtgactccctcccttcacttcagcccatcacttgagcatttctctcccttgaaaaaagacaagtggtgcttctaagacttgagtaattctgaatataattgaggactagatgttcctgttttatatcctacagggctggcatctctaatgctgaaagtacaacaaagtgcagtggtagtcactgagtgttcagccatgctgggtcatcaaaataaaaggagatcgtcttcccattcctatcaatggcctcatctctaccagatatataactggaaaaacaatgcatttgcttaaacatccacagtgagccacacttgttcggtgttgtggggaaatgatgcagaaacatccttgtttattaaggatccaatattgataggctgaggcatatttttcctccc

SEQ ID NO: 214078 - DNA, 631 bp, Homo sapiens
aatttattctaaacttcagtcactcataatatacccttttattcctccttcttctgtgatattgggagtgtatagttgtcattgtgacaaaccctttgctgtcagtatctatagtggatggggagaaaaggagggctttgccagtcatcgtctccagtgcatttcccactgtcagtgtcattgtctaatgctgtttgcatccacacagcctaagggaaccgttcaagtgagtgactccctcccttcacttcagcccatcacttgagcatttctctcccttgaaaaaagacaagtggtgcttctaagacttgagtaattctgaatwtaattgaggactagatgttcctgttttatatcctacagggctggcatctctaatgctgaaagtacaacaaagtgcagtggtagtcactgagtgttcagccatgctgggtcatcaaaataaaaggagatcgtcttcccattcctatcaatggcctcatctctaccagatatataactggaaaaacaatgcatttgcttaaacatccacagtgagccacacttgttcggtgttgtggggaaatgatgcagaaacatccttgtttattaaggatccaatattgataggctgaggcatatttttcctccc

SEQ ID NO: 214079 - DNA, 554 bp, Homo sapiens
gtcttcccattcctatcaatggcctcatctctaccagatatataactggaaaaacaatgcatttgcttaaacatccacagtgagccacacttgttcrgtgttgtggggaaatgatgcagaaacatccttgtttattaaggatccaatattgataggctgaggcatatttttcctcccaagtctgcacatggtcatgcattaaatattaatgagcatcttctctctatcaggctttgggggatatgttcacctcttgggaggtgaacatgatagataagatcctttctctcatgtagcattctctccattcttttttttttttttttgatagtgactagctctgtcacctaggctagagtgcagtggtgcaaacatgactcactgcagccttgacctcatggactcaagtgatcctcaagtgatcctcttgcctccacaacatccagctaacttttaaaaaattttttgaagagaaggttttgccatgttgcctcagcctcctgaagtggtgggattacaggtgtgagccactgcacctggccatgttttctttc

SEQ ID NO: 214080 - DNA, 554 bp, Homo sapiens
gtcttcccattcctatcaatggcctcatctctaccagatatataactggaaaaacaatgcatttgcttaaacatccacagtgagccacacttgttcggtgttgtggggaaatgatgcagaaacatccttgtttattaaggatccaatattgataggctgaggcatatttttcctcccaagtctgcacatggtcatgcattaaatattaatgagcatcttctctctatcaggctttgggggatatgttcacctcttgggaggtgaacatgatagataagatcctttctctcatgtagcattctctccattcttttttttttttttttgatagtgactagctctgtcacctaggctagagtgcagtggtgcaaacatgactcactgcagccttgacctcatggactcaagtgatcctcaagtgatcctcttgcctccacaacatccagctaacttttaaamaattttttgaagagaaggttttgccatgttgcctcagcctcctgaagtggtgggattacaggtgtgagccactgcacctggccatgttttctttc

SEQ ID NO: 214081 - DNA, 578 bp, Homo sapiens
acctaggctagagtgcagtggtgcaaacatgactcactgcagccttgacctcatggactcaagtgatcctcaagtgatcctcttgcctccacaacatccagctaacttttaaaaaawtttttgaagagaaggttttgccatgttgcctcagcctcctgaagtggtgggattacaggtgtgagccactgcacctggccatgttttctttccattcttatggaaggcagtattcagcaaaacagttaatcaattgagaatatattaggttgttataggaaccatgaaaaaataaaatagagtgtgtaaagaaggcttgatggccaggaagcttttacagggaagtgacattggaactgagaccaaatacttaaagaaggcagttctttgaagagttgatgggaaagtattccaagaagtgggaatggcaaggggaaaggacttaagatgtaacctcagaatgattaaggaggagcatggtacaagaggatgtcagaaacatagccaggaaagagagctatgcttaagtattaggattttattctttgcaaagaaaaagcccattgaagctttaaagcaag

SEQ ID NO: 214082 - DNA, 578 bp, Homo sapiens
acctaggctagagtgcagtggtgcaaacatgactcactgcagccttgacctcatggactcaagtgatcctcaagtgatcctcttgcctccacaacatccagctaacttttaaaaaattttttgaagagaaggttttgccatgttgcctcagcctcctgaagtggtgggattacaggtgtgagccactgcacctggccatgttttctttccattcttatggaaggcagtattcarcaaaacagttaatcaattgagaatatattaggttgttataggaaccatgaaaaaataaaatagagtgtgtaaagaaggcttgatggccaggaagcttttacagggaagtgacattggaactgagaccaaatacttaaagaaggcagttctttgaagagttgatgggaaagtattccaagaagtgggaatggcaaggggaaaggacttaagatgtaacctcagaatgattaaggaggagcatggtacaagaggatgtcagaaacatagccaggaaagagagctatgcttaagtattaggattttattctttgcaaagaaaaagcccattgaagctttaaagcaag

SEQ ID NO: 214083 - DNA, 288 bp, Homo sapiens
gcatcctccccgtgtgcctctctctatgtccaaatctcccttttatttaaggacagagtcacagtggattagaacatccccataacatgaagattgcatgaaattatatacataaataactcaacaacatagcttccaaatagaaaacactcagcctttgtcatctcatcattatttgtttacacctttgtattattggtatagctctagtcttttgaaargtgcagttactcatctttgtgttttcactcctttatagctaagtgtaaggtgcttttgcaaaatcca

SEQ ID NO: 214084 - DNA, 514 bp, Homo sapiens
tcctttatctgtggaaagagctattctggccacagttactgccaagaaacaaggtgttagaaaaggcctaaagttaagtgcagaactgytgtgttttgatgaatattccgttgttttgagaggaggtagaagcattctcagcttcaggatatttgctcactactcattagtctctctgagaagtagcaaacttcaaaggttaaatatgaagagatgaattgtgtaatgcctagatgtcagtagcggagaaggtatctgagcaaattcagaattttatccctgtctccatgggcctagtgtgaagaacagtcatttgtgtaagtgggtctttgtgtatatggtagtgaatcaggtcactgagtcagaaacttagagctgtaaggaaagtgaggtgctctccagtccagtgttctggaatttcttctgcagtggcccccaacagcaggtggcagcctcgtccatgattctattcttaagtgacatggtattactctttgtatttgcaatccatttc

SEQ ID NO: 214085 - DNA, 514 bp, Homo sapiens
tcctttatctgtggaaagagctattctggccacagttactgccaagaaacaaggtgttagaaaaggcctaaagttaagtgcagaactgctgtgttttgatgaatattccgttgttttgagaggargtagaagcattctcagcttcaggatatttgctcactactcattagtctctctgagaagtagcaaacttcaaaggttaaatatgaagagatgaattgtgtaatgcctagatgtcagtagcggagaaggtatctgagcaaattcagaattttatccctgtctccatgggcctagtgtgaagaacagtcatttgtgtaagtgggtctttgtgtatatggtagtgaatcaggtcactgagtcagaaacttagagctgtaaggaaagtgaggtgctctccagtccagtgttctggaatttcttctgcagtggcccccaacagcaggtggcagcctcgtccatgattctattcttaagtgacatggtattactctttgtatttgcaatccatttc

SEQ ID NO: 214086 - DNA, 248 bp, Homo sapiens
ctattctggccacagttactgccaagaaacaaggtgttagaaaaggcctaaagttaagtgcagaactgctgtgttttgatgaatattccgttgttttgagaggaggtaraagcattctcagcttcaggatatttgctcactactcattagtctctctgagaagtagcaaacttcaaaggttaaatatgaagagatgaattgtgtaatgcctagatgtcagtagcggagaaggtatctgagcaaattca

SEQ ID NO: 214087 - DNA, 248 bp, Homo sapiens
ctattctggccacagttactgccaagaaacaaggtgttagaaaaggcctaaagttaagtgcagaactgctgtgttttgatgaatattccgttgttttgagaggaggtagaagcattctcagcttcaggatatttgctcastactcattagtctctctgagaagtagcaaacttcaaaggttaaatatgaagagatgaattgtgtaatgcctagatgtcagtagcggagaaggtatctgagcaaattca

SEQ ID NO: 214088 - DNA, 248 bp, Homo sapiens
ctattctggccacagttactgccaagaaacaaggtgttagaaaaggcctaaagttaagtgcagaactgctgtgttttgatgaatattccgttgttttgagaggaggtagaagcattctcagcttcaggatatttgctcactactcattagtctctctgagaagtagcaaacttcaaaggttaaatatgaagagatgaattgtgtaatgcctagatgtcagtagcrgagaaggtatctgagcaaattca

SEQ ID NO: 214089 - DNA, 444 bp, Homo sapiens
tctgtggaaagagctattctggccacagttactgccaagaaacaaggtgttagaaaaggcctaaagttaagtgcagaactgctgtgttttgatgaatattccgttgttttgagaggaggtagaagcattctcagcttcaggatatttgctcactactcattagtctctctgagaagtagcaaacttcaaaggttaaatatgaagagatgaattgtgtaatgcctagatgtcagtagcggagaaggtatctgagcaaattcagrattttatccctgtctccatgggcctagtgtgaagaacagtcatttgtgtaagtgggtctttgtgtatatggtagtgaatcaggtcactgagtcagaaacttagagctgtaaggaaagtgaggtgctctccagtccagtgttctggaatttcttctgcagtggcccccaacagcaggtggca

SEQ ID NO: 214090 - DNA, 507 bp, Homo sapiens
tctgtggaaagagctattctggccacagttactgccaagaaacaaggtgttagaaaaggcctaaagttaagtgcagaactgctgtgttttgatgaatattccgttgttttgagaggaggtagaagcattctcagcttcaggatatttgctcactactcattagtctctctgagaagtagcaaacttcaaaggttaaatatgaagagatgaattgtgtaatgcctagatgtcagtagcggagaaggtatctgagcaaattcagaattttatccctgtctccatgggcctagtgtgaagaacagtcatttgtgtaagtgggtctttgtgtatatggtastgaatcaggtcactgagtcagaaacttagagctgtaaggaaagtgaggtgctctccagtccagtgttctggaatttcttctgcagtggcccccaacagcaggtggcagcctcgtccatgattctattcttaagtgacatggtattactctttgtatttgcaatccatttc

SEQ ID NO: 214091 - DNA, 514 bp, Homo sapiens
tcctttatctgtggaaagagctattctggccacagttactgccaagaaacaaggtgttagaaaaggcctaaagttaagtgcagaactgctgtgttttgatgaatattccgttgttttgagaggaggtagaagcattctcagcttcaggatatttgctcactactcattagtctctctgagaagtagcaaacttcaaaggttaaatatgaagagatgaattgtgtaatgcctagatgtcagtagcggagaaggtatctgagcaaattcagaattttatccctgtctccatgggcctagtgtgaagaacagtcatttgtgtaagtgggtctttgtgtatatggtagtgaatcaggtcactgagtcagaaacttagagctgtaargaaagtgaggtgctctccagtccagtgttctggaatttcttctgcagtggcccccaacagcaggtggcagcctcgtccatgattctattcttaagtgacatggtattactctttgtatttgcaatccatttc

SEQ ID NO: 214092 - DNA, 432 bp, Homo sapiens
aagtcacttttcagagtagtaagttagtgacctagtaaccttccctctaatgaccagtagtttttttttctgaataccattatgaactcatagattattgtttgcatttgatgtatttcaggccattgcagtctttattgttttggatgcttasattgtctcatctaggttaataattatctcttcaagttgactttcatgtctttttgaagtgatcctgttggactttgatggcttccttgctttctggcaaaacagatgttccaggatcaatatactgcaccatacatggagtcagccatttctctagggaaccttgattccttttagtagagaacacagtttgaggtcttggactgaatgacttttgtgaacctcctctcctgagactacagcctgcatccctgcatatagcccgtttggagctcttgc

SEQ ID NO: 214093 - DNA, 498 bp, Homo sapiens
ttagaatagttgcccaaacccatgcctaatactctagtaaacaaggttctacctgggcttaggttaacttttgctcctttgggccctgtgttctaccagcattccatttatctgaaactctccctcaccttaagaacttatctgttctttaatgatttactgctgcttcctgggctcgaaagaacccagttcaggagtttctgttttagtttgagatcttataggcctgtctcatcaggttggtgtcagcccagctaggattaggcagaattgggtgggggctgtagtgcayttttggcacagcatgtacctgtctgactaattctctgtcttttctttcctgttgcaattcatgggtcttagcatcttctgaatggtgtttagtaggtcatcctgttgatttcctgctagggagtagcatactctggctctgtaccactggccaagggacttaaggatagatgaagggctgcagttttgttaaatggaacaatatga

SEQ ID NO: 214094 - DNA, 498 bp, Homo sapiens
ttagaatagttgcccaaacccatgcctaatactctagtaaacaaggttctacctgggcttaggttaacttttgctcctttgggccctgtgttctaccagcattccatttatctgaaactctccctcaccttaagaacttatctgttctttaatgatttactgctgcttcctgggctcgaaagaacccagttcaggagtttctgttttagtttgagatcttataggcctgtctcatcaggttggtgtcagcccagctaggattaggcagaattgggtgggggctgtagtgcacttttggcacagcatgtacctgtctgactaattctctgtcttttctttcctgttgcaattcatgggtcttagcatcttctgaatggtgtttagtaggtcatcctgttgatttcctgctagggagtagcatactctggctctgtaccaytggccaagggacttaaggatagatgaagggctgcagttttgttaaatggaacaatatga

SEQ ID NO: 214095 - DNA, 495 bp, Homo sapiens
tgtatgatttaaaaaaaatttccaagctttatgctggaaggcttatatacattttaaacaccactaatactacaagaaaatggccatttcactgcaccttcgcccacacaggtattataatttaacaagttattttctgtgtgataaatgaaagacctcctattagctgggattacaggcatatgccaccatgcctggttaatttttgtatttttagtagaaacgtggtttcaccatgttgatcaggctggtctcgaactcctgatctcawgatctacccgccttggcctcccaaagtgcttgattacagctgtgagccatgtgcccagcctatttgtcacatattttatctttccttatgttagcttattagctttatttctttattgtccttttttttttttttgagatgaagtctcgctctgtctcctaggcttcagtgtagtggcacagtctcaactcactgcagccttgacctcctaggctcaggtgatc

SEQ ID NO: 214096 - DNA, 605 bp, Homo sapiens
cacatttggctaatttcttttattttttgtatagatggggtcttcttatgttgcccaggttggtctcaaattcctaggctcaagtgattccgcccacctctgcctcccaaagtgctgggattacgggcatgagccagtgcatctggccaccttattttctattactggctcaatgtaatggctccatctcaggaacagccaatgaaagagatgcacaggacaaggtaagtggggaggggcacagagcttccatgccctctgttgggcacactaccctcccaggacctccttgtgtttagcaacacagaagctctccaaaccctgctgtttgggtgtttatggaggcatgattgataaaatcactggccattggtagttaagtcaatctccagttcyttttgcctcctggagttcagcaggtgaggctgaaagttccaagcctcaaaaaatgtggttggggccaggtgcggtggctcactcctgtaatcctagcagtttggaaggctgaggcacatggaccacttgaggtcaagagtttgagaccagcctgaccaacatggtgaaaccccgtttctactaaaaataacaacagttagctaggcatt

SEQ ID NO: 214097 - DNA, 605 bp, Homo sapiens
cacatttggctaatttcttttattttttgtatagatggggtcttcttatgttgcccaggttggtctcaaattcctaggctcaagtgattccgcccacctctgcctcccaaagtgctgggattacgggcatgagccagtgcatctggccaccttattttctattactggctcaatgtaatggctccatctcaggaacagccaatgaaagagatgcacaggacaaggtaagtggggaggggcacagagcttccatgccctctgttgggcacactaccctcccaggacctccttgtgtttagcaacacagaagctctccaaaccctgctgtttgggtgtttatggaggcatgattgataaaatcactggccattggtagttaagtcaatctccagttccttttgcctcctggagttcagcaggtgaggctgaaagttccaagcctcaaaaaatgtggttggggccaggtgcggtggctcactcctgtartcctagcagtttggaaggctgaggcacatggaccacttgaggtcaagagtttgagaccagcctgaccaacatggtgaaaccccgtttctactaaaaataacaacagttagctaggcatt

SEQ ID NO: 214098 - DNA, 605 bp, Homo sapiens
cacatttggctaatttcttttattttttgtatagatggggtcttcttatgttgcccaggttggtctcaaattcctaggctcaagtgattccgcccacctctgcctcccaaagtgctgggattacgggcatgagccagtgcatctggccaccttattttctattactggctcaatgtaatggctccatctcaggaacagccaatgaaagagatgcacaggacaaggtaagtggggaggggcacagagcttccatgccctctgttgggcacactaccctcccaggacctccttgtgtttagcaacacagaagctctccaaaccctgctgtttgggtgtttatggaggcatgattgataaaatcactggccattggtagttaagtcaatctccagttccttttgcctcctggagttcagcaggtgaggctgaaagttccaagcctcaaaaaatgtggttggggccaggtgcggtggctcactcctgtaatcctagcagtttggaaggctgaggcacatggaccacttgaggtcaagagtttgagacyagcctgaccaacatggtgaaaccccgtttctactaaaaataacaacagttagctaggcatt

SEQ ID NO: 214099 - DNA, 549 bp, Homo sapiens
tgaatatggagtcacgaggtaagtcaaggaatgggggtggcttctagaagctggaaaaggcaaaggagcacattctgtctagagcctcccccagaaggaatgcagcctctctgacaccttgactttagccttaatagacctagttgggcttctggcccccagaactgtaagatggtagatttstggtgtttgatgccactaaatgtagggtactttgttgtagcaacaacaaaaaatgaacacgaagctgggacctcatgttacagttgctcacgcctgtaatcccagaactttaggaggctgaggtgggaggatcgcttaagcccaggagcttaagaccagcctgggcaacataatgagacctcatgtctaaaaaaaatatttttttaaaggccaggcgcagtggctcacgcctgtaatcccagcactttgggaggccgaggagggtggatcacgaggtcagaagttcaagaccagcctagccaagatggtgaaaccccatctctactaaaaatacaaacattagccaggtgtggtggtgggtgcctg

SEQ ID NO: 214100 - DNA, 549 bp, Homo sapiens
tgaatatggagtcacgaggtaagtcaaggaatgggggtggcttctagaagctggaaaaggcaaaggagcacattctgtctagagcctcccccagaaggaatgcagcctctctgacaccttgactttagccttaatagacctagttgggcttctggcccccagaactgtaagatggtagatttgtggtgtttgatgccactaaatgtagggtactttgttgtagcaacaacaaaaaatgaacaygaagctgggacctcatgttacagttgctcacgcctgtaatcccagaactttaggaggctgaggtgggaggatcgcttaagcccaggagcttaagaccagcctgggcaacataatgagacctcatgtctaaaaaaaatatttttttaaaggccaggcgcagtggctcacgcctgtaatcccagcactttgggaggccgaggagggtggatcacgaggtcagaagttcaagaccagcctagccaagatggtgaaaccccatctctactaaaaatacaaacattagccaggtgtggtggtgggtgcctg

SEQ ID NO: 214101 - DNA, 549 bp, Homo sapiens
tgaatatggagtcacgaggtaagtcaaggaatgggggtggcttctagaagctggaaaaggcaaaggagcacattctgtctagagcctcccccagaaggaatgcagcctctctgacaccttgactttagccttaatagacctagttgggcttctggcccccagaactgtaagatggtagatttgtggtgtttgatgccactaaatgtagggtactttgttgtagcaacaacaaaaaatgaacacgaagctgggacctcatgttacrgttgctcacgcctgtaatcccagaactttaggaggctgaggtgggaggatcgcttaagcccaggagcttaagaccagcctgggcaacataatgagacctcatgtctaaaaaaaatatttttttaaaggccaggcgcagtggctcacgcctgtaatcccagcactttgggaggccgaggagggtggatcacgaggtcagaagttcaagaccagcctagccaagatggtgaaaccccatctctactaaaaatacaaacattagccaggtgtggtggtgggtgcctg

SEQ ID NO: 214102 - DNA, 549 bp, Homo sapiens
tgaatatggagtcacgaggtaagtcaaggaatgggggtggcttctagaagctggaaaaggcaaaggagcacattctgtctagagcctcccccagaaggaatgcagcctctctgacaccttgactttagccttaatagacctagttgggcttctggcccccagaactgtaagatggtagatttgtggtgtttgatgccactaaatgtagggtactttgttgtagcaacaacaaaaaatgaacacgaagctgggacctcatgttacagttgctcacgcctgtaatcccagaactttaggaggctgaggtgggaggatcgcttaagcccaggagcttaagaccagcctgggcaacataatgagacctcatgtctaaaaaaaatatttttttaaaggccaggcgcagtggctcacgcctgtaatcccagcactttgggaggcygaggagggtggatcacgaggtcagaagttcaagaccagcctagccaagatggtgaaaccccatctctactaaaaatacaaacattagccaggtgtggtggtgggtgcctg

SEQ ID NO: 214103 - DNA, 533 bp, Homo sapiens
ttgaagttgctgtgagctgtgattgcaccagtgtactccagcctgggcaataaagcaagaycttgtttcaaaaagaaagaaagaaatgagcatggtgggaatggggacagatggcagtgttaagtagagtggtcagggttggcctcataagtgaatattgagcaaaagtttgaagcaggtgatggagctggccaaggtgctgagggaagagcattgtaggctgagtcaacaggataaaggcattaggaggaaactctctggtgtgtctgaggctctggaaggaggccagtggagcaaagagatggagcgaagtcagcgaggaggccagggagttgctgggctgggatcggtacagatcgtgtaagccctgggacgctattgctggggctttggcttttgctctgactaaaatgggaaccaccgagggcttctgagcagagaggcgacatgatccgtctcctgatttaaaagcacgacctggctgccgagttgagaaagactatgggaagatttgggtagaagcatgggagcca

SEQ ID NO: 214104 - DNA, 533 bp, Homo sapiens
ttgaagttgctgtgagctgtgattgcaccagtgtactccagcctgggcaataaagcaagatcttgtttcaaaaagaaagaaagaaatgagcatggtgggaatggggacagatggcagtgttaagtagagtggtcagggttggcctcataagtgaatattgagcaaaagtttgaagcaggtgatggagctggccaaggtgctgagggaagagcattgtaggctgagtcaacaggataaaggcattaggaggaaactctctggtgtgtctgaggctctggaaggaggccagtggagcaaagagatggagcgaagtcagcgaggaggccagggagttgctgggctgggatcggtacagatcgtgtaagccctgggacgctattgctggggctttggcttttrctctgactaaaatgggaaccaccgagggcttctgagcagagaggcgacatgatccgtctcctgatttaaaagcacgacctggctgccgagttgagaaagactatgggaagatttgggtagaagcatgggagcca

SEQ ID NO: 214105 - DNA, 551 bp, Homo sapiens
aagcatgaataacacacactccctaatctccatccattcatgggaggagcacttcacctgccatgctcctgagaatctcgggagtcatagaagtcttctatgaggaggtgatgccaaagcggacaagtgacagaggagtcaaagctagctaggaagagagtagaggtttaaggggaagcatattataagcagaggatattacccacttcagagactcccagaggagaaagagtgtgcgttcaaggggcagatgaggctcagttggactccatagcagatgaaatggagaggggcaagcagtgaggctgccttgcaaggcagggcagagcaggggctgttaaggagtttggacttaatccctgaggcaaggagaagtgatgtaaatgggggagtaacatgatgagattcatagattagagacatggctcaggctgctgtagagaaggcaccrggaagagcagatggctcaatgtgtgtgcagaagacctctccctgagtttagggagaggtttttaaaacagaagaagtttgagtaatttaaatgatgatgg

SEQ ID NO: 214106 - DNA, 616 bp, Homo sapiens
ctttggccttctgagatcaagcaatcctcccatctcaacctcccaagtagctaggactacacaygcatgtcacccatgcccagatcatttttgtagagtcagagtttcaccgtggtggccaggttggccatgttggccagatggggtcttcttttgttgcccaggctggccacaaattcctgggctcaagtgatcctcccacctcgtccttgtagagatgagatttagttatgtcgtccaggctgatctcaaactcctgggctaaatcgattgtctcacctcagcctctcaagtatgttatgaaggttatatgttaggaagggtcccaggaggtaaacccacacagatgggatttgggcataggtttggtttcccagggggcagtgctgagctctttgccagtgggaaatgggatgctggtgatttccagtaggtgacctcacagtgactcaagctaccacttactgttgattgtgacgaaatgccagctgaggcacatgccttgggagctaagtggttgctgcccttgaccactgtgaagactggtgtgggaagggtcgttttggatgcacttgagcaggggtccccaacccctgagccatggagccgcaaggag

SEQ ID NO: 214107 - DNA, 616 bp, Homo sapiens
ctttggccttctgagatcaagcaatcctcccatctcaacctcccaagtagctaggactacacacgcatgtcacccatgcccagatcatttttgtagagtcagagtttcaccgtggtggccaggttggccatgttggccagatggggtcttcttttgttgcccaggctggccacaaattcctgggctcaagtgatcctcccacctcgtccttgtagagatgagatttagttatgtcgtccaggctgatctcaaactcctgggctaaatcgattgtctcacctcagcctctcaagtatgttatgaaggttatatgttaggaagggtcccaggaggtaracccacacagatgggatttgggcataggtttggtttcccagggggcagtgctgagctctttgccagtgggaaatgggatgctggtgatttccagtaggtgacctcacagtgactcaagctaccacttactgttgattgtgacgaaatgccagctgaggcacatgccttgggagctaagtggttgctgcccttgaccactgtgaagactggtgtgggaagggtcgttttggatgcacttgagcaggggtccccaacccctgagccatggagccgcaaggag

SEQ ID NO: 214108 - DNA, 547 bp, Homo sapiens
acttaaggtgcttaggacaaagaaggcgattgacatctttcaggtaaaacctggtaagtttggtggtcaaggaacacaactgagacatcacttggatgtattyctatgactattttaagaaacataaattgtggtgactcactcagctcacttttaactactgcatggtaattaaagatgcaaaataaaataagttacaagaagtgaggttttttattggttaaagcaatttttctatattttctccgcaagttggtcataaaagttctaagcattcctctttttataaaatcgaagcattattacttactctcttgttaacctatctggattttaattttgtaactttattatatttgttttgctgtgattctttaaaaagcacctttagactcagtgagatagcaaaaatatccaaataggccaaaaaattgtggcaatgtcctctcactcaggaaaattctgtgtgttttctctaatggccaagggaaaacttgtgagactataaaagttagtctcagtacacaaagctcagactggctattcc

SEQ ID NO: 214109 - DNA, 637 bp, Homo sapiens
tgataaatgaagactcttaaagtagatggggaattgggagtgaagtctgtaatttaaatagggtgggcaggaaagcttcacagagaatgggacatttaagaatagacttgaaggacaggcaagagcaatctctatgtttatatgggagaaaaggttccaggcagatgcagtaacaatggcaaatatcctgaagtaggatcatgctggagtttttgtggagcagcaaggaggctagtgtgactgccacagaatcacccaagggaagatgagaagatcagaccagaccagcacttgggcatctaatgggaaaagtttctcargccatcataaaaatttcacttttactataaatactatgagaaaccatgggatgttttacagtaagaaaggtggcataatatgttacatgttttaaacaaactctatagcttctgagttgaaatagattgtaggggctcatggcagaatcagagggaacatttaggagactactgtaaagaatatcatgaaaagaacaaacaacgctatgtaacatgcttaaatggactgaagaagatgtataaaatcaaaatgatgttaccttcacaccttgaatcagtacgataaacccccctccccaatcacaaaagaaaaacta

SEQ ID NO: 214110 - DNA, 637 bp, Homo sapiens
tgataaatgaagactcttaaagtagatggggaattgggagtgaagtctgtaatttaaatagggtgggcaggaaagcttcacagagaatgggacatttaagaatagacttgaaggacaggcaagagcaatctctatgtttatatgggagaaaaggttccaggcagatgcagtaacaatggcaaatatcctgaagtaggatcatgctggagtttttgtggagcagcaaggaggctagtgtgactgccacagaatcacccaagggaagatgagaagatcagaccagaccagcacttgggcatctaatgggaaaagtttctcaggccatcataaaaatttcacttttactataaatactatgagaaaccatgggatgttttacagtaagaaaggtggcataatatgttacatgttttaaacaaactctatagcttctgagttgaaatagattgtaggggctcatggcagaakcagagggaacatttaggagactactgtaaagaatatcatgaaaagaacaaacaacgctatgtaacatgcttaaatggactgaagaagatgtataaaatcaaaatgatgttaccttcacaccttgaatcagtacgataaacccccctccccaatcacaaaagaaaaacta

SEQ ID NO: 214111 - DNA, 589 bp, Homo sapiens
gcggaaaaaaaaatttatcaaaagtcgtcttctatcagggagttttatgagaaaccctagctcctcagttccacagtgggtarctgtaattcattctaggtctgcgatatttcctgcctatccattttgttaactcttcaatgcattccacaaatacctaagtattctttaataatggtggtttttttttttttttgcatctatgaagttttttcaaattctttttaagtgacaaaacttgtacatgtgtatcgctcaatatttctagtcgacagcactgctttcgagaatgtaaaccgtgcactcccaggaaaatgcagacacagcacgcctctttgggaccgcggtttatactttcgaagtgctcggagcccttcctccagaccgttctcccacaccccgctccagggtctctcccggagttacaagcctcgctgtaggccccgggaacccaacgcggtgtcagagaagtggggtcccctacgagggaccaggagctccgggcgggcagcagctgcggaagagccgcgcgaggcttcccagaacccggcaggggcgggaagacgcaggagtggggaggcggaaccgg

SEQ ID NO: 214112 - DNA, 472 bp, Homo sapiens
ctcatccacaatcttttctcctagtaaatggcagctccttctgttaagttgctgaggcttcttattgcttttttctycaaataacagtcagaactgaacaactgtaatcatcctagtccatacaattgttatattttcatttaaagaagatcaatgtgtgattctttttttatatatttctggacaattctttatattttaatagtagtcagaatttgatcaggaaaacagaagacatcctatgtattataatgataaaagtttaatattaattagggccttatgctattattggaagagcttggtgaatagatattagaaaagcagctagacaaaatcagaagaggtctgttttatatcagagatcttagcctgacagtctagagtgtgggcacagaacccaagcttataggaatttctgaaaggtctgtaaatcttatccagatggacagtgggagctcataaaggattc

SEQ ID NO: 214113 - DNA, 472 bp, Homo sapiens
ctcatccacaatcttttctcctagtaaatggcagctccttctgttaagttgctgaggcttcttattgcttttttcttcaaataacagtcagaactgaacaactgtaatcatcctagtccatacaattgttatattttcatttaaagaagatcaatgtgtgattctttttttatatatttctggacawttctttatattttaatagtagtcagaatttgatcaggaaaacagaagacatcctatgtattataatgataaaagtttaatattaattagggccttatgctattattggaagagcttggtgaatagatattagaaaagcagctagacaaaatcagaagaggtctgttttatatcagagatcttagcctgacagtctagagtgtgggcacagaacccaagcttataggaatttctgaaaggtctgtaaatcttatccagatggacagtgggagctcataaaggattc

SEQ ID NO: 214114 - DNA, 472 bp, Homo sapiens
ctcatccacaatcttttctcctagtaaatggcagctccttctgttaagttgctgaggcttcttattgcttttttcttcaaataacagtcagaactgaacaactgtaatcatcctagtccatacaattgttatattttcatttaaagaagatcaatgtgtgattctttttttatatatttctggacaattctttatattttaatagtagtcagaatttgatcaggaaaacagaagacatcctatgtattataatgataaaagtttaatattaattagggccttatgctattattggaagagcttggtgaatagatattagaaaagcagctagacaaaatcagaagaggtctgttttatatcagagatcttagyctgacagtctagagtgtgggcacagaacccaagcttataggaatttctgaaaggtctgtaaatcttatccagatggacagtgggagctcataaaggattc

SEQ ID NO: 214115 - DNA, 645 bp, Homo sapiens
gcttgctttgatgatttatttgtccagagaggattttttttcctacctagcattttggactgctatcaacctgagaccactttgaattaaattctcagcttgcaaatttggaagccacacagattgtgtgagttcaggctgaaacctgtttgagagctggattctggctataaactccacagggaacattttctctctccactcagagctgagaccatagggaaatttatttgctagctcactttgaaggtttattttatttattttttaaatttctagtacacgtgctcactgaaggtgtaatacttatgtgagaatctcaaaatcagttgtgttctttgtatgaccctggttttgtttcctcctgctctcttactttcagtgtgtctcagtatgtctgctcaatatgtcatcttaaatttcaactgagggtggatcttcttcccagctcactcrcatggttcttagctagattcagtttctctccatttgtaggactgaggacctcagttcttcacttagggttggctacaggtaatcgtcaatttcttgtaacaggacttacactgtgccactgacagcatgccagttggcttcattcaaatgagagggcaagagaaagagagagagggagagggcacaaga

SEQ ID NO: 214116 - DNA, 552 bp, Homo sapiens
cacagtatcttataaactaatctcagaagtggcatctcatttcttttgttctattctattcaatagaaacaagtacctgggaccagcttacactataggaaagagattatataagggtataaataccaagaggtagagatcatcaagagccattctggtagcagccacaatatcttatccagaatatttcttattcaggccttcaaatgtgctgtcttttctggtctaatggaaatgaaccttccttccatacaatttcttctcctaaattgtactctggctctcttatcatatacaaacktctatgttaggtatttgtgtctgtcttgattcttggtaggcttttaaactctgtgaatgttggactgtgatgtagacatcatttcaccgcacactctgtaaccaccaaaccttagcagcttattcagtgagcacatacttggctcttaatgagtattgcttaaattgatgaattgaattagtattttaccttctctgttgcttagctaagcagaagaatttgtcatttttttaatgtagtgactggttcta

SEQ ID NO: 214117 - DNA, 605 bp, Homo sapiens
ccttgtaaattacctacgtgacataccagatagtgttcatgatccatttagtactctgttctaaaaatgagacaatatccatttattcacttgttcatttatttagtgtttgttcagcccttactgcatattccaggcactattctgactgtggcaggagtgaacaaacaggcatggttcttacttgcatgtaattacagtcttatagtgaaaacaagtgttaaacaacaaaatctcccaattattttaaaattataaacttgattcgatactatgtggccatataattgttcctaatttggttggagaagggaggcagttagggaagccttccctgagttagtgccatttaacctgaattatgatagatgataagtaatttgtcaggggaaaaatactccaggaataaagaacaggtacaaaggtcaggttctgggaagagcttgtcttggtccaggagctaaaaaatgttagagtggctggatctgggmaagagacaaagagttattaaatgaggcagcaggcttcagcaggtgccacattgctcagggccttgtaggccatgctaaggatttgggatgttaatgtcagtacaaacaattgag

SEQ ID NO: 214118 - DNA, 593 bp, Homo sapiens
acaaacactaattttttttagaaaaaattataaaaagagtaaaaatatgccttatactaccgtaatttcatgttttacagctctgggaaaatagaaaataaaatgttctgttagcatgaatccctctgtgcccccaaaaaaccctatggattgcatcattattacctaaaaagtctattctcaaatgcagcagagtgatattttttacaaggtagatattaattttagatatggaataatattggtgatttcaattttataacactgggttaagatgaaagaatgagaagataaaggtccctcagcaatataactcacaaacatgttcagaagcagtaagaagttacattaattatcttttgaaagtcgataatctacatctttaatgtatgcatatagcatagctaatgtactatcsctgggtccatttattcaatgaataattgccgctatgtgtcagacatttttctaggcctaggaatggatacataagtgaacaaagcaaagattctggttcttgtagagtttccattaaaagacaatttagtaaaacttttcttcccccaaattataaaatctgtaagatgatttaa

SEQ ID NO: 214119 - DNA, 657 bp, Homo sapiens
gtactatccctgggtccatttattcaatgaataattgccgctatgtgtcagacatttttctaggcctaggaatggatacataagtgaacaaagcaaagattctggttcttgtagagtttccattaaaagacaatttagtaaaacttttcttcccccaaattataaaatctgtaagatgatttaacaacatgtgtaaaagtcattgtgggccaggcacggtggctcataccaggtgtggtgactcatagcactctgtcacccaggmtggagtgcagtggcacaatctctgctcactgcaacctctgcctcctgggtacaagcgattctcctgcctcagctttctgagtagcaaggactacaggtgcacaccatcacgcctggctaatttttgtactattagtacagacggagtttcaccatgttggccaggctggtctcgaactcctgacctcaaatgatccatctacctcggcctcccaaagtgctggaattacagatgtgagccacaatgcccggccttattttctacaactttggtaactttagcatataccccaaatctgtaagacataatattataattcaaatgcaactcatggcttctctttgtactctttctctagcttttgaattatttattctaataccagttttaat

SEQ ID NO: 214120 - DNA, 551 bp, Homo sapiens
ggaatctaataaaacaatagcttctgcacagcaaaagaagctaccaacaaagtaaacagacaacctacagaatgggagaaaatatttgccaactgtaagtctgacaaaaatctaatatctggcagctataaggaacttaamtttacaagacaaaaacaaccccattaaaaagtgggcaaagaacatgaatagacactctcaaaagaagatatacatatggttaacaagcatatgaaaaaaaagctcaatatactgagcattagagaaatgcaaatcaaaaccatattgagatatcatctcataccaggcagaatggctattattaaaaagtcaaaaataacagatatcggtgaggttacagagaaaagggaacacttatacactgttggtgggactgtaaattatttcaaccattgtggaaagcagtatgggatggcgattcctcaaaaagccaaaaacagaactatcattcaacccagcaattccattactgggtatatacccagaagaatataaatcgttctaccataaagacgcatgcatgagaatgt

SEQ ID NO: 214121 - DNA, 589 bp, Homo sapiens
gcggaaaaaaaaatttatcaaaagtcgtcttctatcagggagttttatgagaaaccctagctcctcagttccacagtgggtaactgtaattcattctaggtctgcgatatttcctgcctatccattttgttaactcttcaatgcattccacaaatacctaagtattctttaataatggtggtttttttttttttttgcatctatgaagttttttcaaattctttttaagtgacaaaacttgtacatgtgtatcgctcaatatttctagtcgacagcactgctttcgagaatgtaaaccgtgcactcccaggaaaatgcagacacagcacgcctctttgggaccgcggtttatactttcgaagtgctcggagcccttcctccagaccgttctcccacaccccgctccagggtctctcccggagttacargcctcgctgtaggccccgggaacccaacgcggtgtcagagaagtggggtcccctacgagggaccaggagctccgggcgggcagcagctgcggaagagccgcgcgaggcttcccagaacccggcaggggcgggaagacgcaggagtggggaggcggaaccgg

SEQ ID NO: 214122 - DNA, 413 bp, Homo sapiens
gcccggggtgcgccccgggggcaggacccccagcccacgcccagggcccgcccctgccctccagccctacgccttgmcccgctttcctgcgtctctcagcctacctgaccttgtctttacctctgtgggcagctcccttgtgatctgcttagttcccacccccctttaagaattcaatagagaagccagacgcaaaactacagatatcgtatgagtccagttttgtgaagtgcctagaatagtcaaaattcacagagacagaagcagtggtcgccaggaatggggaagcaaggcggagttgggcagctcgtgttcaatgggtagagtttcaggctggggtgatggaagggtgctggaaatgagtggtagtgatggcggcacaacagtgtgaatctacttaatcccactgaact

SEQ ID NO: 214123 - DNA, 413 bp, Homo sapiens
gcccggggtgcgccccgggggcaggacccccagcccacgcccagggcccgcccctgccctccagccctacgccttgacccgctttcctgcgtctctcagcctacctgaccttgtctttacctctgtgggcagctcccttgtgatctgcttagttcccacccccctttaagaattmaatagagaagccagacgcaaaactacagatatcgtatgagtccagttttgtgaagtgcctagaatagtcaaaattcacagagacagaagcagtggtcgccaggaatggggaagcaaggcggagttgggcagctcgtgttcaatgggtagagtttcaggctggggtgatggaagggtgctggaaatgagtggtagtgatggcggcacaacagtgtgaatctacttaatcccactgaact

SEQ ID NO: 214124 - DNA, 524 bp, Homo sapiens
ggagatcgaggctgcagtgagctatgattgtaccactgcactccaggctgggcgacagagagagaccctgtctcagaaaaaaaaaaaaaagtactttgtaatctgtaaggtttatttcaacacacacaaaaaaagtgtatatgctccacgatgcctgtgaatatacacacacaccacatcatataccaagcctggctgtgtcttctcacaaatgcactgctaggcaccacccccagttctagaatcacaccagccagttcaccctccagatggttcaccctcaacttcataaaagttccctacctaatctactgacaggctcatccccgacctaattttaaagatttcctaggagctgcagtgggaatcctggacctcagcctggacaaagaacagctgcaggtcattctcatgtgtggacacrgaagctctgcctgcctttgctggccagctgggctgagcgggcctgggaattaaggctgcagggttggtcccaggcagtcttgctgaagcttgccacatcc

SEQ ID NO: 214125 - DNA, 195 bp, Homo sapiens
tggacttagtatgaaaagggattttttttttgtcaggtacctcactagttatttttaaaataggattgcatgttgaaatgataatcttttggatatattgggttaaataaatktattattaaagttaatttcacttaaaaatgtttaatgtagctactagaaattttaaaattaagcatgttgctcaccttatgt

SEQ ID NO: 214126 - DNA, 594 bp, Homo sapiens
tatttctccttgtactcccagtgttcacaccatgctgcactcacagaagactcttcgttgatattttgtggacagagagaatgcctgtgagagtgggctgaagtgtgcgttgggctccagagaccttaaggaggggagaccaggtcctgagtaaagttgaaggggaggggctgagtcctgctagccaggagtctcatcccctggggaagttccagggacccctcagaagtgcaaggggacggtgttagtgttagtccagtaacacagcccagagcctgccttccacgtgggtttgacaggagcctcctaactgctcttctgcttccatttttgccccttcagtctattctcaacagggaagccagaggcatccttaaccatgtcagatcatgtggctcctcagctcaaagcctcatctcagaggaaagctctggtcccttagaaatggcccargtggtgacagacagactctaaggtgagcagactgttgctagatatctgggctcggaggactcgccactgctcaaaggcagtgaggattttcgcactagaagctggaggacagggatccttgttaggtaggagcagaaagct

SEQ ID NO: 214127 - DNA, 434 bp, Homo sapiens
tattatactaaattcatttgacaattctcagcaaagtgctgggttgatctctatttaygcttttcttaaacacacaaaatacaaaagttaacccatatggaatgcaatggaggaaatcaatgacatatcagatctagaaactaatcaattagcaatcaggaaggagttgtggtaggaagtctgtgctgttgaatgtacactaatcaatgattccttaaattattcacaataaaaaaaaagattagaatagtttttttaaaaaaaaagcccagaaactaatctaagttttgtctggtaataaaggtatattttcaaaagagaggtaaatagatccacatactgtggagggaataaaatactttttgaaaaacaaacaacaagttggatttttagacacatagaaattgaatatgtacatttataaatatttttgg

SEQ ID NO: 214128 - DNA, 434 bp, Homo sapiens
tattatactaaattcatttgacaattctcagcaaagtgctgggttgatctctatttacgcttttcttaaacacacaaaatacaaaagttaacccatatggaatgcaatggaggaaatcaatgacatatcagatctagaaactaatcaattagcaatcaggaaggagttgyggtaggaagtctgtgctgttgaatgtacactaatcaatgattccttaaattattcacaataaaaaaaaagattagaatagtttttttaaaaaaaaagcccagaaactaatctaagttttgtctggtaataaaggtatattttcaaaagagaggtaaatagatccacatactgtggagggaataaaatactttttgaaaaacaaacaacaagttggatttttagacacatagaaattgaatatgtacatttataaatatttttgg

SEQ ID NO: 214129 - DNA, 594 bp, Homo sapiens
atttaaattttcaaaaacaaaaataaagacaaagtgggaaaaatatgtatgcttcatgtgtgacaagccactgatacctattaaatatgaagaatattataaatcatatcaataaccacaacattcaagctgtcagtttgaatagacaatgtaaatgacaaaactacatactcaacaagataacagcaaaccagcttcgacagcacgttaaaggggtcatacaacataatcgagtagaatttatctctgagatgcaagaatggttcaaaatatggaaaycaataaatgtgatatgccacactaacagaataaaaaataaaaatcatattatcatctcaatagatgcagaaaaagcattaacaaaagtaaacattctttcataataagacatcagataaaacaaattaggaatagaaggaatgtaccgcaacacaataaaggccatatataacaagcccacagctaacatcataatagtaaaatcatcacactggtaaaaaaaatgaaagcttttcctctaaggtcagaaataatataaaggttcccactcttgctatttctattccatatcgtactaaaagtcctagccaggac

SEQ ID NO: 214130 - DNA, 594 bp, Homo sapiens
atttaaattttcaaaaacaaaaataaagacaaagtgggaaaaatatgtatgcttcatgtgtgacaagccactgatacctattaaatatgaagaatattataaatcatatcaataaccacaacattcaagctgtcagtttgaatagacaatgtaaatgacaaaactacatactcaacaagataacagcaaaccagcttcgacagcacgttaaaggggtcatacaacataatcgagtagaatttatctctgagatgcaagaatggttcaaaatatggaaaccaataaatgtgatatgccacactaacagaataaaaaataaaaatcatattatcatctcaatagatgcagaaaaagcattaacaaaagtaaacattctttcataataagacatcagataaaacaaattaggaatagaaggaatgtaccgcaacacaataaaggccatatataacaagcccacagctaacatcataatagtaaaatcatcacamtggtaaaaaaaatgaaagcttttcctctaaggtcagaaataatataaaggttcccactcttgctatttctattccatatcgtactaaaagtcctagccaggac

SEQ ID NO: 214131 - DNA, 651 bp, Homo sapiens
caacaatgtcaagaagacaatggggaaaagacaatctcttcaataaatgatgctggaaaaactatatatccacatgcagaagaatgcagttgaatcctgatttcataccatatgcaaaattcaactggaaatggattaaatacaaatttaaaacatgaaatggtataactattagaacaaaacatagaaaatattcttcctgacattggtttgggccatcatttttctgatatgactctaacagcacaggcaaaaaaagaaaaaatagacaaatgagactatgccacattaaaaaatttctaacaacacaagaaacgatcaatagagtgaaaaagataacctcttgaatgggagaaatatttgcaaactactcatccaacyggggattgatatccagaatatacaagtaacacaaatatgtcaaaagtaaaataaataaataaataaataaataaataaattaaataaattatttaaaaatcggcagaggacaggaatagacatttctcaggagacaacatacaaagggccacagatacatcaaaaaatgctcaacatcactatttgtcagggaagtactaattaaaaccaaaatgagatgtcccctcaaacctgttagaatggctattatcaaaaagatgaaagatagca

SEQ ID NO: 214132 - DNA, 344 bp, Homo sapiens
tcccacaccccgctccagggtctctcccggagttacaagcctcgctgtaggccccgggaacccaacgcggtgtcagagaagtggggtcccctacgagggaccaggagctccgggcgggcagcagctgcggaagagccgcgcgaggcttcccagaacccggcaggggcgggaagacgcaggagtggggaggyggaaccgggaccccgcagagcccgggtccctgcgccccacaagccttggcttccctgctagggccgggcaaggccgggtgcagggcgcggctccagggaggaagctccggggcgagcccaagacgcctcccgggcggtcggggcccagcggcg

SEQ ID NO: 214133 - DNA, 651 bp, Homo sapiens
caacaatgtcaagaagacaatggggaaaagacaatctcttcaataaatgatgctggaaaaactatatatccacatgcagaagaatgcagttgaatcctgatttcataccatatgcaaaattcaactggaaatggattaaatacaaatttaaaacatgaaatggtataactattagaacaaaacatagaaaatattcttcctgacattggtttgggccatcatttttctgatatgactctaacagcacaggcaaaaaaagaaaaaatagacaaatgagactatgccacattaaaaaatttctaacaacacaagaaacgatcaatagagtgaaaaagataacctcttgaatgggagaaatatttgcaaactactcatccaaccggggattgatatccagaatatacaagtaacacaaatatgtcaaaagtaaaataaataaataaataaataaataaataaatwaaataaattatttaaaaatcggcagaggacaggaatagacatttctcaggagacaacatacaaagggccacagatacatcaaaaaatgctcaacatcactatttgtcagggaagtactaattaaaaccaaaatgagatgtcccctcaaacctgttagaatggctattatcaaaaagatgaaagatagca

SEQ ID NO: 214134 - DNA, 550 bp, Homo sapiens
ttttgtaacagtttttgacttaaagtctattttgtctgatataagtatatttgcctcagatctcctttggttattacttacatggaatattttctcccatcctttcatttcaactcattgtgtattttgatctaaagtgagtatcttgtggacaatatagttggatcatttttaaaaaatccattctgtyaatctctttctttggattggagagtttaattcatttgtatttaatgtaattactgataaagaggggcttactcctaccattttgcttttgttttctgtatgtcttatacctcctttgttcctaatttcctcaattatcgccttcttttgtgtttagttgctattttgtagcatatcactgtgtttaccctgtgctttccttttctgtattttcaaaagatattaacttagtggttaccatggggatttacaattaacattcttaatttggaacaatttagagtaaattgaaacaacttcaatagtatacaaaatctctattattatttagtttcctatgaatttctttatgttggtaatt

SEQ ID NO: 214135 - DNA, 550 bp, Homo sapiens
ttttgtaacagtttttgacttaaagtctattttgtctgatataagtatatttgcctcagatctcctttggttattacttacatggaatattttctcccatcctttcatttcaactcattgtgtattttgatctaaagtgagtatcttgtggacaatatagttggatcatttttaaaaaatccattctgttaatctctttctttggattggagagtttaattcatttgtatttaatgtaattactgataaagaggggcttactcctaccattttgcttttgttttctgtatgtcttatacctcctttgttcctaatttcctcaattatcgccttcttttgtgtttagttgctattttgtagcatatcactgtgtttaccctstgctttccttttctgtattttcaaaagatattaacttagtggttaccatggggatttacaattaacattcttaatttggaacaatttagagtaaattgaaacaacttcaatagtatacaaaatctctattattatttagtttcctatgaatttctttatgttggtaatt

SEQ ID NO: 214136 - DNA, 581 bp, Homo sapiens
ttatagaatttttggttgacagtgtttttttctttcagaactttaaaatgtcatcctaagctcttctggcacccatggtttataatgagctctctgctgtcaaacttactgaggatcctttgtaaatgacgcgttgcctttttcctaagctcttctggcatccatggcttataatgcactatctgctgtcaaacttattgaggatcctttgtaaatgacgcgttgcctttctcttgctgctttcaaacattcgctttgccttttgacaatttgaaacatagtgtgtcttggtrtgaatatctttgtatatttccttgatgaagttcactgagctttttgaatgtatatatttgtttttagtgaaatttgggaagctttcaaacacatttcttcaaatagtcttcctgcccctcactccccaccaggattctgtatgtaggcattcttgatgttgttacacaggtctttaggctctattcttttttgttgtcattctttcattttcctgctcttcagactgaatcatttcatttgatctatcaagttcactgattcttttttccagctgctcaaatcttcta

SEQ ID NO: 214137 - DNA, 588 bp, Homo sapiens
tttagcacaccgaaaattataggttggcctagcttactttgaacatgctcagaacatttagattagacttcagttggtcaaaataatctaacaaaatgtctaaataaagtattgaataactgatatttattaaatatggtactgaaaataagaaacagaatggttgtatgggtactyatcattaatgtacgtagctgaaattacacagggcctgaagaatttttgaagcattgagctaaagttaattgctgaatgatgggactaatactttgacacagtcagtctctgtctcttccgatcatgagggttgagaatagctggtagaaagtattgatgcctgttgatggtaggcaggcattatgttcttcaggaagatatcaagatggattatctacctttattatcatttagctgactggaagctgcagctcaccgctgttgcacaacattgtgagagagcattgtgccacatattggtagtccaggaaaatatcaaaattcaaaattcggagtagggtttctttcttttttttgagatggagtctcactctgttgccaggctggaggcagtggcacgatctcggctca

SEQ ID NO: 214138 - DNA, 588 bp, Homo sapiens
tttagcacaccgaaaattataggttggcctagcttactttgaacatgctcagaacatttagattagacttcagttggtcaaaataatctaacaaaatgtctaaataaagtattgaataactgatatttattaaatatggtactgaaaataagaaacagaatggttgtatgggtactcatcattaatgtacgtagctgaaattacacagggcctgaagaatttttgaagcattgagctaargttaattgctgaatgatgggactaatactttgacacagtcagtctctgtctcttccgatcatgagggttgagaatagctggtagaaagtattgatgcctgttgatggtaggcaggcattatgttcttcaggaagatatcaagatggattatctacctttattatcatttagctgactggaagctgcagctcaccgctgttgcacaacattgtgagagagcattgtgccacatattggtagtccaggaaaatatcaaaattcaaaattcggagtagggtttctttcttttttttgagatggagtctcactctgttgccaggctggaggcagtggcacgatctcggctca

SEQ ID NO: 214139 - DNA, 588 bp, Homo sapiens
tttagcacaccgaaaattataggttggcctagcttactttgaacatgctcagaacatttagattagacttcagttggtcaaaataatctaacaaaatgtctaaataaagtattgaataactgatatttattaaatatggtactgaaaataagaaacagaatggttgtatgggtactcatcattaatgtacgtagctgaaattacacagggcctgaagaatttttgaagcattgagctaaagttaattgctgaatgatgggactaatactttgacacagtcagtctctgtctcttccgatcatgagggttgagaatagctggtagaaagtattgatgcctgttgatggtaggcaggcattatgttcttcaggaagatatcaagatggattatctacctttattatcatttrgctgactggaagctgcagctcaccgctgttgcacaacattgtgagagagcattgtgccacatattggtagtccaggaaaatatcaaaattcaaaattcggagtagggtttctttcttttttttgagatggagtctcactctgttgccaggctggaggcagtggcacgatctcggctca

SEQ ID NO: 214140 - DNA, 588 bp, Homo sapiens
tttagcacaccgaaaattataggttggcctagcttactttgaacatgctcagaacatttagattagacttcagttggtcaaaataatctaacaaaatgtctaaataaagtattgaataactgatatttattaaatatggtactgaaaataagaaacagaatggttgtatgggtactcatcattaatgtacgtagctgaaattacacagggcctgaagaatttttgaagcattgagctaaagttaattgctgaatgatgggactaatactttgacacagtcagtctctgtctcttccgatcatgagggttgagaatagctggtagaaagtattgatgcctgttgatggtaggcaggcattatgttcttcaggaagatatcaagatggattatctacctttattatcatttagctgactggaagctgcagctcaccgctgttgcacaacattgtgagagagcattgtgccacatattggtagtccaggaaaatatcaaaattcaaaattcggagtmgggtttctttcttttttttgagatggagtctcactctgttgccaggctggaggcagtggcacgatctcggctca

SEQ ID NO: 214141 - DNA, 453 bp, Homo sapiens
tttatggtttcaggtcttagatttaagtctgtgaaccatcttgagttgatttgtttataaggtgagagatgaggatccagttgcattcttctacatgtggcttgccaattataccagcaccatttgttgaatagggtgtcctttccccactttatgtttttgcttgctttgtcaaagatcagttggctgaaagtatttggctttatttctgggttctytattctattccattggtctatatgcctatttttataccagtaccatgctgttttggtgactatggccttatagtatagtttgaagtcgagtaatgtgatgcctctagatttattctttttgcttagtcttgctttggctatgtgggctcttttttggttccatgtgaattttagccttgttttttctagttctgtgaagaatgatggtggtattttgatgggaattgcattgaat

SEQ ID NO: 214142 - DNA, 521 bp, Homo sapiens
acactttgatgctgactccagacccttatctcaccccaaaacccaaatgccttgggrcagccagcttcagacaggagtgaatttgatgctcattctctgggattgacccaaggcttatataatggagcacatctgcccccgtgtcttgggggagtcaacggtagtgacccagaactgtgaacaccattccccacacagagcacagggaacgcagccctctccagcaggctggcctggccgtggcctgatgcacatcagtcctgaggcaagagacccaaggcaggaaatgtctcttgtgcatcccctttcacaatgcagccatttaactgggggtggtgcctctgtgggtcctccagccttcagagtgggattgttaccctgggccaccaagggaagcggaagcacagggccagtgggtggcaaagttagagactctgtgattgggaaatatcaccttagacccagcacggcccgttcaggacatagcgcctcttgggctccatccatgggctgttctttcc

SEQ ID NO: 214143 - DNA, 511 bp, Homo sapiens
tcttacattagttcactccacgcagttatctcctgttctgcttgatattgatgaacatttcagctctccatgagagttctgaaagttttttctttattctattgccaaaatttccaaagttatcagaaacctgcatttaagagcacctgtcaacgtcctaaacctgattataaatcacctttcaaagagcgttaaaacaagacaacaattgtctgtggatgacaaagaagtcttaggacagccactattaaagctacaattgacagattttggttacttctgttgcatacaatgattttacataacaattattactattaataacatacactaagttatattggaattatgggarttttccctttttttgaatcacataccaataacatatttatacaaatacagcccaaggaaaaccaaacaccatttcatatttgacaatattttctttctttcctttttttttttttgagatagagtatcactcttgttgcccagactggagtgcaat

SEQ ID NO: 214144 - DNA, 512 bp, Homo sapiens
gcaggacttggtttttgggaatgctaccttggaaaagaaatagagaaaatgtctctctctttatgcctgcataaaaataaatacatttctacaagaaacttacagattaacacatgaattacaaacattcatgaaaacgccagttacactcttgtgcagggtggagaacttgtgacagttggtaactcatttttttctagatgaatttctacttcatagggaatatttttatatatatgataaagaagtatttgccactatgcatacacctctttgctcagctagcatataacctaaagcaatatgattgtctagtacaagcttagccagtgaatcagtagcatttttgttgagctacaatgaatacaacagttkcatctgtaattttttccaaggttataaaaatattttaagtcatgtgttcatgggaacaactcaccaaggcaaaagcatttttccagtaaaatgcataaagctgttttcctgaaagccaggcagataattagcagatt

SEQ ID NO: 214145 - DNA, 518 bp, Homo sapiens
atagttccattgaaaaaaaacaccataaagcctagacaatgtagcaagtgcttaactgcagagtttagttctaagtgctaaagtaaaaaaaaggggctgggcatggtggctcacacctgtaatccaagcactttgggaggctgaggtgggcagattacttgagttcaggaggtcgaaaccagcctgggcaacatgatgaaaccctgtctgcccctgaaaatmcaaaaaaaaaaaaaaaaaaaaatagccaggcgtggtggtgggtgcctgtaatcccagctactcaggaggctgaggcaggagaatcgcttgaacccgggaagtggaggttgcggtgagccgagatagtgcaaatgcactccagcctgggcaatagagtgagactccatctcaaaaaaataaaacaaagaaagaagcacaggcagcagaaagaagggaggatgagacagtccatctggcagggtgaggcttcctacaataggttgataataataggggcatcatttcttgggttttta

SEQ ID NO: 214146 - DNA, 645 bp, Homo sapiens
gcagggggatggagtagaagagtaaggttggcaatttattgacactaaagggtactggcctcaaaataaataaaaaggaatgttgaaagcagtgaggctctgcctgagtttggacattaatattaatttctactcacatttagtagataatatttacttccatagcaaaatgtcagatggcctataattacaagacaaaatacagcarccttgttctaataacctcaaagtgacttattactacaattgatccttgctcattggccttactaaagggaaggaagtagtgtcattaatgcaaaagaatagagaactataatcagtcctatcaaatcaaactctacttaaacacaaaatctgtggaaacaacccaaatccagtgtacttctgcattattaagaaaacatttaagaataatagagttcagaataatatatatactggcttaagaaaaaactacttaagataaaaagactatctgtaacatttcatgtttcttcaaactaatattttaataaacacaatattttttaatgttccaaattaatgtctattttacatttattttgactttgaaatgcactctacatgttttgcaacaatgtcgttatcattccctcattttactgcagcttaagagtaaat

SEQ ID NO: 214147 - DNA, 645 bp, Homo sapiens
gcagggggatggagtagaagagtaaggttggcaatttattgacactaaagggtactggcctcaaaataaataaaaaggaatgttgaaagcagtgaggctctgcctgagtttggacattaatattaatttctactcacatttagtagataatatttacttccatagcaaaatgtcagatggcctataattacaagacaaaatacagcagccttgttctaataacctcaaagtgacttattactacaattgatccttgctcattggccttactaaagggaaggaagtagtgtcattaatgcaaaagaatagagaactataatcagtcctatcaaatcaaactctacttaaacacaaaatctgtggaaacaacccaaatccagtgtacttctgcattattaagaaaacatttaagaataatagagttcagaataatatatatactggcttaagaaaaaactactyaagataaaaagactatctgtaacatttcatgtttcttcaaactaatattttaataaacacaatattttttaatgttccaaattaatgtctattttacatttattttgactttgaaatgcactctacatgttttgcaacaatgtcgttatcattccctcattttactgcagcttaagagtaaat

SEQ ID NO: 214148 - DNA, 615 bp, Homo sapiens
ttcgtttttctcctgggttttgaaatcaattttgttcaaattcaaatcctagttcaatcacatacaagtatgtgaccttgatcaagatacttactctattaattaaatgcactgggcttgacattttaaaaagcacctcaaatgaaacctattattaagagatgagacagtaacaaactacagttcttaactaaaatacatattagtgtcatcccagkagctgtttcaaaatagatgaatattccatccttgacccaaagcccagaatatctaggcaagtgtttccaggactactttgaagaagcttcccaaaatgatttgaaaggtagatgaaattaagaaattcttatgttcatgttgtcctctccataaaaagaaaattaagaaattctagtaaataaaggatgacatagggcaatatgccagattacatcaacatttaaaggtggcccataggaaaggatcctaataaagcagcttcaacacaaccaggtaaatcaggaggcaacagcacaaaaagtgaggaagagtttcaaggaaaaatagtcaataatgccaaataagttaaagaaaaatacaatcagaatgccttttactgacctttaataaaagtag

SEQ ID NO: 214149 - DNA, 598 bp, Homo sapiens
attttcaatataaaatccaaactgacataatttttacagaatcaggaaaattctaatgaggaagcatgatattaaagatataattgaatagtcataatacctaatacccctacataataccataatatccctacttattaaagtaggggtaaattaaaatattttcaaaagctaaaattttgagagatttgattaccaacaggagcttaagagtaccttttaagaaaaaagaaacatttactaatatgaagttaaaatgaaaattaaagagaaaaagatttgatatgagaatatcaatttatggtagatattgaacttagcragctataaagtccttagtaatatcagcttcaaaagtattcatatataattttaaaaggtgatcttatacacattggttaaatcagataaaaaatgagctacttgagcagtttaaataatagcagatgactatttttcagaaaacgtttttcatcaatagcttgttaaaattggtggcacatcaattacaattctgcagaatacttttttttttaatcagaactaatttgtcccagtggaataacagtggcatatgcattgagcacaagcctccgga

SEQ ID NO: 214150 - DNA, 598 bp, Homo sapiens
attttcaatataaaatccaaactgacataatttttacagaatcaggaaaattctaatgaggaagcatgatattaaagatataattgaatagtcataatacctaatacccctacataataccataatatccctacttattaaagtaggggtaaattaaaatattttcaaaagctaaaattttgagagatttgattaccaacaggagcttaagagtaccttttaagaaaaaagaaacatttactaatatgaagttaaaatgaaaattaaagagaaaaagatttgatatgagaatatcaatttatggtagatattgaacttagcaagctataaagtccttagtaatatcagcttcaaaagtattcatatataattttaaaaggtgatcttatacacattggttaaatcagataaaaaatgagctacttgagcagtttaaataatagcagatgactatttttcagaaaacgtttttcatcaatagcttgttaaaattggtggcacatcaattacaattctgcagaatacttttttttttaatcagaactaatttgtcccagtggamtaacagtggcatatgcattgagcacaagcctccgga

SEQ ID NO: 214151 - DNA, 531 bp, Homo sapiens
tggtcaaaggctgaaaaaaattttcatggtgagaataataaaaccagaaaaatgtactacaacataaagaaaaataaaactcttccagaatgaataaatgctggaaaagcacataatcattgtatgtgccctacataaaatgctgaaaagaggtctttccacttaaaacaacatgatgaaaaatatatgtaatcatatgaaaatacataactttctgaaaaacatatgcatatacaaaaagtaaaattctgtggcattattgtgrtggtgcagaaaatacttttagttattctttaaaatttgaaaaatataagcataaaaatcataaaacataaaaagatataattagcaacatcaataagaagtatagggtagatataatgaggacaaatttttctatgcaactgaagtcatttttttttacctagtttaaaatatatctgttgtaacatttaagatgttttacagaatctccaatgtagcacaaagaaaaaatctttatagacacacgaaagcaaatgagtcaattac

SEQ ID NO: 214152 - DNA, 531 bp, Homo sapiens
tggtcaaaggctgaaaaaaattttcatggtgagaataataaaaccagaaaaatgtactacaacataaagaaaaataaaactcttccagaatgaataaatgctggaaaagcacataatcattgtatgtgccctacataaaatgctgaaaagaggtctttccacttaaaacaacatgatgaaaaatatatgtaatcatatgaaaatacataactttctgaaaaacatatgcatatacaaaaagtaaaattctgtggcattattgtgatggtgcagaaaatacttttagttattctttaaaatttgaaaaatataagcataaaaawcataaaacataaaaagatataattagcaacatcaataagaagtatagggtagatataatgaggacaaatttttctatgcaactgaagtcatttttttttacctagtttaaaatatatctgttgtaacatttaagatgttttacagaatctccaatgtagcacaaagaaaaaatctttatagacacacgaaagcaaatgagtcaattac

SEQ ID NO: 214153 - DNA, 476 bp, Homo sapiens
tggggcaagaagtttgatactagccttgggaacacagtgagaccctgtctctacaaataattcaaaattagctgagcattgtggggtatgcctccaatgccagcygctcagtaggccaaggtgaaaggattacttgagttcaagaggttgaggctgcagtgagccaagattgtgctactgcactacagtctgggaaacagcgtgagaaactctgagtcaaaaaaaaaataagaagagcaaaatcatacagtatatgttttctaacccaaactgaataaaactaaaaagaaaaaaagtaatactggcaaatcaaaaatacatggaaataaacacactcttcactgtattcttgcacagggtcaaataatttaaattaatttaatattttttctcaagggccaacatatttaagtgatgacttaatttgttaagacccacagtggtgaacaaatttaatataatctgtatcaaaattc

SEQ ID NO: 214154 - DNA, 651 bp, Homo sapiens
ggggctgggcatggtggctgacgcctgtaatcttagaattttgggaggccgaggtggggggatcttttcagctcaggagttcaagaccggcctgggcaacgtggcaaaaccctgtctctactaaaaatacaaaaaaattacccggtcatggtggcacatgtctgtaatcccagctactcaggaggctgaagcaagagaattgcttgaacccgggcggcggaggctgcagtgagccaagatcgcaccactgcactccagcctgggtgacagagcgagactctgtctcaaaaaaaagaagtaaaagtggttcatgattttcctagttaaggactggactgtttgccatcgccccaccccmcgcttttttgagtaacttccctttttggaaacagtgatgaaggtttctccctttattctaaacagtgtgtaccttgtagtactatctgccatcaaatttctaaatgctttctgcttttttaatactctttaaaaattagcaaatacagttatactttcagttaagattatattttttcccattggattttttctttatcttttaaattcttaacactgactatgtgaagtaatacgctgtataccctgaactcagctatgagatatttaacatatcatgggatatataaataa

SEQ ID NO: 214155 - DNA, 651 bp, Homo sapiens
ggggctgggcatggtggctgacgcctgtaatcttagaattttgggaggccgaggtggggggatcttttcagctcaggagttcaagaccggcctgggcaacgtggcaaaaccctgtctctactaaaaatacaaaaaaattacccggtcatggtggcacatgtctgtaatcccagctactcaggaggctgaagcaagagaattgcttgaacccgggcggcggaggctgcagtgagccaagatcgcaccactgcactccagcctgggtgacagagcgagactctgtctcaaaaaaaagaagtaaaagtggttcatgattttcctagttaaggactggactgtttgccatcgccccaccccccgcttttttgagtaacttccctttttggaaacagtgatgaaggtttctccctttattctaaacagtgtgtaccttgtagtactatctgccatcaaatttctaaatgctttctgcttttttaatactctttaaaaattagcaaatacagttatactttcagttaagattatattttttcccattggattttttctttatcttttaaattcttaacaytgactatgtgaagtaatacgctgtataccctgaactcagctatgagatatttaacatatcatgggatatataaataa

SEQ ID NO: 214156 - DNA, 555 bp, Homo sapiens
tataaataaattaacttccatcaattcctagactacttacactgaaattatggaccaaagctttctaattcaattcccaagtggtattaaaaccaaactgtattgtatttcaagaaaytttatccatggttacaaaagtttaaaaacttatcaaacacgtgggaaaactgcaatttaaagataaatgattaggtttcctatttttttaagaccaactacaatgtgaaccataactacactaactgggtgttctctatcaaagtcaacactgcaaacaacaaagggtatcatctggccaagaaaaagataatttctgattccaattcaacacagctcctgtgtaacaggtgtttctctagttctcagctccacatttatgcttgagttatttctatgctagttgtagttttctttttaagttgcctctgggcaaagtacacctttcataacagattgagaactgttccatttcctcaactctaagatacaattttgccccctaatatttctaaaaacaaatgtctcataatcaaaatgtaattgactgtactattt

SEQ ID NO: 214157 - DNA, 555 bp, Homo sapiens
tataaataaattaacttccatcaattcctagactacttacactgaaattatggaccaaagctttctaattcaattcccaagtggtattaaaaccaaactgtattgtatttcaagaaactttatccatggttacaaaagtttaaaaacttatcaaacamgtgggaaaactgcaatttaaagataaatgattaggtttcctatttttttaagaccaactacaatgtgaaccataactacactaactgggtgttctctatcaaagtcaacactgcaaacaacaaagggtatcatctggccaagaaaaagataatttctgattccaattcaacacagctcctgtgtaacaggtgtttctctagttctcagctccacatttatgcttgagttatttctatgctagttgtagttttctttttaagttgcctctgggcaaagtacacctttcataacagattgagaactgttccatttcctcaactctaagatacaattttgccccctaatatttctaaaaacaaatgtctcataatcaaaatgtaattgactgtactattt

SEQ ID NO: 214158 - DNA, 537 bp, Homo sapiens
atgttagccagggtggtttcgaactcctgatctcaggtgatctgcctgcctcggcctcccaaagtactgggattacaggcatgagccaccgcccccagcccaaaataatttttaaaattagctgggcatggtgttgtatgcctgttgtcccagctactctagaggctgggatgggaggatcgcttgaggccagaagtttgaggttgcagtgagacaggattgcaccactgctccccagcatgggtgacagggagagattttgtctctaaaatggaaataaaggaagcaaggaagggcttctcctccaaacactaccacttcatcttgggcagttacatgattccaggaaacatggaaaatctaccttgagtacctttttggatgtatgctaatgggaaaacaaatctcattaattaactcatagaacsgctaagaggaaagaatcttaggggatgtgtggtttcactccctaatttcaaacatgaggaaactgggtaccaaagagatgaagtaactcaccaggtagagagagaagag

SEQ ID NO: 214159 - DNA, 537 bp, Homo sapiens
atgttagccagggtggtttcgaactcctgatctcaggtgatctgcctgcctcggcctcccaaagtactgggattacaggcatgagccaccgcccccagcccaaaataatttttaaaattagctgggcatggtgttgtatgcctgttgtcccagctactctagaggctgggatgggaggatcgcttgaggccagaagtttgaggttgcagtgagacaggattgcaccactgctccccagcatgggtgacagggagagattttgtctctaaaatggaaataaaggaagcaaggaagggcttctcctccaaacactaccacttcatcttgggcagttacatgattccaggaaacatggaaaatctaccttgagtacctttttggatgtatgctaatgggaaaacaaatctcattaattaactcatagaacggctaagaggaaagaatcttaggggatgtgtggtttcactccctaatttcaaacatgaggaaaytgggtaccaaagagatgaagtaactcaccaggtagagagagaagag

SEQ ID NO: 214160 - DNA, 555 bp, Homo sapiens
tataaataaattaacttccatcaattcctagactacttacactgaaattatggaccaaagctttctaattcaattcccaagtggtattaaaaccaaactgtattgtatttcaagaaactttatccatggttacaaaagtttaaaaacttatcaaacacgtgggaaaactgcaatttaaagataaatgattaggtttcctatttttttaagaccaactacaatgtgaaccataactacactaactgggtgttctctatcaaagtcaacactgcaaacaacaaagggtatcatctggccaagaaaaagataatttctgattccaattcaacacagctcctgtgtaacaggtgtttctctagttctcagctccacatttatgcttgagttatttctatgctagttgtagttttctttttaagttgcctctgggcaaagtacacctttcataacagattgagaactgttccatttcctcaactctaagatacaattttgcccccyaatatttctaaaaacaaatgtctcataatcaaaatgtaattgactgtactattt

SEQ ID NO: 214161 - DNA, 431 bp, Homo sapiens
caggaaaatcaaagcacttcttcccctagaattgaattcaattagaaaagccaaatcaataagaccttaattattttrtcctataattgagaactttatatttaattcttagaacaatttattctgaactaaagggatttctatttccttctaaattggaagacccaaagaaacagaagcctttaacacaaacttggatgagaaataaggaaagtaaccaagaccatctcccaccttgaggctcatgaggtgaaacaaaagctcccgcttgagagagttatatgccacaggggaaatgaccctcaaagagacaagtttcattcagagtaaggaggccgaaaaaatgggtaccaaaaagtagttgagaactccgtctgctttttctggttctgtacataaggagcttggaagttgccactccattctaagaa

SEQ ID NO: 214162 - DNA, 438 bp, Homo sapiens
caggaaaatcaaagcacttcttcccctagaattgaattcaattagaaaagccaaatcaataagaccttaattattttatcctataattgagaactttatatttaattcttagaacaatttattctgaactaaagggatttctatttccttctaaattggaagacccaaagaaacagaagcctttaacacaaacttggatgagaaataaggaaagtaaccaagaccatctcccaccttgaggctcatgaggtgaaacaaaagctcccgcttgagagagttatatgccacaggggaaatgaccctcaaagagacaagtttcattcagagtaaggaggcmgaaaaaatgggtaccaaaaagtagttgagaactccgtctgctttttctggttctgtacataaggagcttggaagttgccactccattctaagaagtaaaaa

SEQ ID NO: 214163 - DNA, 438 bp, Homo sapiens
caggaaaatcaaagcacttcttcccctagaattgaattcaattagaaaagccaaatcaataagaccttaattattttatcctataattgagaactttatatttaattcttagaacaatttattctgaactaaagggatttctatttccttctaaattggaagacccaaagaaacagaagcctttaacacaaacttggatgagaaataaggaaagtaaccaagaccatctcccaccttgaggctcatgaggtgaaacaaaagctcccgcttgagagagttatatgccacaggggaaatgaccctcaaagagacaagtttcattcagagtaaggaggccgraaaaatgggtaccaaaaagtagttgagaactccgtctgctttttctggttctgtacataaggagcttggaagttgccactccattctaagaagtaaaaa

SEQ ID NO: 214164 - DNA, 430 bp, Homo sapiens
caggaaaatcaaagcacttcttcccctagaattgaattcaattagaaaagccaaatcaataagaccttaattattttatcctataattgagaactttatatttaattcttagaacaatttattctgaactaaagggatttctatttccttctaaattggaagacccaaagaaacagaagcctttaacacaaacttggatgagaaataaggaaagtaaccaagaccatctcccaccttgaggctcatgaggtgaaacaaaagctcccgcttgagagagttatatgccacaggggaaatgaccctcaaagagacaagtttcattcagagtaaggaggccgaaaaaatgggtaccaaaaagtagttgaraactccgtctgctttttctggttctgtacataaggagcttggaagttgccactccattctaaga

SEQ ID NO: 214165 - DNA, 422 bp, Homo sapiens
ggaagcaggaaaatcaaagcacttcttcccctagaattgaattcaattagaaaagccaaatcaataagaccttaattattttatcctataattgagaactttatatttaattcttagaacaatttattctgaactaaagggatttctatttccttctaaattggaagacccaaagaaacagaagcctttaacacaaacttggatgagaaataaggaaagtaaccaagaccatctcccaccttgaggctcatgaggtgaaacaaaagctcccgcttgagagagttatatgccacaggggaaatgaccctcaaagagacaagtttcattcagagtaaggaggccgaaaaaatgggtaccaaaaagtagttgagaactcmgtctgctttttctggttctgtacataaggagcttggaagttgcca

SEQ ID NO: 214166 - DNA, 561 bp, Homo sapiens
atgacttgtgatagatgcagtatattagtaaaataattcatatatagttactaaatgattacacatatattagtggttcgtgcccaaatattattttactggtactggactgtgattcttaaaatgtggaaattattgtgccttaatactaatcttacacttgttcccacatagcagtagaagtcaactgtgcttagcatggttccatacgttggtagtaattatcagttatttggtttttgtattaaagataaatggattccttcagtagattaagatgtaggaaaagtgttataacaatttaacaaaatatacaatattttctttatatgttcatacatattagtcagttttagagcaatattctccaccatatatgaccttctgacttgaagccaagaacactagcagaatgtctgcattgaaaacataagtaaacattctttcatctcagggaaagkatctgaatgcctatgcacttttccattatttatttattggtgtcatcagctaaactgttctcagcattaaattgatttatatggttgaaatagtaatgcc

SEQ ID NO: 214167 - DNA, 458 bp, Homo sapiens
tggagcaaaatgggatgtgctcaagatttcatgacaaacagagcagggcttggatcccagctggtgaggggcagacagcaggggagagcagctggacacaaggggattcacttgtgaaatgtgagagtcctcctttcctcttaccttccatcctgccctgcaggtctcccctgcactgccttgaagcaaaccattcttgctctgcctttgcccatgtgagctggtaagggtggcagacagggtggttgccaaccctcaatatctgttcccacccctgcttccctccttttcagtggaacccctattttgttggatatccaccttccccaacttgcccatgtgccttggaggaagtggacacaaccctgagtggtgcatcctgatgagtctaaactaatcccatccccattgtcaaygactgggaatcaactctggacagtaatctgggaggaacatct

SEQ ID NO: 214168 - DNA, 458 bp, Homo sapiens
tggagcaaaatgggatgtgctcaagatttcatgacaaacagagcagggcttggatcccagctggtgaggggcagacagcaggggagagcagctggacacaaggggattcacttgtgaaatgtgagagtcctcctttcctcttaccttccatcctgccctgcaggtctcccctgcactgccttgaagcaaaccattcttgctctgcctttgcccatgtgagctggtaagggtggcagacagggtggttgccaaccctcaatatctgttcccacccctgcttccctccttttcagtggaacccctattttgttggatatccaccttccccaacttgcccatgtgccttggaggaagtggacacaaccctgagtggtgcatcctgatgagtctaaactaatcccatccccattgtcaatgaytgggaatcaactctggacagtaatctgggaggaacatct

SEQ ID NO: 214169 - DNA, 619 bp, Homo sapiens
tcttaaacgacaagcattttgtgtaatcaagctttacatatcttattccatctgtctttaaccatttcccttttgtgtacatggctgtccctttcttatttatatatttttaaataatcctattttttgaaataaaattcaaatatatattgaaatgcacaacataagctgtacagttttgatgaatagatacatctgtgtaacttacactcctgtcaagaaagccctttcatgtcctctcccagtcaattctcacccccaatccacaggcaaaccaccctgttttgattttttcacmatttttttttatgttttagaactttatatacatgggttaatatagtatagcaaattttgtgtctggcttcttttgctcagtacaatatctgtgatatttatccatgttgttgcatgtatccataacatacttttttattgttgattggtgttttcattttatgaatacatcacaatttttaaacccattctcatactgatgtacatttgggttatttctggttttggttattaggaataaatttgccatgaacaagttattgaatgagtattttattttatctctctttgatatatacctggaactgaaattatgcagtca

SEQ ID NO: 214170 - DNA, 428 bp, Homo sapiens
cttttttttctaatttctcttgtggcttctttatacccattggtttagagtgttgtcttatttccacaaatttgcagatttttcagttttatttctgttattgattgaagtttcattccattgtgatcagaaaatacactttttatgattttaatttttttgattttaatatttttaagtttgttaatacttcttttgtggcctaacatatgatctatcctggagaatacttcatgtatacttgagaagagtatattctgctgttgttgagtggaaatgttccatatatrtctgttaggtcttgttgatttatagtatttttcaagtctgctatttccttatttatcttctgtctagatgttccatctattgttgaaagtagaataccaaagtctacagctattgtagaactatctatttctctcttc

SEQ ID NO: 214171 - DNA, 446 bp, Homo sapiens
accacaaacctcagcatcacataatatactcatgtaacaaacctgcatatgtaccctggatcctaaaataaaagaaaaaataaataaaaatkaaaaaaattaataaaatcctgattttctttctccctagtgatgaagataatcaaagttcagcccatttccttcaggtgctcctctatgtaagctgagaaagccttccctggctcgggtttattttcctgcttctagatactctttagcaatgcatcatcttcctaaagtgcctggctcagtccacggagtaaaatgtactaaacgagtaggcacatcctgtccttcagatgttccagcttgaaactcaaatttctgcacttgcacatgcttgtttggctaaatgtgtcttgtagcttaagccactgcacacagctgatcttttattttgaacattaatgtataaatctgaaggg

SEQ ID NO: 214172 - DNA, 428 bp, Homo sapiens
tacagattccatacatgttttattaattgtatacctgagtactttatttggagttactgtaaaaagaaattgtgtttttagttttggtttctacatattcatagrtgtgtatgttagtaataaaatacaattgctctttgtgtattgatcttaaatcttgcaaccttgttgaactcactagctaattctagaagttttcttttgcagtttctttttttactttctatgtgtttactgatgtcatctgcaaatagaattgttttatttctatgtttccaatctgtatgcctgatatgcctttttcttgcttcattacagtaggtaggaattccagttctgttcagtaagaatggtgagtagaagagcgaagatggctggctagacacagccaggaaaagcttctcccactgagagaccaaaccatcatg

SEQ ID NO: 214173 - DNA, 467 bp, Homo sapiens
gtctcattctgttgccatggctggagtgcagtggcgtgatctcgctcattgcaacctctgcctcctgggctggagcgatcctcccacctcagcctcccaggtagctgggactgactacaggtgcacaccaccatgcccagctaatttttgtattttttgtatagatggggttgcccgggctggtctcaaactcctgggctcaagtgatccacccaccttgscctcccaaagtgctgggattacaggtatgaaccactgagcctggccaacgctcacttttactgcagcattttgtaccctgtttttaatctgttgtgtatttagaacacgagtttctcaaggagagaagcagtcttatttatactggtgttcccagtataatcttagtgcctgccacataagaagtatttttaaattcttcttaaattcttcttgagcacttgattaaacaaacgaatgaataaatg

SEQ ID NO: 214174 - DNA, 484 bp, Homo sapiens
  misc_feature (1)...(484): n = A,T,C or G
atttgtttctaggctgcagaaagtactcagcaaatgctagccattactactactattattattttactaacttttcttggcccccttttttctcatctatagtaataagctggcatacatttcaaatgagctggcatacagctctaacaagcttttagatgagattactcaagaagctgcacgtgatatctaaagaggacctaatctccaagtccagatcacatgaggtcaccttgtaatatttaagatgaagccaaaacacaacctaaatacatacaaccataagtgaaatttaatggtgtgcattaggaggaattatagtgccactgggcctattactacaggaggaaaatggttaacaaagagaattctcataacacctgagtttctaagactctctaaaagcaaatgagtctgyactccaactgtagactcagttgctatgtaaactgttcttcataaggcnnnnnnnnnnnnnnnnnnn

SEQ ID NO: 214175 - DNA, 411 bp, Homo sapiens
taaataaaatgtcacccagctggccagtgggagaagcagagagcaagcctggtttaatgccttcatttgtaactcttttcacttcttcaagctgtcaatccccctccttccccaccacaagttatataaactgataccattacctgatacaagtacaattgaagttatattgttttcttaacataaacactgaaagaatccacgtatttgtttcatwtgaggctaagacccctctgaggagtgggagagaaaggctctcacaggcaagcttcttggcagtgttgcacatgatcttatgcatctgcctcttccacaacctggtctctgaggatccttccatccaacagtggcttaaccactcactcctttggctccctctattctgaggcagcctctaccatagaatcccta

SEQ ID NO: 214176 - DNA, 610 bp, Homo sapiens
gtcagtggttgtggaaaacagaatgggtggtgagctataaaaatgggagcttggttttggcaaattgtgaagcaggtaaagattgcctgcaatattccctcccttttcctctccctacacacctccacttctcccctctaccaaaagcctattcttcacatggctatctgggtctctgtgcgctcaagtcacaatggaaactaaagttccattgctaaagtactggctgatgcttgagagatgtgtggagggtrcctgtgcgttaggtctatgcagagatgcctgtgggccccttacatagataaataggaggggaaatagctttggcccagttagggtggggttggatgtaggtggagtttcttgctgggaatagggaaggaggacttagaaactcaaatgctaaaattttagacctatgcaagctagtaaaagagctgtctttgaaccctttaaagcacaagatgtagagtattgcctgaaagcacagaatagattactacaactaggaggaaagaatcacttggttgggacaatcaatggccctggtacccagccccagggcactacatttaattttcagaattaaaccaaacattttcagagattc

SEQ ID NO: 214177 - DNA, 581 bp, Homo sapiens
gtgagctataaaaatgggagcttggttttggcaaattgtgaagcaggtaaagattgcctgcaatattccctcccttttcctctccctacacacctccacttctcccctctaccaaaagcctattcttcacatggctatctgggtctctgtgcgctcaagtcacaatggaaactaaagttccattgctaaagtactggctgatgcttgagagatgtgtggagggtgcctgtgsgttaggtctatgcagagatgcctgtgggccccttacatagataaataggaggggaaatagctttggcccagttagggtggggttggatgtaggtggagtttcttgctgggaatagggaaggaggacttagaaactcaaatgctaaaattttagacctatgcaagctagtaaaagagctgtctttgaaccctttaaagcacaagatgtagagtattgcctgaaagcacagaatagattactacaactaggaggaaagaatcacttggttgggacaatcaatggccctggtacccagccccagggcactacatttaattttcagaattaaaccaaacattttcagagattc

SEQ ID NO: 214178 - DNA, 581 bp, Homo sapiens
gtgagctataaaaatgggagcttggttttggcaaattgtgaagcaggtaaagattgcctgcaatattccctcccttttcctctccctacacacctccacttctcccctctaccaaaagcctattcttcacatggctatctgggtctctgtgcgctcaagtcacaatggaaactaaagttccattgctaaagtactggctgatgcttgagagatgtgtggagggtgcctgtgcsttaggtctatgcagagatgcctgtgggccccttacatagataaataggaggggaaatagctttggcccagttagggtggggttggatgtaggtggagtttcttgctgggaatagggaaggaggacttagaaactcaaatgctaaaattttagacctatgcaagctagtaaaagagctgtctttgaaccctttaaagcacaagatgtagagtattgcctgaaagcacagaatagattactacaactaggaggaaagaatcacttggttgggacaatcaatggccctggtacccagccccagggcactacatttaattttcagaattaaaccaaacattttcagagattc

SEQ ID NO: 214179 - DNA, 605 bp, Homo sapiens
aagaccaagaaatggaatttcttatttagcagccatctaaaattttctaggaagaaatttataagttcaactgaattgttgtaaatgagtcttggaaatcaactaaaatgtcattgatttttcttactggttctagctgtgggactaatagagagattgctgaccatctttcatgtgtttctttcaaatacactttcctgaaatgttcttttcagcaagactttaattgcctctagattgaaattagacacagtagtcaagaacttttaaaataaagatacaatgagaggagtcctgaaaaaaataaacatttaatatattgaattttaaaaataacctgtgaaagatttgccttactaatgttatgaatggagtgcataaagaatactgctggagacagtattcttctcatttggagacacttctcatttggaaaagatacggttataccattgatattccaagtttttgagtctcactccataccttctatgtctttcccttaggaaggtcttggaagagaaacagtagtgctattgtttaggcttragatgattaagaggcaaactagtagccatctgaggatccttgcagcatttgctcac

SEQ ID NO: 214180 - DNA, 581 bp, Homo sapiens
aagctttgttatccctctacagactggctcagtccagctaacccagctttcagctaaattattgaaagaaagaagatgaatctgtaatgccatctactttcattgttcagagtggggagaggaattaggaattagaaaaactrctaaagacaaaagtaatctttatttatgattttataaagattttctggtaccttacagttgttaataaacttgaattttaataataatgaactgaaattttagtaattaataatcactgtgaggaaataatttaaaaaaaattcatttaatgtttgaaaggcaaacattaagttagagaagttagagacaatatattgctctggagagatttatggatttatctcctgtggcacctgtgattatattctaggatggtgaaggaaaagtagaaatgattctcctccccagagaagatttgtttacattccagagtaaaggtttttctccctctctggagggaagaatgagcagatatgtcagcagtctatagaagctctgagcttcataatttgagggttcctatcctgtgtatatgtgtgcatgtggtgcatgtgcaa

SEQ ID NO: 214181 - DNA, 577 bp, Homo sapiens
ggtaaaccaaatagcacaaagtttcatctcttctgcccaagtatcgtcactttgaatcaactgcctttgtaaactgtatagtgtttgccctggtgtatacatttgatttttcagaaactgaaaaaactaataataaaaattttgactccatgaattccttcttattcagaaayggtgtaaaatttgttttggtatgaatttgggcatggtcttatcatctctgatgatttacagtaacaccattttctgtagaattgttatttaaataaaggttacttgtgctgggcatagtaaatagcccacaaccatagtcccagctacttgggcagctgaggcaggagaatcacttgagcccaggagttctaggctgtagtacgctatgccaatcgggagtctacactaagttcagcatcaatactgtgatctctcaagagcaggggaccactatgttgcctaagaaggggtcaactggcccaagttggaaatggagcaggtcaaagcctgcatgctgatgagtagtgggattgtacctgtaaaaaaaacactgtactctagcatgggcaacatagcaagaccc

SEQ ID NO: 214182 - DNA, 509 bp, Homo sapiens
aatcacatatgtagttgaacctaatcaactcaattactatcatcttactatatgtctgtgyttcttataaaatcagcttaggcccttttgaagaaaaagcaacatttaattgttattcacaataatacgttgttccaaaacctgggatgaaggtaatgttgcatttctttgcttttctaaatctaatcaaatctaactccaattctctgcctaccaaaattggcaagagatccagttccagcatcagtacttttttgggacttcttcccactctcttgggcacatgaggtcctagaaaatataggagcaggcctggacctcaggttttgaaggttgatgctgccattgtgctttgcagaggccactgagggctggaaaaagatggctgctctgtggtggcttcagtcccttatggcaacctcagtcactagagactctcaccaaggcagagcagttggtatcacaggtctcacaggctcctaccccttctacatcttgctgccttagac

SEQ ID NO: 214183 - DNA, 660 bp, Homo sapiens
catggatagaaaagcaagaagacttgacattgagccctggggccttccaacatgaagaggagctggggaatagtggtgactagggaagtaggaggaaacacaaaagtgtggttctgggaaaacagtgattcaagaaggaggaagtagtttygtcaaaagcttccagtggatgaggtactgaaaattggccagtgaatttagtagcatggcggttactggctaactgaataaaagccacttgggcaaggtagccgggcaaacttctaattggagatactgaagaaaaacaatgtattggctgagtaaggatgctcatgcctataatcccagcactttgggaagctgaggccagagaatgaataatactaatttttaaaaaaatcttagctgggtctggtggtgcacacctgttttcccagctattcaggaggctgaggagggaggattgcttaagcccaggagttcgggctggagtgagcataattgcaccactgcactccagcttgggtgacaccgcgagaccccatttctaaaaaaaataaaacaaaatgatcttctgactgaaaaatgtacgcaaaaaaaaaagtttgaatgtaggagaacaatgtagaaagctaaaataggttctgctcagtgaagaaccagctctgataaatttgc

SEQ ID NO: 214184 - DNA, 660 bp, Homo sapiens
catggatagaaaagcaagaagacttgacattgagccctggggccttccaacatgaagaggagctggggaatagtggtgactagggaagtaggaggaaacacaaaagtgtggttctgggaaaacagtgattcaagaaggaggaagtagtttcgtcaaaagcttccagtggatgaggtactgaaaattggccagtgaatttagtagcatggcggttactggctaactgaataaaagccacttgggcaaggtagccgggcaaacttctaattggagatactgaagaaaaacaatgtattggctgagtaaggatgctcatgcctataatcccagcactttgggaagctgaggccagagaatgaataatactaatttttaaaaaaatcttagctgggtctggtggtgcacacctgttttcccagctattcaggaggctgaggagggaggattgcttaagcccaggagttcgggctggagtgagcataattgcaccactgcactccagcttgggtgacacmgcgagaccccatttctaaaaaaaataaaacaaaatgatcttctgactgaaaaatgtacgcaaaaaaaaaagtttgaatgtaggagaacaatgtagaaagctaaaataggttctgctcagtgaagaaccagctctgataaatttgc

SEQ ID NO: 214185 - DNA, 402 bp, Homo sapiens
cttctttacttccattctggtatgtttcctctgaataagcaacaaatccgtggtaattattaccttgagtgacttccagatgttaaccatgccatgtgaccraactcaactattctctaacaagcatggcaagagagggaaattgttagtatatatgatgatttcaataaccatgaaaaataccttttttgtctatcacatccatctgcatgatgtaaaaaccctacataaataggatacctttttgagaagaagaggaagacttaaatctgtgtaacataggtgaactttccctttaaaaaaaaaaagaatagctaaattaatgaaagctgaatgtaatttattatctaatcctttaaatgtttttagattttaaattatatgcctacgctctatagaaag

SEQ ID NO: 214186 - DNA, 402 bp, Homo sapiens
cttctttacttccattctggtatgtttcctctgaataagcaacaaatccgtggtaattattaccttgagtgacttccagatgttaaccatgccatgtgaccaaactcaactattctctaacaagcatggcaagagagggaaattgttagtatatatgatgatttcaataaccatgaaaaataccttttttgtctatcacatccatctgcatgatgtaaaaaccctacataaataggatacytttttgagaagaagaggaagacttaaatctgtgtaacataggtgaactttccctttaaaaaaaaaaagaatagctaaattaatgaaagctgaatgtaatttattatctaatcctttaaatgtttttagattttaaattatatgcctacgctctatagaaag

SEQ ID NO: 214187 - DNA, 567 bp, Homo sapiens
gtggtcaacagagactactaaaaccagcaagaataaaaagacacaatagatacagaagaacagagataaaaatgacagaaaatttattgtycgaaataattcaagtaagaagataggaaaacaacatgtttaaaacactaagagaaaacatgtttatctggaattctacactcagtgaaaacacctttcgaaaacaaatgtaaaatacagacttcatcgacacaaaagctgaaatttatcaccagatttgcactccaagaaatattaaagaatgtacttcagtcacaatgaaaataccagaaaaaaaatacaggtcttcacaaaaaattgaggagcaccagaaatggtatcttcatgggtagataggtaagattttttctcattatataattcattttaaagaaaaattgcctgggtcaggtgcagtggctcaggcctgtaaatccagcactttgggaggccaaggtgggtagatcacttgaggtcaggagtttgagaccagcctggccagcatggtgaaaacccatctctattaagaatacaaaaactagctggggatagtggcag

SEQ ID NO: 214188 - DNA, 543 bp, Homo sapiens
atggaatgccagttgatgaactgacctcaaaccatcctgaaatgtgctaataagtggtgggcatttcaagagttggttggccatggtgttcctctgtcagatactttttcttatgatggctataaaaattttgctaaaatgactgatgaaacagaagtactggagctacaaatggtagtgaagaatacatggggtcatagaggtaaagctgttttcttggctcgagataagcaccatttatttggctgatctaagccatcttattcatcatgaagctctataccaattccagaagcatgtagaagagtttcagggacaggatatatgttccactgtcatgggaggctgtatggttggcaccatgttacattgttcaayagatggaaggatgcaaagcaactgctcactaggtggtgtggggataatgggctcactgagtgaacaaaggaagcagctagctgtccaggtgtctaatatcctggggatggatgtgtgtggcactcatctcttgatgaaagatgatggctccttctctgtgaggcc

SEQ ID NO: 214189 - DNA, 569 bp, Homo sapiens
aagcttatttaggtctcttctgcctggttggattagtaaaaattcaaaacagaggtaaacgttatttttctaaagtaaggttgagaatttaaattcagaggagggcaagcagtatgtattgaagatctggcagtcttctggttaatttttttaatgtggatagctttaaagtatttttttaacttttactattagaattaactttctataatattaactgtgttttgtcaagtgccctcgttgtgctatataaatacagcatggagaaatacgagtatacaacttaagatttttcagcaatatttataccaatacattttttgataaacatagactatagaattatatatatgtaaatctatagatagatgagaaaatacaaatcttctttacagatattaactcatttacatatattaatataagtgggtcctttacatatattaactcatttattcctttaaaaaagcctgtaaggtaaattaaattatcgtcctcattatgtaaggtgagaatacaaagacctcargatttgaggaacttgcccaagatctcagagccagttcctt

SEQ ID NO: 214190 - DNA, 262 bp, Homo sapiens
ctagaattaataagtgaatttagcragtttgctgcatattagaccaataaaaacattatatttgtatatacttgcaacaaataaatagaaaattgaattttaaaaatacatttacaggagcataaagaacagcagacatttctgaattaatataatgaaagatgtacaagatctctacattcaaaattaaaacaattaaaaaatcaaaaacattattgagagaaattaaagtagttctaaataaatggagtatatataccat

SEQ ID NO: 214191 - DNA, 576 bp, Homo sapiens
ggttctcagtgtgggggaaggaaagtgtgagagtaatgggaatgttctcaaaatagaaactttgttctcagtagtcaggggcacaggtaaattaagaagggagctaagacccagaactacctgtgttactgagatgggacacacaattcaaatgatcaagcatgtattaaatgcctgctatatgccaggtataacgctagtctccagtggaagaattwcctctgaatatggaagagtatctagcagggcaagaagtaatggaataaggcaaattccagtcactagatctggtgaacaaacacaggaagggtcacaaagtaggtcattcttctgagagatcaccttcaaacactgattaaagtttcatggcacacctaaaaccaagtattctctttccctcaacaaggtaggattttttttcaaagtaaatcctaaaaataaaagcgaaaaaagggaaagttctttgaaaaaatatgcaacaaaaagtacttttcagcgtgaatatttcagtacaactcagcatgcatttaaaatgaaaggtgaattattcgctatcaagaaacttcaaagctcttc

SEQ ID NO: 214192 - DNA, 472 bp, Homo sapiens
gatttttatctaaaacatgaccagtttgaagatttgcattttactacttagtaactattacattttaacttgggatcatttctgaagaaatctttttaccaagctcctacagagtcattgctaagatattgctaaggagaagtagctgagatgggcctaatttaaaatttataatttattaattatgaccagctgcagggaaaggaaagcaactagcagatggtgggatagagaacagaatttttagaaagtaaaaaaaggataatatatatcttccagattgagggatgaactgggcaattgcccctgagctgggagaaagattataacaaaatcatgagctgttgctggaaaaaaaagaggaaagttccaacttggagacttttaagyaaccaaatagttggagccacaatagaactgcgttaaattatttcatccaatgaagaaactaaaagatgtggggcattacgtc

SEQ ID NO: 214193 - DNA, 468 bp, Homo sapiens
aacatgaccagtttgaagatttgcattttactacttagtaactattacattttaacttgggatcatttctgaagaaatctttttaccaagctcctacagagtcattgctaagatattgctaaggagaagtagctgagatgggcctaatttaaaatttataatttattaattatgaccagctgcagggaaaggaaagcaactagcagatggtgggatagagaacagaatttttagaaagtaaaaaaaggataatatatatcttccagattgagggatgaactgggcaattgcccctgagctgggagaaagattataacaaaatcatgagctgttgctggaaaaaaaagaggaaagttccaacttggagacttttaagcaaccaaatagttggagccwcaatagaactgcgttaaattatttcatccaatgaagaaactaaaagatgtggggcattacgtccattgaata

SEQ ID NO: 214194 - DNA, 455 bp, Homo sapiens
tgaagatttgcattttactacttagtaactattacattttaacttgggatcatttctgaagaaatctttttaccaagctcctacagagtcattgctaagatattgctaaggagaagtagctgagatgggcctaatttaaaatttataatttattaattatgaccagctgcagggaaaggaaagcaactagcagatggtgggatagagaacagaatttttagaaagtaaaaaaaggataatatatatcttccagattgagggatgaactgggcaattgcccctgagctgggagaaagattataacaaaatcatgagctgttgctggaaaaaaaagaggaaagttccaacttggagacttttaagcaaccaaatagttggagccacaatagaactgcrttaaattatttcatccaatgaagaaactaaaagatgtggggcattacgtccattgaata

SEQ ID NO: 214195 - DNA, 464 bp, Homo sapiens
aaggaaagacttgaaacgcatgctacatggccctgctggccagcattttaaacaaactgcaaagaaacacatcacatctctcagcagtgcgctagttcagcaaggaggactttctgaatggttgcaagaaaaagccataccttataggaaagaaaaaaggagagggaatttataggcttggtttccttcttcctcccacttctcattgaccaaattccatcctgctgggctgcaagtctccacagaccaggttgtatcatcgagctacctgatttatcatttgatccatgtctggaggtttggggtgactcagcatggacagagataaacatggtggggcaagggaaaacrtaagagccacagaggcccaaggctgaatttagatttcagccacttgtcaagattttaatttgggcaagctagggagttcgtttaggcttctagtacgtgatacatatagattg

SEQ ID NO: 214196 - DNA, 464 bp, Homo sapiens
aaggaaagacttgaaacgcatgctacatggccctgctggccagcattttaaacaaactgcaaagaaacacatcacatctctcagcagtgcgctagttcagcaaggaggactttctgaatggttgcaagaaaaagccataccttataggaaagaaaaaaggagagggaatttataggcttggtttccttcttcctcccacttctcattgaccaaattccatcctgctgggctgcaagtctccacagaccaggttgtatcatcgagctacctgatttatcatttgatccatgtctggaggtttggggtgactcagcatggacagagataaacatggtggggcaagggaaaacataagagccacagaggcccaaggctgaatttagatttcagccacttgtcaagattttaatttgggcaagctarggagttcgtttaggcttctagtacgtgatacatatagattg

SEQ ID NO: 214197 - DNA, 494 bp, Homo sapiens
cttcagggaatattacaacaggtcctgctgtggatgcaagtgcatttaaagagaatatatacccaggtacattgttcaaattccacttggaaaataatattatatcctcgggaattcaatgctcayagatagcaccgatggtgtagcaactgaacatttttcttctgctgtaaacagagacaagttgagtagccatctgaattatgtgagtattctggtgttatcatagttgtttcaactataatttaaggtagtattttataaacctgcctggccattagaactacctggtaaacttttcagacaaatttgcttctgagtgcccccacacctgccgaaacatcatctatttgttataagtttcctcaggtggttggaagaatcataattagggatgtttcagcttactctgtatttcctgggatttgggttatgaggccaaacaagtagattatgaggttgggggtgtagaacaacaacataggtccttgctt

SEQ ID NO: 214198 - DNA, 622 bp, Homo sapiens
atggtaaatgaaagaaagagtattctttaggcaaaatgataacaatctagtaaaaaaaagaagagctacaacaaagaataaatgaaattaaaatagtaaatatgtgggtatacccaaatgaataatgactgtstaaagttttttaatgtcttgagaggtttaaaatataaagagaattaaaataacatggcaataggattgaagacagaaagagattacatggggttaaagcagtctaaacttcttgactggctaggagagagtataaacatcaatttagaagagaagtgtagatgcattgcttttttaagaaatcaaaaaatgaaaacaatccacatttgcattagtactaaagtagattaaattatggtattccctacaatgtaatactattagcaatgaaagtaagttaactgcagcctcttgcaacaaacttcatgttaagagaaagaaaccagactcaaagaatacaagcctatgtagagaaataggaacgcttttacactgttggtgggagtgtaaataaattcaaccattgtggaaaacagaacagtgtggtgattcctcaaggatctagaaccagaaataccatttgacacagcagtttcattactgggtatat

SEQ ID NO: 214199 - DNA, 504 bp, Homo sapiens
tttttggcaaaatgagccaaaaccattccagaaacttggttgtttatcccctcttaaaaatcattaaagaaagagatttcacaatcatgtatgatgtaatgcattccagcaactcataattccaagtttggatccctatttataaagtaggtttgaggttaagaaaatgttcttcctttttcataacattaggtatccaaataacttgtaatgtgttgtcagaaacaaactatttctggcttggagcatgatcatttttgtaagaaccaccagaaagtaccaaatttacatctagtatttaaaactgaaataaaatatcattcaaccacatcacttaaatttattattgcttttttggttctgcaraaaaaaaagtaaatggaatagatatgagaataactttctactttttattttgctttgtgttttcataagaatatcaatcaattaacttttgcttacaatcctgaaactaaaataagttttagtttagtatttcctggt

SEQ ID NO: 214200 - DNA, 650 bp, Homo sapiens
gcatcaattggaatcttgttagaaaagcaaattcttgagccctatccaagatctgccaaatcagaaactagggatggggagacctaactatttgtgttctatgaagtctctaaaatgattctgatgaagccaaaattaaagaaacattgttctaagtttacagtatacatcattagcttatcacagcctattttattttttatgtttatgtttatgtttattttttagagacagagtattgctctgttgcccaggccagagtgcagtgacatgatctagactcactgcaaccttgaattcctgggctcaagagctcttcccacctcagtctcctgagtagctggaactacagttgcataccaccatgcttagctaacttttaaaattttttgtaggaatgggatctcactctgttggccaggctggtactttgaataatattgtaacacttcatgtacttccatttcttccatcccttttgctatttttgcattcatcttacatatacatatgttataattctcattattagtattttttgttttaaacatctarcatatattaaaaatattagaaattagacaaaataaatattttatatttactgacagattttactattttggtgtccttctttcctttggttgatt

SEQ ID NO: 214201 - DNA, 490 bp, Homo sapiens
ccaaagtcatgctgccactatgaaattgagatccaaacctacagcttaactcaaagttcatagattttccaatatactgtgttggtagagattaccgccaggtgtgtgtgattgttaatgtgtgtatatgtatctggtattagcatcaacgaaaaatcaacgaaataagtacatttaaactgatctttctggttattcaaatgactggtgtatcttaaatcaaggtttgaaggccaacaccaaaagtgtgttgagaattttaagtttgtgtcctttgataataatgtagcttttctagaaaagaaaccctgctctcctgcccgtcaaacaactacaggtcaccggggtgtgcaccttgtaaaacttcattaaggtwcatacttacttgatgcctaaaaatattttgagtgtagacacagacattaagtaaaaaagaagaccaggagctatagatattaaaatttttattaaaaacatttacaagtacaca

SEQ ID NO: 214202 - DNA, 531 bp, Homo sapiens
cagggaacatatttaacttggccaagccatggataaaacaagccttgcgcatttgcagagaaatgttaaacagaaataactggaactggaagcttgtctctcctatggtctgaaaacaatgtatatacagcaatcagtccctaaatctgtttacttttcaatttctccatagacagaaccacataaaaagttcaaaataataaatcaggtaggagagcccacaccataaaaayctcattctgattatttcttattttgtgagaaaccaagacaaaccattcaactttctgtgtcctgcctttcttgtcaagaagtggttaacatctatctcgtagggataatgcataaaatgacagattgtacacagcatcaacaaggtcactgctgcataagcaagtattgcatgacaaagtaagatttggaaatgcttgaaaattttgcagtatattttattattttaaagaatgctaaggaaaaatttatttccaagattatctgtttttggtgggcttcagtacatgctttttaaac

SEQ ID NO: 214203 - DNA, 659 bp, Homo sapiens
agcaggcctgttggtaaatactttttattacctgagagatgcattgtagtaagagctttgagtaaataaaagaaacattattcactcttatattaatatttccttgacccgccagaataactgacaagtgagtactcagtaaatgttggcttgttagttggttggttatgttgttaggaaagaatgcagatataaacatgaatgcaaaagtaaatttaaatattcttatacttaggtgctaaacaacgagttggtaagtaaaatctgtagggaaccagaaaaatgtagattaaatgtggtctagggctgtaagagaagctcyacagaaaagacagaatttgaactgaagcttagaagtcaggcaaatgaagaaagatggaggtaatttaagtgaaagtcacagtgttgccaaaaatctggaaaggcaatgattaactctctttggaaaggatgaatccaatcagtctttaatcaattaaataaaagcaaagtcaatccaacaaaatgaaacaaaagacaaagtcaatcaaacaaaagcaaagattttgttctgggtagtagcatagaaaagccatttagggccagcttggtgaagattatgaatgcctcagcaaaatattagagtaaccaagggaatttagggaatttttgaagcattt

SEQ ID NO: 214204 - DNA, 258 bp, Homo sapiens
acctgcattaattagcattaaacaccttaagtgttccttttctcagaggacccaggactcacacactttatactcaagragcagcaatgaatacattacaagatcaggaaaggatatgtattagcataagaaatacaacgaaggagataatgtgaaatcatactttaaaaaaaaaggcagagagagagaaagtagtgaacaaagttggtaagggactgagttaagatgagaacccagttcttctccttctttctctga

SEQ ID NO: 214205 - DNA, 561 bp, Homo sapiens
attttgtcaagaagatactgacatggttctatgcaggaagattatttagagcccaaatctaattctaatcctggggttttatattgctatcttcatcatagagcaataaacattataatagctattattattaactacacttaagttcaagatttctacaaattttcttggtaaccctagcaagaaacttccaaaaatgattccaaaactgctggatgtttaccctgtgttacactgtactaggttcattaatgtatcattctcaataattctttagggtgttctggtcccaggatttcaggtgaataaactgagattcagggatgcagagcaaatttccccaggtcacattacagtcagttgatagagtcatktctcaaaaccttttttttttcttcttctgattcgactgctcttcccatggttgccatgactatgactttaaagatcttcagaatttgactcctgtgataatgaattggtaataaattaaggattataaggtactttcaggatttaaagggttcaggaataacattgtcgaagcataaagttttgtgt

SEQ ID NO: 214206 - DNA, 511 bp, Homo sapiens
gcacctttcctcattaggcattcagacacacaccagacctcatctctgggacatttcagaatactgtggacaaacagaagatcctgcaagcttccagagacgggaacaggtcactttccaaaagctaggaagtagaatgggcttcatttctttttcttttcctgttttttgaaacagagtctcgctctgtcatccaggctggagtacagaggtgcgatctcagctccctgcaacctccacctcccgggttcaagtgattctcatgcctcagcttcccagagtagctgggattataggtgtgcatcaccacgcccagctaatttttgtatttttagtagagatggggtatcgccatgttgcccagactggtcttgaactcctcacctcaagtgatccaccrgccctgacctcccaaactactgggattacaggctaccacacccagcccagaatgggcttgatatcctatagcaaccctggaaactaaaagataggagagcaatgactttgg

SEQ ID NO: 214207 - DNA, 474 bp, Homo sapiens
aaagtctataaccccccactcttgcgtgctgattattggagtgttctcggtctgtggggcgtacttttgtttcaataaatctgtgcttttgttgcttcattctttcattgctttgtttttgcgttttgtctaattttttgttcaaaatgccaagaacctggacaactcgtagtcaagactctccactagtaacacaggggtttttccatttacagattttaattctatatttctcatcttgagaatcttaggttctaattttctggttttagcaaatgacctcagagwaagagcattctaattctggcttacttctctgaacgaatgttcccttcatttttgatgtggtggtttcttggtgtcttaatatttctttaatgctttcatcaagacacgtcttactcatattttttagtttctttcagtaggaagattgttccaaatagcctgtcaaccatcctggaaattagaagt

SEQ ID NO: 214208 - DNA, 426 bp, Homo sapiens
cacattttaaattgctttttttctattttagacagtgctgtatccgcatcccctctctctctatctctctttttttttctttttttttttttggagacagggtctcactctgttgcccagattggagtgcagtggctctatctcagctcactgcaaccttcacctcccgggttcaaacaattctcctgcctcagcctcccgagtagctgggattgattacagctgcctgccatcacgcctagctaatttttgtatttttagtagrgacagggtttcaccatgttggccaggctggtctcaaactcctgccctcaggtgatccacccacctcagcctcccaaagtgctgggattacaggcctgagccaccgcacctggctgttataatctctttttatatgcacctatttgcttttgtacatgggta

SEQ ID NO: 214209 - DNA, 602 bp, Homo sapiens
ttctaaagctttctgaattattgctttgttctgtaatggtagcagtttctggtctattttaggattgttggcagttgttgtcatctctctagagctggctggacagtttggcatgccggtactgtatcggagaaatggtatgttgagaggacaagtttcttctgttgttgctattgattattttgtgtttggacagtcaaagaaatattttatacaaaagcaaattaccaaaaaaagaggaattcagaaaccctttatgttcaggattctgtttacccgttggaagctcattcacagataaaatggaaatgcgctcagctcagctggttacattaagagggtgtttccgtgttcaacaacttttatgatgggcacagsctttcttatttttaagcctcttgctgttgccatctccagatattttttcccagctctttgcttattttcagagctgtttagcagctatttactaccttaggtcaacagcctataaaatatgttcttagttttaaattatagatcatattgcttttacattttctcaaaactacttgatttccttaatgaaaattatttcaattgttatgtgaatagtttattct

SEQ ID NO: 214210 - DNA, 519 bp, Homo sapiens
atcttttttcaaggaatgagatcatgtcctttgcaggaacatggatggtactggaagccattatcctcagcaaactaacacaggaacagaaaaccaaacacagcatgctttcactcataaatgggagctgaacaatgagaacacatggacacagagaagagaacaacacacatggggcctgtcatggggtgtcgggagagggagagcatcagaataaatgtctaatgcacacagggcttaatacctaggtgaagggttgataggtgcagcaaagcaccatggcacacgtttacctgtgtaacaaacctgcacatcctgcacatgtattccggaacttaaaataaaataaaataaaataaaataatcttttttttcagggcctycagtgacatttagtgctttacttattatacctttgaagtgactgcattgagtcatgcactcagaaatcgaatcatcttagatagtatatggctttataaagaaaatgaaaaatatcattttttctaggccagttag

SEQ ID NO: 214211 - DNA, 544 bp, Homo sapiens
ttaacatttcagaaacttgaggttcaagtagattaatgagcttgcccgagtttgctcagcatgcaagttgagaattgggattagattctagaaaattcaactcaagaaccctttttcttcatcattattaattcctcyaatcctttcaagagtcattcttacgacttcagttaatggcagattcaccactgttggtgcaaaagggtcctttctaagggtcctatttggggctctctgttgggacctgtttaatactggcctttctgggtgacaagatctagtcttgctatcatgttctgggaatggatatagggtcttcctctggattttttattcagcccatacttggttgtaaaataagtattacacgtaatggcctcaaaggagaagataagccacagcagaataacttgagggactgacgttgaggaggcagaaggtggttttgcctggctgtagactgcaggctgttggtttaggaagcatttctggtgtaactatgtatgcacttcaaggttagttgttatatttattttgctactgc

SEQ ID NO: 214212 - DNA, 540 bp, Homo sapiens
aaggggaggccttcaggaaatggttggtgtgttaatcagttattgccacaataatgttacataaaaaaccacctcaaaattcagaggcktgaaacagggttgactgtgggttggtggatcctggatgggcttggctgaggtggtaggttgagtatttgccacccaaaataggtattcctgtgacatggggatataaccttaaatggcaaacatacagtatttaaggacctagtgatagaaagattatcctggattatctaagttggtcctaaatgtatcataagtgtccttatgagagggaggcagaaggagattgtgcacggaaggcagatgtgtgatgtacaagacagagatatttgaggacaccatgctgctggctttaaagatggaagaaggggccatgagccaaagaaggaagctctacaagctgaaaatggcaaggaaacagattctcccctagagtctctggaaggagcatggccctacccacaccttggtttcagttcagtggaacttctttttgggcctccaaaactgtaa

SEQ ID NO: 214213 - DNA, 607 bp, Homo sapiens
tagtaattttatttttcttgagtgaaatcacccctcctctaccctcattctgtgtgatttggatggggctgactctactttttgcatattgagaactgctgtatgacccaaattgatccaatgagctaaaatctcatggattttgataggacaactagmggtcctgtgtgtggatgcagcaacagagataagcaaaatcaagagataaggagagtaacaactaagtactaacaatataagttgaatacctgggttcagtcaagtctgaaactctgctgcctctggacttctcaggatatttgagccaacggatctgctccttttactcaaatttggattgtacttttgttacaaattaaggagctcctactcatataaagagcagggagaagataagaaaaatacaggcagcatgatatagcaagtggaaagagcacaggcctgggttattggccccagttccataacgaaacacttctgggactttttctttacccgtgaaatgaagctaaagctttttcaatgttatttgtttaattgaggatcaaaaagactacagagccatgcaactagtttctagcacagtcctataaggagcagctgacct

SEQ ID NO: 214214 - DNA, 607 bp, Homo sapiens
tagtaattttatttttcttgagtgaaatcacccctcctctaccctcattctgtgtgatttggatggggctgactctactttttgcatattgagaactgctgtatgacccaaattgatccaatgagctaaaatctcatggattttgataggacaactagaggtcctgtgtgtggatgcagcaacagagataagcaaaatcaagagataaggagagtaacaactaagtactaacaatataagttgaatacctgggttcagtcaagtctgaaactctgctgcctctggacttctcaggatatttgagccaacggatctgctccttttactcaaatttggattgtacttttgttacaaattaaggagctcctactcatataaagagcagggagaagataagaaaaatacaggcagcatgatatagcaagtggaaagagcacaggcctgggttattggccccagttccataacgaaacacttctgggactttttctttacccgtgaaatgaagctaaagctttttcaatgttatttgtttaattgaggatcaaaaagactacagagccatgcaactagtttcyagcacagtcctataaggagcagctgacct

SEQ ID NO: 214215 - DNA, 492 bp, Homo sapiens
cagaaagggccattatcttctaactcacacacagatctttcagtctgtcttcaggaaagccacaaaaatttgttgcaacacgtttattactatcaacaaggataccttttctttagaaagagaatacttataacactgtcaaactcccatttaaccttccacactggatattgcatcttaggacaattaaaaaaatgtcttttcatcctcttacaaaaatgaagttagtcactacctcccacatgctatctctacattctagacacacttctattattttatttattacatggtattttattattgttttttaagtcggtgtttctgctctactggattgcacacttcagaaaaaaagggttttcttcattatatctctagggtctaacccagagccagtaccccataaccacttgatamatgtttcttaaataactgattgacaagcaagtggatctttcgttgtaacctaatgcttcaagataaactgta

SEQ ID NO: 214216 - DNA, 564 bp, Homo sapiens
ctctctctgcttataactagctgtgagatttagggcaagacccttaggtttctgaacttcaaagtcttcttttataaataataatactcatcctgttgactttgcagattactatgaaaatcagatcaaaatgcctggaaaaagataaagcagatgctcctttcctggggtagatggacaggcttcaggtgtgtttaggatccccctgaaactgaatgaaaaattttgcgtgtrtgcatttttgcattttcttcctagattctccaaggtttgtcatcagatactcaaaaggttttgtgacaacattgctgtaaagcagtaatattgaagacagtagcgttgaaattatttgctgtggccaagtgtgttatacctaaatcacaataatgttttctgtgctcaaatgggatttaaaagcaacattgcttgcagcagtggttcttcaactttagtgagcatcagaatcacctggaggacaggtcaagatacagattgctgggctgcaatcccaggatttctgattcagtagttagttcttaggtggggactgtgaatctgtatttc

SEQ ID NO: 214217 - DNA, 492 bp, Homo sapiens
tgaggctcatccttggattcaagcaccttggtcaggaacaatgaaaacctatggaagggctttcatcaggggaatgtggtgcataccactgacttgggcttttgttttgcgaagatacctctggaggctggttggagaatagactagaaagggcttagtagttgtggataaatcaggtggtagttagcagttaaaccaaccaggccagagaggtgtaacttgaaggccctgctctagtgtcaccccctctgtgaggtgagctcagccaaatggagagagaggcaaggatggaagttggactkgatggtccatacattttattcctacattacaaatcccccagatggtgaggtcctcctggtccctggagcaaagtgagtgattcattctataggcatcacagcctttgttaattctgctgccctgcttgaccatgatttcatgcctgtaaagaagaaatttgtcctgttcatcatcaattcatgagcattc

SEQ ID NO: 214218 - DNA, 492 bp, Homo sapiens
tgaggctcatccttggattcaagcaccttggtcaggaacaatgaaaacctatggaagggctttcatcaggggaatgtggtgcataccactgacttgggcttttgttttgcgaagatacctctggaggctggttggagaatagactagaaagggcttagtagttgtggataaatcaggtggtagttagcagttaaaccaaccaggccagagaggtgtaacttgaaggccctgctctagtgtcaccccctctgtgaggtgagctcagccaaatggagagagaggcaaggatggaagttggacttgatggtccrtacattttattcctacattacaaatcccccagatggtgaggtcctcctggtccctggagcaaagtgagtgattcattctataggcatcacagcctttgttaattctgctgccctgcttgaccatgatttcatgcctgtaaagaagaaatttgtcctgttcatcatcaattcatgagcattc

SEQ ID NO: 214219 - DNA, 502 bp, Homo sapiens
ctatctcatatatcctataaatatatacacctactatgcatatacaaaaattaataaagaagtttttaaattaaaaaaaagctcgtactacccaaagtgatctgcagattcaatgcaatccttatagaaataccaatgatgttcatcacataagtagaaaaaacaatcctaaaattcctgtgggataacaaaagatccaaaatagccaaagcaatcttgagaaaaagaacaaagctggaggcatcacacaatctgacttcaaaatacrccataaactgtattaaccataaagcatagtactggcataaaaacagatgcattgatcaatggaaccaagagcccagaaataaattcatgcatttatagccaattgattgtgattattcacaaaagctaagatacggaatcagtctaaatgttcatcaataaatgaactgataaagaaaatgtggtgtatatatacccaatggaaatctattcagcctttaaaaagaagaaaatc

SEQ ID NO: 214220 - DNA, 552 bp, Homo sapiens
tccattccagcagtggtacagccctctccattgctgccccaggaaactggtgaggaaggcacccgtgaggctgagcttcttggcctctgccggtcatacccagcaactccctgaaaactatagtatcctggaagccctacagcctccttacctcatcccattagcccttcaggtcctctactgccccaaaagaagactgatattttgcagagtataattaactttgcaaagtatggacagactctggaaacactgtggcatactcttgctcttcacagtcctgcatccttttcccattttctctcttacacgtttccctcctgttactctttcttttrtctttaattacttcagtttttgcatattcctgtctatgtcttgggcttcctgttgaagtttctgtcagcattgcttaaagacacaaatccagttttatctatgagtagagtgagccactgcctaaggcatgtgatttcaagggttccaggaaacaagacacctaaattctacattcctctattaccaaaatttttttccgtaatatccataatg

SEQ ID NO: 214221 - DNA, 553 bp, Homo sapiens
ggacacagagccaaccctttcttttctctactttccaggaggcccaggtgacacaatcgcctgatttgtgttctctgtgctccctggtatttggcctacaggtctctgcattttctctccaaccttttaaagcataataacagaccgtgcctttctgaagcatgtgttrgagacaaagaacacaggaatatgtcattttctataaaggccagaaagggtgttgtgaccagcgaagtgctaaaatgacatttgcacttaggtgacaaacaagcccattccattccaggtaaagaccagagctttttccagcaacagtaaaacacaagaaagtaaaggctgccctcgtcagggtgctctggggatgacaactgctgcttcagaaggcagcaagttgcactctggagacagaccttggatgaaagatcaggaatgaaaagccacatctgctttcaggtggacgctgcctaaggtcttgtccttgagcaatattctcccaggcaccagtgcattaggaaagaagcaacaaaccaggagagagtcttgtttaagctgc

SEQ ID NO: 214222 - DNA, 637 bp, Homo sapiens
aataaacaaattcaatcacattatgttgtacaatgggaaactacttagcaataaaaagaaacaaaacgatccattccacaacatgaatgaatccaaaaagcagattatgcctagtggaagaaaccayaatcaaaaggctacatatggcatgctttcattcatacgacattaaggaaaaggcaaaactatgctgacaggaatcagttgcttccaggagctgacgggagtggaggggattgactgtaaaagaacatgaggggctttttggataatggaaatagtctctgtccttactgtggtgatcacacaactctatatttgtcaacattcttggaactatactcctaaacaagggaattgtattagatgtaattatacctcaataactctggcttttaaaaactgctagctggcagacactcaccagatcagcaatttcggtggtgtgcaggaagggagcactctccagcctcaggtgccagccacggaatcattgttgtttatgttaatacagttattaatataactctgcgataagaatacctgtcttctagttccaatattcccaaaaagtgatgggagcaggggagatgtgccaacctggcaatattctgtgaaactaattacctcaggatta

SEQ ID NO: 214223 - DNA, 560 bp, Homo sapiens
caattacttcaccttaactttcttatttataaaactgaactgataatagcacacttggaaatccaagaaatagagttattgtgcatgaaatgcctggtgtatagtatgtgctcaataaaygatcattgttctttgtttttcattatcgtcactttgtaattttctttggatatggactttaggggctctaagtcatgaaaagtggcaggcagctgaaagaacagtgtggttccataattatttattgagtgtctcctatttttaactttgcattagctcaaagggatactttggagaacaagagcaacaaagttcccactcttagagcctacactctaggtgagaagatataaaataaataagcaagtaatagtgttacaaatgccattagtactctgaaatgagtgtataaaagatgttaggaataaagaatgtgcaatctatgaagagttttagggagaagagtgaaatgacataatttatatttctaacagaccacagtgacagtttgtggaaaatggaaggttgcaagtgtgaaagtgagcaagtgaaagtcattc

SEQ ID NO: 214224 - DNA, 560 bp, Homo sapiens
caattacttcaccttaactttcttatttataaaactgaactgataatagcacacttggaaatccaagaaatagagttattgtgcatgaaatgcctggtgtatagtatgtgctcaataaacgatcattgttctttgtttttcattatcgtcactttgtaattttctttggatatggactttaggggctctaagtcatgaaaagtggcaggcagctgaaagaacagtgtggttccataattatttattgagtgtctcctatwtttaactttgcattagctcaaagggatactttggagaacaagagcaacaaagttcccactcttagagcctacactctaggtgagaagatataaaataaataagcaagtaatagtgttacaaatgccattagtactctgaaatgagtgtataaaagatgttaggaataaagaatgtgcaatctatgaagagttttagggagaagagtgaaatgacataatttatatttctaacagaccacagtgacagtttgtggaaaatggaaggttgcaagtgtgaaagtgagcaagtgaaagtcattc

SEQ ID NO: 214225 - DNA, 560 bp, Homo sapiens
caattacttcaccttaactttcttatttataaaactgaactgataatagcacacttggaaatccaagaaatagagttattgtgcatgaaatgcctggtgtatagtatgtgctcaataaacgatcattgttctttgtttttcattatcgtcactttgtaattttctttggatatggactttaggggctctaagtcatgaaaagtggcaggcagctgaaagaacagtgtggttccataattatttattgagtgtctcctatttttaactttgcattagctcaaagggatactttggagaacaagagcaacaaagttcccactcttagagcctacactctaggtgagaagwtataaaataaataagcaagtaatagtgttacaaatgccattagtactctgaaatgagtgtataaaagatgttaggaataaagaatgtgcaatctatgaagagttttagggagaagagtgaaatgacataatttatatttctaacagaccacagtgacagtttgtggaaaatggaaggttgcaagtgtgaaagtgagcaagtgaaagtcattc

SEQ ID NO: 214226 - DNA, 588 bp, Homo sapiens
gtagttatgttttcagttctttgagaaatttccaaactgctttccacagtagctgaacaaatttatattcccaccaacaatatatgtgttcccttttccccgccactttgccagcgtctgttgtttttgactttctagtaatagctattctgactggtgtgagacagtatctcattttcattccaagctttttaaagactaaatagtatacatcacattgtctttctctattcatccattaatagatacttaggttgattccacatcttggctattgtgaataatgctgcaatgaatatgggagtgcagatatatctttgacatactgatttcaatttttttggatatatacccactaacggacaccttcttggtcagaacaatcaaacaagcaagtcactctgctaaagtgctttgctttggattaaatgttactgctgccccttgcaatcacagagggaagcaacagaataaacataaaaatattttcttttttttcyataggttattggggtacaggtggtgtttggttacatgagtaagttctttagtggtgatttgtgagattttggtgcacccatcacccaa

SEQ ID NO: 214227 - DNA, 412 bp, Homo sapiens
gtacgtttactatgcagactgttttccaagccctttgtataggatattgaacaaattacctgacaatatgaatatttttgaggtctgctcagaatttacaagattctgaccatttcccaacccatccatgttcttttctttagttcagtgtttctcaaaacatggtctgtgggctagcaaacatcagagtcaactgaaattcytgttaaaaacatgatttcctaagttccacaacactgatccaaaactgttgagagtagagacctggaatttgaattttacaagctacaatgatgagcaccaaatttaaaaccccatccctgtgttttggactaaggcaatcaagagggagttcactcctaagtagagcaaacacactctcttttagtaaccagtgattttttttttaaac

SEQ ID NO: 214228 - DNA, 560 bp, Homo sapiens
gtgactggagctgcaggatgtggggggagctacatgaaatgaagccagagagtctagtaggccacttgaaggactttggattttgttctatccaaagctattgaygggaaactattggaggattagagcgagtgaacatacaatctgattttttaaagatcactctggctgctatttggagaatagtctcagagggcaaagtaggagcaaggagactaattggggatggggaaagaaatcaagttctcttttggatgatgcatgtggtcacaccccctgtataccagctcagatccccatcactgccaatttctttttctctactttggaacccacctatgccaggtccactttagaacttaggtaaaattcaacaccaacggtaataaaatctattttcccaaatggcatgactgaggctgtaggacaacccagaagcactggggaagttagctctccatgggtgaaacttgaccaataagaaatgcaagatgggagggaaacacaaataaagttccctccctttctctttctttatgactaccctaaagggcagctct

SEQ ID NO: 214229 - DNA, 560 bp, Homo sapiens
gtgactggagctgcaggatgtggggggagctacatgaaatgaagccagagagtctagtaggccacttgaaggactttggattttgttctatccaaagctattgacgggaaactattggaggattagagcgagtgaayatacaatctgattttttaaagatcactctggctgctatttggagaatagtctcagagggcaaagtaggagcaaggagactaattggggatggggaaagaaatcaagttctcttttggatgatgcatgtggtcacaccccctgtataccagctcagatccccatcactgccaatttctttttctctactttggaacccacctatgccaggtccactttagaacttaggtaaaattcaacaccaacggtaataaaatctattttcccaaatggcatgactgaggctgtaggacaacccagaagcactggggaagttagctctccatgggtgaaacttgaccaataagaaatgcaagatgggagggaaacacaaataaagttccctccctttctctttctttatgactaccctaaagggcagctct

SEQ ID NO: 214230 - DNA, 554 bp, Homo sapiens
cacaattggaacttccctaacctaggcttgggctaatccgagactgggtagtcggattcaagtttgaaggacctcaaacatctaggactgctcaggtttcagtggactcagagaacgtctgaaaataggctggtcagcaattagtgtgtccatttcacaactgagaaaactgaggcccgcagaagctaaataaacagatgcagtcagcactctgtggtgaccagacacaaacgagggtcttctgattctaaattctgtgatttcctctcttccctctatatcaccttgtgccttgtcaacattcagaatcaaggcattatcttcgaaaggcacagggaggatgagaaggaaacaagcctggtgaaatggaatggtcagaaaagcctctytagcatagtactacttacggggttaatttcatgaggagcctgatttggaagttcaaaagaggcgagaaactagacagaatgaactggaatgggtgaggtctgtggcgatgaggtggtgagaggctttagggctgagaggcgcacaagtccagaagagaaagtagg

SEQ ID NO: 214231 - DNA, 513 bp, Homo sapiens
gtctgggtcagccacccagagcactgagggcagagcatcttcaacgttagtccttctgactgctcccaaggggaaaaaggaacttggggtgctatttccaaatagagggggcatgagtgctaggtggccccatatagcaaatgatcaccacaaactacatgtgaataaatgagggactccccacagagagggtgaacatcttctgaatagcccaggctggagtgcaatggcacgatctcggctcactgcaacttccgcctcctgggttcaagcgagtctcctgcctcagcctacgsggcagctaggattacaggcatgcaccaccacgcctggttaattttgtatttttagtagagaggggggtttctccatgttggtcaggctggtcgcgaactcccgaccttaggtgatccgcctgcctcagcctcccaaagtgctgggattacaggcatgagacttactcatttctgtaccctgtaggtggcacagtgcctgtcagtaagggatcctctc

SEQ ID NO: 214232 - DNA, 513 bp, Homo sapiens
gtctgggtcagccacccagagcactgagggcagagcatcttcaacgttagtccttctgactgctcccaaggggaaaaaggaacttggggtgctatttccaaatagagggggcatgagtgctaggtggccccatatagcaaatgatcaccacaaactacatgtgaataaatgagggactccccacagagagggtgaacatcttctgaatagcccaggctggagtgcaatggcacgatctcggctcactgcaacttccgcctcctgggttcaagcgagtctcctgcctcagcctacggggcagctaggattacaggcatgcaccaccacgcctggttaattttgtatttttagtagagaggggggtttctccatgttgktcaggctggtcgcgaactcccgaccttaggtgatccgcctgcctcagcctcccaaagtgctgggattacaggcatgagacttactcatttctgtaccctgtaggtggcacagtgcctgtcagtaagggatcctctc

SEQ ID NO: 214233 - DNA, 513 bp, Homo sapiens
gtctgggtcagccacccagagcactgagggcagagcatcttcaacgttagtccttctgactgctcccaaggggaaaaaggaacttggggtgctatttccaaatagagggggcatgagtgctaggtggccccatatagcaaatgatcaccacaaactacatgtgaataaatgagggactccccacagagagggtgaacatcttctgaatagcccaggctggagtgcaatggcacgatctcggctcactgcaacttccgcctcctgggttcaagcgagtctcctgcctcagcctacggggcagctaggattacaggcatgcaccaccacgcctggttaattttgtatttttagtagagaggggggtttctccatgttggtcaggctggtcgcraactcccgaccttaggtgatccgcctgcctcagcctcccaaagtgctgggattacaggcatgagacttactcatttctgtaccctgtaggtggcacagtgcctgtcagtaagggatcctctc

SEQ ID NO: 214234 - DNA, 511 bp, Homo sapiens
gtgagccaccatgcccagcctaatccaatatttttcatgatgtgttggtgaatcattaaatcagtttggtgagttttgactggaattttatttaaattaaattgaataacagaaaatatcatagtctatcaaagttaaaggtgtgattttttgagctgtgtttggttgcatgtgtgcatatactgggtcatagtccaaaaggtttaaaagttactaatgtgaacgtttctccaattacattccctaccagtcacacatttttctgtatgacgccttcatcttttttgtgcaaacattagttttctgtaatgcccaatgtgacttaacatgaccaaactgaattctttatcttctcttcaaacttgtttttccttctgccttccctatttttaagagttattrtctacccagtcatgtgaaatcttttgaatttgatcttggaaacatacctaaaatgtattcctttgcatcctatacaaaagcctgtgccctatgtcagcctcatcatctc

SEQ ID NO: 214235 - DNA, 430 bp, Homo sapiens
tgcattgctcctactttaggtctttctggtttgggttaaacaccrcccagttcaaattttattttaccactcaaatgaatcttgtttatgtaaagaatttagttgcatcacacacatttatttcctctttctcccatgatgtcattaaaattaaagaactaacaaaaagacagaggggataataaatgagagagggcccatcagcacatgagagaagtaagcacatttaagaaagtctgaaggcagatgggtgataggtcctggattaaacagtccagtaatgactgtcaggagtggagtagattcagctgacaagcatagtcaccagccaggcagaaccacagaggggtcagcattcagatttgccaggtaagacagagcatgcaacatggggcaaaaataactgctggacagccaacgccctttcttc

SEQ ID NO: 214236 - DNA, 603 bp, Homo sapiens
aagctttattgctcacacaaagcctgtttggtggtctcttcacagggacacacatgacaaccaggactaggcaaaacacattcttggccaaaagaagctctaggtgaacaaggaagagawgtaatcagaaacacaagagggatgaaatataaatataaaagtgtagaccagtaagggagctgaagtggcatggtatgaacaaattgaagaagaatgaaagaaaatgaaagttaaataaagcagagagggagggagggcaactgcaggaaagagcaggtggaatgactgatagccaatggtgtgctggtaaaatttaacaaccagctctgtgagaaaaaccaaagtccttatttgtagcatttgcttatttctgtggtataaataatcccaccatggctgattccatgctaccaacaaggatgtcactaaatatggagctgggaagagatatgcaatagtagcacaccattataaagcatttctactggctacctatttacaacagatgtaaataacttcaagtgcataggtagtgaagtaaccaggaggtgatgcatttggagtattaattacctttgttttcagtataatttatttaagtgt

SEQ ID NO: 214237 - DNA, 375 bp, Homo sapiens
gtttgtcaatatttttaatggtcatactaagttgctttatcagtcaaaattttctgtctcacaagagtcaattgagaccagaattgcaaatataaacttacagtgtgccatggctggcgcatcctggaccrtggggttaatctaggcagttagtgcagaaaggcagggaaactgaaagtaagaaatcctaggttcaagacctgcctctttaaagaagacagctagcatttgacacactttaaggtcagcttggtgtgaccttgaagagttaacatctcatagcctcagtgatctcatcttcaaaatgaagacaataatgtaagatttagcatagtacctggcacacagcattgtgctgaaagaacgtgagctata

SEQ ID NO: 214238 - DNA, 543 bp, Homo sapiens
ggagatgtgttggcttcagaaccagctgttttatatttcctctgctcattggagacattttcaggtcatgtccagtttctagaaagaacttagggaaggcgatgtcaaggagccctaagctggactaaaagaggatgcaaaatggcattttcaagagaatggcagcatcagatcactagggaacatactaagtatgaacaatccagagtctgccckcagaaatttggattcagcaggttttgtggagctcaggaatctgcatttttaacagccacccctccccctagagtggattaagatatgggttgatgagagctggcatttggcttcagttggttctcgccacccacacatgtggccttaggaaagtgttacaacctctctgagcctgtttctttatgggagtaacaatacctaccacatagtttatagtgagaactaaatgataaaatgaatttttagtgttcggtaatcaattaaaggttgggtattattaaaaggctgtgaacaactgaattttgaaaaggcctgtttttttttttt

SEQ ID NO: 214239 - DNA, 543 bp, Homo sapiens
ggagatgtgttggcttcagaaccagctgttttatatttcctctgctcattggagacattttcaggtcatgtccagtttctagaaagaacttagggaaggcgatgtcaaggagccctaagctggactaaaagaggatgcaaaatggcattttcaagagaatggcagcatcagatcactagggaacatactaagtatgaacaatccagagtctgccctcagaaatttggattcagcaggttttgtggagctcaggaatctgcatttttaacagccacccctccccctagagtggattaagatatgggttgatgagagctggcatttggcttcagttggttctcgccacccacacatgtggccttaggaaagtgttayaacctctctgagcctgtttctttatgggagtaacaatacctaccacatagtttatagtgagaactaaatgataaaatgaatttttagtgttcggtaatcaattaaaggttgggtattattaaaaggctgtgaacaactgaattttgaaaaggcctgtttttttttttt

SEQ ID NO: 214240 - DNA, 560 bp, Homo sapiens
taatactcacctcaaccttgtaagattagtagtattagtatcacaattttctgggtaagaaatgaagacacaaaagagttctctctcctgtgttccaatccagtgctctttccatgaaactagagaactctaatcttaacataagcctccttagtctctgcaaaagcccactttatttatgcttctactgtatgccactattataatccttgaaattgtccaagacgcacctgtctcagaccgattccttatccagatggactctgagctctcatacagttcctccttggtgattggactgatttttgctgggaataatggtatcacactaatttacattttttcaacttttttcttaactcagatttgacctgaccttttaatattttaaaaatcttcatgcaccaggyactgtgctaagtatgcaacacacattttcccatccatttgtttcttgagaaaaaggaggcaacagcaactgaagtttagataagccaaatcacttcctcaagatgacagaggcagaaagatttttcagtcagtttcaaatcaaggtcatt

SEQ ID NO: 214241 - DNA, 581 bp, Homo sapiens
ctcaggtcttagatttaagtctttgatctatcttgagttgatttttttgtataaggtgagagacacgtggcatgccaattatcccagcactgtttgttgaatagggtgccctttccccactgtgatggttaataatgagtgtcaacttgattggattgaaggacataaagtattgatcctgggtgtgtctgtgagggtgttgccacaggagattaacatttgagtcagtgggcttggaaaggtagaccgactcttaatctgggtgggcacaatctgatcaactgccagcatggstagaatataagcaggcaaaaatatgtgaaaagagagactggcctggcctcccagctacatctttctcctgtgctggatgcttcctgtccttgaatatcaaactccaagttctacagttttggaactcggactggctctccttgcttctcaccctgcagacggcctattgttggaccttgtgatcatgtaagttaatacttaataaatggcttatatatatatacacacacacatatatatacacatatatgtatacatatatatgtgtgtgtgtatatatatatatt

SEQ ID NO: 214242 - DNA, 581 bp, Homo sapiens
ctcaggtcttagatttaagtctttgatctatcttgagttgatttttttgtataaggtgagagacacgtggcatgccaattatcccagcactgtttgttgaatagggtgccctttccccactgtgatggttaataatgagtgtcaacttgattggattgaaggacataaagtattgatcctgggtgtgtctgtgagggtgttgccacaggagattaacatttgagtcagtgggcttggaaaggtagaccgactcttaatctgggtgggcacaatctgatcaactgccagcatggctagaatataagcaggcaaaaawatgtgaaaagagagactggcctggcctcccagctacatctttctcctgtgctggatgcttcctgtccttgaatatcaaactccaagttctacagttttggaactcggactggctctccttgcttctcaccctgcagacggcctattgttggaccttgtgatcatgtaagttaatacttaataaatggcttatatatatatacacacacacatatatatacacatatatgtatacatatatatgtgtgtgtgtatatatatatatt

SEQ ID NO: 214243 - DNA, 540 bp, Homo sapiens
gctatttggaattatctcgccaaggggctattaaaagaaatctagaaccatttgtttaaaagataacaaaaacaaagtcgacatttaattggctttacacttttgtcaaaatcagttgacagtatttacgtgggtctatttctggaatctttattctattcctttgatayatgtgtccataatttaatcaatataacacaatcttcattactgtgctttattgcaaaaatcttaaaattaggcagtgagtcctccagctttgtttgtttcagatcgttttgatttttcaagtttctttgcctttcatacacattgttgaataagcttgtcaatatctactaaaaacatgtgctggaattttgattaagattgcataaaatctagacatcaaattgagattcaaatattgaatcctcctgtccatgaacatgatatgtcaactctacttatttctctcttccttgatttctttcagtagtgtcttctagttctcagcatacagatcctacacatattgttagaattttagctaagcactta

SEQ ID NO: 214244 - DNA, 437 bp, Homo sapiens
aagaagttctttgaaactaatgagaacraagacatagcatatcagaatctctgggacaaagctgaggcagtgttaagagggaaatttatagcattaaatacctgcatcaaaaagttagaaagatctcaaaccacgtaacatcacaactagaagagctagagaaacaagagcaaacaaactctaaagctagcagaaaacaaagaataaccgaaatcagagctgaactgatggaaacagagacataaaaaaacatacaaaagataaacaaatctaggaattggtttcttgaaaaaattaataagatagtcagctagacaaacaagaaaagagagcatatccaaataaacactataataaatgacaaagggaatattactactattccatagaaataccaataaccatcagagattactatgaacacctctatgcacaca

SEQ ID NO: 214245 - DNA, 598 bp, Homo sapiens
gtaaagagaaaaaaacacttggcaaagctcaaagattcatggtttatcagctcatgggccagaatccctgattgctcatctgctgtcctatatagtttataaaatctgtaaggattgaacagtatttactcactctagggttataatttaagtgcttctcaagtgcttaataaagagtttcacattttcttcaccttagttgactctctcttggtttgtaaccaagtttaccatggctttttctagaactttattgattttaattgacagtttctactgaaacaaaaggaaagaaaacaaaattatctactttgtaataggtrgattctgtaagactgcattgataagttaatagtagattattttatcaactctgttttatcacatacaaataaaggcttacagagtactttttcttgtcagctaagtaaagcatcttttctgaaaatgtcattaacaccacttggagttcatgtagaaatcaacttaaagatctcagaatgtttaaagagcttcatttataatcccttcaatataaaggagaggaaagggcaggaactcactgtatctgtatcagcactaaaatgcagtgtaaata

SEQ ID NO: 214246 - DNA, 380 bp, Homo sapiens
tgacctcaggctcttaattccaggttctatgctttttccattgtgctattgaaagacctcaataattattttttaaaatctatttttttttattttagtttcaggggatacacatataggtttgttacattggtatattgtgtgacactgacgtttggggtataartgattccttcacccaagtagtgagcatagtacccactatgctagttttcagtcctttccctccagtagtccccagtatctattgttcccctctttgcgtccatgtatacccaatgcttagctgccacttataagtgagaacatacggtatttgattttctattcctgccttagttcacttaggataatgccctctagctacatctatgttgctg

SEQ ID NO: 214247 - DNA, 578 bp, Homo sapiens
ttgaaatcaatagggttttctagctaaatatcttaatccagattgatcagttgaatcaccctgcaccattttatttcagaattatatttaggccataaagaaattatcataaaatgaatttatttattacctaagtacaaagttggattaggaattgtaygcagaaaattacatattcagaaagtctttttttcctgaaacttacagtctaaggcaggggtcagcaaacatttcctggaaaagacaagatagatagatagatagtaaatattcttggctttatgggctacacggtctctgatgcaacatttcaactctgctgttgtagcacaaaaccattcacaggcaatatgtaaaaacatgacgttggctgtcccaataaaactttatttgcaaaaataggcagtgtgctgggtttgcctacttgtcacagtttgctgactcttggtctaagagaaagtcttggcaagacaaacagtatcacttcaatggcctttggaaagaatttggcatagggactccgagtggtagaagaaccaggacagggaaaatcaaggtaaaggagcatcagccactaa

SEQ ID NO: 214248 - DNA, 357 bp, Homo sapiens
gcttatcacttacctgtttaactgcaccactgaaatttcccagtgccttatatgaattcagtaggacagctttccacattttcatcagatgtaggaactcttaaagctgcaccttagaagttgtcttttctgacttctgcattttacgtgaaaataaagtagaccaagaaaagttaaatacttcgcccaagatcacacagctattgaaacaatttatactaragcttatgttttgtgatggttataagttctgtgagttataatgccctgtcacctcccacctcagcattctcctagctctcttccaagcagcttattttggaggactgcagaaaatggacctagcaaatacagtgg

SEQ ID NO: 214249 - DNA, 599 bp, Homo sapiens
ggtgactgagttttgagccttgtcaagctctgaggatttgatacatgttcacttgcctkctctgtgccttagcatcttcagttgccaaataaggaatgttcttagaatcattaatacaattccaatgaaattatttgattttgagctccttgaagaaaacgatacagccaggcagaagtttttgttattgttcgctgttaactaatttaaaatcaattacaattatcttaatatcgtgccacccataagtggcagtcggtaatattttcaaagttcaaatattgttttctttattacaggtttcttttctccatggaaaactccaaagcctgtaagttggaattattatgcttctttctttatttctacttactattgcaatttcatttaataaaagttgaattgggtgacctcaaaatctctttcaactctaggagtctgtgatgtaaaaaaaataaatcctctgtgtccttttgtcttgtatctgtcccacaagtacatgagtcactcaccttaccttcctataaaaacaattctgcccttttaaaaaatatatacttacaaaatgaacattaacactatgcagcctaatgtaatga

SEQ ID NO: 214250 - DNA, 586 bp, Homo sapiens
tgacaagcactcaaaatggtgcttctgaatcttcttcagatactggagatctctaccatcatctgaccactataggcctacgaaacatgctaaaatgtctgcgccagtataggaagctggtgggttttaataatctttttgcagagctaggctagccaagttggcttagcagttagaggtggtcttcacttgcagatagattgaaactattaattgcccaagtcccaagagctgggactggttttctggcatcccattttatgtgttagaatactcggccctaactgggatatgtgaaacccatgactggaagaggctgcagcaaagcagaacactctcactaagcaggacctcatttaggatttgactcatctggtccacaaagaacattagatgggaaaaccagtcctatttaagcttagcaaatcacttaaggatgcatgtgattttgaaaagagatacttttaaatgtttaaaatgaaatttggtttatcttaaccaatgtctaaatagttccttcctytcaccaccaaacttaaatctgtgctctgtggttatacacatctttatctaattcaacaaggaa

SEQ ID NO: 214251 - DNA, 617 bp, Homo sapiens
tgaggcatcagttgatgaatgaaggtgaagttggcagtgccaataggtggtctcagggagtctggcttcctccttgataaaaaatggtattaatctctgccttctctatcttatggtgctatggtgaggatccaagaagatcacgtatgtgaaagaacatgataaactgggaagtactctgcaggtctttaaattatagcagtagcaacatcagtagcagcattctgggggaggaaccaccagatccacagtaaatgaggcttcctagragactttgaacaatccctgaatcctagatggttgcataattacgtctaaactgagaggaaagcgactgaatgctcaagcgtaggaagttgttgcgatatgcataggtgtcaaatgagtatatgcagacgactgtatcttctgctccagtgaaagtgatgtaatatgttgaaaccatcttagaaaaggaacaactaataccatacatttctaagcacctacacatgaatcgtcttgagacacattatctttatcttatagggggaaaaaaacagagaaattaagtggtttgccaaagattactggctaattgttgacaaggttatgtaagttatagataagtttgcatt

SEQ ID NO: 214252 - DNA, 538 bp, Homo sapiens
gcctgcttccaggatgtgcctgggtctcttctcaggactgtctttggaaggatgacagcattgcagacaggcatattttgccttgaagcatggctgaggcaatgggatgtatgtatggacagagcttrgtcatgtgggctgtgatgtccacatgcatgtgtaccaggtccctcatggtccttatggggcaggagcagcctacaggctgtggccctgaaaatgttaggggctggcctgcctataggcatttgtgcagacattcccagtttatactcatcaaggcagacagcttatttaaatgggtgacatggttgcagacaaacaacaagggaatgcatttagaattggcaaaaagtgtagtcaccaggatcagggaacgtactggcaccttcaatactggctaaacttttcacccatctgccaagacaacctccccttttttggcattaggccaagaattagactttcccttaggtgttagagaaaagatgctgatagctttaagactgactctaacatgtttttatgaagtcataaa

SEQ ID NO: 214253 - DNA, 538 bp, Homo sapiens
gcctgcttccaggatgtgcctgggtctcttctcaggactgtctttggaaggatgacagcattgcagacaggcatattttgccttgaagcatggctgaggcaatgggatgtatgtatggacagagcttggtcatgtgggctgtgatgtccacatgcatgtgtaccaggtccctcatggtccttatggggcaggagcagcctacaggctgtggccctgaaaatgttaggggctggcctgcctataggcatttgtgcagacattcccagtttatactcatcaaggcagacagcttatttaaatgggtgacatggttgcagacaaacaacaagggaatgcatttagaattggcaaaaagtgtagtcaccaggatcagggaacgtactggcaccttcaatactggctaaacttttcacccatctgccaagacaacctccccttttttggcattaggccaagaattagactttcccttaggtgttagagaaaagatgctgatagctttaagactgactctaayatgtttttatgaagtcataaa

SEQ ID NO: 214254 - DNA, 359 bp, Homo sapiens
gactggagggcagtggcacagtcaccattcactgcagccttggcctcctggtcttaggtgatcctcctacctcagcctcccgagtagccaggactacaggcatatgccaacatgcacytgtatttgtgttttttgtaaagatggggttttaccagaaaaatgttttgagcacttactatgtatctggctccatgtgttcacatttctgcacctcagagttttagaaatagaactgctttaggcacagttccaaaagcaaaatagcctgaatatttgttggggtgagagtgcttcaaaaccaagtccatatttggcaaggactgaccagagagaggtcaatttctttctaaacagtccag

SEQ ID NO: 214255 - DNA, 610 bp, Homo sapiens
tatcattctgatacctgtttttaatgattttccaaatttctgaaggagtcaattgaaattctaggctcacaaactacaatatcaaaaaagacctccttatttattgagactttgaggggcagcttgggtaattaattcttctgaggaaaaaagagaaacaattggaaggcccctatttcattagcctgacgccagctcagattctgggcatcttttggtttctgtaaaaaccctggaagtgtgacttccttccatgtgactggctgtctcagaagttgacttgttcacagtttcctgatgtgccttcctcaggcagttttttagtgtgttcaaaagcatcactgactgactttcacaaactcctgcaatttagagacgtttgttgaagtaagctttctcaagagccttggggaggrtggtctttagtaatttcatagaaatctcttccactaaattaggggattctgtcactggaccaggatcaatcattcaagggtcaggcttcatgctggaatatggaaactttaattggaatataaatcacttgggagatgatgttaaaatgtagataatgattcaatagggtctaaagtgggatgcaaaatgacct

SEQ ID NO: 214256 - DNA, 569 bp, Homo sapiens
ttccctccctccacttaaaaataatttgaataaactgattgaacatattttacataatagtaaatttgaccatcctcctgtagctttagaattgttggctgtaaccattactactactttttcttcttccctctgacatttgttgaaatcccaaattttgctamtgccatgttttatctaaggttagtaaattttgggctgcatgctcaaggaaattactactgttgattagaagggggcaggaaataggtttatagaaaaatacatagtaaacaaactgtttgatgtggtttggctgtgtccccacccaagtctcatcttgaactgtagttcccataatctccacgtgtcgtgggaggaacccagtgggaagtaatttaatcatggggactgttacccccatgctgttcttgtgatagtgagttctcacgagatctgatggttttatgagggacttttccccctttgcttggcacttctctctcctgctgccatgtgaagaaggacatgtttgctcccgcttctgccatgattgtaagtttcctgaggcatctccagccctgcagaac

SEQ ID NO: 214257 - DNA, 550 bp, Homo sapiens
gttctatatctttatattttcaagtgacatgaaaacttctttcttctcttgatcaaacagttgccatgacagagcygtctgtttgcctcactggcacttatgtactaaatatgatgatccctttagaaacttactcggatttgtattgtttattatttgctgaataaggacaatttagaaatactgtctacaattaagtgggattatctgtaattggtgcagctctttgaaaaatacagaagtaatatccttgtactttgaagataataatctatattttcataatcctggaacccagaagcacttctaagcattatataaaccacagaatccaaaaaggacaatattgataaaaatttaacattttcatttgtaggatataccataaatagagttaaaatacaaatgaaaaactaaaaatctgtattatatgtcttaaaagattatattgtgaaatattaaaagttcttttagctgggcacagtggctcacacctgtaatcccagcactttgggaggccaaggcgggctgattgcttgagcccaggagt

SEQ ID NO: 214258 - DNA, 301 bp, Homo sapiens
taagcattctctcctagttgaacccaacagtttttagtagtttcttctgttacttatgatwttctttgtctcttcaaatcatgatgacgggctcagttcaaattgctgttcaacctatatgttaggctaggccttataaggttttccagcccattaaatgaatatgcaaaggtgactaccaccataaaacacactaaacactgttatcagattagctagttacttattaccatgtcagttatttgtactaagaatgaaaactctcatagagccacacccttcagacttagttcccttttct

SEQ ID NO: 214259 - DNA, 410 bp, Homo sapiens
atataattcattgtaacatttctaatatctagatcgggaacacgggtctctaccaaagacaagaagatgcagccaaaacaaacagaacaggagaaacaaacattctgttttcagcaattcatcacacaaccatgagattcaaacacgtatagatttcaatcgttattcattattattgttttaattttttatagatacagggccttcctccatcgcccaagctggagtgcagtggcatgatcatggctcactgcagccttgaattcctgggttcaagcaatcctcctgcctcagactcttgaggtgctaggactacaggtgcacgccaccgcacccagctaatttttacattttttgtaacaayggggtctcactatattgagacccaggctggtggcaaactcctgggt

SEQ ID NO: 214260 - DNA, 293 bp, Homo sapiens
tggatttgtatgcataaagctcctcaaagcaataacaaaggcatccccccacaaaaaaatgaataaagagtataagtgggtaatccacaaaagtgaaaatacaaattaccaacaacagaagtgcttaatttcataaataatgaggggaaagtaagttcacaatgtaccatctttttaactatcagagtggcaaaaatcaaagaatggtaatacycagctctgatgaggatattactgtgaattactatgcccttttggaaaggaatctagacttacattaaaattaaaactct

SEQ ID NO: 214261 - DNA, 550 bp, Homo sapiens
gtcatctgatatcaacccgtgagtgaagtagacacacgagtatcatcattccctttttatggatgagraaactgaggcccagagaaattaaactatctaaagtcacagagccagagaggggcagaactaggactagaacctaagcctcctaagctctgaactggtaatgtcatttaagtaaagacacgtaccatctgtactgtcagcataatcatccattccggctgctggtgcagtgatctgccttccttgggtttcatctaatccctttatgctgcattcctaagccattttctcaatttggtcatcaccctttgtgtaaaagcccttttattcacatctgtgcttgatctgtcagtttaccgggctcagtgtgctgggtttattttgcactaagagtgtcatttgccatcaagaatcaggaaaaaagcgagggaagtaaattcacagcaaatctagttaattgtctcctttcatccccaagctgtaatatgtaagaaagacatagcctccaaaattagcccccaaaagaactcaggaatggaagaat

SEQ ID NO: 214262 - DNA, 405 bp, Homo sapiens
gaattcagggcaccagacccggagtgaggacaccggggctttggccctggcgctccccctaagcagctgtgttagcctggaaaagatacctcccttctctgggcctcagcttcccttacttcccttatctgtaaaatgattcggttggattctaagatccccttcagctttgatatgttgggattccttaggggtgggtgggaggggtatcaatatggcccaaacttgaggttggtggctggattagcatagggrctgggtccaggtggaatcaagcccctcgcaggccctgtgaactgaggtgggcacttatctggaggccactgagtttgtgttcctctctcctatgcttatgtcttattcctctttatatccttgccacctggcagagtgacctgtgtttgg

SEQ ID NO: 214263 - DNA, 580 bp, Homo sapiens
ttaactaccagtgggatttatttgataatataggactattcgggttttctctctcttcttgagtctgttttggtaaatgattctttttttctagaaatttacacatgccattgaccttttcaattgcattaacctattgttttgaatagtattwtttatctcttctgaatatgtaaggggtcctctttttcattcttaataatatttgacatctcttttttctttgattaatcgtgtcacatttgttaatattaatagccacttcaaaaagacaatatttgagtttgattatccactctataatgtgttttaaaatcattaattgctgccttttattgttttcttctaagttcttttacatttattttgtttttttcatttttaaaaagttattttctatgttaggatatgctaattgctgtgacaacctccaaatctcagtagtctaatacagtaaaagtttatttctcatatctcagtccaatgcaggttgctctggaggatcttgctccacccaaagtcactcaggaactggagacgctttcatcaattggttccactatactctggattgcagagt

SEQ ID NO: 214264 - DNA, 580 bp, Homo sapiens
ttaactaccagtgggatttatttgataatataggactattcgggttttctctctcttcttgagtctgttttggtaaatgattctttttttctagaaatttacacatgccattgaccttttcaattgcattaacctattgttttgaatagtattatttatctcttctgaatatgtaaggggtcctctttttcattcttaataatatttgacatctcttttttctttgattaatcgtgtcacatttgttaatattaatagccacttcaaaaagacaatatttgagtttgattatccactctataatgtgttttaaaatcattaattgctgccttttattgttttcttctaagttcttttacatttattttgtttttttcatttttaaaaagttattttctatgttaggatatgctaattgctgtgacaacctccaaatctcagtagtctaatacagtaaaagtttatttctcatatytcagtccaatgcaggttgctctggaggatcttgctccacccaaagtcactcaggaactggagacgctttcatcaattggttccactatactctggattgcagagt

SEQ ID NO: 214265 - DNA, 544 bp, Homo sapiens
tcttaagttcctctaattcagcctgaggtcaaattagcttgtttgttcttgtcagtcacgttacactygtactattcactaagctatcctcagttacttttacctgtccctctcatatttgtgtaagtgggaaacttagattcagccttcatttcaaccttacagtatctttttggatcctgatattccctgctcctgtaccctcctccccaacccacctctatacctacacacagctttgcagtttccgcaattttctaagcatgtgctctctcctcatctaagttctttacacaaatgtgtgcattctaaaaccctccctctaatcgctttagcccaggagttcagaccagctcgggcaacgtagtgagaccccatctctaaaaaaaaaaaaaaaaaaagtaatataattagctgggcattatggcacaagcttggagtcccagctacttgggagactaaggtgggaggatcacttgagcccaagaggtcaaggctgcagtgagccatgatagcacctctgtactccagcctgggtgacaca

SEQ ID NO: 214266 - DNA, 544 bp, Homo sapiens
tcttaagttcctctaattcagcctgaggtcaaattagcttgtttgttcttgtcagtcacgttacactcgtactattcactaagctatcctcagttacttttacctgtccctctcatatttgtgtaagtgggaaacttagattcagccttcatttcaaccttacagtatctttttggatcctgatattccctgctcctgtaccctcctccccaacccacctctatacctacacacagctttgcagtttccgcaattttctaagcatgtgctctctcctcatctaagttctttacacaaatgtgtgcattctaaaaccctccctctaatcgctttagcccaggagttcagaccagctcgggcaacgtartgagaccccatctctaaaaaaaaaaaaaaaaaaagtaatataattagctgggcattatggcacaagcttggagtcccagctacttgggagactaaggtgggaggatcacttgagcccaagaggtcaaggctgcagtgagccatgatagcacctctgtactccagcctgggtgacaca

SEQ ID NO: 214267 - DNA, 544 bp, Homo sapiens
tcttaagttcctctaattcagcctgaggtcaaattagcttgtttgttcttgtcagtcacgttacactcgtactattcactaagctatcctcagttacttttacctgtccctctcatatttgtgtaagtgggaaacttagattcagccttcatttcaaccttacagtatctttttggatcctgatattccctgctcctgtaccctcctccccaacccacctctatacctacacacagctttgcagtttccgcaattttctaagcatgtgctctctcctcatctaagttctttacacaaatgtgtgcattctaaaaccctccctctaatcgctttagcccaggagttcagaccagctcgggcaacgtagtgagaccccatctctaaaaaaaaaaaaaaaaaaagtaatataattagctgggcattatggcacaagcttggagtcccagctacttgggagactaasgtgggaggatcacttgagcccaagaggtcaaggctgcagtgagccatgatagcacctctgtactccagcctgggtgacaca

SEQ ID NO: 214268 - DNA, 462 bp, Homo sapiens
gttcctctccagccacccttagtggtactctaaacgcaccactgagcacacacarctggggctgagaaaacagggactagtgttaaagctggtacctgaagctgagccctggatcttctggaattagttcagtcttgctgagcttctggcgtggccaggaaggaggaggagggaggaatgggtccctggctacccgtgagcaccccaactcagatcccagcactgtggggcctcctgagagctgattaggaccctaggtagatatgaaagaagcttagggacttcctgggggccctctccaggttggccacagagggcaatcctcccacaggcatagcacccagcagaccctggtgagtccagagaactgtaggtgctcagtcagaaacatccaccttaaatgtgccagttaaaaaagtgttcagccaggcgtaggggcaggtcacctcggtgaggggagag

SEQ ID NO: 214269 - DNA, 545 bp, Homo sapiens
tacaagtatgctgacatttcctagtcatgtgactatagcctagtcttaaactcactgaatgtctgtttcctcatttgtaagaagggatgacawtattattagtggaaggagcatggacttttgaacccatgcttaaattgggtttttaatttaagcatgacccaggtttaatttaagagagacccaggtttaaatcccacttttactacctggaggccatgagcctggagtggatggagcagaggggaagtgggaggagaattatcagagagtgaaggggccagtgatcacattgggctataaggccatagtaatgaccttggcttttactctgaataagatgggaatctgttgcaatgttttgagcagagggatcacaagatgtaattcatgtttttaagagattggcctggctgctgggttgaaaatagactgaagggaaaaaagggtggaaagtcagagacccagatacacagcccctgcaataatctaagtgagagaggatgacactttggacaatggtgtcacagtggagatggtgagca

SEQ ID NO: 214270 - DNA, 570 bp, Homo sapiens
tttacaagtatgctgacatttcctagtcatgtgactatagcctagtcttaaactcactgaatgtctgtttcctcatttgtaagaagggatgacattattattagtggaaggagcatggacttttgaacccatgcttaaattgggtttttaatttaagcatgacccaggtttaatttaagagagacccaggtttaaatcccacttttactacctggaggccatgagcctggartggatggagcagaggggaagtgggaggagaattatcagagagtgaaggggccagtgatcacattgggctataaggccatagtaatgaccttggcttttactctgaataagatgggaatctgttgcaatgttttgagcagagggatcacaagatgtaattcatgtttttaagagattggcctggctgctgggttgaaaatagactgaagggaaaaaagggtggaaagtcagagacccagatacacagcccctgcaataatctaagtgagagaggatgacactttggacaatggtgtcacagtggagatggtgagcaggtcagattctagacgtacttgc

SEQ ID NO: 214271 - DNA, 545 bp, Homo sapiens
tttacaagtatgctgacatttcctagtcatgtgactatagcctagtcttaaactcactgaatgtctgtttcctcatttgtaagaagggatgacattattattagtggaaggagcatggacttttgaacccatgcttaaattgggtttttaatttaagcatgacccaggtttaatttaagagagacccaggtttaaatcccacttttactacctggaggccatgagcctggagtggatggagcagaggggaagtgggaggagaattatcagagagtgaaggggccagtgatcacattgggctataaggccatagtaatgaccttggcttttactctgaataagatgggaatctgttgcaatgttttgagcagagggatcacaagatgtaattcatgtttttaagagattggcctggctgctgggttgaaaatagactgaagggaaaaamgggtggaaagtcagagacccagatacacagcccctgcaataatctaagtgagagaggatgacactttggacaatggtgtcacagtggagatggtgag

SEQ ID NO: 214272 - DNA, 410 bp, Homo sapiens
atgtccacggtgctcccagcagcccagcagagggggcaggaggctggccagcccagtcctccctccaggagctggaaccatcccgcagacacagtccactcctgcccactccgaaacacctctgagggtattctctcagcagtagcttcctggcagttcttgttatctcatttaaattcctattgctgtgggcctagcttttctgggcaccatgggtgaaagagatttcagagggtgaagtaaaggcattttcaagactaaaagaaaatgagcttcctttctcaagcttttcatgctgaaggacaggtgggctttattcaaawgtagaatatgctagaagaagcatcggccttaagggagacagagtaagcaagaatgtgttccgagcagcttgccctgtgacgaaggag

SEQ ID NO: 214273 - DNA, 592 bp, Homo sapiens
gcttccagtttttgcccattcagtatgatattggctgtgggtttgtcacaaatagctcttattattttgagatacgctcagattctatacttgactggcagggactttktttggctttgtgtggaaatgaatgaaaatgccatgaccattccttttgtcttcatatcccaccccagttacagaagtatgctagcccctcccagggacacctaacttggcctgccccaggatattggcactctgctgtccactgccaaaagagacaactgctttccactgtcccaggcctccaagggcaggaactccacctccatcgtggttggcgcccagagcacacatgcacctgtaaatttggtcctagaatgtttccctttggcattagaccaaagggctgtgatagctacataggtcaccctgaattgtctaatctgaaccatttgccagccctcgaacccaatttgtgcttccctacctccttgcctttgctcatggtgttctccaccgtgatacacccttgcccattcctgcctgtccagttgctacttttccctcaagcatgttaccactttacgaagccctccttgaggttctc

SEQ ID NO: 214274 - DNA, 562 bp, Homo sapiens
atccttgggcctgtgcccacagacgtaagtgaaaacaggcactcctgtttttgcacccaaatgttgcattttccaagaccactctggcccgccatgctcccatcttatgcccatataaacttgagaccttagcaggcacagacacaagtagctgaacatcaagaggaggaaaggaacagaccagcagactggtagaccggccacggtggaacaacatggcagagaaagagagaagaggaaggttgtctgtaccctgaggggagttcasgcaagggcagtcagagaagagtctgccagctgggcggccaggctccaaggaagacccccttcccactctatcctcatcttccggcttcccatccttcttgctaaaaaccacctccatcactcaataaaaccttgcacgcatccttccagcccatgtgtgatctgattcttccagtacactgggcaagaacccaggcatgtcacactgccttgcagatataggcagaggatctattgagctgattaatacacgccgtctacagacatcaaagctgaaacagcacagtgtaacaca

SEQ ID NO: 214275 - DNA, 562 bp, Homo sapiens
atccttgggcctgtgcccacagacgtaagtgaaaacaggcactcctgtttttgcacccaaatgttgcattttccaagaccactctggcccgccatgctcccatcttatgcccatataaacttgagaccttagcaggcacagacacaagtagctgaacatcaagaggaggaaaggaacagaccagcagactggtagaccggccacggtggaacaacatggcagagaaagagagaagaggaaggttgtctgtaccctgaggggagttcacscaagggcagtcagagaagagtctgccagctgggcggccaggctccaaggaagacccccttcccactctatcctcatcttccggcttcccatccttcttgctaaaaaccacctccatcactcaataaaaccttgcacgcatccttccagcccatgtgtgatctgattcttccagtacactgggcaagaacccaggcatgtcacactgccttgcagatataggcagaggatctattgagctgattaatacacgccgtctacagacatcaaagctgaaacagcacagtgtaacaca

SEQ ID NO: 214276 - DNA, 536 bp, Homo sapiens
tgacatcatctatccaaatragaagaatagacaaacaattctgataatatgacaaaacaaggttttataacaccctcaaaagaccacactagctcaccagcaatggatccaaaccaggaagaaatctctgaattgccagaaaaagaattctgaaggtcaattattaagctactcaagggtgcacaagagaaaggtgaaaaccaacttaaagaaattttaaaaataatatagaatatggatgttaaaatgcctagaaaaatagttaatataaataaaaaacattcacaacttctggaaatgaaagacacacttagagaaatgccagatatactgaaaagtctcaacaatagaattgaacaagtaggagaaataacttcggagatcaaagacaaggcttttgaattaacccaagcaacaaagacaaaggaaaaataatttttaaaaatgaacaacacttccaaaaagtttggaattattttaaacaaccaaaactaagaataataagtgttcctgaggaataacagaaatctaaaagt

SEQ ID NO: 214277 - DNA, 505 bp, Homo sapiens
tagattaagccaggaagaaataggaattytgaacagaccaataacaagcaatgagattgaaatggtaattaaaaaaaaaaaaaaatccaaaaaaaaaaagtccaggactagatagattcacagctgaattctatcagatattcaaagaagaattggtaccaatcttactgaaactattccaaaagacagagaaagaaggaatcccccctaaattttttgataaagccagtatcacctcaataccaagaccaggcaaggacataacaaaagaaaactatggaccaatactgctgatgaacatagatgcttatattctcaacaaaatactagctaactgaatccaacagcatatcaaaaacccattgtgttcaagtgggtttcatactggggatgcagggatgggttaacatacgcaagtcaataaatgtgatacaccacataaaattaaaagcaaaaatcatgtgattatctcaaaagacatagaaaaagtatctgacaaaaccta

SEQ ID NO: 214278 - DNA, 505 bp, Homo sapiens
tagattaagccaggaagaaataggaattctgaacagaccaataacaagcaatgagattgaaatggtaattaaaaaaaaaaaaaaatccaaaaaaaaaaagtccaggactagatagattcacagctgaattctatcagatattcaaagaagaattggtaccaatcttactgaaactattccaaaagacagagaaagaaggaatcccccctaaattttttgataaagccagtatcacctcaataccaagaccaggcaaggacataacaaaagaaaactatggaccaatactgctgatgaacatagatgcttatattctcaacaaaatactagctaactgaatccaacagcatatcaaaaacccrttgtgttcaagtgggtttcatactggggatgcagggatgggttaacatacgcaagtcaataaatgtgatacaccacataaaattaaaagcaaaaatcatgtgattatctcaaaagacatagaaaaagtatctgacaaaaccta

SEQ ID NO: 214279 - DNA, 482 bp, Homo sapiens
taccaatcttactgaaactattccaaaagacagagaaagaaggaatcccccctaaattttttgataaagccagtatcacctcaataccaagaccaggcaaggacataacaaaagaaaactatggaccaatactgctgatgaacatagatgcttatattctcaacaaaatactagctaactgaatccaacagcatatcaaaaacccattgtgttcaagtgggtttcatactggggatgcagggatgggttaacatacgcaagtcaataaatgtgatacaccacataaaattaaaagcaaaaatcatgtgattatctcaaaagacatagaaaaagtatctgacaaaacctagcatccctttacaattaaaatcctcaacaaaawtggcatagaaaggacataccttaaggtaataaaagccacctatgacaaacctacagccaacattatacttaataaggaaaagctgaaagcattccccctg

SEQ ID NO: 214280 - DNA, 498 bp, Homo sapiens
gccgttaaaggtgaggttcacagtgtgacccatgagtaagtatgttacattagaaaaaaactacttgagttttctaatttatttaagcagaaatctggataacagacataagaatagatattaagcatgtgggataatcgtggaagaaacatagtgttggatcaggctgaatttattgatttgggcccactaagtagggattctgcatttaatgtttgcaacttggggagttaaaaatgttctaacagtttatttgcttggttagctgaaatatggattaaaaattggcccactgtgagccaactggaaatacctgatctcccttggtttaatgtagaggaaaagatccaaagtcttagggagattgagatgctggagtggattagtcactttagacctactcatcctagctgggaaggtccagaagatrtacccttgaccaacactttaagaaatagatttatgaagacagcacatgcatctttgaagagccccata

SEQ ID NO: 214281 - DNA, 517 bp, Homo sapiens
ctgctgccttgatagttgaactgattagagctatgctaatagtttgcatttgaaccaatatcatactcatcttttaaccagggaagatttttcctctgatcagttcttactctggcctttcctcccccaatatatcttccttaagttgaggaaggctaaaatgttgatgcagataccagtcttagttttctctaccatccttctacaacccatagtcaccttctctaacaaaactttttttccccaaaatatgcaggttcaaaactttatctcacagatattaattgaattcttacttgatgtcagrcattatgtcatccctgatgatataaaatatgtaaacaatagtttaacctgtgtctatattgccatcattcccttaaatttctcgaaagaaaattactatataaatctaaatattttgcaatctttaacttattctgtgtgttccctgaggttccatctaaacttccgtcattctctatattcctatcttttaaccatctattacattttc

SEQ ID NO: 214282 - DNA, 590 bp, Homo sapiens
tcattggtttctgatgttatctttcttttctttttattcttttttccatgggtctgatatgctgttcttctcctagcttcgcgacatcttaaatcttttattttcaactgttttctcctggtatgggcatttacaagtatacatgtccctgcaagcactacttttacratgctttagttgcatcccaccaatttaaatatgttgcatttttttatcatttagttcaaactaattctcatttgtatttctcatttgtattatttagacatgtgttatttaatttccagacagttgtgacttttcttgttattattgaaatttaacttaattcctttgtgattgggaaatatacacgaagctattccaatatttcaaagtttctggaggctttttatggttcatcagatattcgattttagtaaatatgctatgtgaacttagattatattattgtcaattgcttatgtctgtgatctcttaagattctgatttgttgctccagacccacacgatggcaaaggtgtccctgattctctctcctcagcagaggctctgtacatgggccatgtctgagcatcagctcaaaccca

SEQ ID NO: 214283 - DNA, 590 bp, Homo sapiens
tcattggtttctgatgttatctttcttttctttttattcttttttccatgggtctgatatgctgttcttctcctagcttcgcgacatcttaaatcttttattttcaactgttttctcctggtatgggcatttacaagtatacatgtccctgcaagcactacttttacaatgctttagttgcatcccaccaatttaaatatgttgcatttttttatcatttagttcaaactaattctcatttgtatttctcatttgtattatttagacatgtgttatttaatttccagacagttgtgacttttcttgttattattgaaatttaacttaattcctttgtgattgggaaatatacacgaarctattccaatatttcaaagtttctggaggctttttatggttcatcagatattcgattttagtaaatatgctatgtgaacttagattatattattgtcaattgcttatgtctgtgatctcttaagattctgatttgttgctccagacccacacgatggcaaaggtgtccctgattctctctcctcagcagaggctctgtacatgggccatgtctgagcatcagctcaaaccca

SEQ ID NO: 214284 - DNA, 592 bp, Homo sapiens
cttactatttctctaaatatgtatttatgtatcatgcagggaagtttaattatcttttatctcacctatttcccaatgtggctgagatttgaatgctatttttgtaagaaaagtgacaggcagatctcttatatggctcccaaagacccaagcccttgtataacctcctcccctgagtacagctgagacttataacttgcttctaaccaagagaatatgacaaaagtaatgagatgtcactcccatgataatgttacattatatgacaaaagtaaagggattttggagatgtaattaaaacccctaaacagtgaactttaagttaatcaaaagggaaattatcctgaatgggcctgacttcatcaggtgagccctttttattttattttattttattttattttattttattattattatactttaagttttagggcacatgtsgacaatgtgcaggttagttacatatgtatacatgtgccatgctggtgtgctgcacccattaactcgtcatttagcactaggtatatctcctaaagctatccctcccccctccccccaccccacaacagtctccagagtgtgatgttcc

SEQ ID NO: 214285 - DNA, 592 bp, Homo sapiens
cttactatttctctaaatatgtatttatgtatcatgcagggaagtttaattatcttttatctcacctatttcccaatgtggctgagatttgaatgctatttttgtaagaaaagtgacaggcagatctcttatatggctcccaaagacccaagcccttgtataacctcctcccctgagtacagctgagacttataacttgcttctaaccaagagaatatgacaaaagtaatgagatgtcactcccatgataatgttacattatatgacaaaagtaaagggattttggagatgtaattaaaacccctaaacagtgaactttaagttaatcaaaagggaaattatcctgaatgggcctgacttcatcaggtgagccctttttattttattttattttattttattttattttattattattatactttaagttttagggcacatgtcsacaatgtgcaggttagttacatatgtatacatgtgccatgctggtgtgctgcacccattaactcgtcatttagcactaggtatatctcctaaagctatccctcccccctccccccaccccacaacagtctccagagtgtgatgttcc

SEQ ID NO: 214286 - DNA, 601 bp, Homo sapiens
caggtcttctttccctgccaatccatgtcttcagagaatcttccagtgctctaccttagtatctttcatgtctatattctcatcrgatctcatgagaaccttctcactatcacgagaagagcatgggggaaaccactcccatgatccaatcacctcccttctggtccctcccccaacacatggggattacaattcgagttgagatctgagtggggacacagagccaaaccatattacatatgataccaatcttatataaacaagagggtgggccagatgcaatggcttatacctgtaatcccaacactttcagaggccgaggtgggcagatcacttgaggacaggagtttgagaccagtctggccaacagggcaaaaccctgtctctactaaaagtacaaaaatcagctgggtctggtggcaaacacctataatcctagctacttgggaattggaggcaggagaatcatttgaacctgggaggtgtaggttgcagtgagccaaggtggcaccactgcactccagcctgggcaacagagtgagactctgtctccaaaaaaaacaaacaaaaaaagtgacacagcctcatatacatctattat

SEQ ID NO: 214287 - DNA, 345 bp, Homo sapiens
gtatgagtccagcattacagtcctggatgatttacatcatagaatgatgaaacactcactggtctcattcagtaaatcacccaattagaataattgttaaccatgaaagaggtaagataaggctagagactaaaaatkaacaattattgttcatttctaacatgaacaaagggtccagcatgtcagccatttgtgtattgagccttactgtaataaacttctttatcaataaggatcccattattatatattgtctattgaggcatacctattaaattatcaaatgcctcaatgctgagataaaatactaacaatgatagaaaattctgaatatactgaagaagt

SEQ ID NO: 214288 - DNA, 495 bp, Homo sapiens
atcatagcaaggcttttcctaaatgagtacaatctcatgctgcattaatggaaacatagtgtctacaagaagagaaattcacaattctttgaaatatctagaacagcatgttctgctccaagaacactttagggcacaaagaacaaaagagggtgaccaggatgacaaatgtttggaaacagttatcaggaaagcttgtaggaaccagggatgttgaaatgaaaagagatgtttatgtgaaacaaatctctrttttaaaatgttagaagctttgtccaatgatcagaatgattacacattctatgcagcccaggaagcaggagtaggaaaattgaaaggaagatacaggaaagctgactttcacttcggaatcagagagagaactttccaactgagaggctagggcaacactgaatcctccctccacctccacagtatttcatcatgccctaagctgccagatgctgcatccacaatgagatgatgatgagcaaa

SEQ ID NO: 214289 - DNA, 495 bp, Homo sapiens
atcatagcaaggcttttcctaaatgagtacaatctcatgctgcattaatggaaacatagtgtctacaagaagagaaattcacaattctttgaaatatctagaacagcatgttctgctccaagaacactttagggcacaaagaacaaaagagggtgaccaggatgacaaatgtttggaaacagttatcaggaaagcttgtaggaaccagggatgttgaaatgaaaagagatgtttatgtgaaacaaatctctgttttaaaatgttagaagmtttgtccaatgatcagaatgattacacattctatgcagcccaggaagcaggagtaggaaaattgaaaggaagatacaggaaagctgactttcacttcggaatcagagagagaactttccaactgagaggctagggcaacactgaatcctccctccacctccacagtatttcatcatgccctaagctgccagatgctgcatccacaatgagatgatgatgagcaaa

SEQ ID NO: 214290 - DNA, 611 bp, Homo sapiens
acagtatcacctctgagacattcctatcaaaaatacataatttgtgtctaaagcgaaaatattagacaaacccaaattgagaatagcaaacagaatggctggcctgtaatcttctaaatatgtcaagatcatgaagataagagaaaactgaagaattattcctcaaggaaagagactataaagacatagcaactgaatgcaacacattatcctagatttaattcttstgctgtaatgaatataattgaaacaattgaagaaagttaaatatgttctgtgatcaaaaggtatatgtctattctttgtattacctttgcaaataccctgtaagtttgaaactgactttaaaaacaaacaaacaaacaaacaaacaaagactcatgacttcaaaatcaaatctacaaagcttgattttctttgaattttcaactttttctcattcatgagtgttttggtgaaaatttgagagattactagccaaaagaccattttaagccagaaaacaagtccacatgcatttttcaggaatttgtcttttgcaccaagaaaggtataatttctattttaaaaaccacattttcttccattattagtgcttcaattttattaat

SEQ ID NO: 214291 - DNA, 611 bp, Homo sapiens
acagtatcacctctgagacattcctatcaaaaatacataatttgtgtctaaagcgaaaatattagacaaacccaaattgagaatagcaaacagaatggctggcctgtaatcttctaaatatgtcaagatcatgaagataagagaaaactgaagaattattcctcaaggaaagagactataaagacatagcaactgaatgcaacacattatcctagatttaattcttctgctgtaatgaatataattgaaacaattgaagaaagttaaatatgttctgtgatcaaaaggtatatgtctattctttgtattacctttgcaaataccctgtaagtttgaaactgactttaaaaacaaacaaacaaacaaacaaacaaagactcatgacttcaaaatcaaatctacaaagcttgattttctttgaattttcaacyttttctcattcatgagtgttttggtgaaaatttgagagattactagccaaaagaccattttaagccagaaaacaagtccacatgcatttttcaggaatttgtcttttgcaccaagaaaggtataatttctattttaaaaaccacattttcttccattattagtgcttcaattttattaat

SEQ ID NO: 214292 - DNA, 597 bp, Homo sapiens
tgattttaaaaacctcagtgaaatgcaagagaattatgaaaaacaatgcaaagaaatcaggaataaaaaaccaattcaggatatgaatgagaagtttaccaaagatattttttaaagaaccaaatagaaattctggaactgaataattcattaaaggaaatacaaaatacatttgaaagtttcaacactagggtagatcaagcagaataaaaaaaaaatctcagaacttgtaatctagtcagaaaaaaaataaagaacaaacaataaaaaataatgaaagcaaagcctttgtgactgctggaacaacataaagtgaccaaatatttgagttattgatatccttgagggcaaagagaggaagaaagaattagaaaacctatttaatgaatcaatagataagaccttccaaaatgtagcaagagatttgcacattcagatacaggaggctgaacaatccataggcagatacratgcaaaaaagtcttatcaatagcaaaatatattcagtcagactgtataaaataaaagataaagagcaaatcctaaaaacagcgtgaaaagcttctagtcaccaacaaaagaaacctcatcagacta

SEQ ID NO: 214293 - DNA, 535 bp, Homo sapiens
aatagaattccaatgcgtgattggaggtcgtgatgacccatgggagcaatcggagaagtagagtaaggagcgtgaaccagattatagtaggttgggaaaaaaatgataagtgaggagtagaaacaatgggtataaatcactctgattttgagaagaatttagattagaaaatgccaaggacaagagagtcacagggctttttcagaaaaaaaaaatatcatcctacatgtattgtttatgaaacattgaatatgggacwcaaatgttctatttaacagttaaccatgtacgaaatggtaaattccttccaaattacttccacttactaatcagctttcatctcctaattacagaaaggatcacaatgaagcacattaactgcattagtaaatactcaagtgatcaagtgatttccatatgcctctgctgtcagagtccccatgagaatgccctaggcaactgagtacttgactgactttcatgagaaaggtcttggcttcccctagaacatgtatttcacaatgaagagtaaaat

SEQ ID NO: 214294 - DNA, 396 bp, Homo sapiens
cgctttcttggtttcttgagattgacactgataggaattggctttctttttaaaacttcactttcaggagtcacagttatgattcatctgaccattccccagagatatttmtgtaataataaattgtgccttattcatcctttattccaagtgactttcagtagaacagtattttaagatacctactagatgccagatatcacttagtctcaagcctagataaaatagtgataataacaatattattattatattattattattaggcctcagtacatgccagggatcttaaatgttttttaaatatataatctcatttaatcctcaaaataatcttataagtgtagaattaattttcccaattttaaaaatgaggaaaccaagattcatagatgg

SEQ ID NO: 214295 - DNA, 381 bp, Homo sapiens
tgccatgttaactctgcagcctgctttaattacatggttatgttcctttttatatatgtgtggatatatgtgtatgtggcaaaaacatttttaaagtttagacccaaaggccrtagttataaaagattcattttgagtcagtcaataggaatttatgtttgtggaattgtttttgaaaactaatcatttaaaatctatcatagtctatggattcacctcatttaataaataatcagaataatagctaacagttgttatattaggcagttttctaaatgtcttacatgtcttatttaatctccacataattctctgacttaggtagtattctcattttatagataaggaatctgaattaaatttaaaaattatttctatatt

SEQ ID NO: 214296 - DNA, 556 bp, Homo sapiens
tggcctcccaaagtgctgggattacaggcgtgacgaccacgcctggccttggagattattattctaagtgatgtaactcaggaatggaaaccaaacatcgtatgttctcactgatatgtgggagctaagctatgaggatgcagaggcataagagtgatacaatggactttggggacttggggggaagggtgggaggggggcgagggataaaagattataaatatggtgcagtgtatacttcttgggtgatgggtgcaccaaaatctcacaaatcaccattaaagaacttactcatgtaaccaaatactacctgtaccccagtaacttatggaaaaataaaattwaaaataaaatttaaaaattataataaaagtttgacatattaaaaagaattaccaaaaggtgaatcagagacacaaagcaggtatatttcattggaggatgccaatgattaagacttgcttgacacaggattgccagaaactttcagtttgtgaagaagtacaataaaatgaggtatgtctgtatattcataaaattatgcaaccatccccac

SEQ ID NO: 214297 - DNA, 564 bp, Homo sapiens
ggtgatccgcccactttggcctcccaaagtgctgggattacaggcgtgacgaccacgcctggccttggagattattattctaagtgatgtaactcaggaatggaaaccaaacatcgtatgttctcactgatatgtgggagctaagctatgaggatgcagaggcataagagtgatacaatggactttggggacttggggggaagggtgggaggggggcgagggataaaagattataaatatggtgcagtgtatacttcttgggtgatgggtgcaccaaaatctcacaaatcaccattaaagaacttactcatgtaaccaaatactacctgtaccccagtaacttatggaaaaataaaatttaaaataaaatttaaaaatkataataaaagtttgacatattaaaaagaattaccaaaaggtgaatcagagacacaaagcaggtatatttcattggaggatgccaatgattaagacttgcttgacacaggattgccagaaactttcagtttgtgaagaagtacaataaaatgaggtatgtctgtatattcataaaattatgcaacc

SEQ ID NO: 214298 - DNA, 564 bp, Homo sapiens
ggtgatccgcccactttggcctcccaaagtgctgggattacaggcgtgacgaccacgcctggccttggagattattattctaagtgatgtaactcaggaatggaaaccaaacatcgtatgttctcactgatatgtgggagctaagctatgaggatgcagaggcataagagtgatacaatggactttggggacttggggggaagggtgggaggggggcgagggataaaagattataaatatggtgcagtgtatacttcttgggtgatgggtgcaccaaaatctcacaaatcaccattaaagaacttactcatgtaaccaaatactacctgtaccccagtaacttatggaaaaataaaatttaaaataaaatttaaaaattataataaaagtttgacatattaaaaagaattaccaaaaggtgaatcagagacacaaagcargtatatttcattggaggatgccaatgattaagacttgcttgacacaggattgccagaaactttcagtttgtgaagaagtacaataaaatgaggtatgtctgtatattcataaaattatgcaacc

SEQ ID NO: 214299 - DNA, 556 bp, Homo sapiens
tggcctcccaaagtgctgggattacaggcgtgacgaccacgcctggccttggagattattattctaagtgatgtaactcaggaatggaaaccaaacatcgtatgttctcactgatatgtgggagctaagctatgaggatgcagaggcataagagtgatacaatggactttggggacttggggggaagggtgggaggggggcgagggataaaagattataaatatggtgcagtgtatacttcttgggtgatgggtgcaccaaaatctcacaaatcaccattaaagaacttactcatgtaaccaaatactacctgtaccccagtaacttatggaaaaataaaatttaaaataaaatttaaaaattataataaaagtttgacatattaaaaagaattaccaaaaggtgaatcagagacacaaagcaggtatatttcaytggaggatgccaatgattaagacttgcttgacacaggattgccagaaactttcagtttgtgaagaagtacaataaaatgaggtatgtctgtatattcataaaattatgcaaccatccccac

SEQ ID NO: 214300 - DNA, 556 bp, Homo sapiens
tggcctcccaaagtgctgggattacaggcgtgacgaccacgcctggccttggagattattattctaagtgatgtaactcaggaatggaaaccaaacatcgtatgttctcactgatatgtgggagctaagctatgaggatgcagaggcataagagtgatacaatggactttggggacttggggggaagggtgggaggggggcgagggataaaagattataaatatggtgcagtgtatacttcttgggtgatgggtgcaccaaaatctcacaaatcaccattaaagaacttactcatgtaaccaaatactacctgtaccccagtaacttatggaaaaataaaatttaaaataaaatttaaaaattataataaaagtttgacatattaaaaagaattaccaaaaggtgaatcagagacacaaagcaggtatatttcattggaggatgccaatgattaagacttgcttgacacaggattgccagaaactttcagtttgtgaaraagtacaataaaatgaggtatgtctgtatattcataaaattatgcaaccatccccac

SEQ ID NO: 214301 - DNA, 588 bp, Homo sapiens
aagcttgccacgagtcagcttacaacttataaaaaataattaggcacttttacattctgtcttctaactctccacttcagagtggcccttcagagtttgattcttgaggctattctttattgatgggtgacatgcctttccctgaataatagcaatcctagctaacaattagtgcttgacatttgaagtgctttaaatcctttgaaaacccccaaagatttaagtattattattattrcctccattctatagctggagagactcagttacaggggcagggtacatcatctgtgcacagccacaccgttgacacttggcaccagaattccaagttgctcttaatcactctgtagttctgcctccaaatagtgagagaagagagccactgggtggaaagccaagtttgcaagcagagagactggactgtgagtcacaatgggagcaagtggttaggacagcaaaagcagtggctcatgagatgtgagcatatgtggttgactgattgatgaatgtgggagctctgagtacataacactattaagtggatgactccttgaaaactggacataggacatgcaaggcattatt

SEQ ID NO: 214302 - DNA, 588 bp, Homo sapiens
aagcttgccacgagtcagcttacaacttataaaaaataattaggcacttttacattctgtcttctaactctccacttcagagtggcccttcagagtttgattcttgaggctattctttattgatgggtgacatgcctttccctgaataatagcaatcctagctaacaattagtgcttgacatttgaagtgctttaaatcctttgaaaacccccaaagatttaagtattattattattgcctccattctatagctggagagactcagttacaggggcagggtacatcatctgtgcacagccacaccgttgacacttggcaccagaattccaagttgctcttaatcwctctgtagttctgcctccaaatagtgagagaagagagccactgggtggaaagccaagtttgcaagcagagagactggactgtgagtcacaatgggagcaagtggttaggacagcaaaagcagtggctcatgagatgtgagcatatgtggttgactgattgatgaatgtgggagctctgagtacataacactattaagtggatgactccttgaaaactggacataggacatgcaaggcattatt

SEQ ID NO: 214303 - DNA, 588 bp, Homo sapiens
aagcttgccacgagtcagcttacaacttataaaaaataattaggcacttttacattctgtcttctaactctccacttcagagtggcccttcagagtttgattcttgaggctattctttattgatgggtgacatgcctttccctgaataatagcaatcctagctaacaattagtgcttgacatttgaagtgctttaaatcctttgaaaacccccaaagatttaagtattattattattgcctccattctatagctggagagactcagttacaggggcagggtacatcatctgtgcacagccacaccgttgacacttggcaccagaattccaagttgctcttaatcactctgtagttctgcctccaaatagtgagagaagagagccactgggtggaaagccaagtttgcaagcagagagactggacwgtgagtcacaatgggagcaagtggttaggacagcaaaagcagtggctcatgagatgtgagcatatgtggttgactgattgatgaatgtgggagctctgagtacataacactattaagtggatgactccttgaaaactggacataggacatgcaaggcattatt

SEQ ID NO: 214304 - DNA, 588 bp, Homo sapiens
aagcttgccacgagtcagcttacaacttataaaaaataattaggcacttttacattctgtcttctaactctccacttcagagtggcccttcagagtttgattcttgaggctattctttattgatgggtgacatgcctttccctgaataatagcaatcctagctaacaattagtgcttgacatttgaagtgctttaaatcctttgaaaacccccaaagatttaagtattattattattgcctccattctatagctggagagactcagttacaggggcagggtacatcatctgtgcacagccacaccgttgacacttggcaccagaattccaagttgctcttaatcactctgtagttctgcctccaaatagtgagagaagagagccactgggtggaaagccaagtttgcaagcagagagactggactgtgagtcacaatgggagcaagtggttaggacagcaaaagcagtggctcatgagatrtgagcatatgtggttgactgattgatgaatgtgggagctctgagtacataacactattaagtggatgactccttgaaaactggacataggacatgcaaggcattatt

SEQ ID NO: 214305 - DNA, 602 bp, Homo sapiens
ctatttagaaaccatcatagtttattcaccttaaaaaattgattgtattatttaaatatatcacttagatgggcatttcctataattaggatattccaaatagttgctgaaatcaattgtgccattgaccaatggatgcacttggttagccttaatttttttwaaaaaaaaaaaaacaaaaactttcttgaatatttcagtttgttcattttaagtttgtgctgctggtatttgggaagaaaaatcaatcagttaagtgctaccagaaagtgtaccaatttttataaaaattaagaatgatataaatttcacaatctaaaattttaattttgtgcaatattttcatttaatgcatgtgtatttgagtaattgtaagataaatgaatttttaattttttgagatgtagcttaaactgtcttcttaatccaacaacttacattccgttgttgctgcatccttttatttaaggacttgttttaaaagtctttttgtcactccttggaaaattcttttattagtagtaaattttgcttttaggagcatggctcctgtattacaagggaaaaaatatgaagagcacattttaggattataattgtta

SEQ ID NO: 214306 - DNA, 622 bp, Homo sapiens
ttaacaggtttttttgttggcaaaacagagtcagctttttttgttgttttaaaaaaactctgccttttactttgtattattgtattattgtattgtaatgtattagatgtggtcgttttaatgtgttaaatgtagttaaaccatttgtttttaattattgatacggttgaatttaaatttgtcttgctgtagctgctttatatttgtcccatttgttctttattcccttttaatctttttttgtattgaatattttttatgattccattttatcttctctagtrggttattattagttttactttctatttaaactgagtggtttctctaagatctgaaatatacaactttaattcaccacagctgccttaaaatattatacagctttgtttatagccggtcttataacagtatatttctataagccctgtaataaacttatttattttatgttagtcagacatctcttaaagtgattaaaaagaagaacagtactgtttatatttacatttcttgttaccatttccagtgcttttgtttctttttgcagatccaggttgctatctggtaatatactcctgccagaaaatttttaatttaacattcactgtggcacatgtct

SEQ ID NO: 214307 - DNA, 606 bp, Homo sapiens
  misc_feature (1)...(606): n = A,T,C or G
cctgattgtgctatatggactgactcagttatctagctggaagaaatctttattcactaaatatttattgaaagttattatgtgccaggtgctgttctttgcacttatgtttgccttcttggagcttactttccagtagaaatagagagactcaaaaacacacagaacaaataaatggaacgtagtttgttagataagtggtaagtactaaagagaaagatactgcaggaaaatggaatagatagtgtcagatgagttgcagttttagatggggtggccaggcaggcctcactgagatgatgatggtggtgtgaagatctgaaggaagtgagggtaaatatgaaagcatataaatttatatatacataatccttgcctattttttagtaaattctcaaaatttttgctttaaattatatcktacccctagttagataaagactttttggaaattgcatgtttctttccgaaagcagcaaaataatatctatattatcagtattatgaataattatttgtaattatgaataagaatatgaataattaataatcatacatgttggtctcataacttggtgttatttatgattaaacagccnnnnnnnn

SEQ ID NO: 214308 - DNA, 606 bp, Homo sapiens
  misc_feature (1)...(606): n = A,T,C or G
cctgattgtgctatatggactgactcagttatctagctggaagaaatctttattcactaaatatttattgaaagttattatgtgccaggtgctgttctttgcacttatgtttgccttcttggagcttactttccagtagaaatagagagactcaaaaacacacagaacaaataaatggaacgtagtttgttagataagtggtaagtactaaagagaaagatactgcaggaaaatggaatagatagtgtcagatgagttgcagttttagatggggtggccaggcaggcctcactgagatgatgatggtggtgtgaagatctgaaggaagtgagggtaaatatgaaagcatataaatttatatatacataatccttgcctattttttagtaaattctcaaaatttttgctttaaattatatcttacccctagttagataaagactttttggaaattgcatgtttctttccgaaagcagcaaaataatatctatattatcagtattatgaataattatttgtaattatgaataagaatatgaataattaataatcatacatgttggtctcataayttggtgttatttatgattaaacagccnnnnnnnn

SEQ ID NO: 214309 - DNA, 563 bp, Homo sapiens
agacccatctttagtgactgtactggcagtgaatcaatcattgccacctttggctccttgtttgctgaggtcttgttgtttctgggacttgaaactggaatggtttttagggaggatttttttctattattttgtcctgcatattttagtacaaaattataaacacaatacaaaaaatacttggtgtttcgccccaagaacataaccaacatgaatggaaatgtttctgtcagcytgtggctttcaaaatctgaacacctgatacaccgaaatgaactcacaggatgatttgttagggctgactgtattatctttatttatttatttatttttgttgaatcagtttaaagaatttttacaggaagtctcctatttattctatagaaaaatcaaggaggtaattggaactgacctttggctcttctgttggttgaccctgtggaaataaagagttatgattccttgagtttgtgtgttcacttttaggaacagatttctctggaagtaaattccacttgtataacaattagatcttacagttaaaaattataattaaaaaatgt

SEQ ID NO: 214310 - DNA, 585 bp, Homo sapiens
tgactgacagctaaggtcagtagttttcarttggtggtaatttggcaccccagacactatttggcaatgtccacatacatttttggttgttacagtgggggagggggtgctactggcatcacctaatgggcagagcccagggaagaggccatctcaacattaagaggtatttctactagtgaagtaaaccatgtttttttttctaacagcctaagaatattacaccaaaaaaagaattttatgtagacatattaacaccaagcatttattagttttcaatataaatctgacaattattttgagtatctcttaatacctggtgttgagatgttaaaaaaaattaagttgaacttctcttagattaattccattactattgtaaatgttcttaaatattaggtactaatggacagaataagtaaaataatggattacctataatgcgcaggatagttcccacaacaaagaattacatagcccaaaacgtcaatagtgccactgctgagaaaccatgacatagactctggagccagcccacctgggttgagatttcagcttgatgaccagttaccagttgtgaagctt

SEQ ID NO: 214311 - DNA, 585 bp, Homo sapiens
tgactgacagctaaggtcagtagttttcaattggtggtaatttggcaccccagacactatttggcaatgtccacatacatttttggttgttacagtgggggagggggtgctactggcatcacctaatgggcagagcccagggaagaggccatctcaacattaagaggtatttctactagtgaagtaaaccatgtttttttttctaacagcctaagaatattacaccaaaaaaagaattttatgtagacatattaacrccaagcatttattagttttcaatataaatctgacaattattttgagtatctcttaatacctggtgttgagatgttaaaaaaaattaagttgaacttctcttagattaattccattactattgtaaatgttcttaaatattaggtactaatggacagaataagtaaaataatggattacctataatgcgcaggatagttcccacaacaaagaattacatagcccaaaacgtcaatagtgccactgctgagaaaccatgacatagactctggagccagcccacctgggttgagatttcagcttgatgaccagttaccagttgtgaagctt

SEQ ID NO: 214312 - DNA, 394 bp, Homo sapiens
taacatataaatggaaaacaggttattaaaggaatgcttaacagcacttatcatcatagaaatacaaactacaatgagatactatttcactccaagttaaagatggcttttaacgcaaaaagaaagggcaatcaatcaaactgcttgcaagtatgtaaagaaatggataaagaaaacatggtacatacacaaaatagaatattattcagccattaaaaaaagaatgaaatattgactgagggacattatgttaagtcaaattaaccatgcacagcaggccaaatatgtgggaactaaaaacaaaacaaaacamagactgaactcatggagatacagtgtcaaataatgtttctttaccagatgctgagaagggaaataaagaaggaatggctaa

SEQ ID NO: 214313 - DNA, 440 bp, Homo sapiens
catggttttcaaccacggacctgcctcctctccgtcttccaaattttggtaaatggaattgctatatactcagttgcacaagtgagaagcctgtgagccattctcgattactttttctcttatgccctatatcaagtccatcaggaaatatcttttgaccctgctaccctaatgtctttcagagtttcactctgtcacccaggctggagtgcagtcgtgtgatcttggctcactgcaacctccatgtcctgggttcaagtgattcctgctttagcctcctgagtagctgggactacaggcacgtgccaccacacctggctaatttttgtatttttgtttcaccatgttggccagscaggctggtctcgaactcctgacctcatgtgatccgcctgccttggcctcccaaagtgctgggattacaggtatgagccaccaca

SEQ ID NO: 214314 - DNA, 609 bp, Homo sapiens
attcatctaaaaaattattagagaacctaaaataaaaatctaaaaatattcaagtaatcccaaagaaggtaagaaaagagscatagaaataataagaaagatgatatacataaattaaaattctacgattctatccaaagtaattgatattggcattaaatattaatgaatttaacacactaattaaatggaagatatttaatctttaatgtttatgatgcattacttacaaagtggagaaaaatactttgacaaatgatatattttaaataaatagacatagatatgttgaagataattatatagaaaaaaacatcatgtcaaaggaataaaaggaataaataggctgtgttttctacattcctataaaaaagtaggtatcatgagaaatatgaaaagaaaaaaatggaaatatttcataatgataaaagattattcagaagataaaaaattgaaaatgtttatgtacagaagagctttcaaatacataaaagtaaattgataggcatagaaagagaagtagaatatatcataagcagaatgtgtgacagtaaacttatctttcagaaactgacaaaagcaactaaaaaaaaatcagcaattacatag

SEQ ID NO: 214315 - DNA, 602 bp, Homo sapiens
tcccttaggaaaaataagactactgcggctgacaaaagttcttacaaccatactgtatttagtttctaataagaggtatctagaactatttgatagaattttgaaatacataccatattcttgaaatttgaagagtaaaawtctttttctaaattaataaatatcttgctctattctcaggcctaacaatgctttgaaatccatggaatttaaaaatgacggataaaacctctgattttgcaacattcaagaaagaaaaggtaaaacatgattgaaatatctaaattatatgttcagtttattttaaaaatccagactggaaaccactagggaatatataaaaacagacctattttaatatagatggatgaagacaggcattcagcaataagaaaagatttagtaaaactcgagggaatatcatgtctgtttctactttaaaaagtgtgcaatatgtcccttttcttaatttacagagtttctattgtttaaagagttgaaaaagaagtttacttagcatcaaaattgaaggtactatcatttcataggaaaggaaggagaaaaaagaaagggagggaggttttatcaaagattcacatagg

SEQ ID NO: 214316 - DNA, 598 bp, Homo sapiens
agtaattagtgcattattttgtaaaataaagacatcttgggatacatgttataaaaatctttctgatagggatgcctatcagaaatataggtgttctaattacaacacctattcttttgatttraattacaaaaataaaaataaccatttagttatttattttgattacctaaatgatttactggggtccaaatcatgtcaggagcacaatcacaaatatctagttttcagaaaatataattaaccatgcagttaaaaaattgggttaccaaagctatatccatccctaaagagaagccagctcatgcttgctgtcaaacatacccgaaagcaagtcctcaaactgcaccttagcttggtttgggagaaccagaaaggcaaagcaaatctgttttgatatgtttttctcaactttaacctgggtttttgttgttgttgtattaaagctgtagtgctcttttatatatggtgaaattgtctttattctttgcttagtaataggctgggaagcttatcacatttccagcactagttcaaagacagaaactattttattttttaaaagaattattttaaaataataattcttgcttttgtt

SEQ ID NO: 214317 - DNA, 479 bp, Homo sapiens
gaccacacccggcccagggcctgatctttaaagaaatgtcttctctgacttgtattctctactccaacccttcaggctaaagccattttagttaacctccttttggacaaacttctcatcatttccgttggaactctggcctcttggccagcaactccttgcactttgtctttgaaaataccatttctctctctcaaccccttctcccacagtgttctgtgagcccctcgacttcttttcaactttttactatttaatataaaatctaagacaagatacattaaatgcttattggcatatatttartcttcacctagtacatagtatttgtccaattttaaactttcttccattttataggtttcaattaatcttttttaaaaaaatgttttaacatttattttaagttctggggtacatgtgcaggtttgttacacaggtaaacttgtgtcactggggtttgttgtacagattacttc

SEQ ID NO: 214318 - DNA, 566 bp, Homo sapiens
attcgcagctctctgggcaggcccttacgtgtgcatatcctgttccttgtaattggaattgtgtttgcaaatccctctacacccaggtgaggttgtattacacccctgcatgttggatggagaagaaaacacagtctgcttaaaagagggcaattcaacttcctctaaaaactggagactatgggtgagctttttgcaaccacagcctttcaaggaatgtgattgcaatcacaatactgcwatggtgctctcctcatttcttaaaaacattcataaaatttatattcaatgatagcttagatagaggtcttccctagctatgcagtaagtctttagaaagagatcttgatgttgcctcttgtgacatgtttctaagaaactacattgttataatgcagacctaatctctgcttggcatatgagcagatgatataagcagacaataacatatgttgcaagagaggggtaatgcagttaattgagttggcaagtaaccaactaggatagtttttactaataacctttgctaggtacagttacttcctcctatttgaaagcctttaaat

SEQ ID NO: 214319 - DNA, 566 bp, Homo sapiens
attcgcagctctctgggcaggcccttacgtgtgcatatcctgttccttgtaattggaattgtgtttgcaaatccctctacacccaggtgaggttgtattacacccctgcatgttggatggagaagaaaacacagtctgcttaaaagagggcaattcaacttcctctaaaaactggagactatgggtgagctttttgcaaccacagcctttcaaggaatgtgattgcaatcacaatactgctrtggtgctctcctcatttcttaaaaacattcataaaatttatattcaatgatagcttagatagaggtcttccctagctatgcagtaagtctttagaaagagatcttgatgttgcctcttgtgacatgtttctaagaaactacattgttataatgcagacctaatctctgcttggcatatgagcagatgatataagcagacaataacatatgttgcaagagaggggtaatgcagttaattgagttggcaagtaaccaactaggatagtttttactaataacctttgctaggtacagttacttcctcctatttgaaagcctttaaat

SEQ ID NO: 214320 - DNA, 642 bp, Homo sapiens
actaaggtcacaaaattgctattgttttaaaatatcagaaaaataacaaactcatttgcgtttccaaatactcacatagtgtttcttctttatgtaatggtaatatggaaatcagtattctgtatgacctaatttaaagggataagtgcttgagtacatrcactcagttcagtgttccaaaataatttactgcatataactccagggatatttaaattatataaagagtttaaaaacatgatttccatattgaaataggtagaccaactagttggcactgtgtcagatgagagacaatagaagcttgttctattatttacacaaattgactggtttggcagttgctacagcaatgagccataatgaactacagaaaaatgaaaatgtgatttctttagcactatacaaaaatggaatatttacagaaaggcagagaatgacttacaagagccctagctgtgtcaaaatggtattccttgttgctacttatccagaatgtaatccaaatagtgtatgtttactggggcaaaattgtaatgatgggccattattttcctgctgttagtaaggggactgtgctttgtaattccaaaggaatttaaaatgttcattttccatgatttacttttcacttttgactat

SEQ ID NO: 214321 - DNA, 435 bp, Homo sapiens
agatcttcaaataaatatgcactttatataaatttcatagaatcacatgaatgaaggagtttgcaagaccacaggtgacagttaatttcttgggtcatcttggctagagtatggtgccctgttgtttgttcaaacaatagtcttgatattgctattaatgtatttttacatgataagtatttacaatcagctgaactaaattaaagcagattatactccctaatgtgggtgggcttcaaacaatcagttgaaggctgtagagcaaagkctgggttttcttgaagcagaaagaattctgcttcaataactcttgacccctgtattatttggatctgtgtcccattcaagtctcatgtcaaattgtaatctctaatgttggaggtggcgcctggtgggaggtgattgaatcatgggtgcagattttctccttagtac

SEQ ID NO: 214322 - DNA, 435 bp, Homo sapiens
agatcttcaaataaatatgcactttatataaatttcatagaatcacatgaatgaaggagtttgcaagaccacaggtgacagttaatttcttgggtcatcttggctagagtatggtgccctgttgtttgttcaaacaatagtcttgatattgctattaatgtatttttacatgataagtatttacaatcagctgaactaaattaaagcagattatactccctaatgtgggtgggcttcaaacaatcagttgaaggctgtagagcaaagtctgggttttcttgaagcagaaagaattctgcttcaayaactcttgacccctgtattatttggatctgtgtcccattcaagtctcatgtcaaattgtaatctctaatgttggaggtggcgcctggtgggaggtgattgaatcatgggtgcagattttctccttagtac

SEQ ID NO: 214323 - DNA, 435 bp, Homo sapiens
agatcttcaaataaatatgcactttatataaatttcatagaatcacatgaatgaaggagtttgcaagaccacaggtgacagttaatttcttgggtcatcttggctagagtatggtgccctgttgtttgttcaaacaatagtcttgatattgctattaatgtatttttacatgataagtatttacaatcagctgaactaaattaaagcagattatactccctaatgtgggtgggcttcaaacaatcagttgaaggctgtagagcaaagtctgggttttcttgaagcagaaagaattctgcttcaataactcttgacccctgtattatttggawctgtgtcccattcaagtctcatgtcaaattgtaatctctaatgttggaggtggcgcctggtgggaggtgattgaatcatgggtgcagattttctccttagtac

SEQ ID NO: 214324 - DNA, 400 bp, Homo sapiens
atttcatagaatcacatgaatgaaggagtttgcaagaccacaggtgacagttaatttcttgggtcatcttggctagagtatggtgccctgttgtttgttcaaacaatagtcttgatattgctattaatgtatttttacatgataagtatttacaatcagctgaactaaattaaagcagattatactccctaatgtgggtgggcttcaaacaatcagttgaaggctgtagagcaaagtctgggttttcttgaagcagaaagaattctgcttcaataactcttgacccctgtattatttggatctgtgtyccattcaagtctcatgtcaaattgtaatctctaatgttggaggtggcgcctggtgggaggtgattgaatcatgggtgcagattttctcctta

SEQ ID NO: 214325 - DNA, 450 bp, Homo sapiens
atttcaataattaccttaaatggaaatagtctaaatataccaatcaaaagaaagaaattgtaataaaatacatgcacacacaaatacaatagtacatcacttaaaagtacattccttcaaattgactccagctattaaaagggtgtcaagagaatactatagataactttatgtttacatacttatgtgttaagttaggagttaactgattactcaaaaccacaaactactaaaactcaatcaagatggaatagctaatccagttggttctctaatcattaaaagaattaaattttaattagaataytctaaaaggaaatccagagtttcctgttttatcagtgtagaagtgtaaaaacttttaaaacagtattaacaccaattccctgaaagaaataatacagagagctcccatatacatatctcatatacatactgtagtacaaagtc

SEQ ID NO: 214326 - DNA, 580 bp, Homo sapiens
atactaaaataatgtattatgtgataaatattaatattttaatataccctgagatttactaaaattattttatataacaaaatatttgctaactgaaaaatgtaatttccaaaatgattcaagggaaaacatttcacttaagatattcactagtactatttagaayatataatctattaaccaatatatttctcatagacatgaaagtaaataaacgctattgcgtttatattatgatgtactttctgaatattttatgacatattcttattctggtctactcttctaaaatgctagttttattttcttttaattgtcttaaattcttagaatgtggaatgcacataactagttactgcttattaatttaaagacatttgtcaggaggaaaacttccaaacagatctgtgtgctttttgctgctgctttctgaatagttagcatagtccttagcacataataaacattcgataactattcactgattaaatggaggaatgaatgaatggctacatgaatgaaaatgtataaacacataacggtctgaatgtttctaggagtgctttagtgatttcacttg

SEQ ID NO: 214327 - DNA, 580 bp, Homo sapiens
atactaaaataatgtattatgtgataaatattaatattttaatataccctgagatttactaaaattattttatataacaaaatatttgctaactgaaaaatgtaatttccaaaatgattcaagggaaaacatttcacttaagatattcactagtactatttagaacatataatctattaaccaatatatttctcatagacatgaaagtaaataaacgctattgygtttatattatgatgtactttctgaatattttatgacatattcttattctggtctactcttctaaaatgctagttttattttcttttaattgtcttaaattcttagaatgtggaatgcacataactagttactgcttattaatttaaagacatttgtcaggaggaaaacttccaaacagatctgtgtgctttttgctgctgctttctgaatagttagcatagtccttagcacataataaacattcgataactattcactgattaaatggaggaatgaatgaatggctacatgaatgaaaatgtataaacacataacggtctgaatgtttctaggagtgctttagtgatttcacttg

SEQ ID NO: 214328 - DNA, 620 bp, Homo sapiens
gcaatcctactatatttgttttcattttctgagcaacaatgaaaacacagagtaaaagggaaggaaaaaaatgaagtaacatctcttaaaataaaaaaataattagtaccttgaactctaaacactttggaaaataaagctttctatgaaaaaagggaaagcaaaacaaaatatataaagcaaccaacaattaaattgtcttagtataaaacagaagagaagaggagaacattacaaataataaaagtatactgtgttttgaaatacaaaaatgaatgcctcaataattttcagatatgcattgggaaatgaattcttacagtttgaataataaaatacaatctgcagaagtgtttaaaataaacaaatatactctggtttgtcttaagattgtataactctctttaagggaaataacttttatcacaaactttatatagatgtagtcatgtacacacatataataaaygtttttaaagtaacttttatcacaaactttatatagatgcagtcatgtacacacatataataaacaatgtttttaaagtaattaagtaatatcaacagtcattaaaaaaggtaataaggctaggcacagtggctcatgcctgtaatcccag

SEQ ID NO: 214329 - DNA, 375 bp, Homo sapiens
gactttgtcacatctaacacaatgagaaaatttgacaattcagtgtggggtgaaaaaaatgaggagataaaatcaatagtaaagaagaggagtggatacttttcttgcatgtttcacaactaaatctggacttaaggacagttagatatattggatttattatctgaatcttatctcattgcattaggtaataaaaaggccagttgtagaacaaagaatcagtaaatatgtcacagagcacaaagcttaacctgaaaggagtctatttttttttttctattcagcacrtctcagtttgcaaaaaacatttcaataaagtttctgtgcaacagagggtaattaggagaaaatgaccttgaggtttatactgctttt

SEQ ID NO: 214330 - DNA, 441 bp, Homo sapiens
aatctgcaaaaaaaagaatcatgacatcatcaaatataaatgaattcatatttttgttttcaatccacatacaatcatattttcttgccttactgcctttttcccaaacttasagcattcattatttcatcacaattataatgtgactcatacatctttcatggagtcctcttactcagttgagaaatccctttgtatttctaatttgtcaaattttttaaacatgaatagaaactgggtcttttatatatacctattggggtgatcacaggatctttctcttatcgtctcttaatacagtaaattgcaacagtggacttttgaacattgaaccaacctcacattctaggaatgaacaccaatcagttagtgtgtgttacttctattacatattgatggatttaccatcagaaaattctgtgaggaattatttgtatttgt

SEQ ID NO: 214331 - DNA, 441 bp, Homo sapiens
aatctgcaaaaaaaagaatcatgacatcatcaaatataaatgaattcatatttttgttttcaatccacatacaatcatattttcttgccttactgcctttttcccaaacttagagcattcattatttcatcacaattataatgtgactcatacatctttcatggagtcctcttactcagttgagaaatccctttgtatttctaatttgtcaaattttttaaacrtgaatagaaactgggtcttttatatatacctattggggtgatcacaggatctttctcttatcgtctcttaatacagtaaattgcaacagtggacttttgaacattgaaccaacctcacattctaggaatgaacaccaatcagttagtgtgtgttacttctattacatattgatggatttaccatcagaaaattctgtgaggaattatttgtatttgt

SEQ ID NO: 214332 - DNA, 263 bp, Homo sapiens
cttagcatgagatactccatttcggtttggtatagtttgttggggcctagtgcataagcctagtccaaaacaatggcctcccataattttgtttaaaaaaattcctcctctttggtcaggctctcacttaggtgasagtgtaaacaaaacttagggccttagtgccactctcagttaccatcattttgggtttccagtctcagcaggtcatttataggttacaatgtcctcatggttgcacatttatttcagctcctgttatt

SEQ ID NO: 214333 - DNA, 544 bp, Homo sapiens
ttacaacttgtgctctcctgagagacagcctgagccaaacctggacccacttgagccaaagctgggagagctaaaacgcactgtaacagaatgtagggagaggaaccttgaaatcatttcttcaccaaagccctggtgttctggggccatgattggcttggcagtgtgaaaatcttcaaaatgcctttggggtaactctattgtyttccacccatactaatctccttatcaaattgttcacctgacaacaccattggtgttctctcctaatcttgtttttttattctttacaatatgttaaggctaagaattttccaaatatttaagttttgattccatcttgattacaagttccatctttaattcattgatcttatcttgcatttccctataagcagtcaagagaagccatgtggcatcctcaacaccttgcttagccatttcttccaccaaatatccaatttcatcactcttaattttctccttccacaaaacactaggacaggaacacaattaagacaaattatttgccacaatataacaa

SEQ ID NO: 214334 - DNA, 544 bp, Homo sapiens
ttacaacttgtgctctcctgagagacagcctgagccaaacctggacccacttgagccaaagctgggagagctaaaacgcactgtaacagaatgtagggagaggaaccttgaaatcatttcttcaccaaagccctggtgttctggggccatgattggcttggcagtgtgaaaatcttcaaaatgcctttggggtaactctattgttttccacccatactaatctccttatcaaattgttcacctgacaacaccattggtgttctctcctaatcttgtttttttattctttacaatatgttaaggctaagaattttccaaatatttaagttttgattccatcttgattacaagttccatctttaattcattgaycttatcttgcatttccctataagcagtcaagagaagccatgtggcatcctcaacaccttgcttagccatttcttccaccaaatatccaatttcatcactcttaattttctccttccacaaaacactaggacaggaacacaattaagacaaattatttgccacaatataacaa

SEQ ID NO: 214335 - DNA, 584 bp, Homo sapiens
atgtcacttgttattcgtgcagaaatatgcaagctttgactctgcagtatgtagccagtaacacaatttcaatagaatattggttgttatgactttcatcatgatgtttaatattgagttgcttgttctttcacagtgaattagaattaagaaatgcttcaagaaaattgaacctagactagcatttcaggcttcagttaattccttagtttctcttttaatgtagtatgtagaaatacttatccttccacttctctccatttctttccctatcaaagtttactcttttgcttagctgatatgcccttttcttctgaacttaaattcatagacaaaagaaatatttttacrtcttcttattctatgtacatcatgcttctaacattaattgcaactcaagcagcaagaaaataaatgacatttacagtgaggaagaaaaacagattctgtagtaacttcaagataccaatgtaaattaaataaaaactgggagaactagactttttttcacatgaatagatatttgctcacagaataaatacaagtttgcttgagtggaaaaaccactgattggcaaaagacag

SEQ ID NO: 214336 - DNA, 445 bp, Homo sapiens
gaagcttagtgagatatgagagaacttggaaaaaataaaatgaaaaacagaaaaataattcatcatgtgaataagaaatgttcaaaagaggtagagatcataacaaagaaccacacagaaattatttaaccaaaagattcattgaataaaacataaaatacatttgaaagcttcaacaatacmccagatcaagcaaatgaaagaatttcagaactagaaaaccgtcatttgaaataatccaactaggtacatttaagtgaaccaccttaagattaacagcagatttctcagcagaaactacaaggccaggacagaattgaacaatatatttaaagtgctgaaagaaaaaaaaaaacttaccagctaaggatatggtacgctgcaaagtcattcttcataaatgagagaaatagtctttctgagacaagcaaagttgtgggaattc

SEQ ID NO: 214337 - DNA, 445 bp, Homo sapiens
gaagcttagtgagatatgagagaacttggaaaaaataaaatgaaaaacagaaaaataattcatcatgtgaataagaaatgttcaaaagaggtagagatcataacaaagaaccacacagaaattatttaaccaaaagattcattgaataaaacataaaatacatttgaaagcttcaacaatacaccagatcaagcaaatkaaagaatttcagaactagaaaaccgtcatttgaaataatccaactaggtacatttaagtgaaccaccttaagattaacagcagatttctcagcagaaactacaaggccaggacagaattgaacaatatatttaaagtgctgaaagaaaaaaaaaaacttaccagctaaggatatggtacgctgcaaagtcattcttcataaatgagagaaatagtctttctgagacaagcaaagttgtgggaattc

SEQ ID NO: 214338 - DNA, 565 bp, Homo sapiens
aatggattgaaaaacatgattaaactatatgctgcctacacgaacttcatctcacctgtaaagacacatatggtggactaaaagtaaagagacagaaaaagatattccatgcaaacagaaaccaaaaaggagcaggagtagctatacttatataagataaacagtaaaaagagtaaaaaaaaaaagtcattacataattataaaggatcaatcccttgacatccaatgacattacatccaatgacattacatccaatgagaaattacatccaatgacaaagtcattacataatcacagagggattaatccatcaagaggatgtaacaattctaaacatatatacactcaacacctgtgcacccacatactagagcaaacacttttagatctcaagggcgatatggactctagtacagtaatagttggggacatcacatctttcatgattaawactctcaacaaatgaggcatggaacatacctcaatgtagtaaataacacatgggtcaaataccgacagctaacatatatatgtgtcatttaccttaaatgtgaatgggtaaaa

SEQ ID NO: 214339 - DNA, 477 bp, Homo sapiens
attatattattcagaaattaaacttgatgctaacagcaaattcaaacatagctaatactaattgaattttttcattatgcgaggcactgtataagagctgcacaatcaatctctgcaaaaacctacgaaggaaatactattattatcttcatttgacaaatgaataaattgagacagacattaaataactgacaaagccactcagataatcgtggcagagccagttttggaatcraggttttcaaacactggagacagacacatacaaactccaagctacgaagtaatttaaacattatttagcccaatttcaattgtttaataatataaaaagtgtaaagtagtcaaatgactcactcagattaggccagttctttaggttctaagttgcactggtctgatttcctgaacttcagcctaaatatttatttttattaataatattactgctattaatgttgtaatgttaaccattta

SEQ ID NO: 214340 - DNA, 477 bp, Homo sapiens
attatattattcagaaattaaacttgatgctaacagcaaattcaaacatagctaatactaattgaattttttcattatgcgaggcactgtataagagctgcacaatcaatctctgcaaaaacctacgaaggaaatactattattatcttcatttgacaaatgaataaattgagacagacattaaataactgacaaagccactcagataatcgtggcagagccagttttggaatcaaggttttcaaacactggagacagacacatacaaactccaagctacgaagtaatttaaacattatttagcccaatttcaattgtttaataatataaaaagtgtaaagtagtcaaatgactcactcagattaggccagttctttaggttctaagttgcaytggtctgatttcctgaacttcagcctaaatatttatttttattaataatattactgctattaatgttgtaatgttaaccattta

SEQ ID NO: 214341 - DNA, 388 bp, Homo sapiens
tcaggtagcttcctagggtttccaaggcaatacaagaagaattttgataggcaggaaaatgcatgctacatacacatattattattctctgatttcctttcacatgtaaaaattgaaaattgcaaatctggtctttcaattagcaaaagatttatttttcagcaaagcaaataactgtagaaaactgatgggggaacaaatgccatyagctgccaaaaacagtatgaccagattcagtaagtatctagtcatgcaaatcacagcccaattaaattaagaccccataggtgcatgtggacagcatttccatgcaatgtggtgcacctccactgggcaccttcttctgcctgcttacagagataccaatttcccctgagtgactcaaggt

SEQ ID NO: 214342 - DNA, 505 bp, Homo sapiens
gttaaacaacctgaacatgcagatacctaaaagttttacctagataatagtattaatattttaataggttatgattgtgagtcacagttgccccattgagtttactggaaagcggttatttatcttctgagtgtatgtagagaataggctttcataatcctaaacaaagagatcttttaagattagcactatatttagatttgaataaaattcataggcttgtagtaacagaaattttaatatattttctaatagaaaaaagtcaatmgaaataagttattcagatgagttttaaaaaacttcacgtgttcattaaataacatttaaaattacattgtaagtgactgatttgtaattccaatctatttcattttagtcactgagaaaacaatatccttaaattattcaatcagaaaaagtattcttatattagtgtttctgaaactttcagaaactgtagaccactcagtggatggggaggcatatgcagaccacaaattttcta

SEQ ID NO: 214343 - DNA, 610 bp, Homo sapiens
gagctgccccacattattgccaggaattactgtatacttaacatgaatccattaagtacacaactggacaaatgatgaaattttatgttagtaaaattcctgacatatttcacacctcttactctattaaattacgcttttttaacaaagaaaagcttgcctacctctacacattttcaattttttctcctatgtatttcatattaaaatttcaaaataatttgatcagagatccagtgcacaaaggtgcctaagtggataataatcaccaaaaacacttgcaatggctgcagtagtgggattcccatcagtgatgtcaacagtgatgccaagaagacaaaagaagagggaaggagctaataacaaaatccacagaataaacaggcttcattaatttctgaacaggctacataaatccattaatgyctaccgattaataacatggtcatataaatgaagttactgcatacgtgttttctgaaaagcatcattgctaattcatcttatactatcaaaatttctttatccaaaatgtatatatttttgagtaatatcttctcaagaaagtaatactttcttgtaatactcaagaaataccctcaattcccaa

SEQ ID NO: 214344 - DNA, 567 bp, Homo sapiens
caatatgctccttgatggaaagacctgctagtgagaactgactccttcccatattcgtctataaatttagcacaattctaatcaaaatctcagtgggatttgtcttagaactcatcaaaattattctaaaattcaccggaaacagtaaattcatgacaatagcaaagaaaaatttggaaatgagcatatttgccctatcagatatcaaacttctataaaaagccacgggggaggggtggtaatggaataaacacagaccgacctgtcactggaacagaactgagaatccagaaagaggccttatgtatgcagaaaagccttgtggcatttgaaatatgaacaagtcaatgaactgagagaggcaaaagcctatccatttaggaaaaatttagatccctacccttacactagatacaaaaggaaattccatacaaactaaaagagctcagtgtgaaaaaaattttttcatataaartatatgaaaatattttaaagataatcttgggatggtagagattttgctaaaccagaaaaaaaaaaaaactataaatatgtgaaagattttcc

SEQ ID NO: 214345 - DNA, 567 bp, Homo sapiens
caatatgctccttgatggaaagacctgctagtgagaactgactccttcccatattcgtctataaatttagcacaattctaatcaaaatctcagtgggatttgtcttagaactcatcaaaattattctaaaattcaccggaaacagtaaattcatgacaatagcaaagaaaaatttggaaatgagcatatttgccctatcagatatcaaacttctataaaaagccacgggggaggggtggtaatggaataaacacagaccgacctgtcactggaacagaactgagaatccagaaagaggccttatgtatgcagaaaagccttgtggcatttgaaatatgaacaagtcaatgaactgagagaggcaaaagcctatccatttaggaaaaatttagatccctacccttacactagatacaaaaggaaattccatacaaactaaaagagctcagtgtgaaaaaaattttttcatataaagtatatgaaaatattttaaagataatcttgggatggtagagattttgctaaaccagaaaaaaaaaamaactataaatatgtgaaagattttcc

SEQ ID NO: 214346 - DNA, 454 bp, Homo sapiens
  misc_feature (1)...(454): n = A,T,C or G
ccagatctgtgtggcgctttagctagcaccacacctcaggtccaattctcctgtctttatatgcagcaggtccacaggacaaggcctccctcmgaaaaagctaccccaatctaggacaaaaacaaactcttttccctccccctccctccatgtgcccagaacccctttctccttcctccctaggctaacctgctaagtcttccggatagctcactacactatctgatagctaactgggtgtgacaaaccacgtcctcacaccttagaaggcaaaacactccaggaacttacttctggaataccaataccttcacagtaatttccctgcctttccaaagagtgctctaaacaggtaaaagctataatacaaactctatatatttgtgtcacagatacagaaactggcnacatcgtttgcatattttaaaatctgggtgatatgggtatcactcta

SEQ ID NO: 214347 - DNA, 454 bp, Homo sapiens
  misc_feature (1)...(454): n = A,T,C or G
ccagatctgtgtggcgctttagctagcaccacacctcaggtccaattctcctgtctttatatgcagcaggtccacaggacaaggcctccctcagaaaaagctaccccaatctaggacaaaaacaaactcttttccctccccctccctccatgtgcccagaacccctttctccttcctccctaggctaacctgctaagtcttccggayagctcactacactatctgatagctaactgggtgtgacaaaccacgtcctcacaccttagaaggcaaaacactccaggaacttacttctggaataccaataccttcacagtaatttccctgcctttccaaagagtgctctaaacaggtaaaagctataatacaaactctatatatttgtgtcacagatacagaaactggcnacatcgtttgcatattttaaaatctgggtgatatgggtatcactcta

SEQ ID NO: 214348 - DNA, 401 bp, Homo sapiens
gaattctcttatgtccaataagggttgaagatcrgttaaaggctttgccacattcttcacatttgtagagtttctctccagtatgaattttcttacatgtactaagttttgaggataggtggaaaactttgccagattctctacatttgtggggattctctccagtatggattatcttatgtgtattaagggctgaggactggttaaaggctttgccacattctccacatttgtagggtttctctccagtatgaattaccttatgtctagtaaggtttgagagttggttaaaagctttgccacattcctcacatttgtagggtttctctccagtatgaatttttttatggtcagtaagatttgaaaattgtttaaaagctttgccacattcttcacatttg

SEQ ID NO: 214349 - DNA, 257 bp, Homo sapiens
tttctctgtttatgttttctttttgacatttgagtataattaagagagttgtttaaaagtctttgtgtartaagtttgatgtctgggtttccttagagatattttctgtcaacttattttgttcctttgaatgagccatactttcccattctttgtatgccttgtaactttttttgaaaactggacattataataattataattactatgtggttactctgggcagacccccccctacaaacacactaatgttttgt

SEQ ID NO: 214350 - DNA, 257 bp, Homo sapiens
tttctctgtttatgttttctttttgacatttgagtataattaagagagttgtttaaaagtctttgtgtagtaagtttgatgtctgggtttccttagagatattttctgtcaayttattttgttcctttgaatgagccatactttcccattctttgtatgccttgtaactttttttgaaaactggacattataataattataattactatgtggttactctgggcagacccccccctacaaacacactaatgttttgt

SEQ ID NO: 214351 - DNA, 257 bp, Homo sapiens
tttctctgtttatgttttctttttgacatttgagtataattaagagagttgtttaaaagtctttgtgtagtaagtttgatgtctgggtttccttagagatattttctgtcaacttattttgttcctttgaatgagccatactttcccattctttgtatgccttgtaactttttttgaaaactggacattataataaytataattactatgtggttactctgggcagacccccccctacaaacacactaatgttttgt

SEQ ID NO: 214352 - DNA, 576 bp, Homo sapiens
attatacacatattattttataaacaatttatgataaagagaaaasatgcatttctactgtcttttataatgttaatattacctataccagtgcttttttaaaaatgtggattcaaatgactgtcttgtgtaacttgcttttagccttaggaatttattttggtgtttttggttttttttttttttttggtatgataggtctggcagcaacaacttcagttaatatttctgtttatctggcaaagtctttgtgttatcttcatttttgaaaaataattgctggataaggaattggtggctgacagttttttttcctttgcatcttttgaatatattattctactgcctcttgccttccattgtttctgttaagtcagctgttaatcttacaaaacataggtgctcaaataacaaacatgtgcatgaatatttacagcagtaataatcatacagtcaaaaagtggaaacaatccatatgcttgttgactcataaatggacacccaatttttagctataacaaagaaagaagtacttatacatggtataatgtgggtgaaatttgaaagcattaagtg

SEQ ID NO: 214353 - DNA, 605 bp, Homo sapiens
ataccagtgcttttttaaaaatgtggattcaaatgactgtcttgtgtaacttgcttttagccttaggaatttattttggtgtttttggttttttttttttttttggtatgrtaggtctggcagcaacaacttcagttaatatttctgtttatctggcaaagtctttgtgttatcttcatttttgaaaaataattgctggataaggaattggtggctgacagttttttttcctttgcatcttttgaatatattattctactgcctcttgccttccattgtttctgttaagtcagctgttaatcttacaaaacataggtgctcaaataacaaacatgtgcatgaatatttacagcagtaataatcatacagtcaaaaagtggaaacaatccatatgcttgttgactcataaatggacacccaatttttagctataacaaagaaagaagtacttatacatggtataatgtgggtgaaatttgaaagcattaagtgcacaaaaagacaaatattacctgattttattcagatgaaacatcaggaattggcaaatcaattgggatataaatcagattagtggtcattagggctcagggaagcagaatagg

SEQ ID NO: 214354 - DNA, 576 bp, Homo sapiens
attatacacatattattttataaacaatttatgataaagagaaaacatgcatttctactgtcttttataatgttaatattacctataccagtgcttttttaaaaatgtggattcaaatgactgtcttgtgtaacttgcttttagccttaggaatttattttggtgtttttggttttttttttttttttggtatgataggtctggcagcaacaacttcarttaatatttctgtttatctggcaaagtctttgtgttatcttcatttttgaaaaataattgctggataaggaattggtggctgacagttttttttcctttgcatcttttgaatatattattctactgcctcttgccttccattgtttctgttaagtcagctgttaatcttacaaaacataggtgctcaaataacaaacatgtgcatgaatatttacagcagtaataatcatacagtcaaaaagtggaaacaatccatatgcttgttgactcataaatggacacccaatttttagctataacaaagaaagaagtacttatacatggtataatgtgggtgaaatttgaaagcattaagtg

SEQ ID NO: 214355 - DNA, 572 bp, Homo sapiens
ctggaacattgtgaatatactaaaagcaactgcattgtatgctttaaaatggttgttattaattttatactatgtgatttttaccttaaaaaacaaaaaaaaaagaaaatagccttactctatacataataaactcaagatgtgttacaaatttatatgtgaaatmcaaaatactataatatttaaggaatagctcagtagaataacactaaaatttaatgtaatgaaatattaccttaaaaaagaaaaaagcacagtaattaaaaagggaaatatagttaatcttttttctctccactaagcatgccattaactgaggaaaaaatccagctgcaattatgtaaactacattttctaaaaccataaagaaaataagaaatgaaaagggatttgggaaaaaaatccaaaggtacagtcaactacacaaaaaaagcttagtctcattaatcattatggaaatgcaaattgtaactgaaataagataaaactacaattcaaagagaaagcctaaaatttcaaccccccaaaaattctgggttttggagagctgggatggaatagggctcctaacc

SEQ ID NO: 214356 - DNA, 572 bp, Homo sapiens
ctggaacattgtgaatatactaaaagcaactgcattgtatgctttaaaatggttgttattaattttatactatgtgatttttaccttaaaaaacaaaaaaaaaagaaaatagccttactctatacataataaactcaagatgtgttacaaatttatatgtgaaatccaaaatactataatatttaaggaatagctcagtagaataacactaaaatttaatgtaatgaaatattaccttaaaaaagaaaaaagcacagtaattaaaaagggaaatatagttaatcttttttctctccactaagcatgccattaactgaggaaaaaatccagctgcaattatgtaaactacattttctaaaaccataaagaaaataagaaatgaaaagggatttgggaaaaaaatccaaaggtacagtcaactacacaaaaaaagcttagtctcattaatcattatgraaatgcaaattgtaactgaaataagataaaactacaattcaaagagaaagcctaaaatttcaaccccccaaaaattctgggttttggagagctgggatggaatagggctcctaacc

SEQ ID NO: 214357 - DNA, 487 bp, Homo sapiens
tcatgactttatttttatagcaaccaggttgccaagaactgagtcaaaatgtgagggaaaacaagcacctgcaaggagaaagaggacagatgcacttacataggacagatgcaaatagacaccactatgacaagtaaagctggaataatcaataaattcctgaagacaaagtggggcyggtcagattgggagaccgctgacagctgcagaagttgggaaagatccatcatcttgaaaacttttccccccaaacccactgtgatctctcaagcaattggtaaggaatccaagagagtctgtatatgatacagatcagggagagcagaacacttgggaggtgaccaggtcttggggccgagcccttatgaatgggattagtgcctttataaaagaagctcaatggagttcttgtgtgccttccactatgtgaggacatagaaagaaggcaccatctatgaaccatgaaatgggctctcatcaacactga

SEQ ID NO: 214358 - DNA, 487 bp, Homo sapiens
tcatgactttatttttatagcaaccaggttgccaagaactgagtcaaaatgtgagggaaaacaagcacctgcaaggagaaagaggacagatgcacttacataggacagatgcaaatagacaccactatgacaagtaaagctggaataatcaataaattcctgaagacaaagtggggccggtcagattgggagaccgctgacagctgcagaagttgggaaagatccatcatcttgaaaacttttccccccaaacccactgtgatctctcaagcaattggtaaggaatccaagagagtctgtatatgayacagatcagggagagcagaacacttgggaggtgaccaggtcttggggccgagcccttatgaatgggattagtgcctttataaaagaagctcaatggagttcttgtgtgccttccactatgtgaggacatagaaagaaggcaccatctatgaaccatgaaatgggctctcatcaacactga

SEQ ID NO: 214359 - DNA, 552 bp, Homo sapiens
gagaggattctttgcacccaggagttcaagagcaacctgggcaacrcagcaagacccagtctctatcaaaagttaaaaaaaaaaggtcggcatggtgatgtgcacctgttgtcctagctatttgggaggccaaggtggaaggattgcttgagcttgggaggttgaggctgcagtgagcagtgattgcaccactgcactccagcctgggcaacaaagcaagaccctatctcaaaaaatatatataataaaaataaaaatcagctctcattgatttctgcataaatatgcacaggtgatgtccatatagacataaataataatatatctgacaacgggcccatatgatcttaaaatgtaaaatgcctatctgtgtaattgactggttagtctcattaatgaatatagattcaattctactttcttgttctacataaattatataatctagcttttcgtttcacttatttactgataacaacatgaagaatgacaagatatctattttggaaaattactctggtaggagaaaagatgaaacaatgatagaattgc

SEQ ID NO: 214360 - DNA, 552 bp, Homo sapiens
gagaggattctttgcacccaggagttcaagagcaacctgggcaacgyagcaagacccagtctctatcaaaagttaaaaaaaaaaggtcggcatggtgatgtgcacctgttgtcctagctatttgggaggccaaggtggaaggattgcttgagcttgggaggttgaggctgcagtgagcagtgattgcaccactgcactccagcctgggcaacaaagcaagaccctatctcaaaaaatatatataataaaaataaaaatcagctctcattgatttctgcataaatatgcacaggtgatgtccatatagacataaataataatatatctgacaacgggcccatatgatcttaaaatgtaaaatgcctatctgtgtaattgactggttagtctcattaatgaatatagattcaattctactttcttgttctacataaattatataatctagcttttcgtttcacttatttactgataacaacatgaagaatgacaagatatctattttggaaaattactctggtaggagaaaagatgaaacaatgatagaattgc

SEQ ID NO: 214361 - DNA, 469 bp, Homo sapiens
gaattcctgggggccgagtgggccmttgtcatgggttgttctgggcacaggttaaatattgttcacaaacagcttgggtgatggcagtgagtcgcggcacatagaaatggcgtcctagtagcgtttctagtgctgtttttcccacgagttccatgatgcaattacttcacaaatttgggggccaccattttgggaatggccgacctcccatcagaaaatttccaccatcctccttcaatatattttccagttttttgggcaaaacaggccttctcattcggagagtaacttgagacctcctggaggggaggctctgggaggaggggcatagctaaggcttcctttttaaaatgaggtgtaaccattgctgcccattttgcctccctgtctgcctttctgtttccttttgcctctgacgtccctgccctctggtgtcccctgcagtgcatagctgctactttctctggga

SEQ ID NO: 214362 - DNA, 531 bp, Homo sapiens
tttctgtacagcataggatcttcaagtaattcaagaaacaacgctgactgcatgaaaattatcagtgccttctcagttcggtgtttaacgtacacccatctggaaatcaataaccataattttgtgtatgtttgaacagcttaatcagagggcttgttttggaccatggagcatagcatcttgataggaagaaaagggtggaggatgcatatatcctcatttgtaacgtgtcattagaatatgaaaaaacttaagtttatagccccttaacttaaatggaggagcttcgtgttttaggtgagttacttttttgtgaaacttcgtttcccactstaaggacaataatcctcaaattggtttgggagagttataggaaacagcctctgaagatgtgcaaggggtaggattggagctcagtgagctgtttgttaaatcttaggactaatccagtttcagaagctattttctcaaaaaataaatgtttccctgctttctgtaacttttttttttttcttaatagagaagtgaatt

SEQ ID NO: 214363 - DNA, 572 bp, Homo sapiens
tttgtctctgaattcagtatactttctcccaaagagctcaccacaataaaagtttttttaaaaatattattttattatttttttgagacagtcttgctctgttgtacagtggcatgatcgtggttcattgcaacttctacttcctgggttcttaggattcttgtgcctcagcctcccgagtagctaggattacgggtgtctgccaccatgcccgttgaatgtttcrttttcgttttgcttttttggtagaggtggggttttgccatgttggctaggctggtctcaaactcctggcctcaagtgatccacccacctcagcctcccaaggtgttgggattacaggcgtgagccaccatgcctggccaataaagagctcttgtccatctttagatttcatttgctgacttggggagagtggtttaaatggagggttaaaagactggttttcagctggttgatggcaaatgaaaaggcttaggttaaagtacattttaaactgtaattttgtgtgtaattctgaaaaattccttcctagaaattactggtcttctctttgaacttcactggtaaca

SEQ ID NO: 214364 - DNA, 504 bp, Homo sapiens
agaattcagccaaaacccaccgaaaccaagatggtgacaagagtgacctctggttgtcctcaawgctacactcccaccaacaccatgacagtttacaaatgccatggcaacatcaggaagttaccctatatggtctaaaaaggggaaccataaaaataatccactcctggccaggtgcggtggctcacacctgtaatctcagcattctgggatgccaaggtaggtggatcacctgaggtcaggagtttgagaccagcctggcaacgtggtaaaaccccgtctctactaaaaatacaaaaacaaattagttgggtgttgtggtatgcacctgtgatcccagctactagggaggctgaggcaggagaattgcttgaacccaggaggcggaggttgcagtgagccaagatcacaccactgcactccggcctggactccatctcaaaaaaaaaaaaaaaaatagtaacagaggctgggcgtggtggctcacaactgtaattccagcac

SEQ ID NO: 214365 - DNA, 504 bp, Homo sapiens
agaattcagccaaaacccaccgaaaccaagatggtgacaagagtgacctctggttgtcctcaaagctacactcccaccaacaccatgacagtttayaaatgccatggcaacatcaggaagttaccctatatggtctaaaaaggggaaccataaaaataatccactcctggccaggtgcggtggctcacacctgtaatctcagcattctgggatgccaaggtaggtggatcacctgaggtcaggagtttgagaccagcctggcaacgtggtaaaaccccgtctctactaaaaatacaaaaacaaattagttgggtgttgtggtatgcacctgtgatcccagctactagggaggctgaggcaggagaattgcttgaacccaggaggcggaggttgcagtgagccaagatcacaccactgcactccggcctggactccatctcaaaaaaaaaaaaaaaaatagtaacagaggctgggcgtggtggctcacaactgtaattccagcac

SEQ ID NO: 214366 - DNA, 504 bp, Homo sapiens
agaattcagccaaaacccaccgaaaccaagatggtgacaagagtgacctctggttgtcctcaaagctacactcccaccaacaccatgacagtttacaaatgccatggcaacatcaggaagttaccctatatggtctaaaaaggggaaccataaaaataatccactcctggccaggtgcggtggctcacacctgtaatctcagcattctgggatgccaaggtaggtggatcacctgaggtcaggagtttgagaccagcctggcaacgtggtaaaaccccgtctctactaaaaatacaaaaacaaattagttgggtgtkgtggtatgcacctgtgatcccagctactagggaggctgaggcaggagaattgcttgaacccaggaggcggaggttgcagtgagccaagatcacaccactgcactccggcctggactccatctcaaaaaaaaaaaaaaaaatagtaacagaggctgggcgtggtggctcacaactgtaattccagcac

SEQ ID NO: 214367 - DNA, 393 bp, Homo sapiens
ctctcttagaaaactttatacaatgcaatattgttagagatagacactatgctgtgcattagatcttgcataagtgacattttgtacattatgaycatcatctcaccatgtcccaccccacacatgccttcaccacagcccctggcaatcagcattctactctctgcttctagtttcactattgtgtattccacatataggtgagatgatacaggacttgtctttctgtgtctggcttgtttcacttactatatggtcctccaagtccaaccatgttgtcacaaatggtagaatttccttctttttaaaggccaaattatattccacttcatgtatatacacattttctttattaatttgtcctttaatgaacatttaggttgattccatatt

SEQ ID NO: 214368 - DNA, 499 bp, Homo sapiens
aaccacacaggtgcaaatgacagaatttccttccttttaaaggcagaaaaaatattctagtatgtatatataccacagttttttatccattcacgtgttgatggaaacttaggttgatttagtatcttggcaattctgaataatgctgcaaaaacaagggattgcaggtatctttcaacatactgatttaatatcatgtgaatatttacttagtagtgaaattactggatcatatggtagttckatttttatttattcgaggaacctttacagtttttttattatggctctactaatttacattttcaccaacaatgttcaagggttactatctgtccgcatccacgccaccacttgttatcttttgtctttttgatcatagccattctaacggttataatatctcgttgtggttttgtttgcatttctctgatgactaatgatgttaagcatgtttttatacacttttttgctatttgtatgtcttctttgaggtctt

SEQ ID NO: 214369 - DNA, 611 bp, Homo sapiens
aaacagcaattaggagctatttagctcaaccttgtaggaagaactagggagaaatttgctttgtgttgtgctacaggcaaagaatggatccaatgagggaagaatttggagttgtatgtaaaagagcagtgaatcaacttcttctggagacttctagtcattasttcgctagctgatcatggtcaggtcagtgtgtgcagcagatcatacagtttgataaccaagttgatatatccagtacttcccttgggctttgcattggaaaaagataaagttctactttcttttgtcctggaatcagagcaatcattgcattttgcatttataaattgtcccagggagaccagctgtgcattgtggtctacctgacatatgatgctgagctcaacattaaaatagacatttttcttactacattggaatgccctacagtttctttttcagtctcgtttataccttctcactatcaaaaacttaatctttgcaaacacatagaatgattatcctttagatgaaataacatgtccaagagaataaaacgtcacagtgcttctactagaagagaatgcatgcaggattatgatgaccacgtgcatagaagtgagctcttt

SEQ ID NO: 214370 - DNA, 577 bp, Homo sapiens
tgataatattttactatctgggcatgtactttcattgtggggaggtttttatattaaattcagtttgattaatacatacagagttattcagattttttatttaatctagtttcaagttttattttctttcagatattatagtaatttaaccagttgtaaaaggccctacagttaaaagaccaaacttgaaaggctaaatattaaaaacacaaactacaagttatttccatgaaatcagtcaaatcatgaaataaattttgtgcaaatactaaggaaatatatacatctatataaatattagaaaaaataaaattagactacaaaattgtrttaggaaataagagtgtatttagcactcttaaataaaaatgtatttattaaaattatttttattgacaggtcataattttatacatttatgaggtacaatgtgatgttttgatatatatatgcaatgtaggataattaattcaagccaattgacatattagtcaacttgcaaacctatcattttttatggggaaattaaacttgtaatttactcttctagttattttgaaatatacattattattga

SEQ ID NO: 214371 - DNA, 567 bp, Homo sapiens
gtctcatatctccctataacatacaaaacccaagctgttccctgaccactttgggcacatgttgtcaagacttcctgaggctgtgccacaggtgcatccttaaccttggcaaaataaactttctaaattgactgagacctgtctcagttatttcgggttcacagtgtgaattatctgatagtggattttgcctatattttctactgtgctttaattatgtactgctgatatacagagctatctatattttatatagatatattacagtrtagacatagtaccatttatggaatggagaataaaatttttcagaaaaatattttacctaatatatttatccaatatatatttgctggtcatgtgaaaatttaacaaatatcaaatgaaaaagaaagaatatatatgtgtgtgtacctatatatcatatataacatgttattaaatgtataagcatttttattaaagtataatttatatataataaaaatgtatattttaaactgtgcagtttgataacttttgatacatgtataaaggtgtgatataaaccatttgtgatataaactg

SEQ ID NO: 214372 - DNA, 519 bp, Homo sapiens
atgtttaacacaggcagaagactctcctgattggcacrtagcccagacaaagtgagaaaaggtgtccacaaatatatgtacataagctagtctccaaatgagggaacatgtgtgacatccatttgccaaagagaattaggttccaatcctcgaggattaactcctcctgtgaaagatgaggaatgtaccatttagcaaattgggcattgctggataatagctttagcttctttccaggtaatgctgtatctgcgtttgagaccagaggcattaacatgggttaaattgtaaaagtgtctggcattatatattgcagtagcaactaggcgatcagccatttgattcccttcagttaaaggtcctggaagaggtgtatgagccctaatgtgagtgatgtaaaaagggtgcattctactccagactgctgtttgcaattgggtaaataaagtcatcagttgttcatctgtatgaaatcataactgagcattttcaactaattgtgtggaatgaaccatgtat

SEQ ID NO: 214373 - DNA, 597 bp, Homo sapiens
gtatctcttgactttcaaattagcaattacagattttattgtttctaattttccattctggtatctttcccatttctacttcccaatttttgtcaattcttcattttaaattgtagtagtcaaatatatttacattagtctctataactataattaagtcttttagcattgcgtattcttggattctaaaaattgtaactagtaacagtttaattttttacgactacataaatatttttaactgaaaagttagtggcagagtaattaccatttttaatgcagttttattgtttataatttggtttaaagtttcttcttcccccttttatcatgcacttaaaaattcccataatttctgccagtatatcagtcatactctctatcctgaacactgcatttttgccagctgtttctgccwggagtccttgttctctcttcttttctgttttatcagccagtgctcttttaactactctacattttcctaaaagttgttgaagtttgcttcaattaatactattccttcttctttttttgtaactgtaggtttatacctttgaaacattttttaaatgattaatttttctggaagtagag

SEQ ID NO: 214374 - DNA, 526 bp, Homo sapiens
tgctatatgtttagaatattagtcatcttgaatacatgcataggttaagtgtcagaagctatatatcgtgcagaaagaaaatttattgttaggagaccaggctgtacctgtgcttatacagcattttccttagaggatcaatttgagtatatgaacaaataccagctagatttttgtacggtaacattattgataatataggagaagttcattgaggagaaaaacaaagggagcattaaagtctcatactgtatgaaactacagaaatggatcaaagagtttgacaggaagtttaatgtgtacataagtagaggctgacaggaacatgctgtgtgtgccaaaggttccagtgatggaaaactgaaacatagtgctcactgaccacagcatkagccttgacacacattgtaaataatccagagatatatgactgcattaagtgctaggctggtatatgaacggcagtaaatctatagcagcagaaagggttggcatgcagaaattgctctgatttttataatggatt

SEQ ID NO: 214375 - DNA, 579 bp, Homo sapiens
gtgctcactgaccacagcatgagccttgacacacattgtaaataatccagagatatatgactgcattaagtgctaggctggtatatgaacggcagtaaatctatagcagcagaaagggttggcatgcagaaattgctctgatttttataatggattaataggaatatagcaaatattttcatttcaaattcaaccatctccagttcccctstccagctctccccggtgtgatcattttttattctcctctgctcaccagacttgtgtatgcggatacctgcttcagtaccatcaagttaaaagcagaagatgcttctggtagagagcatttaatcactctcaagttgaaggcaaaggtatgtgcctcgttaaactgttattgtgatcagaaaatactttgtgaaatgaactctgtgaatgctctcaatgtaaagaagtgctagttacatctaaaaatacatatatcatgctttaaaacattgattttggaaagcctcaaagaatttattcaccacgtttccaaaagcctagacagttttatgtcatattttagtccaaatttgctcaaaatacagactt

SEQ ID NO: 214376 - DNA, 579 bp, Homo sapiens
gtgctcactgaccacagcatgagccttgacacacattgtaaataatccagagatatatgactgcattaagtgctaggctggtatatgaacggcagtaaatctatagcagcagaaagggttggcatgcagaaattgctctgatttttataatggattaataggaatatagcaaatattttcatttcaaattcaaccatctccagttcccctctccagctctccccggtgtgatcattttttattctcctctgctcaccagacttgtgtatgcggatacctgcttcagtaccatcaagttaaaagcagaagatgcttctggtagagagcatttaatcactctcaagttgaaggcaaaggtatgtgcctcgttaaactgttattgtgatcagaaaatactttgtgaaatgaactctgtgaatgctctcaatgtaaagaagtgctagttacatctaraaatacatatatcatgctttaaaacattgattttggaaagcctcaaagaatttattcaccacgtttccaaaagcctagacagttttatgtcatattttagtccaaatttgctcaaaatacagactt

SEQ ID NO: 214377 - DNA, 606 bp, Homo sapiens
atctgtagttacgaagcacttttatagatattcttgcaaaagagaagagaaagctttatttaagctgggaaggaatttggcaaaaaaagaaaaaaaaaactgttttggaaaaacaaaagcatgtaactgaatcttatgttggtatgatttattagaatctttatttctcaatttagcttagctttcatatatacaccatagctgtctttgagatgtgataatttttttttttaggaaaaaaaagttagttytagattgtgaatttggacaaataagtagaataaacaagttcagcatattaatcatttacctagtaatcactggggaaacatgagaatttgaagaaaaccaggaagtctttttttttttttttttttttttaggaaaaaggtataggtatatataaaaccaccagcaactaattgtcaaacttttactttcaaaagtaatttacaacaacaaaaactccacatataggaatattaactgaaaaatattttaggaaacaaaaattttagggaaaaaaaaagaaattgggcctgcgattgtcagtcaactacactaatagttgaaacgttaactgtatgttaagagtatattatgcaa

SEQ ID NO: 214378 - DNA, 606 bp, Homo sapiens
atctgtagttacgaagcacttttatagatattcttgcaaaagagaagagaaagctttatttaagctgggaaggaatttggcaaaaaaagaaaaaaaaaactgttttggaaaaacaaaagcatgtaactgaatcttatgttggtatgatttattagaatctttatttctcaatttagcttagctttcatatatacaccatagctgtctttgagatgtgataatttttttttttaggaaaaaaaagttagttctagattgtgaatttggacaaataagtagaataaacaagttcagcatattaatcatttacctagtaatcactggggaaacatgagaatttgaagaaaaccaggaagtctttttttttttttttttttttttaggaaaaaggtataggtatatataaaaccaccagcaactaattgtcaaacttttactttcaaaagtaatttacaacaacaaaaactccacatataggaatattaactgaaaaatattttaggaaacaaaaattttagggaaaaaaaaagaaattgggcctgcgattgtcagtmaactacactaatagttgaaacgttaactgtatgttaagagtatattatgcaa

SEQ ID NO: 214379 - DNA, 444 bp, Homo sapiens
tgtttaaaacacaaggtaagatcaggaagaatgttttataaatatagtttttataaaggtgactatattgctgtattataggaaatataattacattactatttaacacctagcaaagctattgtagggtgtttccttttccactcaaatatacacagctaggctaaaaaaagagattccatttttggctggcaagwtgtttgggcatcagtaatattcccatatcatacattgttataatgtccctgatagtatttaaagaaaggaattgatattagctagtgattactaaacagcacaattctgtaactaaaggaaaaagaaactcactaccatttagtagtctacaaccttagcagccttgtcaaaaatcaattctattatttttgcagtatagtggtatctattcaattttgagaaactataactgcttcacaaacactt

SEQ ID NO: 214380 - DNA, 589 bp, Homo sapiens
agagaactctggggttctaggggatagtagagtgtgggtccttgaatgaccctgtaaacaaacaaacaaaaaattctaaggtcttccccaaaccacctgaatggacccctgctctccaacaagggcattccaaagttaacctgataaaactagttcagracatgatgggaagggggagccagatgtgcctcattatacccgccgcccctttggaattacttataaaacagactctttcagtctgataaatatttgcaatctattgtctctgaagcctgctacctggaggcttcatctacatcataaaacctcagtctccacaaccccctactgtaaccctaacccagacattcctttctattgataataactctttcaaccaactgccaatccaaaaatctttgaatctactcgcaacttggaagcccccacttccgtttgttcagcctttctggactgaatcaatgtacatcttctgtgtatgattgatgccttacttatctccctaaaatgttaagaaacctagttgtggaccagccaccctgggcacatgttctgaggatctcctgaggactatgtcaacaggcca

SEQ ID NO: 214381 - DNA, 437 bp, Homo sapiens
gataactgtacagtcaatcttcattatttgtagattccatatttgtgaatttgcctactcgctaaagtttatttgtaacctcaaaatcaatactggtggtgcttttgtaggcattttcgcatataagcaactcaaaatatttgagctgtttcatgtacatgttcccaactgaggttgaacaaagcaacactctgccttcttctgtcaactttcatgctatacaaaagtaacccctttgtgttctatttagcaccacattttttacacttttgtgcttcttttggtaattttgctgtttaaatggtccccaaacaaaamacaaaacggctttctgtgagtgcagataggctgtgatgtgccttatggagaaaatacatgtgttaggtaagcttcattcaggtgtgacttcttggccatgggatcactgtgaatgaacc

SEQ ID NO: 214382 - DNA, 394 bp, Homo sapiens
acaaaggccaagacaagcatgaaatgtgtcaaggacaygaacatccttcattaaggtcctagaccttgttcaggacatgctaagagatgccaaaccgcttcagctagcattggtcttgtgacaggctgcttatataggaatggattaagaagggtatggaggatttctctggagagacttgttagtatgtcatatctccactcagggcctcaggaggcctcagggcaagagagtgggctagaagaaagccatctgggggtattctgtgtggctctggggttggaacatcatagggaactaggcatctgactcacttgtgactgagctgcagaaaggggcttgtactctcacacctggccatcacacagagaaagaactgtaccagaatggcctg

SEQ ID NO: 214383 - DNA, 361 bp, Homo sapiens
ataggcactcccaatgatcataagttttgtaacaatttccattctcaccagcaacgtatgagaatgcttattctctggcagtttcatcaatggagggtgtgtggaagatatggctatgccccacccacaccctgtagacaagtcatctctatactacagctgcaaccctctgccccaggscttttttttttttttttttttttttggctttaggagggaggtttgacctgtacgtgagtgtggggatagggcagaagtgcctgagagttaattttccacaagcagccatcaagcaatgatagataggggagtaggtggataaatacccctgctttgtcattcctagaggggataacactaa

SEQ ID NO: 214384 - DNA, 538 bp, Homo sapiens
atgagatctcactctgttgtccaggctggaatacagtggctactcaataataggtatttctgaggttctatctacctaacttttaaaaattagtgttaccctatctgttgcacatctaaaaattagattccctattttgaaatgaatacattacgtaacctcaaactcctggactcaagtgatgctcccgcctcagcttgggactagactacaggagctagagatgtgcaccatcatgcctggtcctcagttctgttttagaagattacccttggtctactggaacccactttgtccacatgcacaaagagctagcagtgcctgkaaattatgtgcccacccacatggagagtggtccttagtcaatgaccgaggggtgcacatagagagagatgaaatgccatctcctttgtctcaggtccagacaactctgaggcataactcacactccagagctccctgtgggatcaggccgaagccaccccgcaagggactctgaccacagccttgcttggcttcttctcctttcctgtcttgc

SEQ ID NO: 214385 - DNA, 510 bp, Homo sapiens
aagcttttccccagacaggcaacaccggggcctagggccaggactggcccactgaacaaaatggctctggaatattaagagtttcctgttctctgttaaacagcgaagacgactccttgctcaagtgagaaggggaaataagaagaatcttccattgctctgaaataccctgagaggactccagacccagaaccccatgggcgttacccccacccaagaactaaagggagacggcaaagaaaacagacctcagcctgttcctgtatccagcaggcaaagccactggagctgagaaccaasgctctggctgctccatcaagtactccccactcaatcccagaagtgcaggcaaaaccagccaggccagggccacatgggcacacacagctggagatgagcacaccacccaggaggactttaaatagtgaagcctcctcaccgtgggcactaagtaggccatgtgaggtcaaatgaagctgcctgttcctgggtcacactcttagaggcaca

SEQ ID NO: 214386 - DNA, 510 bp, Homo sapiens
aagcttttccccagacaggcaacaccggggcctagggccaggactggcccactgaacaaaatggctctggaatattaagagtttcctgttctctgttaaacagcgaagacgactccttgctcaagtgagaaggggaaataagaagaatcttccattgctctgaaataccctgagaggactccagacccagaaccccatgggcgttacccccacccaagaactaaagggagacggcaaagaaaacagacctcagcctgttcctgtatccagcaggcaaagccactggagctgagaaccaacsctctggctgctccatcaagtactccccactcaatcccagaagtgcaggcaaaaccagccaggccagggccacatgggcacacacagctggagatgagcacaccacccaggaggactttaaatagtgaagcctcctcaccgtgggcactaagtaggccatgtgaggtcaaatgaagctgcctgttcctgggtcacactcttagaggcaca

SEQ ID NO: 214387 - DNA, 563 bp, Homo sapiens
tctaaacaactcatttgctcaccacgaattatctgaactacaacctcgccgggtcgtgggagttctcccttytcccatcatgatgaaaacctttaagtccaacttcccatgataccagtgattttctcccgggtaaagggcctttaacatcctgcagacctctgtcaaggaaaaccagggccagacagaagttaaagcagtgaagacaaattttattcaggagctattgcaatagggaaagagagacctcagtttagaatgggctcccttctgaatacaaggacaagtgggaaattatggccaaggtgcagggtgaggtcagtggatggaaattactaaaagggaacatcagcaataagagggattctaaactgactcagcttctagctgaaggcagccaggataagaagatactgagggagaggggttgaggaatttcatcagatatcaagggtggtcagataccaagggtgggggattctagtgacactaactcagcaggattctttctgaaagcagaataagcaagccaaggacagagcccatggtctgggtcttcaggg

SEQ ID NO: 214388 - DNA, 519 bp, Homo sapiens
acatatggtccttggcatgaccacatgacctgcagagcccctgttatagaactcatttttatattttccttagtataacagttaatrtaatatgtcatttttgttaatagtgtctttttgtcattttactttttaaaagattgtattgaaatatacatacaggaaagtgcatctatcataagtgtgcaaattgatgaattctaaaatctttattgtacctgtttagcacctagattgacactgaacataactaacaaccagaaatctccgtgtactcccttcctgtaactacccctgcgcccgaccaaatcactctcttctaacagcataactttgtgtgactagcttttttaatgtaaaagaatgaaatctacagcatgtattcatttgcatctggcttctgccacccaacattatatttgtgggattcatttgtacagttgcatattagtttgcagatccctcactctcgtttctatatggtattatattgcataaacgtaccacactttatctaac

SEQ ID NO: 214389 - DNA, 519 bp, Homo sapiens
acatatggtccttggcatgaccacatgacctgcagagcccctgttatagaactcatttttatattttccttagtataacagttaatgtaatatgtcatttttgttaatagtgtctttttgtcattttactttttaaaagattktattgaaatatacatacaggaaagtgcatctatcataagtgtgcaaattgatgaattctaaaatctttattgtacctgtttagcacctagattgacactgaacataactaacaaccagaaatctccgtgtactcccttcctgtaactacccctgcgcccgaccaaatcactctcttctaacagcataactttgtgtgactagcttttttaatgtaaaagaatgaaatctacagcatgtattcatttgcatctggcttctgccacccaacattatatttgtgggattcatttgtacagttgcatattagtttgcagatccctcactctcgtttctatatggtattatattgcataaacgtaccacactttatctaac

SEQ ID NO: 214390 - DNA, 519 bp, Homo sapiens
acatatggtccttggcatgaccacatgacctgcagagcccctgttatagaactcatttttatattttccttagtataacagttaatgtaatatgtcatttttgttaatagtgtctttttgtcattttactttttaaaagattgtattgaaatatacatacaggaaagtgcatctatcataagtgtgcaaattgatgaattctaaaatctttattgtacctgtttagcacctagattgacactgaacataactaacaaccagaaatctccgtgtactcccttcctgtaactacccctgcgcccgaccaaatcactctcttctaacagcataactttgtgtgactagcttttttaatgtaaaagaatgaaatctacagcatgtattcatttgcatctggcttctgccacccaacattatatttgtgggattcatttgtacagttgcatattagtttgcagatccctcactctcrtttctatatggtattatattgcataaacgtaccacactttatctaac

SEQ ID NO: 214391 - DNA, 615 bp, Homo sapiens
ggggttgacttatgacaaaactatagagattgagaagagattagtggtagtcaacagacacagatggcgatgagggtgcacctataagaaggctagcacaggggagccttgtcatggaacaggtctgtatctccctgtggtggtggttacgtgaacctacacacgtgataaaatcgcacagctgtgttaagggcatgcacacagacgacagcatgtatgaactggtgagtaagagctatccagtgtcccagtgtcagcttcctggtttggatgctgtactctagttacgagatgttactattgggggaagttggatgaagagtaagtacatggccctctgtgctatttttgtacctccagtgagtctgtagttatctcaaaataaaaagttaaaggaaaagaaagtaaagaagtacaaaccttacatattctaaccatcgagtattttccagtgaagataaccatttctcttcagtttcttcaaaaggctctgtaataaattatatacatacacatttttactttttattttataygatccctatcagagtaaagagatacatcagtttctaatatttaaaagttagctttaagtaaatatcatgcattttcact

SEQ ID NO: 214392 - DNA, 662 bp, Homo sapiens
ctgggtggatcaggttgacaccctctaagcccactggtcgtcaggattacaatgagagagacacagccagccagcctgagatgggatgtgactccacaggagaacacagaaccacctaatgaaacattcttgccaaaagtactgaacctgaatccgattaagcctctgttgctaacattttaaaggaaatattagagacagaggaacacattacgggacaccctggggataaaacaagcaatatctacaatgtggaaaattctagggaacaaatgacctggtttgtcaacaaatagtaggtaaaaaagaggtgggaggagactgttgtagattaaaagscctaagagacatattaagcaaattcaatgtgaagactttagatcctgatatgaacaaaccaactgtaaaacaccagttacaagatataatgcaataaacactgactactgatgacagtaaggaattactatcaacttcttttaagggataccgtaatttatattaataagccttgatctttaaaataaaatatttattaaaacattattaaaaacaaatattccattaaccacaacttgaaagtcatcaatgacaacagagtttgatgattattcatagggaagtgacttccagccatatataacattgctaaaattgtactt

SEQ ID NO: 214393 - DNA, 482 bp, Homo sapiens
cttttaaatcaatttttggaccaaagctgataatcttctctggacagaagccagaagtacccacagtggatggtttctttcctaagatcacctggggtgcagtactgaagaaactcaaatccaggaaacactcaaacctcattaagttctatctcatttgcaaacaaaagtggtttatttctgtggcctgaaagccaccaaaaaacagtaccagattcaagtcaaaaatgacagttcatgaaaagrccaacttgttccttaatcagatgaatggaattcacttctataaagtattcctgaagaagtgattcacaacccactaatcagagaacaaagtggagacaaaaggcatgtatttcacttgtcactcatgtgtatctatatatttatctttatctacacagacagatatatagataaatcattaaaaacaacctttattattttgcccttcagttttgagcaaaggttctgcaaaagaa

SEQ ID NO: 214394 - DNA, 482 bp, Homo sapiens
cttttaaatcaatttttggaccaaagctgataatcttctctggacagaagccagaagtacccacagtggatggtttctttcctaagatcacctggggtgcagtactgaagaaactcaaatccaggaaacactcaaacctcattaagttctatctcatttgcaaacaaaagtggtttatttctgtggcctgaaagccaccaaaaaacagtaccagattcaagtcaaaaatgacagttcatgaaaaggccaacttgttccttaatcagatgaatggaattcacttctataaagtattcctgaagaagtgattcacaacccactaatcagagaacaaagtggagacaaaaggcatgtatttcacttgtcactcatgtgtatctatatatttayctttatctacacagacagatatatagataaatcattaaaaacaacctttattattttgcccttcagttttgagcaaaggttctgcaaaagaa

SEQ ID NO: 214395 - DNA, 271 bp, Homo sapiens
agaattttgtttcttttcgttgtttctctggttattttaacataggtacttaaaaacctaaagttaattagtattttcccctcctcccaatcagtgaccccttgttacccagtgtttgggttctaacctattcccctctgccatagacattattgctgttgttttggttgttttatatggactgtggtttttttctggagttagccaaatattgcacatctttgcttactatcgtttcttaccatcrtttgctatgtctcagatcttataa

SEQ ID NO: 214396 - DNA, 595 bp, Homo sapiens
ttttccctattggattttggacatgctcagaacctgtcatcatttcttctttcccatttctcccttttggaagggaactgtctgtcctatgactgactcaccatggtattttggaaacacttaaacttgttttgatttcataggttcacagcctcttttttttttttttttttttttttagacagtctccctctgtcgctcaggctggagtgcagtggcactatcttggctcactgcaaactctgcctcccaggttctaagtgattctcctgcctcagccttcagggcagctgggattacagtcatgcaccaccacgcccggccaattttgtatttttagtagagacagggtttcaccatgttggccaggctggtctcaaacttctgacctcaggtgatccacccaccttggcctccggaaatgttgggattacaggtgtgagccactgcgtccagcctaagcccattttataaaggaactaattgcattttcttcttgcattctactataagcagtcaggaagaattaagccactccactaacacttcccttaraaatcgtttcagctcagtatacaattttatcactcacagt

SEQ ID NO: 214397 - DNA, 634 bp, Homo sapiens
actgcacccatattaatttataaaattactactagaaacaaattatgatttattttaaaagtataactctatttttgaatagatttttaaagtaataataataacaaatatataatggtatacaatttaaaatgcaaaatgtatatgataataagaaagtaccataggaaactgatatayggctgagaacaaggactttgatattctcttgtctaatttctttagtcatgtagtaacccatatatttctaccttgaaaatgtttattttaagggcatctagatacacatcttctttaccagtattattggggaaacatttttaaagaccctttacctgaataacatttttagttgatatatgaagcttagaacatttttaatgcttttttgtcatgtgtaagtaacttagcaataggtatgtcactaagcttagaaaaatgctttttctttttatggaagcagagtcgatttactttcatcaaaatgagcagacaccattaagcaagaattcctgtatgtatagattcagtctaaggaaaggacatagatcactatcacttcatctggtcttgttttccctacgccactttgattgctttcctagaaatatgtggctgcacagtttaatgagac

SEQ ID NO: 214398 - DNA, 591 bp, Homo sapiens
acatattttatatagtttgtgaggcacaggcatatcaacccaggaacgttcaaaaatactgtttgaagtggagctctaaatattgctgatatacattctgtgtaacctagacagtcccctcccctcaccatttttcttttcttttctcattgcacagatattcatgactgcctatcacgttttaagctctaggttcaccgcatcaacaaaaaatacaacaaatacttattctcatggaacgtatatttcactggggtggcaggggagacagacaataagcaaaggaagattagatagataaatggagagattaatcaataaattgtttaggatatgtatcataccagacaataaatccaattgagagtttggagaaggagtgagagagcggaggttcattctggctgtcgtgtggagacaagggttggtaaggtagaaactaagaaactagttaggaatctattttaataattcagattggcaatagtttcctgaaggaaggtggtattgaagaatgtggtaagaaatsatgataaataaggatatgctgatagatagaatgttgggtgtgagagaaagggagaattcaag

SEQ ID NO: 214399 - DNA, 603 bp, Homo sapiens
ctaactaaataatcttgtatgttctcggttggttkgtttgatctctctctctctctttttctttttctttttgcttctttcaccaataagacttgtattctgacaaatagcaagattatggaatatattgttgaagttactgaattaagtgttttgcccaaaaataaaaatgaaaacccaaatctatctaaattttcgttgtttctagttttgaagtagagatcaagttttgtgttggaattgagtgatttaaaaactaattaattcgttgtcttgatgtcattggtttattataaattacatacttctggcaggactgggctctctatacaataatttaaagagaaatgatagctacataaacttactataatctgtaaaaagagaattaaatagcatgtaattcaactacattcatttggtcctcaacttaaaaggaaaaggacatcatattaccatttacactgctgttcctgatagcatatttcagactttaatttttcaggttgttatcgaataagagctaacattaaacttgggactcattggacaagaaacatatagctaaaaagaagagattttcaaaaaagagaaatcaagtta

SEQ ID NO: 214400 - DNA, 603 bp, Homo sapiens
ctaactaaataatcttgtatgttctcggttggttggtttgatctctctctctctctttttctttttctttttgcttctttcaccaataagacttgtattctgacaaatagcaagattatggaatatattgttgaagttactgaattaagtgttttgcccaaaaataaaaatgaaaacccaaatctatctaaattttcgttgtttctagttttgaagtagagatcaagttttgtgttggaattgagtgatttaaaaactaattaattcgttgtcttgatgtcattggtttattataaattacatacttckggcaggactgggctctctatacaataatttaaagagaaatgatagctacataaacttactataatctgtaaaaagagaattaaatagcatgtaattcaactacattcatttggtcctcaacttaaaaggaaaaggacatcatattaccatttacactgctgttcctgatagcatatttcagactttaatttttcaggttgttatcgaataagagctaacattaaacttgggactcattggacaagaaacatatagctaaaaagaagagattttcaaaaaagagaaatcaagtta

SEQ ID NO: 214401 - DNA, 603 bp, Homo sapiens
ctaactaaataatcttgtatgttctcggttggttggtttgatctctctctctctctttttctttttctttttgcttctttcaccaataagacttgtattctgacaaatagcaagattatggaatatattgttgaagttactgaattaagtgttttgcccaaaaataaaaatgaaaacccaaatctatctaaattttcgttgtttctagttttgaagtagagatcaagttttgtgttggaattgagtgatttaaaaactaattaattcgttgtcttgatgtcattggtttattataaattacatacttctggcaggactgggctctctatacaataatttaaagagaaatgatagctacataaacttactataatctgtaaaaagagaattaaatagcatgtaattcaactacattcatttggtcctcaacttaaaargaaaaggacatcatattaccatttacactgctgttcctgatagcatatttcagactttaatttttcaggttgttatcgaataagagctaacattaaacttgggactcattggacaagaaacatatagctaaaaagaagagattttcaaaaaagagaaatcaagtta

SEQ ID NO: 214402 - DNA, 567 bp, Homo sapiens
tctgtggaatataatacagggaaatgtttttcagtaacatgtcttccagaaggaatttttaaaccaaagactcaagcttgagaaaaatctcaagaatacattatgaaatttgaaaatgattggcaaagtatagcattcattttgaacagttttttatttatagaaamtgttagcctctcctaagcgaattaatgcaggagcagaaaaccaaataatgcatgttctaacttataagggggagctaaacaatgagtacacatggacataaagatggaaacaataggcactgtggactactagacggggggaagatgggaagggatcacccactggtactatgctcactacctaagtgatgggtcatttgtaccccagacccctgtgacacacaatttacccttgtaacaaacctgcacatgtaccccttgaacctaaaataaaagttgagaaaaatgttagcctccatagacagaaaattatgagaaattttccacttgaattattctcgcaagtacacgattctgaacttcgataagaaagaacaaaaatgttgtgggtacgtacttt

SEQ ID NO: 214403 - DNA, 622 bp, Homo sapiens
aatatccattctattgacataaagaggtgaaattattttatctctagctctcaaaaggtggtccctagacaaacaacatgggcatcacctgggtacttgtttgaactgcatattcttaggtcccatttaatttctattgagccagaaactctggaggcaaggcctaggaatctgaattttatcatgctgtctaggagattctgatgcacactcaaatttgagtcactgcactaagcaatgagkaaacagaagaaatggattcatatttgtctgagtctctcaagttctatagcttagtcattctggttttctttttttccaaagggaagaaatattatttaggtatgcagaactgcaaatagttttaggaatatggattccttaatttttatgtgattttaaaaaattattgagtaaaaacatccaagcaatttgtaatggctttaatagttacagaataaaacagtgttggacattgcagttaatcattttctttgctatcaaagttacttgcagtacttttcctgactttcgatttttaattatttttcttttaacatttcatccatatcccaatgcatatccttctttatatgcatgtaaatgtacatgtgtttctttc

SEQ ID NO: 214404 - DNA, 622 bp, Homo sapiens
aatatccattctattgacataaagaggtgaaattattttatctctagctctcaaaaggtggtccctagacaaacaacatgggcatcacctgggtacttgtttgaactgcatattcttaggtcccatttaatttctattgagccagaaactctggaggcaaggcctaggaatctgaattttatcatgctgtctaggagattctgatgcacactcaaatttgagtcactgcactaagcaatgagtaaacagaagaaatggattcatatttgtctgagtctctcaagttctatagcttagtcattctggttttctttttttccaaagggaagaaatattatttaggtatgcagaactgcaaatagttttaggartatggattccttaatttttatgtgattttaaaaaattattgagtaaaaacatccaagcaatttgtaatggctttaatagttacagaataaaacagtgttggacattgcagttaatcattttctttgctatcaaagttacttgcagtacttttcctgactttcgatttttaattatttttcttttaacatttcatccatatcccaatgcatatccttctttatatgcatgtaaatgtacatgtgtttctttc

SEQ ID NO: 214405 - DNA, 622 bp, Homo sapiens
aatatccattctattgacataaagaggtgaaattattttatctctagctctcaaaaggtggtccctagacaaacaacatgggcatcacctgggtacttgtttgaactgcatattcttaggtcccatttaatttctattgagccagaaactctggaggcaaggcctaggaatctgaattttatcatgctgtctaggagattctgatgcacactcaaatttgagtcactgcactaagcaatgagtaaacagaagaaatggattcatatttgtctgagtctctcaagttctatagcttagtcattctggttttctttttttccaaagggaagaaatattatttaggtatgcagaactgcaaatagttttaggaatatggattycttaatttttatgtgattttaaaaaattattgagtaaaaacatccaagcaatttgtaatggctttaatagttacagaataaaacagtgttggacattgcagttaatcattttctttgctatcaaagttacttgcagtacttttcctgactttcgatttttaattatttttcttttaacatttcatccatatcccaatgcatatccttctttatatgcatgtaaatgtacatgtgtttctttc

SEQ ID NO: 214406 - DNA, 622 bp, Homo sapiens
aatatccattctattgacataaagaggtgaaattattttatctctagctctcaaaaggtggtccctagacaaacaacatgggcatcacctgggtacttgtttgaactgcatattcttaggtcccatttaatttctattgagccagaaactctggaggcaaggcctaggaatctgaattttatcatgctgtctaggagattctgatgcacactcaaatttgagtcactgcactaagcaatgagtaaacagaagaaatggattcatatttgtctgagtctctcaagttctatagcttagtcattctggttttctttttttccaaagggaagaaatattatttaggtatgcagaactgcaaatagttttaggaatatggattccttaatttttatgtgattttaaaaaattattgagtaaaaacatccaagcaatttgtaatggctttaatagttacagaataaaacagtgttggacattgcagttaatcattttctttgctatcaaagtyacttgcagtacttttcctgactttcgatttttaattatttttcttttaacatttcatccatatcccaatgcatatccttctttatatgcatgtaaatgtacatgtgtttctttc

SEQ ID NO: 214407 - DNA, 537 bp, Homo sapiens
aatcaaattggtcagacgtctctggtgctttgctcagatgccggcgccctagcagcctgctttcaaagagggtcttttcctaagatatgcagtgattattttatggaaattagctctacccacttgcacagttaattgcagtatgagaaggttccagaacagtacctccttgagttcgacagtaaatatgcacacatcattgtatgacgagcattccagaacacccacctcccagcaaagtaaatttgctggctgaataaacacctgggctgctttagcccacaaatggcaacaagtctcatgttttaccacaaatgtacactaagcctttttaggacactgcagagccttgtagcatggaaaggggcatctgatgtctgaattcytgtagagttggcctccaagaatctctctttttccacttgaggatatcaggttatgagtttttttttttgaagaatttgaagaaaattgtttgctcatccacttattacagggaattgtagttagtaatatctttggcgttaagtatttaaa

SEQ ID NO: 214408 - DNA, 576 bp, Homo sapiens
aactgagctatttctactgatgtgccaggcatygttacaagcacttttgcatgcattacctcatttaatcttcacatcatcactaggaggtaaatacttagattattcctatggcaggctccatcagagcccaaccatgtccctgcagcccatcggaaggccacctgcagacagtcctccaacatgtagaccaatgcctgaggatttctggtcccaggtcaggcccatgcacaagacaggtcagagtgaccctaaactaagaaaggcaaggagtctgtagaatataactgatattcatcctactcatgggccagtcatagtaataaatcctggggtaattatccccatcctctctcacagagtccccagtggaatttaccactgttgacaatcaggatctattctgagctgtttccctgttttactctccctaccctctcttcctgagatcagctcccaaataaaatacttttgcccaaatctttgtctccaggtttgttatagggggaacccaaactatgacctccccatttttaagatgcgggcacagaggcactgaagaacctcaagactgca

SEQ ID NO: 214409 - DNA, 427 bp, Homo sapiens
gcagttacaccaaccaatgagagatgggaagaggtacagaaatgtcccaactccttattctgctcggagacctctctgagaccattccatatggtccatcctcagggagtccccagtgggcctgagcccytctgttttctccatgacaacccatttattaatatagtctttattcacttttctcccttccttctcttactttccccactcatttctgcttcctgaaatcacctcttagagaaactgcctgcacccaagtccttatgttgggtctgcttttgggtcatctaaataagatccctccatccatccctccatcctgccatgatcccctactaggttccagctactggacacggagaggggaagggaaatcaagagaatcccgagctgaaaatatatcctttctctttccagagatctctca

SEQ ID NO: 214410 - DNA, 504 bp, Homo sapiens
attgtacaatttccctcagaaatagccttgagaaagaagtcacatcactcagcaatgagtattataattactcacagcagttttcatggtactatataacatccaatttacagaattaaaggtaatgtaattcgaaagaaaaatagctggttttaaggaatgaakggccatgtcaactattggaagcatctttgaactggagcctctatgttcgggtttcaccaggtttatgtttttaattaatatcctattcagcttgctgtaatttccattgaggttttctagaacaagacaagtcagaaattgatctttaattataagctaagagcaaactgccaaagaactgagagaaattttgaagaaacaggtctatcaggactaaccattttaagataataaagactaatcagacacacacacatatgcacaaaaagagggagagagagaacaaaaatcctatgaaatacattttaaaaacttaatttttttaagaagaagcatttg

SEQ ID NO: 214411 - DNA, 504 bp, Homo sapiens
attgtacaatttccctcagaaatagccttgagaaagaagtcacatcactcagcaatgagtattataattactcacagcagttttcatggtactatataacatccaatttacagaattaaaggtaatgtaattcgaaagaaaaatagctggttttaaggaatgaagggccatgtcaactattggaagcatctttgaactrgagcctctatgttcgggtttcaccaggtttatgtttttaattaatatcctattcagcttgctgtaatttccattgaggttttctagaacaagacaagtcagaaattgatctttaattataagctaagagcaaactgccaaagaactgagagaaattttgaagaaacaggtctatcaggactaaccattttaagataataaagactaatcagacacacacacatatgcacaaaaagagggagagagagaacaaaaatcctatgaaatacattttaaaaacttaatttttttaagaagaagcatttg

SEQ ID NO: 214412 - DNA, 526 bp, Homo sapiens
aaagatctaattgtacaatttccctcagaaatagccttgagaaagaagtcacatcactcagcaatgagtattataattactcacagcagttttcatggtactatataacatccaatttacagaattaaaggtaatgtaattcgaaagaaaaatagctggttttaaggaatgaagggccatgtcaactattggaagcatctttgaactggagcctctatgttcgggtttcaccaggtttatgtttttaattaatatcckattcagcttgctgtaatttccattgaggttttctagaacaagacaagtcagaaattgatctttaattataagctaagagcaaactgccaaagaactgagagaaattttgaagaaacaggtctatcaggactaaccattttaagataataaagactaatcagacacacacacatatgcacaaaaagagggagagagagaacaaaaatcctatgaaatacattttaaaaacttaatttttttaagaagaagcatttgatctgccaaagag

SEQ ID NO: 214413 - DNA, 526 bp, Homo sapiens
aaagatctaattgtacaatttccctcagaaatagccttgagaaagaagtcacatcactcagcaatgagtattataattactcacagcagttttcatggtactatataacatccaatttacagaattaaaggtaatgtaattcgaaagaaaaatagctggttttaaggaatgaagggccatgtcaactattggaagcatctttgaactggagcctctatgttcgggtttcaccaggtttatgtttttaattaatatcctattcagcttsctgtaatttccattgaggttttctagaacaagacaagtcagaaattgatctttaattataagctaagagcaaactgccaaagaactgagagaaattttgaagaaacaggtctatcaggactaaccattttaagataataaagactaatcagacacacacacatatgcacaaaaagagggagagagagaacaaaaatcctatgaaatacattttaaaaacttaatttttttaagaagaagcatttgatctgccaaagag

SEQ ID NO: 214414 - DNA, 524 bp, Homo sapiens
agatctaattgtacaatttccctcagaaatagccttgagaaagaagtcacatcactcagcaatgagtattataattactcacagcagttttcatggtactatataacatccaatttacagaattaaaggtaatgtaattcgaaagaaaaatagctggttttaaggaatgaagggccatgtcaactattggaagcatctttgaactggagcctctatgttcgggtttcaccaggtttatgtttttaattaatatcctattcagcttgctgtaatttccattgaggttttctagaacaagacaagtcagaaattgatctttaattataagctaagagcaaactgccaaagaactgagagaaattttgaagaaacaggtctatcaggactaaccattttaagataataaagactaatcagacacacacacatatgcacaaaaagagggagagagagaacaaaaatcctatgaaatacattttaaaaamttaatttttttaagaagaagcatttgatctgccaaagag

SEQ ID NO: 214415 - DNA, 441 bp, Homo sapiens
gatgggatactaaagtaccaagtttaagaggtgtaatctattaatgtttaatttatgtcccaaatacttaaaaactatgtttcattgttatacatatttattttattrtaaagataatgaatgcagtagggttagatttaaataattcattgggtttaaaatgagaaatgaaagtctggctttttacaacctacagtcttatcaccaaagttagctattgttaataacttcttgtccattcttgtatgtgttatggtttctttcttagaaagaagtatgctatactagtatacatgctatttattcatgaaccttgcacttatcatgtaatcatatgtcttagtggtcttttcataatagatgtctctctttcccacgctgtcagtggtgattgcatgaggcattgtacagacgtaccaataattacttactctgtgtcat

SEQ ID NO: 214416 - DNA, 441 bp, Homo sapiens
gatgggatactaaagtaccaagtttaagaggtgtaatctattaatgtttaatttatgtcccaaatacttaaaaactatgtttcattgttatacatatttattttattataaagataatgaatgcagtagggttagatttaaataattcattgggtttaaaatgagaaatgaaagtctggctttttacaacctacagtcttatcaccaaagttagctattgttaataacttcttgtccattcttgtatgtgttatrgtttctttcttagaaagaagtatgctatactagtatacatgctatttattcatgaaccttgcacttatcatgtaatcatatgtcttagtggtcttttcataatagatgtctctctttcccacgctgtcagtggtgattgcatgaggcattgtacagacgtaccaataattacttactctgtgtcat

SEQ ID NO: 214417 - DNA, 441 bp, Homo sapiens
gatgggatactaaagtaccaagtttaagaggtgtaatctattaatgtttaatttatgtcccaaatacttaaaaactatgtttcattgttatacatatttattttattataaagataatgaatgcagtagggttagatttaaataattcattgggtttaaaatgagaaatgaaagtctggctttttacaacctacagtcttatcaccaaagttagctattgttaataacttcttgtccattcttgtatgtgttatggtttctttcttagaaagaagtatgctatactagtatacatrctatttattcatgaaccttgcacttatcatgtaatcatatgtcttagtggtcttttcataatagatgtctctctttcccacgctgtcagtggtgattgcatgaggcattgtacagacgtaccaataattacttactctgtgtcat

SEQ ID NO: 214418 - DNA, 441 bp, Homo sapiens
gatgggatactaaagtaccaagtttaagaggtgtaatctattaatgtttaatttatgtcccaaatacttaaaaactatgtttcattgttatacatatttattttattataaagataatgaatgcagtagggttagatttaaataattcattgggtttaaaatgagaaatgaaagtctggctttttacaacctacagtcttatcaccaaagttagctattgttaataacttcttgtccattcttgtatgtgttatggtttctttcttagaaagaagtatgctatactagtatacatgctatttattcatgaaccttgcacttatcatgtaatcatatgtcttagtggtcttttcataatagatgtctctctttcccaygctgtcagtggtgattgcatgaggcattgtacagacgtaccaataattacttactctgtgtcat

SEQ ID NO: 214419 - DNA, 581 bp, Homo sapiens
cattatctattctttattaaaagagaaactaaaagtaatataattaaatagcttgttcttgtgacttaaataatataaaattttcatttcaattatgtgacaatgctttgtatagctgtattccaaatacayagcatggtgcctagaacatagcaggcagtcaatacatttttaccaaatgaaatgaataaattaccagttgattttatactgaggaccaaactatgacctttaattcctccaaaataaaacacacaatcccattatatgtgaaccatatccacaataccagaatctaagattcccactctgaaagagtaactagaacaacttcttttggaggcaattctgcttacttagcacattactcccccctacagttttccttcttttgtttttgtactaaggatatttgtataaaaacaggatctttgttgcttagtaattcatctgcttcagctgcttgtattctgttcccaatcaaaattcttggttttcagcctcctcatcatttttataaggagttgaatgaattggccaagcttgttcctttctccctctccatggaacaccaggcccca

SEQ ID NO: 214420 - DNA, 581 bp, Homo sapiens
cattatctattctttattaaaagagaaactaaaagtaatataattaaatagcttgttcttgtgacttaaataatataaaattttcatttcaattatgtgacaatgctttgtatagctgtattccaaatacacagcatggtgcctagaacatagcaggcagtcaatacatttttaccaaatgaaatgaataaattaccagttgattttatactgaggaccaaactatgacctttaatycctccaaaataaaacacacaatcccattatatgtgaaccatatccacaataccagaatctaagattcccactctgaaagagtaactagaacaacttcttttggaggcaattctgcttacttagcacattactcccccctacagttttccttcttttgtttttgtactaaggatatttgtataaaaacaggatctttgttgcttagtaattcatctgcttcagctgcttgtattctgttcccaatcaaaattcttggttttcagcctcctcatcatttttataaggagttgaatgaattggccaagcttgttcctttctccctctccatggaacaccaggcccca

SEQ ID NO: 214421 - DNA, 290 bp, Homo sapiens
tgtgaaccatatccacaataccagaatctaagattcccactctgaaagagtaactagaacaacttcttttkgaggcaattctgcttacttagcacattactcccccctacagttttccttcttttgtttttgtactaaggatatttgtataaaaacaggatctttgttgcttagtaattcatctgcttcagctgcttgtattctgttcccaatcaaaattcttggttttcagcctcctcatcatttttataaggagttgaatgaattggccaagcttgttcctttctccc

SEQ ID NO: 214422 - DNA, 581 bp, Homo sapiens
cattatctattctttattaaaagagaaactaaaagtaatataattaaatagcttgttcttgtgacttaaataatataaaattttcatttcaattatgtgacaatgctttgtatagctgtattccaaatacacagcatggtgcctagaacatagcaggcagtcaatacatttttaccaaatgaaatgaataaattaccagttgattttatactgaggaccaaactatgacctttaattcctccaaaataaaacacacaatcccattatatgtgaaccatatccacaataccagaatctaagattcccactctgaaagagtaactagaacaacttcttttggaggcaattctgcttacttagcacattactcccccctacagttttccttcttttgtttttgtactaaggatatttgtataaaaacaggatctttgttgcttagtaattcatctgmttcagctgcttgtattctgttcccaatcaaaattcttggttttcagcctcctcatcatttttataaggagttgaatgaattggccaagcttgttcctttctccctctccatggaacaccaggcccca

SEQ ID NO: 214423 - DNA, 555 bp, Homo sapiens
atctcccttactcctgatgtttcctcttagtgattttccattcactgacccctgcattgctcctgggctataaattcccacttccccatgctgtattcagagttaagcccatctctctccccagctccaagactgtgttgcagtggttcctatatctatggtgatggtcctgaataaagtcttctttactgtgcatttgaagtatcactgaataattttttctttaacaattatggtgttgaaactcaactaggacagattcatcactggatcctgggcctctcactcagaaccctaaatgcatgcctttgaagtctttgttgtcatttctgactgattagggatccattggtgaatcakattcctgagccattgctccagacaaaagcccgttgatggctaaggacagattttgaatctgaagggatgaatattctctctgaagctggggtagagtcccaggcttcttttgaaagcaatcctctgggcaggaaggtcttcgtgtgggcttcttgttctgagtggtctattctctgagtccctagactagaattc

SEQ ID NO: 214424 - DNA, 561 bp, Homo sapiens
atgttttttgaacccaataattggaactatcattcattccttttaaatccatcatattgagtctttactccaagtttccttgattgagacaacttttacattatactcatacaatcacagaatttcagcagtgatctcagaaaccaaatggtctgaacccctatagcactgaaaaggacaccaaagctaactgatctacccaaagttggttatctgtgaatctagcaatttccccagtttaacaaatatagccctagcttcacctagaccttgcaatgaaayagtacttaactgaaagtgtatgactaagtcttgccccaagactagcacctattcaatcagctctaacatcctaaatggaccagcatcctatccatacctctcctctccctaaggacagtctggaaattccttgctgaacctaagcatatgactaaaagaataatctttcctaagcataattttcatgtcattcttctgctcagaaactagcaacagtattaataccaagcctttcaaatccaagttctttacaatctctgatctgcttgtctgtcccat

SEQ ID NO: 214425 - DNA, 522 bp, Homo sapiens
agcacctattcaatcagctctaacatcctaaatggaccagcatcctatccatacctctcctctccctaaggacagtctggaaattccttgctgaacctaagcatatgactaaaagaataatctttcctaagcataattttcatgtcattcttctgctcagaaactagcaacagtattaataccaagcctttcaaatccaagttctttacaatctctgatctgcytgtctgtcccattccaatcatctaaccatcttactctttagtaatccataactcgaacactccatattatttccacaatcttgtttactgtcccccatattaaaatctttttaatttccagtgagaaacatcatgcttcccttctggtatatctccaacttaggttcctttcttccacccttttttcaaaaatctgctgtaaacctgtcctatagtaagccttctacaaatcatcccacctgtctctgatccttccaacagtcagatgtagtgccatgtcatgcactacattgtctcc

SEQ ID NO: 214426 - DNA, 522 bp, Homo sapiens
agcacctattcaatcagctctaacatcctaaatggaccagcatcctatccatacctctcctctccctaaggacagtctggaaattccttgctgaacctaagcatatgactaaaagaataatctttcctaagcataattttcatgtcattcttctgctcagaaactagcaacagtattaataccaagcctttcaaatccaagttctttacaatctctgatctgcttgtctgtcccattccaatcatctaaccatcttactctttagtaatccataactcgaacactccatattatttccacaatcttgtttactgtcccccatattaaaatctttttaatttccagtgagaaacatcatgcttcccttctggtatatctccaacttaggttcctttcttccacccttttttcaaaaatctgctgtaaacctgtcctatagtaagccttctacaaatcatcccacctrtctctgatccttccaacagtcagatgtagtgccatgtcatgcactacattgtctcc

SEQ ID NO: 214427 - DNA, 489 bp, Homo sapiens
atctaacagatgcctttcatccgcaaaactatatgaatgtttccctcctgtagggagtttattaattattttcataactgtctcttcaatgtctctcagtgacttctacttactctctcttctctagcattggaactctgaaagaacatacttcgcagatgaggttgtgaatacagagaaaggtttggggagcatttttccattttaaactctataaactaatctgaatacttaccaggtccataaagatatatttatgactttttctttaaaagtctcagctgggcacagtggctcacacctgtaatcccagcactgtgggaggccaaggygagcagattgctagagcggaagttcgagacctgcctaggcaacacgggcaacatggtgagaaccccatctcaaaaaaaaaaaaagtgtcatttctgacattgagaggtccacatttccattgttactgttcaaacatacgcatggggttggatgtag

SEQ ID NO: 214428 - DNA, 489 bp, Homo sapiens
atctaacagatgcctttcatccgcaaaactatatgaatgtttccctcctgtagggagtttattaattattttcataactgtctcttcaatgtctctcagtgacttctacttactctctcttctctagcattggaactctgaaagaacatacttcgcagatgaggttgtgaatacagagaaaggtttggggagcatttttccattttaaactctataaactaatctgaatacttaccaggtccataaagatatatttatgactttttctttaaaagtctcagctgggcacagtggctcacacctgtaatcccagcactgtgggaggccaaggtgagcagattgctagagcrgaagttcgagacctgcctaggcaacacgggcaacatggtgagaaccccatctcaaaaaaaaaaaaagtgtcatttctgacattgagaggtccacatttccattgttactgttcaaacatacgcatggggttggatgtag

SEQ ID NO: 214429 - DNA, 489 bp, Homo sapiens
atctaacagatgcctttcatccgcaaaactatatgaatgtttccctcctgtagggagtttattaattattttcataactgtctcttcaatgtctctcagtgacttctacttactctctcttctctagcattggaactctgaaagaacatacttcgcagatgaggttgtgaatacagagaaaggtttggggagcatttttccattttaaactctataaactaatctgaatacttaccaggtccataaagatatatttatgactttttctttaaaagtctcagctgggcacagtggctcacacctgtaatcccagcactgtgggaggccaaggtgagcagattgctagagcggaagttcgagacctgcctaggcaayacgggcaacatggtgagaaccccatctcaaaaaaaaaaaaagtgtcatttctgacattgagaggtccacatttccattgttactgttcaaacatacgcatggggttggatgtag

SEQ ID NO: 214430 - DNA, 582 bp, Homo sapiens
tagtgacagtccagctttggaagagtggaagccctagttycaaattcaagcatgctttgagtataaattaagtttacctctttttgcacagcaacatggccaatctttcctaagctgctcagcttacaagaaaaggaatcatactgctaagaattcaaacttcagcagtcataggtaagtaaggaagtcttataaacctattctagccacctaaccagaaactcgaaatttagcaggttctttcagtttcaggacagttgtgttcactagatcagaggcattgagacatgaagaacagacccttaaaaagggaaagtgttcccttcagtttgaggacatcactggaacattagggaagtgggaacacagctgctcactctacagtgtgggttgcctttgtgtctggaatgtgtctgacgtcctgatccctgtgcacatttcagggagccttgggaggacccctgaatcactgatggaattgggcagtgcatggagatggctcagcaggatgagggtaaatgcaggggcaagtccaggtcatactgagagacaatgagtggcgctgatgaggacaaagataaa

SEQ ID NO: 214431 - DNA, 582 bp, Homo sapiens
tagtgacagtccagctttggaagagtggaagccctagttccaaattcaagcatgctttgagtataaattaagtttacctctttttgcacagcaacatggccaatctttcctaagctgctcagcttacaagaaaaggaatcatactgctaagaattcaaacttcagcagtcataggtaagtaaggaagtcttataaacctattctagccacctaaccagaaactcgaaatttagcaggttctttcagtttcaggacagttgtgttcactagatcagaggcattgagacatgaagaacagacccttaaaaagggaaagtgttcccttcagtttgaggacatcactggaacattagggaagtgggaacacagctgctcactctacagtgtgggttgcctttgtgtctggaatgtgyctgacgtcctgatccctgtgcacatttcagggagccttgggaggacccctgaatcactgatggaattgggcagtgcatggagatggctcagcaggatgagggtaaatgcaggggcaagtccaggtcatactgagagacaatgagtggcgctgatgaggacaaagataaa

SEQ ID NO: 214432 - DNA, 582 bp, Homo sapiens
tagtgacagtccagctttggaagagtggaagccctagttccaaattcaagcatgctttgagtataaattaagtttacctctttttgcacagcaacatggccaatctttcctaagctgctcagcttacaagaaaaggaatcatactgctaagaattcaaacttcagcagtcataggtaagtaaggaagtcttataaacctattctagccacctaaccagaaactcgaaatttagcaggttctttcagtttcaggacagttgtgttcactagatcagaggcattgagacatgaagaacagacccttaaaaagggaaagtgttcccttcagtttgaggacatcactggaacattagggaagtgggaacacagctgctcactctacagtgtgggttgcctttgtgtctggaatgtgtctgacgtcctgatccctgtgcacatttcagggagccttgggaggacccctgaatcactgatggaattgsgcagtgcatggagatggctcagcaggatgagggtaaatgcaggggcaagtccaggtcatactgagagacaatgagtggcgctgatgaggacaaagataaa

SEQ ID NO: 214433 - DNA, 419 bp, Homo sapiens
ggaaaaacttattcatatagttgcttcattttgctgactgcaaaaggatttgttttggaagtgatttctgctctttaacctagtggattgatagatcacagaaaggtcttagaaatgacattacrtaattttgttcataacatgaaattagcttgaatcaaaaaatgtataccattttttgtatctaccttctaagacatttgtcttgagaaattaatgattctacaacataaatagtcattgtgaaaggaaggaaaaagataacagagggctttcataataatcatggactcaagattatctaatttaaaaagacatatctcattttcctttacttaaacataaaacaaatgagagaaaacagaaatagctcataattttatttatctgataaaacatgctgacataaaaatataatt

SEQ ID NO: 214434 - DNA, 396 bp, Homo sapiens
gctttcataataatcatggactcaagattatctaatttaaaaagacatatctcattttcctttayttaaacataaaacaaatgagagaaaacagaaatagctcataattttatttatctgataaaacatgctgacataaaaatataattcatgcacccagtaagaaaatcaaaaaattaaataaaggtaaaaatgaaatataaaattctctttcctctagtctcttacccccagacatctagaatctctccttaagataatcactgttgacaattccttgagtatctttttaaaaatgaccttaatacacatcccccgtatagaatatagatcttaaacaagttagaaaataaaattttatcttttagtattacacaaaaggatgttcagaactag

SEQ ID NO: 214435 - DNA, 396 bp, Homo sapiens
gctttcataataatcatggactcaagattatctaatttaaaaagacatatctcattttcctttacttaaacataaaacaaatgagagaaaacagaaatagctcataattttatttatctgataaaacatgctgacataaaaatataattcatgcacccagtaagaaaatcaaaaaattaaataaaggtaaaaatgaaatataaaattctctttcctctagtctcttacccccagacatctagaatctctccttaagataatcactgttgacaattycttgagtatctttttaaaaatgaccttaatacacatcccccgtatagaatatagatcttaaacaagttagaaaataaaattttatcttttagtattacacaaaaggatgttcagaactag

SEQ ID NO: 214436 - DNA, 627 bp, Homo sapiens
tgacttctgaaaacgcctttttgggggagaagcaccacaacagaaacattgcgaatgcatcctccataaaaagctaagttctaagggattatgagtgtctctactctctacttactatacagacatttaccaagaagacaaagaaggcaatggctctagtttttcttggatggattcaggaaatctggaccaccaacatgactgcctaatcctggcaaggaraattgttagctgttaatgtttaatgtttattacagctagcagacaagttttagacaaaatgtgacacaaagttatattttataacactttatatttataataatttaccttaaagtgtagtttttagatcagcactttagcaaaaagtggacattctcaaatgcaagcacccatctacaggaacgtatacaactcacggtgactttctgctgttttacaaacactatgttagatatttaccaagtggtatgtatgaaattctgaaaggcccctttatatttccaattttcatcattaaaaataattgcagagtaacttatatcagactagccctcttgctctggacaaaatatcaaaggcactggagaatcactgaaagcaggcataaactagaagggatataag

SEQ ID NO: 214437 - DNA, 627 bp, Homo sapiens
tgacttctgaaaacgcctttttgggggagaagcaccacaacagaaacattgcgaatgcatcctccataaaaagctaagttctaagggattatgagtgtctctactctctacttactatacagacatttaccaagaagacaaagaaggcaatggctctagtttttcttggatggattcaggaaatctggaccaccaacatgactgcctaatcctggcaaggagaattgttagctgttaatgtttaatgtttattacagctagcagacaagttttagacaaaatgtgacacaaagttatattttataacactttatatttataataatttaccttaaagtgtagtttttagatcagcactttagcaaaaagtggacattctcaaatgcaagcacccatctacaggaaygtatacaactcacggtgactttctgctgttttacaaacactatgttagatatttaccaagtggtatgtatgaaattctgaaaggcccctttatatttccaattttcatcattaaaaataattgcagagtaacttatatcagactagccctcttgctctggacaaaatatcaaaggcactggagaatcactgaaagcaggcataaactagaagggatataag

SEQ ID NO: 214438 - DNA, 627 bp, Homo sapiens
tgacttctgaaaacgcctttttgggggagaagcaccacaacagaaacattgcgaatgcatcctccataaaaagctaagttctaagggattatgagtgtctctactctctacttactatacagacatttaccaagaagacaaagaaggcaatggctctagtttttcttggatggattcaggaaatctggaccaccaacatgactgcctaatcctggcaaggagaattgttagctgttaatgtttaatgtttattacagctagcagacaagttttagacaaaatgtgacacaaagttatattttataacactttatatttataataatttaccttaaagtgtagtttttagatcagcactttagcaaaaagtggacattctcaaatgcaagcacccatctacaggaacgtatacaactcacrgtgactttctgctgttttacaaacactatgttagatatttaccaagtggtatgtatgaaattctgaaaggcccctttatatttccaattttcatcattaaaaataattgcagagtaacttatatcagactagccctcttgctctggacaaaatatcaaaggcactggagaatcactgaaagcaggcataaactagaagggatataag

SEQ ID NO: 214439 - DNA, 627 bp, Homo sapiens
tgacttctgaaaacgcctttttgggggagaagcaccacaacagaaacattgcgaatgcatcctccataaaaagctaagttctaagggattatgagtgtctctactctctacttactatacagacatttaccaagaagacaaagaaggcaatggctctagtttttcttggatggattcaggaaatctggaccaccaacatgactgcctaatcctggcaaggagaattgttagctgttaatgtttaatgtttattacagctagcagacaagttttagacaaaatgtgacacaaagttatattttataacactttatatttataataatttaccttaaagtgtagtttttagatcagcactttagcaaaaagtggacattctcaaatgcaagcacccatctacaggaacgtatacaactcacggtgactttctgctgttttacaaacactaygttagatatttaccaagtggtatgtatgaaattctgaaaggcccctttatatttccaattttcatcattaaaaataattgcagagtaacttatatcagactagccctcttgctctggacaaaatatcaaaggcactggagaatcactgaaagcaggcataaactagaagggatataag

SEQ ID NO: 214440 - DNA, 258 bp, Homo sapiens
tttcatccttcactctaatttcagcgtctaaaatcctcgctaccatgaacaatctgagtatttgatgagacagggctgaatagtgcagtttttctcctagcaaccatttgggggyatttgctttaaatcgattggaaaaatatggcataaccatttgcacaaacttgggacaaatgatattgggataacgatctaccagaatagggaattttacccacagtttctgggacaaaaaccaaggaatctctatggtgatca

SEQ ID NO: 214441 - DNA, 455 bp, Homo sapiens
ctcctttttcttttcaaactcttccttatgttagccatgaaatctagctggggctgtgtggtttctgattccccctggcttattctttactttttcccacttttccaggctcagcagggagctgctggatgagaaagggcctgaagtcttgcaggactcactggatagatgttattcaactccttcaggttgtcttgaactgactgactcatgccagccctacagaagtgccttttacatattggagcaacagygtgttggcttggctgttgacatggatggtgagtacctttctatgaaggtgataaggatccactgagtcttctggttagggtcatattcctactgcaagtggcccttactgagctgagagatgtcattgccacagggaggacctataggcacatgtaggttgaatgaaactctagttccacttggcagcccagacaagggat

SEQ ID NO: 214442 - DNA, 556 bp, Homo sapiens
aagtttgtgcagcaatataggaaagaaagctggctaaggctacccagggatttctaaatttaaagcttayaaacttattggctctctctctccactccctctaaattcttcaactttgtgggaaaacttgagtttagccccagaattactaatgtggtcaactgtgagacataattgcacagggtgtgactctggcatagaaccgtggtagataacttagcagtttgcttttccctggcttataaaggatagcaagttccacagatctagggagaccttgtcaagctcatgcagttgacatcacagttcattctagaaccatatctttttggtttctccattttaaaatacagtttcataaaaggagaatggttttacatgcactttttttcttaaaaaaccttattcatgatattgaaatacttaaaaattctgctttaatagacatagtaccaagaggccaattcgtatgatgttaggtgtgaattatattctgtaggacatcaccttaactatgaaatatgttggcttatgttattccttctctacttttgct

SEQ ID NO: 214443 - DNA, 521 bp, Homo sapiens
tttagaaaccaaaggaggaaaataccagtaagaatagagaagaaataattttccacccataagagcatctttttccaggaagttctttctggcttctaatactggttatagaaagaatgtgtgaggctacctgggcctatgtggggtccagtttgttttctttcgtgagtcctcagggaattaggtcaactaacaaatgcctgattgtcccagagaagatacttagaacggggctgcagcagtcaagtcacagtcagagagtgaccttcttgggtgagaagcaggggggtccatgctcgtccatcagcatgttgattcatgtacrtttcctgaggttcatgtcgagaattctcagtaaacacggtcacctgatggcaggtgataggaactgtcagcctatttgaggaattctaattgatttcataccaaagagtaagctgtccttcagaatcagttcttaacatcctgaagttagaaggcactggcataaccctctacaggccgagcaggaagtggcaaat

SEQ ID NO: 214444 - DNA, 521 bp, Homo sapiens
tttagaaaccaaaggaggaaaataccagtaagaatagagaagaaataattttccacccataagagcatctttttccaggaagttctttctggcttctaatactggttatagaaagaatgtgtgaggctacctgggcctatgtggggtccagtttgttttctttcgtgagtcctcagggaattaggtcaactaacaaatgcctgattgtcccagagaagatacttagaacggggctgcagcagtcaagtcacagtcagagagtgaccttcttgggtgagaagcaggggggtccatgctcgtccatcagcatgttgattcatgtacgtttcctgaggttcatgtcgagaattctcagtaaacamggtcacctgatggcaggtgataggaactgtcagcctatttgaggaattctaattgatttcataccaaagagtaagctgtccttcagaatcagttcttaacatcctgaagttagaaggcactggcataaccctctacaggccgagcaggaagtggcaaat

SEQ ID NO: 214445 - DNA, 556 bp, Homo sapiens
aagtttgtgcagcaatataggaaagaaagctggctaaggctacccagggatttctaaatttaaagcttataaacttattggctctctctctccactccctctaaattcttcaactttgtgggaaaacttgagtttagccccagaattactaatgtggtcaactgtgagacataattgcacagggtgtgactctggcatagaaccgtggtagataacttagcagtttgcttttccctggcttataaaggatagcaagttccacagatctagggagaccttgtcaagctcatgcagttgacatcacagttcattctagaaccatatctttttggtttctccattttaaaatacagtttcataaaaggagaatggttttacatgcactttttttcttaaaaaaccttattcatgatattgaaatacttaaaaattctgctttaatagacatagtaccaagaggccaattcgtatgatgttargtgtgaattatattctgtaggacatcaccttaactatgaaatatgttggcttatgttattccttctctacttttgct

SEQ ID NO: 214446 - DNA, 519 bp, Homo sapiens
ttttctagcaaatgatgattatcttttgcaatatgaagttcaaatttcatcacaattataagtcattccttggtacatcaaccagcaaaatgtactgcacttaaacttgggtgcccaaagatgtattagtggcatagacaaataaaccattggatatgttatgacccatatttgaaaacttttacacattacacatataaatatttacatttcaaataataacaagcttacctacaacatatgttaataactgaaggcatattatgatgttgggcataagcataactctatgttcyatattttggctgattttaacataatcaaaaataggcagaattggagattaacataatcaccaaatagtcttgaaatgcatagtttcaaatttctttaaaactcagtttgatgcaataggaagagaatcagattgggagccaaaacagggatggtgtaaatagaacactaggctggatgctaagatatttttcagccctgacatttcatgatccttttattctt

SEQ ID NO: 214447 - DNA, 587 bp, Homo sapiens
caaatactgctctgcgaacaaagagcaaaatgcaactgaagcagaaccatcagctaccaggcarcactaatatgaaattgtttaaaatattgttcatcagcgacatctaactgtagcagataaagactgtttaaggatatgtgaacaatgcacagaagttcaagttgttttaaattcaaccttataaagcctgagtttatacatgaaagtaatatagtcttgtttgataaaggcactttttcaaaaagtatgaattttctcacattcattgtgtgtgcgcgtggtgctgtgtgaggttttgtcacctgcctgaaaatcttttgtctttcatgcatttaataaacaggacttattttacaatgaattacaatttctctcagtctccatgcactacagatgattcttcttaaagcgatttgtggagttactcttagaaaagacaatagagttgagaatgaatttttttttttttttaaaagtcacaagacactgaagatcactcagctaacaatcgaatttggtcctactaaccctgagcaataccatctagtaaaaggcactgtcttgatggatcattcatggaaaac

SEQ ID NO: 214448 - DNA, 587 bp, Homo sapiens
caaatactgctctgcgaacaaagagcaaaatgcaactgaagcagaaccatcagctaccaggcaacactaatatgaaattgtttaaaatattgttcatcagcgacatctaactgtagcagataaagactgtttaaggatatgtgaacaatgcacagaagttcaagttgttttaaattcaaccttataaagcctgagtttatacatgaaagtaatatagtcttgtttgataaaggcactttttcaaaaagtatgaattttctcacattcattgtgtgtgcgcgtggtgctgtgtgaggttttgtcacctgcctgaaaatcttttgtctttcatgcatttaataaacaggacttattttacaatgaattacaatttctctcagtctccatgcactacagatgattcttcttaaagcgatttgtggagttactcttagaaaagacaatagagttgagaatgaatttttttttttttttaaaagtcacaagacactgaagatcacycagctaacaatcgaatttggtcctactaaccctgagcaataccatctagtaaaaggcactgtcttgatggatcattcatggaaaac

SEQ ID NO: 214449 - DNA, 509 bp, Homo sapiens
tttcaatttgcattaacagaaacaacattggaagggagtatattaagattttaatagtgackatttctgccaatggtttctgttttattgtttactattttcggtatatttccaatgtttcttaataagtgtttattatttaaaaaatgagaaaacagcaatgagtaattcagtaaaataaaatttttcaaaattgtgactgctatgattatgagccaattatgaaagaaagagacacagatagaaatagggtgaccaatctttcaacttactcaggaatgaaggattttctggatgggggatttttgttgctaaaatcgggacagtaggggacatgttgggactgtggaaaaaccctacagggatttatttcctaactatgaatttctatcttggtctagagacgactgttctcataaataggtagagtagatgtggtatttctggaatgagatttaacatctttacatagcttgccctattaaaagtagacaaatgcttgtgagaga

SEQ ID NO: 214450 - DNA, 509 bp, Homo sapiens
tttcaatttgcattaacagaaacaacattggaagggagtatattaagattttaatagtgacgatttctgccaatggtttctgttttattgtttactattttcggtatatttccaatgtttcttaataagtgtttattatttaaaaaatgagaaaacagcaatgagtaattcagtaaaataaaatttttcaaaattgtgactgctatgattatgagccaattatgaaagaaagagacacagatagaaatagggtgaccaatctttcaacttactcaggaatgaaggattttctggatgggggatttttgttgctaaaatcgggacagtaggggacatrttgggactgtggaaaaaccctacagggatttatttcctaactatgaatttctatcttggtctagagacgactgttctcataaataggtagagtagatgtggtatttctggaatgagatttaacatctttacatagcttgccctattaaaagtagacaaatgcttgtgagaga

SEQ ID NO: 214451 - DNA, 275 bp, Homo sapiens
ctggaatgagatttaacatctttacrtagcttgccctattaaaagtagacaaatgcttgtgagagaatatcatatacttttgaaagctaatgtcttaactaattcgctgtgagcaaagctcttgaagactgtgatgtaacagagattcctaggtatcagtgaagacacggagatgaaaaaagggaagttgaaaaaagaagctgagagataagcatggaaatcattttccaacctcatttttccaatctccattttcctgtattgagaagtgaaaa

SEQ ID NO: 214452 - DNA, 275 bp, Homo sapiens
ctggaatgagatttaacatctttacatagcttgccctattaaaagtagacaaatgcttgtgagagaatatcatatacttttgaaagctaatgtcttaactaattcgctgtgagcaaagctcttgaagactgtgatgtaacagagattcctaggtatcagtgaagayacggagatgaaaaaagggaagttgaaaaaagaagctgagagataagcatggaaatcattttccaacctcatttttccaatctccattttcctgtattgagaagtgaaaa

SEQ ID NO: 214453 - DNA, 632 bp, Homo sapiens
tagctgaaattttgtcagtcctaaaaatattttgtatttctctgcccagatttgcatttgggtagatmgtgctgtagaagatatatcttgctttaagatagctgccactgattagtttattttagtctattttaatcaacttattgccttgtaatctttcctttttcattctctaaatttctgaaattctatctttcatgttccccaggaaagactagtaagacgtgtttttattaataagacattatcctcatttcaccatgacataatttgggctttctgttccaagttatcctacttgaatgctggacacttccacctgaatatttgtcattttcacctcaacccagcacatcaaaacaatcccttattacctctttaaaagaagcttctctctccagccttttcctagtcagtatcacatcttttgagccaggcatggggattgcagtttcagatttcacctcaagtcttcctcttctggttcctgaagctccggcaacctctgctttgaaacattgttggcctcttcatcccatcccatgtcaatatttagcccatgccctgttggctttgacttagctcaatcaccttaacccagtgtcttaaaattcttgattttgagtttctta

SEQ ID NO: 214454 - DNA, 632 bp, Homo sapiens
tagctgaaattttgtcagtcctaaaaatattttgtatttctctgcccagatttgcatttgggtagatcgtgctgtagaagatatatcttgctttaagatagctgccactgattagtttattttagtctattttaatcaacttattgccttgtaatctttcctttttcattctctaaatttctgaaattctatctttyatgttccccaggaaagactagtaagacgtgtttttattaataagacattatcctcatttcaccatgacataatttgggctttctgttccaagttatcctacttgaatgctggacacttccacctgaatatttgtcattttcacctcaacccagcacatcaaaacaatcccttattacctctttaaaagaagcttctctctccagccttttcctagtcagtatcacatcttttgagccaggcatggggattgcagtttcagatttcacctcaagtcttcctcttctggttcctgaagctccggcaacctctgctttgaaacattgttggcctcttcatcccatcccatgtcaatatttagcccatgccctgttggctttgacttagctcaatcaccttaacccagtgtcttaaaattcttgattttgagtttctta

SEQ ID NO: 214455 - DNA, 632 bp, Homo sapiens
tagctgaaattttgtcagtcctaaaaatattttgtatttctctgcccagatttgcatttgggtagatcgtgctgtagaagatatatcttgctttaagatagctgccactgattagtttattttagtctattttaatcaacttattgccttgtaatctttcctttttcattctctaaatttctgaaattctatctttcatgttccycaggaaagactagtaagacgtgtttttattaataagacattatcctcatttcaccatgacataatttgggctttctgttccaagttatcctacttgaatgctggacacttccacctgaatatttgtcattttcacctcaacccagcacatcaaaacaatcccttattacctctttaaaagaagcttctctctccagccttttcctagtcagtatcacatcttttgagccaggcatggggattgcagtttcagatttcacctcaagtcttcctcttctggttcctgaagctccggcaacctctgctttgaaacattgttggcctcttcatcccatcccatgtcaatatttagcccatgccctgttggctttgacttagctcaatcaccttaacccagtgtcttaaaattcttgattttgagtttctta

SEQ ID NO: 214456 - DNA, 538 bp, Homo sapiens
agttcagtgagttttaaaactcaacaatgaaacttttcaaaaagagttgttatacagaacagaaaaaagcagccacaattttaaaaaagatatgaagacccagattctcactaactcattcagctcccttcatactccctccccacagccaccccagctcctgaggcaggttcccagggctccaaggaacatacttttaaaaaatcagtattttgaatacataataagtgatgtaacttaaaagtatggtgagaaagtcccattgccaagagaaacatgttaatttaattttttatttaaaaaatcatcactcktttcattgtgacatcttgaagaacgctgaatggcttcaaaataactgcatatgccaagatttctggagtgggcacgtttgatcttctttcataatgaaaactgacaaacctttttaaggggatagtattgtttcttcactctcccccctcctcacccctgcacacacatacatttctccttcctggggaactccaaagaaaacaaaggccctttagcaatcaag

SEQ ID NO: 214457 - DNA, 561 bp, Homo sapiens
ttgcttgatcaacagagtgctgttgattttttcaactgaattaattactcttggagtccaaactctccagtgtgccacagtcctcatcacttcctgtatcttaaatattgcattatctgtcccctaaaagtatttgaacatgtgacccagagaaggggacttacaacttgactaggcaacttctgtcacactggattcatatgaaattccactgcaagtgacatcaccagattggggaccctgaagtgtttgagtatcttctccacatctggtcatttaggctaagaaattccttcttgtctaccaggtcttttagcattcattttgtaagtcattcaacacctacttactgagaaggaatactgggctagacagtgtgctaggggctggggaaaccgcaatgcataggagagaattcccatctccaagaggctcacagtcaaacagacataaataggtgattacaatayacactaacaacatagttttagaaacaactagcagaattatatagacgaagatgccaggaaatgcttctcagagaatctggcttggcaaata

SEQ ID NO: 214458 - DNA, 400 bp, Homo sapiens
ctctctctccataaggctcccacctccttcaatgaagtctagttcacctaaaatgacactattaacattaattcaatattmtaagttgataagcacattaaatcaaaacacagcaagattattttaagagtctgactgaaatgtcaggatgagaaatagattaataaatattggcttctaatgttggtaatgaaaacaaacacgttattttcagaaaataaaaggtcttcgccattaggtacaaatcataaagggattatctacagttactacactgtaacaactttttacatattgtattatagaacaagcttttgagaagacaaagcaacacatcagcagtttaaccaattgtctttctcttttaacaggctggtctacattagattagatataaaag

SEQ ID NO: 214459 - DNA, 400 bp, Homo sapiens
ctctctctccataaggctcccacctccttcaatgaagtctagttcacctaaaatgacactattaacattaattcaatattctaagttgataagcacattaaatcaaaacacagcaagattattttaagagtctgactgaaatgtcaggatgagaaatagattaataaatattggcttctaatgtyggtaatgaaaacaaacacgttattttcagaaaataaaaggtcttcgccattaggtacaaatcataaagggattatctacagttactacactgtaacaactttttacatattgtattatagaacaagcttttgagaagacaaagcaacacatcagcagtttaaccaattgtctttctcttttaacaggctggtctacattagattagatataaaag

SEQ ID NO: 214460 - DNA, 400 bp, Homo sapiens
ctctctctccataaggctcccacctccttcaatgaagtctagttcacctaaaatgacactattaacattaattcaatattctaagttgataagcacattaaatcaaaacacagcaagattattttaagagtctgactgaaatgtcaggatgagaaatagattaataaatattggcttctaatgttggtaatgaaaacaaacacgttattttcagaaaataaaaggtcttcgycattaggtacaaatcataaagggattatctacagttactacactgtaacaactttttacatattgtattatagaacaagcttttgagaagacaaagcaacacatcagcagtttaaccaattgtctttctcttttaacaggctggtctacattagattagatataaaag

SEQ ID NO: 214461 - DNA, 621 bp, Homo sapiens
ttactaacgaaatgtgcatctctcattcttcccccaaaaagaaagaagtcatccactccagctacatataagtctccaatttctgtcttacaactaaacgtgaaaaccgaaataccactcattgaaaaaaaaaatgtacagagaattggcaggctgcatgtttatgtgaaccttcagaaaacatggaaacacgcagccccaactcaccaggaaaatcaacacttgtgatcaaactattttgtgacattttatgtcttttatacatttcacttcatatccagtattccagttttgcatccggcttgcctgtatcaaccccaaatcgcctgagagcaatctagtactgtagcagaaccgtttcaacatgaagagttctgctcagctctgtggcgtggtcttcgaaacacactgaatcaaacattgattcccctcyccctgctatttaaaaccgagggacgtcaggcttgggttgtaggtaaagaaaagccacagtaatcaaacaagcaaccaaaatacccgaacacggaacacgctaagaacaaaggaaacacaagagtgtgaacaggaaatgaagcaactctacacccataaataccttctggggccgccaacataggtaaa

SEQ ID NO: 214462 - DNA, 599 bp, Homo sapiens
aagggacattttggagcaaagttaggcctatagtgaaaatcagaaaatcccataataaaaattggaaagattttatctgtgaaattgctttttcattttgcattcagttcacagagctaaactatacttttgattcagccatttgggaamagtctttttccagaatctgtgaaagtatatttcagaccccactgatgcctacagtgaaaaacaaaatatcatgtgataaaaactatgcagagtctctctgtgaaactgctatgtgatgtttgcattcagttcaaagggttaaagcattcttttattttaacaagttggaaacactcttttcgtagaatctgagaagggacattttggagcccactggtacctataatgaaaaactgaatatcctgtgacaaaaactagaaagaatctatctgtgaaactgctttctgatttgtggattcagctcacagacttaaactttatttttgtttcagcaggttaaaaacactatttttgtagaatctgtgaagggatatttcacaggccacagaggcctttattgaaaatccaaatatcctgtgataaaaaactacaaaaaagctacctgtgaa

SEQ ID NO: 214463 - DNA, 602 bp, Homo sapiens
ctacagtgaaaaacctaatatcctgagataaaaactagaaagaagcttctgtgaaactgctttgtgatgtgtgcattcagctcacataaaatcagaaaatgttccaataaaaattagaaagaagcattctgtgaaactactttttgatgttcacattcagctcacaaaattaaaccttacttttgattgaacaggttggaaacaatctttttgtagaatctggaaagggacatttcaaactgctttgtggtgtgtggattcaggtcacatagttaaatmtttcttttgattcaacaggttggaaacactttttttgtagaataagcaaaggaacatttcagagaccatagaggcctatagtgaaaaactgaatatcctgtgataaaaactagaaagaagcaacctgtgaaactgctttgtaaagtgtgcattcagttcaaaaagttaaacctatcctttgattcagaagtttaaaagcatctttttgtagaatctgcagagatattttggagcccactgaggcctatagagaaaaactgaatatcttgtgataaaaactagaaactatgagcaaaactgctttgtgatgtgtagattcagct

SEQ ID NO: 214464 - DNA, 279 bp, Homo sapiens
ttcctcaatgaaaactggaaagaatctatctgtgaaactgctttgtgatgtgtggtttcagctcacagaattaaaactttttttttattattcagctagttgaagcaatcattttgtagatttatttcagagcccacttacacctatagtgaaaaactgaatatattggagaaaactaaarcaagctattgtgaaatttgtttgtgatgtgtggattcagttcactgtgttaaaactttcttttgactcaggatgttggcagcactctttttatataat

SEQ ID NO: 214465 - DNA, 558 bp, Homo sapiens
gtttccaaacagttgaattaaaagaaaggtttaactctgtgaggtgaatccacacattgcaaagcagttttatagatagcttctgtctagcttttgtcacaagataatcgatttctcactataggcatcaatgcactctgaactgtcccttcgcagatttmagaaaaagagtttttccaaagagctgaatcaaaagtaaggcttaacactgtgagttaaatgcacaattcactatgcagtttcaccactaattccttccagtttttatctcaagttattaggtttttaactgtaggcctcagtaagctccaaaatgtccatttgcagatctacaaaaatagtctttccaaactgttgaatcaaaagaaaggtataactctgtgagctgaatgcaaaaatcacaaaggagtttcacagatagcttctttctactttttttcgtgaaatattttgattttcactataggccttactgcaccttgaaatatcccttcacagattctacaaaaagagtgttatcaaactgctgaatcaaacaaaagtttaactctgtgaact

SEQ ID NO: 214466 - DNA, 484 bp, Homo sapiens
gggccgtaggtggcatgggcagggtgcagagactcagggggatgttgacacaggcagagaggagaagctgcagggaatgttgggagcctctgccatcacagaagcccccagggctgtttctgtcaagctgtaatwccccagtctatgtagcacggtttctatgtcttgtggaagacctccaaaagagacaacggggcaacatggtggcctgggcaagacacagggactcagaggggctttgaggcaggcagaatggagaagtggccagactgcagggaatggtacgagcctcccaaacaggccccttcaatcccagaagcatccaggcctgcccatgcgggttggaaagcaccaggctttggagcagggagcctgcatctctcgcagaaggcccccacatgcaaaaatggggccacagtgtggtgtgggaggttcgcagggactcaggtagacgttgaggcaggccaaaggaagaagccacaat

SEQ ID NO: 214467 - DNA, 484 bp, Homo sapiens
gggccgtaggtggcatgggcagggtgcagagactcagggggatgttgacacaggcagagaggagaagctgcagggaatgttgggagcctctgccatcacagaagcccccagggctgtttctgtcaagctgtaattccccagtctatgtagcacggtttctatgwcttgtggaagacctccaaaagagacaacggggcaacatggtggcctgggcaagacacagggactcagaggggctttgaggcaggcagaatggagaagtggccagactgcagggaatggtacgagcctcccaaacaggccccttcaatcccagaagcatccaggcctgcccatgcgggttggaaagcaccaggctttggagcagggagcctgcatctctcgcagaaggcccccacatgcaaaaatggggccacagtgtggtgtgggaggttcgcagggactcaggtagacgttgaggcaggccaaaggaagaagccacaat

SEQ ID NO: 214468 - DNA, 448 bp, Homo sapiens
gaggactatggtgaaaaattgaataacctcaggaaaaaaaaaacaagaaactatctgtgaaactgctttgtgatatgcggattcatctcacaaagttaaatctttgttataactctgcaagttataaacaytctttttgtagaacttgtgaaagtacatttggagcccttcaaggactgtggtgaaaaacagaatatccccagataaaacgaaaaagaaactatctgtgaaactattttgggatgagttaagtcatcttacaaagtgcaacctttcttttaattcagcaggtcgaagacagtctttttgtagaatctgtgaaggcatatttgaaagcccattgaggcctatggtgaaaaaccgaatatcctcagatacaaactagaaagaagctatctgtgaaacttctttgtgatatgtggattcatctcacagagttacaccattc

SEQ ID NO: 214469 - DNA, 448 bp, Homo sapiens
gaggactatggtgaaaaattgaataacctcaggaaaaaaaaaacaagaaactatctgtgaaactgctttgtgatatgcggattcatctcacaaagttaaatctttgttataactctgcaagttataaacattctttttgtagaacttgtgaaagtacatttggagcccttcaaggactrtggtgaaaaacagaatatccccagataaaacgaaaaagaaactatctgtgaaactattttgggatgagttaagtcatcttacaaagtgcaacctttcttttaattcagcaggtcgaagacagtctttttgtagaatctgtgaaggcatatttgaaagcccattgaggcctatggtgaaaaaccgaatatcctcagatacaaactagaaagaagctatctgtgaaacttctttgtgatatgtggattcatctcacagagttacaccattc

SEQ ID NO: 214470 - DNA, 569 bp, Homo sapiens
gcacagtgaatgcactatggcttccaaagtctttccactgtaacatatttagttaatgaacacaaactcttagagaaagaaagtgataggaaaataaggtgcatctaatatatgagtaaatggtcctctaggcatatcttgcatagaaatagtaaagttatgattaataggttatctaatgcattaacagaagcacaagccagcatagttcaatactatcagatttgcaaaatgcattgattttgaaagagttgctagggtctgtttagccttgaacaactctggttatgaagcttatggttgggtgaaaagtggacaacttctatgtgcttaaatattcttaaaaaatataattatgtatggtyatttctaaatatacagaaaatctgtatgtcctacacttttcaataacataacaattaaaacaggtactaatgatattcctgaaacacaatatgaacccaatctctatctcaccccacgttgagtctattgttctctaaatgcttctaaatctctatgagctattgcttcttagtattgcaatgaataaagagaaatagacaatt

SEQ ID NO: 214471 - DNA, 371 bp, Homo sapiens
aaagttctttcaacattgtctccaagttgtcagggtgtaagtgattctccttagaagaggaaaaacatgatacaagccaacacactactctgtattataattacctccaaatttcataatttctgttgtacatttaaacttttacaatcagataattgttttgccaaacaggcatacttaacttacctaatgcttagtttaacttttatgttagttaaaataattatacattatttattattagatacagtgtctaaaccctgtatagcacacaggtcttaatatgttgagggtcccttgaaaagaaataagttgatcatcagattatctctactkccatcatttcctactgtatacgtttgtcattaagc

SEQ ID NO: 214472 - DNA, 470 bp, Homo sapiens
ctctaaccttctagcccctttcaattcgaaactcatctgatctctatgcccctgctgcagcttttgccaactctactgtcagtgtctaacattggaactgagagattccttaaggtacataatataaaaaggcaaaaccaggcttgaggcaagatatggagctaatgcagtaataggaagggataaacamcaaattacttgatactgaatgcagaagcaatcgcagaatgagactaggccaaggctttgccatggaatgtttacaattttgcgttaaaagctaggccggagaaggacccaaatgataagcattttaaaaaatctttatttcatctgacttaagaatgttaatgtttgattgcctgataattttctcaccaaaaaggtaaaatagaattagctaccgttttaaaaaattttctgtgtgctgaaaattgtatacccattttatactgatttaatgttcaaaa

SEQ ID NO: 214473 - DNA, 589 bp, Homo sapiens
tggctgtaggtggatgtcattatttctgkgttctccatccttttccattgggctatgtgtctatttttgtacccatgccacatgccattttggaaactgtagccatttagtatattttgaagttgggtagtgtgattcctctgactttgttctttttgctttggattgtgttggctattcaggctcttttttgtttacatagggatttcagaatagattttttctaattctctgaagaatgtctttggtattgtgatagaaatagcattgaatctgcagattactttgagcagtatggccattgtaccaatattgttcttcttatccttgagcatggaatgtttttccatttgtctgtgtcatctctgatttctttcagcagtgttttgtaattgttgttgcagagatcttttaccttcttggcaagctgtatttctaggtatttcattctttttgtagctatcctaaatgatattgtatttttgttttggctttgagcttggtcattattgctgtatagaaatgctactaacgtttgcacattgattttatatcctgaaactttactgaagtcggttgtcacttccag

SEQ ID NO: 214474 - DNA, 593 bp, Homo sapiens
agtatgttgactccaataatacgaaaagaaactaaacattaaaattttgcattgatttattccaagtggaggtaatttgtactaggcactgaaagaagaaaacaatatagttgaactgtgtaatgttatcaaataagttttcattatttaatatgaaggaagccacagataggaaactcccaaaagtaagtcctaaaattctagmggttactcagaagtgctcattttataaagtatttattgtcagggaggttgaacaatccacagcatcacggttttccataatctgattttaaactttctaaaattccaagtgtcactctgtggctcaaagtcagtattttaatacacaaaggtaaagaaaatgaatacacgtacatggtaactataaaacagaatagagaactggccaaaaccaaatcaaagtacatgtatttttttctatcaattatcataaatagtacacaatttataccgaattatatggaaagtgacaacaattttaactcacattaatgataagtaaacatctgtggaatttaatttatctggtctactatttttttcttataattaaggtataatgtacatac

SEQ ID NO: 214475 - DNA, 561 bp, Homo sapiens
ttccaccttgagttaatttttgtatatgatgtacggaaggggtccagtttcaatcttctgcatatggctaaccagttatcccagcactatttattaaatagggagtgagtccttttcccattgctttatttttaagtcaactttgtcaaaaatcagataggtgcaggtatgtctgggctctccattgtgtttcattcgtctatgttcctgtttttgtaccaataccaagctgtttyggttactgtagccttgtcatatagtttgaagtttggtagcatgcttcctccagctttgttctttctgcttagaaatgccttggctatttgggttcctttttggttccatatgaattttaaaatactttttctaattataggaaaaatgtattgatagtttaataggaataaaattgaatctataaatttggagagtatacccatttttatgatattgagtcttactatctatgaacatggaatgttttttgcatcatctctgatttctttgagcagtgttttgtggttttccttgtacagatctttcaccttcctggtcagctgt

SEQ ID NO: 214476 - DNA, 484 bp, Homo sapiens
acaaaatcacacaaaccacaatcttgggccatagtgcaataaaaaattacatcaataccaagaagatctctcaaagcaactaaattacatggtaattaaacaacttgctcctgaatgacttttggctaaagaatgaaattaaggcagaaatcaagaaattatttgaaaataatgaaaacaaagatgaaacatactagaatctctgggatccagctaaagcagtattaagaggaaagtttatagtgcttaacacccacatcaaaaagttagaaaggtctcaaattaaagtcaccaaagtttcaggaytcaaagttaacatacaaaaatcagtagcatttctacacacaaatgatgttcaaactgagctaaatcaagaacacaatcccattcacaatagccacaaaaggaataaaattacatttcacctaaaggaactagaaagacaaaaacaaaccaaccccaaggctagcagaagaaaaaacta

SEQ ID NO: 214477 - DNA, 467 bp, Homo sapiens
gtggcagttattgttctttcatttccatatttagcactgtctttaggagattttgtaaggcaggtttagtggtaatgaattccttagcatttgcttgtctgaaaatgatttaawttttccttctcttatgagacttaggttggggggatataaaattatcggttggaatttcttttctatgaggatattaaaaataggccttaaatctcttctggcctgtaaggtttctgctgaaagttcggctgttcgcctgatgtggttccctttgtagatgacctgccccttctctcttgctgcctttaagatttttgtctttcatgttgaccttggaaaatctgaagactctatgtcttggggatggacatcttatttaatacatattatctcacatacatagttctctgagttttttgaatttgcatgttgacttctagaaattgggaaaaaatatgtggaatatatgtttt

SEQ ID NO: 214478 - DNA, 467 bp, Homo sapiens
gtggcagttattgttctttcatttccatatttagcactgtctttaggagattttgtaaggcaggtttagtggtaatgaattccttagcatttgcttgtctgaaaatgatttaatttttccttctcttatgagacttaggttggggggatataaaattatcggttggaatttcttttctatgaggatattaaaaataggccttaaatctcttctggcctgtaaggtttctgctgaaagttcggctgttcgcctgatgtggttccctttgtagatgacctgccccttctctcttgctgcctttaagatttttktctttcatgttgaccttggaaaatctgaagactctatgtcttggggatggacatcttatttaatacatattatctcacatacatagttctctgagttttttgaatttgcatgttgacttctagaaattgggaaaaaatatgtggaatatatgtttt

SEQ ID NO: 214479 - DNA, 467 bp, Homo sapiens
gtggcagttattgttctttcatttccatatttagcactgtctttaggagattttgtaaggcaggtttagtggtaatgaattccttagcatttgcttgtctgaaaatgatttaatttttccttctcttatgagacttaggttggggggatataaaattatcggttggaatttcttttctatgaggatattaaaaataggccttaaatctcttctggcctgtaaggtttctgctgaaagttcggctgttcgcctgatgtggttccctttgtagatgacctgccccttctctcttgctgcctttaagatttttgtctttcatgttgaccttggaaaatctgaagactctatgtcttggggatggacatcttatttaatacatattatctcacatacatagttctctgagttttttgaatttgcatgttgacttctagaaattgggaaaaawtatgtggaatatatgtttt

SEQ ID NO: 214480 - DNA, 584 bp, Homo sapiens
gtagttacttggcatgagtgatttttcattgttataatgtttattctgatactctacaattaatatgtgattatttaatgaatttttaaagttgaattctgaataatkcttattttttgcatgaaggtgtttgtattctaattttactatgtgtatcattccgttttcgtgctgctgtgaaaaaaacactggagactgggcaatttataaagacaaagaggtttaatggactgaaagttccacaaggctggtgagcctttcaatcatggtggaaagagcaggaggagcaaaggcatgtcttacatggcagcaggcaagagagcatgtgcagaggaactgcatcttataaaaccatcagatctcatgagacttattcactattatgagaacagcatgggaaaaatccaccccatgattcagttacctttcaccgggtccctcccatgacacatgcgtattatgggagctacaattcaagatgagatttgggtaggggcacagccaaaccatatcactatgggattgatttatagaaataggattactgtattaaaagcataaagttatccttaaatgataacctg

SEQ ID NO: 214481 - DNA, 589 bp, Homo sapiens
cacaatttgtctattcactcctctttacgtgtacatttggtttgcttttaggttttggctattataaagaaaaaagctatgactattcctgtaaaaatctttgggtagactttttaaaatttttttctttacatttacttttaaaataaatagccaactcaaaaatatttaaaggaaaataatgaaaagtctttctccagcttggcccaaataactacgtttagtgggttctttactcttccaatgattgccatgcacatagaagcccacagagcgctatgtacttttttctttcccttcctcatccccaaagaaccatcccatatgtacatttctataacttgcttctttatttttttaatttacttatctctaatcaacataaaaatttttttgatgtaaattatttgaatttaccacatgtatagatttgagtaaccattaccacatcaaagagatgaaatagttttctcacctcataaaatttcctgttgctatcacttcacaatcaaattccttcargcatctcacccctgacaataactaatacattcgccatcactgtagtctttttgagaacctaagtgga

SEQ ID NO: 214482 - DNA, 589 bp, Homo sapiens
cacaatttgtctattcactcctctttacgtgtacatttggtttgcttttaggttttggctattataaagaaaaaagctatgactattcctgtaaaaatctttgggtagactttttaaaatttttttctttacatttacttttaaaataaatagccaactcaaaaatatttaaaggaaaataatgaaaagtctttctccagcttggcccaaataactacgtttagtgggttctttactcttccaatgattgccatgcacatagaagcccacagagcgctatgtacttttttctttcccttcctcatccccaaagaaccatcccatatgtacatttctataacttgcttctttatttttttaatttacttatctctaatcaacataaaaatttttttgatgtaaattatttgaatttaccacatgtatagatttgagtaaccattaccacatcaaagagatgaaatagttttctcacctcataaaatttcctgttgctatcacttcacaatcaaattccttcaggcatctcacccctgacaataactaatacattckccatcactgtagtctttttgagaacctaagtgga

SEQ ID NO: 214483 - DNA, 640 bp, Homo sapiens
tggtcatccatatctcagttttctacatagattacaaaggcatacaacttagcttccaattacttttaacctttcctaccacttctttaatagaaaggagaacacagcatcctacatatcatagtacaaagtataactctaaagctattgctatgtgatatatygcactagaaaaaggaacaagtaatcgttaactgcatttatgtaacacagtactacaaaactgattaaactctaaccttacccaactcctctataactagtgccctcaaaaagctcattctttcacacattatgctttgctacttctccactctgtctgcaattttcattttatttctctgcctctagttccccattcttcatgaattcagtaattcatctctataaacacatattaaatttcagtgttagaaacgtagtcctcaagcatcagaaggagtgccaggatgaggacttctgaaaaatcctcttttccataaaagcaatgagaaaactggctaaaatcagcttttacagaactctggaaattaaccaaaggcttgcagcaatccagggtgcatcattcaagaaaaatggcagaatcacagtaagaacagtgagctttgccatttgactggcttatgcccattgctgcacc

SEQ ID NO: 214484 - DNA, 375 bp, Homo sapiens
ggcctattcccttaatatttcaggaacatgaatggttggactattctttttaaaggaatgaacaaagcctgaatatacagccagtggactataaatggattattgttttctttacattgtaagcaacagcagtaaacaaggatataaatgttaatgatatttctttaacaaaagctatccatcagcactgctgcactgtgagcagtacagtgattaaaccactgtaacatatgtatatgtgaatattyacaaacaatcaaggaaaaaaagcagtcagtgtaatactgtataactcgaaagaacatgattattattttttaaaagaaaacaagtttattgtcaaacatttttccaggacatttgctacaatgcctt

SEQ ID NO: 214485 - DNA, 470 bp, Homo sapiens
taaaatccaatctgagcaaattgaacactagcaattctcagactcttaaatgaaaacacacaattttagagtctgagtttaggaaatcagaataatccaccagagacacatttcttcaacagtttttttaaaaagagttctaaggaaaacctacttagcagttagatttaaattaacttgattaataggaaaaagctaatgggcaaatctgyagataactttgtcaaaaaacaaagcaaacagattttaagccacttctgagaagtttatctcaccaatagaatagtgatcaaagagaaatcatttgaaattgtgtttagtagaggcttagcaatatcagacctaaattaaatcaaatcgaggtgtttgaaaccattttaatatcaaagagaacctgatgacaacttttcttctcaataagaacacatggcaattaaagatactggcaggaagaaagtcagaaggcccag

SEQ ID NO: 214486 - DNA, 420 bp, Homo sapiens
atgcgcttcgtgaactaaaactatttaagaactcatatcttgcatattcaaggaaggattagattgaatcctaagaaattgtttttgtaggtcaaagatatccaaatatcagccatgtcatgtggtttaactaaatatttttaaaaggcaartctccgttatctcatgtgaccttttacagtgcttcaacagaattactgcaaaaattaaatgagatggcacatccaaaagtacttggtcaggtatgaatatctacaggctatacaacctgagcttgggaagaagaaaaacatgtggctgggcgtggggacaaagctgctgtgtagtattctaatggcagttgagtggggtctgaaaagcttaaggtcatttgtaaggccaaaatcagtccacaaaagaaaaggtaaaaattaaatggat

SEQ ID NO: 214487 - DNA, 593 bp, Homo sapiens
gcgatttaaatcattgccactagaatgtgaactctatacaagagcatagatttttttaaacctgtttcactatggctctctctagtagcaaagtggcatagtaggaatttaaaatatatttgctgggtaagtgaacaccttttcatacaggcattgtgggtgatctttatttttttcctttgtacatgcctgtatattttattagaaaggaaaaaaagctagtgcagactttaaatcaagatacacaaatgttgagttctagcccttgatatgttactttatatgtgtgccttcttgggtcagttcaaaagtctatgacttgaaattttatctttatgaataaaatatctatgtattatatatgatatatatgcataaatgtacacatacatgcacatactacacacacatacaggcgtgcgcagcactggcacacacacacacacacacactcatacacacaaagaacaaagatatctgtgactgcctaacttaactattaytggaaggataaaatcttataaacgtgttaaggatatttggtaaactattagttgttcaatattagatcattaccaagggaggatactatg

SEQ ID NO: 214488 - DNA, 577 bp, Homo sapiens
taatctgtaccgtagaccaaatagacctaatagatatttacagaacmgttcatctaacagctgcggaatacacattcttttccccagcacacggatcattctcaaggatagaccatatgttaagtcacaaaacaagtcttaaaacattcaaaaaaattaaaatgatatcaagcatcttctctgaccacgatagaataaaagtagaaattaataagaggaattgtggaaagtatacaaatatatgaaaattaaatatatgctcttgaatgaccagtggatcaacgaagtaattaagaaggaaattgagaatttttttgaaacaaatgacatgacaatggaaatacaacatgtcaaaacctgttgggatacagcaaaggcagtactaagagggatgtttacaattcaaagttcctatgtcaaaaaagaagaaaaactgcaaataaacaacctaacaatgcattttaaagaactagaaaagcaagagcaaactaaacccaaattagtagaagaaaagaaataataaagatcagagcagaaataaatgaaattgaaatgaagaaaacaacacaagagatca

SEQ ID NO: 214489 - DNA, 577 bp, Homo sapiens
taatctgtaccgtagaccaaatagacctaatagatatttacagaacagttcatctaacagctgcggaatacacattcttttccccagcacacggatcattctcaaggatagaccatatgttaagtcacaaaacaagtcttaaaacattcaaaaaaattaaaatgatatcaagcatcttctctgaccacgatagaataaaagtagaaattaataagaggaattgtggaaagtatacaaatatatgaaaattaaatatatgctcttgaatgaccagtggatcaacraagtaattaagaaggaaattgagaatttttttgaaacaaatgacatgacaatggaaatacaacatgtcaaaacctgttgggatacagcaaaggcagtactaagagggatgtttacaattcaaagttcctatgtcaaaaaagaagaaaaactgcaaataaacaacctaacaatgcattttaaagaactagaaaagcaagagcaaactaaacccaaattagtagaagaaaagaaataataaagatcagagcagaaataaatgaaattgaaatgaagaaaacaacacaagagatca

SEQ ID NO: 214490 - DNA, 328 bp, Homo sapiens
gacccttcagatattagagaggagttttttttctcaccwgcaaagtacttctcccattttcagctactattatccaattggcctgaaacaatttctcatgagtatctattagaaaattgggtgttatcctgacctcatttccatcaaatacctcattgctttcctctgttgtctcctacaaaaattgtagtatcatctgggtcatgacaatgtcagctcatatttgagaatctgtgagaacactttgccacctaaatttgttgtcaaaattgtttatcattcttttaagttttgctgttctagtcgttttctgttttaatgggaaaat

SEQ ID NO: 214491 - DNA, 432 bp, Homo sapiens
tttttcaagctggctactggttgaatttctggcataataagcataaatcagccatcttcttgcctatctttggccatttattcctttctttgttttttagtgtaaatagcttgattccatgttttgaaagagcaacaacaaaggtctcaatcttgaaatctcctttgtatctaattgccttgctcttttaatttcctgcttgctgcctcttaggcctcttccgccacaaacctattctccattccatcatttcttacaacagtgcagtccacgatgttttcagtcctaatctaagcaaactacaatcgtctggctgctgttcctctacsatttttatggcccaccccttacatttactttcatcccattttcaatgtagtatcatgagccaaaaaaaaaaaaaaaaaaaaaaatttctttgcctttaatttt

SEQ ID NO: 214492 - DNA, 582 bp, Homo sapiens
aacatgtttgatttctgtgtctacaacagggccacatattaaattacttctgaatggtgaattcatcttacaaaatgttccaagttttggacaaggaaaaacattacattggatattgaattcatrgagcctttacagaagcatcacatttaaaccaatgtgaattcaaaaaagagaaggaaactttttaaattcaatttagagtacataaaaagatatccgcgcagttgaggggaacaagatgagtctaatccgcagcacttcgatcactgtgagagaactcaaagtgggttgcaatcattcctaacacaggctgaaactaaacaatcttgctcccagagtttatgttggaaactcaattcttaaccaaaatcttggtctccacaaactctaccatcccttttctcttcactctatagacagtggcatgccattgatgctgtacagaattgcaggtgaaagggagaattttagacttaatttttaactctattgcacttaaagattttagttaggttaccactgtcattttcattttctatgttaaagaatacctttcagtgctatgctccagtatctaaa

SEQ ID NO: 214493 - DNA, 582 bp, Homo sapiens
aacatgtttgatttctgtgtctacaacagggccacatattaaattacttctgaatggtgaattcatcttacaaaatgttccaagttttggacaaggaaaaacattacattggatattgaattcatagagcctttacagaagcatcacatttaaaccaatgtgaattcaaaaaagagaaggaaactttttaaattcaatttagagtacataaaaagatatccgcgcagttgaggggaacaagatgagtctaatccgcagcacttcgatcactgtgagagaactcaaagtgggttgcaatcattcctaacacaggctgaaactaaacaatcttgctcccagagtttatgttggawactcaattcttaaccaaaatcttggtctccacaaactctaccatcccttttctcttcactctatagacagtggcatgccattgatgctgtacagaattgcaggtgaaagggagaattttagacttaatttttaactctattgcacttaaagattttagttaggttaccactgtcattttcattttctatgttaaagaatacctttcagtgctatgctccagtatctaaa

SEQ ID NO: 214494 - DNA, 509 bp, Homo sapiens
gaccctttataagttgctttactcctgggtaaaacatataatttttaatacttcatgggattatcatgaggaaataaatagaatgatatatacaaagtatttggcacagtgagagttaaagaatgttaactcgtgtcaaaaaactgataaataccttttgttcagttataaaaactttaaagtatttcataatctaataacaggttactgtcttatttattccactttttgaatttttagacataaatagaaatatttaagtttaattttatttcttctgctagataaaaaaatttgaaarcaattttcagtgattttagtcatagattaagatatttgctacttcacttaacagtcattaagataagtgttttattaatattttcatggggttcagtaatcttaattcctttaatctttttaaatgcatacttaactttgcaattgttttcctgcccaggattcagtatttactgagttaagagttactcagcaaggcagtgttgcag

SEQ ID NO: 214495 - DNA, 611 bp, Homo sapiens
agatctagataaaatatttgaatgatgcttaccgaatattagaaattcaccctgtatctcaatgsctttcagcaatatagataattaaatcatattaccaatttgcaaaatggaggtttcagtctcccaagtcacaacatcaattctatactgcacaagagtgaagaaggaagaaagccgggaaaggaagaaggctgggagtaaagacagtacttcatgttataattggtgaactgtctcagttgacaagtctgaaggaggcactcacaaaaggctttgaggagttgtagcaaattttgaacacaactttagcctcacttcttgagaccaaaaaatggcactcagaagtatgaaatcttaaataaaataaagcaaaacataaacaaaacccacagagctctgagtatctttgttattgttcacactctgtaagaatctttagtccttaaaacagtactcctgccacacctgttaagtggctattacaaggccaagggaagacttgtgcccaatatgggaaaacgtttgttgttactattctgcaatcaaaacctgttttatgtcttttgacttaatgatgatgtaagtaaagacaatataaaaagcagtgg

SEQ ID NO: 214496 - DNA, 479 bp, Homo sapiens
tttgggtaggactttgatccttgctaaggcaaagctatcttaaagctaccagactagccaaagtaaaattaaatagataattcactaaataaaatgggttaattttagcttcattattaagaacattagacacggcagagaatgcaaattaacattctgaataaagaccttaaatcaggttattaattgctgctaaccacatgaaattagacatcaattaaacgcagtaatatttgtatcttccctctaatccttaataaagttctgttcttatgcagaactctcaaaaacaaaacccctcaaatgacaattacaagagttgtgtaaaacatacatacatatrtaaacctacagtgaacctgaccaaggcacaagttcaagtgacttatcagaggtcacatggttcatttaaacttagcttttttcttgaagtatctagcgcattccttttattatgagccactctggcttttcaaggc

SEQ ID NO: 214497 - DNA, 478 bp, Homo sapiens
agcttagcagggcagctctgctccctggagacattcagggtctgtcctagccattgttccaccacccccagggcatcatcattgtctctgtggcccaagctcagctgccaccctatcttggcctcacccactgagaaggctagtagtggcagtggacaagacccacctgatatcataagccccagacatgggtccgacacacaccagctacagtcacatttcatckgcaggcactcagtctcggtcacactacctgcaagggaggctggaaatgttcttcagtgggacacataagaccagccacatgaaatagagtagtcataaaataacagaatagttttattctattactataaaaaacagggagaatggattttggtggatagccacagtctctgagacaagtagatgctgttaatatcctcattttataacataagaaactgacgcacagaaaggctaatttgccaagatcaca

SEQ ID NO: 214498 - DNA, 621 bp, Homo sapiens
  misc_feature (1)...(621): n = A,T,C or G
nnnnnnnnnnnnnnnnnnnaaaaaaaaaaaaagaagttgcctggccttcctaaaatacatcatacagttttacaacttcctgccttttctgggctgttcctcctgtctctttccaccctgactctttccaagcatcatccacttgggttccttggattattcctttcttcccctgagctcccagggcattttgctcatgtggctggcttggcccttggcttaragcgactggttggcttttttccctagtttataagcccctcaaaactgaagccttctctttccctcctgtaggctcagtgcctcacctgacgccgtgagggctctgcatagatgtgtttggaatgaatgtgagcaggatggcaggtacataccagtggtatcacaggattggccttcctgtgttgctctctaactcccaacaacctttaggaacccaaaccacctagaaaaaactgaaaaccaccaggatggccctccaggtgcgagctctcagcctctaaagcaaggagctgccgtaacctgggcagctgcttcagcccattcctcaggcacctgagaagcatgggagggaggcttgggatgccagcttggcaagctcagctggcttggttcagcagt

SEQ ID NO: 214499 - DNA, 621 bp, Homo sapiens
  misc_feature (1)...(621): n = A,T,C or G
nnnnnnnnnnnnnnnnnnnaaaaaaaaaaaaagaagttgcctggccttcctaaaatacatcatacagttttacaacttcctgccttttctgggctgttcctcctgtctctttccaccctgactctttccaagcatcatccacttgggttccttggattattcctttcttcccctgagctcccagggcattttgctcatgtggctggcttggcccttggcttagagcgactggttggcttttttccctagtttataagcccctcaaaactgaagccttctctttccctcctgtaggctcagtgcctcacctgacgcygtgagggctctgcatagatgtgtttggaatgaatgtgagcaggatggcaggtacataccagtggtatcacaggattggccttcctgtgttgctctctaactcccaacaacctttaggaacccaaaccacctagaaaaaactgaaaaccaccaggatggccctccaggtgcgagctctcagcctctaaagcaaggagctgccgtaacctgggcagctgcttcagcccattcctcaggcacctgagaagcatgggagggaggcttgggatgccagcttggcaagctcagctggcttggttcagcagt

SEQ ID NO: 214500 - DNA, 621 bp, Homo sapiens
  misc_feature (1)...(621): n = A,T,C or G
nnnnnnnnnnnnnnnnnnnaaaaaaaaaaaaagaagttgcctggccttcctaaaatacatcatacagttttacaacttcctgccttttctgggctgttcctcctgtctctttccaccctgactctttccaagcatcatccacttgggttccttggattattcctttcttcccctgagctcccagggcattttgctcatgtggctggcttggcccttggcttagagcgactggttggcttttttccctagtttataagcccctcaaaactgaagccttctctttccctcctgtaggctcagtgcctcacctgacgccgtgagggctctgcatagatgtgtttggaatgaatgtgagcaggatggcaggtacataccagtggtatcacaggattggccttcctgtgttgctctctaactcccaacaacctttaggaacccaaaccacctagaaaaaactgaaamccaccaggatggccctccaggtgcgagctctcagcctctaaagcaaggagctgccgtaacctgggcagctgcttcagcccattcctcaggcacctgagaagcatgggagggaggcttgggatgccagcttggcaagctcagctggcttggttcagcagt

SEQ ID NO: 214501 - DNA, 513 bp, Homo sapiens
ggtcaatggtgtgctttccccatccagcctcacttccttcctgggtgaaatgaggaaggaggatacgttakcttgcttgggctgctgtggataaaaaaagtcaaactctgtaaaatatttaaagacgtttattctgaagcaaatatgagtgaccaagcctaaggcacagttccaagaggtcctgagaacatgtgcctaaggtggttgggctgcagccaggttttatgattggttcaggttcgaaaggtggcataactcaaagagggagtcggggtgggggttacaggtcatagggggactccaagactttctgattggctattggttgaaagagttaagttattatctaaaggcctggaatcaatagaagggagtgtccgggtcaagataagaggttgtggagaccagggttctcattatgtagatgaagcctcaagggtggccaccttagagacaatagatggcaaatgttttctattcagaccccaaaaaggtgctagactcaattaattt

SEQ ID NO: 214502 - DNA, 592 bp, Homo sapiens
ggccttattctttctacttctgttaaaggtaattacacggaaagagaaagacgaatgtggaaagtggggggcctgcgacatggacagtttttatttaacacacacacaccacagtctaagcactctacacatgttaaatcacttaaacgttataataactctagcagtaaagcactaattatcatctgagttttatgtgtgacaaaagtaggtcacagaaaggctaagtgagttgcccaaggttcatatggctaaataggaggcagatctggggttggaaccccagcaatctgattcacactagagtctgagatgcctctccactgttaaataggattaggaccaaataacatcagacaacagtaaactccattctttaccatgacttatgataytatgttaagggtttccatgtactttacagaaaagactaggaagaataactttgtgtgagtcttttaatcaagacaaattttttaaagcaaggattgtgcgaggctgttttattcaatatggtagtcatatgtggctattttaattgaataaaacaaaaaattcagtcccttagctgtgctagccacatttcatgtgc

SEQ ID NO: 214503 - DNA, 539 bp, Homo sapiens
aagccacatgtccctgcagggatgtcatttcatcccttttgctcttgttaactttatctttaagtttttgttgtagttctttcatttattttgttcctggtcttgcacatgtttggtgactataacaggttgaggggaaatatgatgctaagtgagatgtgaggcaagtgaaagccttcatgcacttaatgtaaaaatgaaatgacaccctaaatataaagtgtgaattgcttgtagatgcgctggcaccctgaggtgtgggaggagaaggaggcagtagccacagtactcacctgagcaggctggctcagctccctgttggaacaatgggattccctaatggcaaaatcacacctgagcctcctttaacactccaaaagcagcaacctccttatgagcagggggagttgtttttcaagcaacatagagtcctgataaataacgttttcacttargtagagtcagtcacttagcattgaaacagctttctagatatgataggtatttttagaatttgcattaattctatcagcattatg

SEQ ID NO: 214504 - DNA, 467 bp, Homo sapiens
ctggaatgagtggcataagactgagacacaagtggaccacactccccacagcttcttgcccatgctacctgcttgggaggggcctcactgccctcactggttgcaagacgaaggtrccattttgagagtttaatgctaggcttccccctgcccttgggcaaagttcgagttgacgtggctgcacctgccacccatctaggggaagaacatgggagagcaatctctcctgagcacacttaggacaatacccactgccctgctatgggtggctgtgggattacggactaggcttctcagcctgttgcagcttccagcaataccaacacagactgcttgggtcccggtggttgcttttctactgctactttcatcacccacaccacaccaactgcccagaggtctgagaacacacccacataactggcccactgctcccactattagcttccaagcaagccacctggagg

SEQ ID NO: 214505 - DNA, 385 bp, Homo sapiens
acagggctgagggagacatccaggaagaatgcaatgtgcccactgtaatacttgcctacctacctcctctgttgttgaggctagaactgagcatcactagccagagcactcacctgtcaggatgtcattaccgttgctttaaatcatgttttacattcaacgttgaaaaccaaggtgacatggcatggtgaattccagagcaaacagacccagttgaaattctgcctytgcccatcaccgtgggcaccttactcacactcactgagttgtagattcctcatctgtttgagaggagtcatcatagatgaggattaaatgggataataaatgccaaatgcttggcatatagtagatgcttgatattttcttttctttccaccaaacc

SEQ ID NO: 214506 - DNA, 607 bp, Homo sapiens
tgttaggtatccttgggaatgaggcaagtagccgataagcagatggacacagaggagtgttggagtgaccccagacatttaggtaaatatgttggcagggaactatttattattactctgggttttgttttgctgtttgttgttttggtttggtttttactagtcctctgtcccttcagtttctgcaagaaaaggctttcagtcaccaatacctttgtagaaagaaagagagagagagagagagaaaggcaaaaaatacttgttcattagctttttccttcaggcaaaaccaaggtgctatgctttagcacctccacacctgataaagccctaaaccttccattgtgacaggccgcaaagagaaaggcaagcratctctgctctaagagagcctcttcctttcctttttccttcccttccttcttccttccttcctccctccctctgcccctctagttttctcatttcttttctgtttttccccctttctgttggcacagcttccctcttggttgtatctctctttgcttgaacttttctaatactttatgtttatccacaaacctcgtgcaattttctcaacaagagagattatggaggtactgca

SEQ ID NO: 214507 - DNA, 588 bp, Homo sapiens
aggcctggtgggaggtgattgacttatgggggcagtttcccttatgctgttctcatgatagtgagtgaattctcatgagatctgatggttttataagtggtaatttttcctgtgctgacacacacttactctcacctgctgccatgtaagactgtgcctttgcttcttctttgccttctgccatgagtgtaagtttcctgaggcctcccagccatgtggaactgtgagtcaattaaatctctttcctttataaattacccagtcccaggtatttatttatagcagtgtgagaacagattaatacagggggtaatgctggcgtctagtgggtggaggccagggatgctgctaaamctccctcaatgcacaggacagaccccacaataaggaatcatctggctcgtgccaaggctagtgccaaggctgagaaatcttgccctaggtatatactgctccaattgatactctcccacccttaccccctcaaagtcccaagacagggattgtgtatttcaattttggatttccagtacctacagtcaatacacatttattgaaagattgaatgaatgaatgaatgaatgaatg

SEQ ID NO: 214508 - DNA, 608 bp, Homo sapiens
gcatgacacttttgggtccttggatctaggcagctcttctgtcttgatttacttctaattctccccctttcaaccccaatgcccactccaccaacagacagccactctaatagtcactcttaatttgtgtaattatatcctttgatatgcatatatctttgaaaactgtattaatatgtccactgctttggtaacctaacacaatttttaaaaatctatccagttgctgtatgtacatctagtgtattgcttctaactaccgtatggaattccaaataatatgcatctgctacgttttatttatacatttcctattgattggatctaggttgcctctaagtcacttttacacataccacctcacatgaatatcctcatatgtgactatttatgggtctgtgaaaatattttctagggtataagctcaggggtgtgactgataggtcaccaaatagagaaaatatatgcatataatytatatgtttatatacatatgcatgtagatgtgtacaaatacatagttttctctaacataagtaatgacagattactctcccaaatggctattcctgtttccatccctaccagcagcactaggattcctgttt

SEQ ID NO: 214509 - DNA, 372 bp, Homo sapiens
gtgagcaacacataagagcctgaaatctaatacgttcctctatgaagattctcttcaggcagtttaccagttctattayaacaatgtgtagctgaggtggtgggtcaataggagactcgtctgcaagccagcatcacctgttatgatgggacatggctaggaaatgatacttcatgacctgtccccatctggtgatctactctttggaaatcctcaggcagagactacatctctgaatgttcaggaacttgggacttggctccaagtctttgctattgtgagtagtgctgcaataaacatacgtgtgcatgtgtctttatagtagaatgatttataatcctttgggtatatacccagtaatgcgattgctgg

SEQ ID NO: 214510 - DNA, 515 bp, Homo sapiens
tggagctggaggccattatccttagcaaactaacacaggaacagaaaaccagatagatactgcatgttctcacttttgtaagtgggagctaaatgatgagaacacacggacatatagaggcgaacaacatacactggggcctttcagagaatggaggttgggaggaaggagaggatcaggaaaaataactaatgggtactaggcttaattcgtgcgtgatgaaataatctgtacaacaaaactccatgacacaagtgtacctatgtaataaacctgcacttgtactcctgaatttaaaagttaaaaaaaaaaaaatccatacaccatacttgtgtgggtctatttctgggttatctattctattcccattgatctatgtgtctacccctctccttataatatactctcttgattaccayagctataaaataaatcttgaaattggatagactggctcttcctactttattcttttttttttctgacacagcgtctcactctgtcgcccaggctgg

SEQ ID NO: 214511 - DNA, 547 bp, Homo sapiens
atggtcaaggcaagtactgtttggtgggtcatatgtgtgtactgagtcatgaggtaaaaggaatttactgtggttccaaagagcttaaaagccactgactcagaaggagagctgtgtagtcagtcatgcacaaatattacagacgccgacacccaatgcttagagctccatcatttaccccatccttgccatttgactttaatcagctttcttaaaccactaagcctccgtttcttcaaacagaaaataagttactcaataatgaagcccaggactgtccggagggcaaaataaaccaaatatatatgaaagcaattttcacaatagaaagaactttgccaatgttaatagctgtcaccttaaatccatgcctttgcacaatctgaacattggttctagaattaaaagcttcattctctgtggaaggaatttcaagcactgttagaaggagaaacctgagccactgaaaagctctggmttcatccatggggatacaagggtttctggtaagtttacaaagaaagagtttaggagatgtctttgtagt

SEQ ID NO: 214512 - DNA, 621 bp, Homo sapiens
tggccacgagtgtcaaagggggtattgagagacctaagactctgacgcttggaaaacccccctccaacatttgggtttcttgcagaatctgcttccagcttcactcacattcacttcactccaaatctagctgccaatacatcgcgtttactaaagataactttggcaggaaaaccacagattttaacgtgaagtgattcacagctaaaatatgacacttttttaaagctcattaagatwgttaaacattgatgggtttgttggagaggtctcctgttccatttaaaacatgtcagttttttcacaggtatctggctttgagtgttggttgttagagaatacgctaggaccgttttcccacaaaaaccaaaactagtcatttactctaaaaattttattgagaatatatattctatttaaattttcaaaatcagttggaaaaaattcaaacttatgctaaaataagtgacttataagcaccacttttaaatactaaacattttcattttaaaccagcattactggtattataactatatgtgcttctgcacatcagtgtaactgtacacagatttaagagaaaaatgatagcctacttatactagtcacgaaacaataaaa

SEQ ID NO: 214513 - DNA, 525 bp, Homo sapiens
ctgcattcgcataaattttattgcagtatattgttataattgctttatttttttatgagtaattgttgttaatctcttgtgcctaacttataaattaaactttatcacaggtatgtatagataggagaaaacagaatatacagggttcagtactatccaaggtttcaagtatccactgggtgttttggaacatatcccctttggataagggggatcaccgtatgacaaaagccattgttttttgttttgattctgatctttctgattcctacatatactttaagcacaaacaatttggttaaagtctatttccaagtttctgtggtgtagaggaggaaaattttagtttccctctgctcttcacagttattatttgggatggactcctgtaacaaaagacagattaacaagagaaagacaaayggaagtttattaacatgcatgcctcctgtgtatgtgatagatacccagagagatgagtcagtctcaaagaggagactttgaattcaggcttaaatatttaat

SEQ ID NO: 214514 - DNA, 626 bp, Homo sapiens
ctccagaagctgctgattaccagtttcaggttttttctttctactgggagactgcctttccctggcgctagctattrttttagtgcttaacaaccgcctggccatcaacttatggttgcctgacattcctggtgtgatggggccctcttctgccctgctcatgtctgcccgactacctactgcaataagatcacggaggggatgggtgcaaagaccttgccccaagtgctccctgcatgctggctgtgttacacatttcaggggaatttttatagattcattcaatgctgagtgttactttcttcagatattggaagctgtaactgttaattccaaaagagctgcttcttttgctttaaagtgacttcattttgcatgagttgatttcagctccatgcctgtcttctttttttgaatggagaacttctttcccaaagaagcagttgattttaaataacagaaaaaacaacttgtaaaggtgaagaaacaaacttaaggcttgagttttgaacttagggtttcaacttcctttgcctataagtaggaaggatggagatggccactatgtaccttgcatataaaatcagttgaacagaaaaaagtgcagcttttctgggcagaagaaa

SEQ ID NO: 214515 - DNA, 626 bp, Homo sapiens
ctccagaagctgctgattaccagtttcaggttttttctttctactgggagactgcctttccctggcgctagctattgttttagtgcttaacaaccgcctggccatcaactyatggttgcctgacattcctggtgtgatggggccctcttctgccctgctcatgtctgcccgactacctactgcaataagatcacggaggggatgggtgcaaagaccttgccccaagtgctccctgcatgctggctgtgttacacatttcaggggaatttttatagattcattcaatgctgagtgttactttcttcagatattggaagctgtaactgttaattccaaaagagctgcttcttttgctttaaagtgacttcattttgcatgagttgatttcagctccatgcctgtcttctttttttgaatggagaacttctttcccaaagaagcagttgattttaaataacagaaaaaacaacttgtaaaggtgaagaaacaaacttaaggcttgagttttgaacttagggtttcaacttcctttgcctataagtaggaaggatggagatggccactatgtaccttgcatataaaatcagttgaacagaaaaaagtgcagcttttctgggcagaagaaa

SEQ ID NO: 214516 - DNA, 619 bp, Homo sapiens
gattaccagtttcaggttttttctttctactgggagactgcctttccctggcgctagctattgttttagtgcttaacaaccgcctggccatcaacttatggttgcctgacattcctggtgtgatggggccctcttctgccctgctcatgtctgcccgactacctactgcaataagatcacggaggggatgggtgcaaagaccttgccccaagtgctccctgcatgctggctgtgttacacatttcaggggaatttttatagattcattcaatgctgagtgttactttcttcagatattggaagctgtaactgttaattccaaaagagctgcttcttttgctttaaagtgacttcattttgcatgagttgatttcagctccatgcctgtcttctttttttgaatggagaacttctttcccaaagragcagttgattttaaataacagaaaaaacaacttgtaaaggtgaagaaacaaacttaaggcttgagttttgaacttagggtttcaacttcctttgcctataagtaggaaggatggagatggccactatgtaccttgcatataaaatcagttgaacagaaaaaagtgcagcttttctgggcagaagaaacagcgat

SEQ ID NO: 214517 - DNA, 536 bp, Homo sapiens
ggtagttctgggaccatttgcaagacagcgcattgattggaagcctgtacattctggagtgttggcttaatatgttgatcatcctttgaggtggggcacaaggaaaaataaactatttctccttcaggaacatacagtggcataagagagaccaacttggtgataactgatcataggattagaccaaggtgcagaagcaaacagaacctccataaaatgtaatgatgtctygtgcctgcaatcctagtgctttcagaggccaaggtgggaagattccttgagctcaggagttcgagaccagcctgaacaacacaacaagacctcgtatctatgaaaaaataaaaataataaaattagctgcacacctatttggtggcacacacctgtggtcccaggtactcgggaggctgagatgagatcatttgagcccaggagatcaaggctgcaatcagctgtgatcatgccactgccctccagcctggacaactgagcgagaccctgtctccaaaaaaagtaaaattaaaaaaaaaattaaa

SEQ ID NO: 214518 - DNA, 570 bp, Homo sapiens
cagtgacactctggtctcagacttccagcctccagagccctgagasagcaaatgtctgtgttttaagccacccagtttgaggcgctttgttaccacagccgcagggaactaagacagtgcctatattcataaagaaaggaagggctcaatttcagttagaggttcctgaaaataaggatgtcatgttttggggtgctcagggtcttcttccaccaagggtgaatagtggtggacaggctcacatagcgaggactcctgagctgagtgaccgtcacacttcaaaaccacgatggcaccgattcaggggaagacatcacggtgacctcattcccagccactctagaagaaggttttttttttctttatggttgttttatctgaccttgtcttctggctggaccacggctgagtgagggtgttggcgctggggtggaagaagtgggacatggtgagctgctcatttttacctttttttttttgtaaaatacattttttaatcttattttaaaaatggtgatagtagctgacaattttttaatttttttctactaagcaaaacaaactgtcaag

SEQ ID NO: 214519 - DNA, 355 bp, Homo sapiens
caggcacggtggcttgcatctttaatcccagctactcaagaggctgaggcaggaggatcttggaatgtctaagcattgaggagttggatctgaaaagcagtgaatacagcaagaaaggacaagccaatctgtaagaaccttgggtccatgaagatatggaatagatacttaaagatactaatgtgacttgtgcctatggtgaaagtagtgtcacaaggaattaaatgttatttaagacatactgtaaaatgatcaaactacactacaggtgcyttgccaacacccagatgttattactccagaactttggatctctactatatgccaattttggtgaacacccagatgttattac

SEQ ID NO: 214520 - DNA, 475 bp, Homo sapiens
tggtgaaggaggtacccacatgtctgtgcaacagcaaacaatgatttgggcgttttctcctgacaccagtcagccattgtgcctgggcttattaagttaacragtaagttttaacaaggagcttcaagaagacaaagaaggaagacaaagaaaacagctgctgcggcaatgaggaaacggaggcggaacagcagcaggaaaactgtgctgaccccagactggagaattcaggcttctgtgcaaacagcccggaaatgagttgagcaacagccaaggatgtgggtgctggaggaccctgggtttagttgggaaaaggtagacataagtctgagagctgaggtgaggagctggaacctggccacctgcgtgtctggcctctgtccctgggtccctctcaggtggagacgacagccatgcatcctccgggcagcagatgaaagcttgagagcagaagagagacaccagaaggttggca

SEQ ID NO: 214521 - DNA, 475 bp, Homo sapiens
tggtgaaggaggtacccacatgtctgtgcaacagcaaacaatgatttgggcgttttctcctgacaccagtcagccattgtgcctgggcttattaagttaacaagtaagttttaacaaggagcttcaagaagacaaagaaggaagacaaagaaaacagctgctgcrgcaatgaggaaacggaggcggaacagcagcaggaaaactgtgctgaccccagactggagaattcaggcttctgtgcaaacagcccggaaatgagttgagcaacagccaaggatgtgggtgctggaggaccctgggtttagttgggaaaaggtagacataagtctgagagctgaggtgaggagctggaacctggccacctgcgtgtctggcctctgtccctgggtccctctcaggtggagacgacagccatgcatcctccgggcagcagatgaaagcttgagagcagaagagagacaccagaaggttggca

SEQ ID NO: 214522 - DNA, 287 bp, Homo sapiens
catggtacatgacttcacttaccaacatagttctatgaagcttttttgtttacatacagatattaatatattttagcagcatgttggtacctttttcatgattagtagattatgggatatctaacactgagaatttcctattggtttccactgagcagaatactatatttacatgaagaaaccatcckttccttacaaagtcactttaaagcctttaaataaacatattattacatatacattttttcaaaataatgtaattctaaaaattgtgatgcactagatac

SEQ ID NO: 214523 - DNA, 699 bp, Homo sapiens
acaaaactacatttccaaaagcgaaaagaccactgaatgctttttttccttatctaataaaggttttcactgaaaattcatctcagttcattgtgtgagtgaaagcagtcaaataaaatgtagtatagacactgaatgtattgaatgaaaacaaagtgggtgctttgtaggatttttctaaaaaccaaactgaggagtcttggaaacacagacatcacattttatcttaagcattatatctctttatccttatcactaatattttaaagcyaaattatatttttgcacagtttttcttcatttgctttttcttattttaattttacagtgtaatgtattgactgtttacactttctttttcgaaacattgaatgaaatccaataagccaggacaccacatatgtacatgcccagcagggcccctcagctgcagcagcatcacttcctggaacagactacaagtggcaaatgagtggtaattaaacacagctgctgcccaagaggtaaggtagaaggatagatcattagaacctaaagggactggagaagccattttgtctaacccttcactttgcatatgaggaatcagacacaatgaatagtcaggagacttgctttgggccaagggtgaccctggagaagcatgagtgatgtccgatagttaatgtaacactcttcttaccacttcacaaggcaagt

SEQ ID NO: 214524 - DNA, 436 bp, Homo sapiens
tctgctttaaatgatttaaagtaaatcacttgaggataaaagcagtgaggcaccctggaaagagaacagtccctacagttaggaagaaacaccagaccccacaatttactgtacaagggactctggacacattatttaaccaaacctaacctgataggcagtttcttcatttcaaaaatacataattagaagatttgagatagcttgctgcgtatattagacactcaataaattgaaatatataaaataattacttactatgtatatcctgggggaagagctaatgtcagaggcacagtgaagtaatggtgacctagggctcgatttttctctcttcatattttctatctagcagctggttagcagttattaccagaattaacaacttcaacaaaytctacttcttcaacaaactcttcttctgactctaactaca

SEQ ID NO: 214525 - DNA, 580 bp, Homo sapiens
tctgcctcagcctcctaagtagctggaatttcaggcatgctccactacacccagctaatttttgtatttttagtagagatggggtttcaccatgttggccagggtggtcttgaactcctgacctcaggtgatccscccaccttggcttcccaaagtgctgggattacaggcaagagccactgtacccgtccaatctattttttatatagcagatttcaatcctttaaaaatgtaaatttagttttttaatctccttgtcaatgttttccaaagacttttcatcacattcagggtaaaagccaaataattttcaattagctacaagaccctacatggacaaaccttttcctaatgtcctactatttaccctgacccagttggcttcagctcacaatgcatttcttgccgccttaagcaggtcaagatttgcctgcatctgaatctgtacactacttttcccactgcctaagcactctttaccaaagcctcttcgcatctatctcattcacatcattcagattacttctcaaatagacaaataaagaccttattgagaggtgttttatttacagctttttgt

SEQ ID NO: 214526 - DNA, 580 bp, Homo sapiens
tctgcctcagcctcctaagtagctggaatttcaggcatgctccactacacccagctaatttttgtatttttagtagagatggggtttcaccatgttggccagggtggtcttgaactcctgacctcaggtgatccgcccaccttggcttcccaaagtgctgggattacaggcragagccactgtacccgtccaatctattttttatatagcagatttcaatcctttaaaaatgtaaatttagttttttaatctccttgtcaatgttttccaaagacttttcatcacattcagggtaaaagccaaataattttcaattagctacaagaccctacatggacaaaccttttcctaatgtcctactatttaccctgacccagttggcttcagctcacaatgcatttcttgccgccttaagcaggtcaagatttgcctgcatctgaatctgtacactacttttcccactgcctaagcactctttaccaaagcctcttcgcatctatctcattcacatcattcagattacttctcaaatagacaaataaagaccttattgagaggtgttttatttacagctttttgt

SEQ ID NO: 214527 - DNA, 482 bp, Homo sapiens
tattctgccttatcatcttgctgctgatctcatttttgatattgccattcaataaatattaactgagaccctactatatgcctcggcctgtgctataaattggagatgagaaaaaccactggctaaactagagaaacatcgtaaaatacagtgtaccctaagccactcaccttgacctttactaattttgtgaaaaagtactacttattaaatcattttattctcatcatccttcaaaaaatattcagcttgacccagaagatatttataaatatttttaaaaattatttttcactcaattacattcctagaaatgttaaatgtctacttacatcatttttgttgcatgcaggactagcrctatatttattagtacaggttacactgccatagcaagaaaacgcctttttaggtaaattttcctttaggcaaatgtcagaattgggtcacatggtcataatcaagttgaagtaaggctgaga

SEQ ID NO: 214528 - DNA, 625 bp, Homo sapiens
agacaaattgtgataggagtctcaaaaagagaatgcagaaatgcatgcctgaatataataggtactctacaaaaataattaaataagacccttttcttaacagaagttaatcaagaatttagccatattctggaattccatttatttcctgcaaaagtgtcatagtcatattgatgccccatctgtgggattcaattataaagatgtacacatataggatttcaaacgatgaatataggatgaagctgtcaaatattactatttttcaaattatgttgatttggtgtatcttaagaaatagcattataggtaataatcaagttttctctacccatcttttttttcagggaaatttcaagaatgttagaattctaaagatagactcaatgaaaaaataggctagtagatctcattcatggccttgatcatgaagtttctagtattaaattggaagtctcaagtttmtctctgtaaagaaattaaacactttgagatagctggtactttatagtgtttcagtgatgatgtgtgaccttctatacaacattacattttaaaatattaatgccaatattatttaatgaaggtgtgatatttacatttccatcataaactaaaacaaaga

SEQ ID NO: 214529 - DNA, 595 bp, Homo sapiens
atgaaccttattctatttcagtgattaaaaattattaagatgttttaaattaagtactggtatgattggatttgaattctaaagtagttttaargttctacctatcagattatcagtaaaacaagtgaaataataaaaacccttttattggaacccactataaaccaggcactacgtgagtcactctaaatggattactgctaatctccccaatgactctacatcaggtgatgaaatatgttcagaccaacagaagtacttctcccaagatcctagagataataatgacaagattcaagccttagacaactgaaatctaggatctgcccactatgtctctctgcatctggagaacactctaatacactgcaggatgctttaaggagtgtttgtgatctgaaagtaggcagacatattaggtggaaaatatttttaggattacaccaagtgagtgcttttactacattcacctatataagaaaacttttttttctctttttctaatttgaaccaaagctctctgcagtttagcaaactataatgacctcaatatgagcttacagttcagtggaaaagctccagtcctagagtggag

SEQ ID NO: 214530 - DNA, 595 bp, Homo sapiens
atgaaccttattctatttcagtgattaaaaattattaagatgttttaaattaagtactggtatgattggatttgaattctaaagtagttttaaagttctacctatcagattrtcagtaaaacaagtgaaataataaaaacccttttattggaacccactataaaccaggcactacgtgagtcactctaaatggattactgctaatctccccaatgactctacatcaggtgatgaaatatgttcagaccaacagaagtacttctcccaagatcctagagataataatgacaagattcaagccttagacaactgaaatctaggatctgcccactatgtctctctgcatctggagaacactctaatacactgcaggatgctttaaggagtgtttgtgatctgaaagtaggcagacatattaggtggaaaatatttttaggattacaccaagtgagtgcttttactacattcacctatataagaaaacttttttttctctttttctaatttgaaccaaagctctctgcagtttagcaaactataatgacctcaatatgagcttacagttcagtggaaaagctccagtcctagagtggag

SEQ ID NO: 214531 - DNA, 536 bp, Homo sapiens
atttctgggctagttttcatggtatataattggcaaagaggaagtggcaagaaggctccattatcagaatttaagaacatagaaacagtgagagatgtaaaaatatgatcatcatataagaaaaagaataagagatccagagccagattgctttggttcaaatccagattctattatcttatactgtaataaactctggtgtgataacatctctgttcctaacttttctcatctatatgtggatatattagtggcctatcattcaaaatgctgttatggtacaaacatgacaatacatgataaagtgctgagcaaaatatgtggcacagagaaaggacccttctgtttttggctatctctcgtgtgtttgtctgtgtgggcatacatatataaagtcatcccccagaattcgtaygggcttagttccaggatttccacagacaccagaatccatagttaccaaattttgtgtatgctcaagtccctgaaataaaatgatgaaataatatagcatcgacatataattcgcacacatc

SEQ ID NO: 214532 - DNA, 577 bp, Homo sapiens
tgaatttgtttgctatggcattccactaaatagagatatatttaattactttaggctggcataatgcgtacgtgtgtgtgtgtatattcagaggaacccaaataattaatgctgtgtaggttttggwaattaataaaaatatttctgtgcacagcaaatttgaattttcattgttcttaagaagtttgctttttaaatcaatttttgaatattttatcctgtagctaatactttgatattctttttttttagggcaatgaattgtttttccttttatattggtcaaattaaacataaaaacatgttatttaaaacatgacatatataaatgtatcaacttttcccccaaattctagaattaaaatgagtaaacctcatctgctgagatttgataaaagctagcctttcatattaaatatatgcactaatgcccactcttgcacctctatttaaaaagaaggtaaaaaagatactttaatgtaataataaacttcttaagcataaagtttcagtactatttatcattgttcatctggataatttggcacactaccaaaaaaatactctatttctcact

SEQ ID NO: 214533 - DNA, 404 bp, Homo sapiens
catacacaacttcatttcatcatgaagtttacacactaggattttcagtgggaggacacagatgacaaacaataaattcataacatttacaatatattaagtactgtaataaatactattgagaaaatagagtgaggaagtaggataaagagttgctggaatggaatgtattaacaattttaaaaatagtagatatggaaggcattactgggaaagaggtatctaaataaagatttgaaagaagcaagggtgtcctagggaagcctatacctggcacagggaatagataatacaaatgccttgaatcaggcacaggcccagcttttagaagatayagcaaaatgcagacacagtcaagtaaaataagatgaggtcggagagatgacagagtgatccaattgtct

SEQ ID NO: 214534 - DNA, 404 bp, Homo sapiens
catacacaacttcatttcatcatgaagtttacacactaggattttcagtgggaggacacagatgacaaacaataaattcataacatttacaatatattaagtactgtaataaatactattgagaaaatagagtgaggaagtaggataaagagttgctggaatggaatgtattaacaattttaaaaatagtagatatggaaggcattactgggaaagaggtatctaaataaagatttgaaagaagcaagggtgtcctagggaagcctatacctggcacagggaatagataatacaaatgccttgaatcaggcacaggcccagcttttagaagatacagcaaaatgcagacacartcaagtaaaataagatgaggtcggagagatgacagagtgatccaattgtct

SEQ ID NO: 214535 - DNA, 603 bp, Homo sapiens
attgatgaaaatgactacactaacaactcattcattttctasgtaaaatagacaggcttgtatcggaagaagttgccatcaagaaattacataaaggggagaagtcaatgtttgaatttaaagctttgaaggacaggctgcctctcttgttaggggctaatgaagttggtggctttaatttaaaagtaattatcatttattacttcaaagatactatggtccttaagaattatgctggccgggcatgatgactcatgactgtaatcccagcactgtgggaggccaaggcctggtggatcatctgaggtcaggagttcgagaccagactggccaacatggcgaaaacccatctctactaaaaatacaaaaaatagccggctgtggtggtgtgcgtctgttctcccagctacttggaaggctgaggcaagagaatcacttgaaccagggtggtggaggttgcagtgagctgagatcgtgccactgcactccagtctgagtgacaaagcgagactctgtttaaaaaatatatatatgctaaattgactctgccagtgctgtctcaatgaaaaaataaaacctgatgacaacacctgtgttcacagt

SEQ ID NO: 214536 - DNA, 394 bp, Homo sapiens
gggtagatcgctgtcactattggcaaaaagactcagcagagtttaagggttcagtgtcttctgcttcatcagaatcttcccatatgttcccattgtaatatttgatatccaattttttcccaaacaatgtccttagtttagagcatacatgctgtgaggttgggaattcaatttgccttgtaattcarccattcataggatgagattctgagcttgtttttcaaaagtctcagctctacgtctaatggaaattagagtttctttcatggaggacagagaaattttcaagttgtgtatgtggagcttgagctgacaatttgaatacctgagttcatcctttcccccacccttactttcttggaagccattaggagaaaataactaatctcattat

SEQ ID NO: 214537 - DNA, 605 bp, Homo sapiens
tggggatgagctttgtatcacatatagtgtcagggaaggggtcaaactttatccaactggaagagaagcagtaccaattggatgactctagatgggatcccaataataatttgggagaatggaaaaggagacactttcaggtgtgcataatggggggactattataccaattacaccaagttcatttacaccaagctatccatgataggccaaggatttgatgagaatcccattgccttcccagagagtctaagagggaccttggtaaagcacacctstagatctcctgtttcagctgagagacaactaatcctaaaggataaatttattactcagcaggaaggtgcagaaacaggccctgggaccagatagtactttgagaacctcctgaaagtggccacctcagtcttttacaatacctcactggaatagattcttggatttattatacctgagtaaaggcctgggaagctgatggaattacctccctcaacccagaagagcacccaaagtaccaacgtgaagaaaccaggctcaagctaaaaatcacaaaaggtaagtgttaataattcaccttccatggatatcctctttatagtcttgcc

SEQ ID NO: 214538 - DNA, 551 bp, Homo sapiens
gactcatgctttacgtaatttaaagtttttaaagatagaaaacttatctaatatatttatccatatatttaacatttcaagtactattcctttttttctgtggaatttactttccatatggtgtcattttccttcggccaaagagtattcttttgtttttgttctggggggtgtgtgtgtgtgtgcgtgtgtgcaagtgtgtgtgtgcatgtgtgtgtgtttgatagcacaggtctwcttgtgacaaattctttcagctctcagttttcccaaaaatgtccttattttgtatgtattttggagaaaaattttacaggatatagaattctacatggaaataattctttcaacactttaaagttatgccattttcttctggctttcattactgatggaaattcagctttcaacaatattaatgttttactttacataatttgtttttttcttctcttgcttttaatggttttctcttctgaaatttgattatgatattcgtaggtaaaatttgctttgtaatttcatggtatttgctgagcttcttggatatg

SEQ ID NO: 214539 - DNA, 590 bp, Homo sapiens
atcatggtacaccgatggaatttttcaataattacgtatttaatgaccttttgaaactgtattttggaagttgtcaatattttgtgatagtcacaacactaaagtaatgattgcagtgtgtttaagaaatggatccaaaaatgacaattacgggtacagtctgagtttcttcctaagtaaacacaacgcaaaagttactgtcagcttatctattccttcagtatttgattctgtgatgagaagagcagattgcagtgttactatgaagcccctggggtcagtgaccacacctcctttggtctttatytctccagtgtctacctacagtgtctccacgccaataagtgctccgtaaatgttggactgagttaaatctactaatttgagatgagaaggaaaaccacccaggatttggaagaaacacaaagccaggtcattcaacataccataagtaagccagtcaaaaaatagggattgcattctttttgcaatccaggagctgttctaagtgtgcggggctacagtggatgccccctcaaaagtttatctttaggtggaaggaggcagacatttacaaagtagataaagaa

SEQ ID NO: 214540 - DNA, 583 bp, Homo sapiens
tagagaattttttaggccattattaagagtttttcaaaaaaattgctcccaataggaaatgattggaacgttgaatagaaaccattggagtaaaagataagatgatttggtttaggatttagaaagttttctctaactattacagaaaatgaatcctagaaggagaaggctgggaacagagatatgattggaactgtacggatttataggaattgatgatggtggtggggttatactagagttgttggcagctgagagagtgagaagtggtcaggtttagaatacatgtgggatgtaagtgcagggctaagggaaaataataatagtgatggctaattctttaytgaaaacttacaatgagaagtggaccatttgaagcactttagtgtattaactcactcttttaatctgtataataactgtgtgctataggttctatttattctcattttatggatggggaaactgaaatattggaaagtcagggaactggcctgaggtcacttagctggaaactggaagagccatgactcaaacccagcagtctggccccaaggcgtgtatgttcttaatgctattttat

SEQ ID NO: 214541 - DNA, 583 bp, Homo sapiens
tagagaattttttaggccattattaagagtttttcaaaaaaattgctcccaataggaaatgattggaacgttgaatagaaaccattggagtaaaagataagatgatttggtttaggatttagaaagttttctctaactattacagaaaatgaatcctagaaggagaaggctgggaacagagatatgattggaactgtacggatttataggaattgatgatggtggtggggttatactagagttgttggcagctgagagagtgagaagtggtcaggtttagaatacatgtgggatgtaagtgcagggctaagggaaaataataatagtgatggctaattctttattgaaaacttacaatgagaagtggaccatttgaagcactttagtgtattaactcactcttttaatctgtataataactgtgtgctataggttctatttattctcattttatggatggggaaactgaaatatwggaaagtcagggaactggcctgaggtcacttagctggaaactggaagagccatgactcaaacccagcagtctggccccaaggcgtgtatgttcttaatgctattttat

SEQ ID NO: 214542 - DNA, 583 bp, Homo sapiens
tagagaattttttaggccattattaagagtttttcaaaaaaattgctcccaataggaaatgattggaacgttgaatagaaaccattggagtaaaagataagatgatttggtttaggatttagaaagttttctctaactattacagaaaatgaatcctagaaggagaaggctgggaacagagatatgattggaactgtacggatttataggaattgatgatggtggtggggttatactagagttgttggcagctgagagagtgagaagtggtcaggtttagaatacatgtgggatgtaagtgcagggctaagggaaaataataatagtgatggctaattctttattgaaaacttacaatgagaagtggaccatttgaagcactttagtgtattaactcactcttttaatctgtataataactgtgtgctataggttctatttattctcattttatggatggggaaactgaaatattgraaagtcagggaactggcctgaggtcacttagctggaaactggaagagccatgactcaaacccagcagtctggccccaaggcgtgtatgttcttaatgctattttat

SEQ ID NO: 214543 - DNA, 586 bp, Homo sapiens
atgcttagttgcatttcttttaaagtctcttttgtcgcacacacaaaattaaaaccagtaggtcctgggctagccagcttcatgggcgyctggcttatagagccaagggcaagctatggctgcagtgccttgagagcacagtttagagaggcagtgaaatgtagacacttctttactggcaatttttgagaaataactgtgagaaaaaggccaagagtttctctcactgaacacattgaaagtaattagagaaatgtttaggaatcacaataaatgctgtggaaaagtgaccacttgcgaggcagtagaacatactggttatgagagtgggatctggggctagaccagttcaaaaccccacctctggctttctcagtgtgaaccactgggcaaacttgaccttacaatgactctactttttcacctgtaaaatgagagtaaaaggagttcctgcctcatggaactgtgatgaagactaactgggtgaatagagggcatggtacttagatctgagttcccggcacagagaaagtgctgactaagtattattactggcacatcaacacgctaactcttaggtgtggat

SEQ ID NO: 214544 - DNA, 538 bp, Homo sapiens
tttcttggccaagtaatctcgcatcttgcttttaattttaaccttctcttcagttctctcttcttcaattcaagtgcaatgacagctacagacatcagaagtgagcaaatcgatacacagtgacccaaagtcaaacaccaaaagttcttcctggagtcaaacaacttttgcagaataaaaagaatcctctgaaccagttcttccttactcctaacacaggttatttttttcaattaacaagtcacgcaaacaccaggacaattagagctgtactgaactttgtggtattttctgmacataaagtaaatatatctttctaccaaagcatgaataaagaagtgaaggacaataaaaaaaaatatgtggcagataccaatcttgggctatcagattactcaagcacctctgaatgcttaagactgacaagtcgcttctataagaatcacagatttttttgtcagttgtttctcttacagtgtgcacaccggtttccacacattaatgtgtacatttcaattcagcagccttccctggtgat

SEQ ID NO: 214545 - DNA, 538 bp, Homo sapiens
tttcttggccaagtaatctcgcatcttgcttttaattttaaccttctcttcagttctctcttcttcaattcaagtgcaatgacagctacagacatcagaagtgagcaaatcgatacacagtgacccaaagtcaaacaccaaaagttcttcctggagtcaaacaacttttgcagaataaaaagaatcctctgaaccagttcttccttactcctaacacaggttatttttttcaattaacaagtcacgcaaacaccaggacaattagagctgtactgaactttgtggtattttctgcacataaagtaaatatatmtttctaccaaagcatgaataaagaagtgaaggacaataaaaaaaaatatgtggcagataccaatcttgggctatcagattactcaagcacctctgaatgcttaagactgacaagtcgcttctataagaatcacagatttttttgtcagttgtttctcttacagtgtgcacaccggtttccacacattaatgtgtacatttcaattcagcagccttccctggtgat

SEQ ID NO: 214546 - DNA, 548 bp, Homo sapiens
ccaggacaattagagctgtactgaactttgtggtattttctgcacataaagtaaatatatctttctaccaaagcatgaataaagaagtgaaggacaataaaaaaaaatatgtggcagataccaatcttgggctatcagattactcaagcacctctgaatgcttaagactgacaagtcgcttctataagaatcacagatttttttgtcagttgtttctcttacagtgtgcacaccggtttccacacattaatgtgtacatttcaattcagcagccttccctggtgatacctctgcttgcatatctaatagatatttagattcaaaatacccagagttaaacaattatcttccccttcaaatgggctccacctgcaagcctgtcccatctcagtaamggatgactccagcccttctctgagcttagggcaaaagtcaggatattaatatcatccttttctcctgtcttattctcataccacccatcaaaaatatctacacaccctgtgccagctcccatcaccactcaccttgatagctgtgcaagcctc

SEQ ID NO: 214547 - DNA, 593 bp, Homo sapiens
acatatatgtgccatactacacagagatctcaattctaggtatctacctagcaaaatgaaaaccactgtgacacaaatacctatctaatacatatttagttatctctctggccctctgaacctattctcttgctgtctttgaagtctcctttagcaactttattcttaattcccaaaaatgagaacaattctactgycctttaactggtgaatggctacacatactatagtatattcatacaatggaataatatgcaacaatacaaaggaacaaaataatgacacaagcaaaaacacaggccgggtgcagtggctcacacctgtaatcccagtactttgggaggtgaagcaggaggatcagcggagcccaggagttcgagaccagccctggcactatagtgagaccctgtctgtacaaaaaatttaaaaaattatcagggcgttggtggcgcatgcctgtaccctcagctacttggatgactgtggtgagggtatcgcttgagcccaggaggtttaggttggagtgagccatggtcatgccactgtactctagcctgagcaacagaaagagaccctgtctaaaaaaaaaaagc

SEQ ID NO: 214548 - DNA, 593 bp, Homo sapiens
acatatatgtgccatactacacagagatctcaattctaggtatctacctagcaaaatgaaaaccactgtgacacaaatacctatctaatacatatttagttatctctctggccctctgaacctattctcttgctgtctttgaagtctcctttagcaactttattcttaattcccaaaaatgagaacaattctactgccctttaactggtgaatggctacacatactatagtatwttcatacaatggaataatatgcaacaatacaaaggaacaaaataatgacacaagcaaaaacacaggccgggtgcagtggctcacacctgtaatcccagtactttgggaggtgaagcaggaggatcagcggagcccaggagttcgagaccagccctggcactatagtgagaccctgtctgtacaaaaaatttaaaaaattatcagggcgttggtggcgcatgcctgtaccctcagctacttggatgactgtggtgagggtatcgcttgagcccaggaggtttaggttggagtgagccatggtcatgccactgtactctagcctgagcaacagaaagagaccctgtctaaaaaaaaaaagc

SEQ ID NO: 214549 - DNA, 593 bp, Homo sapiens
acatatatgtgccatactacacagagatctcaattctaggtatctacctagcaaaatgaaaaccactgtgacacaaatacctatctaatacatatttagttatctctctggccctctgaacctattctcttgctgtctttgaagtctcctttagcaactttattcttaattcccaaaaatgagaacaattctactgccctttaactggtgaatggctacacatactatagtatattcatacaatggaataatatgcaacaatacaaaggamcaaaataatgacacaagcaaaaacacaggccgggtgcagtggctcacacctgtaatcccagtactttgggaggtgaagcaggaggatcagcggagcccaggagttcgagaccagccctggcactatagtgagaccctgtctgtacaaaaaatttaaaaaattatcagggcgttggtggcgcatgcctgtaccctcagctacttggatgactgtggtgagggtatcgcttgagcccaggaggtttaggttggagtgagccatggtcatgccactgtactctagcctgagcaacagaaagagaccctgtctaaaaaaaaaaagc

SEQ ID NO: 214550 - DNA, 598 bp, Homo sapiens
aagcttaagtccattttattaagtgagaaaagctaaatctaatacctttatacactagattatcccacttacatgatattcagaaaaaaaggcaaaattattaggaatagaaaatggatataattgcttggaggaggtrgaaaggattgactacaaatggtcagtagaaaataattttaggaatgctgatttttaggggtgatagtattattattctatagtttgaatgaagtggtagttacatgattgtatgcaactgctgaaactcagagcactgcataccaaaaagagtaacttttgttgcaagttaattttcaaaatgaatacaatttgcttcaacaaatgtgatttgaatgacagaaattaaacacaaagatacacaaaaatactaaatacacaaaatactaaatacacaaaaatatacaaagatacacaaaaatactaaaattttgcctaaagccatcccaaactacaagacgtattcttaatgacaaaatgttggaacatgaacaatttcaaattggcaagtaacagattttttttttttaacaccttctcactagttggcaagcagaacagttcgctccaatatcttcat

SEQ ID NO: 214551 - DNA, 598 bp, Homo sapiens
aagcttaagtccattttattaagtgagaaaagctaaatctaatacctttatacactagattatcccacttacatgatattcagaaaaaaaggcaaaattattaggaatagaaaatggatataattgcttggaggaggtggaaaggattgactacaaatggtcagtagaaaataattttaggaatgctgwtttttaggggtgatagtattattattctatagtttgaatgaagtggtagttacatgattgtatgcaactgctgaaactcagagcactgcataccaaaaagagtaacttttgttgcaagttaattttcaaaatgaatacaatttgcttcaacaaatgtgatttgaatgacagaaattaaacacaaagatacacaaaaatactaaatacacaaaatactaaatacacaaaaatatacaaagatacacaaaaatactaaaattttgcctaaagccatcccaaactacaagacgtattcttaatgacaaaatgttggaacatgaacaatttcaaattggcaagtaacagattttttttttttaacaccttctcactagttggcaagcagaacagttcgctccaatatcttcat

SEQ ID NO: 214552 - DNA, 538 bp, Homo sapiens
tatgagttattcatagcagaaagctcattttattaaagtattttgagagcttttgtttcccccgtattgttgtattttctccctcacccttaacaacaggacacccaatctatggctggggcaaatggtactaagaactctaacaggactaaggaggggattatttgcaaaggcttgagccttaaggaacgaaacccaccactcagaaaaatctaaacacaagaagcaaaattcaaggaggtgcttaacttgaactcaaaggatcctgaagtgttcaggaacaagcttagggggtctatgaacaccctgaaaatacawgagacatgagacagattaagtatgaagttctggtttcttctagaaaagactcagaatcttgagatgcacaagctgaaaaggagttttagaaataatttacatcaactctcgttttatacatgacaaaactaagacatacagatgtgatatttaccaccttcactgaaagaaaatcaaatgagtttctcacttcttaaatcaagccattgcttttaaaact

SEQ ID NO: 214553 - DNA, 433 bp, Homo sapiens
gcatctacatggctgtacatcracattgtttggagatcatgataaaagtctacatttgaggccattcctgctccctgctccctccacagggagggagctgacttgtaaaaagtatgaaaaggaatgacatacagacacttttaagtggcattgcttctgaaagcagacaaaactggcaggacctctgagatgtcagaagaggcccaggacactcataatgttaagacctctagtatgagatagctaaatgtggttttaaaagatgagctttttttagatatattaattaaaatcttgtgaatgtatccacatggctgtacatcaacttttgtttggagataatgacaaaagtctacatttgaggccattcctgcttcctgctccctccacactcacgctgactgtgtaaaaagtatgaaaaggaatgaccccc

SEQ ID NO: 214554 - DNA, 433 bp, Homo sapiens
gcatctacatggctgtacatcgacattgtttggagatcatgataaaagtctacatttgaggccattcctgctccctgctccctccacagggagggagctgacttgtaaaaagtatgaaaaggaatgacatacagacacttttaagtggcattgcttctgaaagcagacaaaactggcaggacctctgagatgtcagaagaggcccaggacactcataatgttaagacctctagtatgagatagctaaatgtggttttaaaagatgagctttttttagatatattaattaaaatcttgtgaatgtatccacatggctgtacatcaacttttgtttggagataatgacaaaagtctacatttgaggccattcctgcttcctgctccctccacactcacgctgacygtgtaaaaagtatgaaaaggaatgaccccc

SEQ ID NO: 214555 - DNA, 573 bp, Homo sapiens
taatgcgcaagttaatatttttccatggtgcaaggtgtatgaattaggtttgagaacagagagacaggaaagtctttcagatttataaaatgtaaatactagctyttctgaaaaggaaaaaaaaaagccgacatttgaaaccattctggaaaatctaagataatgtggttttcctaaccaacagtagtcagtttttaaatgcagtattttgactttattatcctatcattgagattcaccatgttttaatgtaccactgagaaagaaaaagaaaatggctgattaaatttaaaaaaaataccacagattcatctgttatactcgtatagattgaaactgatctactgttaagtcaacaataacgaaggggaggacattgcagaaaactatgagaaggatctcaattttgcaaattatacatgtatacacgcgattccaacatctattctctgtgagcatttgtttctgttaatatgtagatcaagttctaggcacagaaagttctagaagtatctattaacagttgggtttgagttaagtaaataacttactttctaaccacatttttcattg

SEQ ID NO: 214556 - DNA, 573 bp, Homo sapiens
taatgcgcaagttaatatttttccatggtgcaaggtgtatgaattaggtttgagaacagagagacaggaaagtctttcagatttataaaatgtaaatactagcttttctgaaarggaaaaaaaaaagccgacatttgaaaccattctggaaaatctaagataatgtggttttcctaaccaacagtagtcagtttttaaatgcagtattttgactttattatcctatcattgagattcaccatgttttaatgtaccactgagaaagaaaaagaaaatggctgattaaatttaaaaaaaataccacagattcatctgttatactcgtatagattgaaactgatctactgttaagtcaacaataacgaaggggaggacattgcagaaaactatgagaaggatctcaattttgcaaattatacatgtatacacgcgattccaacatctattctctgtgagcatttgtttctgttaatatgtagatcaagttctaggcacagaaagttctagaagtatctattaacagttgggtttgagttaagtaaataacttactttctaaccacatttttcattg

SEQ ID NO: 214557 - DNA, 573 bp, Homo sapiens
taatgcgcaagttaatatttttccatggtgcaaggtgtatgaattaggtttgagaacagagagacaggaaagtctttcagatttataaaatgtaaatactagcttttctgaaaaggaaaaaaaaaagccgacatttgaaaccattctggaaaatctaagataatgtggttttcctaaccaacagtagtcagtttttaaatgcagtattttgactttattatcctatcattgagattcaccatgttttaatgtaccactgagaaagaaaaagaaaatggctgattaaatttaaaaaaaataccacagattcatctgttatactcgtatagattgaaactgatctactgttaagtcaacaataaygaaggggaggacattgcagaaaactatgagaaggatctcaattttgcaaattatacatgtatacacgcgattccaacatctattctctgtgagcatttgtttctgttaatatgtagatcaagttctaggcacagaaagttctagaagtatctattaacagttgggtttgagttaagtaaataacttactttctaaccacatttttcattg

SEQ ID NO: 214558 - DNA, 450 bp, Homo sapiens
gacctaacaatcccactcctaaatgtttaccccagagaaatgaaaacatattcacacaaaaccccatacasaaatgtttagaagagctttatgcataatcaaccaaaactttatgaaaacaaccaaatgtggttcaattggtgaatgaattcactgtggcacatccctacaaagaactactgctcagcaaaactacagatacacacagcatggacgagtctcacatacattatgctcagggaaagagaagccagactcaaagattacacactgtatgattactccatttatattctatatattctatagagatggagaatcaagcagtggttaccagctatgtagggtgggagcagcacaggtaattagggaaaggaggaggacactgttttgtttcttgcctgcggtggtggttgcacgactgtgctttggtcaaaacccatagcgcac

SEQ ID NO: 214559 - DNA, 656 bp, Homo sapiens
caaatttatttctcgttttatatctagttatataatatttgctcaataaatatcacattcatttaattatagaaggctttgattatgtgaagaataacatggttaacatggaattagggcaattgagatcctcaaatttagacattatatttcaataagtaggcattttcttatggatccgtgctagtggctaatgactagaatgagggtatttatagaatgtgttgactttgtgatttcttattgaaagataatccaaaaagttgtggttaggagctatatagattcttgtgtgactttgaaaaatggtgattagggatggaaaatttcatcaaggttggaaaaatatacccctcttggaagaattaaattaggcattatgtatagaaaacctgtgctctttgttagagatatagtaagtgatccatagtcttccttcttccataaccatttccctttagaagcacagagtatgttgttgggggcgggcgtgggcagatactgttgttgtcatggttaatgcatattatgaccaggttaagcattttacttgtgttatctcatgtaatcctcacacagtcttatgaggcatgcmttattattattcccattttagagatgaggaaaccaagacccaaaatgtttaccttgtctat

SEQ ID NO: 214560 - DNA, 538 bp, Homo sapiens
tagttggtatgtttgtcttagttaataaaagaaaaatgttgaggawcgaacagagaaacgagtctgctctgggtctgactgctgcccttcctgtccgtctggtgtggatattaatgttgctctgagggttagatgagagcatggcatctagtggaccttcctgattgaagagaatcacattagggctataattaatttttcagctcaattacaggcttcttttgatatccttcatattgtatttgccagatttctaagagctttggtatattgcagttcaatgccagcctaacttggtataaatttaactgtagggaattgatttctgcatagttacttgttttagaaaatgctgaacacatgagaaaaatgtttttggatgacagagaaggaggtagatagagatcagtgttttttatcaccacatggaaggatggtgtgtatcttttaatctggccagagaatatcccctgagtccatgccacttaaagcattattcttagctgtggtattttgttgtttatatggagaatttaca

SEQ ID NO: 214561 - DNA, 591 bp, Homo sapiens
aagtgccacctagttgtcctactgtcaattccaccacctccctccatcctctgctgttgtatactcaaatgaaggtttcttcctgttacagaaggaggcatgactgtggtcctacccaggactttctaagggatgggagagcaagaagagtttcggtgcatctattctcagatgctcacggagtctgagctggtgccttttataccctgctggtcatacagacatattcttgccatacaatcagccccagtgccagacttctctgtgtgtgtcggggcggggggtggggggatgtgtcgtgtccatgccaggtgcaagtcatgcatctcatctgsgagttacatttctgatttcagttagacagttcaggtgatttcaaggcctgccagaatgaaccctaacagcacaatccaccctagacccatggtcagcctttttacgacaaaacaattactcttagtttgacagcaatgtcaaactctgcctctctcctccactttataaggacccatgtgattacatcgggcccaccagaataatccaggataatcccctcgtctcaaagtcagcagattggcaggcttaattcca

SEQ ID NO: 214562 - DNA, 550 bp, Homo sapiens
ttaaagaccaagttgtacccaggaaacaggaagacttcgggacacagaagtattagtcactattattttatttatttatttaagatggagtctcactctattgcccaggctggagtgcaatggcacgatctcagctcactgcaatctctgccccccaagttcaagcaattctcctgcctcagcctcccgagyagctgggattacaggcatgcaccaccacgcctagctaatttttgtatttttagtagagacagggttttaccatgttggccaggcttgtcttgaactcctgacctcgtgatccagccaccttggcctcccaaagtgctgggattacaggcatgagccaccgtgcccggcctagtcacaattactattatagatactattattgtgatgtataaccacttctggatttaagatgtgtgaatttagcagactatttctctctgagcctcattttgatcatctgtagatcaatgagtttgaccagatattatgtaagtttcctccaaatataatggattgtgaaccttataattaaaaaaaa

SEQ ID NO: 214563 - DNA, 589 bp, Homo sapiens
tttcttgttaatgtatctacgtgtttattaaattttgtgggctctgaattaactttttggtgtgctgagacatgtgccacaaatatcttaattcagtttgataattcatgtagttgctccmagtaagatttggaccatatacctttaccattaattttgaaatcgttttgtcttcatttatgtggctgcggggctatgctgcaagtctgtaaaaacgtagatgttattctgatttgctgagtgcctgactgctagaacagctgcaattagttctgccaagagtgattgacctgctgcctgcagatcgtgtggcctgaggtctgagtgctgctgctgtccattgagcctggccttgggtcacagaggcctttttgtctataaaccaggtgttgggtaagacgtttgactagcctgggccccattttcctatattagcataaactgtacctactctcagaataaattttggcacatctatttcagtgttgtgagtttcctcagtaaggagacctggttgacccctaaagcctgtgtctccatcctggatataccatttccatgtgaacagctttggatcaatttggatacc

SEQ ID NO: 214564 - DNA, 579 bp, Homo sapiens
ttaaaatttccaacctaagttccaaatctggagatgggtaatgtcatgtttggaatgtggtgatgtagtctttgagtgtttcaaatgcttgtgtttgttcttgtccccatatgaagtcttgggatttcctggttatctttttggttttaggatgatgcttaggtaaggtayaggctgtctctagtatccaaggaaacttactagtctttgcttcctgtttattttttggtgccctatgggcttttgatccatctatcactgtggtcagaatttttatcccttctgataaccactgtactcctaaaacttcgcagttggtgtcttgatttatagttgtatctataataatcatccatctcagtgatctcaagtgtgttgagatttcttttgggtaagtttttcttggtattgtttaccattgtaatgtcatctatgtacaatattattagtgatgtgtattttgattgatctatgtgtgataataaaatggagtgagctgttattggactatttaaatatccctgtggtaatcttttaaattggtattatttgccttcccaggtaaaggtaatatattcc

SEQ ID NO: 214565 - DNA, 467 bp, Homo sapiens
ggaattcagggacccccaacagagagactggctgaagccatggcagaagaacataaattgtgaagatttcatggacatttcttaattccccacattaatrtttttataatttcttacgcctgtctttactgcaatctctgaacataaattgtgaagatttcatgaacatttatcacttccccaatcagtacttttgtgatttcctatgcctgtctttacttaaatctcttaatcccatcatcttcgtaagctgaggatgaatgtcgcctcaggaccctgtgatgattgcattaactgcacaaattgtttgtagagcatgtgtgtttgaacaatatcaaatatgggcaccttaagaacaggataacagcgatgttcagggaacaagggagataaccttaaagtctggctgcctgtgggccgggcagcacagagccatatttctcttctttcaaaagaaaataggagaa

SEQ ID NO: 214566 - DNA, 622 bp, Homo sapiens
cctcttttccttcactatctatgtattggatcatttatttataccagcattaattttatttatgattactttatactttgggtgataatataatacaactttatcttgttcaaatcgctccagctttggccagtggaagctctttcagttggcttctgtgcccttttaacgtgcccctattcatgtaggttttggtgggggctctttcttactttttggcaytaaaagaggctccaggatcatcttacatatatcttctccttcaatcctagattcagtcatttcttcaaggaactctggtttcttttgttgaaggttgatgttagaaatcaagatctgtatgctatatgtgttcactgctactggagtgtcatttctttcagacattctcacatgacaacatgaaatatagtgttaatgctaacatatatattctatatgttaccatctgtatctaggtaaagctaaacataagctcatcctgaggtcaccaactttaatccactaccacatagatcattttagcctccccctttgcttaactgtaacctcccactccaatagtaagaaatctgactctcatttacttaatagttcgattagagtataaatgtgtagcagt

SEQ ID NO: 214567 - DNA, 595 bp, Homo sapiens
cctcatttttttttagcagtgaataacagtcatagtgtggatatggcacagtttattgatttacctattgaaggacatcttggctacttctaggttttggtgattatgaatgaacatgtgctgtaatatgtacatgcatgttcaggtttttttggtgyggacacgtattttcaaattggttgggtaaatacctaggagagtcattgctggatcatacatggcaagactgtgtttagctttgtaagaaactgtcagtcttccaacatggctgtaccattttgcatttccaccagaaatggatgagaattactgttgctctacatccttgccacctttttgtttaatttattctttcttttgctttcctgttttcaattgcattgattactgctctgataattattatgtccttcctttgctagctttgagtatattttgttcttcttttttatagattctgtgggcagaaagttatgtgactgatttaagacttttccttatttccagcgtagggattttggtgccacaaattttcctttcagcatggcttcggttgtgttccgaaaatttttgatttgttccattattgtttttc

SEQ ID NO: 214568 - DNA, 491 bp, Homo sapiens
ctaccacaaaaaatataaaataatttcaaataaatgaaagtaagtgggacgcagcatgacaaaacttatggcatgcaactaaagcagcacttacagagactttcatagctgtaggggagaggtctatattacattagaagaaagaccgcaaatcaataacttggatatacaatttaagacaattataaaagaacaaactaaacctaattaagcagaaggaaataaatatcagttagaatgaaaattaataacatggagaagakaaaacagagaaaaattaacaaaaacacacctggctttttgaaatcaataaagttgacaaatccttagccagactgacaaagaaagaagaaaactcaaattaataaacatgaatgaagaggggacgttattatagaccttacagaaatagagaagtataaggaatactatgaacaattgtatgccagtagtagaaaaatatcctagaaaggctcagactatagaaactg

SEQ ID NO: 214569 - DNA, 445 bp, Homo sapiens
aattcacttctaattaaggaatagtaaatatattttctcttcctcatgattttttagtaacatttctttactccagcttactttattgtaaaaatatagtacataatacatagaagatacaaaatatgtgttaactgtttgttattagtaaggcttctggtcaacagtaggctattagtygagttttggaagagtcaaaagttatacttggattatggactgcatacaagttggggcccttaacccctgcattgtttagggatcacctgtacatgtaaagttagcctatttttttgaaatggcaattgtgtattgtacttgtgaattagtctgttctcacattgccaataaagatgtacccgagactgagtaacttataaaggaaagaggtttaatggactcacagttccacatggctagggaggcctcacaatcatggcagaag

SEQ ID NO: 214570 - DNA, 561 bp, Homo sapiens
aaatagaaactaaaataaaattttcatgcaagggcagagctgagctttggtccctttctggcctgaaaatgaaaagaaatcttaacctcccaccaggatacctcagtgaaatttagggccataaaaccattgacatggcaagttgatccttactttttgtctttttatgtcttgttactgatgcattgctayttaataggcaatttaacatattatctcccctgctttatgcatacacacgcagatttttaaaattatcatggtaagaacacttcataatactgcagaatgtggtatttttgactgtacaatgttgtacaacagatctctagaacttatgtatcttgtgtaagtgagcctttttgcccattgaaccctgtttccccttccccctagtccctagcaccaccattgtattccctgcttctctaagtttgaccattttagatacttcatataagtggagtcatgaagtatttgtcctacttgttactggtttatttcactcagcataataccttcaagtttcatccatgttgttgcataaggcaggacattttt

SEQ ID NO: 214571 - DNA, 561 bp, Homo sapiens
aaatagaaactaaaataaaattttcatgcaagggcagagctgagctttggtccctttctggcctgaaaatgaaaagaaatcttaacctcccaccaggatacctcagtgaaatttagggccataaaaccattgacatggcaagttgatccttactttttgtctttttatgtcttgttactgatgcattgctatttaataggcaatttaacatattatctcccctgctttatgcatacacacgcagatttttaaaattatcatggtaagaacacttcataatactgcagaatgtggtatttttgactgtacaatgttgtacaacagatctctagaacttatgtatcttgtgtaagtgagcctttttgcccattgaaccctgtttccccttccccctagtccctrgcaccaccattgtattccctgcttctctaagtttgaccattttagatacttcatataagtggagtcatgaagtatttgtcctacttgttactggtttatttcactcagcataataccttcaagtttcatccatgttgttgcataaggcaggacattttt

SEQ ID NO: 214572 - DNA, 561 bp, Homo sapiens
aaatagaaactaaaataaaattttcatgcaagggcagagctgagctttggtccctttctggcctgaaaatgaaaagaaatcttaacctcccaccaggatacctcagtgaaatttagggccataaaaccattgacatggcaagttgatccttactttttgtctttttatgtcttgttactgatgcattgctatttaataggcaatttaacatattatctcccctgctttatgcatacacacgcagatttttaaaattatcatggtaagaacacttcataatactgcagaatgtggtatttttgactgtacaatgttgtacaacagatctctagaacttatgtatcttgtgtaagtgagcctttttgcccattgaaccctgtttccccttccccctagtccctagcaccaccattgtattccctgcttctctaagtttgacyattttagatacttcatataagtggagtcatgaagtatttgtcctacttgttactggtttatttcactcagcataataccttcaagtttcatccatgttgttgcataaggcaggacattttt

SEQ ID NO: 214573 - DNA, 549 bp, Homo sapiens
ccacatggtatgtctgtatttattagcagccttcacctcttgtcctactagcgtcacaccatgacagtgtttgcatttgctcactgcgcgtggattcggagatgattgcttctgacttgtttgagtgcagagaggaactaatttgattagacagaaagctggagctgccacagctgccgtgggaaggagctgtcacctatccactcygttgcattcaagtgtgccaattgttctctgaaagaaggcccagtgatgctgtcagatgtctcggtcctaaatacaactgaacacaatgaaacagtgatcacgctaagtgtgttctttctgttatgcaatttcccaaggtatggaacttatttaccctgggatcctaaaagctaaaaactaaataaataaaaattaaattaaaggaagtgggattggaggggaaaggagtaaaagccaaaagagattaaatatttagatacgactttacccatgcatgacacaaaagcaggcaaggccagcccctgcccattggacactggatactggttgacattttaatac

SEQ ID NO: 214574 - DNA, 500 bp, Homo sapiens
aacatcattaatcgttggggaaatgcaaattaaaaccacaatgagctatcacctcacacctgctagaatggctattatctgtaaacacttttggttgtcacagcctgggaaggggagctactggcatctggtgggtggaagccagtgatgctgctaaacatcgtacaatgcacaggacagtccctcacaacaaagaattatctaccaaaattgtcrgtagttctcccactgagaaaccttgctgttgcagagaatcactgtgtgtcataagaaatggtgtgaagggtatatatttggcacatgaatggggtaaagggtagagacagaaaaaagaatggaaaactttgcaagaaaaggttagaaatgatccttcttggactcaagccatggagcagttgagtagtgaggtgaataacctgaaaaggttgaaaattaatgtggagtcatcccctcctcaactgctgctctttctccatattcctcagaagttccaataaacc

SEQ ID NO: 214575 - DNA, 458 bp, Homo sapiens
gcagtatggaggagcgcccttggaaagctttcagtatctacagagacctccttgccattytcagcgttggctgtacattagaatgaggtagggagtttcgaacaattacctgcacctggagcctagtcatctttattttttaacagatgcacattgcttctgatgcatagatgaggatcagaagtcttcatccagtacagcagactgaaccgactactgtgggtcctgaaggcaccatactttcacttcctgttttcccattcctttgactgccgtttcaactcccaccatacttgaagaccctcaggtggtgtcatggaaggctactctcattgtccacttgggtatgagttaagtccccgacttgggcaagctactccctaggcaagctactcccacgtgctctgagctcagatactgtaattgcttgtttgtttttttttttttttggaagaggg

SEQ ID NO: 214576 - DNA, 458 bp, Homo sapiens
gcagtatggaggagcgcccttggaaagctttcagtatctacagagacctccttgccattctcagcgttggctgtacattagaatgaggtagggagtttcgaacaattacctgcacctggagcctagtcatctttattttttaacagatgcacattgcttytgatgcatagatgaggatcagaagtcttcatccagtacagcagactgaaccgactactgtgggtcctgaaggcaccatactttcacttcctgttttcccattcctttgactgccgtttcaactcccaccatacttgaagaccctcaggtggtgtcatggaaggctactctcattgtccacttgggtatgagttaagtccccgacttgggcaagctactccctaggcaagctactcccacgtgctctgagctcagatactgtaattgcttgtttgtttttttttttttttggaagaggg

SEQ ID NO: 214577 - DNA, 437 bp, Homo sapiens
ttcgagtcctttagcagtatggaggagcgcccttggaaagctttcagtatctacagagacctccttgccattctcagcgttggctgtacattagaatgaggtagggagtttcgaacaattacctgcacctggagcctagtcatctttattttttaacagatgcacattgcttctgatgcayagatgaggatcagaagtcttcatccagtacagcagactgaaccgactactgtgggtcctgaaggcaccatactttcacttcctgttttcccattcctttgactgccgtttcaactcccaccatacttgaagaccctcaggtggtgtcatggaaggctactctcattgtccacttgggtatgagttaagtccccgacttgggcaagctactccctaggcaagctactcccacgtgctctgagctcagatactgtaat

SEQ ID NO: 214578 - DNA, 504 bp, Homo sapiens
tcacaggttacttgatacaattgatgcttttatcacttcctggcagaaaaggagctggacttcaaaatcacgacatctgggccctggtcagctgagccaggcattagagtccttccactgtggtggcctgttggtcggcccaatggcacggtcagcggctgctctcaggggcttgctaatgggcagtgctcaccttcctccataagatgggaagggtaggcatcctaattaggagtctctggtccctttctgagtgtcagcatgacctagtgatgtattcagagaagctgccaakagtggaagtggatttatttagtgatgattgtcaccactagaatcagtacctttttaaactccaccctgtttatctgaattcagttgtgtgtatggttcttgttttgatggatggctcaggctcccattgaagccatcagaggctccctctgatgatgagggagcagactaaaaaaccgttactatccactggatacttagtgacttata

SEQ ID NO: 214579 - DNA, 596 bp, Homo sapiens
tttgacccctaatttgtatcattggtttcgttaagggatatatttaaatgaaaaccagaaatgttaggcctagatctatcatctaaataatatttattttatggtaaatgaattggagtttacagccaagcctagtgacctttgggtctgcaacatgggaaaacagcccgttgctccccaggctagtctttttattttcctcactctgggaagcagtccccttaaagaggtttttactggtgactcctcccaagtactgcaaaagtagaaatgaaaatttctccccaataaaatcctgttaggtgttggaactaaaatatgaatctaaaatataaaaatagcctgtataacagasgaactgcagctcctttccaacaatgcctcctgctagggcaacacatatattggaaatgagattatgagatataattaacttgtctgcctatactgttactctttgaatgtttccaagtttattttaggaagattgacagtcataattatattgtcaagcatttgtcatttttgctgtagcaataacactgaaactcagacaaaaagctcccacctgactttgattggaatggtgcagcaga

SEQ ID NO: 214580 - DNA, 578 bp, Homo sapiens
attgtaacttaagtgctcttaacaaaggattatttgatcatttgtaaaggaaatgcaattcatacatacacatacacatacataatttgattgccttcaggaagaatacatcccttcctactttcttaaaaggacatgaaatggatgctaaatttcaccaaatgcctcttggccawctatggaaacattggtatgtggttgtttctcctttaatcttccaatatgaggaatttcattaacagctattactaatgaactatttttgcttggaacgaaaccatttgtttatagtttgtttttaaaatgcattgtcaattatattatattttatttgtaatttttgtaaagagattccttagtgaaattggtctaagaatttttgttgtgttattttgaggttcttttgatgtaatttgcccagtttgggtaccaatgatatacttgctgtcttaaaacaagataaactaggaatttttctcctgggagtctctggtggtttcagtattaaaattatctgtgtattgagagtttaagagaatccatctgtgacagcacctagatctcattctttcttgtgg

SEQ ID NO: 214581 - DNA, 433 bp, Homo sapiens
tctcccgcctgaagcggcatgaagtgaagcaggagtgaggctgtgtcagcttcccacagatgctcaggacactaagcgaacgcgaggcttcctgggcacyggggcagccgggcgatggctgagggctgggcgagtgatgcacgtacagtacactgctccgggggtcaagataggaggcgggatcttgaccagccgccatccaccctggattgtcctcagagtccccggaggaagggatcctagagaatactcatgtccccgggggcgcagaccaagaaccttatacctctgcgcacgcgcgagggcgctagcccgggaagaataaactccagcgggtcctgggccagcgtgatgaatgcacgtgtcacaggcgggaggaaaaaggacaactgggctcagaaaaaggggctgccacgccccggcccctgcaagg

SEQ ID NO: 214582 - DNA, 433 bp, Homo sapiens
tctcccgcctgaagcggcatgaagtgaagcaggagtgaggctgtgtcagcttcccacagatgctcaggacactaagcgaacgcgaggcttcctgggcactggggcagccgggcgatggctgagggctgggcgagtgatgcacgtacagtacactgctccgggggtcaagataggaggcgggatcttgaccagccgccatccaccctggattgtcctcagagtccccggaggaagggatcctagagaatactcatgtccccgggggcgcagaccaagaaccttatacctctgcgcacgcgcgagggcgctagcccgggaagaataaactccagcgggtccygggccagcgtgatgaatgcacgtgtcacaggcgggaggaaaaaggacaactgggctcagaaaaaggggctgccacgccccggcccctgcaagg

SEQ ID NO: 214583 - DNA, 609 bp, Homo sapiens
aacaaaaatccagtcaaatacataaaataagtgcacctcggcccaagatgattgtgcccttgagttcaagctgataagctgtaactaacggtgccaatgccagcagatgatatggatgctcagtatggaaaacactgggtcgcattctctggacatcagagtcatatgtaggtaggtgtcctgaaaatttggtatgctgtctttttaatgataggaactggctgattggcattctcatgaattaaactaataatttcaaccccattaatatgatagggttattgtttttcttccagagggtaaggatgctttagaatagggccagatagyaatattttattttttatgaactatatgattatatatagttcacaactctgccactgtagtgcaaaaacagccgtagacagtaagtaaacaaatgggttgggatgagttccaacttaataatattaataaaatagccatggatcagttttgattcaagagccatagtttgctgactcctggctttagaatatcatagaaataaattctggacctcctcacatcccctggctgtacacatcatattattggcctctaccaggttttaacgcagctccaata

SEQ ID NO: 214584 - DNA, 578 bp, Homo sapiens
ttcaaagcctgaattcactgtacttcatcaaaacagtagttcccatctaaaaaatattgtggtgtgccaaatagcaaaacctaactgactggttaaaaatgcaagagcaggtaatttttatcgtaaatttattctggagcaaagtgaagaatgataatgcttggacttaataatgggagaaaacaagtgtatggggcaggccacagttctaagctatttctcagatattctgaattcatcataatcacataaccttttctcagcattggagactgtgaggacttaatgggatctgcaattcatatgggtctactatacttgtctgcttcgtcacagcaatgctgcttgtggttattcattatccaagatgacttttccttgtgattgcttgacacagttgttaaaacattttttttgtggctcatttcctgcataagctggttaaccctatcccatctggagacctcagaagacctactcccatagctttgctcactaatgcctgctccaagctgcrtggggcaccacctgggagagatgagggcttggtggaagttcgtcttcttaaatggagaaag

SEQ ID NO: 214585 - DNA, 553 bp, Homo sapiens
cacacttttggatatcaaggatcaagacagcatggaagtgtcccctttacatggggactggtaattactgtgggacggtcctggtagcttaatggagttccattagcytggatagtcatagacatggattcttatttctaggcactgctgaaacaatgaccttggttcttcacttgagttccatttatgtttcctttctggctgtcattgatgtctgctggataaggtcactttgggatcaaagtgtcaaattggattctcaccatggcttgatcagttggtcacccaaaagacactgggaaaggtggtctacaccttggcaggggctcttaaaaactgtgcttctatagaacactggggttccatgagctgcagaacagtgctccacaaaacttgagtagcaatggcagccttttcacaactgagaggggaaaaaatacatgtttatgaaaaaattttcttaaagtttgtcttccatgcctttttcttaatcctttggtgtcagcagctatttgaatgtgaacgagtgctagtgcacaacaaaatgagtcag

SEQ ID NO: 214586 - DNA, 553 bp, Homo sapiens
cacacttttggatatcaaggatcaagacagcatggaagtgtcccctttacatggggactggtaattactgtgggacggtcctggtagcttaatggagttccattagcttggatagtcatagacatggattcttatttctaggcactgctgaaacaatgaccttggttcttcacttgagttccatttatgtttcctttctggctgtcattgatgtctgctggataaggtcactttgggatcaaagtgtcaaattggattctcaccatggcttgatcagttggtcacccaaaagacactgggaaaggtggtctacaccttggcaggggctcttaaaaactgtgcttctatagaacactggggttccatgagctgcagaacagtgctccacaaaacttgagtagcaatggcagccttttcacaactgagaggggaaaaaatacatgttyatgaaaaaattttcttaaagtttgtcttccatgcctttttcttaatcctttggtgtcagcagctatttgaatgtgaacgagtgctagtgcacaacaaaatgagtcag

SEQ ID NO: 214587 - DNA, 617 bp, Homo sapiens
tggacaaccatttatcatatggtaggtgtcactgaccaagacagaaattttaggttcttatttggtctttgaacccctgaggtgtgctgccttactgaatcaaacytgagccaagcccagctttctcttaagggcagggccctcatctttgtcttgttcaccaaatacctacccaagaaagtgcatcaataaatgtctgctgaatgaatgactatctggatgactgtgaatgaggaaatatagaaataaattcacactccttttttagactgagtgtcattgtttaccttctccaaagaactctttgcaaaatgttttgagctatgtgaagaaaggcttcatctaaacttattcatgaagcaggccaactagattgtgtcagagggctactaaagtcattctcttattggatgaaaaaatactctagtcataattaagaaacattaaactatatttataatcaaatattctttaaggggattggctttttcttctgggttgagtgggttttgctctcacgcacccagaaaaggccagacagtgtgttgtttgatctattttgttaaccttctcctctggcttatgttaccttaagttgacctttcaagtgctttgtc

SEQ ID NO: 214588 - DNA, 626 bp, Homo sapiens
tgatctattttgttaaccttctcctctggcttatgttaccttaagttgacctttcaagtgctttgtcttctggcaaatatatttaaaactttaggacctaagtaatgtatagctatcagaattcatgcagaaaatcaaagctgagtctggagcattctcttttgaagaraaataccaccctgcgtgtgatgacctcacctgattcgtcacctgatacctgatgggggtcaatgggtgcagagaagatcctgagcctagggctgggagcgggtgttgtccacatattggctttgctgtgaactggatgggggtcaggtttgcatagggacatgttagacatgctggggttggcctggattagaaaggacatgattttgatttaacttttgttctcatgactttgaaggtaaatctgaggttgtgtcatgtagatgagaagtttctaagttcaaagtcgggaggcctgggttcaactcagggttaagagattgtgagcaagatacacaaactccccatgtctcattgttattattttttaatctgtaaaaagagaccaataatgggatgctgggaacatggtagagtaggaagtaccagaaatttgtttccctacctagacaactatt

SEQ ID NO: 214589 - DNA, 536 bp, Homo sapiens
aaaatcaaagctgagtctggagcattctcttttgaagaaaaataccaccctgcgtgtgatgacctcacctgattcrtcacctgatacctgatgggggtcaatgggtgcagagaagatcctgagcctagggctgggagcgggtgttgtccacatattggctttgctgtgaactggatgggggtcaggtttgcatagggacatgttagacatgctggggttggcctggattagaaaggacatgattttgatttaacttttgttctcatgactttgaaggtaaatctgaggttgtgtcatgtagatgagaagtttctaagttcaaagtcgggaggcctgggttcaactcagggttaagagattgtgagcaagatacacaaactccccatgtctcattgttattattttttaatctgtaaaaagagaccaataatgggatgctgggaacatggtagagtaggaagtaccagaaatttgtttccctacctagacaactattacactggcagaatttgtatgatgtaactattttggaattc

SEQ ID NO: 214590 - DNA, 536 bp, Homo sapiens
aaaatcaaagctgagtctggagcattctcttttgaagaaaaataccaccctgcgtgtgatgacctcacctgattcgtcacctgatacctgatgggggtcaatgggtgcagagaagatcctgagcctagggctgggagcgggtgttgtccacatattggctttgctgtgaactggatgggggtcaggtttgcatagggacatgttagacatgctggggttggcctggattagaaaggacatgattttgatttaacttttgttctcatgactttgaaggtaaatctgaggttgtgtcatgtagatgagaagtttctaagttcaaagtcgrgaggcctgggttcaactcagggttaagagattgtgagcaagatacacaaactccccatgtctcattgttattattttttaatctgtaaaaagagaccaataatgggatgctgggaacatggtagagtaggaagtaccagaaatttgtttccctacctagacaactattacactggcagaatttgtatgatgtaactattttggaattc

SEQ ID NO: 214591 - DNA, 591 bp, Homo sapiens
atctgtaaaaagagaccaataatgggatgctgggaacatggtagagtaggaagtaccagaaatttgtttccctacctagacaactattacactggcagaatttgtatgatgtaactattttggaattctggagtatattgaaggattgcaacttctaggagaaggcttgggaagtaattgtggtttattttggtcaattatagttcttagcatagtagcaagtcttccaaccttcacccttcagccctgtggcaggcagctgtgccaagtgttcctggagcagcttgcaaactgtttgcaggagccggggtgagcaaaaaggactctgttctccaaatatcaaaaatctgtgttctgatcactgatgctggttctgatcaaagagatgcagacaaaatcgccaccattgttgttgcacctccccttactgggaagctcctccccttggctgaagtgattgtcaggagatttaaagggccagcacccttttaattttttycaccttcgattttctttttctccaccttcgattttctttttctccttttgggggcctgacattaaatattaggtcattaaaaaataactaca

SEQ ID NO: 214592 - DNA, 565 bp, Homo sapiens
attccagctgcacgttttttcacactttagcatttttgaagtcaagatgtgtctcataatcagtggtgtcacaaatataattaacagcgtttttcttcttagatgtacataaagtaatagtatgccttatcatgaactacatctaggtttgatgaaactcaccgtatgtactttraagatatatatgagtgtaacaaatttttcatgtctaccacaatatctagcatatactaatggtcttgatatattctcaactggtatttcatgaatgaatgagtgggtgagttagtgagtgaaggagagaatgaatgaaatagtctacctgccctgcttttaggatgtcgatagtgtggtgtcaggaaaaatatcagttcatatacaacagttgtttaagctgtcatcatgatctcctagaatgataggccaaaacagcctgagtgttacattagccacaagcatccaattaactttcattatgttattttccgccaaattgatgctaattctgtttccatgctgtgcactttccgtagtcttcatgataatttcagaacctgttttacaa

SEQ ID NO: 214593 - DNA, 507 bp, Homo sapiens
aagatcgttgtgaagcagttatctggaggaggaaagggcaacagcctatgcaaaggtcctgaggcatgatcatgactggtgattcaacaagcaggaaggaaacccagcatgactggagtgatgcaagcaaatggggaagtaatagacagatgagagagattaccagaggaggtcatcatgttgggccttaaagactgggccgggtgcagtggctcacacctgcaatcctagcacgttgggaggctgaggcaggcagatcagtggcgctcaggagttcaagactagcctgaccaacataatgaaaccccatctctactaaaaatacaaaaaattagccaggagtggtggcaggctactcgggaggctgaggctagagaatcacttgaacccaggaggtggaggttgcagtgagcctagatcacaccmctgcactccagtgtgggtgacagagcaagactttgtcaaaaaaaaaaaaaaaaaaaaaaagactggagcttttccactgag

SEQ ID NO: 214594 - DNA, 613 bp, Homo sapiens
aagcttacaaaagtcaaagtatcacttatcatgatggatgtttgataggcccagataagcagacgtaggagctgtaatgaacactaaaatcaagccttgtrtgtgttcaccaataaacagcaaaggtgagggaattactcttatttaccctccttatccccatttcacagatgagttcttgctgtggctcagagaggctacaacagaacttgcccgcaacctcacaggtagcaagggtttaggaactgattctggaaactgggtattcagagtcagtattcagggtgaatttcattgacccattgctgtcttctgcaacattctgggccactggctttaataataatgacccttatctgtgcagccacgagcagacctggcctagggctcacctgtgttctccaatggctgagttagttgattaacacaaagaggcaatgagagcaaccctgactttgaggaattcctaaagggaagctaagcgtgtcttcccaagtgtattacctggtctcagaagtttatagccacaccacataaactggtgcagtgagacatttggctgttctcttggaagagacatcaagagtcatttagaactcctgcatgcaggttt

SEQ ID NO: 214595 - DNA, 613 bp, Homo sapiens
aagcttacaaaagtcaaagtatcacttatcatgatggatgtttgataggcccagataagcagacgtaggagctgtaatgaacactaaaatcaagccttgtatgtgttcaccaataaacagcaaaggtgagggaattactcttatttaccctccttatccccatttcacagatgagttctygctgtggctcagagaggctacaacagaacttgcccgcaacctcacaggtagcaagggtttaggaactgattctggaaactgggtattcagagtcagtattcagggtgaatttcattgacccattgctgtcttctgcaacattctgggccactggctttaataataatgacccttatctgtgcagccacgagcagacctggcctagggctcacctgtgttctccaatggctgagttagttgattaacacaaagaggcaatgagagcaaccctgactttgaggaattcctaaagggaagctaagcgtgtcttcccaagtgtattacctggtctcagaagtttatagccacaccacataaactggtgcagtgagacatttggctgttctcttggaagagacatcaagagtcatttagaactcctgcatgcaggttt

SEQ ID NO: 214596 - DNA, 613 bp, Homo sapiens
aagcttacaaaagtcaaagtatcacttatcatgatggatgtttgataggcccagataagcagacgtaggagctgtaatgaacactaaaatcaagccttgtatgtgttcaccaataaacagcaaaggtgagggaattactcttatttaccctccttatccccatttcacagatgagttcttgctgtggctcagagaggctacaacagaacttgcccgcaacctcacaggtagcaagggtttaggaactgattctggaamctgggtattcagagtcagtattcagggtgaatttcattgacccattgctgtcttctgcaacattctgggccactggctttaataataatgacccttatctgtgcagccacgagcagacctggcctagggctcacctgtgttctccaatggctgagttagttgattaacacaaagaggcaatgagagcaaccctgactttgaggaattcctaaagggaagctaagcgtgtcttcccaagtgtattacctggtctcagaagtttatagccacaccacataaactggtgcagtgagacatttggctgttctcttggaagagacatcaagagtcatttagaactcctgcatgcaggttt

SEQ ID NO: 214597 - DNA, 598 bp, Homo sapiens
ttaccttctttgatacctgtgtagtcaccagtcaggccctgggagccacatcttctgtatcacctaacacatggaccattagcacaatctgtccatcttcctctacttttccttagacatgttccttcctctctatcctcatggcctcagaattctgggcctcatcatttttcctaccctattgcaaaagcctcctaattaattctccaacattgcttctgcatttctcygatatagtctcttctgccagagtatgagttctaaattgcacatggagtcatagcgttcttctgcacaatttcccccctgcttcctgactatccaaaatggttgccctcctttccatgtcattcaagcccccgtgggatcttgcttttcttgatctcatccctggcagttgaccttcacccctcatattttggctaatagaaatgttcctgaaatttcctgtgcacactaaactctcttcttatctctgagcctctacacaatgtttttccctctgtcacaagttcttttccctctgtatcaacttgaactcctgctcactcttcaaggtctagcacccattccactaggacccttccctgaggcccag

SEQ ID NO: 214598 - DNA, 598 bp, Homo sapiens
ttaccttctttgatacctgtgtagtcaccagtcaggccctgggagccacatcttctgtatcacctaacacatggaccattagcacaatctgtccatcttcctctacttttccttagacatgttccttcctctctatcctcatggcctcagaattctgggcctcatcatttttcctaccctattgcaaaagcctcctaattaattctccaacattgcttctgcatttctccgatatagtctcttctgccagagtatgagttctaaattgcacatggagtcatagcgttcttctgcacaatttcccccctgcttcctgaytatccaaaatggttgccctcctttccatgtcattcaagcccccgtgggatcttgcttttcttgatctcatccctggcagttgaccttcacccctcatattttggctaatagaaatgttcctgaaatttcctgtgcacactaaactctcttcttatctctgagcctctacacaatgtttttccctctgtcacaagttcttttccctctgtatcaacttgaactcctgctcactcttcaaggtctagcacccattccactaggacccttccctgaggcccag

SEQ ID NO: 214599 - DNA, 645 bp, Homo sapiens
agactgctcagtctccctatggccaaatgaaagtctgaccagggtagatttggcgtctgcataaacctccctggaggaagatgctaagccacttccctacccatccaggcattgcctccttggcttggagccctactcttgcagggagtattcatccagaatctgggaccccagcaacatctccaggaaggaggccaattgagaccactaaacaaaaacattacaagggggagcagagagggaagccagaacagagaaagaaaatctgccatctccttccgcaaaagccctcagtgaatgcagtggcagggctcagcaccgtggtctccccgtctaagctccatgctcttcctcatttttcttaattacatacagacaggctttttgaagcctctctgatctgttgccacggttacttctgatgaatgcattctgtttaaagggctaaggaaattcagtccttttaaaggatgggagaagygttgagctgtgattttctgtttgggtgaggagggagtgtggttggtcatgagttttgaagatgggtctccgatgtcctccaggatgtgcctgagaggttggcttagcctgcatggagcacggttgtcactggagttaaacaggatccttctagacccacagggc

SEQ ID NO: 214600 - DNA, 512 bp, Homo sapiens
tgtgctgtgctgtgtatgtgggtttatgaaaagttcaccgatgtctaccctgagaagctgaaggtctgcaaaggagacaggcacctgcacaacagccacacaaaccactgactgacaaagctagtggagatctatccccctgagcctggagatggccaggcattgtgctaygggaacttggagggaacactgccctctttatgggagaatcaaatggcataacataggttaaagcattctgtgatccttagtgtacttcatatgcataagggactgcctgatatagttatctgggagtccctttccatctattcactttctagaagggaaacagggaccaagtgcacacctgtacaattaaaaaaaaaaaaagactttgtgcagaacacttgacctgaaggccttgtgaagcaggaaaaacatctccttgcctagggcccctgagacccaagcagacctcctgtataggttctcccaggcctttaggtaggggcccttgtgccaagccctgc

SEQ ID NO: 214601 - DNA, 512 bp, Homo sapiens
tgtgctgtgctgtgtatgtgggtttatgaaaagttcaccgatgtctaccctgagaagctgaaggtctgcaaaggagacaggcacctgcacaacagccacacaaaccactgactgacaaagctagtggagatctatccccctgagcctggagatggccaggcattgtgctacgggaacttggagggaacactgccctctttatgggagaatcaaatggcataacataggttaaagcattctgtgatccttagtgtacttcatatgcataagggactgcctgrtatagttatctgggagtccctttccatctattcactttctagaagggaaacagggaccaagtgcacacctgtacaattaaaaaaaaaaaaagactttgtgcagaacacttgacctgaaggccttgtgaagcaggaaaaacatctccttgcctagggcccctgagacccaagcagacctcctgtataggttctcccaggcctttaggtaggggcccttgtgccaagccctgc

SEQ ID NO: 214602 - DNA, 573 bp, Homo sapiens
gtagaatttgtcccaatgttctaaactgactgagacagactttacaagaatcctacctgctctgattacaaagaaggaaatgtgtatgcctacttgctcacaagtgcatgtgcacacacacacacttctgtgtgtttgagaggaagcaggcaaccacacataatgtcgttcagagaaagacacatggatgaagagacaaggacagagacatcccagggcagcctatacatacmcacaaccccttggttggccaatagcagcaaatattgtactgaggcagaagtcatggtacgtagttttcatgggcaaatatggttgggcagatgtggaaacatttcttagcatttgttcacaccaattgctcagaaaccaggccatggagggctctactccacagtgctttcatctgcagacctcccagcctctgcagaattcactgatactgcatgaggacaccatcgatagacttgttaggctgccatttttggcaaagacacacacacatgttctcctcctacctagacgctgggaaagtcaaatctacttcagtcatcacttcacctcatcaaaaac

SEQ ID NO: 214603 - DNA, 609 bp, Homo sapiens
gaccctcttacaatcacccctgactcccctgaattcttctgaacccttttagcaacatttgcatcacccattttacaaaatcatatgtaacatcttttgcaattttatacatctatatgtagtctccctaaggccttatattcaccagggtacctcgcatgcctgcccttaatagatgcttagtgatactagaatccttgcttttgactgatgtttgcatctctcactgtggaatttgttcttgcaagctgtgcctcataaaatatgacactttgcttaaaatatggcaggtwggccaatattatatgctgagactcaaagggattcaacttaaaccaatctcccaaaaacatcattgtctttgattgcccttaagaaaagaattcagtgtttcatcatgtgtaaatttgaacatccaaaagtaggcctcttgaaaaagccatgtgtgttcatcacatggcagaattggactgttacactgaggtgacagtgcagcaatatttgtcaacaaatataacaaatactgtctcagtaaccaagatgtaatgctgtaaggagaggatgcagaaaaatctaatataagtggtctctgcaaatcaatggatcaag

SEQ ID NO: 214604 - DNA, 599 bp, Homo sapiens
catgtcggcagcttattaggttgtgcccacccagattgagggtgggtctgcctttctcagtccactgactcaaatgttaatctcctttggcaacaccctcacagacacacccaggatcratactttgcatccttcaatccaatcaaattgacactcaatgttaaccatcacacaaggcttttaggaaaaacaggtatagtagtagaatgcttcagaatatcagacaaaattggatgcaatttgtgagattgtaggccaaattcaatggttcagttggaacgtctgactttgagactatctggatgtgcaaaaccaaaagatacgtcagagaaaagaaatgattaatgcaatagtgctcttagcaattttaattataatggaaaactgtctgctggagcagataactggcagaaattctagcctgcagatatttgtttgctatggaagagtggtaacttttgaagttggaaggctgggaatccaagcggggtacttgcaaatgagacagggtcccagttgtcagtatactctaatcaatgaattggtgacattgggctgttgagtaatatcatgaggctcctacttctcttgcctggacc

SEQ ID NO: 214605 - DNA, 599 bp, Homo sapiens
catgtcggcagcttattaggttgtgcccacccagattgagggtgggtctgcctttctcagtccactgactcaaatgttaatctcctttggcaacaccctcacagacacacccaggatcgatactttgcatccttcaatccaatcaaattgacactcaatgttaaccatcacacaaggcttttaggaaaaacaggtatagtagtagaatgcttcagaatatcagacaaaattggatgcaatttgtgagattgtaggccaaattcaatggttcagttggaacgtctgackttgagactatctggatgtgcaaaaccaaaagatacgtcagagaaaagaaatgattaatgcaatagtgctcttagcaattttaattataatggaaaactgtctgctggagcagataactggcagaaattctagcctgcagatatttgtttgctatggaagagtggtaacttttgaagttggaaggctgggaatccaagcggggtacttgcaaatgagacagggtcccagttgtcagtatactctaatcaatgaattggtgacattgggctgttgagtaatatcatgaggctcctacttctcttgcctggacc

SEQ ID NO: 214606 - DNA, 451 bp, Homo sapiens
ctttatgaagacccctggtttgctaccaaggaaaaagtagctcgtccttaaccatcgtattttctctcttagctttggctatctggaagctaagagccaaatttatggcacagtagtaagcatgaagtatctaatatcacaaatttyataataagttttaattctgacattatttcccctctttaattttttttcacctgtttccttcacttactttaattctcatcttgcatttcatattttacacctgaggtttcttgaattatttttggaccaatgaaggaaataagtaaatttttattatacaaatgactgagatttataaattcataaccacttgaaatccaccaaatataattttattgtacaaattttatattttgacctcctatacaaaacctacactatacaaatttaacatttaacattacataatttttattgtacaaat

SEQ ID NO: 214607 - DNA, 471 bp, Homo sapiens
tgttctatgtgctaggaatactttctaacacagtaggttttcataaatatttgttgaatgattgaataaatgactagctacagagaagagtgcctgctaccccttgttggataaacaaacaagcaaacagctcctggtgtggattttttgaggagtcaggactctacacccacctgttggctatggatttgcaggaaagttgctctggtgagccaagtagctcccagattctgcagtggagcaaactttcttgctacacacgttgggagacctgttgctagagagggactggatttttctgctcattggatgtcagctcaaaagaggagatgctactctgcttgtcaacaatttgatcttcackattccttagaacaattttgtgttctaaggaatcacaaaattatgaaccaacaaataaaaaaacacaacttacttaagagcattcagtgacctaatggaggaaagcca

SEQ ID NO: 214608 - DNA, 473 bp, Homo sapiens
tgttctatgtgctaggaatactttctaacacagtaggttttcataaatatttgttgaatgattgaataaatgactagctacagagaagagtgcctgctaccccttgttggataaacaaacaagcaaacagctcctggtgtggattttttgaggagtcaggactctacacccacctgttggctatggatttgcaggaaagttgctctggtgagccaagtagctcccagattctgcagtggagcaaactttcttgctacacacgttgggagacctgttgctagagagggactggatttttctgctcattggatgtcagctcaaaagaggagatgctactctgcttgtcaacaatttgatcttcacgattccttagaacaattttgtgttytaaggaatcacaaaattatgaaccaacaaataaaaaaacacaacttacttaagagcattcagtgacctaatggaggaaagccaag

SEQ ID NO: 214609 - DNA, 533 bp, Homo sapiens
gtccaaagaccttactgggcttctcagtagtttcgagctgaagggtgattccactttcactggatttctgcctttgttgcagtaaaagaaaagacgctcctcagtcttccccttcgcatgtcattaacctatatagcagctgcctgaaaagcattagatatgatagggctctctttggatttatcggctgggaaattagctgatcctgcctcatattgattctcacctgccacccctcagttgacctcaggtacaaattgcacttgtccggagattaaccctaaaattatctgcccatgtttcagtggggaggacaagcctcgattctatcccgtaatagagttctgccagcccaatcctgttttcttggtgggaattctcaggactcgcgtatgctactgttagcattttatgagctctgaaggtttcagacaggtaggraaccacactttatcaattcagcaaggaagggtttataatgtgtggtataggcattatcatattgtgtcacttgagccaattcataagtatag

SEQ ID NO: 214610 - DNA, 412 bp, Homo sapiens
gaattcatttggcccactgcccagatagagccaacttatcaagacagaggattgcaacagaggaagaatttaattcacacagagccggctgaattggaggctggagttttattactcaaatcagtctccatgaaaatttggaagctagggttttcaargggtagtttggcaggctagggaatggatgctgctgattggttggggtgcaatcataggagtgtggaaaatggtcctcttgtgggctcagtcttcttctgggtggaaccatctgtcatcagaaatgcaaaaatctgaaaagacacctcacaaggccaatcttagcttctacaagtgtgatgttatttgcaggagtaattggggaacttgcaaatcctgtgacctctagaataatggctggatatcatttatgtct

SEQ ID NO: 214611 - DNA, 412 bp, Homo sapiens
gaattcatttggcccactgcccagatagagccaacttatcaagacagaggattgcaacagaggaagaatttaattcacacagagccggctgaattggaggctggagttttattactcaaatcagtctccatgaaaatttggaagctagggttttcaaagggtagtttggcaggctagggaatggatgytgctgattggttggggtgcaatcataggagtgtggaaaatggtcctcttgtgggctcagtcttcttctgggtggaaccatctgtcatcagaaatgcaaaaatctgaaaagacacctcacaaggccaatcttagcttctacaagtgtgatgttatttgcaggagtaattggggaacttgcaaatcctgtgacctctagaataatggctggatatcatttatgtct

SEQ ID NO: 214612 - DNA, 412 bp, Homo sapiens
gaattcatttggcccactgcccagatagagccaacttatcaagacagaggattgcaacagaggaagaatttaattcacacagagccggctgaattggaggctggagttttattactcaaatcagtctccatgaaaatttggaagctagggttttcaaagggtagtttggcaggctagggaatggatgctgctgattkgttggggtgcaatcataggagtgtggaaaatggtcctcttgtgggctcagtcttcttctgggtggaaccatctgtcatcagaaatgcaaaaatctgaaaagacacctcacaaggccaatcttagcttctacaagtgtgatgttatttgcaggagtaattggggaacttgcaaatcctgtgacctctagaataatggctggatatcatttatgtct

SEQ ID NO: 214613 - DNA, 426 bp, Homo sapiens
cataatgttcagcatgcaaaccacagtgaatagtgtgtgtgtgatacagattgcttgataaagagcttacgtccctagttgctgtgattgcttttggcaggcagccttcagttgttaggctccttaagggtttgtctcagtaaaaagagttgscttgtctcaggccacatctccttactggagtagcctacacctcacccagtgactgattgacagaggggtataaaggcctgatttccttgcttcaagctgggaaatctctgcaaagccacaccgactccagagcttatggtggggtcaactggtgctttctttgggactatacggcagcttaatttctcctatccattcttactttctttccctcctttctgcaggtgttggttgtaaagttctccctaataagtgtgctacattataatctcc

SEQ ID NO: 214614 - DNA, 557 bp, Homo sapiens
aggaacttaaacaaactgacaagaaaaaacataagcaaccccattaaaaagtgggcaatgaaataggaggcaggactagattgcaactcccactcggacaggagagcagcgtgtggagacccacatcgtgaacttttgctccagaactattgtaggamtataccaggaaagctgagagaatccacagaccctctgatggaagcagattgctcctgcaggacccagaagacaccccccaaacactgtgagtgtccaagctgtgaaagtgggaaagggggatcattgcccctagacacacaccttcactggggaacctaaaggtctagaccttacctggagctgggtcaaattagagagcctagagaaatacaggagtagacgaagcagcaggaaaagccctctgggctccctaggtaccctgggaagctgtttctgccttgtctcacagagatctttggggagggctgccagaggaactgagaaaagaccacagggaaaaggaaacctccagctgaactttgtgataattccaactgaatgtgaagtctcttggccag

SEQ ID NO: 214615 - DNA, 557 bp, Homo sapiens
aggaacttaaacaaactgacaagaaaaaacataagcaaccccattaaaaagtgggcaatgaaataggaggcaggactagattgcaactcccactcggacaggagagcagcgtgtggagacccacatcgtgaacttttgctccagaactattgtaggaatataccaggaaagctgagagaatccacagaccctctgatggaagcagattgctcctgcaggacccagaagacaccccccaaacactgtgagtgtccaagctgtgaaagtgggaaagggggatcattgcccctrgacacacaccttcactggggaacctaaaggtctagaccttacctggagctgggtcaaattagagagcctagagaaatacaggagtagacgaagcagcaggaaaagccctctgggctccctaggtaccctgggaagctgtttctgccttgtctcacagagatctttggggagggctgccagaggaactgagaaaagaccacagggaaaaggaaacctccagctgaactttgtgataattccaactgaatgtgaagtctcttggccag

SEQ ID NO: 214616 - DNA, 311 bp, Homo sapiens
tgccttgaaagagttaacattaacatgacaatattcccaaattcacgtacagatttaatcactgtcaaaatcctagctgccttttttttatagaaactgaccatctgattctaaaattcatatggaaatataattacaatatccccaatataagcaaaacartgtttaaaaataacagttggaggactcacacttcctgatttcaaaacctattacagggctgtgcatggtggctcacgcctgtaatcccagcaccatggcaggctgaggcaggcagatcgcttgagaccaggagtttgagaccagtctgg

SEQ ID NO: 214617 - DNA, 512 bp, Homo sapiens
attatttaattacttgtctgccttgcctgctagatgatcacttcataagagaagactctggtgtttttctcaatgcttaatttctattcctactttaacacatttatgcatagtgctcttcatataacagtgaaaagaatgtttgcactctaatagattttacattttctagttgaggtagagataatgaacagataaatagttataaaatgtcaggggtaatgactattgaaaaggatgcaaggcacrcaggagggagtggagggtgctgggttagtctgtggctgggcctacagtgcttacacactcatttgcggccctgtctgttataaatggctacagcgttcaggcatctgcctgctgactgcctacatggggttgtgtcaatacatgttggagataaatcaaacaactgtgcctcacgccgaagagtaactctatgattacttagtataagaaacttatcgacatttctccttatgtggaattagagaaagtgaagttctgatgtt

SEQ ID NO: 214618 - DNA, 512 bp, Homo sapiens
attatttaattacttgtctgccttgcctgctagatgatcacttcataagagaagactctggtgtttttctcaatgcttaatttctattcctactttaacacatttatgcatagtgctcttcatataacagtgaaaagaatgtttgcactctaatagattttacattttctagttgaggtagagataatgaacagataaatagttataaaatgtcaggggtaatgactattgaaaaggatgcaaggcacacaggagggagtggagggtgctgggttagtctgtggctgggcctacagtgcttacacactcatttgcggccctgtctgttataaatggctacagcgttcaggcatctgcctgctgactgcctacatggggttgtgtcaatacatgttggagataaatcaaacaactgtgcctcacgccsaagagtaactctatgattacttagtataagaaacttatcgacatttctccttatgtggaattagagaaagtgaagttctgatgtt

SEQ ID NO: 214619 - DNA, 596 bp, Homo sapiens
acaaactaaaaagctaggtcccactgtgttcagaagctccttatatatatgggagcatatgtcatttatcatagcataggaatctrcacagagtatgaactacagtaaataccttccccacaaaaagtaataagcagatttatctaggttcatattcatatgctagttacctgatagccaatatgctggattatgttctttatttgaaatgtgccattgaaggagaatagaaacaaaattacccaggtgttttgggagatcttcagtgaactattaataaatagataatattatccttagttcactagtaattaaggctacattattaaagatgatcgtttcatccaatgaccaggtttctagtcagcaaactttgaattgagcaatcgaattccatcatcctaggctgctgagaactattattgtttggaaacgatagtacttggaggataacacagacagagagagtcttgggctggagttacctcatgggtgactttgcatgagaagttatgtatgctgcagaacagagagatccgtggaactaggtctaatgtagttataatgaaactctttaaataagagagtggagagaa

SEQ ID NO: 214620 - DNA, 581 bp, Homo sapiens
tctgtttccctcctgctcttcccccatcaaaatgaaataatgtgttccatttacacctaatttattcattgctttcatctttaaacaaacattattgagtgtttacttcagttactcaatgctctgtgggatattggagaagcagagacragaacattaaggtttcagttgtgttgcctatgacagaattacgaagccatgtgacaagcatccaagtagaggttctggttgttcttccatatgaacgactttgtactgaatgtttattatatttgcttttatttttaatatttaaagttaacatactgtaaaacggacttttctggtgtacagttccataaagtttaagacatatagagattcatataaccaccaccatagtcaggatatagatcagtcagtcaccccaaaagagctgcctcatgatgtattccactgtagtcaaaccctcccatctcccaacctctggcaaccactaatcattatagttttgtgttttcaggaatgctatataaatggaagtatacaatgtgtagtccattgtagatggcttctttgactgaacactacacctttaagat

SEQ ID NO: 214621 - DNA, 581 bp, Homo sapiens
tctgtttccctcctgctcttcccccatcaaaatgaaataatgtgttccatttacacctaatttattcattgctttcatctttaaacaaacattattgagtgtttacttcagttactcaatgctctgtgggatattggagaagcagagacgagaacattaaggtttcagttgtgttgcctatgacagaattacgaagccatgtgacaagcatccaagtagaggttctggttgttcttccatatgaacgactttgtaytgaatgtttattatatttgcttttatttttaatatttaaagttaacatactgtaaaacggacttttctggtgtacagttccataaagtttaagacatatagagattcatataaccaccaccatagtcaggatatagatcagtcagtcaccccaaaagagctgcctcatgatgtattccactgtagtcaaaccctcccatctcccaacctctggcaaccactaatcattatagttttgtgttttcaggaatgctatataaatggaagtatacaatgtgtagtccattgtagatggcttctttgactgaacactacacctttaagat

SEQ ID NO: 214622 - DNA, 594 bp, Homo sapiens
tctttgtgagtaaaatatttatttaaaaatggactccccacccagaaaacaaagcaaaacaaaaaacctaaatatttttggaccgaccattataactgcaatgttattaatggatttactgcattcaggaaggaaaaagagacatttcaacttttactccagtactagaataagaactgacattatcctctgacatatcaacaaagaaacctagatgttcgttttgagcgttccaaacaaataatccaaataatccaattattttggattactttgctgaagtggtaatgaagtgtgaggtgcgtttcatttgtaggagggcttcaatttaattataccaattccactgagttttgctggtctctcataacaccctgaaacacttccatgaaatgaaaagagtacattttaaaaggcataaaaagaaagtactcgttgatgctacatttaattaatccctagaacacatcacattttgtgtcagaaaatgaarttctatacatgattcaccaagttccaaagttatagctcaggtatttgactgaaatagaaatacttttcatcttgggccattataaaaattaagaaaaaaga

SEQ ID NO: 214623 - DNA, 489 bp, Homo sapiens
agcaatatctgttttcacttcatcattgcttcatgaattttggctactgttttttttgatatttttatttataacacattctgaatctttgattttttttttctattggtttgtagatgaaatgtgttcaatatttaaagattatgtgtagtctattttggttaaaatgctgttttaaagttacacatagacactcaaatatcactaattaattygttaaagtgcttagagttactagaggtttagcaactataccagtagttagaagcctagtttcagtgttcttcatggttggtatgaaagaccacaagtgttttcttctgtgaaatgacatttttaaaatacgcaaatcataacacttcatccacgcccttttttagcaacgaaagtgaatttatcggttgcaaataagaacaggaaaatacaactgtttgtgattgcaaatcctggggaagatttttagcattttaaataacaattaagtttaag

SEQ ID NO: 214624 - DNA, 489 bp, Homo sapiens
agcaatatctgttttcacttcatcattgcttcatgaattttggctactgttttttttgatatttttatttataacacattctgaatctttgattttttttttctattggtttgtagatgaaatgtgttcaatatttaaagattatgtgtagtctattttggttaaaatgctgttttaaagttacacatagacactcaaatatcactaattaatttgttaaagtgcttagagttactagaggkttagcaactataccagtagttagaagcctagtttcagtgttcttcatggttggtatgaaagaccacaagtgttttcttctgtgaaatgacatttttaaaatacgcaaatcataacacttcatccacgcccttttttagcaacgaaagtgaatttatcggttgcaaataagaacaggaaaatacaactgtttgtgattgcaaatcctggggaagatttttagcattttaaataacaattaagtttaag

SEQ ID NO: 214625 - DNA, 603 bp, Homo sapiens
aactgtttgtgattgcaaatcctggggaagatttttagcattttaaataacaattaagtttaagagatccctctgatacatagaaactgaaagctgaagcagaaaatgtctgtcttcctgaacacatgagatctaaatccattttgatggcttaagagtatcattgtcctcttatgtctcattggttcaagcccaactgctccttgctccactaagtatagtgatgaatggtcctccctccaactgacagtaaaagaattctccatgctgtgagaattccatttagtaccattgattgcaggctatggtattaaaagtaactcatgttagtgttttgtgatagaatctttaatcatttttaataacaaggaaaccttcattacatggatttacttcttaaagtggaaatgattttggcctgatgtgatgaaagacagggcttgagtttttacttgttcccattccaacagttcttaatttttcttcatctcaacagttggaatttgcagaattcttctatgagaatgcatgttacctctatgtctratttccatttgtttctatttcctgtggtacttacttctcctttgccttttattagga

SEQ ID NO: 214626 - DNA, 469 bp, Homo sapiens
attcctcaattcttatagttaggaggcccttcatcaacttctttttatttctttctattgcaatttagatacaaccactttcatccctatcctcagagaagaaaaaaggatgattcatsagccatgataatccctaccaaataccaccaacattatagaaaatatcaacttcttaaggtttcacttggtcctagcccaaatccaatagtacagatacttatctcatttgagaataaagaaattgacttagaaaagttaagtctaaaggcatgcctaaagtgacactggtctataaaggacagaatttgttcttgaatcctggtctttgtctcttcatccgattatcttcccactctctgaggcttcttatcaatactcttctatgggctttaattttctgttattttcttctgagtttggatgagaaaatattttctttatccacgaagtatatattttacattttgag

SEQ ID NO: 214627 - DNA, 506 bp, Homo sapiens
catttttagcttaaaaacctctgtgtgtgtgtgtgtgttcccagtaagaagaaggtggttgtttaattcatctttaaaaattaggcttctttcacacagcatgttaattggatattcgagacgtaagtgctgtggctcccgtaacaacagttccctttccacttagatgccagtgctccttgtggttctgccctttctctgggagactgtatctctgatctgtgtcttcagcccagaattttcttctaaaaattgaagactcatacccaaatatcttagttgacatttttaccttaatgtctcatagtaacctcaaactacatgctagaaactggactcattaactttatttccttgacttttctaccccaccatccagtgagcctattccmttcacagctgtacacatgaaactaccatccattcatttgtcctgttcctggcctctggggttccctcagtcgcttctacttctatacacctgtgttagtccatttttgcattgc

SEQ ID NO: 214628 - DNA, 555 bp, Homo sapiens
agaagagtgggcctacccttgcgcagcagctgcctgtgtaatgcttgggactacgggactagtggactgacggcccaactaacgaggccagatactgactggctgtttctgagcccaacagagttggagagcgacagcgagagagagaaagwgtgtgtgtgtgtgtgtgtgtgtgtgcacgcatgtgtgcatgtgtctgtgcatgtttgtatgtatacaaatgcatttttttttttttgagacagagtctcactctgtcacctaggctggagtgcaagggcacgatctcggctcactgcaacctccgcctcccaggttcaagtgattctcctgcctcagcctcccgagtagctggaattacaggcacacgccaccacccccaactaatatttgtatttttagtagatatggggttttgccatgttggccaagctggtctccaacttctgacctcaggtgatctgcccgcctcagcctcccaaagtgctggaattacaggcgtaagccaccacgcccagcctacaaatgcatttttataattagttaccaatactt

SEQ ID NO: 214629 - DNA, 575 bp, Homo sapiens
aatgcaattcaagtgtagaggttggaacgaacctttgttctgcagccttccagctgcagcatgggcaaacctcggygtacactgggcacggcaggtatcaatgcacacaccctgccctccccatgcagtcaccgtgagagcctgagcaggtgacaggcacaaacagctgctctgtagactgtcacagacaggcaaaccttccaggctcactttggttttttgcttctgtgtctattttcttaaattgaaatgattttttcctccaaggcatagcagattggcaagcatccaactaggcactttcagagggcctgatcgtggccagtggtgatcagatgaggctaactgtgtgattaattgcttacaaagcttcccgtcccatgcccatcgcagctccgggaactcatggggcagttccttaggcccccagatgtgtaacttggaaagagtcagagcccaagtgagtcaatatcagtttctggttcaagtcactgacgttgcaaaaagaagaatgatttcccaaagcatcttatttcatgtatgtggaactctgctaggcactgccaaagaaagat

SEQ ID NO: 214630 - DNA, 597 bp, Homo sapiens
atgattcctctcactgtatatcagaaataaattattttattggaggttattgaatgagtactctacttttctttccatattttaaggcctgttttgctctggctttacttgggggcagctgtaaactacattacagatttcgaaaaccagtggattaaatcaccaatgattgctcaacagggaagcctctmcccactctctcagggtactcctatatggtgactaccagcacatggagcaaagtattggatttgcttctgttgactgctgtgtttccaacatcattattttatgaaactgatgatttgtatcaccactatgaaatgctggcataaaactctaaactctgttgagcctacattacatcttattgcatataacagagggattggcactgtgacggaggaccatggcaggaatcaaaactcgtgtgtttcaagatgttcttccagtgactatgtgaaactaacagttccaaagtcttactatcggtaagtgaacttctgttaaatttggagcgcatgtccctatctttaaaattattctgaaaaaaaaaaaaaaaaagaaaagaaatgatgtgattgtgttttacctaag

SEQ ID NO: 214631 - DNA, 597 bp, Homo sapiens
atgattcctctcactgtatatcagaaataaattattttattggaggttattgaatgagtactctacttttctttccatattttaaggcctgttttgctctggctttacttgggggcagctgtaaactacattacagatttcgaaaaccagtggattaaatcaccaatgattgctcaacagggaagcctctccccactctctcagggtactcctatatggtgactaccagcacatggagcaaagtattggatttgcttctgttgactgctgtgtttccaacatcattattttatgaaactgatgatttgtatcaccactatgaaatgctggcataaaactytaaactctgttgagcctacattacatcttattgcatataacagagggattggcactgtgacggaggaccatggcaggaatcaaaactcgtgtgtttcaagatgttcttccagtgactatgtgaaactaacagttccaaagtcttactatcggtaagtgaacttctgttaaatttggagcgcatgtccctatctttaaaattattctgaaaaaaaaaaaaaaaaagaaaagaaatgatgtgattgtgttttacctaag

SEQ ID NO: 214632 - DNA, 565 bp, Homo sapiens
ggagggaataatactgttatattttctaaaagctttacattcctcaaatgaagtgagaaattagataactaaatcattgtttccaggagcttcagatacatcttacatggagaagtaacgaagagaacatactgaaaactatctctatgtcagacactctctgtgtgccatttactgaaaaccctgactcaccatcagctcaatttaggctaataccaaaaattgaccttgacctaggctttctgtcataagaaaatgccaaacactccttcacttcagagcatttaagaatgttgcttctttttgtgtttggaaatggcttttgacagcaaagtcaaaagaacagctataagcactatttgtacatagagactgtcttctgattggtggctaatgtacttagagactaccttttttattttatcagttctcagtgctgaacrcagtacaaatggtaatagtacactaatttctgactctatagtttaggattatctccctgaatttgttttctagaaccccatagctatgcctcattgattacttttctccctaagattcagtc

SEQ ID NO: 214633 - DNA, 552 bp, Homo sapiens
taattggtatgagatactttaaagataatctatgaatgttttttaaaacaatagcaaaaagtaacctattcactgatattgagaatacttgatcctcttttttacctgtagggcttatttacctagtttgttcacttagtttatttcttacttagtttattgctaatattttatgatttgagatgcttattaaagtgttacatgcagtatggtgtttcaaaatttattttaaattgaaattaattttgtttccagctgtttcaggtgaataaatttgtactacttttaaatttcattgaagatgttttggagcattacaaaactatgcctaaaaatcattgcattagaattctggrcaatgatattctgattagataatatgaaggtgtaagatgaaaaatacatttcacaaactttctaatttttgtaagatgtaatggtttacatcttacaagataaatatttgtaatatatataaatattatatatagtggaatatatatattccatgtatgtttgtgtacacacacattttatataaagaaatagaaa

SEQ ID NO: 214634 - DNA, 499 bp, Homo sapiens
ggggcactgttaaggattgttatataggtaaacatctttcatggggggctgttataaatattatttcatcagcctatattaagcctagtacccaacagttatcatttctgctcctcttccccctcccaccctccactctcaagtagaccccagtgtttgttgtttctttctttgtgttcataagttcttattatttagctcccacttatagatgagaacatgtggtatttggttttctgttcctgtttgagtttgctaaggataatagsctccagctctgttcatgttactgcaaaagacatgatctcattcttttcttacggctgcatagcattccatggtgtatacgtactacatttttttaatccagtcagtcattgacaggtatttaggttgattccatgtctttgctattatgaatagtgctgcaatgaacattcttgtgtatgtgtctttatggtagaatgatttctattcctctggccatattcccactcaa

SEQ ID NO: 214635 - DNA, 550 bp, Homo sapiens
gaaatgattttatgttctaagaactaaatctgtaagattctaaatataaatctatagctatataaagacataattcatgtgaagaatattatcacactagtaggtttctcagactgtccttatatacataatctctgaagcatgcattttccccasgggaattgaatccttcttgtttccatgactaaaagtagcctcatagttataaagaacagtgaaaatgaggtaatgtacgtggaagtccaaactaaaaaacaaaatcagattgtgatctgatttccccaattctacattggggaaaaacttactgatttcaaattcgttaacaaatattgatttccctttatatttagtacaaaatcaaactaacctcgataagaatgcaagtgaatcaaaatgagtttcaaggggttgtggctagtacacgctttctacagctgatcaaactattgtttggaccatgatcccttcaactcagaaaaccctgacatatgcctgtagtgtgtttgccaaatatcatagtttactaacaggaaattcttctgctaat

SEQ ID NO: 214636 - DNA, 538 bp, Homo sapiens
gaaaagtggcagcattcctgagaggctttctttcgcatgcttagtttaggaaaatagaattctgtgatgctgtgagtggaaatacaaggccttggttggacccatcaaccatgaatcaaattacaggcaatatttcccacctttatgtgattgcctctttttaacactttttacttttttaaaatttcaaattaattttgaktcctaattggaagatacataatggttagcatgaaaagacaaataaaggtgcagccatctgttttggaaatgctggggaaagaaaatacacatatccatttgaaggtagatttttctcttaggtattgtgtgattggttgcaaatcacacttggaggtatcctttcagagagcatgttcctgggcacattcgcttcctgattgcagtaaaatcttttaaaatctctggcgggtaatttgctgctgtactgctgcttactacaacttgaggtagggagaaagagatcagtttaaaaggattaagaaaatgagtagtaattgtaggctgtctgttaaaa

SEQ ID NO: 214637 - DNA, 430 bp, Homo sapiens
aaggaaactgggcagactggtggccccagagatttcttcaacagtcccctgtcgcggattctccttccagtattcagcagtagcagacagtgagatttgtggctgagggccratccacaagccaactcttacctacctatgatttgagcagttagaatgcaagtctgaatcaaaggtctagcctgggttttctctcctttttacctttcagcctcagggacaattacttaaccatttagactcagctttttagagaccaagtggttagatatttgtcatcttcagtatatattgaagtatttgcattattgcattatcgaatttgtattatgatatattagagaataatatttactattaaagttttataatatataaatgaataatataatgaaaaaactaagattttttaatttttttgggaataaga

SEQ ID NO: 214638 - DNA, 430 bp, Homo sapiens
aaggaaactgggcagactggtggccccagagatttcttcaacagtcccctgtcgcggattctccttccagtattcagcagtagcagacagtgagatttgtggctgagggccaatccacaagccaactcttacctacctatgatttgagcagttagaatgcaagtctgaatcaaaggtctagcctgggttttctctcctttttacctttcagcctcagggacaattacttaaccatttagactcagctttttagagaccaagtggttagatatttgtcatcttcagtatatattgaagtatttgcattattgcattatcgaatttgtattatgatatattrgagaataatatttactattaaagttttataatatataaatgaataatataatgaaaaaactaagattttttaatttttttgggaataaga

SEQ ID NO: 214639 - DNA, 486 bp, Homo sapiens
aatgggtaaacaaagcctaagggtcatgttaattaatttaacaaaacamactattttcagtcctttgggcttgtacattttatagacaaaattagtatttattgatttggaagtgttcaattgagagtaaatgactctgtgttttgaaactaatacctttgcatttaaaatactgaagtattattttgttagttgaagtagatcttttcctgtgtagcatgatttaatgcagagcagttattcacttatacttctgaaaagccataatattgaaatttaaaatgaatagtcttactttaaggtcacttttactttacattttactttaaaggtcgtttttagactttatgcactagtggtattgaaactaacctttaatatttgactaaattgcttgtgaatttttggaaactatgtttaatttttaaagacattgttatgtgaattatcttactaaattatcacttaagaactctctcatagcag

SEQ ID NO: 214640 - DNA, 486 bp, Homo sapiens
aatgggtaaacaaagcctaagggtcatgttaattaatttaacaaaacacactattttcagtcctttgggcttgtacattttatagacaaaattagtatttattgatttggaagtgttcaattgagagtaaatgactctgtgttttgaaactaatacctttgcatttaaaatactgaagtattattttgttagttsaagtagatcttttcctgtgtagcatgatttaatgcagagcagttattcacttatacttctgaaaagccataatattgaaatttaaaatgaatagtcttactttaaggtcacttttactttacattttactttaaaggtcgtttttagactttatgcactagtggtattgaaactaacctttaatatttgactaaattgcttgtgaatttttggaaactatgtttaatttttaaagacattgttatgtgaattatcttactaaattatcacttaagaactctctcatagcag

SEQ ID NO: 214641 - DNA, 502 bp, Homo sapiens
cctcccaccaggtccctcccacaacacgtgggaattcaagatgagatttggatgggagcacagccaaagtatattagaggattttagacaagatctttgaaaaacttttttwaaaatagatttaggggctactgtgcagttttattacatgcagtagtgaagtagtggtgaagttggggcttttagtgtaacgatcacctgaatagtataccttgtgcccattaagtaatttttcatccctcatttccctcccaccctcccacctttctgagtctccaatgtgtattatttcctgaaaaacttatttgaattatataaaacatcaattggaaagttaggataagcttttccactcttttaatgagatgaaattcatataacataaaattaaccattttaaagtatgcaattaagtggcatttaataaaatcacaatgttgtgtgactatcatctttatcaagttctgagaaattttcatcaccctcagttttttttttaatg

SEQ ID NO: 214642 - DNA, 652 bp, Homo sapiens
ttggctgtgtaatatcataaagtgttcatgtcagagacataaaggatgaagagcaagcaaaaaaaatttcaaaaatattaacaaaaataacataatgataaaagtacacacacatacaacccacacaactcaagaacaagaaracataaatggtctaggaaagttacagctaaagagtaggattcagagggagaatagattttgagatggttagatatgggaactcttcatggaggaagttatgtttgaattgggttttcatggatcaggttatagaggcagaaaagaaagaaaggtcattgaaggcagcagcctctccatctgggaaactccattttgccttgagatggccacattctagttttcaggccctatgcagcatgaatgtgcttatgaaaaatggcaagagtatttctcttaaaagaacattaattttttgtggttggcaaaatatgcagaatttttcactttaattttcattgctgtgtactttgctctctattgcaagcttattaaaagcttaattgaaaatatcatctgtatctgagtggatcaaagctttgaaagtttttttgctagcaaagaaataatatcttccttctgataagcttatgttcatatggtctgttcctattcattcattcattattca

SEQ ID NO: 214643 - DNA, 652 bp, Homo sapiens
ttggctgtgtaatatcataaagtgttcatgtcagagacataaaggatgaagagcaagcaaaaaaaatttcaaaaatattaacaaaaataacataatgataaaagtacacacacatacaacccacacaactcaagaacaagaagacataaatggtctaggaaagttacagctaaagagtaggattcagagggagaatagattttgagatggttagatatgggaactcttcatggaggaagttatgtttgaattgggttttcatggatcaggttatagaggcagaaaagaaagaaaggtcattgaaggcagcagcctctccatctgggaaactccattttgccttgagatggccacattctagttttcaggccctatgcagcatgaatgtgcttatgaaaaatggcaagagtatttctcttaaaagaacattaattttttgtggttggcaaaatatgcagaatttttcactttaattttcattgctgtgtactttgctctctattgcaagcttattaaaagcttaattgaaaatatcatctgtatctgartggatcaaagctttgaaagtttttttgctagcaaagaaataatatcttccttctgataagcttatgttcatatggtctgttcctattcattcattcattattca

SEQ ID NO: 214644 - DNA, 605 bp, Homo sapiens
aattggtatagccagttttaatgaactttagggtaggcactaatccaatgtgactggtgttcttataagaaaaggaagagacatcagagatgaatgcacactgagaaaggaccctatgagaatacagcaagaaggcagccatgtacaaaccaaagagagagtcctcaggagaaaccaaatctgccaacacctcgatcttggactttcagcctccagaactgtgtgaaaataaatatctattatttaagccaccaagtttgtggtattttgttatgccagcctgagcaaactaatacrcaaggtttcaaagtttttcttctatgttttcttcaagaagctttatagtttttgcatatagatgtggaattttagcagtacaaattattaaagaggctgtctttttccattgaagtacttttgcaattttattaaagatcagttgactatatttgtatagcattattattcttttattatttagatgagtgcatgtgaattaatatttaaaacagtattacttccaaataaggcaacgattcatttagcttaatattaactacaaggctataaagtgatctgtatgactcattaaatcatttgatttt

SEQ ID NO: 214645 - DNA, 525 bp, Homo sapiens
acaataaaagacatctggggccgggcatggtggcttacgcctgtaatcccagcactctgggaggccgaggcaggcggatcacctgaggtcaggagttcgagaccagcctggccaacatggtgaaaccccgaccctattaaaaatacaaaaaattagccaggcatggtggcggacgcctgtaatcccagctacttgggaggctgaggcaggagaattgcttgaacctgggaggcggaggttgcagtgagctgagatcataccactgcactccagcctgggcaatgagagcaaagctccgtttcgctgggggcgggggtgggggggaagacatctgggaactgggaccagtgggttttatttatttagaccccaggtctagcatccctggagcctgggtcggatttgtgtgaatctgaacaccttggtgagaggtgagggagtaatgagtgrggcagatttcagaggagaagtaatggaggccagagatgaagcctgatcagagccgctcggtggtgggacgtcctc

SEQ ID NO: 214646 - DNA, 558 bp, Homo sapiens
tgttcatagtgagataggagacctgcaggacttgttttctggtcacaaccctactggccaaaacaggatctggcccagacaagatgaagtgaaaaaacaggcaggcatctaaagatggcaaggaaagcaatccctagctgcccccattgtccattagcataagacactcccaccagcgccacgacagtttataaatgccatggcaatgacctggatgttaccaaccccttccttggcaagggcctggaagttactgcccctttcctagaaagttctaaataacctgccccttaatttgcatgtaattgaaagtaggtataagtaagtataaatgcaactgccaagagaccatacgttgcctactctgggcccactgcctgtgagttagccctgttctgcaaggaacagtactgctcaataaatgactgctgtcactggctcacccttaaattctttcctgggtaaagccaagaatyctcctgggttaagccccaatttgggggctcacctgtcctgcatcaatagcagcactattcatagtaaaggaggaaacaaccc

SEQ ID NO: 214647 - DNA, 428 bp, Homo sapiens
tatctatgtggaacaaggcaaattatttaacattcttaaactccattttctttaaaaggattatgttatgatatgcagttgtgacctttaaataagataatgtatataaagtcccttacacagtattctgtacacagcacataataacaaattattagagattcttttaccttttccttctcctgaaattatacccgagttgaaaatttttttgacatctaatttaagatggaccatgattaagaagtacaaaccatttatccaagagaagattccttaaaatgattagtggacaatttactttagcatgatccatacatggtaatctaaggtttttgtttatatagttttrtaacacatgttcttaaataagttgaagatagaccagccaagcctgttaaaacagtatatataacattaaaagagaa

SEQ ID NO: 214648 - DNA, 495 bp, Homo sapiens
agaattccccgtattataagagaatagtaaatattgtcagatttttatatacatagcataattttttaaaaatttatttaaaaatctacaaacagtaaagttcacttttttaaaaaatatactttctatggattttcacaaatgtgtatagtcttgtgactgtcagagatgtgtgaactggaacaaatccatcttaaataggagctgggtaaaatgaggctgaaacctactgggctacattttcagacagttaaggcattctgagtcacaggatgagataggaggtcaccacaaaattcgggtcataaagaccttgctgataaaacaggttgcagttaaggagctggccaaaacccaccaaaaccaagatggcgacaagagtgacctttggtggtcctcactgctacactyccaccagcaccatgacagtttacaaatgccagggcaatgtcaagaagttaccctataaggtctaaaaagggaatgcatgaataa

SEQ ID NO: 214649 - DNA, 509 bp, Homo sapiens
ttttatatatacattatacagtggttaattttttctatttttgcttacataaatttattaattttgataaaaacaaatgtgtcatgaaataaaataagaattccaaaaaactaaaaacaaaactaaaaaggtctgaagagtttcatattaagatgaaatatctaattgtgctctctcaaaaaacacactaaaaatcccacacctacaaagaataaccaaaaaaagaacaacattttaaaagctggaaagcagaaagccaaatgttgactatcctggctgacctgcaaagacaaagtgtaagccagcagaggaaaaagttgaaaacaaacccacagaatcctcctaaggcctaggaggyggaagcatcaggtactgctggatgcaaatggagatgaatggcagtttgccaaaataaagaggattaggtaatgagtgaggggcaggtggattcctagattcccttctctctctgcacctctgggtaactgtccctctcctaccgcagcata

SEQ ID NO: 214650 - DNA, 538 bp, Homo sapiens
tgacctaaaattctgtttgtagaaataactttgcacatcttttactatggtatgatatgttatggtatgctatggtatggtatggtatggtatggtatatgtgtgttaaattttttaaaaacagtaactcacttaagcagaaggtttattaaaccctgactaattaaattatccaaacattaacagactgctatatggtactaatactggtttttgtaatattgttaagtcacttagtgtgatctttcaccagtgaataattgcatattttccatggaaagcattgtgataagagatatatactactattagaaaccattaactttaggaattatcagcagatgttttccatgcatggttggcttcatttggtttggtccccgcttagctgaatagttttaasctgactagaaagatatatagctaacgtttacatgacgtatttggaacttaatgaagcactacactaggcttccagttaatggaatttgtaccgttttaattttttggacagcttttttctctatttttaaggcag

SEQ ID NO: 214651 - DNA, 571 bp, Homo sapiens
gttattatttaggtgtgctggcccagtcagattagcatccaaaggactgagccctgaacaaagacttaagttaccttttaagcrtttcgtggggtagggggagatctgtgcagggggaagcatattacagaagtgagaaacaaagacagttattcaattaattaagacatgcattacatcatttcttacatttcaaaaacaaacatgttttacgacttgagtttatctgtctagtgaccttgcagctacacatctagagaaacagggtcttcacaatgcctaggaaagaaggagagataaggctcactagccacagaaaaataggcagttaatttttaaaggactccagctctttctttttctcagggggaattgggttttcttacatacagctgagtttctgcttacacattctttcatttctcttaattcctgttccaagatggtatcacattgtggttttgatttgcatttctctaatgaccagtgatgatgagctttttttcatatgtttgttggctgcataaatgtcttattttgagaagtgtctggtcatatcctttacccactt

SEQ ID NO: 214652 - DNA, 319 bp, Homo sapiens
ttataatattgtaaactataccagctatttgtttaaaatatacagagagaaaattacaaagaaaaagtaattaaaattccaccatggaaaagwaactaacatcatttagtgactgtatttacaaagagatagtcaatgttatttagtatctaatctttccgttttccaatggcttattatgtcaaaagtatcatgtattaaatgcatttatataggtctctatttctggatttattttgatttctggttgcatgtacagtattgttttgacttttgcaactttatgaattcatcacatggtgcttcatacaccagccag

SEQ ID NO: 214653 - DNA, 319 bp, Homo sapiens
ttataatattgtaaactataccagctatttgtttaaaatatacagagagaaaattacaaagaaaaagtaattaaaattccaccatggaaaagaaactaacatcatttagtgactgtatttacaaagagatagtcaatgttatttagtatctaatctttccgttttccartggcttattatgtcaaaagtatcatgtattaaatgcatttatataggtctctatttctggatttattttgatttctggttgcatgtacagtattgttttgacttttgcaactttatgaattcatcacatggtgcttcatacaccagccag

SEQ ID NO: 214654 - DNA, 598 bp, Homo sapiens
ctgtgttatttttagaatctgcctgctttggctacatgttacagacgcaaatcagagtggatttcatactagcatcaatggtttaaaaagtctccttaatgtgtgtaatgtgtgacaaaaattgagaaccactgaggtatgcagtgctgaatgaatataaagacrgacattaacataacctggaaggttttgtgtgaggatttccagagaaatccatgcttaagccaagacttgaatggtataggtaagaaaatgtagtaaaaagaggctagagagtgtgtccactgaaagctattgcagcaagtgaacaatgagaagtcaaaagctgctgtgaagctatgctgtattggcttccttctcttccagtgggacctggtatgtgattatcagtcactgaaatcagtggttcaattcctacttctgactggaatgctggtgggaggcatcataggtggccatgtctcagacaggtgagtgtctccagatcagggttatcattactctgcagtgtttttatcagcttacaattaatttttttcacaaagaagtgttattgagttacaatatgcaatttacactgttggtgctgctctgttcc

SEQ ID NO: 214655 - DNA, 572 bp, Homo sapiens
gcagtgctgctgcatcagagaacaggtgggtctaaatgctatctgtttcagataaagtgatgagaatgtgcaccagaatcactcccacagagagtcacaaaacaggcatttcccatgactctcaaccacattgcagccaagagacagactacagtatttttctgactaggagtcatgagccckgaaacaggggtgtgatagggaaacagatcatattcctgcctatctaagacagagcaggtgcagtccagtcaaacttccccccagagacttcaaggcactttaccaggagctcttcccaaccaccctcatcaggacaggtgtctttacttgacattaggatatttgtgcacaagccaggaaccccagctctgcccaactgtgtcccctcaaccccatggaacaggaagctcaggacaccaggcacaccactgttcagttcttcccttgaaataacagagagcacctcacagtaaacaaaaaacagactcatacccatctgcttgtgcagcagctggctcttacctgcaaacaccatctactggcctgtgggtcaaacttcaaagaccaat

SEQ ID NO: 214656 - DNA, 572 bp, Homo sapiens
gcagtgctgctgcatcagagaacaggtgggtctaaatgctatctgtttcagataaagtgatgagaatgtgcaccagaatcactcccacagagagtcacaaaacaggcatttcccatgactctcaaccacattgcagccaagagacagactacagtatttttctgactaggagtcatgagcccggaaayaggggtgtgatagggaaacagatcatattcctgcctatctaagacagagcaggtgcagtccagtcaaacttccccccagagacttcaaggcactttaccaggagctcttcccaaccaccctcatcaggacaggtgtctttacttgacattaggatatttgtgcacaagccaggaaccccagctctgcccaactgtgtcccctcaaccccatggaacaggaagctcaggacaccaggcacaccactgttcagttcttcccttgaaataacagagagcacctcacagtaaacaaaaaacagactcatacccatctgcttgtgcagcagctggctcttacctgcaaacaccatctactggcctgtgggtcaaacttcaaagaccaat

SEQ ID NO: 214657 - DNA, 572 bp, Homo sapiens
gcagtgctgctgcatcagagaacaggtgggtctaaatgctatctgtttcagataaagtgatgagaatgtgcaccagaatcactcccacagagagtcacaaaacaggcatttcccatgactctcaaccacattgcagccaagagacagactacagtatttttctgactaggagtcatgagcccggaaacaggggtgtgayagggaaacagatcatattcctgcctatctaagacagagcaggtgcagtccagtcaaacttccccccagagacttcaaggcactttaccaggagctcttcccaaccaccctcatcaggacaggtgtctttacttgacattaggatatttgtgcacaagccaggaaccccagctctgcccaactgtgtcccctcaaccccatggaacaggaagctcaggacaccaggcacaccactgttcagttcttcccttgaaataacagagagcacctcacagtaaacaaaaaacagactcatacccatctgcttgtgcagcagctggctcttacctgcaaacaccatctactggcctgtgggtcaaacttcaaagaccaat

SEQ ID NO: 214658 - DNA, 454 bp, Homo sapiens
agacctttttaaattagttacttggccgggggcggtggctagcacctgtaatcccagcactttgggaggctgagactggtggatcacctgaggccaggagtttgagaccagcctggccaagatggtgagaccccatctctactaaaaaaaaaaaatgcaaaaattagcagggcgtggtgttgcrtgcctgtagtcccagctactcgggaggctgaggcaggagaatcgcttgagccttggtggcagagattgcagtgagccgagatcacaccactgcactccagcctgggcaacagagtgagactccatctcaaaaaaacaaaaaagaaaattcacatttgctttataaatccaacaaaggcatcacacccaaagaggagagttatgggacatggacatgtctaagtcagtaacagctgttaatttccatggattatccctagatagctggaaa

SEQ ID NO: 214659 - DNA, 562 bp, Homo sapiens
gggactctgacaagagggaggtgccctgggtggaggtgcggctcccccttcagtgaggtggcatggcctcgtaacactttcaatactgrgctcacctcctgctgctgctgaggaggaggatgaagatgaggacaagatgaaggccctgtgggggctggggaggggccctgcagaaaccacatgtgagttggttgtccctcctgcctggctcccagcccgccagcccctcccctctgcaccccgagaggaaggcatggtggacacttgacatttgtgggaggcaagaagccacttccctgaaagtcacctgaagccttaaatgccccagctgaccctgggattttccaagtctggatccttccccttcatagtggaagctgggagctgtccctgggacccatctccccacggggacaggggccaggaaacggctgcttctgcccctgggagttgaaggtggcacctgaagcccttggaagtctgggttcccatggagagatcagggcctggtccccatcctgagcccccggcgtggacaggctggggcctggccaggccaagc

SEQ ID NO: 214660 - DNA, 630 bp, Homo sapiens
tgaataaccattagattagtgcaaacttcttaaaaggaaaaaggacttttttcagggtagtgaactgcaatcgaggaagataagtagtgagcttcagccagatttagggaaagggcaaaagaaaaaaaaatgaataaataaataaataaataaataaagggtagagtagggtgtaaaaataactcctgtggagatagattgaggaccagggtctgctttcagaaaactaaatgaaaatataatataaagaaacatttaaaaaaagtgggctgatcttggggaggtggtaggagcaggaataaatctgtgagtttttttatttttatttatttatttatttatttttgagacagtttcactctgccgcccaggctggagtgcagtggcatgatcttggctcactgcaacctccacctcctgggttcmagcgattctcctgcctcaacctcccaagtatctgggactacaagcatgtaccaccgcgcccagctaatttttgtatttttagtagagacgaggtttcaccatgttggccaggatgttctcgatctcttcaccttgtgatcctcccacctcggcttcccaaagtgctgggattgcaggcatgagttccggtgcctggccaagctt

SEQ ID NO: 214661 - DNA, 607 bp, Homo sapiens
aatgtctacagttatccccaaaatgccttctgttgcttttatttatttactttttgggcatggtaaaagtgaaagtggaccaggatctatctgaagctcttgaattgcatttggttgttattctgaaccatttagacagccataatcttttcacttggctttccagtgcctgctctctgcaaatgtatgcatrgtaagcatacactcttctaaggtaaaaggcatctctgactcaggctctggaggctgattgaagtctcttattttggttgcttgagagtctctgagagtttcctgggtccatggcacagaatgggataaggatccataggattacattcctgacctgaatttgaagaacaaacttgtatatattatgataaagatggaaggactatatccatgtcttgcaattttattcagaccttaagcttcaacccgaagctaagaaagaatgataataaggttggcaaatatctttgaactgacccagagagaaactagcacaaatattcgttgtccctggtgttatgtagactgatttggactcagaagtcaagaatgttactgaaatcaggaagttttcagtaaaggctctaccaaacct

SEQ ID NO: 214662 - DNA, 571 bp, Homo sapiens
agatgctagacaaaaacagtttcaactaaaatatgacttctttacttaatgagattacacaggcattaacagtgatgtcccatagtatatggaaatacataaaaatttaaggatatcaagttaagtgttaaaatataatgccacatggtatattcaggttaactttaaaaaggtgaaaaaaaaacctaaaaatcaggaaggtaattttaatagtgtttctatttatatattaattgtaattcttcttatataactgtatcacaggtttttaaatgtttaaattctttttctttattattttaaaattttgtatgattacatagttatggtatgataaaatgttaaaattcacttttcaaattacagcataacacttataatagtaatattagatgatatcatcttagcactcaccatcagctatgcatagttrtaagcaattttcatgaattaactcatttgattttatttacaaatggaatacagagggacaaaatgttaatagctcgcttcatatcacaaaactagtgaaaaacccaggattaaaatacaaatggtatactgccagagt

SEQ ID NO: 214663 - DNA, 634 bp, Homo sapiens
aacacctgtgttttctgaagttttctgtatgacacctgcgtacgtgtatttgttgagactttgttagccccttgtcagaaaggtaaatctgagcaatgtcaagaattgtaaagggtccaaaatttaccctattggaagttaatgtattagcttgccacagttttatggatgctgccagaggacatgagactcctgagtcagagacaatagactttgttattcacaacaaagagagcaacaggagcttcacgtttgagttcaccttgcctccaaaatctcatgggaacgacagagtgggacccaattratgattgtgcacagcatcacgttttggaaaccctgacttaagaaaactaaatgaattataatgtgtaggaaacaagcccatttcacctttgcctacaagggagtgattatttttattatactgtaagtatagtaagcaaactggccctctcctctggagggagacatgtctctattgtccaaggctaggctgtttgttactcaaacatctttgaaaagatagtcttaagaagaaaaaaaagaaagaaagaaaaagaaaggacagtgcttctgtttgcaaaacatgaagaaattcaagagacccaccaagaattatcgcccaggaagc

SEQ ID NO: 214664 - DNA, 585 bp, Homo sapiens
tgcaaaacatgaagaaattcaagagacccaccaagaattatcgcccaggaagcatttcattaatgtttcatgttgtgaggcaaatttgacatttctggttctaawgtaagaattagttactgtagattttctctagtattacaaatctggtggtttatcccttgactgggaataggaaaggtagttaggagcattattattaatattttattatcaagagaaacaagatgatctgaatatatttatattgcctcactaccacaggagtaacgttaatgcccaagcacttaaaacatgctcagaaattattaggtgaatgtgttccaagaaatatgacaacttggacaacctggaaagttatggcaaataatgttttcaatagaataccaataaatgttaatctgtttgatataatttgatgattagactacaaacagtacatgttaatggagaaaatgatggtagcaaaagtaataatatataataatttcatttaatatcttgaccttcttgtaaggagttcaagaaattcctaagcatcatattatttcattttattttaatcttgaacaatgcagctgtgat

SEQ ID NO: 214665 - DNA, 585 bp, Homo sapiens
tgcaaaacatgaagaaattcaagagacccaccaagaattatcgcccaggaagcatttcattaatgtttcatgttgtgaggcaaatttgacatttctggttctaatgtaagaattagttactgtagattttctctagtattacaaatctggtggtttatcccttgactgggaataggaaaggtagttaggagcattattattaatattttattatcaagagaaacaagatgatctgaatatatttatattgcctcactaccacaggagtaacgttaatgcccaagcacttaaaasatgctcagaaattattaggtgaatgtgttccaagaaatatgacaacttggacaacctggaaagttatggcaaataatgttttcaatagaataccaataaatgttaatctgtttgatataatttgatgattagactacaaacagtacatgttaatggagaaaatgatggtagcaaaagtaataatatataataatttcatttaatatcttgaccttcttgtaaggagttcaagaaattcctaagcatcatattatttcattttattttaatcttgaacaatgcagctgtgat

SEQ ID NO: 214666 - DNA, 585 bp, Homo sapiens
tgcaaaacatgaagaaattcaagagacccaccaagaattatcgcccaggaagcatttcattaatgtttcatgttgtgaggcaaatttgacatttctggttctaatgtaagaattagttactgtagattttctctagtattacaaatctggtggtttatcccttgactgggaataggaaaggtagttaggagcattattattaatattttattatcaagagaaacaagatgatctgaatatatttatattgcctcactaccacaggagtaacgttaatgcccaagcacttaaaacatgctcagaaattattaggtgaatgtgttccaagaaatatgacaacttggacaacctgraaagttatggcaaataatgttttcaatagaataccaataaatgttaatctgtttgatataatttgatgattagactacaaacagtacatgttaatggagaaaatgatggtagcaaaagtaataatatataataatttcatttaatatcttgaccttcttgtaaggagttcaagaaattcctaagcatcatattatttcattttattttaatcttgaacaatgcagctgtgat

SEQ ID NO: 214667 - DNA, 562 bp, Homo sapiens
tttgaaagtttagttacatgttagttacactagaacattctccctatacaaaggaagtactttgtttttaaagttctattatatttaagaaaaggaatttttatggtacagtctgttaacaagaacacataaaacaaaatgataagtctcaaataagatgagtgatattatatgaggaatgagaattttkctcataagtttttactgattagtgtggtgaatgcaatattcaatattatttttaatacggaggagaagagaaaacatgttttctccctcaatgttgccaaagaaaatcacagatatgaatattttgggagagttttactatataaatattatttagatttagtgtttttcattttaatttgaggcagtggttagttttttgcttttgtttttattgaggaggctatatgtttatttttaagtactgttttatatatttatgcatttagaacccttaatctggaaccaacattttattaaaagaacacatgtagttgaccctaaatcatattcagactcaaaccataaagaatttgaagatgccaaaaatgta

SEQ ID NO: 214668 - DNA, 535 bp, Homo sapiens
gcacccagtggctctttgctgccattgttcagcaagcaggagaaggtggcacccagtgggtttttctgtcctgttgttcggcgagcggcagagaatattaccactcttttattctcaccacctatagctcagcaagcaggaacattacagctcttttgctcctgcagttcaaggatttccagtttctygtccgtgaccaaaaggatcaaggtatgtgcacaccagaaagtgagtaagatatagtagaattgtattgagtcactgaaggaaagctctcggcaatgagagaggacccctaaacaggtagccatttgtgagtctgagtctggggtttttatgggcttagaatcggggaatgcatgctgatgggtccatggttggtcttgaaaaaaatatcatttgattagttaaaaggcatcattcagaaggaaccaatcaagactgagtgggtgagatggagatagaagttctcatgccagttgtggagtctatctggaactggcagcttggttttcaggctttaaactgtcctttg

SEQ ID NO: 214669 - DNA, 535 bp, Homo sapiens
gcacccagtggctctttgctgccattgttcagcaagcaggagaaggtggcacccagtgggtttttctgtcctgttgttcggcgagcggcagagaatattaccactcttttattctcaccacctatagctcagcaagcaggaacattacagctcttttgctcctgcagttcaaggatttccagtttcttrtccgtgaccaaaaggatcaaggtatgtgcacaccagaaagtgagtaagatatagtagaattgtattgagtcactgaaggaaagctctcggcaatgagagaggacccctaaacaggtagccatttgtgagtctgagtctggggtttttatgggcttagaatcggggaatgcatgctgatgggtccatggttggtcttgaaaaaaatatcatttgattagttaaaaggcatcattcagaaggaaccaatcaagactgagtgggtgagatggagatagaagttctcatgccagttgtggagtctatctggaactggcagcttggttttcaggctttaaactgtcctttg

SEQ ID NO: 214670 - DNA, 535 bp, Homo sapiens
gcacccagtggctctttgctgccattgttcagcaagcaggagaaggtggcacccagtgggtttttctgtcctgttgttcggcgagcggcagagaatattaccactcttttattctcaccacctatagctcagcaagcaggaacattacagctcttttgctcctgcagttcaaggatttccagtttcttgtccgtgaccaaaaggatcaaggtatgtgcacaccagaaagtgagtaagatatagtagaattgtattgagtcactgaagraaagctctcggcaatgagagaggacccctaaacaggtagccatttgtgagtctgagtctggggtttttatgggcttagaatcggggaatgcatgctgatgggtccatggttggtcttgaaaaaaatatcatttgattagttaaaaggcatcattcagaaggaaccaatcaagactgagtgggtgagatggagatagaagttctcatgccagttgtggagtctatctggaactggcagcttggttttcaggctttaaactgtcctttg

SEQ ID NO: 214671 - DNA, 535 bp, Homo sapiens
gcacccagtggctctttgctgccattgttcagcaagcaggagaaggtggcacccagtgggtttttctgtcctgttgttcggcgagcggcagagaatattaccactcttttattctcaccacctatagctcagcaagcaggaacattacagctcttttgctcctgcagttcaaggatttccagtttcttgtccgtgaccaaaaggatcaaggtatgtgcacaccagaaagtgagtaagatatagtagaattgtattgagtcactgaaggaaagctctcggcaatgagagaggacccctaaacaggtagccatttgtgagtctgagtctggggtttttatgggcttagaatcggggaatgcatgctgatgggtccatggttggtcttgaaaaaaayatcatttgattagttaaaaggcatcattcagaaggaaccaatcaagactgagtgggtgagatggagatagaagttctcatgccagttgtggagtctatctggaactggcagcttggttttcaggctttaaactgtcctttg

SEQ ID NO: 214672 - DNA, 600 bp, Homo sapiens
ttacctatataataaacctgtacatggacccttgaacctaaaagttaaattaaaataaggaatattgtttctaaattataacacaaaatgtgtacatacagaaaacaaaactaaatcatggaggtgaatacaacagaaatgatttttgtgataatctgcttgattttactcttcaaagtttaaaatgtgattttctcatgagatatctcaagtcttcttttgttgatggtggcagaattaattgaataaaagcccctccaaaactgaaaaataattacataaatatgtgcactcttaaagagccactttacctcatcataaaaattatataaaacttagaatgaatgtaaaactaaaatataattctagagaaattgatcagatttgtagcctcctatatgagattactctaaaatcaaagggattctataggcctattttatcgatttctgtgacctcacaaatttatgtactacccaaaataatttcaaaagtatggacttaagccattgcagagaaacagaagagaaatttatgaatagaatagtgataaagktatatataaacacataaaaataaacaacttatattccaacatca

SEQ ID NO: 214673 - DNA, 600 bp, Homo sapiens
aagtttttaatttggttaagagtttttgttctgctgtctatactttgctcaatgtagaaagcagttacaaaactagatgaatgcaaaaattcttgagattccagattgtgtcatttaagaaaaatgactacgtggtgtaacctgctgttgattttgcatttgagcctcaggaatgacaggtgaccttacaatgtgtggtctggagatgaacagttgatgacagctccactcagaattttaaaacttttctctgcattctctttgcccaggcctaatagagctcatctttttgtctaaaagagaagtttcggccgggcgcggtggctcacgcctgtaatcccagcactttgggaggccgaggcgggcggatcacgaggtcaggtgataccatcctggctaacacggtgaaaccccgtctctactaaaaatacaaaaaattagccgggcgcagtggstgaaggcaggagaatggcacgaacccgggaggcggagcttgcagtgagccgagatcgcgccactgccctccagcctgggcgacagagcgagactcctctcaaaaaaaaaaaaaaaaaaaaaaaaataagaggagtttctgtcaca

SEQ ID NO: 214674 - DNA, 509 bp, Homo sapiens
taatactgataaaccagtgggaaattaccttataccatgtgttaatattgcaaaatctgtttagaaaagtatgctttaactataacataatgtgcattgaagctagaaatatttatgtcttcagtgtcaattagaagcttgtggtgttgggcaatttaaggaacttttctgagccttagtttctttgtccataggttttgtgatgactaaatgatagmacacatataacatatttagtgcagttcctaaaacatagtaacatttggatagtgttacataatgaggacctgtaaggtaaaagactgtgtcatacacttagtgatgcaaagtcgtgttggatcatatagcccttcaggaaagagaagttttgcatggaatctgtctgctcatatgtgcattataaaaaccccctgtggagattttctttaaaagtgaacatacaagtaaggaataattaaaaactgatcttattaattgaaattatatatactaaggtttccaagacattt

SEQ ID NO: 214675 - DNA, 590 bp, Homo sapiens
atgagtatagcttactcaattattaaagactgtaaatagctcaaaataaaagttttcttgactctgaataacaaaacaaggaccagcaatgtttcaagcaaaaggttttaaaaaaagattacttcagttttctattagttcagtccattcagttaactcatgctctgcttgatattcgtgaatgtttcagctctttcatgagtcctgtacgttttccctttagtscagtgttagagtctccaaagttatcagaaacttgtattggagaacacccatcaaacttttatagctgattattaaccatcttttgaaggggatcaaaagaagacaattgtttatgaataacaaaatgaccagggtagttacagtcagaaatgtgattgacaaaatgtggttatctctgtggcttacaataacttaatataacaaccttaattgtgattgatagcatacactcaaacattagaattttagaaatcccataaaattctggaacatatgttagcattattcactaaaatataacctgaagaaaattaaacatcattttggagatcccatgtacctaaccatgttaaattattctgttt

SEQ ID NO: 214676 - DNA, 561 bp, Homo sapiens
gactgtaaatagctcaaaataaaagttttcttgactctgaataacaaaacaaggaccagcaatgtttcaagcaaaaggttttaaaaaaagattacttcagttttctattagttcagtccattcagttaactcatgctctgcttgatattcgtgaatgtttcagctctttcatgagtcctgtacgttttccctttagtccagtgttagagtctccaaagttatcagaaacttgtattggagaacacccatcaaacttttatagctgattattaaccatcttttgaaggggatcaaaagaagacaattgtttatgaataacaaaatgaccagggtagttayagtcagaaatgtgattgacaaaatgtggttatctctgtggcttacaataacttaatataacaaccttaattgtgattgatagcatacactcaaacattagaattttagaaatcccataaaattctggaacatatgttagcattattcactaaaatataacctgaagaaaattaaacatcattttggagatcccatgtacctaaccatgttaaattattctgt

SEQ ID NO: 214677 - DNA, 614 bp, Homo sapiens
agtggttggctagagctggcagcatccaggccacatctgtctctgcattctaagtctgcttccaagatacagatacaaatgcaggctggctccaacctagccagagatcccagccccactctctccatccccaaatccctcaaagatccaagagactttccagattactagagtctcctctcagattctcttgacagttaaatgycctctctttactgaactagctgcagatagaatataatgcggtacaacagaaaaccatactgctgtaatatgcatttctaagttacacgggtcttttaagtatttcactatattacatctagcttacctctaagtgatttattcaggtgtgattgaagaaagtctaaagggaaaataaagcaatttaatttgatatcagatatcctggctataacaaataaaacattctaagttgacagaagatacaaaatgtttgctatcaaaatattctgactgacaaaaatgttctcaaatatttctgtctgaaagttgcattgtttaggaaggaagccaagtaggtgggacatatacagcaacaacatttctaaaaaaaaaaaaaaaaacaactgggctccttcctataaacctgg

SEQ ID NO: 214678 - DNA, 614 bp, Homo sapiens
agtggttggctagagctggcagcatccaggccacatctgtctctgcattctaagtctgcttccaagatacagatacaaatgcaggctggctccaacctagccagagatcccagccccactctctccatccccaaatccctcaaagatccaagagactttccagattactagagtctcctctcagattctcttgacagttaaatgtcctctctttactgaactagctgcagrtagaatataatgcggtacaacagaaaaccatactgctgtaatatgcatttctaagttacacgggtcttttaagtatttcactatattacatctagcttacctctaagtgatttattcaggtgtgattgaagaaagtctaaagggaaaataaagcaatttaatttgatatcagatatcctggctataacaaataaaacattctaagttgacagaagatacaaaatgtttgctatcaaaatattctgactgacaaaaatgttctcaaatatttctgtctgaaagttgcattgtttaggaaggaagccaagtaggtgggacatatacagcaacaacatttctaaaaaaaaaaaaaaaaacaactgggctccttcctataaacctgg

SEQ ID NO: 214679 - DNA, 448 bp, Homo sapiens
ctgaataccaaccgtctgttggttacatagactgaaaataaattcagtagattatcttttctataagatatttttgatacagaatttattttaayataattggatccattgatcttttcattcccagtcacagcagtattgtttgtaaaaattaaaaaaagaaagcattctattaatatatcatgaggaaaatggaaaaacaaatacatttagatatattcaaacaatgaaattgcatgtagcagcgaattagagctatacatataagcatagataaatctcataaacaaaacactaaatgaaaaatacaagttgaagaagacaaaaagcaatataaacatacataaactataaaaaacttttaaaaagatttaacaggccaggcacagtggctcacatgtataatcctagcactttgggaggctgaagtaggcagatcgcttgagtc

SEQ ID NO: 214680 - DNA, 448 bp, Homo sapiens
ctgaataccaaccgtctgttggttacatagactgaaaataaattcagtagattatcttttctataagatatttttgatacagaatttattttaatataattggatccattgatcttttcattcccagtcacagcagtattgtttgtaaaaattaaaaaaagaaagcattctattaatatatcatgaggaaaatggaaaaacaaatacatttagatatattcaaacaatgaaattgcatgtagcagcgaattagagctatacatataagcatagataaatctcataaacaaaacactaaatgaaaaayacaagttgaagaagacaaaaagcaatataaacatacataaactataaaaaacttttaaaaagatttaacaggccaggcacagtggctcacatgtataatcctagcactttgggaggctgaagtaggcagatcgcttgagtc

SEQ ID NO: 214681 - DNA, 535 bp, Homo sapiens
actacgtgacttggtgataatcttcttgcaatgaatttcccaggagttcttggagcttctcgtatttggatatctaaatctctagcagggccagaaaagtttttctcaattattccctcaaataagtttttcaaactttaggcttctcttctccctcagtaacaccaattattcttaggtttggscattttacataatcctatattctttgagactgttttcctttgattctttttctttatcttttctgattgggctaatttgaaagccttgtctttgagctctcaaattcttttttctatttgttctagtctattgttgaaattttcactgcatttggtatttctctgagtgtgtctttcatttccataaggtctgattggtttttctttatgatacctatctctctggaaaatttttcattcatattctggatttttttatttctttatgttgttttcacctttccctggtatctcctcaagtagcttaacaaccttatgaattctttgtctggtatttcaaagatttaatc

SEQ ID NO: 214682 - DNA, 605 bp, Homo sapiens
actactgtaatgaattaccacaaaccgagtggcttaaaacaacataagtttattttcttgaagttctagggaccagaagtytctcttcagggtgtcagcagaaccacatttcctaagaagcatctagggaagatactttccttgccttttccatcttctggtggctccagatgttccttggcttgtgactgcatgactccaatctctaccttcacatggccttctccgtttcccttctgtgtgtctctttaagaacacttgtccttggatttaaggtccaactgaataatccaggatgatctcatcctgaagtccttcacttaattacatctgcaaaaatgcttttttccaaataaagtcacagtcacaggttctggggcatgtgtatatatttctggggggccaccattcaactactatatcaactcctctacatactatgttcagagatataaatggacagaggtagcctcacagagaagcccaaatttcagactgttatttgcttgctctgataaattcctctcagtcttctcacctttgttctgtcaccagatattctggatcacagccaaatgctgtggggagatgtgtttttctgtcta

SEQ ID NO: 214683 - DNA, 589 bp, Homo sapiens
cactcttccaaacacagaacctggatccattccctccatgtcttgacactggctctcagactgccctgtgttgttggaggctctgcctccccgacgtcgccagtccacattcatgcttgggttttcctcctttgctggaccaccatgatgcccacccatcttttccttttcccctcattaactctgatatttgcctgttattttcaagttcaccctcacaacatctcaaacccttcagtacctgcagaagatgagcctcttgttttttatgaaaaacagtggcctataagtatgaattattctaaaacttgtaaactctccttcgcatttcttttctcttctcagctgtttttctccacagcacttatttatcatcatcgacatacttagcttataaatcttgtatgatggtaaatattaggtgtcaacttgattggactgagaactgcctagagtattgttcctgagtgtgttcgtgagggtgttgccagaggagattgacttttgtgttggwggactgggaaggaagacccaccctcaaggtgggtgggcaccagtcaatcacatgtcagagcagctagaacaaagc

SEQ ID NO: 214684 - DNA, 617 bp, Homo sapiens
ctacatttacaaagtccattgttgaagtcctgagtctaacaaatgaatacagcacaaaattggaattgtgactttcataagtgaacctggccacagtcgcgatgctgactcatttctggacccagctcataggcataatagtgatcttatccctgaatccagcctatagagaattgttgaccgtcatacctgggtttaggacaatatgtaagatcatgagtccatataagcatgtaggcctcrgagaggtttgcggctcccatgcatgttttataaagttctcagatgttgtagaaagcatcatacaatggccagcacacatgtgagattgtgactctcatatacacaactagctaacagttaatggtgtcacctttaatgagaagattgtgtcatatccttcggactagtaccccggtgtttagactttttggtttaaattcctttccataagggcattattaacatatcactgggtcagaatcacgataattagactcttctgcctgggccctgcaaacgggatattttcaggtatctctgggcctacagcgtatgtgatatgtctctcctccctgtgtcctgctcacaggggaaactgtgacatatcgctagat

SEQ ID NO: 214685 - DNA, 477 bp, Homo sapiens
ggaactgtaggctaattaaacaatctttctttataaattacctagtctcaggtatttctctttttctctttacttttgtgtgtgtgtgtgtgtcgcctaggctggagtgcagtggcgcaatctcaggtcactgcaaactccrcctcctgggttcaggcaattctcctgcctcagcctccccagtagctggaatttcaggtgtgcgccaccatgcccagctaatttttttggatttttttttttttttttagtagagatggggtttcatcatgttggccaggctggtcttaaactcttgacctcgtgatctgcccgccgtggcctcccaacatgctgggattacagatgtgagccactgtgcctggccttcaggtatttctttattgaagtgtgagaacggactaatacagaagtcctacatgagtctcactgggctaaaatcaaggtgttggtagggctgcagtcctttctggaagc

SEQ ID NO: 214686 - DNA, 618 bp, Homo sapiens
catcagtgattctttaataagagagaagcgggtaaggctgtttcactgcttctctttgcgtttagctgaagaatgtggggtggaaagtgaatatggtgaccggataaccagaaattctcttctagtattaatgcttctcatttaaaaaattaaagataatgactgttaagagcatgataataaacattatctttacatgagtattctttcaatgatctaagttaaataacattgatatttattgagccaaaacttaagtgtgtccatgttacttctgttttggtagggaaagtgtagtcttcttgcttttaaaaatagttttcaaaaataatctgactyataaatcttcccattggcccatacattaccattgttctagtcacacttacaaaagtcctcttccccagttaatcattctgtatttccattgcttctcttttcttgagattaagaaaaccaaagcatcatctatagctacagtttaattttccaaaaaaccactctgagtatacatcacacacataccccgctggccattaaaaaagagaagcaatgtaaattttcttctagtctttccctgatttaatagggcctaagaagctacttttatctcttttt

SEQ ID NO: 214687 - DNA, 481 bp, Homo sapiens
aatgtgatagttcatattgagtgtcaacttgattggattgaaggatgcaaagtattgttcctgggtgtgtccgtgagggtgctgcgaaaggagagtaacatttgagtcggtggactgggagaggcagacccaccctcaatctgggtgggcacygcctaatcagctgccagcgcagctagaataaaccaggcagaagatggaagagcagacttgctgagtcttctggcctttgtctttctcccgtgctagatgcgtcctgcccttgaacaacagactccaagtttttcagcttttggactcttggactacaccattggtttgccaggggttctcaggcctttggccacagactgaaggctgcgctgtcggctcccctacttctgaggttttgggactcagactggcttccttacccctcagcttgcagacggcctattgtgggacctcaccttgtgatcgtgtgcatcaatactccttaata

SEQ ID NO: 214688 - DNA, 621 bp, Homo sapiens
aagctttgttaaattctagataccccccagcacctcatccccactccagaggtcttagcagaggcctgctttcctctactgagaagcccaaccccaggcccagggagcctgcccaatttccstcaccacacttcaaaccatcttcctgtatgtttgtcctctttactgtacacacacccctgctgctcggtacccctgactctcactctccatgtgcaccctgtgctgctcctgtggaacatgcttcatccattaacccttttctgtggcttctccccatcacgtgctctcaggttcaccccagcctgaccctgctgtgcctcatagacctttcccactccttcctatcaccaccacatatctgcaggtgtagacaacctcctagcttgaaggtccataccactcactcacctgtacctttatttctccagaaatagtcagcttctgagccagggatcctcatcctcactgacctctgtgaagccctggaaaccctctgctcccggactgcatagccaggaacattccattgtcccaggaccctgccccctttcatgagcccctttgtgacctcttgtcctttaaacacaaatgcccccaaaagaatcgactcagtcttct

SEQ ID NO: 214689 - DNA, 419 bp, Homo sapiens
ataactgggaggagggttcctactggtatctaatgtgtagaggctgtggatgctactaaacacactacaatacacaggacagaccctccacagcaaagaatcatctakcccaaaatgtccattgtgccgaggttgagaaaccctgctatatgggaattgcctggttacttacctgtgtctcccactggaatgaagatatgttatcttgttcagtgatgggttctcaatacctttcacaatgcctggtacacagcagacactcagcggactttgaataaatgaatgatctgacctctaaaagcaccaaacagatgtttagatgaatgaataatcagatggataaatgggctgtcctctgggagtagaatggacacagagaaaagcacatccactgttttctaggccctgggtgccagaag

SEQ ID NO: 214690 - DNA, 575 bp, Homo sapiens
aatatacttaagattgagtgctagaattcagaattttgcagtgcaagttaaaaaataattctatctttggggagaaaaaaaatggggttatattttatttattttttatactctgtcagtagactaaagggggtctttaattagtaaaattgtacatttcaatatgttcatgcttgcacacagaaaggtgctgagtacctgccatggctgtactgcaatgtctattgtaaatgttagctctttggggggcaagcatacccacattcatatggcatttcctaagcctgttttccttctcagsgttaaactcactgatgcaaactgcccagctgtgttttaattaaacttctactcccactttcctttgggcttttcaatcatatacgcttctctttcccctcttttccccatagtcttctctctcttttccctaaactcccgccacataggcctgtggtgaggagagctgacaataatgaggccccaggaactggtacaaagcctgctgtaaaactttttaaattaaacccttgagattttaagagtttgtaattagaatgcatggtttgaaatga

SEQ ID NO: 214691 - DNA, 575 bp, Homo sapiens
aatatacttaagattgagtgctagaattcagaattttgcagtgcaagttaaaaaataattctatctttggggagaaaaaaaatggggttatattttatttattttttatactctgtcagtagactaaagggggtctttaattagtaaaattgtacatttcaatatgttcatgcttgcacacagaaaggtgctgagtacctgccatggctgtactgcaatgtctattgtaaatgttagctctttggggggcaagcatacccacattcatatggcatttcctaagcctgttttccttctcagggttaaactcactgatgcaaactgcccagctgtgttttaattaaacttctactcccactttcctttgggcttttcaatcatatacgcttctctttcccctcttttccccatagtcttctctctcttttccctaaactcccgccacataggcctgtggtgaggagagctgacaataatgaggccccaggaactggtwcaaagcctgctgtaaaactttttaaattaaacccttgagattttaagagtttgtaattagaatgcatggtttgaaatga

SEQ ID NO: 214692 - DNA, 594 bp, Homo sapiens
caggcacagaaagacaaataccacatgttcttactcatatgtaggaactaaaaaccttgatctcctggaggtagacaatagacgggtagatatgacaccagagtttgggagggtgtgagagtgggtggagggagaaaggaaaagaggttcatgaagaagcacaaacttacagttagatagaggaaataagttctaattttcaatagcagactaggrtgactatagttaacaacaacatattgtatatttcaaagtagctagaagaaagaacttgaaatgttaccaacatgcagaaatgacaaatactcagtatgatggataccccaaataccctgacttgatgttacatgttcgatgcacattaaaaatgctcacatgtacccccataaatgtgcaaaacactatgtaccaataaaaggaaaaaagaaatagtagagggtctcacaagcattgtatacatgatttgttagcagaatcatgttcagcaatgcttttcaaaccgcaggtcactaacaatcagtagtctgtgaaggtagtttagcaggttgtgatcagcttcttgttaacaaaagagaattcatccaggctggaaca

SEQ ID NO: 214693 - DNA, 594 bp, Homo sapiens
caggcacagaaagacaaataccacatgttcttactcatatgtaggaactaaaaaccttgatctcctggaggtagacaatagacgggtagatatgacaccagagtttgggagggtgtgagagtgggtggagggagaaaggaaaagaggttcatgaagaagcacaaacttacagttagatagaggaaataagttctaattttcaatagcagactaggatgactatagttaacaacaacatattgtatatttcaaagtagctagaagaaagaacttgaaatgttaccaacatgcagaaatgacaaatactcagtatgatggataccccaaataccctgacttgatgttacatgttcgatgcacattaaaaatgctcacatgtacccccataaatgtgcaaaacactatgtaccaataaaaggaaaaaagaaatagtagagggtctcacaagcattgtatacatgatttgttagcagaatcatgttcrgcaatgcttttcaaaccgcaggtcactaacaatcagtagtctgtgaaggtagtttagcaggttgtgatcagcttcttgttaacaaaagagaattcatccaggctggaaca

SEQ ID NO: 214694 - DNA, 570 bp, Homo sapiens
aaagacataaccctcaataatcaaaaagagactggagatgacagcaacaaaatgctgttttgcaaaacagatggatgggtaaccaacttagcagaccaaggaaaacagaaacctaaactgtaagtgcagtagccctaatgcccaaatttatactacagattattaggaagcctcaggaactcaaaaacagtcgagattagaaggctgaataaaggctggttaaaatgtctgcacagaagccgttagatccctgaagtcaatgagctaccgttactctatctttagcgggaaccaggaaaagttgacctagagcactctatactcagggatgacacatgtatccaagaccaagagtcctatgaaaacaggggcattgactaagactccttctgtatccccactccaggccccgtcctctctgagtttcccaggatgctggcagccagcttacacctgacaggctraagactaggaggtctctttctgagtatactgacacatcagtagaagagacttacgggtcgtggtatttagagatggcacagtgaagtagctgaggccccacccaaa

SEQ ID NO: 214695 - DNA, 588 bp, Homo sapiens
aggaaaactggacaaggcaaattagggtaatttgcaggcctagtggtaactgacactaggataaatttgcatcctgtctgagccaagagcacacctctcctctttagcctgagcatcctcctctctaagtgagctctggttcagatgcagagcctgaccactctttagcactcctaggaaagattaaaarcaggactgtggctaggggcagggaggaggccagggaccaaggcactcaagtggggactgcaggaggggtcagaatgcaagcagcactgacggccttcttcgtgttgctctttagcctgctgagtcttctggggattgcagcgaatggcttcattgtgctggtgctgggcagggagtggctgcgatatggcaggttgctgcccttggatatgatcctcattagcttgggtgcctcccgcttctgcctgcagttggttgggacggtgcacaacttctactactctgcccagaaggtcgagtactctgggggtctcggccgacagttcttccatctacactggcacttcctgaactcagccaccttctggttttgcagctggctcagtgtcctgttctgtg

SEQ ID NO: 214696 - DNA, 588 bp, Homo sapiens
aggaaaactggacaaggcaaattagggtaatttgcaggcctagtggtaactgacactaggataaatttgcatcctgtctgagccaagagcacacctctcctctttagcctgagcatcctcctctctaagtgagctctggttcagatgcagagcctgaccactctttagcactcctaggaaagattaaaaacaggactgtggctaggggcagggaggaggccagggaccaaggcactcaagtggggactgcaggaggggtcagaatgcaagcagcactgacggccttcttcgtgttgctctttagcctgctgagtcttctggggattgcagcgaatggcttcattgtgctggtgctgggcagggagtggctgcgatatggcaggttgctgcccttggatatgatcctcattagcttgggtgcctcccgcttctgcctgcagttggttgggacrgtgcacaacttctactactctgcccagaaggtcgagtactctgggggtctcggccgacagttcttccatctacactggcacttcctgaactcagccaccttctggttttgcagctggctcagtgtcctgttctgtg

SEQ ID NO: 214697 - DNA, 565 bp, Homo sapiens
cttggactgacaccagactttgtgggaaaccaggttgaagagtgcttggcaatgkccagtggcctggaggtccagttcaccaaatcagttttcctcttttagttttatctgcaaaagggaaacacccaccccatagttttagtaagggtatgaatctcacacacctggactttctactttttctgcagccaggagctagagctggaaaaaaatctctaccaagtcagactcctttgcttctcttttctcacttctaactaactgaaaggtagagagggcgttttctctttttattgtatgtttttctagtttctaaactgagcctgatatctagagttgggggactaactgactgactgaacatcacactgagtagtggcttcttaaaattcatcctctcatctaggtggtggaggaagccaaagaactataatttgtgagggaaacaggggtgggaatcctcagaaaatcatttcccttattggcccccaccttatctgttcccagggcttgtattcctttgtgctgagatctcattctgaaagaagtgtcagccagcacattc

SEQ ID NO: 214698 - DNA, 565 bp, Homo sapiens
cttggactgacaccagactttgtgggaaaccaggttgaagagtgcttggcaatgtccagtggcctggaggtccagttcaccaaatcagttttcctcttttagttttatctgcaaaagggaaacacccaccccatagttttagtaagggtatgaatctcacacacctggactttctactttttctgcagccaggagstagagctggaaaaaaatctctaccaagtcagactcctttgcttctcttttctcacttctaactaactgaaaggtagagagggcgttttctctttttattgtatgtttttctagtttctaaactgagcctgatatctagagttgggggactaactgactgactgaacatcacactgagtagtggcttcttaaaattcatcctctcatctaggtggtggaggaagccaaagaactataatttgtgagggaaacaggggtgggaatcctcagaaaatcatttcccttattggcccccaccttatctgttcccagggcttgtattcctttgtgctgagatctcattctgaaagaagtgtcagccagcacattc

SEQ ID NO: 214699 - DNA, 461 bp, Homo sapiens
tttcctgttactagcaataatttagttcactcccagggaactactatttctggttctcagttactaacctttccattcagttctttccattccatttttaccagaattaacgtttcctcatctttcccagtgaatgtaaaaggtaccttctgggaagcattttaccggaactgatgactgctatgcttgacagcagcttcaacagcctcggatacaactcatcatgaattagctctggcatgactgagttagaatactgttctgtttcctatctctacatgtaggaaaaatttaaagtggcatttctatgctttggtcttttctcataaatgacttargggaaaacacttaatgaggatgagtaactaaaattcaatgaatactaaaagctttataagaatcatctaattgaaactttacataatttccttattatgtattaacattgaacgggcattatg

SEQ ID NO: 214700 - DNA, 562 bp, Homo sapiens
gagaaacacacgtaaataaacacattgctaaaactgttggtttatcaaggaggcgatgtccaggagagaaagggccaacagagctgaatttggacaggtgacttgacagctaatggacaagatgttccagcatgattcagcagcaggaagcaaacaaggggaggcacagaagccaaaacagcaagctgtgtccgtaaccataagcaggttggcatgccgaagggtaaatgtggaggtgagagcagtaggagatgtagctagaggtgctggtgaggctggtcatgaagggcctcctatgccctgctaatgagctttgaytttaccctatatatgctagagaacactgtaagcatttgatagacagagtattaacattattttggaaggagtgtaaggaagatggatcatagaggattgaggcaagatgctgggacaacttagaaggctactggaatacactgagggaagactaacgaggcctgagctaaggcagcagtggcacggatgctggggagaagccctctagcaggaagaggagtcagaaggtgcctgtttatcctga

SEQ ID NO: 214701 - DNA, 562 bp, Homo sapiens
gagaaacacacgtaaataaacacattgctaaaactgttggtttatcaaggaggcgatgtccaggagagaaagggccaacagagctgaatttggacaggtgacttgacagctaatggacaagatgttccagcatgattcagcagcaggaagcaaacaaggggaggcacagaagccaaaacagcaagctgtgtccgtaaccataagcaggttggcatgccgaagggtaaatgtggaggtgagagcagtaggagatgtagctagaggtgctggtgaggctggtcatgaagggcctcctatgccctgctaatgagctttgattttaccctatatrtgctagagaacactgtaagcatttgatagacagagtattaacattattttggaaggagtgtaaggaagatggatcatagaggattgaggcaagatgctgggacaacttagaaggctactggaatacactgagggaagactaacgaggcctgagctaaggcagcagtggcacggatgctggggagaagccctctagcaggaagaggagtcagaaggtgcctgtttatcctga

SEQ ID NO: 214702 - DNA, 448 bp, Homo sapiens
gaaaaatgaattttatgtcactaagcgattcatggaaatatttttttagtacctacatgtacagatttcttaaccaattatgtatatttgagttcctaagaatagaagtaactttttaatgaccttcaggtacacatatttgtattaaaataaaccttggttcctaactgtmatcattggtcactacatttttttttaaagttgcagttgcttcccaacctctatttatctttatttactcatccctttattctatttatttctaatataatgagcacctatgaaacgcacccagtctcagactagaacatcaataacttaagctactcaagctttcctatcaaagaaatgcttctttatagcactgaaatgcacaagaatccaaatgcataggaagcatttcttagttgtcttgattgtgaggtaagttgttttttttgtgtagtta

SEQ ID NO: 214703 - DNA, 448 bp, Homo sapiens
gaaaaatgaattttatgtcactaagcgattcatggaaatatttttttagtacctacatgtacagatttcttaaccaattatgtatatttgagttcctaagaatagaagtaactttttaatgaccttcaggtacacatatttgtattaaaataaaccttggttcctaactgtaatcattggtcactacatttttttttwaagttgcagttgcttcccaacctctatttatctttatttactcatccctttattctatttatttctaatataatgagcacctatgaaacgcacccagtctcagactagaacatcaataacttaagctactcaagctttcctatcaaagaaatgcttctttatagcactgaaatgcacaagaatccaaatgcataggaagcatttcttagttgtcttgattgtgaggtaagttgttttttttgtgtagtta

SEQ ID NO: 214704 - DNA, 519 bp, Homo sapiens
cttttcctgggactgagctttcaggacttagagttccttctccttctcattctttttctgcgcatagtctcccggtaaagtgaaaaccagctgagaaaagattcgggctggacaggcctccgtggcgattaagagtcacgaatgtgatgatattattcgcaaacagcagtgtagtcatggttcagaattttggaaacagtgccaggaggatcttggacataattttcagggtgtataagccctgcactaaagtaaagtttaccagtgccaagagtttgacgttttcttcttcatgttttctttggctrgagcctggctttagttgaagagttctgtcaacaaatggaattctctatttgggactgggattcttgattggtggtgcttctgtctcctcttgctgtgagtttcctcaaacttagagtcctgtgggatctgtgtttgaacagagactggaaatgcttacctcatctccacatttcttagccatttgtcaccagactgtagattgactggtgg

SEQ ID NO: 214705 - DNA, 507 bp, Homo sapiens
actgagctttcaggacttagagttccttctccttctcattctttttctgcgcatagtctcccggtaaagtgaaaaccagctgagaaaagattcgggctggacaggcctccgtggcgattaagagtcacgaatgtgatgatattattcgcaaacagcagtgtagtcatggttcagaattttggaaacagtgccaggaggatcttggacataattttcagggtgtataagccctgcactaaagtaaagtttaccagtgccaagagtttgacgttttcttcttcatgttttctttggctggagcctggctttagttgaagagttctgtcaacaaatggaattctctatttgggactgggattcttgattggtggtrcttctgtctcctcttgctgtgagtttcctcaaacttagagtcctgtgggatctgtgtttgaacagagactggaaatgcttacctcatctccacatttcttagccatttgtcaccagactgtagattgactggtg

SEQ ID NO: 214706 - DNA, 432 bp, Homo sapiens
gggacaagcagctgagtgggcataccagccacacaaacttctgcagccaaggccactgaggtacttgcaggcaccactgacattaactacagctaaagaagctgcatggagactacactactgcatccacccagaacaaaaacaaatgtaccttacccaaccaacatgctaggacacatctgcaggtgtaagtcttttcygctgaaagttatgctacaaagttagaaaaggtgattattccatcagatgcacagatgccagtgcagggatacaagaaacataaaaaagcaagggaacatgacaccaccaaagaaacacaataattctctagtaactgaccccaataaaaaaataaaaatttatgaattgccagaaaaggaattcaagatagtgagcctaaggaaacttggtgagacatgaaagaacacaaac

SEQ ID NO: 214707 - DNA, 432 bp, Homo sapiens
gggacaagcagctgagtgggcataccagccacacaaacttctgcagccaaggccactgaggtacttgcaggcaccactgacattaactacagctaaagaagctgcatggagactacactactgcatccacccagaacaaaaacaaatgtaccttacccaaccaacatgctaggacacatctgcaggtgtaagtcttttctgctgaaagttatgctacmaagttagaaaaggtgattattccatcagatgcacagatgccagtgcagggatacaagaaacataaaaaagcaagggaacatgacaccaccaaagaaacacaataattctctagtaactgaccccaataaaaaaataaaaatttatgaattgccagaaaaggaattcaagatagtgagcctaaggaaacttggtgagacatgaaagaacacaaac

SEQ ID NO: 214708 - DNA, 581 bp, Homo sapiens
aagcttaattgtggtaattacttcactttatmtgtacataaaattgtcacattgtacagcttaaacttatacatttttttgtcaattgtaactcaataaaaaatttttaaataaaaataaatctctcaaaataaaaagttcatttcatgctatgttttaatcatctttattaagaagggcaaattacataaaaccaggaccatgtagaaaacctgggacatgtggtccacactgcagtgagttgaatttgggacactttatgcctcgggtggtcagagaagggtggtgtcaaacttaaaggtaggacttagttcaatttacttagcaaccaatgtaaagacaggaatgatttgtgtaaggtagtagcagaagctaagtttagaaagggacaaggaggtgaagaggtgaatatcttaaacccttttgtggaatgttaatgccaagcgaatattcctaagttttcactgaagaaagtgttctgtggtccaacacattttgaaaacgttggcttaagaaaacttccaatgtcttgataatatattcagtttcttagtgaatgtgcatgtacatggagaagtggt

SEQ ID NO: 214709 - DNA, 581 bp, Homo sapiens
aagcttaattgtggtaattacttcactttatatgtayataaaattgtcacattgtacagcttaaacttatacatttttttgtcaattgtaactcaataaaaaatttttaaataaaaataaatctctcaaaataaaaagttcatttcatgctatgttttaatcatctttattaagaagggcaaattacataaaaccaggaccatgtagaaaacctgggacatgtggtccacactgcagtgagttgaatttgggacactttatgcctcgggtggtcagagaagggtggtgtcaaacttaaaggtaggacttagttcaatttacttagcaaccaatgtaaagacaggaatgatttgtgtaaggtagtagcagaagctaagtttagaaagggacaaggaggtgaagaggtgaatatcttaaacccttttgtggaatgttaatgccaagcgaatattcctaagttttcactgaagaaagtgttctgtggtccaacacattttgaaaacgttggcttaagaaaacttccaatgtcttgataatatattcagtttcttagtgaatgtgcatgtacatggagaagtggt

SEQ ID NO: 214710 - DNA, 607 bp, Homo sapiens
ttcactttatatgtacataaaattgtcacattgtacagcttaaacttatacatttttttgtcaattgtaactcaataaaaaatttttaaataaaaataaatctctcaaaataaaaagttcatttcatgctatgttttaatcatctttattaagaagggcaaattacataaaaccaggaccatgtagaaaacctgggacatgtggtccacactgcwgtgagttgaatttgggacactttatgcctcgggtggtcagagaagggtggtgtcaaacttaaaggtaggacttagttcaatttacttagcaaccaatgtaaagacaggaatgatttgtgtaaggtagtagcagaagctaagtttagaaagggacaaggaggtgaagaggtgaatatcttaaacccttttgtggaatgttaatgccaagcgaatattcctaagttttcactgaagaaagtgttctgtggtccaacacattttgaaaacgttggcttaagaaaacttccaatgtcttgataatatattcagtttcttagtgaatgtgcatgtacatggagaagtggtgatagcaggtagcatttctttccttttctttttttttaaatgaagct

SEQ ID NO: 214711 - DNA, 607 bp, Homo sapiens
ttcactttatatgtacataaaattgtcacattgtacagcttaaacttatacatttttttgtcaattgtaactcaataaaaaatttttaaataaaaataaatctctcaaaataaaaagttcatttcatgctatgttttaatcatctttattaagaagggcaaattacataaaaccaggaccatgtagaaaacctgggacatgtggtccacactgcagtgagttgaatttgggacactttatgcctcgggtggtcagagaagggtggtgtcaaacttaaaggtaggacttagttcaatttacttagcaaccaatgtaaagacaggaatgatttgtgtaaggtagtagcagaagctaagtttagaaagggacaaggaggtgaagrggtgaatatcttaaacccttttgtggaatgttaatgccaagcgaatattcctaagttttcactgaagaaagtgttctgtggtccaacacattttgaaaacgttggcttaagaaaacttccaatgtcttgataatatattcagtttcttagtgaatgtgcatgtacatggagaagtggtgatagcaggtagcatttctttccttttctttttttttaaatgaagct

SEQ ID NO: 214712 - DNA, 607 bp, Homo sapiens
ttcactttatatgtacataaaattgtcacattgtacagcttaaacttatacatttttttgtcaattgtaactcaataaaaaatttttaaataaaaataaatctctcaaaataaaaagttcatttcatgctatgttttaatcatctttattaagaagggcaaattacataaaaccaggaccatgtagaaaacctgggacatgtggtccacactgcagtgagttgaatttgggacactttatgcctcgggtggtcagagaagggtggtgtcaaacttaaaggtaggacttagttcaatttacttagcaaccaatgtaaagacaggaatgatttgtgtaaggtagtagcagaagctaagtttagaaagggacaaggaggtgaagaggtgaatatcttaaaccsttttgtggaatgttaatgccaagcgaatattcctaagttttcactgaagaaagtgttctgtggtccaacacattttgaaaacgttggcttaagaaaacttccaatgtcttgataatatattcagtttcttagtgaatgtgcatgtacatggagaagtggtgatagcaggtagcatttctttccttttctttttttttaaatgaagct

SEQ ID NO: 214713 - DNA, 548 bp, Homo sapiens
cttgcaggccaggagagaatgggatgatatatttaaaatactagaagaaaaaaagctgctagcctagaatactataccagcaaatctttgcttcagaaatgaaggagaaatagtctttcccagatcagcaaaagttgagggaactcattaccactggaccagacttacaagaaatgcttgagtatttctattggaaaaaaaagtttttatgataattgctaccataaaaaaacatgaagtataaatctcactgctggagataaatgcattatcaaattcataatgcttcattactgcaatggtgatatgtaatgtttcaaacctctagtatgaaggttaaargccaaaacagctgggtgctgtggcatgtgcttgtagtcccagttatttaggaggctgaaatggaaggctcatttgagcccaggggtttgagtccaacctgggcaacataatgagaccccatttaaaaaataataataattaaaaaaatgcagctctgtgggatgccaaaaagtgaaaattggaataatgattatagcaatgataag

SEQ ID NO: 214714 - DNA, 564 bp, Homo sapiens
ccattccctagaggtaatgcttttaacaatatttattttagatcgtctggtaactaactttctaactttaaataatatgtttgagcaataatttcttgacttactgactttacaacatctttaataattccccattacaaaagataaggatttaacttacactatcgccactttcctttgtccatctctctccaaatgtctgatagttacatcactttttaatacatctattggtttgattttatagctttgaacaatacactaatcctctagttcttgttccattaactgaagatcttttcatccccactttgaatatataagtatctctacctttgattccacttctcttcctctaattctcaatctctttctgctttctttccctttgtcagcattaattactttcaacttcagttctgaataaaaaatgaaacctttcacactttgttaataggctgatctgaacaytgaatactaataaatgatatccacattattttggctatttaaatacttcttactgggagcctagtataagctaggatattttcttccctacac

SEQ ID NO: 214715 - DNA, 547 bp, Homo sapiens
tcagtcagttgccagaatgcaaaagtctgaaaaaataaaacatctcaaaaggccaattttaggctttacagtagcgatgctatctacagcagcaattgggcaagtcacaaatcttgtgacctctggccacgtgactcccgagctgtgagggattataaaaactatgcctatatcttaacagaactcaggtcccctcctgtagttctaatctcatggcctttaattagttttacaaatgttgttttggtccctgagcaagaaggggaccactttttagggagggacaattatcatccttacttcaaagttaaacagtaaacaaaattcctgccatggttagcttggcccacactcaggaatgagccaggacagccagcttgtgaggctagaagcaagatggagtcagccatgctagayttctgtctctgtcataatctttgcaagagtggtttcaactggcttcagagaacctggtgaggagactgtattagtcttttactgctgtataaaaaatttctacaaatttaatggcttaaatagcactcat

SEQ ID NO: 214716 - DNA, 614 bp, Homo sapiens
ccacagcctataataggttctttctgacacctttttactgatatacccacagttctctatggtgtgcattttccctagctgcaatgaacaacagattcaacttgtttaattatagrtgtgtttccattggtctttggctgtagggcattaataatattatgtactattagtgcgttaataacattaataatgccctatagccaaaagtacttttaccagtgctagagatccaccaggctttctgctaaaggtcactctaacattacggacacaagtcagttgtttgtcttttaatgcttttgccagctgaaatagtttatctcagagttttctatgaggatctgagatttaactctgctctaggtgttgagagcaacaagctcatagtgccagttgtcttgtggttaaatgtcaaaagccttaattaaggcttattattttctcctttggaataggtcggctccaaggctacacaagcagcaagaagaaaaggaaaaactctgttttattaaagctccacttgcctatctaccttggtggagggtcaagaaaaggtttataacctatttgcaggttttaggctcctgtttgcagcacagaaaccacagacaata

SEQ ID NO: 214717 - DNA, 537 bp, Homo sapiens
ggttttataaggggctctttcctcttctcttggcacttcttcctgccaccttatgaagaagatgcctgctgcttccccttcaccttccaccatgattgcacatttcctgaggcctctccacccacgctggactgtgagtcaaataaacctctttttttttttttttttttttgcaaattacccagtcttgggcagctctttatagcagtatgaaaatggaataatacactaagcaaatcagaatctctggtgtcaggctcaracttcagtagttttaaaggtctttgggtgattccagtatgcagccaaggaaggagcccactgatatagcagtatagcagggcagcagaggatgaggcccgtctgagtttggatcctacagaattatagtggccctgttatagagtaatgagatttgtcttcagaagtattgagcactcacagatttgtattagagatgtcagaaaatcggattgaggtttgtaaattgggtgtgtagaacacagacaatggagttgagagtgttggctcaaataa

SEQ ID NO: 214718 - DNA, 400 bp, Homo sapiens
agatctcaagaatgaaggaggcaggtgatggatatgacacttcatacctgaatacttcagcctgtatctcctaacaaggacattttcccatataaccacaatacagttatctcactcaaaacatgtaacattgatagaatgttgttatctaatgtccatgttcaaacrtctctaattgttcaaaaaaatcccttttttagattttttaagatataggatctaatcaagtttccatatcatatttctttagtctcctttaatcaaaatagttccctagcttttttttaaatctttcaggacattagtatttttgaagtatgcagtcccgttgttttatggaatgcccttcagtttggctttgtctaattgttttttttttcatgattacactcagttcaca

SEQ ID NO: 214719 - DNA, 507 bp, Homo sapiens
caggagtttgatttgagaccagcctgaccaccatagtgaaatgctatctctattaaaatacaaaagttagctgggcatggtgttgtgtgcctgtagtccgagctactggggaggctgaggcatgagaatcatttgaacctgggaggcagaggttgcagtgagctgagaccgtgcctctgtactcagcctgggcaacagagtgagactgtctcaaaaaaaaaaaaaaaaaaaccaaaagaaaaataaaaaccatataattcaataatacacatacaaaatattgaccaaattcaataccaaatcataccaaatkatgataaaatttcagcaaatgagaaataaaaaggaactgcttcaacctgataaaaatgtctacgaaaaatatatagttaaaaatattcttaaaggtgaatactgaacattttcccctaagactgagaacatgacaaggaataatacctgctctcacctcttctattcaacattgtgctacaggtcctacccagt

SEQ ID NO: 214720 - DNA, 493 bp, Homo sapiens
gattttttgtcacagtcatagaaattttctggttgtttgctggatcttgagctgggaattccaagccctgcaccaccattttctctctgtcacattctctagcatacttgcaggcaccagccataccagctggaaactgcctgttctgaaagagctggaatgacctttggaatgtgcagctgaggtaccaacttcgagatgacattttttgtggaggtgagttgttgtccttaaaatgtggaatatactgtaaaygaatgaccattattttgtgctgtgtctccaacacacagaccacatgggtctaggactcaaggagtggaagtagaagtggccttgctcaccatatcttctggagaccctcttggaggattcctgcttcccgtgcttttagctttatgctttgtatgcatagaggttggttcccagagtagggagcatttccaaaaggggacacaagaaaagtcctaataaaattatagctgccacctgg

SEQ ID NO: 214721 - DNA, 493 bp, Homo sapiens
gattttttgtcacagtcatagaaattttctggttgtttgctggatcttgagctgggaattccaagccctgcaccaccattttctctctgtcacattctctagcatacttgcaggcaccagccataccagctggaaactgcctgttctgaaagagctggaatgacctttggaatgtgcagctgaggtaccaacttcgagatgacattttttgtggaggtgagttgttgtccttaaaatgtggaatatactgtaaacgaatgaccattattttgtgctgtgtctccaacacacagaccacatgggtctaggactcaaggagtggaagtagaagtggccttgctcaccatatctyctggagaccctcttggaggattcctgcttcccgtgcttttagctttatgctttgtatgcatagaggttggttcccagagtagggagcatttccaaaaggggacacaagaaaagtcctaataaaattatagctgccacctgg

SEQ ID NO: 214722 - DNA, 663 bp, Homo sapiens
attaatgtttagggcagcaagcccaaaccaaagactacccaaatgtccatcaacagatgacaggataaacaaagtgtagcctatctccagaatggcataatacacagctgtagaagacgatgcattacggatagatgccacagtatggatggttctcacaaagttattctgagtgaaagaagccaarctcaaaggagtacatactttatgattacattatatgaagctttagaaaagacaaatgtttatggatagaaagcacatcagtagttgcctgcggttgtgtgtgggacagtctcagctcactgccagctccacctcccaggttcatgccattctgctgcctcagcctcccgagtagctgggactacaggcgcccaccaccacgcctggctaattttttgtatttttagtagatggggtttcacagtgtcagccaggatggtctcgatctcctgacctcgtgatccgcccaccttggcctcccaaagtgctgggattacaggcgtgagccaccacgcccagcctaatcaataatcttttagagtagcctgtcccattttttcacgagagaggtaatatatcttcttagaactttctgatgatatgcaatacctacttagaacgttcttctccatttgttgctattgttcccttgggagt

SEQ ID NO: 214723 - DNA, 561 bp, Homo sapiens
ttttacggggagcctgccttctgtttttttaawgctgtgttagagttttagaaaagatctgtctttctagtaatggacggcgaagttgaagaggctggagcctgtgctttgggtgccatcttgaggagagtcaggaaaagactcgagttatataaagacacttggggatcttccaatttagaggaatgcccttgatccagagtgtagtgacaaagcaggacaaggtgaggtgataattcagagaaaagtgtctccaaaattaatgttggctgagttcaagtgaggagagagaagaaacaggcatggtaagagatgaagacaaggaccgtacaatgtcaagggccaagaaatttaattaaaagctaattatttcctctgaaagttttcatcatcgtcccccacaaaaatattgctaaaaatattcccataagttctgattcttgcatgtataaatggggaaaaggggaccattgcaaagtttcctcttattcaatctgatgaccaatatcacccaaagttttatagctggttacaagacagaaaaaaattggggagatatta

SEQ ID NO: 214724 - DNA, 539 bp, Homo sapiens
gagcctgccttctgtttttttaaagctgtgttagagttttagaaaagatctgtctttctagtaatggacggygaagttgaagaggctggagcctgtgctttgggtgccatcttgaggagagtcaggaaaagactcgagttatataaagacacttggggatcttccaatttagaggaatgcccttgatccagagtgtagtgacaaagcaggacaaggtgaggtgataattcagagaaaagtgtctccaaaattaatgttggctgagttcaagtgaggagagagaagaaacaggcatggtaagagatgaagacaaggaccgtacaatgtcaagggccaagaaatttaattaaaagctaattatttcctctgaaagttttcatcatcgtcccccacaaaaatattgctaaaaatattcccataagttctgattcttgcatgtataaatggggaaaaggggaccattgcaaagtttcctcttattcaatctgatgaccaatatcacccaaagttttatagctggttacaagacagaaaaaaat

SEQ ID NO: 214725 - DNA, 554 bp, Homo sapiens
tgccttctgtttttttaaagctgtgttagagttttagaaaagatctgtctttctagtaatggacggcgaagttgaagaggctggagcctgtgctttgggtgccatcttgaggagagtcaggaaaagactcgagttatataaagacacttggggatcttccaatttagaggaatgcccttgatccagagtgtagtgacaaagcaggacaaggtgaggtgataattcagagaaaagtgwctccaaaattaatgttggctgagttcaagtgaggagagagaagaaacaggcatggtaagagatgaagacaaggaccgtacaatgtcaagggccaagaaatttaattaaaagctaattatttcctctgaaagttttcatcatcgtcccccacaaaaatattgctaaaaatattcccataagttctgattcttgcatgtataaatggggaaaaggggaccattgcaaagtttcctcttattcaatctgatgaccaatatcacccaaagttttatagctggttacaagacagaaaaaaattggggagatattaaagtcat

SEQ ID NO: 214726 - DNA, 561 bp, Homo sapiens
ttttacggggagcctgccttctgtttttttaaagctgtgttagagttttagaaaagatctgtctttctagtaatggacggcgaagttgaagaggctggagcctgtgctttgggtgccatcttgaggagagtcaggaaaagactcgagttatataaagacacttggggatcttccaatttagaggaatgcccttgatccagagtgtagtgacaaagcaggacaaggtgaggtgataattcagagaaaagtgtctccaaaattaatgttggctgagttcaagtgaggagagagaagaaacaggcatggtaagagatgaagacaaggaccgtacaatgtcaagggccaagaaatttaattaaaagctaattatttcctctgaaagttttcatcatcgtcccccacaaaaatattgctaaaaatattcccataagttcygattcttgcatgtataaatggggaaaaggggaccattgcaaagtttcctcttattcaatctgatgaccaatatcacccaaagttttatagctggttacaagacagaaaaaaattggggagatatta

SEQ ID NO: 214727 - DNA, 557 bp, Homo sapiens
tgccttctgtttttttaaagctgtgttagagttttagaaaagatctgtctttctagtaatggacggcgaagttgaagaggctggagcctgtgctttgggtgccatcttgaggagagtcaggaaaagactcgagttatataaagacacttggggatcttccaatttagaggaatgcccttgatccagagtgtagtgacaaagcaggacaaggtgaggtgataattcagagaaaagtgtctccaaaattaatgttggctgagttcaagtgaggagagagaagaaacaggcatggtaagagatgaagacaaggaccgtacaatgtcaagggccaagaaatttaattaaaagctaattatttcctctgaaagttttcatcatcgtcccccacaaaaatattgctaaaaatattcccataagttctgattcttgcatgtataaatggggaaaaggggaccattgcaaagtttcctcttattcaatctgatgaccartatcacccaaagttttatagctggttacaagacagaaaaaaattggggagatattaaagtcatatt

SEQ ID NO: 214728 - DNA, 557 bp, Homo sapiens
tgccttctgtttttttaaagctgtgttagagttttagaaaagatctgtctttctagtaatggacggcgaagttgaagaggctggagcctgtgctttgggtgccatcttgaggagagtcaggaaaagactcgagttatataaagacacttggggatcttccaatttagaggaatgcccttgatccagagtgtagtgacaaagcaggacaaggtgaggtgataattcagagaaaagtgtctccaaaattaatgttggctgagttcaagtgaggagagagaagaaacaggcatggtaagagatgaagacaaggaccgtacaatgtcaagggccaagaaatttaattaaaagctaattatttcctctgaaagttttcatcatcgtcccccacaaaaatattgctaaaaatattcccataagttctgattcttgcatgtataaatggggaaaaggggaccattgcaaagtttcctcttattcaatctgatgaccaatatcacccaaagttttatagctggttacaagacagaaaaaaaytggggagatattaaagtcatatt

SEQ ID NO: 214729 - DNA, 586 bp, Homo sapiens
taagcttaaaatcaataaaggaataacaaaaaatagagattcacagacttgctaacatactctgcatgttaaaaacatcagggactaaattaaatatttagcaataatctaggaaaactctatgcaatgaatatggcaaaagaatagcattcttcaaatacgaagaaattcattaaaagatgaatactaaaagataaaaacagataatccacaaaagacaaayacaaatattaaacatgtagaaaatgttcaacttcaataatatgaaaataaatgcaaattaaagcaatagtgagctagcattttccacatccccagtatgcaatgttatttcatttttgttgttgttgttgttttgtttgttttaaaaacaaggtctcactctgttgcttaggccggagtgcagcggcatgatcatagatcattacagcctccaatttctggcctcaagtgcccctcctgcctcagcctccccagtagctaggattacaagcacatgccaccaagcccacctgttttttaaaaaaaaaaagtttgtagagatggggtctcaccatgttgcccagactagtcttgaacgcccggc

SEQ ID NO: 214730 - DNA, 587 bp, Homo sapiens
gagttaacattatttgaggagcacctgtttagacaattgccatttgcatcaggtccctcaggtcaagggctcagtcccacaagattgctcccacttaggacaccatttcaaagtccacgtggccacctgtgcttctgaccataaatcagaggttccctccttgggttcattcatttactagagcagttcacataactcaggaaagcactttactaattattacccatttgttagaaaagaatacaactcagggaaaggcagagaggcgtaaggtaatgggagtggtacatgcagcttccacgccctctctgagagctccatcctcccagcatctccatgtgttcaccaacctgaaaactgtctgaacctcatacattagggatttttatgcagatttcatcatgtgcgcstgattgattatgaacctagtcttcagctcctctttcctctctggaggttggggagatggcactgaaatttccaaggttctaatcatggtttggtgtttctggtgatcatctcccactggaagcccaccaagaagtgcttcattagaacaaaagacattcctatcacccagggaattc

SEQ ID NO: 214731 - DNA, 337 bp, Homo sapiens
gagtgaagcccctccctagtctcctgcagggagctcagtgcctggagatttgtaagtttacaaacgatataattcacaaagccrctagtgttggtgaagaacaactaaagaaaaatgtctctgcaaatgcctgcatttgtgaataagcataattagcattaaactcttttgtatttcactctgtgttagtgaattatggcttgtgtgcttttgatctttactgtggcaagttttaactgggtaattaatgataaataacacttgtgtaatgctcaccaggaccccaataataaccctggataacaataatactagctaatgcatgcagagttttcat

SEQ ID NO: 214732 - DNA, 543 bp, Homo sapiens
atatagagtcttctgagcatgatccaggtgctgccactcctcctgagtgaagtccacagtcacatcattgaaagacactgatccctagaatggatggaactgtaatcagaacaggtggacttrgccaggtacagtggttcatgcctgtaatcccagcactttgggaggctgaggtaggtggatcacttgaggtcatgagttaaaaaccaccctggccaagatggtgaaaccccatgtctactaaaaatacaaaaaattagctgggcatagtggtgtgcgcctgtaatcccagttacatgggaggctgaggcaggagaatagcttgaaaccaggaggcggaggatgcagtgagcccagatcatgccactgcactccagcctgggcgacagagcaggactctgtcaaaaaaaaggaaaagaaaaagaacaggtggactggatattgggaactacttttgaccctgcttccttgtggcagtcatacgaatcctaatatagaaagactacaattttccctgttttatgatttatattgtagggaaaa

SEQ ID NO: 214733 - DNA, 277 bp, Homo sapiens
ttttttttcctggtatttcaatgtcactgtttcttatagagttgatatttctagtgaaattctctatctttaatgcacgccatcaccttttcccctggagtctttctcatattaatcattgtaattttaaatgtctgtctgatagtttcaacaaatgaccactttgggttctagttgattataatattttttaagatayaggttattaaattttgctttttttgcatctcataaccattggttgaaactgtgacaccttgtacagaaacttagactg

SEQ ID NO: 214734 - DNA, 586 bp, Homo sapiens
tataggtggaattactttatcaaagccttggtaatctactgttagtctctgtaaatcatttgcctttttcaygggccactcaggactattgtaaatagaatttgttggtatcagcactagaacttctaacttgtcattaattaaagtggtgtattactttcctggggctgtcattaaaaaaaaatgtactacaagctagatagctttaaacaacagaaatgttttgtctcatagttctgtaggccaaaagtccaaaattaaggtgttagcggggtcatgctccctctgaaagcagcagaagagaatctttccttaaatctttctcacttttttcgcatggattgtggctgtcaatccatgccattctttctcttgaagctgtgtacaagtcatggttctttagaaggaataggctatagacatacatataaggagattattgtgggaatcagtttacatgattatgaagaccaagaagtctcaccatctgctgtttgcaagctggagacccaggaaagctagtggtataactccatctgggtctaaaggcctgagaactagggtcagggtggtggaggggcacagt

SEQ ID NO: 214735 - DNA, 591 bp, Homo sapiens
tatatttagctagtttcttattttgtttgcattttcttatgtacccagtaagtgaaatttttaggagttgggtctaccatttaaaaattttattggtaatttgtatgttccataactattccacagcatagctgctgtttcatactatgggacacctaataagcatccagatatcaaacattcattacactcttcaacaaccttcctttttctaaccaacaattttgtcttgttttagtgagtcagggttgatctagcaaagtctactactgatattaattgttggcttttgttttctttttttaaaaaaaacttctattttaagttaagtggtgcaagtgcaggtttgttacataggtaaacttgtgtcatgggagtttkttatacagattatttcattacccaggtagtaagcctaatcctcattatttttccggatcctctcggtcttcctaacctccaccctccaaaaggccccagtgtttgttgttccctcttacaagtccatgtgttctcatcatttaggtcccacttataagtgagaacatgtcatatttggttttctgtcactgtgttagtttgctaaggata

SEQ ID NO: 214736 - DNA, 518 bp, Homo sapiens
atgctgttgtaaaaaaaaaaaagaattataggtttacaggtttttttgtatctactttaaatatattgttcaattatcttacttatttccatcaagaaatctcctattattctcatctctgttcctccctaacaattctctatgtgcctttytctttagctactgttagtatttcatttttatcacgacattggagcaaatatgatgtgccttagtgttttttctttctgtttattgtgtttgggttttgttaaacttctagggtcaatgaaataatgttttccattattttgggaaattttcagccattattttgtcgaatatatttctgctcttacttctccttcagggaccataattatttatgtattaggctgctccaagttatcccacagcttgttgatttatcctttcttgtatgcttcctttcttctttctttcttttacaaatctttgtgtgtgtggttctatcctcccttcagaaagtctcttcactgatttctcagctgaataactga

SEQ ID NO: 214737 - DNA, 518 bp, Homo sapiens
atgctgttgtaaaaaaaaaaaagaattataggtttacaggtttttttgtatctactttaaatatattgttcaattatcttacttatttccatcaagaaatctcctattattctcatctctgttcctccctaacaattctctatgtgcctttttctttagctactrttagtatttcatttttatcacgacattggagcaaatatgatgtgccttagtgttttttctttctgtttattgtgtttgggttttgttaaacttctagggtcaatgaaataatgttttccattattttgggaaattttcagccattattttgtcgaatatatttctgctcttacttctccttcagggaccataattatttatgtattaggctgctccaagttatcccacagcttgttgatttatcctttcttgtatgcttcctttcttctttctttcttttacaaatctttgtgtgtgtggttctatcctcccttcagaaagtctcttcactgatttctcagctgaataactga

SEQ ID NO: 214738 - DNA, 518 bp, Homo sapiens
atgctgttgtaaaaaaaaaaaagaattataggtttacaggtttttttgtatctactttaaatatattgttcaattatcttacttatttccatcaagaaatctcctattattctcatctctgttcctccctaacaattctctatgtgcctttttctttagctactgttagtatttcatttttatcacgacattggagcaaatatgatgtgccttagtgtwttttctttctgtttattgtgtttgggttttgttaaacttctagggtcaatgaaataatgttttccattattttgggaaattttcagccattattttgtcgaatatatttctgctcttacttctccttcagggaccataattatttatgtattaggctgctccaagttatcccacagcttgttgatttatcctttcttgtatgcttcctttcttctttctttcttttacaaatctttgtgtgtgtggttctatcctcccttcagaaagtctcttcactgatttctcagctgaataactga

SEQ ID NO: 214739 - DNA, 597 bp, Homo sapiens
agagctgggggcaggcatatgttatgtgatcataattggtagttgtcagatatccactgtacagagtaaattgtacttcaaaattggtagcttcaaactgtgacacaaagatagcaaaatatsataaacgcttgatcctacagttgttttactgtgtgttaaaaaaaaaaccgtatctgactgtgagaaagtttgtgatagcttgaagcaaaatataaattcttttatatttaatataactaagatatataaatatgttaatatttatgtatactatatgggatatctgtgcccatatataatttatttatatgtaaaatacaaacaaatacctgaaagagacataacccaaggactagataattttattttatttatttttttgttatgatcaattttttattataaaggttacaaagccgtacagctaaatgaagagatgtatattgatgggtaaggtttgcgaggttccaaacacaaagttttccaaacacaaagcttccgtgtcctcaggatgtttcatgcttgcagcacaccgatgtgtgattaccagtcagggaagttcactcaggctttcagtgtccacagcttttattg

SEQ ID NO: 214740 - DNA, 528 bp, Homo sapiens
cccttctcagcgaataccaaaatccttatattcttttgccttttctcaagatagttcgtctgtccctttctatttcctcctctgtccctttctatttcaggcatatttagtaataataataataatagccttctctcatcttcatgcctgctcttgaacctttttgatamtatcttccattttaaaaccaaagtgatctgtctgacatactacctgtgtggtctgtctgaccatgttttcccttcttgcaatccttcagtatcacccaagaccttgggaggtaagctggtctcctgaatgttgcatcatgacctagagaatttatgaaagtcaagccatgggccaggcgcggtggctcatgcctgtaatcccagcactttgggaggccgaggcaggtggatcacctgaggtcaggagttcgagaccaccctgatcaacatagtgaaaccccgtctctactaaaaatacaaaaattagccaggcatggtggtgcgcatctgtaatcccaactactcaggaggctgaggc

SEQ ID NO: 214741 - DNA, 448 bp, Homo sapiens
tttaaagaaacttggcaaactgatctttgacaaaggagcaaagacaatataatagaaaaaagaacagtcttttcaacaaatgatgccagccaggcacagtggatcaygccagtaatcccaatactttgggaggccgaggcaggtggatcacttgaggtcaggagttcgagaccagcctgaccaacatggtgaaaccccatctctactaaaaatacaagaattagtcagatgtgatggcgtgtgcctgtaatcccagatactctggaggctgaggcaggagaattgcttgaacctgggtggtagaggttgcagtgagccaagatcatgccattgcacttcagcttgggcaacagaatgagactccatctcaaaaaaaaaaaaaaaagaagaagaaaagatgcaggaacaactagatgttcatgctcaaaaaaaaaaaaaaaagagaaaa

SEQ ID NO: 214742 - DNA, 601 bp, Homo sapiens
cttgcattgttttatgtctaccattatttttcattactttcttttgttttttaaaatatttatgccttttttcagttcattgagttgttttctwttctgttaattctgttcactttaaagctaaattttttatgtttgttcttttaatatttttaaacattttcaaacatgcatacttaactatacttacaacgtttttagcaaagatgagactttttcaaagcatccttttctattctctagaatatttaaattccctctaagcatgtccatcctcattttaaagtttacctttacattttaaaaagatattagaattatactcaataattaaatttactgacatttaaaaacaattttttttgagtcccatagtttttcttcttctgggtatagtttattacttgttgaagcattttccttacttgttctctcaataaagatttctattgtgttaaattatatttgtctctctgtgctgaaaaatctgtttatttttccttactcttttatgctggtacgacagattttaaaatttaggtaatagttgtttttgttcagtgttctgtatatatttactaactcatcttttggctttatt

SEQ ID NO: 214743 - DNA, 622 bp, Homo sapiens
atgtaaaattccttgtcaatcaccacaaatgaccttttgacatttttattagattgcataaatacataaagtcatgtgtcttccagtcaatgaagatgaaataccctcattttatttagatattcttacatttctctcaacacattaatagttttctatacagaaawcctgcactttttcattagatttattcacaggtgtttgataattttattctcttgtaaattttatctttttaaactattttaatagtcaatctttgttgctaggatatggaaatacaattgatttgatacattgaccttacatgcaaaaattttttctaaatttacatataaattctgacaatttatctttagattttgaattttctacatatatagtcatatcaactgcaaatattgtcagttttatttcaacttttttgattcttacatattttattcattattcttgatttaatgtgctgttagctagtacctccaatacaatgttgaatggttctgaaggttgtgggcattttttctaagtccgaaactcagaggcacacatcaacattttgctgttaaatatgatatttgattttgatatgtaatagatgtccttcttaatattaaaacag

SEQ ID NO: 214744 - DNA, 622 bp, Homo sapiens
atgtaaaattccttgtcaatcaccacaaatgaccttttgacatttttattagattgcataaatacataaagtcatgtgtcttccagtcaatgaagatgaaataccctcattttatttagatattcttacatttctctcaacacattaatagttttctatacagaaaacctgcactttttcattagatttattcacaggtgtttgataattttattctcttgtaaattttatctttttaaactattttaatagtcaatctttgttgctaggatatggaaatacaattgatwtgatacattgaccttacatgcaaaaattttttctaaatttacatataaattctgacaatttatctttagattttgaattttctacatatatagtcatatcaactgcaaatattgtcagttttatttcaacttttttgattcttacatattttattcattattcttgatttaatgtgctgttagctagtacctccaatacaatgttgaatggttctgaaggttgtgggcattttttctaagtccgaaactcagaggcacacatcaacattttgctgttaaatatgatatttgattttgatatgtaatagatgtccttcttaatattaaaacag

SEQ ID NO: 214745 - DNA, 515 bp, Homo sapiens
ccttccctctgacagagcctaccctaataagaaggaaccagaaaaccaaccctcataatatrgcaaaacaaggctctttaacaccccctaaaagccacactagttcaccagcaatggatccaaaccaagaagaaacccctgatttacctgaaaaagaattcaggaggttattaagctaatcagagaggtaccagaaagacgaagcccaatgcaaggaaatccaaaaaatgatacaggaagtgaagggagaaatattcaaggacatagacagcttaaagaaaaaacaataaaaaatttaggaaactttgggcacacctttagaaatgcaaaatgctctagaaagtctcagcaatagaattgaacaagtagaagaaagaaattcagagatgaaagaccaggtctttgaattaactgaatccaacaaagacagagaaaaaagaataagaaaacatgaacaaagcatccaagaaatctgggattatgttaaatgaccaaatctgagaataatcagtgtt

SEQ ID NO: 214746 - DNA, 594 bp, Homo sapiens
tagaagtgttttgttctttcgagatgttagaatttggtcatataaccaacaacatagagaatcactcacatagaagaaatgtgatactagccaaataaatcccttgaattatttacaagaagcattaattatttatccactagttcaattgatttgaactataaccaggaataaaacataagggctttttgcagtaggtttaggacttgaagaatttaatctcttgagtataataaatgaacttgttctccatattactccatctccagtcagcatagcttgagacaaatttctatattaactctgtcaatgttcatattgtttraaatggcatgtaaaacacacatgattaaagttaaaattattattttattatatcattgaataattgaaaacaaaactatctattcactaatctgaataagactgaatacaatacctagttattctcttttactggataccctttgtttttcaacataattgtgttatttgtttacttgtttgatttttactctttagagcctgtctaataaatagtgtatttcttgcaaacacatttactttgagaaagtgggtaccatacacaacatt

SEQ ID NO: 214747 - DNA, 447 bp, Homo sapiens
ctcctttttattaattaatgcatgtttagacatctggtttaaaatgttaagtaaaggggcttgaatctttttccttaaaactgtactgactctgatatgcgaatgtcccaggtggcaaataattaggcactctcaaaactatcgctcccatatttcattggtaggggcaggaagagacagatactctgtccatgyaagtgaatccctctttctatgtgtgtttctcacatggccatgccaccttctctttccgtttctcctaaccaggctcagcctgcacaagagcatccctgatcatgcagaactgagtacagatctcgaagggtggaaggacgggggttaacctcacaactaccacagcgcctctcctctcacatctcatttaggagtctttcttctccatagttgctcctttcagcttcttagccgccagttctgtcacctttc

SEQ ID NO: 214748 - DNA, 604 bp, Homo sapiens
gaatccagtgatatgtgaagagatcagtatcttacagtaaagttgggcttattaatggagaatgtttggtttaaaaattgaatattaatttttaataaaggagacaaaccatatggtcatctcagtagatagatgtagagtctaagaatagatagaaagtgatccgatctgatcctgtaaggctttctaccaaagacctacactaacattatattaaatgtttttccccatccttgccagcatagcacatatttagttaaaattttgatattttattccacatagatttcttgcattaatttattttttcaattattacattaccagtattatttatcttgattactcagtttattggtgttctttctcctaaattttgtgcctgagatggtattccattgtgtcaccttactcctggccctggcatcagggaaacacaaatwaaaaccaccattaaatgttgcttttcattcaccagtatgagtaaacaggggaaaaaccaagtgctggctatgatgcagagcaatggggattttcattcactcttccacattccgtggtcttgtccagctgtgtgtaagatgcatgtacagtgaatgaattc

SEQ ID NO: 214749 - DNA, 529 bp, Homo sapiens
agcatgaagacatcagagcagagtcctccctcctccttgggagcagggccgtggattcaggctggcctcccaggagttgggggccatgagtcagggctctgttgcttaatctgaaaggggtgggtgagtgagctatgtggggcagaattaacctcgcacgagaattaaggcaaaaaaaatggggctaaaagagggacagaaacacagttyaggatctgcattgagaaataaagttagcattaacagaaaaccaaagaaggcacctattttaaaaaaattaggagtttaccagaaagtggccaggttgttttacaaaaaagtaaaaaataaaataaaataaaatctcctttcagaaaacaaagtgaaatcagacttggtgttttgttttgttttttagagagacaaggtctcactccatcgcccaggctggagtgcaatggcaatgacatgattatagttcactgcagtctcaaactctcccaggtgacttttaaattttatttttttgtaaagatggggtgtcactatg

SEQ ID NO: 214750 - DNA, 192 bp, Homo sapiens
cattctaccatgtcattaaaatgtcatttttaaagcttaattaatgtcactttgctttgaaggtagcatggttcatttaatatctttcctatatgggacatttgggttattttagtttatttgctattataaatgatayttgctctgacccaaatatttgtgccccccctaaattaatgtgctgaaatccta

SEQ ID NO: 214751 - DNA, 582 bp, Homo sapiens
ccaccacacctggcccaggcttctggtttttaagtagtggaggaaagatagtgtttctcacttcttttcttacaaatttcaacttggaaaaaaaaaaagaagagaatgagaaacagaaatccaagctgtatgttcaatgacacaaactgtgtcttcagttatcccattttgcaaaatagaagaatgtgctgccaggtgcartgaagatcaggcttgagtgtgggaagatcctgagggtgaaggctctaatgcatctcagacatgagaatggagatgagacatcaggtgtcagtgggggtgtcacctgggagccccatgcctcttggtagtattacagtgatgaagagaatgtcactgcagatggcattaggctgacttctaatctgcactaagccaccagtctatactgatgaggctgctgggcctccaaacttgtgacctctgccagctgccccaacatgagaatgaagaggagggaaggaagcctctctccaaggaagatgagagcaccaagaagtgttctgggagaaacatttggagggagtgtgaaaaggagaatgtgggaagaaaaaaggctacatc

SEQ ID NO: 214752 - DNA, 582 bp, Homo sapiens
ccaccacacctggcccaggcttctggtttttaagtagtggaggaaagatagtgtttctcacttcttttcttacaaatttcaacttggaaaaaaaaaaagaagagaatgagaaacagaaatccaagctgtatgttcaatgacacaaactgtgtcttcagttatcccattttgcaaaatagaagaatgtgctgccaggtgcagtgaagatcaggcttgagtgtgggaagatcctgagggtgaaggytctaatgcatctcagacatgagaatggagatgagacatcaggtgtcagtgggggtgtcacctgggagccccatgcctcttggtagtattacagtgatgaagagaatgtcactgcagatggcattaggctgacttctaatctgcactaagccaccagtctatactgatgaggctgctgggcctccaaacttgtgacctctgccagctgccccaacatgagaatgaagaggagggaaggaagcctctctccaaggaagatgagagcaccaagaagtgttctgggagaaacatttggagggagtgtgaaaaggagaatgtgggaagaaaaaaggctacatc

SEQ ID NO: 214753 - DNA, 604 bp, Homo sapiens
tgctgccaggtgcagtgaagatcaggcttgagtgtgggaagatcctgagggtgaaggctctaatgcatctcagacatgagaatggagatgagacatcaggtgtcagtgggggtgtcacctgggagccccatgcctcttggtagtattacagtgatgaagagaatgtcactgcagatggcattaggctgacttctaatctgcactaagccaccagtctataytgatgaggctgctgggcctccaaacttgtgacctctgccagctgccccaacatgagaatgaagaggagggaaggaagcctctctccaaggaagatgagagcaccaagaagtgttctgggagaaacatttggagggagtgtgaaaaggagaatgtgggaagaaaaaaggctacatctctaaagctaaaagaaaatattttaaaataaatgctataaacacatactgtatatacagttaagacattttatcctaaatttgataatattaaattctacactccaatttggaaattaaaacagaatttaagtgatatgatttggctctgtgtccccacccaaatctcaccttgaatcataataatcccatgtcaagggtgggaccag

SEQ ID NO: 214754 - DNA, 546 bp, Homo sapiens
cctctgccagctgccccaacatgagaatgaagaggagggaaggaagcctctctccaaggaagatgagagcaccaagaagtgttctgggagaaacatttggagggagtgtgaaaaggagaatgtgggaagaaaaaaggctacatctctaaagctaaaagaaaatattttaaaataaatgctataaacacatactgtatatacwgttaagacattttatcctaaatttgataatattaaattctacactccaatttggaaattaaaacagaatttaagtgatatgatttggctctgtgtccccacccaaatctcaccttgaatcataataatcccatgtcaagggtgggaccaggtggaaataattgaatgacgggggtggtttccctcatattgttctcatgacagtgagtcacttatcataagatctgatagttttataaggggagtcccccctttgcttgactctcattctctcttctgccaccctgtaaagaggtgtcttctgccatgattataagtttcctgaggcttccccagccatgcagt

SEQ ID NO: 214755 - DNA, 546 bp, Homo sapiens
cctctgccagctgccccaacatgagaatgaagaggagggaaggaagcctctctccaaggaagatgagagcaccaagaagtgttctgggagaaacatttggagggagtgtgaaaaggagaatgtgggaagaaaaaaggctacatctctaaagctaaaagaaaatattttaaaataaatgctataaacacatactgtatatacagttaagacattttatcctaaatttgataatattaaattctacactccaatttggaaattaaaacagaatttaagtgatatgatttggctctgtgtccccacccaaatctcaccttgaatcataataatcccatgtcaagggtgggaccaggtggaaataattgaatgaygggggtggtttccctcatattgttctcatgacagtgagtcacttatcataagatctgatagttttataaggggagtcccccctttgcttgactctcattctctcttctgccaccctgtaaagaggtgtcttctgccatgattataagtttcctgaggcttccccagccatgcagt

SEQ ID NO: 214756 - DNA, 546 bp, Homo sapiens
cctctgccagctgccccaacatgagaatgaagaggagggaaggaagcctctctccaaggaagatgagagcaccaagaagtgttctgggagaaacatttggagggagtgtgaaaaggagaatgtgggaagaaaaaaggctacatctctaaagctaaaagaaaatattttaaaataaatgctataaacacatactgtatatacagttaagacattttatcctaaatttgataatattaaattctacactccaatttggaaattaaaacagaatttaagtgatatgatttggctctgtgtccccacccaaatctcaccttgaatcataataatcccatgtcaagggtgggaccaggtggaaataattgaatgacgggggtggtttccctcatattgttctcatgacagtgagtcacttatcataagatctgatagttttataaggggagtcccccctttgcttgactctcattctctctyctgccaccctgtaaagaggtgtcttctgccatgattataagtttcctgaggcttccccagccatgcagt

SEQ ID NO: 214757 - DNA, 546 bp, Homo sapiens
cctctgccagctgccccaacatgagaatgaagaggagggaaggaagcctctctccaaggaagatgagagcaccaagaagtgttctgggagaaacatttggagggagtgtgaaaaggagaatgtgggaagaaaaaaggctacatctctaaagctaaaagaaaatattttaaaataaatgctataaacacatactgtatatacagttaagacattttatcctaaatttgataatattaaattctacactccaatttggaaattaaaacagaatttaagtgatatgatttggctctgtgtccccacccaaatctcaccttgaatcataataatcccatgtcaagggtgggaccaggtggaaataattgaatgacgggggtggtttccctcatattgttctcatgacagtgagtcacttatcataagatctgatagttttataaggggagtcccccctttgcttgactctcattctctcttctgccaccctgtraagaggtgtcttctgccatgattataagtttcctgaggcttccccagccatgcagt

SEQ ID NO: 214758 - DNA, 609 bp, Homo sapiens
attttcttctgtcatttcaatttataattataaaaagagaacattgcttagtggttagcataatgggatatcatgatgaaatccttaacagaggaatctgagaccttgagatgaaaagaaatgtaaagtactatcttttagtaataaatgtcataacttagattgtgcccacagcaacttaaagtttcagtgacaggggacacaagaaaagagcatatcatctgcattttttgtaatgcttccagatgccaggtcctctgctaattgctgcaaataaaaggcaaagacagatactgtgcctgtctttaacaaatggaggaggcaagtagtgaaaccaaattattggtaaataacaaccaggatcagtgcctcagaggaaagatatggagagcagagagagaatgtaacagagggcctaatgtcctctgaataataatggaatggaaggctttcctcaggagactgctgaagtattaaaggtaaaccagaagggttagggcagaagatattctaggcacargaaactgcataagcaaaggccctgagtggagagcgatcttaacatattgaaggaaaagaaagagaggccctgcggttggggcacaaaaa

SEQ ID NO: 214759 - DNA, 579 bp, Homo sapiens
gtggtttttagctccagaattttggtttggttctttttatgatttacatctcttggttgaacttctaattttgtttgtatattgtttttatgatatcttttattgtctatctctgttttgttataactcactgagattctttaaaataagcttttaaaattctttttaggcaattcatagactttcatttctttaggatctgtcactggtgcttccatttctttatggtctgttactggtgctccctgttagtggtgtcatgtttcccaactatttgtgtaacttatgactatgtattggtgtctatgcatttgaaggagacatctatttcagtttttacagactagcttctgcagtgaaagccctctaccagttagtttatccagagattacgggcaggtaatctggtgarctgtgtcagctgacttgtttctggaaaactttgtgtagcctggtttagtgcctaggccaggctgggtccagaggggttactctggttcctggttccagaggggccaggcagaatttagagtccatggtgctggcatctggggccacaaggttggcctgcagcttggg

SEQ ID NO: 214760 - DNA, 533 bp, Homo sapiens
agacattcgacagagactgcacatggcctaaagagtctaaaatatttgccacctgacactttacagagttttgtcaacccctacacaacactgacattgaatgaaatattgctgtatactctaatctaaatgaatctcactgacttcatattgaggaaagaaactaatgacaaaggtacatactatattatatactccatttatatgtgtttcaaaagcaggagagactaatctaggagagcagatrgttgtaacaaaggctagctgtgtggataaatcctggctgggaggaggtgcaatgtggcctctgaagtgaaatgccctgattttccatctgaagatggttacatgggtgtgtttcctacgtgggaattcaatgagatccacaattggtttgtggactttttggaggccgttttaattaaatcaaaatttaaagtagcctcctagacaaataatggagcctcaatgtcagaatgtgggaaattcagggagctgcccacagttacccccgtcacctgcctagcaccccc

SEQ ID NO: 214761 - DNA, 548 bp, Homo sapiens
gatcccaggatggaatgcagaatatgaagaaagattctaactctactgcaaatgttggacacaacttcactgaatrgggtgaggaataggtgccgaactaagttaatttagaaataagtagtgtgtacgattaaaaggaaaggaaatatgcatgaggactattttcaactaaagacttgaaaaagttgtttccatgggagttaataattctgaaaccactgcatagatactggaattaaacacataaatggatagaagatggttggaagctagatttctcgctattagagtggaagattacaaataagcaagagagaaagctagaatgatccatgtgataatggattacagttggagggatccaatgaatttgctataaaaacagttggttacacatagaaataagtatatatgtgtgtagaaattgttagtatacacttatatgtctttgcagttgagaaatcctagatgcaaaagtaacactgtagcaatgtgcactgtagcaatgagaggtaacttcttacctctcagaagttagtttctaatac

SEQ ID NO: 214762 - DNA, 548 bp, Homo sapiens
gatcccaggatggaatgcagaatatgaagaaagattctaactctactgcaaatgttggacacaacttcactgaatagggtgaggaataggtgcygaactaagttaatttagaaataagtagtgtgtacgattaaaaggaaaggaaatatgcatgaggactattttcaactaaagacttgaaaaagttgtttccatgggagttaataattctgaaaccactgcatagatactggaattaaacacataaatggatagaagatggttggaagctagatttctcgctattagagtggaagattacaaataagcaagagagaaagctagaatgatccatgtgataatggattacagttggagggatccaatgaatttgctataaaaacagttggttacacatagaaataagtatatatgtgtgtagaaattgttagtatacacttatatgtctttgcagttgagaaatcctagatgcaaaagtaacactgtagcaatgtgcactgtagcaatgagaggtaacttcttacctctcagaagttagtttctaatac

SEQ ID NO: 214763 - DNA, 539 bp, Homo sapiens
acctttgtctgaggagataaaccctgggttgcctgagaatattctgttcctctagatggcctcccctgaggcagttgccaggcaagataacgttgattctccacaggagccacccccaacatcccatttgcttctagacctataactagactaaagtccctgtgggccctagaggtggrgttcagagtgtgaccctgagaaggtatgctacactcaaaaagaactgtttgagctctctaatttatataaacagaaatctggagaatgggcatgggaatggatattaagggtaagggataatggtggaaggaacatagagttggataaggctgaatttactgatttgggcctactaagtagggactctgcttttaatgttgcagcttggggagttgaaaaagtttctaacagtttatttgcttggttagctgaaatatggattaaaagatggccctctgtgagtgagctgaaaatgcttgatctcccttggtttaatgtagaggaaggtatccaaaggcctagagagattgggatggtgg

SEQ ID NO: 214764 - DNA, 539 bp, Homo sapiens
acctttgtctgaggagataaaccctgggttgcctgagaatattctgttcctctagatggcctcccctgaggcagttgccaggcaagataacgttgattctccacaggagccacccccaacatcccatttgcttctagacctataactagactaaagtccctgtgggccctagaggtggggttcagagtgtgaccctgagaaggtatgctacactcaaaaagaactgtttgagctctctaatttatataaacagaaatctggagaatgggcatgggaatggataytaagggtaagggataatggtggaaggaacatagagttggataaggctgaatttactgatttgggcctactaagtagggactctgcttttaatgttgcagcttggggagttgaaaaagtttctaacagtttatttgcttggttagctgaaatatggattaaaagatggccctctgtgagtgagctgaaaatgcttgatctcccttggtttaatgtagaggaaggtatccaaaggcctagagagattgggatggtgg

SEQ ID NO: 214765 - DNA, 623 bp, Homo sapiens
atggcctgtggtaatttgatatgccattttgctaaagtaccttgtataattttatatattcgatttgtaaagtatatctatctgggtgtagtaagtgaagtaacttgtgatttttatgtctttcagttatgtgttctcatttcacccaagaccttccgccagagctaggcataaaagattcactccaaaaagtaataccaagaagatatggaaaaagtggacatgacaatttacaagtaaaaacatgtaaaagcatgggtgagtgtgaggtgcaaaaaggaggttgtaatgaagttaaccaatgtttgtcaactacccaaaacaaaatatttcagactcataaatgtgtcaaagtcttcggcaaattttcaaattccaatagacataagacaagacatactggaaagaaacatttcaaatgtaaaaaatatggcaaatcattttgcatggtttcacaactacatcaacatcagataattcatactagggagaattccyaccaatgtgaagaatgcggcaaacccttcaactgctcttcaaccctttctaaacataaaagaattcatactggagagaaaccctacagatgtgaggaatgtggcaaagcttttacctggtcctca

SEQ ID NO: 214766 - DNA, 623 bp, Homo sapiens
atggcctgtggtaatttgatatgccattttgctaaagtaccttgtataattttatatattcgatttgtaaagtatatctatctgggtgtagtaagtgaagtaacttgtgatttttatgtctttcagttatgtgttctcatttcacccaagaccttccgccagagctaggcataaaagattcactccaaaaagtaataccaagaagatatggaaaaagtggacatgacaatttacaagtaaaaacatgtaaaagcatgggtgagtgtgaggtgcaaaaaggaggttgtaatgaagttaaccaatgtttgtcaactacccaaaacaaaatatttcagactcataaatgtgtcaaagtcttcggcaaattttcaaattccaatagacataagacaagacatactggaaagaaacatttcaaatgtaaaaaatatggcaaatcattttgcatggtttcacaactacatcaacatcagataattcatactagggagaattcctaccaatgtgaagaatgcggcaaacccttcaacwgctcttcaaccctttctaaacataaaagaattcatactggagagaaaccctacagatgtgaggaatgtggcaaagcttttacctggtcctca

SEQ ID NO: 214767 - DNA, 414 bp, Homo sapiens
gaatgaaggcactgaaacttcagacattacactaaatcagggtgctagttataaaaatgatccaaagctaacattatatacattttaacgaagtagtttttttttttggagatttataattacatccgaggtatgcttctttttctgtaaaaaaaatatacattttctgaaaagcaaataataatgtaacccaagtctcgagttacctcatgttgattctttcttcccattgtttgtgaaagtatttgatgaattgttgcatcagagatatgagagattattttttataggtgtccattattcatgaactttcctatgaaagagtaaggacattaggttgtaacatgcataatgaaaaatctaaatgragaggctctttgtggttgacttataaaattgttttagtgacgtata

SEQ ID NO: 214768 - DNA, 414 bp, Homo sapiens
gaatgaaggcactgaaacttcagacattacactaaatcagggtgctagttataaaaatgatccaaagctaacattatatacattttaacgaagtagtttttttttttggagatttataattacatccgaggtatgcttctttttctgtaaaaaaaatatacattttctgaaaagcaaataataatgtaacccaagtctcgagttacctcatgttgattctttcttcccattgtttgtgaaagtatttgatgaattgttgcatcagagatatgagagattattttttataggtgtccattattcatgaactttcctatgaaagagtaaggacattaggttgtaacatgcataatgaaaaatctaaatgaaraggctctttgtggttgacttataaaattgttttagtgacgtata

SEQ ID NO: 214769 - DNA, 439 bp, Homo sapiens
gaattctgtgaggtgagtagataaaatcaactattccacagtagaggcaattgtcatatagaatttaaatttctaagtttagttcctactaagaaaaatatacttttgaagtgaaatagatgtttagaytttcttgtacttaatcagatgctttgtgctctgataaaagttctcactttcattttctgtatgatcaactgattggaaattataaagcagaaacatatgacatctgttccgggcctctctcaaatctcttaaccaaatctccctactcctctctaacataatgcacagatttttaaaaacacctccaaaaatttggacaaattttccagatccctcaaagcaatagaagagcagttagattatttagatccttacagcataaaaaggagttgtctctcactgtgaatgcaccagcagattaaatggatag

SEQ ID NO: 214770 - DNA, 439 bp, Homo sapiens
gaattctgtgaggtgagtagataaaatcaactattccacagtagaggcaattgtcatatagaatttaaatttctaagtttagttcctactaagaaaaatatacttttgaagtgaaatagatgtttagattttcttgtacttaatcagatgctttgtgctctgataaaagttctcactttcattttctgtatgatcaactgattggaaattataaagcagaaacatatgacatctgttccgggcctctctcaaatctcttaaccaaatctccctactcctctctaacataatgcacagatttttaaaaacacctccaaaaatttggacaaattttccagatccctcaaagcaayagaagagcagttagattatttagatccttacagcataaaaaggagttgtctctcactgtgaatgcaccagcagattaaatggatag

SEQ ID NO: 214771 - DNA, 490 bp, Homo sapiens
tggaggcaacaccctgtgctgtcgggtggtgatggggatgactactcacttttgggtgtcccttcgaggcctgtcccctgaaatctcataatcccctgtctcctggaccctcctatccgcatcttccacttgtccccccctttagctgcaggagatcaaagttctccaggagatgcagctgcttcagctggctgtagacaattatcaccttcagcctgtggagcaattttgggtctgcctccagttaacggagtggctcagtgagactgagaggtgagggtccagcagatcggcagaggttatggagaatatttattttgggccagctgccaagagcctgtggccatggctccctggtcagtgtcaggccctgctgcatggtgaccccgggggcccagcactccagctgggcaggcactgggaaggagactaggggtgtgrctcctacatagagacctcacatctgcctctatgacttgtagctacaacc

SEQ ID NO: 214772 - DNA, 584 bp, Homo sapiens
gaaatatcaggagttgccatggtgtcacgggaagctgcagtatggggaagaaatgtgggctggtgcagtcataggggctgcyttgctggagctcttcatgagtcaggcatgtccctccagtgcagatgctctggtatgagcttccagggtacctgagactgccctgtaagcagctgtggccagactgggtccctgggagaggccagcagaccaaggagtgctcagttggaccagcttcttctgatttgcaagaccatcctgcagaaattaggcccaacagttcccgtagggctaaagtctcttatgggagacagttgagcctagagaaatggccatcactggccacactttactacagatgctcttgcaccaaaccctctggccaccacatgagctggcttgctgcattatctctttgcttgtcttctgggggctgcatctcagagagatgtaggtcagcaattactcagtgcagccagcccaggatggaagatctttacttttggccaagttaggggtttactgtctgctgaggagcagtgggtagtttgtgggacccatggaggatgggctggcttcctctc

SEQ ID NO: 214773 - DNA, 584 bp, Homo sapiens
gaaatatcaggagttgccatggtgtcacgggaagctgcagtatggggaagaaatgtgggctggtgcagtcataggggctgctttgctggagctcttcatgagtcaggcatgtccctccagtgcagatgctctggtatgagcttccagggtacctgagactgccctgtaagcagctgtggccagactgggtccctgggagaggccagcagaccaaggagtgctcagttggaccagcttcttctgatttgcaagaccatcctgcagaaattaggcccaacagttcccgtagggctaaagtctcttatgggagacagttgagcctagagaaatggccatcactggccacactttactacagatgctcttgcaccaaaccctctggccaccacatgagctggcttgctgcattatctctttgcttgtcttctgggggctgcatctcagagagatgtaggtcagcaattactcagtgcagccagcccaggatggaagatctttacttttggccaagttaggggtttrctgtctgctgaggagcagtgggtagtttgtgggacccatggaggatgggctggcttcctctc

SEQ ID NO: 214774 - DNA, 507 bp, Homo sapiens
cctgttaatcccactgcacaaggcccaaatcagagaactggcttgactgttcagctgcacccaggcagtgtgtgtactgtcccaagcaggtcccattctcttcctgactccaattatttcacctgcaacttgtcatttgtaccagctctttctctgccccccacatcctatggtttttgaaattcctctgaagactgtatgaaccaagctttaagggtcacagtgctctagcctactcaggctgtgccaggaagagagatctctcaacctaccttgacacttaagagtcatgtataaatagtaccaaccctagcaggagggctgtcgcagactctactctggtctccataccaaaagatacattagaatgacraggaaaataagacacagacctggcagttctgccttttaaagagcagcctcagcctggtcaccttgaaccacaattccagggtctggctcagcatgtcccaccttggaaaatggtggaactggggccccagaatg

SEQ ID NO: 214775 - DNA, 531 bp, Homo sapiens
ctatacaaactgcataatttttgcaagtggrcattgttatcctgctaatcccactgatactggaccttctcctctctatgtaagtccccagtaaaacctcatctcattcactggctctgagtctctttgacaccttgaacctggtgccatttccatgggagtcgaatttgacacagcttaccccatagtgaggaagagtttcagactctgctcagtgtgcttcaaagctcaccaaggcatcagctatggaaggatgcagttgttctcttaccactctcatccaggcctcttttccttagatgcacaatcagtggaataccgagaaagatgagtaagaaacacatcatggtcagaagcatgattaatgccagaataagcagtgaccacttggaaagcaaaagggagcatttttctttctcctgtgggtagtccctgacttctgtcattactttctggattcaggaatgatttttaagttcatcctgcctctggaggaaccgtaggccctgagtggtaaacaccttcacttaa

SEQ ID NO: 214776 - DNA, 531 bp, Homo sapiens
ctatacaaactgcataatttttgcaagtgggcatkgttatcctgctaatcccactgatactggaccttctcctctctatgtaagtccccagtaaaacctcatctcattcactggctctgagtctctttgacaccttgaacctggtgccatttccatgggagtcgaatttgacacagcttaccccatagtgaggaagagtttcagactctgctcagtgtgcttcaaagctcaccaaggcatcagctatggaaggatgcagttgttctcttaccactctcatccaggcctcttttccttagatgcacaatcagtggaataccgagaaagatgagtaagaaacacatcatggtcagaagcatgattaatgccagaataagcagtgaccacttggaaagcaaaagggagcatttttctttctcctgtgggtagtccctgacttctgtcattactttctggattcaggaatgatttttaagttcatcctgcctctggaggaaccgtaggccctgagtggtaaacaccttcacttaa

SEQ ID NO: 214777 - DNA, 531 bp, Homo sapiens
ctatacaaactgcataatttttgcaagtgggcattgttatcctgctaatcccactgayactggaccttctcctctctatgtaagtccccagtaaaacctcatctcattcactggctctgagtctctttgacaccttgaacctggtgccatttccatgggagtcgaatttgacacagcttaccccatagtgaggaagagtttcagactctgctcagtgtgcttcaaagctcaccaaggcatcagctatggaaggatgcagttgttctcttaccactctcatccaggcctcttttccttagatgcacaatcagtggaataccgagaaagatgagtaagaaacacatcatggtcagaagcatgattaatgccagaataagcagtgaccacttggaaagcaaaagggagcatttttctttctcctgtgggtagtccctgacttctgtcattactttctggattcaggaatgatttttaagttcatcctgcctctggaggaaccgtaggccctgagtggtaaacaccttcacttaa

SEQ ID NO: 214778 - DNA, 608 bp, Homo sapiens
gtctccattccccaaaagactcacagtctccctccagccaaggctgcagtgatgtctttctttttagaccaaacacacggcatttgctgacaccagccaactattcaacaccaactgggtgttcaacaactcaattctgacagaatcaagagtcatcatggacccaaccacatcaggactcagttcctcaatacagtccccagtgcacacaccagtgacgggcaccatgggcccatctatgcctataagcagctatctataaattatgggctttttataacttctccctgaagtttaataatttgataaamctactcataaatttgatagaactttaccaggttattataaataatataattcagaaaatgccaattggaaaaaaatgtatagggcacagaaaagtgggagagaaagatggggtggatggtgagtcctggtaaatgagttacaattgaagaaaactctctaatgctttgtgttctgtaagaacaacttactgcaaagaaagatccttaccattgtgactgatggtcaggatcattaccattgttcttcacacacaattaaatagttttatcttcagggttcacaagaaaatacctgtt

SEQ ID NO: 214779 - DNA, 551 bp, Homo sapiens
tttgacatttctcctagctctgaactgtgccagctacttttcccatgaaaccaagcagtggctgtgggataaatgtggttgctctttcatctttttagatcacctattgtttctatcaaaatcctactacagtttttgtttctattctaggtgcaaaaatcagaaaaaaaatttctacaaagaacttgaaagatgctatttcaataaatagctcaggaatttcagaagcatataacccatatctgtcataggatttacattgcatcttggctatgatgaaaacaaatatttcatgtcttaggagattaagatcatacaatctctatatggaattctttgtgataattcattagttggtgagaaygttttgttaggtttaaaccagcctcagtgaagctggtgtcagggaagggaaagtggactttgaacagagcagaaacagaagaaagatgctctgctgcaggtcaggaaaaagcagggggtgaaatgttacaaattctagaactcagagaactgaaggtaattacttccttttcaaattgtgaaacatt

SEQ ID NO: 214780 - DNA, 517 bp, Homo sapiens
tggccccacacccactagagctgccagagattgagaaatcgagctgcatctaacccctttcctagagaaagggcctaagcaatcatgttccacttgtcattaamctatgtacttttctatgtccctttccttttgcccaaaccgaaaccaaatcatggtacatgaaaggtgagtccatttctacatgaaccctttgtaaatctgtcccaggctccctgggttccatctagaatgctgcttctatttgttgcacacagggaatctggcatggccctggaaaatttacattttcaaaacctcaaaaaaataaacttcattctaggcacggctcttctttaagcattcaatgaaataaattctgtctgccctatttcatttgattctatgcaaccagccctgacttgcctatgagtgtttcttttaaaaaagggagcatggacccaggatgcatggctttgctcagccccatactgtgttagctttggcatgtcttttcccctctcccggtctcagtttc

SEQ ID NO: 214781 - DNA, 517 bp, Homo sapiens
tggccccacacccactagagctgccagagattgagaaatcgagctgcatctaacccctttcctagagaaagggcctaagcaatcatgttccacttgtcattaacctatgtacttttctatgtccctttccttttgcccaaaccgaaaccaaatcatggtacatgaaaggtgagtccatttctacatgaaccctttgtaaatctgtcccaggctccctgggttccatctagaatgctgcttctatttgttgcacacagggaatctggcatggccctggaaaatttacattttcaaaacctcaaaaaaataaacttcattctaggcacggctcttctttaagcattcaatgaaataaattctgtctgccctatttcatttgattctatgcaaccagccctgacttgcctatgagtgtttcttttaaaaaasggagcatggacccaggatgcatggctttgctcagccccatactgtgttagctttggcatgtcttttcccctctcccggtctcagtttc

SEQ ID NO: 214782 - DNA, 419 bp, Homo sapiens
gatttttaaatagatttactttgttaatgcttttttattgaaccattgaaatattttgaaataaatactttaaaatgccttacagctacaggatgaacaagactgcacagcaacaattaaaaccaaccagtacacaraaaaccaggaattgttaatagacaaaagaagctgtcagaaatttacttcctctatttatttaaaatgaatgctttccttaaattttctaccatatccattgaagcataatattttcaaacaataaatacacagagtatgaattgatcatccctgaaaatatgttaacatcagatttgagtattttaactattttacagattcttttgtccatattaagcataaaaaggaatggaagaaaacattactagattaaagagcttagctatgagatagagtagagg

SEQ ID NO: 214783 - DNA, 565 bp, Homo sapiens
aggctttcatataagactctggaattgaactgactgtggctcaaggagtctaagctactttataagaatgccacacttcattagacttaggatctgatcaggaacctgaggaaaacctctctttgggggaactaataggtccacagtcratatgggcttactatagcacactaactaaattgtatcagaagatattttcacttttaaaaagtgtaatacctacaacacggtaatattctataatctacattaacaccttagaggaactcaaatcacacaatgtccctgtgtctcaaatctcactgagaagtaattcctaatgtcatatcatgtttagacgaagctccttccatctagcagaccagtgcatatctgctatggtctgaatgttggttaccccctgcaccccaattcatatgttgtaacctgataccccatatgatagtatcttaagaaatggggcctttagggtatgattaagttatgaaggctctactttccagaatggtatttctgaccttaaaaaaaggctcaagtcagctcctttgtctcttccaccatataa

SEQ ID NO: 214784 - DNA, 575 bp, Homo sapiens
tgtgcctctgagcaacaccatcagtgagcaaccaccactctgatttatgtttgctgcacccttttgagtgttgaagaaacctgaattatctatgaattgagccttatgtggtaacacctcgattcaaacacagtctttttctaaagaaccaaagaagtacaaacttgtacaggaaatgaatttagaagtgaaaggcaaaaaggccagaaccctccaaaaaaggccctcaaaagacaaataggcagacagcagtgattaaattcagggacatttaaattttctcagcattggactttccctggattaaaaattgtaaaaggtccagagaaaaataacaaaggtaattaaagacttggaaagtgaattttaaggtattttaagaatactgggtaatttaagctgaagaaaaggtaacaaatatgtgacatgaatttgcttttttaaatgaacatatcaaaaattaggatttactactaaaactgatgcagggtttttctcagtcacytagctggagacctccagccagcaacaccacttcccaggggttcaagatggggttcaccacagaagatgcc

SEQ ID NO: 214785 - DNA, 457 bp, Homo sapiens
gcattaccaagtatgaataacttgttcataattcattgagccggccatagggcaggcacaactaagaggcatttggcaaccaaagcaatgcaagctggttgtgaggagaaagaagctaggatgcctaagaacagatagaagagcctaccagccactgactcaggtacagagctagtcactaaagatgaatattggtctgatgactaccgtcccaacataaacatcttgcttgaggaagccactgyactccaggccagcaaatggagtattgaagtagaactctgcagcacgtgtgcattgaattttagcagatttcaagagcactttccatagtcaggggacagagaaccgagtggatcctcctgggagaagggctcggcaaagactcaaggaagaactagcctaagcatcaggagccaaataccagttaggtgacctgaacgattccatggggtaa

SEQ ID NO: 214786 - DNA, 516 bp, Homo sapiens
gctactgtttctggtattctgctatcactacttttcatattgtttccatagttgtctctttataattatacaaactgcactgaattgcacaaggggcttggaaatgcctgtggtgtctgattaggaattttttttttttttttttgagaacagatttcactatattgaccaggctagagtgaggtgactattcacaggtgtggtcatagtatactgcaatcttaaactcctgagctcaagtgatcctcctgcctcagcctcacaagtagctgggactacaggtgcacaccactgcaactgggtgtactaactgcacaggctatactaacctattactctacttagggttctttttatttagacagagtccttctcagtcacccaggctggagtgcagtggcgtgatcttggctcactgcaacctctgcctctgggttcaagtgattcccctgcctcagcctcctgagtagctgggattaaggcaagtgtcaccaygcctggctaatttttgtattt

SEQ ID NO: 214787 - DNA, 507 bp, Homo sapiens
attatctgtaaaacgggataataagactctatgtcattaggtttttatgaaaagccaatgaattgatatttataaagtgcttagaacagtgcctattatctgataagtgtcatttaagtataaaataattaaaattcaaactagagactaattaaataagtccrtatatttatacaatagaatgctatacaggcaataaaaagggaagaaaaatttacattaagaatgctatacaggcaataaaaagggaagaaaatttacattaaagataagtattggtatttcaagctgtgtgtaataaaaggaaattgtaaaacaacaaaatgtaatataataccaagtatggggttagaagagaaacttgcttctacactacttgtaggtagagtggctcaacataatactctttagagattttttttggtctaatgtgggagaaaatatataaacaattcatttgagtacaatgttcataattatgaaaatttaaaaagaaatggtcccata

SEQ ID NO: 214788 - DNA, 452 bp, Homo sapiens
tatatctcacaacatgccccagagaataacagagactcagaaaagacagaaggaaaatatgaatggcttccaactgtcaaaacatgcagttgggcagctatattaatcgtgatttaaaagccttgtaacatattctatttcaatggtattctatttttccttctgtgcaaaggaatatagtccctataagaaaatagacaatttgcacttgaactaactttttgtgttacagccctraccaaggacagttatcatagtgtttctatctcagcagataagaattcctggttaagaaagccacaaaccacacaggaagggaaagtcataaacataaactcataaagtggcttatttttagagaaagatagtaatgacagacagactcttcctttctgctcttcccacctgaattaaaatcaacttaattattgctaaaaaggcacatgcttaac

SEQ ID NO: 214789 - DNA, 452 bp, Homo sapiens
tatatctcacaacatgccccagagaataacagagactcagaaaagacagaaggaaaatatgaatggcttccaactgtcaaaacatgcagttgggcagctatattaatcgtgatttaaaagccttgtaacatattctatttcaatggtattctatttttccttctgtgcaaaggaatatagtccctataagaaaatagacaatttgcacttgaactaactttttgtgttacagccctaaccaaggacagttatcatagtgtttctatctcagcagataagaattcctggttaagaaagccacaaacmacacaggaagggaaagtcataaacataaactcataaagtggcttatttttagagaaagatagtaatgacagacagactcttcctttctgctcttcccacctgaattaaaatcaacttaattattgctaaaaaggcacatgcttaac

SEQ ID NO: 214790 - DNA, 544 bp, Homo sapiens
aatgtttaaggtgatagatatctcaatcaccctgatttgatcattatacattgtatgcatatagcaaaatattacatataacccccaaatatgtacaaatattatgtattaatamaagaaatatcaataaaaatacaactgttaaatgataaactgaggcacattaaaatttaaggagttttgcaaatgtgtcttcagaagagtgaaataaagaaaacgggagtttatttgagcaaacgatgattcataaatcaggcagcattaagtgggaagtgatttggggctccaagggaggagtttgaagggaaggcttttataggataaatgcagaagcagagtaacagcatgatttcattggttaaaatttgagcagtttttgtatatggtttatctcagtgaaaaattcattattatataacttaatgctcctttggccatctgtgattagcaaaacttaattttcattttgtttacataggaacccaggacattggagccatctcagcctactgacttccattaagttattttattactgctttgt

SEQ ID NO: 214791 - DNA, 544 bp, Homo sapiens
aatgtttaaggtgatagatatctcaatcaccctgatttgatcattatacattgtatgcatatagcaaaatattacatataacccccaaatatgtacaaatattatgtattaatacaagaaatatcaataaaaatacaactgttaaatgataaactgaggcacattaaaatttaaggagttttgcaaatgtgtcttcagaagagtgaaawaaagaaaacgggagtttatttgagcaaacgatgattcataaatcaggcagcattaagtgggaagtgatttggggctccaagggaggagtttgaagggaaggcttttataggataaatgcagaagcagagtaacagcatgatttcattggttaaaatttgagcagtttttgtatatggtttatctcagtgaaaaattcattattatataacttaatgctcctttggccatctgtgattagcaaaacttaattttcattttgtttacataggaacccaggacattggagccatctcagcctactgacttccattaagttattttattactgctttgt

SEQ ID NO: 214792 - DNA, 544 bp, Homo sapiens
aatgtttaaggtgatagatatctcaatcaccctgatttgatcattatacattgtatgcatatagcaaaatattacatataacccccaaatatgtacaaatattatgtattaatacaagaaatatcaataaaaatacaactgttaaatgataaactgaggcacattaaaatttaaggagttttgcaaatgtgtcttcagaagagtgaaataaagaaaacgggagtttatttgagcaaacgatgattcataaatcaggcagcattaagtgggaagtgatttggggctccaagggaggagtttgaagggaaggcttttataggataaatgcagaagcagagtaacagcatgatttcattggttaaratttgagcagtttttgtatatggtttatctcagtgaaaaattcattattatataacttaatgctcctttggccatctgtgattagcaaaacttaattttcattttgtttacataggaacccaggacattggagccatctcagcctactgacttccattaagttattttattactgctttgt

SEQ ID NO: 214793 - DNA, 579 bp, Homo sapiens
agtcacgtttaaagttagccctgaggatatccaggaatctgctataaattctttccatttatagagtttcagaggatgaatggcattagcccactaaactggcatctcagccacttggagttataattaaacagactgcaatcttttggtgaaatgcccatttttgcagatacagagaaaaaacttatggagggaaaagtgacctttgtcactacctaatattaatgtattttccacctaaactgatatagggaaataaataaataaaaataatgatgttgctttgaattcaaagcagacaagtctgtgctataagcaatgctagagaaaggaycaaatatgtctcccaaggtatatagctctaaaactaggacagcattgcaattagttttctctactgggcaaaatctacgtttttgaagaagcaatacctcctcccagacacccatgtaagtataaaacaatatatggtcacagagctcataaaactagaccaaagctgacacagtcaaagttgccctagcatatacatgctcatttaggcagtgggaggatggcaaggcctccaaagctcaagct

SEQ ID NO: 214794 - DNA, 487 bp, Homo sapiens
agttaacatataataatgcaatgtggattaaccagatatggagaattattcttataactgcttcctctctcttacgtaggtttgacagcaataattctcaaacttcagtgtgcaccagacttagcagtgaaactttctaaaattacggaaagaagcttcaggccctatcccacacctgcagagccagaatctctagggctggagcctgggtgcctgcttttttaataaaccatccaaatgaatccaataacttctgctctcaakaattgacagaaatcgctttccattccaggacaagaaccaaagacaaattcctatttgtctcctcttcatgatcttaggcagaagggtctgtcactactgaagacaacaaaggataattcactttagtcagtgctgacttgcttggagaagaaatgtaaaagcactcaaaggcagaaaataaaagcagttccagtcctggaagtcatttggacagttccagttg

SEQ ID NO: 214795 - DNA, 555 bp, Homo sapiens
agatgctttatttttcaagaaaccacacctgctttgaaattacaggtccacggaaatcttatgccctggtgtcagtgtcccttagattcatctataatgtaggccactgcaataattttgcccttaaattaattgatcccacagatgaaaactgtacaatctttgcttttcaccgtatctttagaagccatttttcttttgcctatctcaagaaccctactcttttgaagtatatcatccactcatatatacatacatccacatattccctctgttagaaaaagtgtcttaaaaagaaaaagaaaatcatttaggaaaacataaactgtttcatttttgcaagggaaggatgtgtggagttttttctctttaataattctgtctttttattttattgtggtaagaaaatgtaacgtgatttatcctcttaaattcttaattgtacaatgcattactgtagactataggtacaatgttgtacagcagaactctagagcttgtttatcttgcttaatagaaacttacrcccattgattagtagcttcccattccacc

SEQ ID NO: 214796 - DNA, 565 bp, Homo sapiens
cttctcactgccttgtgtttgttttattcatagttttgttctctttctttattttattttatttttttctgacacagtctcactctgtcacccaggctggagtgcagtgatgcaatcgtggctcactgcaacctccgccttctgggttcagctgattctccagcctcagcctcccaagtagctgggattacaggcatgcgccaccaagcctggctaattttatatttttagtagaggtggggtttcaccaygttggccaggctggtcttgaacttctgacctcaagtgacccacccaccttggcctcccaaagttttgggattacaggcatgagccactgcacctggcctttagttttgtccttttaaaaaagtgtatttcttcttcccaatactcagaaattttctagttcttttgcaattgactcctagttttaattctaatataatcaaaggagatcgttttcatgatttttgtagtttgaaatgtattaaaactttcttaatagcccagcgtattccatagagaaaatcttaaagcccagtataaatctaatacaaatata

SEQ ID NO: 214797 - DNA, 565 bp, Homo sapiens
cttctcactgccttgtgtttgttttattcatagttttgttctctttctttattttattttatttttttctgacacagtctcactctgtcacccaggctggagtgcagtgatgcaatcgtggctcactgcaacctccgccttctgggttcagctgattctccagcctcagcctcccaagtagctgggattacaggcatgcgccaccaagcctggctaattttatatttttagtagaggtggggtttcaccacgttggccaggctggtcttgaacttctgacctcaagtgacccacccaccttggcctcccaaagttttgggattacaggcatgagccactgcacctggcctttagttttgtccttttaaaaaagtgtatttcttcttcccaatactcagaaattttctagttcttttgcaattgaytcctagttttaattctaatataatcaaaggagatcgttttcatgatttttgtagtttgaaatgtattaaaactttcttaatagcccagcgtattccatagagaaaatcttaaagcccagtataaatctaatacaaatata

SEQ ID NO: 214798 - DNA, 598 bp, Homo sapiens
atcaagttccagtgatatttgaagagctatcaaaagaactatgcatataatcaaacacagcctatgagttttcaaagttactggaaatgttcacaagatggtattgtttgctactatgaattaattgaccttgattacaatattctcaaatctgtaacatcgcagaatactgctctcatgcccaaaagaggggaaggggttggtgagggtaacataggtccactagtggtataataaatactttaattctgttagtataaaaagctggtgtttgtctctacacagacatcactggctgatctaggagctgaatcctttgctacaaggaaatgtcctatgaaaaaaatatacttgaagcccaactgcagatacagtactttggtctataccacaaattagacataatcttggccctctgggaaactcaygaagtaacatcctaataaaatcccaacaagtaaataaatttaagtagtattactcaaaaataatttcactgcatttttttaaaaatttgtgttttcatatttcatgccccacatgtggagcacatcctctgactctttgttaggtgtgatgatgaaataaaagttccaaa

SEQ ID NO: 214799 - DNA, 624 bp, Homo sapiens
ttctgtcctatcacagcagaagcaacaccaggcgaaactcagccagcacccacagagggaacagttaggccagccctacccagaggagwattgcccatcccagcagtctgaatctgagatccagcaagactcaccaccatcagctaaagtgctctgggtcctaggtaaacataaaaggcagtctaggtgatttctggacaagccctagtgctgtgctgggcttggagccagtggacttggggggcacacaacctagtgagacaccagccagcataaccaagagagtgcttctgccactgcttccccaaccccaggcagcacggctcatagctctgggagagacttcttccttccactcaaagagaggagagggaagagtaaagaggattttgtcttacaacttggataccagctcagccatagtaggatagggcaacaagcagagtcctgaggtccccattccaggccctagctccagaacaacatctctagacacaccctgggccagaagggagcccactgccttaaaggacccagtcctggcagggttcattacctgctgactaaagagcccttgagccctgaataatcaacagtgacaggcaggcagtactcaccacgggt

SEQ ID NO: 214800 - DNA, 496 bp, Homo sapiens
ccctagacacatacaacctaccaagattgaaccatgaagaaacccaaaacctgaacaagctccaaatatgtaacaagatggaagccaaaagaaaaagccctggatccgatggcttcactgttgacttttaccaaacatttaaaaaactagtaccaatcctactcaaactattctgaaaaatagacgatgagggaatatttccaatctcattctacgagcccagtattaccctgatatcaaaaccagacatagacacatcaaaagaaagcaaaactacaggccaatatctctgataaatattgatgcaaatatcctcaacaaaatacttgcaaactgaattcaacaatatatcttttaaaatcattcaccatgaccaagtagaatttatctcacgtgtgcaaggatggttcmacatatgcaaataaattaatctgatatcaaaagaataaaggacaaaaaccatatgaccatttcaattgatgccagaaaagcattt

SEQ ID NO: 214801 - DNA, 496 bp, Homo sapiens
ccctagacacatacaacctaccaagattgaaccatgaagaaacccaaaacctgaacaagctccaaatatgtaacaagatggaagccaaaagaaaaagccctggatccgatggcttcactgttgacttttaccaaacatttaaaaaactagtaccaatcctactcaaactattctgaaaaatagacgatgagggaatatttccaatctcattctacgagcccagtattaccctgatatcaaaaccagacatagacacatcaaaagaaagcaaaactacaggccaatatctctgataaatattgatgcaaatatcctcaacaaaatacttgcaaactgaattcaacaatatatcttttaaaatcattcaccatgaccaagtagaatttatctcacgtgtgcaaggatggttccacatatgcaaataaattaatstgatatcaaaagaataaaggacaaaaaccatatgaccatttcaattgatgccagaaaagcattt

SEQ ID NO: 214802 - DNA, 446 bp, Homo sapiens
ataaatcacacatgatatataaagaaaataatacaagttaaaaagcaaaaacagaaccaccaaggtacacaggcaacaaatagcagaatgaattcaatggtaactcacattttaatactaacattgaatgtaaatagcctaaatgctccacttaaaggatacagaactgcagaatggaaaataactcaccaaccaacaatctactgccttccagagrttcacctaacacataaggactcacacaaacttaaggtaaaggggtggaaaaggcatttcatgcatatggacagcaaaagcaagcaggagtggctattcttatatcagacaaaacaaactttaaagcaagagcagttaaaagagacagagaaggacattatataatggtaaaaggccatgcccaacaggaaaatatcacaatcctaaacatatatgcacctaacaccaga

SEQ ID NO: 214803 - DNA, 492 bp, Homo sapiens
ggagtctcagtaagtcatgctctccttgtgagacttaggttgagaattaagttcaaagtgccgtgatagattaaatattctcattctccttattttgtgctttagaaacaagtaatccagtggcagagttggttttctctttaactctttaaaaagtaatttccaaactgtatgcaagttcacccatctttgtccagagtagacccagaggcatcaytactacattgtacaactccacaggctccttacacagaagacagtgtgattagagctccctgccattgtgtaatttctggcagtgcccaaggatacagggaacagaagtcgggattttactcacgaagctgcttcacataatctctaaatctgaggcaacaagaaaacatggaataaatattttcactagataaatttcatagctggtgatagtagtcaccagccaaagtccacaaagagtttaataatgattccaaagtgatctgattctgggaa

SEQ ID NO: 214804 - DNA, 492 bp, Homo sapiens
ggagtctcagtaagtcatgctctccttgtgagacttaggttgagaattaagttcaaagtgccgtgatagattaaatattctcattctccttattttgtgctttagaaacaagtaatccagtggcagagttggttttctctttaactctttaaaaagtaatttccaaactgtatgcaagttcacccatctttgtccagagtagacccagaggcatcattactacattgtacaactccasaggctccttacacagaagacagtgtgattagagctccctgccattgtgtaatttctggcagtgcccaaggatacagggaacagaagtcgggattttactcacgaagctgcttcacataatctctaaatctgaggcaacaagaaaacatggaataaatattttcactagataaatttcatagctggtgatagtagtcaccagccaaagtccacaaagagtttaataatgattccaaagtgatctgattctgggaa

SEQ ID NO: 214805 - DNA, 492 bp, Homo sapiens
ggagtctcagtaagtcatgctctccttgtgagacttaggttgagaattaagttcaaagtgccgtgatagattaaatattctcattctccttattttgtgctttagaaacaagtaatccagtggcagagttggttttctctttaactctttaaaaagtaatttccaaactgtatgcaagttcacccatctttgtccagagtagacccagaggcatcattactacattgtacaactccacaggctccttacacagaagacagtgtgattagagctccctgccattgtgtaatttctggcagtgcccaaggatacagggaacagaagtcgggattttactcacgaagctgcttcacataatctctaaatctgaggcaacaagaaaacatggaataaatattttcactagataaatttsatagctggtgatagtagtcaccagccaaagtccacaaagagtttaataatgattccaaagtgatctgattctgggaa

SEQ ID NO: 214806 - DNA, 496 bp, Homo sapiens
ctagcgatgcacttattagggtcaaaaaaacttcaggtaagatgycctccaaagctgagagaagggagggcttctaaagtacccttaacagagaaggaatctaatctccttacagtcccagacagcatggtaccagctaatggtagtatcagtcatttaaaaactctccatccttctttctctgactacactctaactacaaagtggtcaaaagccagatcaagagaaggggatgaagatgggaaataggagagctagagaggtgagcaaccacatattttcccaactgtaggattcctgcatgcagcaggctcaaggtaagaatgggtagaaatctcagacttaaatttagagttttgggtcgggcatggtggctcatgcctgtaatcccagcactttcggaggccaaagtgggagaatcacctgaggtcaggcattcaagaccaccctgggcaacacggtcaaacacccgtctctaccaaaactacaaaaatta

SEQ ID NO: 214807 - DNA, 588 bp, Homo sapiens
aagtaagctactcattatatgtcatgaataatatatttagcacgagaccaagattatggctaggacaaccatattttatattgaaaaaaacacggtaacctgtattcgactgttaygaataacagcagcaaagaaagcgatctgcttcacctttttttcttggttgaactgcttaccattcaggaaacaatatataggcttctagctggcatcattttacccttgcttaaaagttcagtgcaattcaacaaacatgtattgattgcctaatctgcttaagagtaatcaatgggaaaatcaaaggtgtataaggttttaacacattagaatggtaaacaagcaaattattaacatacaaattttatgacccgtgaaaaaagtgatatatacatcacttttacatatatgtattatatatataaaggaaggaatacagtggaggggctcatttattcatgcattgtttatcaactttgggagcacccttagttttgtttttccttttcttagttattttatttcagagggtcaacacttattaatatttttaggatcacatttcattactgttctgttgtggcttgtatt

SEQ ID NO: 214808 - DNA, 604 bp, Homo sapiens
taattggagccaccctgcaggctttgaatactccatgtaaatcttcagagataatgagcaagctcatcctagaaatggcagagggttcaaataggatttgtttttgttgttttgtgatgacaacttacagagacctaaggagttgtgatggagactatgtggtattttgtgataacaatttgtagagaccttagaatcactccttttcatgactacagctgactttctaaaaggggttttaagatattgttgttcaaacttttttttatattgcataccctaacttaraagacacacagcactgcaggacaggtccccatatggcccctttctcacttgtagttctcagagtaactgtagaatacattggaaatgcaacattgaagacatgaaggaacaggctggaactctgttcccattgttcccagaacagggtgtcctgaaatgctttagctcagcaattccattgcccctgggtataaaacccagggcagtatgtgctttggggggccctcagctgcagtgcaacacagaatatgcacagatgagacttcatctgcccttggcagttttcctgtgccttagtgggggctggctcaccata

SEQ ID NO: 214809 - DNA, 525 bp, Homo sapiens
tcccaatgtacttatttctaggtcaattatatttacttagtcatctctccaaagtgaacaagtatgatatttcaaaaatttaagtaaaatttactactatcttcaatagtggtttggttcttttattatagaaagttgtttaaaaggattcattttctgtatgcagctctcaagcaaattcagattctgtagctgttagcattcaatgacaatatactaagtttttattttatttttgtctattttatgattttaatgcttacttattatgcctaaagtgcctttcatttagccttaccatggatcaatggaaataaatataaaaatgtgaatgtgttagataagaatcagaacgcygagagttctcaccatcaagttttgccttttatcagtattctctctgtagtcatcactatgccttctgttttctctggaacaggaactttatgtggcagtcagtcaacaagttccatctgtcttggcttgtgctaccacttccttcttctcttttcacttcctagatca

SEQ ID NO: 214810 - DNA, 525 bp, Homo sapiens
tcccaatgtacttatttctaggtcaattatatttacttagtcatctctccaaagtgaacaagtatgatatttcaaaaatttaagtaaaatttactactatcttcaatagtggtttggttcttttattatagaaagttgtttaaaaggattcattttctgtatgcagctctcaagcaaattcagattctgtagctgttagcattcaatgacaatatactaagtttttattttatttttgtctattttatgattttaatgcttacttattatgcctaaagtgcctttcatttagccttaccatggatcaatggaaataaatataaaaatgtgaatgtgttagataagaatcagaacgccgagagttctcaccatcaagttttgccttttatcagtattctctctgtagtcatcactatgccttctgttttctctggaayaggaactttatgtggcagtcagtcaacaagttccatctgtcttggcttgtgctaccacttccttcttctcttttcacttcctagatca

SEQ ID NO: 214811 - DNA, 525 bp, Homo sapiens
tcccaatgtacttatttctaggtcaattatatttacttagtcatctctccaaagtgaacaagtatgatatttcaaaaatttaagtaaaatttactactatcttcaatagtggtttggttcttttattatagaaagttgtttaaaaggattcattttctgtatgcagctctcaagcaaattcagattctgtagctgttagcattcaatgacaatatactaagtttttattttatttttgtctattttatgattttaatgcttacttattatgcctaaagtgcctttcatttagccttaccatggatcaatggaaataaatataaaaatgtgaatgtgttagataagaatcagaacgccgagagttctcaccatcaagttttgccttttatcagtattctctctgtagtcatcactatgccttctgttttctctggaacaggaactttatgtggcagtcagtcaacaagttccatctgtsttggcttgtgctaccacttccttcttctcttttcacttcctagatca

SEQ ID NO: 214812 - DNA, 473 bp, Homo sapiens
gttatccaatatcccttgcaactatatgtggccacattaatatgttccagccaatgaggtgatacatgcgtaaacattgtatgagatttcaggggagtggccttgaagggcgagaatcaccccatatcttttgatgcttttttcctcctatctrgaacttggatgtaatatctggcactcaaattgccatttgggatatttgcttgtactaaatataaagcagaaatatggaaaaagcctagcttcctgactccatggaacactgcattagccttgaacagtctaattctatattctctcatataacaaaggaagaaatcttcatcttgttaatttcagtctctgttactcaagctgaacctaatccaaactcataccatagtttgtactatacataaaaatagggtgctatgtgtgacaaagcctaaaaagcatatggaattgcctgtggtggacaccaggccttgaagact

SEQ ID NO: 214813 - DNA, 473 bp, Homo sapiens
gttatccaatatcccttgcaactatatgtggccacattaatatgttccagccaatgaggtgatacatgcgtaaacattgtatgagatttcaggggagtggccttgaagggcgagaatcaccccatatcttttgatgcttttttcctcctatctagaacttggatgtaatatctggcactcaaattgccatttgggatatttgcttgtactaaatataaagcagaaatatggaaaaagcctagcttcctgactccatggaacactgcattagccttgaacagtctaattctatattctctcatataacaaaggaagaaatcttcatcttgttaatttcagtctctgttactcaagctgaacctaatccaaactcataccrtagtttgtactatacataaaaatagggtgctatgtgtgacaaagcctaaaaagcatatggaattgcctgtggtggacaccaggccttgaagact

SEQ ID NO: 214814 - DNA, 539 bp, Homo sapiens
ctctgtatcctaaactgcattatggtgtaagtctaaaccacagctgccaagaggcagctttagaaggaagtaagcctgtgcgcccaggatgtctttcataaccttcaggtaagggttatctaccagacactggggcacagcactgttgcagtgatcagattgaggatatcatcgtccactaaaggtttattctttttcaggacctcaaggtagtttgacattagctgaaaggcagagagaagaaaaggagggaggtgcaagttctcttgaaggcagattagagggctcacctccactgggaattggcagaacacagaggtaagtatgaaaaagaatagtcaacaggttttaaactatgtcaagaacagatgtttaggtgtggttatttgcacatagaactgcctgaaagaaaatagattagaagactataacatttttgagaaacttacattgccaaggaaaccataagcatggcctgcaaagttttgtgccctttcaatgactwcagcagtccttaatcactaatttgtatcagcagg

SEQ ID NO: 214815 - DNA, 563 bp, Homo sapiens
tggccagtagtttctctacttaagagcattttagatatagaagatatttgctaaaaaattcacatacaaaataatatttaatttacttatctttagtgttatccrtattattttcacagtcagatcttgatgttcttttaggctaatcattttaaaagagcaaaatcagtatcaagaaaaaagaaagcagaacatgtcaatggtaaatggccgcagggttaagccaattcttgaaagtcaaagagtttttgaaattttatgatatttttctttgaaaacttcttgtaatcattccttaaatctgagtatttccaatgcaagccagttgtaagagccagaaaaaggcaaaggcatgtagaatatcacaataattgtaatgataattagtttaaaacatagctctaatcaaattttacttgtgggagctataaaaaaaagtcttgggaatcttgggctacataataaatactttccaatctccaagtggaaaaacagtttctgatgaggttaatatgttcaatttcaatgtgtaattcctttttttgtgctcttttcttttatgc

SEQ ID NO: 214816 - DNA, 561 bp, Homo sapiens
ggattttttctaggaccttgaggaatatagcagggtatgagataaacaaggtggctgctctcatgtcaccttactctaaaaactagaacacacacacacacacacacacacacacacacacacacacacacacacacacasagagagagagagagagagctatataactatatatttaattaaacaaagtagatatgtaaatacaaatagaaacattttcagaggcaaacatgtaacatacagattttaaagcttaaataaaagccttttctaagcatgtgatttattttttacatctcacattgcgtgatttaggacaggaaacacaataatctaataaaagatgtattgatctaaacaaagtacccagcactttaataaaatatgtcctcataatgtattagttatgaaaaagatcattttctgacaggacacattttttcaattagaaaatgtgacaggtctttgctacaacactttttcacacatagagtttatcattaagataatcttcttcttactaatcttttcgttacttaagaaccaagatgtttgtgacaa

SEQ ID NO: 214817 - DNA, 509 bp, Homo sapiens
tttcacgttttggaagcacaactggtgggtcattgactggctgtcgaaagtttgagaaatagatctgtaacttaagcaactgagtggaaattgatgccatttaactgtaatgagagactgggggagggagtcgaggttgggcgaatctgttagatcaccaagtagagatatcrggtaggcagttatatatttgggtctggagctcaagaaaaaaatgtagtctggagatacaaatcgtatgtcatgagtgtaagtcacggggcaagatgaagttacctggggagagacttgacacagaaaagagagtttaggctgaaccttggagtactctaaattttcaaagttgaggaaatggatgagaggccaggtagcagagattctttgcttgactaaactttagttaagctcctgaagtttctccaaggcccatctgtgcaattccttatacaattcagcttagcaaagaaccctgctaagtcagtttagcaagacacacccccattcctact

SEQ ID NO: 214818 - DNA, 509 bp, Homo sapiens
tttcacgttttggaagcacaactggtgggtcattgactggctgtcgaaagtttgagaaatagatctgtaacttaagcaactgagtggaaattgatgccatttaactgtaatgagagactgggggagggagtcgaggttgggcgaatctgttagatcaccaagtagagatatcaggtaggcagttatatatttgggtctggagctcaagaaaaaaatgtagtctggagatacaaatcgtatgtcatgagtgtaagtcacggggcaagatgaagttacctggggagagacttgacacagaaaagagagtttaggctgarccttggagtactctaaattttcaaagttgaggaaatggatgagaggccaggtagcagagattctttgcttgactaaactttagttaagctcctgaagtttctccaaggcccatctgtgcaattccttatacaattcagcttagcaaagaaccctgctaagtcagtttagcaagacacacccccattcctact

SEQ ID NO: 214819 - DNA, 515 bp, Homo sapiens
gaaacaatgttgctaaactttccaccagaacatagcaaagatctaattttctctaatttctgatgacacttttctcaccttcctttaagtcattacagctcctcaagagccatcacgcttcttttaaggcctgtcccgctaacttgcatattcctgtccctaaattactgccacattttcaggtttctgttataattctctgccagtatcaaattctttttttttttggtactaaagtattttattctattttattttatttttaatttttatttccataggtttttgggggaacaggtggtatttggctacatgagtaagttctttcgtggtgatttatgagattttggtgcacccatcaccttagcggtatacactgaacccaatttgtcttttatccttcacccctctcccacmtttcttccctgagtccgcaaagtccattgtatcatttttatgcctttgcattctcatagcttaactcccacttatgagtgagaacatacgatgtttgg

SEQ ID NO: 214820 - DNA, 563 bp, Homo sapiens
atccatttaatggaactttggttccatcccattttatataaattgtttgttgttacagatataatattagatgaagtgaatgtgtcaataacttcagatttgcaagcagacaaattagtacagtttaaatttgcccagtaggcagatttggtatggtgaaccatatgaaaagtagaagctctggggactttctggagatacttaatgggattgaaaaatatcattttcttatggcctacaaattttccatccataatgggtgtttctatccaattatgcatgtttctcttaaaaagatataatagtaattgattggtggtgatctcttaaagttatttagcaataaactcttaatgtctgatttcaaggttggtgtgggcattctatttcctaatagaatcaacagtattgtgtgtgtgtgtgtgtgtgtgtgtgtgtgtgtgtgtgtgtttactcttgttatttactcttttaattttagttctatctgttattatttactagtatatataccatattatggtattttatwtataccatattatggtattttatttatacca

SEQ ID NO: 214821 - DNA, 579 bp, Homo sapiens
cgtaaaattgaaaagaaattagagaagcagactagtatgttgacaaactaggatacttagcaatttgcaaatcaaattatacaaaatgatttaaaaagccatcgttgcctaggggccacaataaaaggatgaacaaactgaataatttgacactttcatatattttttacrtagtctttttcatgacctagttgtgtattgataaatagagaaaatgcaaatataaaataaataatttttacatcagataactttaattccttatatccacaaactgctagtatatctaaaacatcggcagatacagtcataacataaaataatattgtcttactgattttttcttataagtgtaaacatttgcttaattactatgaaattatacaatattctgaaaaatacaatgccggtggttggaagcttgggctgcagaatagccagaactggtttaagatgtatttgtgtgaccctgactaactcactcatcctgtcttaacgccagtgttttcatttgtaaggcaggaattaataatacccaattcctatggtttttgtaaactgttaaataaaacactgtat

SEQ ID NO: 214822 - DNA, 579 bp, Homo sapiens
cgtaaaattgaaaagaaattagagaagcagactagtatgttgacaaactaggatacttagcaatttgcaaatcaaattatacaaaatgatttaaaaagccatcgttgcctaggggccacaataaaaggatgaacaaactgaataatttgacactttcatatattttttacatagtctttttcatgacctagttgtgtattgataaatagagaaaatgcaaatataaaataaataattttwacatcagataactttaattccttatatccacaaactgctagtatatctaaaacatcggcagatacagtcataacataaaataatattgtcttactgattttttcttataagtgtaaacatttgcttaattactatgaaattatacaatattctgaaaaatacaatgccggtggttggaagcttgggctgcagaatagccagaactggtttaagatgtatttgtgtgaccctgactaactcactcatcctgtcttaacgccagtgttttcatttgtaaggcaggaattaataatacccaattcctatggtttttgtaaactgttaaataaaacactgtat

SEQ ID NO: 214823 - DNA, 501 bp, Homo sapiens
aatgaaaagtcaatacaaagaaggcagagagaaggaaactatgaaagaattagattttatgaaaaaatttatactctactgaaataaaggaaaggtaatacaaagaaggcagagaaaaggaaattatgagaaaattagattttatgaaamttatgaaaaaaattacagtctactaaaatagaaaactgatgagaggaatgagtgagtctaagaacatattctctggaaagataagacaaatctccattgagacagataaagaaaaaaatggagaaggctcaagtggaggcaaaactttagattcattccagattaaaaagctaatgagaatcctatgaactttatgtaaaattttggaaatctaatgaatgggataaaagtacagattgtgatataatatctacaaagaacagcacgcctgaatagccttaagactattatgctatttgcatctaaaataatgactgtgagtccaggtacccaggagaatctaatgaaaat

SEQ ID NO: 214824 - DNA, 565 bp, Homo sapiens
tttcttgttttctttcaccagaattatgtgrcatcctctatacagatgctgtgtatattttgttagatttatagccaaatattttatatccttgctgctaatgtaaatgctattatgtttttactctttaatttgaattatttgttgttggtatatagaaaagcaattgactttcagtgttaatatttgatcttataacaggtttatttgttctaggagtatttttcttaagtctgggatttgctgcataaacaatcatgccctatctgtccacattttatattttccttttcttgtcttatttcactagctatggcttccatgttgaataggaatggtaagaaggaacatcattgctgtattagtccgttctcacactactgaaacaacatacctgagactgggtaatttatggataaaagaggtttaattgactcacagttccacaggctgtacaggaggcacagctggggaggcctcagaaaacttagaagcatggtggaaagtgaagaggaagaaagtaagtcttaccatggtggggcaggagagagagggcaagagagaa

SEQ ID NO: 214825 - DNA, 564 bp, Homo sapiens
tttcttgttttctttcaccagaattatgtggcatcctctatacagatgctgtgtatattttgttagatttatagccaaatattttatatccttgctgctaatgtaaatgctattatgtttttactctttaatttgaattatttgttgttggtatatagaaaagcaattgactttcagygttaatatttgatcttataacaggtttatttgttctaggagtatttttcttaagtctgggatttgctgcataaacaatcatgccctatctgtccacattttatattttccttttcttgtcttatttcactagctatggcttccatgttgaataggaatggtaagaaggaacatcattgctgtattagtccgttctcacactactgaaacaacatacctgagactgggtaatttatggataaaagaggtttaattgactcacagttccacaggctgtacaggaggcacagctggggaggcctcagaaaacttagaagcatggtggaaagtgaagaggaagaaagtaagtcttaccatggtggggcaggagagagagggcaagagaga

SEQ ID NO: 214826 - DNA, 540 bp, Homo sapiens
gatgctgtgtatattttgttagatttatagccaaatattttatatccttgctgctaatgtaaatgctattatgtttttactctttaatttgaattatttgttgttggtatatagaaaagcaattgactttcagtgttaatatttgatcttataacaggtttatttgttctaggagtatttttcttaagtctgggatttgctgcataaacaatcatgccctatctgtccacattttatattttccttttcttgtcttatttcactagctatggcttccatgttgaataggaatggtaagaaggaacatcattgctgtattagtccgttctcacactactgaaacaacatacctgagactgggtaatttatggataaaagaggtttaattgactcacagttccacaggctgtacaggaggcacagctggggaggcctcagaaaacttagaagcatggtggaaagtgaagrggaagaaagtaagtcttaccatggtggggcaggagagagagggcaagagagaatgacgggggaagtgctaca

SEQ ID NO: 214827 - DNA, 485 bp, Homo sapiens
tcagtctactctctgtatttcactttcctttttgttaattgtattttttttgcattgtcagcctatctaatattacccaatattttgtaacccatttcctgaaatattagtcttaattatacaattaaatatactccatcctcaccctagatattatggcaaattttccttaattattttttcattcttgctctctaataagttttataggaagggctcrtgggaaaaatagtctctattatcctttaatttttgaactcatttgtttgcagtctttaagaattaaaaactttttgcaatatgttaaattccatggttatattttctttcctttgacatatttaacataattctatgtgacttctgctatgcaatgttggtattgaaaggctaaagctactctctttctagtaggataaccttataatttattgttcaaagtaagacacttgagaatgtaaaagaaggagctgttactaataaaa

SEQ ID NO: 214828 - DNA, 481 bp, Homo sapiens
tcctgtgtccatgtgttctcattgttcaattcccgcctataagtgagaatatgcggtgtttggttttttgttcttgcaatagtttactgagaatgatgatttccaatttcattcatgtccctacaaaggacattaactcatcattttttatggctgcatagtattccatggtgttatttactcttragatgtcttcaactgtaaatggtgactttgtctatttctctttgcagttttgtcaacttttctcctcatgtattctgatgctttgtcctagttgcttatacatttaaaattattatgacttcttggagaatttggctccttatcattatataatgtccctctttatacctgataattttccttgttttgagtctgctttgcctgaaattaatatagctacttgttaggactgtattttcttttcctctcttttacttttagtatatcaatgcctttatatttcaagtaaatattt

SEQ ID NO: 214829 - DNA, 609 bp, Homo sapiens
taattatctagcaagaaatttaaatgcccataataaaacatgcttccwtaagtgtagggaccagccctacggggctttgcaggtgttctcttcgtgtgcagagatgagagactgcaagaaataaagacacaagacaaagagataaagagaaaacgctgggcctgggggaccactaccaccaagatgcggagaccagtagtggccccaaatggctgggcacactgatatttattgaatacaagacaagggggcagggtaaggcgggtgagttgtccaagtgattgataaggtcaagcaaatcacgtgatcatgggacaaggggcccttcccttttaggtagccgaagcagagaggaaaggcagcatacgtcagcattttcttctatgcacttataagaaagatcaaagactttaagattttcactatttcttctactgctgtctactaagaacttcaaggaggaaccaggagtacaggaggaacataaaagtggacaaggagcgtgactactgaagcacagcaccacagggaggggtttaggcctccggatgactgtgggcaggtgtggataatatctagcctcccacaataagctgatggagcagagag

SEQ ID NO: 214830 - DNA, 592 bp, Homo sapiens
gaaacccaaagcctcatccaatactgcattcaaaaccaagtccagaatatctggctcatgcagcttctgctctgtcatgttcctcctatcaccacaaaactcaccctgcaaaacccaacatgtagtggtattgaaaggggagatcgcagtagcaaaaagtcactcttacatgaagcaatatgaaaaacacwctctgacgaccagttgttgccagttcccctgcctaggtacagagtggacaccttgttcagcaaatccagcctcctggtactgttcattctaagaatctccactgccctgaggaccatgcagctcgaatctgccctgggaaggctcacctcacccactgaattgcagctaaggtaccggacgtccttcccgattctactttaataatgtaaatcttattgctgcaaattgagctgaggagatgctgtgagggtgctcaccttagaagtacacaagccaagacttggatttctttggcagtttgaatcctttaaatggttactatcttcttctagtcaagtaatggtcttgtctgcccctttcctttgagtctggaaatttctgtctcttagcaacatgctgc

SEQ ID NO: 214831 - DNA, 592 bp, Homo sapiens
gaaacccaaagcctcatccaatactgcattcaaaaccaagtccagaatatctggctcatgcagcttctgctctgtcatgttcctcctatcaccacaaaactcaccctgcaaaacccaacatgtagtggtattgaaaggggagatcgcagtagcaaaaagtcactcttacatgaagcaatatgaaaaacacactctgacgaccagttgttgccagttcccctgcctaggtacagagtggacaccttgttcagcaaatccagcctcctggtactgttcattctaagaatctycactgccctgaggaccatgcagctcgaatctgccctgggaaggctcacctcacccactgaattgcagctaaggtaccggacgtccttcccgattctactttaataatgtaaatcttattgctgcaaattgagctgaggagatgctgtgagggtgctcaccttagaagtacacaagccaagacttggatttctttggcagtttgaatcctttaaatggttactatcttcttctagtcaagtaatggtcttgtctgcccctttcctttgagtctggaaatttctgtctcttagcaacatgctgc

SEQ ID NO: 214832 - DNA, 582 bp, Homo sapiens
aacacaggactgggtctcactcaaggcttgctggaaccattctttggctaccatctatgttctctcaaggccctgaggctctaccaccaacaagtggcaaagccagccaggcctgtgtcctttccttcagggtagtgagttccctggccaggtccagatatgctgtccaggagccagggatgagagttaaaaaacttaaaagtttaccttgtgttctattgtactggagctgtgctggcactcaaaccacaagatgtagtccttccaactcttccctcccatttccaaaggcagaggagcctcaccccatggctgttgcaccacaggcccatagagagtactgccaggctactgttaatgtttccttaagactcaagggctttgcagtcagattatggtgaatgctgactgatgtgggactcaccgttcagggcagtggrctcctctttggcttagagcaggtctagaaataccatctaagagccaaggtctcgataccttggctcaggtacccaaagagcctgtttgacattctaccccgctgtggcagagatggtacctaatgtgcaagacaaagtctcc

SEQ ID NO: 214833 - DNA, 465 bp, Homo sapiens
ttgtttctcttttatgtattttttttttttagacttagaatgaacaaactcaggacttagaatggagtttgagagcaaggagaagcataayccctcactcccagaaagaattggaattgggacagttgagtcaatattgttgcaagtgttataaagcagaggcatgtacttgtgaagagcatgatatgaccacatggatcatccgggttattgtggactttggaatctagatgagccatgataaaacagtgcctttggaaacattggttttatgtttcatagaatgtgctacacataaacagtgttttatgcacgaagatcagttgtgaaataatgagccatgagagaatgtttcagacaaataaaataatagtccttgaaaacacattgtaatgtatgattatgaaatttgaatagtatactatggagtcttaaaagctgaagacttaagcagcttagggacat

SEQ ID NO: 214834 - DNA, 465 bp, Homo sapiens
ttgtttctcttttatgtattttttttttttagacttagaatgaacaaactcaggacttagaatggagtttgagagcaaggagaagcataatccctcactcccagaaagaattggaattgggacagttgagtcaatattgttgcaagtgttataaagcagaggcatgtacttgtgaagagcatgatatgaccacatggatcatccgggttattgtggactttggaatctagatgagccatgataaaacagtgcctttggaaacattggttttatgtttcatagaatgtgctacacataaacagtgttttatgcaygaagatcagttgtgaaataatgagccatgagagaatgtttcagacaaataaaataatagtccttgaaaacacattgtaatgtatgattatgaaatttgaatagtatactatggagtcttaaaagctgaagacttaagcagcttagggacat

SEQ ID NO: 214835 - DNA, 564 bp, Homo sapiens
aatgtttcagacaaataaaataatagtccttgaaaacacattgtaatgtatgattatgaaatttgaatagtatactatggagtcttaaaagctgaagacttaagcagcttagggacrtaaggctctaatctctatttgtgtgaggttgaggaggatttgagaaggaagtgaaagctcctagcatgtccccattaccagtcccctgcctgtctctcctatctcaactctcatagcaatagagatcagattttaaattttgaccatgcccaattagtttagtttcccaaggtcatcgtgtaatttctaccatagattatctagtcacatctctcctgagatcactttcccatttcataactaaaaactcttattgaacatttagactgttttgtgactaacactctctaaagtcttttctgatgttccagggaataactgatgatgctgaatctgtattcatttttaccctgtattgaattatatcattaacattctgataccctattgtaactatttgtttatatatgttccttgctcagtagaatataactgtgaagacaggga

SEQ ID NO: 214836 - DNA, 601 bp, Homo sapiens
ggagtaactctaataaagtcaaaatagattttttaaaatacagcaaatattacgtaagtgtgatgcccttattatttttagagctcacagaagttgataagagaaacatcagacccccagtaggtaaaaagatttaygtaaaaaaagagaaaaatatacaaactgtaaggaaacaaacaagaaaatatactattcagttttgaataaacttctttctctgcaaatgcaaaaagaaggccaagtaggtatctccaaaaaatgtctctaggctctcaataataaaagataataaatgtgttaatcaattgtaaaccaaaaataaaattctaagcccagcaaccaactaaatggactaacacccttagccaaaggcattccaaagtaaactggaaaaactaattcaagccatgatgggaagagatggttagacattcctcattataccctccaccctttggaattcaggcacaactgaccagcattagcattaaaacagagaccctcagactgaaaaaacagactgtagcagtaagatactaaattgcaacctgacttgggtgtaagatcacatgacagatagcaagtcctgaaagaaattgaa

SEQ ID NO: 214837 - DNA, 553 bp, Homo sapiens
tttcaggcatactaagaaacttgcctcaaaatacacaggcaaatggtggtacagccagattgcaaatgctggcctttcacctctaaagtctgcactggtttctcccatgtggccaggtcactggaacacatatctgcctgctgtgggagactgcatttcccaccgttgtagaggtgcccactgagatgaacrctaccttgtccaaaggatgttgtggtaagagactgcacttcagagtggtagatgaaatggatggctacatagctactgccttcttttcagaatctgagactccatgatccttttcatctcagggtgtgtgtgaagggacagaggattacagatctattgccgattgttccgctatttcttcattgagcacattgtgcctcagccaggcgccagaccctctcatgcatgagggctggttcttaccttggtgcatctgtctcatgtgctaatgtgaggacaatttggcaaatgatttatcagagaaatgtatgacttcaggtgcctctgtttcttcaaatataaactggaggaaggagagggc

SEQ ID NO: 214838 - DNA, 498 bp, Homo sapiens
acttgaaattagttccaatacccattcaaaaagaaatgatgcacatccagttttcccggggaaaaacaaagacaacaaaataacacaggagtattgtttaccaagctgctaagggatatggagtagggaagcaatgtataaaaattcacaatccgagaaaaattaaactagagctaacctaggctccttgaaaaaatctgtctgccatagtgctgaggggtgtcacctacaaaggacagaaggcatgacaataataaatcagaacttgccagaaatacacacccaggagatactcaaaactgkaaaagtagtgaggtttctaatttctatttttatgctatattttctgttatagacgtgtcatagatttgtggggcatcctcttaacattttggcaatttgaaaaacgccatgctaaaatgaaagataaaagaaatgattaaaaaaaaaaactctcaaaaaccagcaattgatttgcaaggttattgtcattctgca

SEQ ID NO: 214839 - DNA, 498 bp, Homo sapiens
acttgaaattagttccaatacccattcaaaaagaaatgatgcacatccagttttcccggggaaaaacaaagacaacaaaataacacaggagtattgtttaccaagctgctaagggatatggagtagggaagcaatgtataaaaattcacaatccgagaaaaattaaactagagctaacctaggctccttgaaaaaatctgtctgccatagtgctgaggggtgtcacctacaaaggacagaaggcatgacaataataaatcagaacttgccagaaatacacacccaggagatactcaaaactggaaaagtagtgrggtttctaatttctatttttatgctatattttctgttatagacgtgtcatagatttgtggggcatcctcttaacattttggcaatttgaaaaacgccatgctaaaatgaaagataaaagaaatgattaaaaaaaaaaactctcaaaaaccagcaattgatttgcaaggttattgtcattctgca

SEQ ID NO: 214840 - DNA, 603 bp, Homo sapiens
aaatgattaaaaaaaaaaactctcaaaaaccagcaattgatttgcaaggttattgtcattctgcataatcttattttgaccttactatagaaggcaactgttccaaccaaaagaagaaaaggttgccagtcctgacatagtcaaccacagattacagtaaccaatttcttgccctgtgatactctcagaagccyacccagcttctcaggaattggcatatgtccctaagagaaaaaaataaaaacaaaaacaaacaaacaaaaactttattaaccctttgattttatctgtatcttgatttgatagttcttcattcttattagcttttcaatacctttaagaatatttttaaaaaatatcttttccaactattctcagtgaaaggatttggtagaattagctagttatgtacactattaggagaggaatttttattttcctatttaaatttattgaatgtctactatgtccagttactcttctaatagtgaaaaacaaccaaccaaacaaacaaacgaacaagaaaagataaaatacagccttcaagtaacttatattctagaggaaggtcagagaataactatcaaaattaaaatgtgtggt

SEQ ID NO: 214841 - DNA, 603 bp, Homo sapiens
aaatgattaaaaaaaaaaactctcaaaaaccagcaattgatttgcaaggttattgtcattctgcataatcttattttgaccttactatagaaggcaactgttccaaccaaaagaagaaaaggttgccagtcctgacatagtcaaccacagattacagtaaccaatttcttgccctgtgatactctcagaagcccacccagcttctcaggaattggcatatgtccctaagagaaaaaaataaaaacaaaaacaaacaaacaaaaactttattaaccctttgattttatctgtatcttgatttgatagttcttcattcttattagcttttcaatacctttaagaatatttttaaaaaatatcttttccaactattctcagtgaaaggatttggtagaattagctagttatgtacactattaggagaggaatttttattttcctatttaaatttattgaatgtctactatgtccagttactcttctaatagtgaaaaacaaccaaccaaacaaacaaacgaacaagaaaagataaaatwcagccttcaagtaacttatattctagaggaaggtcagagaataactatcaaaattaaaatgtgtggt

SEQ ID NO: 214842 - DNA, 596 bp, Homo sapiens
aagtaactcatttggaatatgcccagcgccttctccatcacaaaggcctaaagactttaccataaccttatctgacataggaggaaggaaaattactcaattctagtagcatcaattctttccgtcccacttaagaagtggggctggagaagggcagtgaatgtaggaaacatttatgaaaatccctctccaggaacacaggaccactaagagcctgagatttattcacaggattatacagtgtgtcctctgctccatactatgttgtcatacatcatcagggtttcagtacaatagcattgaattaaagctgaagaagctgccaatacccagagcctatttaaaaakgagttctcaggaaaacatttagacaacaagagagacaaaaacaaagacactggggaaaactaaagcctctgcgacccagggccacagcaaacattaaacacagccgaactcctagccagattaacataaaacctcacactaaaggccaatttacttcattacctatcacacaatatatcattttcagggttcaagatgattacaagacatgtacaaagcaggaaaaaatgcagtgaaaaagacaaaac

SEQ ID NO: 214843 - DNA, 596 bp, Homo sapiens
aagtaactcatttggaatatgcccagcgccttctccatcacaaaggcctaaagactttaccataaccttatctgacataggaggaaggaaaattactcaattctagtagcatcaattctttccgtcccacttaagaagtggggctggagaagggcagtgaatgtaggaaacatttatgaaaatccctctccaggaacacaggaccactaagagcctgagatttattcacaggattatacagtgtgtcctctgctccatactatgttgtcatacatcatcagggtttcagtacaatagcattgaattaaagctgaagaagctgccaatacccagagcctatttaaaaaggagttctcaggaaaacatttagacaacaagagagacaaaaacaaagacactggggaaaactaaagcctctgcgacccagggccacagcaaacattaaacacagccgaactcctagccagattaacataaaacctcacactaaaggccaatttacttcattacctatcacacaatatatcattttcagggttcaagatgattacaagacatgtamaaagcaggaaaaaatgcagtgaaaaagacaaaac

SEQ ID NO: 214844 - DNA, 528 bp, Homo sapiens
cgtggggctacaggagctgccggcacagctatgcgaggagatgcttcctggccagcgctgccctggaccagttccctggcttcatccccatcactcgtgagtgagaaattgttaactccggaagacaaactctgcaagcaccaaagcaagggccggcacaggagcagaggcaggacagagaaggatgttctccagccaggataatgacggtgagcttctagggaagatgaagcctctaatgccaggcatgmccccatggcaatgtgagggccagtgaggaggtgtgggctgctcctacctactcagctctgccatgcccctgctgggcagagtctgcaccttctcggagtaccttccctcttgcacagcatggagacacaccattcctagggcatgtgattgcattcatccattgaacccagatttccttgtaaggtgggcaatttgggcacagagcacaaactctggggacagatgggtaccaagtccgtgagacagagataggtgccaagctcactgctacaacga

SEQ ID NO: 214845 - DNA, 549 bp, Homo sapiens
tccatctgtcctcttattctgtgatgactattttccctctcaagaaattatccctcgtgtctagctaggggaagggctctactgtacaaggaaggaaacttactgaagcgtgcaaagtcagaaaaataacactttaaatagtactacttggaaaagtgagaaatactactagcctgagcccaaattagagcttggacccatagatgactcatggtttgaacttgctgttttgcagcctaacgggtgttggccttttgtcttagtttaaagaccacaaatgtctgccagactgaccgtggttttcgttttctcatgagattcatacacctagaaattagagactatcagagcaagaagttccctctgaggatgtcgagtccttctgagctttgctctgagtgatcttgcattttggtgctctgacagtctccccaaggcctgtgtcatgaggagacgccagggccaagcagagacaggataagggagagctggggccacacatgcctgaggggttgtattcatcwtttccgttgtggtcacatagcaaca

SEQ ID NO: 214846 - DNA, 524 bp, Homo sapiens
atgaactcttgcaaaatatccaaaatgcatttctgcttctcgcttaaggaaagacttctggttgtcctggaatttgaggtgcttgaaggtctgctgtcagctcaactttgcatcttctttctctgggatgcccctcccataccatttttagtcacgcaaaatctcytgtacttttgagcaggtcatatgtttctatgtttccccatcttctcgaagactgtcttcatcacctgcgtggccattgctcacttttctctttgtagaaactgtcttcaaaatctaggtcaaatatcatacatccatgattccttggctggctctccgaaaggtcaaatagtaattttttaaaaattaatgatgtctgtcttcttgtctatgaacagaaatgcatcatcagtgctgagtcagaaggactaaaagattaaggtttcagaagcactgggagatctgggaatgggaagtccagaagagtacccatcaaaagttagggtggctgacctgagggcttcagactgaaagcacca

SEQ ID NO: 214847 - DNA, 586 bp, Homo sapiens
tgctttagttggcagaggacattacctcacaagggaggtggcctgggtattaatatcagtattggctcaaagaagatgctttaccttccttccagttctcagctgctttttcatcttgaaaataacctcattcagataataaggattctaatactctgttctgctcaaaatttttattaatgcataataactttacatattttgtaccacttgatagaaagatataaaatgtgttttaatagggtttgaaaaatcacaattactgttatttcataatttatattaattgcagaatcagatttcccatcaataaactagtacttgaaagtgaatgaggaggtaacttcatggaaatgatgaaataagaagccccatcaattgatttctccctggaaacaatctttaaactgacaagaaactgaccatatcaactttttcaaaattctcagatcccatggaaatctcayaataccaacggagtgtttagtgaagaaagaggcttcaaagtctcattaatatatagttatgtccattttgtttacctatctaactttccctaatccctaggctcatggcagcgccctca

SEQ ID NO: 214848 - DNA, 582 bp, Homo sapiens
acatccttgcttttaacctgatcttatgaggaaagcaactggtgtctcaccattaagtatgatgttagttgtaagtttttatgaatgttctttatgaagttgaggcaatttacctctatttctaccttactgagtttttatcatgaattaatattggattttgtcaaatgctttttttgcattatttttataatgaatatayaatctttattatttagtatgttgatttattgattaaactgattgattacctaatgttcaaagggcttttcatacctgggatagattccactttgttatggtgtataaactgttgcattcaatttgctaatattttgttatctatgttctgtctatttacaggtttttatatttacgttcgtgagagatattggcctatagctttccttttctgtaatgtctctgcttgattttgttttcagactaatgcagtcttcatagaattaattactaagcaaattactctcttgtattttttaaaagagattgaataatatttgtataatttattggtgagtatttcacatgagattgagaaaagtctgtactatgctgttgttg

SEQ ID NO: 214849 - DNA, 480 bp, Homo sapiens
atttccagacctcagataacacaaggaaccagactgccatatcagactcacaaaaatcagagctcttacaaagtatccagctttcctaataattcaaaggatgcagatgatgataaaggcaattcacaaaaatgtctgcgatcactagtgcagctcctcacatcctgtgccacacgaggatgtgggctggtccagatttaatgtttgaggtttctaagtgatgcatgtaggccatcgtttccacaaggaagccattgtggttacgaaacagctccatttgtttgctccataattatatctttgacctaacattttccactgggccatatcccacaaccccaggagttcytcattcatttgctgtaagcaacctagacagactagatacaccccgtaaaaaggatgccacagaaaagggtctcattacctttctgctagtaaataccttcaggaggcctgattagtatgtttccaaggatt

SEQ ID NO: 214850 - DNA, 532 bp, Homo sapiens
ctcagtcaaaaaaaaaaaagaaaaaaaaaagaataaagatccatgagcagccaatgattgcagctgtgattgaatcactttagttatgagatgcaggctgtttggtggtgaaagctgtggtgttgggagaaatgagagggagaatacgatactttacaaatttttcggttttttttttttggagacggaagtggcagtaggaattagaagagcatcttagcagggcatgccttctgacagtkgcaaagaagagaagcagctaaaagaagactaaaggtagaacagctctcctctctggggaggcaaagagccgttaaaagttgtcagtcacttctaaggctagcactgtgtttgtgtttctctgaagacttatcacatatggcaagttctacgaactggaaagggggtcagaaaggcattgactataagggcaagccaagcccttcttgcttcagtagtttcctggggcatgactgttttgagacagctgaacacttcagtcttcactctcactacccaacacagagcagca

SEQ ID NO: 214851 - DNA, 532 bp, Homo sapiens
ctcagtcaaaaaaaaaaaagaaaaaaaaaagaataaagatccatgagcagccaatgattgcagctgtgattgaatcactttagttatgagatgcaggctgtttggtggtgaaagctgtggtgttgggagaaatgagagggagaatacgatactttacaaatttttcggttttttttttttggagacggaagtggcagtaggaattagaagagcatcttagcagggcatgccttctgacagtggcaaagaagagaagcagctaaaagaagactaaaggtagaacagctctcctctctggggaggcaaagagccgttaaaagttgtcagtcacttctaaggctagcactgtgtttgtgtttctctgaagacttatyacatatggcaagttctacgaactggaaagggggtcagaaaggcattgactataagggcaagccaagcccttcttgcttcagtagtttcctggggcatgactgttttgagacagctgaacacttcagtcttcactctcactacccaacacagagcagca

SEQ ID NO: 214852 - DNA, 558 bp, Homo sapiens
aattggttgacactaatgacacttccctgtgtctaacccttgtccccatcatccaattctttctgcccttacctggcatctgtaattaatttctttgcctccaatgttacttctctgtttggtagtgcaattgaagaccacataaaamtgctgctagaatgcatctcctttgttagcagatttagtattctaatgtgaaattccttctcatcctttaaaacccagttaaatctgacttctataaagtccttattgactatcccaaagaagaggggatttctctttctaaaatttgtagtaatgtgtttctggaatgtattctagttttgactatggttaggaatacacatgctttacctttctaataattttgaaaactcaaaggcaggcagtaggatatactcattttttaaattttctaaagcaccaagatgagcccattacatagaataagttgagtttttgttgagttgtcagggatctgggaagaatggtttggcttttaggagaggttctcagccaaccaggaaggaaaaaaaaaatgattcagtgattagt

SEQ ID NO: 214853 - DNA, 553 bp, Homo sapiens
actaatgacacttccctgtgtctaacccttgtccccatcatccaattctttctgcccttacctggcatctgtaattaatttctttgcctccaatgttacttctctgtttggtagtgcaattgaagaccacataaaaatgctgctagaatgcatctcctttgttagcagatttagtattctaatgtgaaattccttctcatcctttaaaacccagttaaatctgacttctataaagtccttattgacyatcccaaagaagaggggatttctctttctaaaatttgtagtaatgtgtttctggaatgtattctagttttgactatggttaggaatacacatgctttacctttctaataattttgaaaactcaaaggcaggcagtaggatatactcattttttaaattttctaaagcaccaagatgagcccattacatagaataagttgagtttttgttgagttgtcagggatctgggaagaatggtttggcttttaggagaggttctcagccaaccaggaaggaaaaaaaaaatgattcagtgattagtgacaac

SEQ ID NO: 214854 - DNA, 558 bp, Homo sapiens
aattggttgacactaatgacacttccctgtgtctaacccttgtccccatcatccaattctttctgcccttacctggcatctgtaattaatttctttgcctccaatgttacttctctgtttggtagtgcaattgaagaccacataaaaatgctgctagaatgcatctcctttgttagcagatttagtattctaatgtgaaattccttctcatcctttaaaacccagttaaatctgacttctataaagtccttattgactatcccaaagaagaggggatttctctttctraaatttgtagtaatgtgtttctggaatgtattctagttttgactatggttaggaatacacatgctttacctttctaataattttgaaaactcaaaggcaggcagtaggatatactcattttttaaattttctaaagcaccaagatgagcccattacatagaataagttgagtttttgttgagttgtcagggatctgggaagaatggtttggcttttaggagaggttctcagccaaccaggaaggaaaaaaaaaatgattcagtgattagt

SEQ ID NO: 214855 - DNA, 595 bp, Homo sapiens
aaattagcttggtttaataatagtcattcctgattactctctctgtggaaaacagcttaagaggcacattattcaattaaagaaagtatttgcctcgccctttaaaaccttcattttatataacctattgattgtgaatccaattagtcttacatattaaacttttattacttttagtatagcacttttacatgccatcgggaaactcatcaccatgtaaaatgcatgtagttcctgactttcaaacaagaggtatttcagaagatcactgctaagtcagtgtttcaaatttgaatatacatgttcatcctataaatgatctatattcakcctataaatgatgacatgattatatatatagtcgtcctacaaataatcatcctataaacaattattgggttcctggggtaacagcaaagcaaaataattagaacatttttgttaataatatacctagtaataataatgtagctgggaaaataatgaacaaaataatatagctgaaatagtagtcctacgttttagggacaaggttagaaagaagagagcaccaggggttggagggagagagtggttcctcatatacactgtgata

SEQ ID NO: 214856 - DNA, 555 bp, Homo sapiens
tatatgcatttagtgttacaatttccctctaagcactcctttcactgcatcccacacattttgataagtttggttttcattttaatttagtgcaaaagatttttaaatttttcttgtaatttattttttctaaataacacataycttctttagaagtgtgttatgtgatccccaaatattttgaaaatttccaactatctttcttttattgatttctcacttaattctattttggtctgagagcagacactgtatgatttgtattcttttaaatttgtatgtgttattacccagaacgtgatctatcttgttgaatattttatgtgagtctgagagcaatgtgccttttgtggctgttggatgaagtagtttataggtgtcgactgtacctagttgatctagtgtttttgagttcagctatggccttactgattttctgcctgctggatctgttaatttatggatgaagggtatcgaagttgccaactataacagtgggacttaatctaattctctgggcagttctatcaatttttgctttaagtatttttacat

SEQ ID NO: 214857 - DNA, 612 bp, Homo sapiens
gatcacgttaaacaaaaacaggacattttgattcatggatgtgccaagttacaaagtttatcctttcaaaagtttaatgctgagtgatatggttaggctttgtgtccccacacaaatctcatcttgaattgtaaccccgtaatccccacgtgtgaaggaagagaccaggtggaggtaattgaatcatggggacagtttcccccatgctgttctcacratagtaagttctcaggagatccgatggttttataaggggccctccccacttcactaggcacttctccttcctgccgccttgcgaagaaagtacctcgcttccctttcaccttctgccatgatgaggcctccccagccatgctgaactgtgagttagttaaacctctttcctttataaattatcagtgtcaggcagttatttatagcagtatgaaaaaaagactaataccctgggtatcaaggtctttatggttttcatcaggataccaagttctagcccacagcctgtgagttatagggtggcttggtggcttggtcatgatgacaaaccccatcaattcccaaatatgttgaattaattaattaacacattaattcaacaagtatttatgcagt

SEQ ID NO: 214858 - DNA, 612 bp, Homo sapiens
gatcacgttaaacaaaaacaggacattttgattcatggatgtgccaagttacaaagtttatcctttcaaaagtttaatgctgagtgatatggttaggctttgtgtccccacacaaatctcatcttgaattgtaaccccgtaatccccacgtgtgaaggaagagaccaggtggaggtaattgaatcatggggacagtttcccccatgctgttctcacgatagtaagttctcaggagatccgatggttttataaggggccctccccacttcactaggcacttctccttcctgccgccttgcgaagaaagtacctcgcttccctttcaccttctgccatgatgaggcctccccagccatgctgaactgtgagttagttaaacctctttcctttataaattatcagtgtcaggcagttmtttatagcagtatgaaaaaaagactaataccctgggtatcaaggtctttatggttttcatcaggataccaagttctagcccacagcctgtgagttatagggtggcttggtggcttggtcatgatgacaaaccccatcaattcccaaatatgttgaattaattaattaacacattaattcaacaagtatttatgcagt

SEQ ID NO: 214859 - DNA, 612 bp, Homo sapiens
gatcacgttaaacaaaaacaggacattttgattcatggatgtgccaagttacaaagtttatcctttcaaaagtttaatgctgagtgatatggttaggctttgtgtccccacacaaatctcatcttgaattgtaaccccgtaatccccacgtgtgaaggaagagaccaggtggaggtaattgaatcatggggacagtttcccccatgctgttctcacgatagtaagttctcaggagatccgatggttttataaggggccctccccacttcactaggcacttctccttcctgccgccttgcgaagaaagtacctcgcttccctttcaccttctgccatgatgaggcctccccagccatgctgaactgtgagttagttaaacctctttcctttataaattatcagtgtcaggcagttatttatagcagtatgaaaaaaagactaataccctgggtatcaaggtctttatggttttcatcaggataccaagttctagcccacagcctgtgagttatagkgtggcttggtggcttggtcatgatgacaaaccccatcaattcccaaatatgttgaattaattaattaacacattaattcaacaagtatttatgcagt

SEQ ID NO: 214860 - DNA, 532 bp, Homo sapiens
ttatagggtggcttggtggcttggtcatgatgacaaaccccatcaattcccaaatatgttgaattaattaattaacacattaattcaacaagtatttatgcagtgccttgtctatgctcagcattctgtgagatactgtctggtaaacaaaatayacctaagacatagtgtcttacctgaaatagaatcctagggaattaggtgggcaggcatacctaatctgtaattgagttggtactaaaatcagtgctggtttctatgttgttgttgttgttgttattgtttggggtttgggcttgggttttgggttttcctgtatatttccacttgagtagtaatgttacagtatgtttgtttatttgtcttgtttgtttttggttttggacttggttgacaaaatcagaatatatatgttatgggtttgcagttttcaatcactttttaaccctgttaactttagtctcaagtaaacaaaaaattactgagacttctataaatctaagcaatgtcaggttcagaaaaagggtggcat

SEQ ID NO: 214861 - DNA, 614 bp, Homo sapiens
tcatgatgacaaaccccatcaattcccaaatatgttgaattaattaattaacacattaattcaacaagtatttatgcagtgccttgtctatgctcagcattctgtgagatactgtctggtaaacaaaatacacctaagacatagtgtcttacctgaaatagaatcctagggaattaggtgggcaggcatacctaatctgtaattgagttggtactaaaatcagtgctggtttctatgttgttgttgttgtygttattgtttggggtttgggcttgggttttgggttttcctgtatatttccacttgagtagtaatgttacagtatgtttgtttatttgtcttgtttgtttttggttttggacttggttgacaaaatcagaatatatatgttatgggtttgcagttttcaatcactttttaaccctgttaactttagtctcaagtaaacaaaaaattactgagacttctataaatctaagcaatgtcaggttcagaaaaagggtggcatttgtggtgtatgccttttcactcccctttgctctagtatctcaggctttcctgtgtcctccaggctgacatttagtcccatggaaacaagacttataaggagcatt

SEQ ID NO: 214862 - DNA, 532 bp, Homo sapiens
ttatagggtggcttggtggcttggtcatgatgacaaaccccatcaattcccaaatatgttgaattaattaattaacacattaattcaacaagtatttatgcagtgccttgtctatgctcagcattctgtgagatactgtctggtaaacaaaatacacctaagacatagtgtcttacctgaaatagaatcctagggaattaggtgggcaggcatacctaatctgtaattgagttggtactaaaatcagtgctggtttctatgttgttgttgttgttgttattgtttggggtttgggcttgggttttgggttttcctgtatatttccacttgagtagtaatgttacagtatgtttgtttatttgtcttgttygtttttggttttggacttggttgacaaaatcagaatatatatgttatgggtttgcagttttcaatcactttttaaccctgttaactttagtctcaagtaaacaaaaaattactgagacttctataaatctaagcaatgtcaggttcagaaaaagggtggcat

SEQ ID NO: 214863 - DNA, 479 bp, Homo sapiens
tccctcaggtgtcctcaggagtgtcagagttktcccaactggaggagaaaaagctagactgccattttcccacccccaatggtcattggttaccagcatgtgtggaagatggcagtcctcaggcacttctggctcctggaggctctggaaggcaaagagaagtctgccaaagaatatcacagatgatggccattggaagctttccaagggttcaggttttcagaactgtttagaagagatgggaagagatttgggtcattacagcactggccgcagcactgtctgctatgtaagtgcatgactagatggaccttgagctattcttcaggtccagataagggatctatgtgtcattttaaacactggcttcatgtacttgcctgaccacaaagggcaatgtcaccaggaatataaagtcaaataaaatgggtcctgtaaaagacaatttgctgctgggttgcagtttaatccatgacctc

SEQ ID NO: 214864 - DNA, 447 bp, Homo sapiens
agtgtcagagttttcccaactggaggagaaaaagctrgactgccattttcccacccccaatggtcattggttaccagcatgtgtggaagatggcagtcctcaggcacttctggctcctggaggctctggaaggcaaagagaagtctgccaaagaatatcacagatgatggccattggaagctttccaagggttcaggttttcagaactgtttagaagagatgggaagagatttgggtcattacagcactggccgcagcactgtctgctatgtaagtgcatgactagatggaccttgagctattcttcaggtccagataagggatctatgtgtcattttaaacactggcttcatgtacttgcctgaccacaaagggcaatgtcaccaggaatataaagtcaaataaaatgggtcctgtaaaagacaatttgctgctgggttgcagttt

SEQ ID NO: 214865 - DNA, 443 bp, Homo sapiens
atttggagataaggcctttatggaggtaattaaggttaaatgaggtcataagggtagggacctgatctgctaggattagtcctcataagcagaaaygccggagagctcactggctccctgccatgtgaggacacagcaagaaggtggccatctgcacataagggagagagccctcaccaggaaccagattggatggcaccttgatgttggactttccagtctccagaactagaagaaataaatttccgttaagacacccaggttgtggtatcttgttacagcacctgaaggggactaagatagaaatgtaccttaaaactaatctaacctaagtctcttacttaaaggataagaaaactgaagccagagaagttaagtggctttctaaaggtcacaaagtcagtatataccagaactaaacccattaaccacgtggcagttca

SEQ ID NO: 214866 - DNA, 433 bp, Homo sapiens
ccacatttgtggtcaggaggcaagtgagatggtcatcactttcacttaagtcctttttagcaataggcatgttaggcattggaatggatgtgcaagcgaaatggacacaaaccaaaaatggaagaggcaacctgtctatggccttaccatcccgaatatgcctgatctcagaagctaagcagggttggtttggctagtacatggwtgggagaagagataactagctgagacttcagtatgtagcttataggctgcttcagccttcaagcacagcttaattatatgtattactggggaagatccttttctggaaagaggcaacattttaagaccattcaagattaacctttacttgagcaaaaagaaatgtttctactttcaaatgctttttggtaaaaatctttaaaaaataataaatgcttcaaagagaata

SEQ ID NO: 214867 - DNA, 433 bp, Homo sapiens
ccacatttgtggtcaggaggcaagtgagatggtcatcactttcacttaagtcctttttagcaataggcatgttaggcattggaatggatgtgcaagcgaaatggacacaaaccaaaaatggaagaggcaacctgtctatggccttaccatcccgaatatgcctgatctcagaagctaagcagggttggtttggctagtacatggttgggagaagagataactagctgagacttcagtatstagcttataggctgcttcagccttcaagcacagcttaattatatgtattactggggaagatccttttctggaaagaggcaacattttaagaccattcaagattaacctttacttgagcaaaaagaaatgtttctactttcaaatgctttttggtaaaaatctttaaaaaataataaatgcttcaaagagaata

SEQ ID NO: 214868 - DNA, 439 bp, Homo sapiens
gaattctttgtactggcaaaaaatattacatgaacgataatataggagaccctctgttatgtaaaattacgctatttattactttagcaagttccaatagaataatcgttgatggccctgaggtgtcacatgatcctgaattacttaattgttacatatattcaggaaaataataatgttaactgcatcatgctctastctaagcttcaagaaattggtaatacaaatattctatataatctagcattctacctaaatatttgatcatttgtgacaactacattgaatgagagtttaccatacttttttaacaaaagaaaaaatatagcttagttagctattgatgagacctactagaagaaattaaaactcatatcttatgatttatcacaaagcatttgagcacaaagcatttgaatttgatgttaattcaccttgg

SEQ ID NO: 214869 - DNA, 471 bp, Homo sapiens
actccaggtctcacatccgggtcacactgatggtgggctctcacagccttgggcagctctgtccctgtggctttgcaggctatagcctccctcctgactgctttcatgggctggcattgggtgtctacagctcttccaggtgcatggtagttctccatgagcaccccgcccctgcagcaaatttctgcctggacatccaggcatttccatacatcttctgaaatctaggtggagggtctcaaacctcagttattgacttctgtataccttcaggctcaataccatgtggaagctgccaggacttggggcttgcaccctctgaaaccattgtccaacctgtaccttgaccccttttagtcacacctggagcggctgggatgcaggacaccaattccctagactgcatacagcacagggaccctgggccaccccacraaaccatttttctctcctaaggcctctgggcctgtg

SEQ ID NO: 214870 - DNA, 573 bp, Homo sapiens
gaatatctataacagcctcttgccacacttaaggtgttatggttttcaggaaaataaatcatagaatgtttgctggagtatcattgataattagaaataaaataaatttatcaatgtaaattttgctttgtgaacttgtgtcttttttttttttttttttttttttcccgagatggagtctcgctctgtcgcccaggctggagtgcagtggcatgatctcagctcactgcaagctccgcctcccgggttcatgccattctcctgcctcagcctcctggtagctgggactacaggcgcccaccaccacgcccaactaattttttgtatytttagtagagacggggtttcacagtgttagccagtatggtctcgatctcctgacctcgtaatccgcccaccttggcctcccaaagtgctttttacaggcgtgagccaccgtgcccagccgtgtctttcatttttaaccatatttctacttgatgtattgtaaaatactctaatgtttattaatgttccttgtcattagttataaatggcaagtggatatcatccagcattttgtttgctggtata

SEQ ID NO: 214871 - DNA, 523 bp, Homo sapiens
tggccacttagaacctgtacttccatcaacatatcccttttctctctgtattgcgatttcttggtcactcmtgtcttccccactatgttaaataaattaacattcaatgaagaagcaggtattggataatgtcaaacatcttttgacatttatagagatgatatgttgtatttttttctacccactgatggtattaccaatatatttttttaaatgctgcatcatccttatatgtctggaataaaacctaattggctttggcatgactgtctcctaatacactactaaattcaattaactaatatttgatagaatctgtctatccttcagtgttctgggattgttttttcttgttttgctgtttgttgtctttgccagattttaattttataactgtacatgtaataataacttaattttactatgattctctaggttttaaactccatgagaactcccattcaacactataaacccagaatctagtaaaacaggcacacaataaatatttgttaaataaata

SEQ ID NO: 214872 - DNA, 523 bp, Homo sapiens
tggccacttagaacctgtacttccatcaacatatcccttttctctctgtattgcgatttcttggtcactcctgtcttccccactatgttaaataaattaacattcaatgaagaagcaggtattggataatgtcaaacatcttttgacatttatagagatgatatgttgtatttttttctacccactgatggtattaccaatatatttttttaaatgctgcatcatccttatatgtctggaataaaacctaattggctttggcatgactgtctcctaatacactactaaattcaattaactaatatttgatagaatctgtctatccttcagtgttctgggattgttttttcttgttttgctgtttgttgtctttgccmgattttaattttataactgtacatgtaataataacttaattttactatgattctctaggttttaaactccatgagaactcccattcaacactataaacccagaatctagtaaaacaggcacacaataaatatttgttaaataaata

SEQ ID NO: 214873 - DNA, 578 bp, Homo sapiens
atttactgaatcaactaagttttcttattcattttatccccaaatagttggctacccttaaaagtacattgaacaattccttcaataaatgtctgtgagtgataaactttctagtttttgaaagagatcagtcttttctccctcttgaataacactttatctgacagatatactttatctgactgtatcctttgaagacattcttacattaccttcagacatctgcttttgctactgggaagtttgctatcagtctacctattgctccttaaaagataattttgggctgggcgtggttgctcacacctgtaaacccagcactttgggaggccaagacaggtggatcacctgaggtcaggagttcaagaccagcctgaccaacatggagaaacaccatctctactaaaaatacaaaattagctgggygtggtgctgcatgcctgtagtcccagctactcaggaggctcaggcaggagaaatgcttgaacccaggaggcagaggttgcagtaagccgagatcacgccattgcactccagcctgggcaacaaatgcaaaactccatctcaaaaaaaaaaat

SEQ ID NO: 214874 - DNA, 628 bp, Homo sapiens
tttaaataaagtctgagatactgggggttagaacttcaacatatgaatttgggaagacaaaattctgtttattacaaaggccatctacaaaaaaagggttggaaatgagatgcgaagcgcattgcagatttggtgtcaaagtagaaagattagacaacctctgttttctctaaaatgtcttagccaatgtccagagcaggtaatggcaatggtgggaagaggggaggggaagtcagagaagaataaagaaagtgtaagctgttagttactaatgatgaagataaaacttactgaaaaaatagatttctgagcaatgtcaaaggcttggttgaagcaagggaacaatgtaagtctgcctgggggatgtagttcttctctgccacccacttagctgccgtggtaaagtctcagcaaagatgtgyagtgggttcattcacaatgcggttttgtcagagagggtgattggagaggagaggggaaagggaatcacgatactgagttgtggaatctcagctagataaggatgaaggcaaagaaagatagggaaagatagatacaaaggaagtggataaatctgtgaattcgaggtgggaaattcatttagtgacattatatttcctaggctctt

SEQ ID NO: 214875 - DNA, 555 bp, Homo sapiens
acgtatttactatcacaagaacagcataggaaagacctgtccccatgattcaaktaactcccactaggtccctcccacaacacatgggaattcaagatgagatttgggtggggacacagccaaaccataccaccaaactttaaactagttggcttaggattgggctttggggaagggaacccagaagcctgacatgccagcaaaagggtaaaagtgttttttaccagttggatttttgtctccctctccatgtccaaactagtaaaagactttgggatttttgagctatccttacgcccaccttgttttgttttaacacatgttttctaataatctggtttgtctcttttgccttcaggccaccaaactccaaatgttcatgcaaccagagccttagacaatggccccttttgccagggaaccttagatgaacctcagagagaaccctgactgctgttttcccaaaacagcactccctatcagcaggaagctgttaagatcagtcttcctcctcatccttattctaatggcagttagatgtacttctttagaggg

SEQ ID NO: 214876 - DNA, 503 bp, Homo sapiens
ggtaataatggctaacattgatcaagtgaccagtatgtgccaggattcagctaacttttgtttttgtttgttttgtttttttgagacagagttttgctcttgttgcccaggctggagtgcaatggtgtgatctcagctcactgcaacctccgcctcccgggttcaagcgattcccctgccttagcctctggagtagctgggattacaggcatgtgccaccaagcctagctaattttgtatttttagtagagacagggtttctccatgttgttcagtctggtctcaaaytcctgacctcagataatctgcccacctcggcctcccaaagtgctgggattacaggtgtgagccactgtaccttgcctcagctaatttaatgatcacaacaagccattagtccttattcccactcagcagatgatgagacagaggcatgaagaggttaagtaacttgccccaggtaacagagccaggatgtggcagaaccaaatacaaatttctct

SEQ ID NO: 214877 - DNA, 613 bp, Homo sapiens
taggactttatttcattattttctctttggtctttagttctgaggattccacttatcgtatggggtgagggtttggggagcatgtgatgaagtggtgggtgattggttgctagttattacaattctagctagagagaccattgagatagttctgatggcttcaatggcttccctcattgaccacaaccatagtcagggatgccatctccatgcctatggtggctccatgatttacctacgacaggcttttcagccccctcggtcactgcacatctatttgggggatgctataagaacttcccaggctttattgactcacaactcaccttttcctccctttccccttctggtggtagctgcctggttagaagccacactgagatatgctcaccagaatcctycccagctaccactttccaaagtgtaagccaggaagttgtgccccctcttatttcctggggagtttgaggtgggttttcactctgaaattatttctaacctctttggttcattttgtcagcttgggagaggaagaatcactaagcctgcttgactccactatctttatcatgacttggcaaaggcagtttagtaacacagtaaaaagctaatg

SEQ ID NO: 214878 - DNA, 602 bp, Homo sapiens
gtataggaaaaactcgcccccatgattcaagtacctcccaccagttacccccatgacatgtgggaattattacaatccaaggtgagatttgggtggggacacagaaccaaaccgtatcaatgatctgtacctgaagaaagttatttccctccttttcttttttttctttttcttttttttcttttttctctttttttttttttttttagacagagtctcgctctgttgccaggctggagtgcagtggtgcattctcagctcactgcaacctctgcctcctgggttcaagcgattctcctgcctcagcctcccgaatagctgggattacaggtacgtgccatcacacccagctaatttttgtatttttagtaragtcggatttcaccatgttggccaggatggtcttgaactcctgacctgtgatcttcccacctcagcctcccaaagtgctgggattacaggagtgagccactgtgcccagccatttccctccctttctacccataaggaacattcttgtctgttccatcctttttatcatagaaaatgtctttctggttacccacttaactgctatctaaacttcacatttttcaagaatt

SEQ ID NO: 214879 - DNA, 602 bp, Homo sapiens
gtataggaaaaactcgcccccatgattcaagtacctcccaccagttacccccatgacatgtgggaattattacaatccaaggtgagatttgggtggggacacagaaccaaaccgtatcaatgatctgtacctgaagaaagttatttccctccttttcttttttttctttttcttttttttcttttttctctttttttttttttttttagacagagtctcgctctgttgccaggctggagtgcagtggtgcattctcagctcactgcaacctctgcctcctgggttcaagcgattctcctgcctcagcctcccgaatagctgggattacaggtacgtgccatcacacccagctaatttttgtatttttagtaaagtcggatttcaccatgttggccaggatggtcttgaactcctgacctgtgatcttcccacctcagcctcccaaagtgctgggattacaggagtgagccactgtgcccrgccatttccctccctttctacccataaggaacattcttgtctgttccatcctttttatcatagaaaatgtctttctggttacccacttaactgctatctaaacttcacatttttcaagaatt

SEQ ID NO: 214880 - DNA, 637 bp, Homo sapiens
aacattttatttgggaagcaagaattgccatttggggcatacacaaagaccagatggccttcaatatgtccaaagaacaaagagaaggttggaggtcttatgaaaaggagaaatgttatgtactttttggaaagacagttcattggcactagtagagttttttggggagctggcaagctctgactgctgagtgactgcaatgggtaaaactagtcttagayttgcagcagatggtttcagttgttgttagataaaactggtttcagattacaataggcagtttcagcagtcaggcttgcaaagaatcacatttttgggatcgtgtcatgtgccccaagtaacttttccttctggcctctggactgtggttttgttcaacatgacaaggatggcccagttcacatgatcaattttcacagctagaaaggcagagaaggagtccctgcaaactttcagtccttggaagcaggggctctgaaataaacacaaaagacgtctcacccttgatatacttgaaatcaaaggagaactaaaactaacttaacctgaaacccaatcccaatgcatctcaatttcttgacagagaaaagaagatatcttgtctggggaaaataacattggcctcagtctctatggt

SEQ ID NO: 214881 - DNA, 581 bp, Homo sapiens
ataaataaatagatgaatatgactttccccacccttttcccaaagaagcaggtayaccccaagctggaagattcccacctgaggccaaagtagctcttgcatggcagccagatgtttttgtgaacaacttgtccacaatagggtctagaccaaggcaaattagtaagaaggatgagatggagacatattatgctagcaaatgttggtagagaacttgccctgccaccaaggtgtttgcctttttggttccagttgggcttggttaaggcagaaaacccaccttcatttgacactagttaatgactttttggtgtacttcactactcatccttctggcccatatcatctcacttctccatgtacagagcctgcctaggactggtggctttggctttacctgtctcggatgaggtatcaggaggttgccacaaatgttctgagggaaaaaactaaaaacagaactaccatttgacccagcaatcccattactgggtatatacccaaaggaagatatattgtcctaccaaaaagacacctgtacccacagcactactacccacagtagcaaggacatgggacaa

SEQ ID NO: 214882 - DNA, 614 bp, Homo sapiens
ccccagctctggaatcatccgcttctccaagtagtcctggtttctttgattgggaatggtatttagaaacaaagatctgtgtactaaatgtcctcattgctactagggtgtcattaattctaagccttcatagtggacatagctagaaaatatatgtatgtgttctgatccacatttgtgaacaccattatatttgtgccctctctgcatatatatttaaaactgtgagttcatattgatacttcctatgacaatccaaagccacagggttaattctagccttccctctttccttatttcgtaatttatttatttatttttatttatttacttattttttgagacagagtcttgctgtgttgcccaggctgaagtgcagtggtgcaatcttggctcactacaacctccgcctcccaggttcaagcaattctcctatctcagactcccaggtagctgrgattacaggcacccaccaccatgccagtttcattttttgtattttagtagagacaaggttttgccatgttggccaggttggtctctaactcctgacctcaggtgatctgcctccctcagcctcccaaagtgctgggattacaggcatgaggcactgt

SEQ ID NO: 214883 - DNA, 443 bp, Homo sapiens
cagcccaacccagctttgatccacctgactggtgaccagcaacattgaggcagggacaccttagccgtatcattaagctgccacaacaaaatacctggggtmcccaaatagcagacatttattgtcacacagttatggaggatggaaatccaagatcaaagtgttggcagggttggttcctttggaggcctctctccttggcttcagaaggccaccttctccctatatcctcacatgaacttttctctatgtgagtgcatccctgatttctctttctcttcttatgacgacaccagtcagattggattagggatccactctggcaagctcattctaacttaatcacctcttgctgtggtttgaatgtatcccccaaagctcatatgttgcaaacctaatgcccaatgcaacaatgttgagaggtgggacctttaagaggacag

SEQ ID NO: 214884 - DNA, 443 bp, Homo sapiens
cagcccaacccagctttgatccacctgactggtgaccagcaacattgaggcagggacaccttagccgtatcattaagctgccacaacaaaatacctggggtacccaaatagcagacatttattgtcacacagttatggaggatggaaatccaagatcaaagtgttggcmgggttggttcctttggaggcctctctccttggcttcagaaggccaccttctccctatatcctcacatgaacttttctctatgtgagtgcatccctgatttctctttctcttcttatgacgacaccagtcagattggattagggatccactctggcaagctcattctaacttaatcacctcttgctgtggtttgaatgtatcccccaaagctcatatgttgcaaacctaatgcccaatgcaacaatgttgagaggtgggacctttaagaggacag

SEQ ID NO: 214885 - DNA, 443 bp, Homo sapiens
cagcccaacccagctttgatccacctgactggtgaccagcaacattgaggcagggacaccttagccgtatcattaagctgccacaacaaaatacctggggtacccaaatagcagacatttattgtcacacagttatggaggatggaaatccaagatcaaagtgttggcagggttggttcctttggaggcctctctccttggcttcagaaggccaccttctccctatatcctcrcatgaacttttctctatgtgagtgcatccctgatttctctttctcttcttatgacgacaccagtcagattggattagggatccactctggcaagctcattctaacttaatcacctcttgctgtggtttgaatgtatcccccaaagctcatatgttgcaaacctaatgcccaatgcaacaatgttgagaggtgggacctttaagaggacag

SEQ ID NO: 214886 - DNA, 443 bp, Homo sapiens
cagcccaacccagctttgatccacctgactggtgaccagcaacattgaggcagggacaccttagccgtatcattaagctgccacaacaaaatacctggggtacccaaatagcagacatttattgtcacacagttatggaggatggaaatccaagatcaaagtgttggcagggttggttcctttggaggcctctctccttggcttcagaaggccaccttctccctatatcctcacatgaacttttctctatgtgagtgcatccctgatttctctttctcttcttatgasgacaccagtcagattggattagggatccactctggcaagctcattctaacttaatcacctcttgctgtggtttgaatgtatcccccaaagctcatatgttgcaaacctaatgcccaatgcaacaatgttgagaggtgggacctttaagaggacag

SEQ ID NO: 214887 - DNA, 589 bp, Homo sapiens
gaatttggccctctcttgcctttctctgttgagtatgttctgtcaccattctgccttcttctatgggatgacacagtaagaaggccctcataagatgccagtaccttgatattggacttcctaacccccagaactgtgagaaataaatttcttttatttataaattactcggtctgtggtattttattatagcaagacaaaatggactaagacacttctttaaagactttgtctccaaatacagtcacattctgaatactgggttgggggaggggaggrcttcaacctatcattcttgggagaacataattcaacctgtaatatcgcagtctctgcaactgcctctgacaccccttggcttgactttcccttcgttacagtttggccactcatgcttgtgtcctggccttatggatttggcctttggtcttggtcactgattttgccgagtgccctctcatccactctcagacttactccactcttgggagtcacagaatagaatcccaccttcactgtgacccctggccagcatcttagattgagtccctcttagttcttgcaaaaaggaatttggacatttttccaa

SEQ ID NO: 214888 - DNA, 417 bp, Homo sapiens
atcaagttcagcatcccctgcatatcatgtgatgaaatccctgcaaaatagcctcaatcctctgactcagcactttcaggamcaggggcctccctgcttcccatgacagtcaatgcagtctttggattactcctcaactaatgtttctgtcaagctctatttttcaaaaatagttattccttaaaaataaaaaaggcttttcctccttatattctccctattgccttttcttgagcgatcccttctttcgcaatagaaacagagctacagaacatgtggttgttgaggggcctcagtccataccattcacaccacgtgattcatatgaagttggccccctgtgtgcactatgaacaggcctctttctttgcatgaagactgtctgtactgagtgaaggactgtggaaagaaaagata

SEQ ID NO: 214889 - DNA, 417 bp, Homo sapiens
atcaagttcagcatcccctgcatatcatgtgatgaaatccctgcaaaatagcctcaatcctctgactcagcactttcaggaacaggggcctccctgcttcccatgacagtcaatgcagtctttggattactcctcaactaatgtttctgtcaagctctatttttcaaaaatagttattccttaaaaataaaaaaggcttttcctccttatattctccctattgccttttcttgagcgatcccttctttcgcaatagaaacagagctacagaacatgtggttgttgaggggcctcagtccataccattcacaccacgtgattcatatgaagttggccccctgtgtgcactatgaacaggcctctttctttgcatgaagamtgtctgtactgagtgaaggactgtggaaagaaaagata

SEQ ID NO: 214890 - DNA, 562 bp, Homo sapiens
ccttacagtcaatctaactcacattgcttccagttgagatctggtgactttataacattggtttggataggaagaaccatacagatgttcccaacttatcagtgggttattcttacaattttgtggctttacagtggagtgagagcaataagcatgcaataggaactgtatacccatgcactcattctgtttttcactttaagtatggtattcaataaattataagattcaacactttattataaaatakagtttgtgtttgatgattttgcccaactgcaggctaatgtaagtgtacattcaaggtagctagcctaactacgatgtttggtagattcagtgtattaaaaacattttcaacttaacaatattttatacttataatggtttatcaggatgcccattataggttgaggagcatgtattaatatacatggtgaggtcagggagaagcaaaatatgtagctttaatgagtcaatatgtacgaaaaaggaactcaaacagactcaacttgatggcatttctgagataatgttacttagaatgtattttacaatttaa

SEQ ID NO: 214891 - DNA, 408 bp, Homo sapiens
gaaacttcatagttggagtttcagtctgaaatgaaaaagggagaaaaatgagccagccttttcagagaagattgttgaaacttcctaggyataggacttggtgctgatgagagcctttttaccataggaacatatgtggaaaatcaatactgcaggtcacaagccctgtcagtaaattcctgtagtggagcaaagaccacgtagaagtgccaaccagaacagatgtcattcttaacttcattttctcaaacagagaaatgcttgcggatttaaaattggaacaaaatcttcacataagcaatcatgaattggcagaataagggattctaagagaaggcctggaaaaatgctgaaaaacgaataaaaaaaggcttaaaaacctgatctttggcaaacatgtgaaattat

SEQ ID NO: 214892 - DNA, 543 bp, Homo sapiens
tatgtaacaaacctcgacattgtgcacatgtaccgtagaacttaaagtataataaaaaatatatagagagaaaaaaagaaaatgatcaaaaacaagtcataaaatataaatgcaaaaggaaaagttataaaattctatgttctctcccatccagtaattaagtttcccaaactctaccttgcgtaaatattctgaaaatatggccagtatttttgtattaaaatgtttattcttttatttttgttaatagccaaataaggggatagttgtagtaactgatgagatagaatgttatatggccactaagcatactgttttstaagaaattttaatggtgaaaaaatgtttattatgttcaaaaatgtacatagactctatatacaatacaaatccaactatgaaaaaatatatatgtgtttgaaaatgtggcgacgtgtccacagttgcttctcctaggaagttgttcaaatagtattattaatttctacccactttggacagagttatttctcttcaaattgccaccttaatacaaggcattaa

SEQ ID NO: 214893 - DNA, 483 bp, Homo sapiens
ggtgagtccttcacacttcagtatcacaaccattcctccctatgtagtagaatgccttatttgcatagcctcttacactttatatttgagtataatattcttactccagcagaatatggcacaccatagaagcagtggtgtccagtaataaaaggagagacagcctaacaaaattcattaaatatccacacaataatcctaggaccagaagactaaccacatgcttaaagaattcattaattaaagagacaactaayctttcccattccaatttttcctcagaagtaaattataaccaaaaaataaagtgttttaacttaaaatagcattgcaatatttaagaaaatattgaaaaattttaaagtgaattaaccttacaaattttgtccttcaaattttagtctatttaagtcacataagccttatatataacttctacacttttattactcatattttttctttttcacttatattttttac

SEQ ID NO: 214894 - DNA, 547 bp, Homo sapiens
ataataccaagtgcggtaagaaggattaaaaaatggctcctaagattcctgcctcctgacatacacacagattatccaatcaaacactaatgtagatgctgtggtgaaggtattttgcagatgtaattaaagtcccaaatcaattaatctaaagatagagacactatgcagttgagccatgagcatttgaaagcaattttctctggctaatagcaaaataggaagttggagatgtgaagtatgaccagcatttaatgtgttgttattggcttagggattgaggagactatcttaaaaagactgtggacagmcagccagcaaaaacacagggaccccagtcctacaaccacaaggaactgagattttccaataaaaaaattgagcttggaggtgcatatttccccaaaacttctgggtaaaaattcagcctagtcaacactttgattttagctttgtgagaccatgaccagagaatccatccgacaccatgctggtgttctgacctgcaaaactgtgagctaataaatgagtatttattaataagtga

SEQ ID NO: 214895 - DNA, 166 bp, Homo sapiens
gatggtactatacactttctctttcacagtccaatgtaaaatcaatgatatttctagcacaggtgcacctccatgcatcctaatcctgatacagactctttctgtttaattagatttgaggtaaaacrggtcaacacctgcacagcatatccccaccctcaaaaat

SEQ ID NO: 214896 - DNA, 166 bp, Homo sapiens
gatggtactatacactttctctttcacagtccaatgtaaaatcaatgatatttctagcacaggtgcacctccatgcatcctaatcctgatacagactctttctgtttaattagatttgaggtaaaacgggtcaacaccygcacagcatatccccaccctcaaaaat

SEQ ID NO: 214897 - DNA, 539 bp, Homo sapiens
cagttgtgtgtgctttgctccctatgaggaaacacttttctgcagaacactcatgtcatgaagccagaggcaacaagaacaggtagaggcctcattatattctcatgagttcatgcttctgagttcatgaatacttcttttgctatccacactttacatccttcataccttcacaatcacctacactgtggacttcaagttccagtatcataatgagaattagamatgcagacagagctttagagagactgcttaactgctctctcaaaattgtgtaaggtaagattctgccctcgtcttgctcactttgatagatagatgatagatagatgatagatagatagatagatagatagatagatagatagatagatagatagatgatagatagagtgatatgcatttacacaactgtaactggtacacaatctaaatagaattttctactgtaaatattccttcatcccaagtctctgatttttctattttattttctccacaattttatttttccatcgtttcacagtttacactgtcac

SEQ ID NO: 214898 - DNA, 518 bp, Homo sapiens
ttcaacaaatggtaggtatatgtataygttaatctggaagctgaaggagtaaggacagacatatagtgtggtattttgtgaaattagagagagacaagaagctattgagtgcatatttgggagataatgtacaggtgtaataagagatggcaaaggtagtagagtactgggaaggaagcaaagagaaagcctgattacttaggaatctttattaaaaattaaacaagatattccaactaatatcatgaaactgattttgcatataatttattctttatatgcaacccaactgcaactcttgagttttgacaaatatgtttatccatattttagcctgagtttgtacagagccattaatccacatataaggtcctaaaagaatttggctcagtagtttataagttgcattagaattttggggaaatgatcacgtaacatcaatagtcattccaatatacatcctaataagaattacagggaaaagtagtataagtctaattttgtttcacttcttttat

SEQ ID NO: 214899 - DNA, 531 bp, Homo sapiens
atgttcaacaaatggtaggtatatgtatacgttaatctggaagctgaaggagtaaggacagacatatagtgtggtattttgtgaaattagagagagacaagaagctattgagtgcatatttgggagataatgtacaggtgtaataagagatggcaaaggtagtagagtactgggaaggaagcaaagagaaagcytgattacttaggaatctttattaaaaattaaacaagatattccaactaatatcatgaaactgattttgcatataatttattctttatatgcaacccaactgcaactcttgagttttgacaaatatgtttatccatattttagcctgagtttgtacagagccattaatccacatataaggtcctaaaagaatttggctcagtagtttataagttgcattagaattttggggaaatgatcacgtaacatcaatagtcattccaatatacatcctaataagaattacagggaaaagtagtataagtctaattttgtttcacttcttttattttctggaag

SEQ ID NO: 214900 - DNA, 518 bp, Homo sapiens
ttcaacaaatggtaggtatatgtatacgttaatctggaagctgaaggagtaaggacagacatatagtgtggtattttgtgaaattagagagagacaagaagctattgagtgcatatttgggagataatgtacaggtgtaataagagatggcaaaggtagtagagtactgggaaggaagcaaagagaaagcctgattacttaggaatctttattaaaaattaaacaagatattccaactaatatcrtgaaactgattttgcatataatttattctttatatgcaacccaactgcaactcttgagttttgacaaatatgtttatccatattttagcctgagtttgtacagagccattaatccacatataaggtcctaaaagaatttggctcagtagtttataagttgcattagaattttggggaaatgatcacgtaacatcaatagtcattccaatatacatcctaataagaattacagggaaaagtagtataagtctaattttgtttcacttcttttat

SEQ ID NO: 214901 - DNA, 518 bp, Homo sapiens
ttcaacaaatggtaggtatatgtatacgttaatctggaagctgaaggagtaaggacagacatatagtgtggtattttgtgaaattagagagagacaagaagctattgagtgcatatttgggagataatgtacaggtgtaataagagatggcaaaggtagtagagtactgggaaggaagcaaagagaaagcctgattacttaggaatctttattaaaaattaaacaagatattccaactaatatcatgaaactgattttgcatataatttattytttatatgcaacccaactgcaactcttgagttttgacaaatatgtttatccatattttagcctgagtttgtacagagccattaatccacatataaggtcctaaaagaatttggctcagtagtttataagttgcattagaattttggggaaatgatcacgtaacatcaatagtcattccaatatacatcctaataagaattacagggaaaagtagtataagtctaattttgtttcacttcttttat

SEQ ID NO: 214902 - DNA, 403 bp, Homo sapiens
catacctggatgaataaataagaaaattcaaggcatctaaattgccatgttctgctcatatattctatcctttttagcatcttaaaggaaataattttaatcagcatttcagaattgcttatttttactatataaagaagtagctcctgctagaataaaaattatttccaatgttaatgmttttcatgtcaaagtttgtaaaagttaaaaatgtattttcatgaagaagccaactgtttactttttaataattatgagttacattcagaagttgttaaaaatgcaatgcaatttgccaaaacaaataggaaaccagattacatgtaaccatgtgtatgtttactccttatccactttgctataaaatatatgttcacatttatattttatgtgatcgcatctg

SEQ ID NO: 214903 - DNA, 561 bp, Homo sapiens
actgtttactttttaataattatgagttacattcagaagttgttaaaaatgcaatgcaatttgccaaaacaaataggaaaccagattacatgtaaccatgtgtatgtttactccttatccactttgctataaaatatatgttcacatttatattttatgtgatcgcatctgtttaaatatcattctacttgaatttttaatttttctatataagtggtaaatttaaagtgattcaagtctgtgtttgcataatgtaatttttaaatgatagtaaaataaaacaggtgcagaacttgaaatttttgcagagtggattcactggcttgtattcaaaaagcttctaaaaacctgagttacctggttaaggcatctgaagccatctaagtgatatacctcctcccaattgtatctatgctcataaaacttaaggatgctgcctggttgacaaaaatcagaaagcttgtcagtyaatttacaaaagtatatgacaagtcataaaatatagaggtggtattttaagtagaaagaaactgaacacaaatggaaaaccgaaactatagc

SEQ ID NO: 214904 - DNA, 438 bp, Homo sapiens
tgacaaggtggctgggacatgatgagattttgttgttggtgctgtttgtggtttagttgtttacttacttcattaatcagcatgggagagcctgggcattattatagatagagaagaaaaattagcatgatgaaaaaagaatggaaatgccaaaaaaaaaaagagagaaagaaaacrtgatgaaaaatgtgaccccaacaagtcaaggagaaatttagtcttaaaaatgggatgtacttccaagttaaagcaatgtgtgagagaaagaaagagagtgagagagagaatgagaacataaaagtttggaagtacaaaaacaaaaaatatgaggaaactttaataataataaatagcgattattaaatacttttaaatagtcatagctaaatggcctcaatgttattagtcatatataaactgaagtcatttcaattagta

SEQ ID NO: 214905 - DNA, 438 bp, Homo sapiens
tgacaaggtggctgggacatgatgagattttgttgttggtgctgtttgtggtttagttgtttacttacttcattaatcagcatgggagagcctgggcattattatagatagagaagaaaaattagcatgatgaaaaaagaatggaaatgccaaaaaaaaaaagagagaaagaaaacatgatgaaaaatgtgaccccaacaagtcaaggagaaatttagtcttaaaaatgrgatgtacttccaagttaaagcaatgtgtgagagaaagaaagagagtgagagagagaatgagaacataaaagtttggaagtacaaaaacaaaaaatatgaggaaactttaataataataaatagcgattattaaatacttttaaatagtcatagctaaatggcctcaatgttattagtcatatataaactgaagtcatttcaattagta

SEQ ID NO: 214906 - DNA, 571 bp, Homo sapiens
tggggtgctatgatatctcattgtggttttgatttgcatttcctgataattagagacattgagcattttttcttatacctgctgtccrtgtgtatgtcttctcttgagaagtgtctattcagatcttttgcacatttattaaactgaatatttggtttactttctgttaagttcttttcattcctaatgtattctaggtattaatcccttgccaaataaataatttgcaagtattttctcccattctgtgtgttgtctgttaagtctgttgacttttttttctctgctattcagaagcttttttgctgttttaatcccagtcatctatttttgctttggttgcctgtccttttgagatcttacccccaaaaatctttgcccagaccaacggcctggagtcttcctccatgcttcttcttgtagtttcatatttttgggtcttagatctaagtctttaatctattttgatttggtttgtgcgtgtgttgagagaggtctagtttcattcttctgcacatgtatatccagtttttccagcatcctttattgagaagaccctcctttctcccaa

SEQ ID NO: 214907 - DNA, 550 bp, Homo sapiens
cagcttctcctaaattatgtttgcaatagcaaagtaaatgctaagtttcaaatttatatttctgtctatttcatgattagggaggaacttatgttattaagacaatcagttcccaaattaaaatgtttgagacatatgtaatatattctcaaaatacctgtgtataagaactgcctgggatgctttggaaaaagacatgtgtccaacaattaactcaaaattctttgacttattaagtatagttagggcaaataaataagcattttgtcaagaatcccatttgattttgatgtagtcagttcacttggagatctgtttgaggaaatggaataaaattcctttggaaccaaacagctctagtgacatattaaacagcagtctataagtttatatgtgaaaatctttgataaaataattcaaagtaaataaaatatgatctayggcttgaaaagtacaaagaaaacatggcaaaataaatcatgttgctacagacaaatcctaatgcaaatactgtcacctcaagcatttcaaaacttagcctcatatttga

SEQ ID NO: 214908 - DNA, 555 bp, Homo sapiens
ttttcatctttgtatccttattctataaacttatttctgttttaaaatttttttttaaatttaacttttcaattttttgttagaaactaagatactaaaacacacattagtctaagcctacaagggcaagratcatcagtatcactgtctttcctctccatgcattgtcccattgaatgtcttcaagggcattaacatacacggagttgtcatctcttgtgataacaatgccttcttctggaagtattcctacaggaccaacataggctgtttcacagttatctttgtttttataagtagaaggaatacactataaagtaccaaggaatagtatagtatggtaaatgcatataccagtaacttatttattatcattataatgtattatgtactgtacagaattgtgtatgctatacttttatatgactggcagcacagtaggtttgtttacatcagcattgccacaaacatgtgagtaatgtgttgtgctatgccattaccatggctatgatgtcactaggcaatagaaactttttagctccattatcatcttgt

SEQ ID NO: 214909 - DNA, 532 bp, Homo sapiens
gcatgacattatttttaaagtcccttttctaatataatatttgaatgctttatttttctgtaaaataatagcagaaagaataaacctttcaatggaaatcatccaacatattctcaccagcaccataccagatgctgtgtgctcaatggttactaggacaaattccctggccctcaatgtgttcataatatggaagaaaaggattatgacagaattacctaaagtattataacatatagccagaatacaacgcattctgcaaatattacttggcacttttagcttgttaatacatagctaccagaaataaagaacatattaatctcttcaacttcattcatatatacatttttactttaggcaaaattatagaatactcaaaattcttkcagataaattacaatttatatttagaaatataatctgtaaagagacaaataggaaatgcagaatttgactgtagtatattcaccaaaatatttaaagattgccagaaacaattggaaaatggttagcatccagtacaagtttt

SEQ ID NO: 214910 - DNA, 586 bp, Homo sapiens
tgttttccctaaaaataaaatttgaaaatagcctaaactgatagaagcaaacatgccctgtggagaaaattgtattattatctgttcaagatacacttgtgtatttataaacacgtggaatgaggtcaagaggtttctgccaacagggagccagtttagtttccaagacataaactttttcagttagttacaataggagcagasgttaccaatttaaactttctattgtatagaaaaagtcaattctaaatcatgtagtgcattgagcagagaaccattcaaacgtagcagggcagcaggaaagaaatcacgtattgcttagttctcgggatatagatttcctcctcccgaaaatattccctgatgtttctagttagcattaggtgacccttctctctgggcccataaaatcctgaattactcaaaatgcatttattaaactttatcaaaattaccttttaagtggtctctatcgtgcatttggctgaattcctgaaaacagtaaggctgcttgtcttgggagtaggaatgggagttgtttatatccaagagttgagtggataggtcagtaagtcataaaattatg

SEQ ID NO: 214911 - DNA, 635 bp, Homo sapiens
tccttctttaaaaaataatggaataagtaaccttagccactcataataccaattgcctttgcatttagtgcttactccagggtaaacatatgcccatgatgggtctgggtcaggtagaagcccatttttgtatcaagtggtttaactggagacatgatcccacagctgttgatggccatccaycacaatgtgtacacagagatagctagagaacagaataaaaccagcacacctaacaagcaaagatccaattctgagacaagtcatactggttataccatatgcctggatacctttgctccaagcaaaattgattttatgagccccaaaccctgtctttcacatacatgaatttgagttggattgttgttgcttgtaacataaatagttctaattaatttagaaagtgggatctggaaataggaaaactgctaggccacaggatgagatttgttcatcccagatatgaagatagcaatccatattacaggttacacatattaatattgaacagtttcctaaattattattggtatgtctaaaaataattcactcctaggatagggcttttgcaaactgactataaacatgtcagcatattatttggcattatctacttcctacggccttcagca

SEQ ID NO: 214912 - DNA, 635 bp, Homo sapiens
tccttctttaaaaaataatggaataagtaaccttagccactcataataccaattgcctttgcatttagtgcttactccagggtaaacatatgcccatgatgggtctgggtcaggtagaagcccatttttgtatcaagtggtttaactggagacatgatcccacagctgttgatggccatccatcacaatgtgtacacagagatakctagagaacagaataaaaccagcacacctaacaagcaaagatccaattctgagacaagtcatactggttataccatatgcctggatacctttgctccaagcaaaattgattttatgagccccaaaccctgtctttcacatacatgaatttgagttggattgttgttgcttgtaacataaatagttctaattaatttagaaagtgggatctggaaataggaaaactgctaggccacaggatgagatttgttcatcccagatatgaagatagcaatccatattacaggttacacatattaatattgaacagtttcctaaattattattggtatgtctaaaaataattcactcctaggatagggcttttgcaaactgactataaacatgtcagcatattatttggcattatctacttcctacggccttcagca

SEQ ID NO: 214913 - DNA, 573 bp, Homo sapiens
atgaacaaatgtataaatacacaaaaataaatgatgtgtaaagaatacatgaaaaagattaataatatatttctaaaaagaagaaattctggtttctgcaaatgacatgctaggttatttattcgggcgattaaccttcccactgctgaccactagaaatgaaagataaaatattaaaaaaaaacaaacaaaagagtttttttgttttttgttttttgagatgaagtcttgctctgtcgcccaggctggagtgcagtggcgcaacctcggctcactgcaacctccgcctcccaggttcaaaygattctcctgcctcagcctcccaagtagctgggactacaggtgcgtgccaccatgcctggctaattttttgtattttcagtagagatggggtttcactgtgttagccaggaaggtcttgatctcttgacctcgtgatccgcccgccttggcctcccaaagtgctgggattacaggcgtgagccaccgtgcccagccacagaagagtttttaaaaagatatggaattgccaacaatatagtaggaaattacatgatcctaaactaaaagaca

SEQ ID NO: 214914 - DNA, 625 bp, Homo sapiens
cctttcttgaagaaccagaaattattcttattttttctttcagtggcctgtgaatatcctgtcattcaaaaagcaaaagtaagaagaaggggtaagatwaaaaaaagggaggaaaactgagagtttccactaactagtggtgtggttccagactcttttggagcctcagtttcctttttgtgaaattcaggactcagatgaaaaagctttctttaaatgtccttttttggctctgaaagtctaggtatctcagtgggatacaggctccatagatagactgtaattcaccaggtttaaggaaattgttttctttgtgatagagcaatttttttctctttcttcctctttttctttttctttaatagaacagaacaaaatgagctcagatcataagttcggttgatttctttctaaaccacagggttcattttctgaaattgctgtcttttccttcaaaagccttcctcagccttgtcagccagctctatcacttttatattagatctctgtgaagtaaggaagccttttagagtaggcttggaatgtgcaacaacagggcacaggtgtggctgaagagggcctctgtatgaacccccaggaagccaaattggcctcccctccatca

SEQ ID NO: 214915 - DNA, 510 bp, Homo sapiens
atgaatcacagccctgggctgttactttgccttggaacattttccataaaagtattctttttactttttcaaaggacaggatgttccaaatcagtgaatcacttttatttataaaatggaatggatgaggtgatatcagtaaaagtggcagagtaagcatctcccaaaatctcctccataaaagcaatagaacaatggcagaaatggtcasaatcaactaccttctgctatttcacataccaagtagattgtcctgcctgaattatttttcagttgttctgtactaatagtaaacaaatcattattaactcacagccttcatttaaaagcatgcatttcaaaggaaatacaatatcatgcagtggagaaaaaacttggtgtcctaactgcttgcttccaaagccaactgaacacatgcatttatctccattcttttcccatcaaataaaaaaagacgtaactattgtagaacagactaggggctgctcacccagtgcagtaagaccagat

SEQ ID NO: 214916 - DNA, 615 bp, Homo sapiens
tatactgacagaacaggaactggaatgtcaattatataaaaattataattgataaatatcataccacccaaagccatcagtgccactgtcaagcatctttgcaatatactaatgatgtgaatagaccagatataattttatccagcttttacaatgagagtaattaagtcattaaattatacaaatacataccctttctacaatcataaggcaaatcaataataaattaataaataacctaatttctatcagtgcttactatgccaccagatttcacatattcaacttttaacagtaattgtacacagagatgtgttacaaaatgggctaattttcaaccccaaagaatttttctcttagaaccaacaaggcaacttaaactagattgtactactacagattcttgatcatactcctgggtagctaaaaatcaaaatagttattgcaagaattatgtacattatgtgtaacaattaactttctaagacagttcctttttattgtccatattaatgacatttcagaacttgagttttaggcagtcttcrgtcagcaatttcatcttaccataaactgagcaagcttttcacaacatactcatttttgtcttgaaca

SEQ ID NO: 214917 - DNA, 569 bp, Homo sapiens
aaatgcacaggtgtgttttctggttttagttcctataatgaacagcccctaagctgtctgcccaacagtccatctctttctgagcacagctgctggcaaccctgcccacagctacaagagaataaaagagaccacaaatacctgggcagccgcctcctcctcaacatcaggaatgaagcactcattctacatggacttacagaacttcttagaacctgacaccagtagacacaatctcccaggagtttgttactacagagactggcaatctggggtcttccaggccataggctaattcatatccacccacctccctgtcacttgtgggccaaataatttaacaaatgccaagagataagctcaggacaccakgtgaagaaaaggctagcagagacctcagagatgaaccagctccatcttgtattctgaggctcgggacactaggaaagaagtgtaatatcttgcttaacgtcacacagtgagaaatgtttggtatttaattgtggcagcggtcacatactgtgaaatttgtgaaaactggtcaaactgtactttaaaaaggtgaattc

SEQ ID NO: 214918 - DNA, 572 bp, Homo sapiens
agatcttttaccttgcagacctcctgaaatggttgtaggagtctctgggccacattttaagaactgttgttcagctggtgtgaaagaaggcgcaacagctaaagaaatgccaattctaaatctctcaaagcaatcatcatgctgactatgcccagaacagcacagcagccagtgtggccttctgctgataggaaagaccgagcagwctgactctatcctttccctaaagactctggctgtgggcagcctccattccctgtggtgttggaatcaaccaatgaggaggggagaaaacgcttagaaatagtttgaacaataatagagtcagcagttatagttggttctaacatatttttaaaactgcattgttatgattctgatgatcatacacagtgcgggaactactagctatttcacctatatatgagtaaaacatttggggaaatttccctctggttcagctggttatgctgttcacggaggtccttgacatttgcccagcggagtcatcacctgaaaccacgggcagctgaaccctgggaacttgcctcggtgtttataaatacctcagt

SEQ ID NO: 214919 - DNA, 529 bp, Homo sapiens
gagtctctgggccacattttaagaactgttgttcagctggtgtgaaagaaggcgcaacagctaaagaaatgccaattctaaatctctcaaagcaatcatcatgctgactatgcccagaacagcacagcagccagtgtggccttctgctgataggaaagaccgagcagtctgactctatcctttccctaaagactctggctgtgggcagmctccattccctgtggtgttggaatcaaccaatgaggaggggagaaaacgcttagaaatagtttgaacaataatagagtcagcagttatagttggttctaacatatttttaaaactgcattgttatgattctgatgatcatacacagtgcgggaactactagctatttcacctatatatgagtaaaacatttggggaaatttccctctggttcagctggttatgctgttcacggaggtccttgacatttgcccagcggagtcatcacctgaaaccacgggcagctgaaccctgggaacttgcctcggtgtttataaatacc

SEQ ID NO: 214920 - DNA, 570 bp, Homo sapiens
tgaaatggttgtaggagtctctgggccacattttaagaactgttgttcagctggtgtgaaagaaggcgcaacagctaaagaaatgccaattctaaatctctcaaagcaatcatcatgctgactatgcccagaacagcacagcagccagtgtggccttctgctgataggaaagaccgagcagtctgactctatcctttccctaaagactctggctgtgggcagcctccattccctgtggtgttggaatcaaccaatgaggaggggagaaaacgcttagaaatagtttgaacaataatagagtcagcagttatagttggttctaacatatttttaaaactgcattgttatgattctgatgatcatacacagtgcgggaactactagctatttcacctatatatgagtaaaacatttggggaaatttccckctggttcagctggttatgctgttcacggaggtccttgacatttgcccagcggagtcatcacctgaaaccacgggcagctgaaccctgggaacttgcctcggtgtttataaatacctcagttgcatcaggaccctacaggtga

SEQ ID NO: 214921 - DNA, 609 bp, Homo sapiens
aaaatgcaagtcataatatttacgatcagacacggatgttactttggcaaattacacagggtttacttttctaaaggatagaaagggaagccagtacaatcaaatttgaaggcagagaattcagcaacattattttaccacaaacattgatataagtttctgagcttcccagtgccaactcactagtggaaacgtagttgtggatgattcttagcgtgtaaggggcacatcagaccttctgaaagttcaattactctcttcagcctagctttaaaaagacaaaagttaagcagtccgttacacagtcttgcccagatacatgctggccacaactaccactgagccgtgggcttcttagtcttagggttctaccgtgcacaatgtgattgctagtatataacagacacacttaatttggaataaacttctaatccaccactcttggtcttcccaagattgtctcacttagacccaatacattcctgawtctagtgctgtggcatcagaacaagccaaacatctcttggagtggctaacagacccttggatgagctatagatgttatttggcaggagattacaaaatctaccataaatctgcatcctgaat

SEQ ID NO: 214922 - DNA, 555 bp, Homo sapiens
tgacttttgaatgggtattctagagaatgtgaaatgacagctttaaagatggctttaaaacaattattcaaaaaaaatgttcaaatcaaaacataatacctctgaagacaractctataatgctttaggccaactcagtctctgaagctcaaatgagcataaatgcaattagccatttgctcccttaaaatgagggtaggtctgtctaatgtagcttgtaatttgccaattgcatgtaaattattttcacttgaaaatcacttaagttatgtaaagggacagtcctttcaacatgttaatcccaaatattgacacttttttccccaagaaatactgttgtttgattttcaagatatactacaaaataatacaaaggcataaaactctttccagttgaattaaatattatcaaaatccttcaggaataattttgttaaggcatctatgcttaatattatatattccatacacaacatttctttctgatttgattgttaatatgttctacatatagacacaattcttcttatggcagattttatataacatctgaat

SEQ ID NO: 214923 - DNA, 555 bp, Homo sapiens
tgacttttgaatgggtattctagagaatgtgaaatgacagctttaaagatggctttaaaacaattattcaaaaaaaatgttcaaatcaaaacataatacctctgaagacaaactctataatgctttaggccaactcagtctctgaagctcaaatgagcataaatgcaattagccatttgctcccttaaaatgagggtaggtctgtctaatgtagcttgtaatttgccaattgcatgtaaattattttcacttgaaaatcacttaagttatgtaaagggacagtcctttcaacatgttmatcccaaatattgacacttttttccccaagaaatactgttgtttgattttcaagatatactacaaaataatacaaaggcataaaactctttccagttgaattaaatattatcaaaatccttcaggaataattttgttaaggcatctatgcttaatattatatattccatacacaacatttctttctgatttgattgttaatatgttctacatatagacacaattcttcttatggcagattttatataacatctgaat

SEQ ID NO: 214924 - DNA, 597 bp, Homo sapiens
caccagcaaggaaacagggacctgagtcctacagatggaagccacatttggtcaaaaatctgaaagagcttggaaatacattcttccccataacctccatatgacagcccagcccaaaatcaaaacattggttttggccttgtaagaccctaaaagaagaaaactcaccctgacttccaagttatagaactatgagataataaataggtgttgtccctaaattagtggtaaacttgttacacagtagtagaaaatgaatacagtgataaagggctagaaataagcatggcttggacttctcagtaacgaagctgtagtttagaagaaaatgtaagttgcttttgaaattctgaggaaaagcaatttcaaatccaaaactatctatccagtcaaactatcaaacaaatgtgaggatataccaagatattctgaagacrcagtattgtcattatgaagcctttctgaggaggttactagaagatgtgctcctctacaaagaaagtaagctaaaaaagaagaaatcatgcagttcaagaaacacagatcctacttatagaagaagtgaaaagagttcccatgatgatggctgtatacaag

SEQ ID NO: 214925 - DNA, 570 bp, Homo sapiens
tttcaactcactggatctagctgctgctcacatgcttccaccgtgactgtccttaccaaggcctccagtgacttgggttgcaaaatacaaagggcaagtattaataacaatcttatttatcatttcagcagcatggtccattggtacttcctttttatgtttactcattaactatggtgggtttttagttctatttatttatttatttatttttactgtgcaccatttaaatgaacatctcagttctcttttacatctcttattttctcagtccctgttctttccctttaataattccaaccactgtcaaggctattttttccttccattttgtcttttacattttgacccttatggtcaatgcttgctggacacctccagatgacacaatcaccttagattccatatgcccaaaacagaactcataatttcctttctcaagyctttgctttttgggtttcctagtcagaaatgtggttgtcatttttttcattcctctgtctctgacacttcctatatccagctagttaccaagctgcgaaattcactttccaagtatgtctgcactat

SEQ ID NO: 214926 - DNA, 422 bp, Homo sapiens
gctctccacagtgcccacccaccccagccctccagaaagcccccaaattccagcccccacaaagtccaactttgatattgtccagatagtccagcctcttgatccttccccagaccctagttctccagagaatcccagagcccagcctcgcaaagtcctgctagcagagcacactcacctccagtcactggaagaattgggaggcctgaattccatcacccaccagcaaccagcargagccccaggccaggagccagcccagagtggctgatcttaagtgctttgacggttaaggatcaagggtcgggaggagactcctgtccttcaataaagccacaagagccagaagctggtttttcctggtgaatttctctaaggccctctctctggaggggaacacaacctacccacctctcaccctc

SEQ ID NO: 214927 - DNA, 557 bp, Homo sapiens
gcccttggagtatttctggagtcctgaggctactttggagatgagatgaactgtagttgtgtgtctgagaaataatcctgataaatttaggcacaatttacatttcctactaactcagtaggtgtctctaaatatccccaagaaatagcctgtactgacatttctggcctagctttatgccaaacctcgttgcttaggaattggaaaaaaactggttttgmcctgaggaagtggtatgtttggagcatgaggcagcaaccatttaccagcatgtggggtcattaagatttcatgagctttttctgtgctactcaagtccaccaaaattgtttcaacacctattaagtgcccaataccatactaaatacttggttaaaacacatgtcataggttcttgtccttgaatagcttaacaatttccaaggagcaggttttaaactgcgttcattgcactttatggttccaagaaagaagccccagagccaatactggctttagtgtaattttagaattgcacctagcacataataaatgcccaaattgtgttagccttgtgg

SEQ ID NO: 214928 - DNA, 649 bp, Homo sapiens
gggatacatgagatgttttgatacagtcttgcaatatgaaataagcacatcatggagaatggggtatccatcccctcaagcatttattctttgagttacaaacaatccaattgcactcttttattttaaaatgtataagtaagttattattgactacagaatatattctcataaagcatatacctatgacacacagtccactattccgtattttagcacagtcttgcctaaaagagcaggaatctaggcacttgatgttaatgttgctgacctgacactcatttattgccctttggcatacccccaggcccaatttgaagcctgtgattaatatataaacagcttctgttgctgttgmcattgaattttttcttggcctccttatctagccatttgctttaagcaacacattcttgttacaacctgttagtcccattatttttcttagtataaattattaatgtgctgttagactaaagtactgtatctgaacactgattatgcaggactgacaccatactaaaacctgtgaaagaataataactaatatttgttgaatgccaactgccatatgacactgtactaagacctttgtatttacctatattattacatttaatcttcataaaacctatacaatgcgtattaa

SEQ ID NO: 214929 - DNA, 402 bp, Homo sapiens
tttttgaaagagtctttagggttttctgggtataggatcatatcgttgtcaaacagcaacagtttaactctctctttactgactcgggtgccttgtatttctttgtcttgtctgattgctctgtctacgatttctggtactatgttaaatagaagaggtgaaagtaggcatccttgtcttgttacagttctcatgaggaatgctttccacttttctctgttcagtataatgttggctgtgggtttgtcatagatagcttttattacmttaaagtatttcccttctatgccaattttgctgaggattttaaccataaagcaatgctggattttgtcaaatgctttctctgcatctattgagaagatcatatggtttttgtttttaattctgtttatttgatgt

SEQ ID NO: 214930 - DNA, 616 bp, Homo sapiens
actgaatgatacaggaaacgtgactttcttctgtttctgttcatcttcattggttatttcccctgtggtttaccttgtcctgtgtttgtaaagagagatcgagccttatcactcagattcattctctcctgtgtcattagaactttgaaaggcaagatttgttgtccttgacagatatactattatctttcttatcagatccttttggtagctttttctaaagatcatagtctctaaatctgtagcttccttttgttttctctttgcaagaagttactaaaaaatatctttttctcctcccttctttcctattgttttcttccttgcttcattaacctctactcagcctgacattttgtgcagttgtgtactacaaatgctttggactgacatgacatatatcycttttttggcacactttatggatgtttcattgctagaaaaaaatactccctcctaattgcttattattggctatccaaaccacctgagtaagtattagaaaatacttttagaatatcttttatgacaacattaaaaaataattttcacataaaaggggacttttgggtctgcttactctactgaggtgaagtttctcatttgctgtttcaca

SEQ ID NO: 214931 - DNA, 578 bp, Homo sapiens
tgagaaagcttattaatattcctaaatgtcaggaagatttaatagaaatgaatgtgtatatatatataacaacttacttccaaactgttgcttattacttatgtaaataggtttcactgttaaattggtatrtgtgtgtgcatgcaaatgtgtggggtacatgtttgttcatacacacaatttaatagatttggaagcataggcatatagagtagccactttctatgaaggagagaggttatttatttttatttatttatttatttatttatttatttatttgagacagagtctcactctattgcccaggcgggagtgcagtggcatgatcttggctcattgcaacctccacctcccaggttcaagtgattctcctgcctcagcttcccaagtagctggaattacaggcatgcaccaccacgcctggctaattttgtatttttagtagagacggggtttcaccatgttagccaggctggtctcgaactcctgacctcaggtaatctgcccacctgagcctcccaaagtgctgggattatgggattgagccacggcaccaggactctgaaagagagaga

SEQ ID NO: 214932 - DNA, 622 bp, Homo sapiens
ggtttctgtgaccccatattgatgtcattttctgatgtctatgtgttgtctccttgagttttcccctgtagatgcccccattattattttttataaacctccacaggccttgtatggttgtgctgaacgcatgacctggttttcaatgagttactgtgaattgaatttgattttgttatttgagccatctagcaatctataaagcaaaattctaattgtattgatgctttcgaacccccctttcctctgggatgtggcactcttcccagagtgggctttcttcatggcaggtaaaaggtctatgcggtggtggaagggagtgggcctgctagtttcttcgtctaaaccctgtgctgtgttggtggtggtgcaggaccctgctgggtcggaagagatggtgagtaggggcctgggaacctaacaactaatgggaaaggatttccaagtttcttgccagtgmtgaagatagagtcttgtctttttcttttctttaaatgaaactaaggctagagctagttcattatctacaatgtcatattgatttttgtttgtgaggtggagtattaacagattagaatggctgctggcagttctcagctgcttcattgaatttaaatgaatc

SEQ ID NO: 214933 - DNA, 459 bp, Homo sapiens
tgcattcctctgagagttaaccctttcttttgattgagcagttttgaaactcttttgtagaatctgcaagtggacatttggagggatttgagggcaatggtggaaaaggaaatgtgtcacataaaaactagatagaagcattctgagaaatttatttgttatgagtrcatttatctcccagagttgaacctttcttttgatggatcaattttgaaatatactttttgtgtaatctgcaagtggacatttcgagcgccttgaaacttatactggaaaatgaaatatcttcacataaaaactagacagaagaattctgagaaacttttttgtgatgtgtgcattcatctcaccgagttgaacctttcttttgattgagcagtttggaaacactctttttgaagaatctccaagtggacatttggagcgctatgcggtcagtggtaggaaaggaaatatcgt

SEQ ID NO: 214934 - DNA, 459 bp, Homo sapiens
tgcattcctctgagagttaaccctttcttttgattgagcagttttgaaactcttttgtagaatctgcaagtggacatttggagggatttgagggcaatggtggaaaaggaaatgtgtcacataaaaactagatagaagcattctgagaaatttatttgttatgagtacatttatctcccagagttgaacctttcttttgatggatcaattttgaaatatactttttgtgtaatctgcaagtggacatttcgagcgccttgaaacttatactggaaaatgaaatatcttcacataaaaactagacagaagaattctgagaaacttttttgygatgtgtgcattcatctcaccgagttgaacctttcttttgattgagcagtttggaaacactctttttgaagaatctccaagtggacatttggagcgctatgcggtcagtggtaggaaaggaaatatcgt

SEQ ID NO: 214935 - DNA, 349 bp, Homo sapiens
aagttctgaatttggtaagttaattgaagtaatgaagacatgaatataaataatataattgcatttaaaaattacatcctttatgctggtacagaaaaacagtataaatggtattatgcaaaaataatatatttagataatatgaataaacttcaaaggaagtttcatgtatttagatatgtaaaacataacatggaccagatgacataattaaaagtttatcttttcatttatagatattttattttcctagatagttaagttgcagttattgttggaagatttttatttttataatgataaatatataattttttagttgtcrtattttttaacctttcaacatatt

SEQ ID NO: 214936 - DNA, 601 bp, Homo sapiens
tcttactcaaggcacatcctacagtcttggtttctggtttaactcgagtttccagagaaagcaagactgctgtgaccttctccctagataatctggtcattgtgtgggkcctttcccctcagtccttcttcccatttggccctggactcccaaatcactattttgtggggtttttgtttgttttcacacttaagcttctgtactttaatttgtttttctgacctggctctgggtccctgaagactatttgtttatttttcctaggtcaatgactccattctgaaacccaatattcaggagaggggtagaaaaaggaggccctgttttcaacaaaatactctttagtaagggcaagttggtattgtcttccaatgctgtgttataaaccttctccactgttatcagtaaaaactagcctaaataagaaagagaagaaagctttttgtgacctttacttgacttgcaatacttcagtaacatctgctttgaaatatgactctcatcttgccatttcctctcacagtatatagtgaaatgtgattttctttcatacctctcacctaggaatatgatattgttttgaagaaaagtttgaaagtta

SEQ ID NO: 214937 - DNA, 601 bp, Homo sapiens
tcttactcaaggcacatcctacagtcttggtttctggtttaactcgagtttccagagaaagcaagactgctgtgaccttctccctagataatctggtcattgtgtgggtcctttcccctcagtccttcttcccatttggccctggactcccaaatcactattttgtggggtttttgtttgttttcacacttaagcttctgtactttaatttgtttttctgacctggctctgggtccctgaagactatttktttatttttcctaggtcaatgactccattctgaaacccaatattcaggagaggggtagaaaaaggaggccctgttttcaacaaaatactctttagtaagggcaagttggtattgtcttccaatgctgtgttataaaccttctccactgttatcagtaaaaactagcctaaataagaaagagaagaaagctttttgtgacctttacttgacttgcaatacttcagtaacatctgctttgaaatatgactctcatcttgccatttcctctcacagtatatagtgaaatgtgattttctttcatacctctcacctaggaatatgatattgttttgaagaaaagtttgaaagtta

SEQ ID NO: 214938 - DNA, 538 bp, Homo sapiens
ttctcacttttgccactctgtgatgccatcctaaatgagctttgagggactcttaaaaaaaatcctcactgagactgtctccctttccccctttgacatgggacaggactatctggaaatgagccttcccagtgacaagggacatttgacagtcagattttgatcataagcgctttcaagaagaaagattttcatcaaaagggggggaataaaaagaaaaaaaccgttttatctgaggaatatgagcccctttwcattatcaggcccagaaaggcattttaaatgtaacaccagtcctgtttcactcccccatgagctaaataattatgtcttgaagacacttgttaggtgggccctagatcatcttgatgtcaaatagctatagaatcacaaacagctatgatttatcaatgtataatcaatcaccgctcaatgttatttttgtaaaccaatgacaattactgacaaataactttttgtaatcaccccttctcctgatttgttcttttttttttctttgaaaccttgaaccactctt

SEQ ID NO: 214939 - DNA, 538 bp, Homo sapiens
ttctcacttttgccactctgtgatgccatcctaaatgagctttgagggactcttaaaaaaaatcctcactgagactgtctccctttccccctttgacatgggacaggactatctggaaatgagccttcccagtgacaagggacatttgacagtcagattttgatcataagcgctttcaagaagaaagattttcatcaaaagggggggaataaaaagaaaaaaaccgttttatctgaggaatatgagccccttttcattatcaggcccagaaaggcattttaaatgtaacaccagtcctgtttcactcccccatgagctaaataattatgtcttgaagacacttgttaggtgggccctagatcatcttgatgtcaaatagctatagaatcacaaacagctatratttatcaatgtataatcaatcaccgctcaatgttatttttgtaaaccaatgacaattactgacaaataactttttgtaatcaccccttctcctgatttgttcttttttttttctttgaaaccttgaaccactctt

SEQ ID NO: 214940 - DNA, 589 bp, Homo sapiens
atacagtttgatgctggaacgaagtaaaagactagacttttttgtggacaaacttcatagtgttagacttgatctattgtttcagccatttcagaatattttgaatttgaattttgtctcaatmatttcattgatcagcatgctacagatgtcagcataacagtcactggtgaaactgctgaaaaatttagggctgagggaccaccctctaagttattcctcctaataaattttttcttgatttggaatatttcttaactagcaccatttgggttattcagcaagttaaaaatccctctctgtgtgacaagcagcccacagttctttcacaagactctttcatgagattcttggtcatgctgaaatctgaatactctctgtacataaaattctattgatttccattaagtagccctttagaaaaaggaaaatttacttacattggtatggcctcttcttactgaactcatactattcctagcatcattacttactttgtaaactaaaaaaactatctttaaaattattagttctagtcttactgactattcacgatatttattcttttggcaccatttttaaaagatta

SEQ ID NO: 214941 - DNA, 589 bp, Homo sapiens
atacagtttgatgctggaacgaagtaaaagactagacttttttgtggacaaacttcatagtgttagacttgatctattgtttcagccatttcagaatattttgaatttgaattttgtctcaataatttcattgatcagcatgctacagatgtcagcataacagtcactggtgaaactgctgaaaaatttagggctgagggaccaccctctaagttattcctcctaataaattttttcttgatttggaatatttcttaactagcaccatttgggttattcagcaagttaaaaatccctctctstgtgacaagcagcccacagttctttcacaagactctttcatgagattcttggtcatgctgaaatctgaatactctctgtacataaaattctattgatttccattaagtagccctttagaaaaaggaaaatttacttacattggtatggcctcttcttactgaactcatactattcctagcatcattacttactttgtaaactaaaaaaactatctttaaaattattagttctagtcttactgactattcacgatatttattcttttggcaccatttttaaaagatta

SEQ ID NO: 214942 - DNA, 590 bp, Homo sapiens
agaattctccagctgtcaccagccttatgggcttggcagagaatactagactaggagtcwgtaaactgctcccgccccagctctgaggcaagtgactctatgacctcagacaagtccctgagtggcctcttctgttcaatgagggtctgcacagtctccgagagccctttaagctccaatatgcagtgagtctaagaattaaatatgaatggaaacgagttaaatgagcatattagaccaaggcacatgaccatcagcaacaaatctgagcaaatggctaacatctcagtaccaaatatccatcatctgcaaattgcatgatgatcgtgccaacatcatagagtttctgttgaagtattaaatgagttaattcattggaagcatttaggataattttcagcacatagcaaactctcaaaaaactctagctccttcttgtattattatttttactatcattgtcattattatcatagacacttgttgcctttatgaatagaaacagatactagcactaacagagacttctttgctccttaacagacaggttattatgcacatgttacgaagagaaaaagaaaggctcacag

SEQ ID NO: 214943 - DNA, 632 bp, Homo sapiens
atgttttggttaaaggttttccagcattttaaagatagttcagggttatgtgttgtatccagagagcgacattggcataaccagcctccgaccacacaygcggtgcctctcgaacagcttgacaaaagcagcttgctcactgtaagaatctcactggtaattcccactatatttctgcagggtagcctgaaagtaattatccttctcactggtaaatcaattaggaatgcaggatgtaatattcccctcctcctccaagaaactgctaatcctctaacactaatgaacagaaaaccccaggcaacagggttaccactaatagagtgatgattacaactcacctggtctttatacctgtggtagtggcaccaaccctgtgggcagatagaggtgaacaggaatcctggaccccctcttattagctattttccaaaattaagtgtctatctgcttgagcctcagtttcttcgtctgtcaaatgaggataaaactaccacgctcaggagattaatagtaaaacttagaataaagtgtagtaaggaacttagcccagtgcctagaacttattagaagctcaatagaaagaactcattagcctatactgatgtcagaccttatagttttcatcacac

SEQ ID NO: 214944 - DNA, 533 bp, Homo sapiens
tgtgtttcaagtgagcaagacacacttttaaaatgttcaaaatattcctttccttctcagagatcctttgtgtaggtggcccttgtggcaatacggtattaagtactcagcaggacttttaaagtacatctttatgtactttaattttgttaggaccggaacagtgttaatggtcatcatctttttaaatgcttgcagagtattaatgcttaggagaaaaactttttccctcaaatatagaatgcataaccatgaaacaatatttttcgttytgcgtctttcccattctcatgccatcctacttatgtgaatatgtgatgtcaagcagatggctgtatcaaactagctggaacatacatatgatgactatcccattattcttggaaaggtctgagtgcacctcagcactacgaaggattttgacatttttccttaatagttctgagaatttctcttagctttcataatctgaagctgaatagttgaaacagtgatatgagaatattttgaggggagagcaagaaagaaaagaa

SEQ ID NO: 214945 - DNA, 296 bp, Homo sapiens
tttatccacaaggtatttctttaattctccagcagtgcctttactgagtgagatctactggcaagtcttctgtagctttggggtagcatttgggaaagtaaagcaattggatactgtccttttaaaatatcattcaattaggtcttttgtaatacatacaacataacgagatagccttaccaactctaaagaaatttctagtgcatttcatcaaaggcacaataatggaaacatygattcactcctcaccacaaacatctccctttgatgctgcagttaccttaatactagcactt

SEQ ID NO: 214946 - DNA, 603 bp, Homo sapiens
  misc_feature (1)...(603): n = A,T,C or G
gatagtaattgtacctacctcttagtactattgaaaggattaaatgagataatgattaaaggggcttagcacactaccaggcacataagtactaaataaatgttaacctttagctttaaattacccaggataaggccaggtatggtggctcacactagtaatcccagcaytttgggagcctgaggtgggcagattgtttgagctcaggagttcagaaccagcctaggcaatttggtgaaacctcaactctatcaaaaaaaaaaaaaattagtctggtgtggtggcgtgcacttatggccccagctactcangaggctgaggtgggaggatggcttgagcccgggcagtggagatcacaccactacactccagcctgggcaacagagccagaccccatccccccacaaaaaataaattatctaggataagagcacaactgaagtcagaagtgatgccaagcaggttggagacaaatagaggtgatgtggggattatttgcctccctcttgactcccattattcctgaactttgtggagaaaattgcaagaggtgggcataaaggggactgaggagttgctgttcaatggttataaaatttcagt

SEQ ID NO: 214947 - DNA, 603 bp, Homo sapiens
  misc_feature (1)...(603): n = A,T,C or G
gatagtaattgtacctacctcttagtactattgaaaggattaaatgagataatgattaaaggggcttagcacactaccaggcacataagtactaaataaatgttaacctttagctttaaattacccaggataaggccaggtatggtggctcacactagtaatcccagcattttgggagcctgaggtgggcagattgtttgagctcaggagttcagaaccagcctaggcaatttggtgaaacctcaactctatcaaaaaaaaaaaaaattagtctggtgtggtggcrtgcacttatggccccagctactcangaggctgaggtgggaggatggcttgagcccgggcagtggagatcacaccactacactccagcctgggcaacagagccagaccccatccccccacaaaaaataaattatctaggataagagcacaactgaagtcagaagtgatgccaagcaggttggagacaaatagaggtgatgtggggattatttgcctccctcttgactcccattattcctgaactttgtggagaaaattgcaagaggtgggcataaaggggactgaggagttgctgttcaatggttataaaatttcagt

SEQ ID NO: 214948 - DNA, 580 bp, Homo sapiens
  misc_feature (1)...(580): n = A,T,C or G
agtactattgaaaggattaaatgagataatgattaaaggggcttagcacactaccaggcacataagtactaaataaatgttaacctttagctttaaattacccaggataaggccaggtatggtggctcacactagtaatcccagcattttgggagcctgaggtgggcagattgtttgagctcaggagttcagaaccagcctaggcaatttggtgaaacctcaactctatcaaaaaaaaaaaaaattagtctggtgtggtggcgtgcacttatggccccagctactcangaggctgaggtgggaggatggcttgagccygggcagtggagatcacaccactacactccagcctgggcaacagagccagaccccatccccccacaaaaaataaattatctaggataagagcacaactgaagtcagaagtgatgccaagcaggttggagacaaatagaggtgatgtggggattatttgcctccctcttgactcccattattcctgaactttgtggagaaaattgcaagaggtgggcataaaggggactgaggagttgctgttcaatggttataaaatttcagt

SEQ ID NO: 214949 - DNA, 620 bp, Homo sapiens
cagcttcctagtgaggtaagtttttaacctcttagcctcagttgaacaggtgcaaaatggggataattataatacctaactcacaagggtcaaaggactgctccgagaattaatcatacgatgattggccctgtctctggcacacagtaagaatgtcatgggctattatttactattgcttaatagtcctcctcagtacccaaacaagccaamattccccactgacatttagaaaacactcatggaccaactgaatgttctgctgctcagaatctctctcagtgtccttcaactccaactgcatgtactataactcactgctaaaatcaccactgctaaaggaaagcagtgcaaaaaatgccccttcccagccttgactgttttcacagatagtattaagtcaattttgacttcgtccacctctacaatcttaaaggaaatcacagtcagaccttttaacttggttataattccaaaaggaggatggaaactcttgacagaaagaccgaatctgagcataaggaggcaggctggtctacctctttggcaagaagtggtaaaggagtaaaccagtaaacatttcttggttgtaagtcttagaatacaagaggtatggataa

SEQ ID NO: 214950 - DNA, 644 bp, Homo sapiens
acctgtagtcccagctactcttgactctgaggtaggaggattgcttgaacccaggaattcaaggctgcagtgagctatgatcgctctactgcactctaggcttgacaacaaagacagacctcatttctaaaaaataaaaattaaaagttaaaatgaaacttgttcaaagcatagaactaacactatagagcaggacaaagaaaaggctgaacacataagctgagaatcacacaacgtagacagaaccacatgaacaccagactaatgaggtagatgttctcctgtggacacctggaagctgctgaaagtttctgagtaaggattggcaagatcaaagtggtgattcctgaagatatatagaaagttctaactgtgtcactttttgaggggataactgtggtacagcctacttcctcaccacttctttctccctcacttccaggggttgatagttcaggcccatgtgccagccctgacttcagggtacactcagcatgcatacattcaaatgcaagcagccrtgagactaaagagaaacaatctttatagctacttcagagaagagagtggtagggaatgctccaaatcatttacaatttgcttagggtccagctgaggcaagacgggttctgtagaaactatta

SEQ ID NO: 214951 - DNA, 568 bp, Homo sapiens
gaaggcagagacattttaggatatgggaatctcaggcgaggaggtcctgtatttttaaaaccgttgcttgagacagatcattgagattgagttaaacaagatgcaagatgaacaaatggcctattaataacaagctctctgggaaactctacaggctcagtgaggctccccagaaccctgtgggaagtttggcaacaaggaaagctgaaagagtcatgatgtggcagcccatgtgtgtcctatgctttttagtcactttaagaacatgagtttaaagacrctgatccccccaacacttgacttccctaattccttggcttgcacactctgaaatactgcaggtccagggggtcaaggtagctctttgctcctgagaggggaggcagctggggacatggccccagagggcctgtgaggaccacaaaactgcctgtcccatggattgggccaggctccttttgccctctgctcctgtgggtcactgttgcccaaacactcacaggtggctgtgcccatcgtcttcattgagaccctttggtgttgatgcctaagaaataagagaatgaag

SEQ ID NO: 214952 - DNA, 559 bp, Homo sapiens
ttgctataaccaaattccctagcctgggcagagtayaaacagcaaacatttatttctcacagttctggaggctgggaagtccaaaatgaaggcatggcagatttggagtctgccccacttcctacatggcgccttctccttgtgacctcacatggcagaaaggttgaggagctcactgggcactaatctcattcatgagggtggaacctcatggggcataaaccatagcaagtatcgagatcaccagggaggtagtggcagaggggaccagcacaccctgtgcttccaagatctcatttacagtcacaactgagatttttcccattctgaaaagaggagacagaaggagagagagaaaaagaaggaaagagggaaaggagggaggaaggggaaagacatcttgtgaatctactgactctacttgtctctcaagttactaccctaggttttttctcttgcctttattgcctaattattgttgtttgtttatttgttgtttgtttgagctctgttgcccaggcttgagtgcagtggcacaaacatagctcactgcagcctc

SEQ ID NO: 214953 - DNA, 559 bp, Homo sapiens
ttgctataaccaaattccctagcctgggcagagtataaacagcaaacatttatttctcacagttctggaggctgggaagtccaaaatgaaggcatggcagatttggagtctgccccacttcctacatggcgccttctccttgtgacctcacatggcagaaaggttgaggagctcactgggcactaatctcattcatgagggtggaacctcatggggcataaaccatagcaagtatcgagatcaccagggaggtagtggcagaggggaccagcacaccctgtgcttccaagatctcatttacagtcacaactgagatttttcccattctgaaaagaggagacagaagragagagagaaaaagaaggaaagagggaaaggagggaggaaggggaaagacatcttgtgaatctactgactctacttgtctctcaagttactaccctaggttttttctcttgcctttattgcctaattattgttgtttgtttatttgttgtttgtttgagctctgttgcccaggcttgagtgcagtggcacaaacatagctcactgcagcctc

SEQ ID NO: 214954 - DNA, 572 bp, Homo sapiens
gttcttacaaaagtgtgatggggggccggctcccttgtttatgttagacctaattgtgattcttttaaaataaacagtgaagcaaaacttttaggatatcaagagaaagcagttagctagaagagtggagttttaaaaaatatgtcatctaaaamaatattaaacaatattcagatatgatccactcagacttcagccccttactacttgtaagtgttcttccctctgcaaacgtccgagcaaatcagaccagcacacacccactggagaagaatggcattctaaagctgcttcttttttttggcagaaatgatgggactgttaaaattcagtaatgattttattacctcatttgagatcatttcattgtccaagttattctcttttttcagtagcaacagcaaatttggtaagaaagcaaaatccagcagttctcatacaaatattgcaagaattttgttaaaatattttagggtacatagtgatttcagaatatgtattattatagtacctttagctgctgtacaaatacgtccaatgtttgtatcttggctgaagtacaataaaagctt

SEQ ID NO: 214955 - DNA, 581 bp, Homo sapiens
gtccttaagtggaggactggataaagacaatgtggtatatacatatactccatggaatactactcagccacaagaaagaataaaatcatgtcttttgcaccaacatagatagaaccgggtgacattatcctaaatgaaataattcaaaaacagaaagtcaaatactgcatgttctcacttataaatgggagctaaacattggtacatatgaacatacagagtggaataatagacattggagactccaaaggtgagaagtgggaagcrggagtgaaggttgaaagggttgaaaaattacctactgggtacaatgatcagtatttgggtgataggtaaactaaaagcttggattttactactgtgcaatatatgcatgttaagaaacaggtacttgtacccctcaaatatacaaaaatttaaaaaagggaaaatattcttaggactaagtgtaagtacttaaaaacttaaagtactgtgaagaaagtataagagtaaatgtttgtgatcttgcattcgaaattacttttagatatgacaccaatcacaagcaacaaacgataaaattatttttagatatgaca

SEQ ID NO: 214956 - DNA, 590 bp, Homo sapiens
cagagtggaataatagacattggagactccaaaggtgagaagtgggaagcgggagtgaaggttgaaagggttgaaaaattacctactgggtacaatgatcagtatttgggtgataggtaaactaaaagcttggattttactactgtgcaatatatgcatgttaagaaacaggtacttgtacccctcaaatatacaaaaatttaaaaaagggaaaatattcttaggactaagtgtaagtacttaaaaacttaaagtactgtgaagaaagtataagagtaaatgtttgtgatcttgcattcgaaattacttttagatatgacaccaatcacaagcaacaaacgataaaattatytttagatatgacaccaaaatttcaagcaacagaagaaaaaaacttcataaattggacttcatcaaaataaaaatcttctgtgtttcatctacaaactcggttcagtgtatactgttcaggtgatgggtacaccaaaaacaaacaaacaaaaaaactcacaaatcaccactaaagaactttctcatataaccaaatgtcacctgttccccaaaaacctatggaaataaaacatttaaaa

SEQ ID NO: 214957 - DNA, 433 bp, Homo sapiens
aaattgttgtaattaaaattttattagtttcatcttttagtcttcttactaacgatataagtggtttaaacaccacaagtacaataacaatcacattgatatccttttcttttggtttgaagaactccatttatcattacttgtaggacagatctggtagtgataaattccctcaacttttgtttatgtgggaaattctttatctttccttcattttcgcaggataatcttgctkaatgcagtattcttggttggcattttttttccttcagtactctgaatatatcatctcacttcctcctggactgtaggatttctgctgagaagtttgctgccagtcatattagatctccattacatgttatttgcttcttttctcttgttgctttcaggatccttttttcgtctgtggcttttgtgaatttgttattct

SEQ ID NO: 214958 - DNA, 603 bp, Homo sapiens
tgatatgagtcaattgattgatataagcttatagaaattataaatatccaagccatggtggtggaagtgtgttcacatccggggtgggagtgtgggctatgaaggcataaattggtcttgatggttctcagttcataccatcgaaattacccagataaagggatactaaatcagtgccaggagttctctgggagaaattgcttttttggatgttgaaaagcagtaggcagagataatgttaaggaacacatggacaatgcctcagatttttcctccatatggaactgtgtcctcgctgacaatgagtttggtttgagaggaaggaaggtcctgtacatcttaaatgtttcctttaggagtgtagattataagttcttcctgaatagtatacttagaagttttccttctgtattctatatctttyctatatttccaatctcttcctttccactggttatttctccttagcctgtaagcatattaaaacctctactctcctataaacaaaaagcaagcaaacaaaaccaaaacaaacaacaaaaataccacatgccaaccagaagcaatgtccacagatcaaaactcctaatccccctcaactgc

SEQ ID NO: 214959 - DNA, 543 bp, Homo sapiens
acaggcccactatttattttttaagaaaatttctacgcatgtgatccctagaaacttagttatttaggataaactgtctgcctaaaggctaacaatagagtttcccattttgcacaaccaagttagatctaggtaaagagattttcttggttatctgttttatgcattgaagcaaaggagacactagtaagcatcactttcacaaggagccaccagcrcctcagagaggaggccagatgacctaaactgatttcagatacctttggaaagactcagtcagcctcctttgtggggctcaacctcctgaacagcccttcatctaaaccaacaatgtcctttttcccacttctctttcagaagaatgtggtttcctcaccatgccccatctgattcctccatcatctgtccttggccactttcagttcagcgaggcccagctaaggcatgggatgaatgtgctaggcctgacagaaaattccagagagagctcagtcagccttagtaagtgcaaagttgcagaagccatggcctcagaccaagact

SEQ ID NO: 214960 - DNA, 372 bp, Homo sapiens
gtctccctatcttaagcctattcctacagttctcatgcaatagccttgactaaaacactctcaagaccccatttttctccactcctttcctgacactccttccaaaattaaccccatgggtggggatttgatgacaattgtacttcttgcactaacttcagctttttgatgattgtagattggcacgaagaaaatacactcrcacacaaaggtcagattaaggcattaatatatttaactaaggatagagaatattatcagaagtagccacacagggtcagagaaaatgcagcaaatctgaacctggttgtctttgccctccacatcctttaatgggcagtgacaaaaagcacacaaggcatggggtcttgt

SEQ ID NO: 214961 - DNA, 524 bp, Homo sapiens
aaaatgtctccagggcatgtcagaggtcttcacagcagcccctcccactacaggcccagaagcctacgagaatatagttttgtgggccaggcctagggtcaccgtgctgtgtgccgtctagggacttggtatcctgcatcccagccattccagctgtgacgaaaaggggccaaggtacagctcaggcaattgcttcagagggtggaagccccagaccttggcagcttccatgtggtgttgagcctgtgagtgtgcagaagtcaagaattggggtttgggaacctctgcctagatttcagagaatgtatggaaatgcctgggtgtccaagcaaaaatttgctgctgtartgagttaagatattgggggactgttgggaaggcatgattggttttgaaatgtgaggaaatgagattttggaggggccaggggaagaatgatatagtttggctgtgtcttcacccatatctcattttgaattcccacgtgttgtcggggggacctggtgggaggtgattgaatcatg

SEQ ID NO: 214962 - DNA, 614 bp, Homo sapiens
ttttcaggcacatgggaaggctataatgccttgaccactttaagttaggcatggccatatgacttcatttggctaaggaaatgttagtggaagatgggtggtacttttagctgaaagcatttagttcttggtcttgcctctctgccttgctttttctctgccccaaggttgaagtaaggagtcaatatgatgcccaaccaacttaagatggaaatgtaacatgcaggaaaaacaaataattgtgraattaagccactgagacatcagggctatttgttacagcagaacaacctaccctgtactgcagcaataggaaaaacaccaagagcagaatctgtcaattaacactcagtaaatattaacactcagtaaacaccttcgatgaagatggggcctatagcatttgattaacttgctttggaatctagtgatttgaattctgctgttttgtagttgtgtaaccttaaatacatcatatcatatctctatgcctctgttttctcatctgtagtataggattagtaatagcccagcactccatagcttaatgtgatttttaatatgaacaagaatataaagtatgagcaatgagtattttgtgtttttgtttgttt

SEQ ID NO: 214963 - DNA, 420 bp, Homo sapiens
tccaccccagggggtcttggaaggagccatacaagtgagaccttctgaagtgccagcctcattggcttcagtaactctgccaatggagatcaagggcaagaatttatggtcatagtgggaaaggaagtgcagagaacacactgattcagacagttttatgtgtctgggaaaagagcaaaaaaagtttttgaagaatttttggtcttctccaacaagttgtcacaaaacaataatccagtgccttctctgttatacatccagataacagaatatctgctacgatgtacagtttgctctttgctactagctttcatatacaaattgcaatttcttcaaacrttattgcttactgctctgacttaagttaaccaaattttgattttcatgtatcaggtacaaaaaaatcatttcagtttatta

SEQ ID NO: 214964 - DNA, 617 bp, Homo sapiens
gcatttcttccttcctgactttccttcattcctcacagtaatcctcaaatttaaaagcccacacaaaagacactgtctccgattttacttagaaaacccaagttaacaattagcaaaactagaattagcctgtcattaggcctttttgtcacagtaagtagaaatttatagctggatctttctctagtcagatggctaaaaggaccaccccattgctggagaaaaagcatgggtcagcatcacagttgctgaacccctagtttgtgggggctggggaaagattcaagtagaagatgcacagttaggttttacatgagctgtggcaagtgaacagtatgggagagggaaggacataattttaaggattttaagaattagctggcttttgttaactgctttggaaatcttgggaggtaaatatgatctcaggtcagccagctaacaattcaagtgtgttttgaaagccagaagtcctccatggttgtgtgtaaagagactttcatctgtggctgcagagaagaccatgctgaaaaccaggacgaagatttaattgaaargatagaagagcttcaaagaggtggacttctagctcagcatatttcttatggcaaaagcag

SEQ ID NO: 214965 - DNA, 391 bp, Homo sapiens
acatgtaaatatccacaattatagctcatatatattaattataagtgcaatgcataattataatatatccataatataataagtatgataatataaacaaagaaagtttagggaaatatcytttttcccaagaagaaagaacattcatgttctagtatatgccaatagcaatatagactgcaagacaagctagttataccttatgcaacaggattcatgccaaaagagaacacaagaatataaatttctaaaataaaaaaattaaatttaaatatttaaaacgcaaagttatttgaaaataattttaaaatgaaaacggctgcaaagatttttaaagacgcatttagaaagcctgctgtgtcttcaaacatttttcctatttggtagtgga

SEQ ID NO: 214966 - DNA, 587 bp, Homo sapiens
gtggggctggcatgaatcacgcagcagtgagatacagagggcatctgactggtcacctacacaaggagctgggccaggagcattgatggagaatcagacacaatggctttagagcataatgggaaaaatatctaattgctctgtgataatttgcagcctgctgtaaccatgcagatgccttaagaaaaatgaaatcaagcacatcaagtaccagtgtcatcttctgtgtggcttgttctctctgggacatgatacaccacttcaagcaacacatcaacctcatttcctctatccctgcmcttattttagattttagttcaggaacataggaacatgatttggtgggcgtgactctctccacttccaggatgtcctaacaaaatgcaatttgaaatcgccacctctcaccacctctcctccccctagttgtgatttcagggtccttttctttttccatttaatggtgcagtcactaataccttgcaatcacaaatacttgccatgacctctcacggattattttttcctttttaattgactatgatggaaaatcacagatgctaaaatcaagtgttggcaagggcaaa

SEQ ID NO: 214967 - DNA, 565 bp, Homo sapiens
ggctgctctgctggaacggcagtcgatcacaatgagatacacagaggattatccagaccataaacgataaattaaagaaaatgagtcccgtattttatggcctagtcagtctgggaagagttgttcagagtgaagtcagaaaaccccttaatgagaaaacatgagcagcataaatcataatagcataaaaattgaacttagaggggggcaatataaataattctaaatgtttatggaacaccacagttgcttcaagatctataaatataatcagtacctagatttttcttggctcgcttgatatatttcatgtaatgaatyttatctatgccacaaaaagtactatcatctattattttaacatcatagaataaaaacatttccattgagtgctctcgaatactcatcctacactaggtcatctgatatgtactttcacacacacaaaaagtcacctagcctctagagaggattatgaaattttgaatgatgaaaaggaaggcttgcaaaggttggtaccaaagtttggatgtttgtcccctccaaatctcatgttgaaatgtca

SEQ ID NO: 214968 - DNA, 415 bp, Homo sapiens
gaattcagtggcgcagctcagtgtccatctaggttcccaagtagcatgtccaatcgggacaatgggacttggcactgaaaattgaggggaagctgccttcatcaagttatattaatgaggctgtcagggacagaccatgaacaccagggattccttcagcaggaacagaagccctggctgagggtgggtgtccaaagctaagtgcagtcatccttcagtaaccccaggggaytggttccagggcctcactggataccaaaatccacagatgctcaagtcccttacagtcagccttccactgcatctgcaggttctgcatctgagcacggattcaaccaaccgcagatccatacaaattctatccttgattagtgaaatcctcgaatttggaacccacagatagggaaggccaaca

SEQ ID NO: 214969 - DNA, 401 bp, Homo sapiens
agctcagtgtccatctaggttcccaagtagcatgtccaatcgggacaatgggacttggcactgaaaattgaggggaagctgccttcatcaagttatattaatgaggctgtcagggacagaccatgaacaccagggattccttcagcaggaacagaagccctggctgagggtgggtgtccaaagctaagtgcagtcatccttcagtaaccccaggggattggttccagggcctcactggataccaaaatccacagatgctcaagtcccttacagtcagccttccactgcatctgcaggttctgcatctgagcacggattcaaccaaccgcagatccatamaaattctatccttgattagtgaaatcctcgaatttggaacccacagatagggaaggccaaca

SEQ ID NO: 214970 - DNA, 560 bp, Homo sapiens
ggatcacctgaggtcagaggttcaagactagcctggccaatgtggtgaaaccccatctctaccaaaatacaaaaattaaccaggtgtggtggtgtgcacctgttcacccagctactggggaggctaagtcaggagaattgcttgaatctgggagggggaggttgcagtgggccgagattgtgccactgtactccagcctgggcaataagagtgagactttgtctcaaaaaagaaaaagaatttttatttgacttcatgtaaactgatttcaagtaatgcatgatcccaacacatccacaaagtatgtaaaataatgtatacccaccttattatttgaactaaattttmttatatgctataatttaaaatataactcaaaaattccagattgtttcttaaggtttcagagcccagttaaaaataccgtaagaaactaccatttagccattgaacattaattaatatcagagatccttattttgtttctgacattagtgactaaatcggaaaaacataatcattatggtgaacatagtagaaaaccttggctttaagcttct

SEQ ID NO: 214971 - DNA, 455 bp, Homo sapiens
tcttgggccctctcagaaaagccctgtgctagctggaatgaggtctggttgaccactcaatttcaaggctgggtaagtcattcatccaaaaataaactttgaaaggataagatacatttatataarggtgccatgccatgtaactgtggaaatttagaaggcagtcctatattaatagccacaaacaacccagctactctagaccagaaaccaaggaggtatggcttaggaatagatgtctcaggaaggggccccacaggatggttagctctcaggctaattaccaacaatctctagctcacctgggcttattataactcctgttcccaccacttcctttaacatgccaggcaatgaccctaagagagtaaaaataatttagataactgaccaaaggcagactttagaaattgagactggatatggagatgtaaatgcttgggttgcacgggtca

SEQ ID NO: 214972 - DNA, 419 bp, Homo sapiens
tatggcttaggaatagatgtctcaggaaggggccccacaggatggttagctctcaggctaattaccaacaatctctagctcacctgggcttattataactcctgttcccaccacttcctttaacatgccaggcaatgaccctaagagagtaaaaataatttagatawctgaccaaaggcagactttagaaattgagactggatatggagatgtaaatgcttgggttgcacgggtcaaatttttggtactagctctcaagagtgactgttacacatgctctgctggtcgacctcaggcacaggtggttctctttccccgaggatgggatactaatcccgaaggaatgcgttgcatgttggctctacgaggacagggatgcacaaggaaatgagacttgcaagtctatcattgctctttcc

SEQ ID NO: 214973 - DNA, 419 bp, Homo sapiens
tatggcttaggaatagatgtctcaggaaggggccccacaggatggttagctctcaggctaattaccaacaatctctagctcacctgggcttattataactcctgttcccaccacttcctttaacatgccaggcaatgaccctaagagagtaaaaataatttagataactgaccaaaggcaractttagaaattgagactggatatggagatgtaaatgcttgggttgcacgggtcaaatttttggtactagctctcaagagtgactgttacacatgctctgctggtcgacctcaggcacaggtggttctctttccccgaggatgggatactaatcccgaaggaatgcgttgcatgttggctctacgaggacagggatgcacaaggaaatgagacttgcaagtctatcattgctctttcc

SEQ ID NO: 214974 - DNA, 381 bp, Homo sapiens
gaaggggccccacaggatggttagctctcaggctaattaccaacaatctctagctcacctgggcttattataactcctgttcccaccacttcctttaacatgccaggcaatgaccctaagagagtaaaaataatttagataactgaccaaaggcagactttakaaattgagactggatatggagatgtaaatgcttgggttgcacgggtcaaatttttggtactagctctcaagagtgactgttacacatgctctgctggtcgacctcaggcacaggtggttctctttccccgaggatgggatactaatcccgaaggaatgcgttgcatgttggctctacgaggacagggatgcacaaggaaatgagacttgcaagtctat

SEQ ID NO: 214975 - DNA, 605 bp, Homo sapiens
aacttcagggtcagtttattttgatgactaaggaactaacccttctataagaacggaattattccagaagtgtaaaacagatgtacttccaaatagccaacatagtaaagaaataagcacataaatgtmagggagattaccaaattctagccatagcaatgtgattcttgatgttaactagtttatagaaaaatgaactcagtttattttgtgctaaatagtctcctaatctttgtttaaaatcattaaccaattttagatttaaaaatccctatagagctattcctgccctccctaccactcttcagctgtgcatgatgtataaatgctttcatctgagaaacacctcagtggcaaaaccatttgcaattcacagcatctgccttaatggtttattactgggggctaatatttaaaacaattgctattttgtgcagtgctttactacaccacttggaatgtttctcctgatagataagtaaagggacaattttcagtatctctactttaactccagggtccccaaaagtgaatttggcatatgtcatgtagcctgtatttcacagaagacttccttaaaatggagtctccaaatttgttgaaaa

SEQ ID NO: 214976 - DNA, 605 bp, Homo sapiens
aacttcagggtcagtttattttgatgactaaggaactaacccttctataagaacggaattattccagaagtgtaaaacagatgtacttccaaatagccaacatagtaaagaaataagcacataaatgtcagggagattaccaaattctagccatagcaatgtgattcttgatgttaactagtttatagaaaaatgaactcagtttaytttgtgctaaatagtctcctaatctttgtttaaaatcattaaccaattttagatttaaaaatccctatagagctattcctgccctccctaccactcttcagctgtgcatgatgtataaatgctttcatctgagaaacacctcagtggcaaaaccatttgcaattcacagcatctgccttaatggtttattactgggggctaatatttaaaacaattgctattttgtgcagtgctttactacaccacttggaatgtttctcctgatagataagtaaagggacaattttcagtatctctactttaactccagggtccccaaaagtgaatttggcatatgtcatgtagcctgtatttcacagaagacttccttaaaatggagtctccaaatttgttgaaaa

SEQ ID NO: 214977 - DNA, 605 bp, Homo sapiens
aacttcagggtcagtttattttgatgactaaggaactaacccttctataagaacggaattattccagaagtgtaaaacagatgtacttccaaatagccaacatagtaaagaaataagcacataaatgtcagggagattaccaaattctagccatagcaatgtgattcttgatgttaactagtttatagaaaaatgaactcagtttattttgtgctaaatagtctcctaatctttgtttaaaatcattaaccaattttagatttaaaaatccctatagagctattcctgccctccctaccactcttcagctgtgcatgatgtataaatgctttcatctgagaaacacctcagtggcaaaaccatttgcaattcacagcatctgccttaatggtttattactgggggctaatatttaaaacaattgctattttgtgcagtgctttactacaccacttggaatgtttctcctgatagataagtaaagggacaattttcagtatctctactttaactccagggtccccaaaagtgaatttggcatatgtcatgtagcctrtatttcacagaagacttccttaaaatggagtctccaaatttgttgaaaa

SEQ ID NO: 214978 - DNA, 554 bp, Homo sapiens
attcctagggagtgtgtcagttatttttaacacatgagagtgaagtgtacagggcaagaaatgttctctgcacatttccctgtaattaagagagagactcttctttaactaagatcctggatcatacattgctcattatacttcatatttcaaattcttcrttcattgggaattaatgaaataacattgttggattctaaaaacagataagcaagcaggaaagagaacatgtaaacaaccaaaacacccagattactttgtgactcacatgaataatctcaattatttgggacaaaccactgggatgttatgtactctatggagaaataaagactttcccagatggctagagttatccaatatttgaccttctatagcaacagtcttcagtcatgatatactctagttcatggttttattactgtattaccgaggaacaaatatttactaattcttacatagacttcaaattagcatactggcctggggcctgtgattaatgagactggatctgaaaaaccatgccatgggtaattaatattgaaaagcacgat

SEQ ID NO: 214979 - DNA, 593 bp, Homo sapiens
aatgtaatttaatctttctttgagaattcattaatttgataatgcaattatcatttcaactttatctactaaaattgaattagattgaaatatttctgattccagagttagtgtgactttatgttaaaattgctttttctctacttctcttcatctccttaaatcttcaagagtccatgcagcaagttgaaactgaggttgcttaccacttggaaggtaactctttagtcccctgaaagaccaaataggaataaagctgtgtctgagaggcaagagaggtgaatggagcaaactctgcytgagatctttggggcaggctgatctaatttcactcctttgtgtgtgtgtgtgtgtgtgtgtgtgtgtgtgtatctgtgtgtgtgtgttttttcagagttctgcaattccagtggtcaagaattagcccaaacactaggtagtaataaacagtaattttaaaaatattgtcttgcttatatttctttgggactagaatgcatgtatagctacttgtagaagtctaagcctctattgtcgtaagaaaattaacttcaaatataccatatgtatcctaattcaaattctttgatctt

SEQ ID NO: 214980 - DNA, 593 bp, Homo sapiens
aatgtaatttaatctttctttgagaattcattaatttgataatgcaattatcatttcaactttatctactaaaattgaattagattgaaatatttctgattccagagttagtgtgactttatgttaaaattgctttttctctacttctcttcatctccttaaatcttcaagagtccatgcagcaagttgaaactgaggttgcttaccacttggaaggtaactctttagtcccctgaaagaccaaataggaataaagctgtgtctgagaggcaagagaggtgaatggagcaaactctgcctgagatctttggggcaggctgatctaatttcactcctttgtgtgtgtgtgtgtgtgtgtgtgtgtgtgtgtatctgtgtgtgtgtgttttttcagagttctgcaattccagtggtcaagaattagcccaaacactaggtagtaataaacagtaattttaaaaatattgtcttgcttatatttctttgggactagaatgcatgtatagctacttgtagaagtctaagcctctattgtcgtaagaaaattaacttcaaatataccatatgtatcytaattcaaattctttgatctt

SEQ ID NO: 214981 - DNA, 239 bp, Homo sapiens
gattaaaaatatttcaatgtgatatatcttaaaaatcaaaattaatgccaaaaaatccatggtgaaaaaaaaatttcatttataatttgtttggtagcaggacgttggcccccattatctttacwctcttgtttttcatctgtaaatatattacctcacgtatgaaaaggtactttaaaataatatttgttaatcagttgctcttaaaatagggaaatcatccaggattgttcagtggt

SEQ ID NO: 214982 - DNA, 538 bp, Homo sapiens
ccttttccttagagatcctttccctgaccctcccccagtgcaggatagcacccagatcacttgctctctgcaactgtctgctgctccccattactgtcctgactggccttagctacctgtattctgaactccaaccataaaatgtaagttgttcttagaaatcatctaatttagtctaacatcctcattttgcacacaacaggagggaagcttcaaaaagagaagtaacttgtctaaggttacaaaaatcattcattcatccattcagcawatatttcgtaagtacctattatgtcactattctcagtactaggtatcagaggggtacaaaaagggcaaggactttgaactcatgaaacttacagtctattcaaggagacagataataagcaaataaatacataaaataatgtcaggtagtgattaatgcttaaagaaaaaaagcaaggaggtaaaaggaggtagaagcaagaaagagccaagaatagttgaaaaacattatcccaaaggcacaaggacatacagtctattggaaatt

SEQ ID NO: 214983 - DNA, 538 bp, Homo sapiens
ccttttccttagagatcctttccctgaccctcccccagtgcaggatagcacccagatcacttgctctctgcaactgtctgctgctccccattactgtcctgactggccttagctacctgtattctgaactccaaccataaaatgtaagttgttcttagaaatcatctaatttagtctaacatcctcattttgcacacaacaggagggaagcttcaaaaagagaagtaacttgtctaaggttacaaaaatcattcattcatccattcagcatatatttcgtaagtacctattatgtcactattctcagtactaggtatcagaggggtacaaaaagggcaaggactttgaactcatgaaacttacagtctattcaaggagacagataataarcaaataaatacataaaataatgtcaggtagtgattaatgcttaaagaaaaaaagcaaggaggtaaaaggaggtagaagcaagaaagagccaagaatagttgaaaaacattatcccaaaggcacaaggacatacagtctattggaaatt

SEQ ID NO: 214984 - DNA, 306 bp, Homo sapiens
tggctgtgctgggggcaccccacaaccctgtgcctccagcgttcaccatgatccacatctgcagtgagacctccgtgcccgaccatgtcgtctggtccctattcaacaccctcttcaagaattcctgctgcccggacttcatagcattcatctactctgtgaagtctaggacaggaagtctatggacaggaagatggttggygacctgactggggcccaggcctgtgtctccactgccaagtgcctgaacatctgggccctggctctgggcatcctcctgaccattctgctcatcatcatctcagt

SEQ ID NO: 214985 - DNA, 425 bp, Homo sapiens
tctctgggtgttcttgaagtgtgtattatgctgttaatttactcccagggctaccttgcactttgtttccttaatcctccactgcctacagaccaggggaggcaggtcatgcagtctaaaagttcaagtgttctgggatggctcttaattgctcctctgagatttgccttatatgtctacagatgggccataacatttatttctaatttagcaataaatactatatacttagtgactcctagtataaaagaatctggatactctagttcagttgcctccgtaatcatttaattttccttgtaattgaggttatatgtaaatactgtaaccataaactaatgtagccaatagtgtaaccacctaacaggttctccttgcccrctgcctagagagagccagtttattaagacaggggaattgcaaca

SEQ ID NO: 214986 - DNA, 418 bp, Homo sapiens
ggctaattacagtcttattgttgggggaggcagtaggaagatgcrcacacacacacacacacacacacacacacatgcacacacacacccctctgtcctacactacatatttctgccttgagacttcacatgatgatccccagaactagagctctaagggattatgagtagttgggactccagagttgctgttgtcacctgcttggaaacaggagatccacacacatacatttactcttttaggtagcagaaccagattataagtaggttaggaggcacttgactggggaatcaatctatggaagtgttaaaatgtcattggcgaaaattaggactatgataccaactaagatttttaaaagcaaaaacgcttgaggtttttgaaagggactctacgtggtggctgaaacataaagtt

SEQ ID NO: 214987 - DNA, 431 bp, Homo sapiens
gactccaggataggcctaaccagtcatggaaatctccttccctttrtcaattggttgttcttggtttgggcatttgaccttgttctggccaataggatataaaaagaaatcagctggagatatcctaagtaaagacaagattttgtgctgtgttaatttccttgggctgccatcacgaagtatcacaaactgggtagattacaacagaaatgtagtatctcacaattctgaaggccctcagactgaaataaggtgtcagcagggccatgctccttctgaaagctgtaggggaaaaaaccttttcttgtctcttcctggcttctgatgcttgccaatgaaggggtttggattatgccaccccacaatatgccactctggcatatggattattttgacttgaaggcaactgagaaaaagcagacccaggatga

SEQ ID NO: 214988 - DNA, 431 bp, Homo sapiens
gactccaggataggcctaaccagtcatggaaatctccttccctttatcwattggttgttcttggtttgggcatttgaccttgttctggccaataggatataaaaagaaatcagctggagatatcctaagtaaagacaagattttgtgctgtgttaatttccttgggctgccatcacgaagtatcacaaactgggtagattacaacagaaatgtagtatctcacaattctgaaggccctcagactgaaataaggtgtcagcagggccatgctccttctgaaagctgtaggggaaaaaaccttttcttgtctcttcctggcttctgatgcttgccaatgaaggggtttggattatgccaccccacaatatgccactctggcatatggattattttgacttgaaggcaactgagaaaaagcagacccaggatga

SEQ ID NO: 214989 - DNA, 587 bp, Homo sapiens
ctcctgggtagctgggactacaggtgcttgctgccacgcctggctcattatttgtattttttgtagagatggggtttcaccatattgcccaggctggtcttgaactcctggcctcaagcaatcctcccacctcagtctctcaaaatgctggcactatacacattagccactgcgcttggccttaacagtattttcttgatacatatttcagtgcattattttctaatatatattagaaagaatattagaatgagatagattctttcattatttttttttttttgagatggattttcactcttgttgcccaggctggagtgcaatggtgcaatcttagctcactgcaacctcccaggttcaagtgattctcctgcctcagcctcccgactagctgggattacaagygtgcaccaccatgcctggctaattttctttttatttttagtagagacagagttcaccatgttggccaggcaggtcttgaactcccaacctcaggtgatctgcctgccttggcctcccaaagtgctgggattacaggcatgagtgaccccacctggccgagatagattctttctaatatatat

SEQ ID NO: 214990 - DNA, 606 bp, Homo sapiens
acacaacgtttgttgattaagtttgctgttggtggtcctgtaggatgataataccatattttcactgtacctcttttatatttagatatgtttagatacacaaatagttaccattgtgttcccttgggtccatcacatagcctagctgtgtagtaggccataccatgtaggtttgtgtaagtacactctgtgatattcagatgatgacaaaattgcctgacaatgccctttttagaaatgcaatgtatgactataaaggagaagcagaatggaaaaattttgaaaattttcaacctggccatgtraagaataaaaaagcctattcaggagagcaaaccaagtgtgtgaccaagatactgttaaggagattagtatggacagaaagaatcatcaagacaataggagaatgacctcaaagtcatttagagatccttgaggctgtccctcctgttacaggaccagagctctaggagggcaggatagtttcaaaggatgatcctgagaaccctctgtgggctcactatccagagcctcctagatttctccttcccacatttcagtgcattgctcctcggctgccttagctgtggctaaggcacagtggga

SEQ ID NO: 214991 - DNA, 606 bp, Homo sapiens
acacaacgtttgttgattaagtttgctgttggtggtcctgtaggatgataataccatattttcactgtacctcttttatatttagatatgtttagatacacaaatagttaccattgtgttcccttgggtccatcacatagcctagctgtgtagtaggccataccatgtaggtttgtgtaagtacactctgtgatattcagatgatgacaaaattgcctgacaatgccctttttagaaatgcaatgtatgactataaaggagaagcagaatggaaaaattttgaaaattttcaacctggccatgtgaagaataaaaaagcctattcaggagagcaaaccaagtgtgtgaccaagatactgttaaggagattagtatggacagaaagaatcatcaagacaataggagaatgacctcaaagtcatttagagatccttgaggcygtccctcctgttacaggaccagagctctaggagggcaggatagtttcaaaggatgatcctgagaaccctctgtgggctcactatccagagcctcctagatttctccttcccacatttcagtgcattgctcctcggctgccttagctgtggctaaggcacagtggga

SEQ ID NO: 214992 - DNA, 536 bp, Homo sapiens
atttattagttgtaatagtttgttggtcaagtctttaggactggctacgtacaagatcatgtcatctgtaaacagaaacaacttaccttttaycattccaatttagatgcattttatttctttttcttgcctaactgctctggctaggacttccaatactatactgaatagaattggcaaggatgggtgtccatccttgccttgttcctgatcttagaggtaaagctttcagtgtttcacagctgggtatgatgttagctgtgggcttatcatatatgacctctattatgttgaggtaaattgtttctatacctaataagttgagagtttcatcataaaggatgttgaattttgtcaatgcatttctgcttctattgaaatgatcatacagtttttatttttatttttgttaacatcatgtatcacatgtattgatttgtgtatgaatttcttaaaattagttttttgcctctttctctcttcttctgttaccataatttgtaaattcatttgcttgatagtatcgcatggcttct

SEQ ID NO: 214993 - DNA, 448 bp, Homo sapiens
tcataattggcatagagagatcaaattgaaaccattcaagtcaacctttcgatcttgcagcgtgaccttgcataaaggcaggatgtgggtggaagccctgactcccattcaagttacaggtcagcctgaggccggaatttaacaaagtgtaacagcagaagaaatttgagagagtgaaccaaagatgagagaacatgagggacatgttgttttgttgtttgaatacatcttygtgaaagattttgacaccagactttaatcatagctgataggtccatgacagtactggtgacaatacatttttatggaaaacaagcgtagaagcttagatatgtaaaaagaaaatcgtagtaaagaatcaatatcatctactcaaagacctagaaagggcccagaagtcttggaaatttccctgggatttttttaaacctgctcatttgcttctaaa

SEQ ID NO: 214994 - DNA, 448 bp, Homo sapiens
tcataattggcatagagagatcaaattgaaaccattcaagtcaacctttcgatcttgcagcgtgaccttgcataaaggcaggatgtgggtggaagccctgactcccattcaagttacaggtcagcctgaggccggaatttaacaaagtgtaacagcagaagaaatttgagagagtgaaccaaagatgagagaacatgagggacatgttgttttgttgtttgaatacatctttgtgaaagattttgacaccagactttaatcatagctgataggtccatgacagtactggtgacaatacatttttatggaaaacaagcgtagaagcttagatatgtaaaaagaaaatcgtagtaaagaatcaatatcatctactcaaagacctagaragggcccagaagtcttggaaatttccctgggatttttttaaacctgctcatttgcttctaaa

SEQ ID NO: 214995 - DNA, 648 bp, Homo sapiens
taatatagtctattgttaaaggtcttgatttatttcattcattgaattatttcattccaagatttctctttagttcttttcttatatatatattttttgttaaatttctctttcagatcayaagttagtttcttgatttctttgtattgtccatctgtgtttacttgtattttactatttttttaatattgttattttgagttccttttaaggtattttatagatttcttttgggatctgttattggagaattattgtgttcctctgaaggtgttgtgttgacttgctttttcatgtttcttgttgatgtttatgttgatatctatgcatctggtgtaacagtgcattttctaattttatggagtagtttccatagggaaatatgatttctggttgatgtatctatagtgcctattggttagggtactttgacttaggttctgagtgggtgccagagtgtaatctccatatgatttctttggctgtaatcaacgtcagtggtgtctgtgaattccttagtggttgtagttatttgtgcaggctgtggtaagacttttctggaaactggggtgccagtcaggccagtcctcaggtccctgggtggcttggatgagccccagatgaatcagtcctcaggtccctaaatag

SEQ ID NO: 214996 - DNA, 648 bp, Homo sapiens
taatatagtctattgttaaaggtcttgatttatttcattcattgaattatttcattccaagatttctctttagttcttttcttatatatatattttttgttaaatttctctttcagatcacaagttagtttcttgatttctttgtattgtccatctgtgtttacttgtattttactatttttttaatattgttattttgagttccttttaaggtattttatagatttcttttgggatctgttattggagaattattgtgttcctctgraggtgttgtgttgacttgctttttcatgtttcttgttgatgtttatgttgatatctatgcatctggtgtaacagtgcattttctaattttatggagtagtttccatagggaaatatgatttctggttgatgtatctatagtgcctattggttagggtactttgacttaggttctgagtgggtgccagagtgtaatctccatatgatttctttggctgtaatcaacgtcagtggtgtctgtgaattccttagtggttgtagttatttgtgcaggctgtggtaagacttttctggaaactggggtgccagtcaggccagtcctcaggtccctgggtggcttggatgagccccagatgaatcagtcctcaggtccctaaatag

SEQ ID NO: 214997 - DNA, 648 bp, Homo sapiens
taatatagtctattgttaaaggtcttgatttatttcattcattgaattatttcattccaagatttctctttagttcttttcttatatatatattttttgttaaatttctctttcagatcacaagttagtttcttgatttctttgtattgtccatctgtgtttacttgtattttactatttttttaatattgttattttgagttccttttaaggtattttatagatttcttttgggatctgttattggagaattattgtgttcctctgaaggtgttgtgttgacttgctttttcatgtttcttgttgatgtttatgttgatatctatgcatctggtgtaacagtgcattttctaattttatggagtagtttccatagggaaatatgatttctggttgatgtatctatagtgcctattggttagggtactttgrcttaggttctgagtgggtgccagagtgtaatctccatatgatttctttggctgtaatcaacgtcagtggtgtctgtgaattccttagtggttgtagttatttgtgcaggctgtggtaagacttttctggaaactggggtgccagtcaggccagtcctcaggtccctgggtggcttggatgagccccagatgaatcagtcctcaggtccctaaatag

SEQ ID NO: 214998 - DNA, 520 bp, Homo sapiens
tgctttcttgtgtggatatttgtccaatttggtgttcctgttagggtggakggaagagtgatcgctggaggcttctgtttggctgtcttgttcattctactcctttggtattcgtttttgactcctgtaaaagtgtcccaattttcactatttaaaaaaatagtgatttttcatgaagtgttatttatgctaatatttaatggatatttttaatattgcttgtgatgaaatgggaagtatgcatgaggtacttccactacataccaaactattaagatcatctgaaggaaaaagtcatgtgagactgtgttaacctagtcatttttcatggatataatttttactcaaataaatagctggttgacaaactacagttattccacctttggtatttggcagacattttgttgaaaaggaatgaagtgagcgtgtcaccttaaggaaataactgatgaactttgtaaccaatgacaaaattcaagttgttaagcaacaattacaattctggaaactgtttaac

SEQ ID NO: 214999 - DNA, 487 bp, Homo sapiens
ttgagagacagtcacaggtcgtcctcaggtccatgtgaatacagttctgaaacttcttggtaattaaaacattaagttaaaaactaggtcttgttttaaagctaagtttttagcttagttaaaaacacccatgaggatgkccagaaacaattagtcaaagaataacaagtgttgatgagggtgtagaataatcaaaaccctcagatgctgctggtagaaatgtaaaatagcacagccattttggaaaactgacagttcctcaaatgattaaatagttacatgactctgcaatcctactcccaggtatatagccaatagaaaaacatatatccacaaaaaagcttgcatataaatattcatcgcaacattatttatgatagctaaaaggtaaaaacaacccaaatgtccatcagtggcttaatcgataaacaaaatgtggtatcagtcatggttatccagagaaacaaaaccaatagaatatatagac

SEQ ID NO: 215000 - DNA, 372 bp, Homo sapiens
gaccttgaattctgtgagaactgttgagcccttatgataacttcctgcctcctttttttataatcaaaattttgaatatgaagttacgtacagaaaagtacacatgtcaatcaaatttacaaaataaacccacccatgtaaccactatccagatcaagacaaagagtgttattcagaaaccctggctatgcctcttcctgccaattgtccccattttccttgtcaaaggtaagcattatcctgacgtctaacatcatagattagttttgcctatttttgaatttcatttcagtggaatsgtagagtgtgtcttttttatgcctggctacctttgcttaaagctatgcttgtgagaatcatccacattgttgc

SEQ ID NO: 215001 - DNA, 541 bp, Homo sapiens
aatattcattttagggttttgtgagatttactttatcatgtaaagtaactccccttatatatgcagtttagttagcattttaaaaatcataagcggatactgattccttataaatttttttttctgtttaggtggttatatgttttttttccatgaatctttaatgtgttggaaaacattataatttttaatgttgaatcatttttgcattcctttggggtaaattctacttcatcatgatatattacatttttatatatacctttggatttaagttactgattaaaactttattagaatttttttctgtaattataaataaaattggtttataattttctcattctgtagtggttttgttaggttttggtatcatgttaataaaagtttcataaagygaaatggataacttttttcttttctgaagtgttcaaataatagaaatatggtaaaacttacctatgaaaccatctgaactaagcagaaataagttcagtggttctgtggtttgtgaactttctatatctttgtatttctgaaa

SEQ ID NO: 215002 - DNA, 541 bp, Homo sapiens
aatattcattttagggttttgtgagatttactttatcatgtaaagtaactccccttatatatgcagtttagttagcattttaaaaatcataagcggatactgattccttataaatttttttttctgtttaggtggttatatgttttttttccatgaatctttaatgtgttggaaaacattataatttttaatgttgaatcatttttgcattcctttggggtaaattctacttcatcatgatatattacatttttatatatacctttggatttaagttactgattaaaactttattagaatttttttctgtaattataaataaaattggtttataattttctcattctgtagtggttttgttaggttttggtatcatgttaataaaagtttcataaagcgaaatggataacttttttcttytctgaagtgttcaaataatagaaatatggtaaaacttacctatgaaaccatctgaactaagcagaaataagttcagtggttctgtggtttgtgaactttctatatctttgtatttctgaaa

SEQ ID NO: 215003 - DNA, 571 bp, Homo sapiens
gtagtatttgaaacctgctaaatgattctgttgtgaagtcaatattgagaattacttaatttgatgaagggaaatctctgcagattagttttgcatgtcagttatttttttagggaggttccatataaaagattcccttatttttcgtcaacattttctgtatacttagcatggttgttgtcttctactgcttatcagctcttattatgtgtcatgtcttaatttacattattttgtttaattctcatgaaaatacactttatgcatatagaaactggggcttagtgaaagtaaacaacttggtcaagataacttagtaaccagtagtgatgagtcaaacataggtcagcctgaatccagtctctatattatcaatcattacttttaattctctcayagttttaaaagcagactgaaaataagagaattttgtgactccccttgatatagtttggctgtgtccccacccaaatctcaccttgaattgtaataaccacccctcatcccctgccctgtgtcaagggcagggccaggtggagattgttgaatcatgggggtggtttcccccata

SEQ ID NO: 215004 - DNA, 584 bp, Homo sapiens
gctctgggacaatcttatcaagcctggtgaaactttcttaaaactgtagtttaagaattgttctacctagtctttttcctccacttctcctttgtagatgtcaggtttgcatcttagtctgaattccatctctgcctcttatagcttcttcccctttttgttttgcatgactttctctaataaacgtcttgcacatctaatactgtcctgatgtctgcttcttggaagtctgtacttccaagtagtaccaggagtggtctaaaaaacaggtgataagatggggttagggtttaggacttaactcatcctatcaggcaaagaggacctcaatctgagtactgtttggtgcagaaatagtctctcacacaattttgtggcctagctgctaaagattccacaagtggtggcctgggaaaacatcccrgttgaatgaactgtccatgcagttagaatgattcagtcatttcaaagatacaaaaggaacaatacctacaaagagttggttagttactactaagttgtagagaaataaaaagaaactgagggccattgataagcagttgaaggctaagtgtaagagacag

SEQ ID NO: 215005 - DNA, 604 bp, Homo sapiens
catggaaatattttaaatgtaattctagaactgaaattacagtaactgagataaccatttctacgtagcttaacagaagatgtgagatggtggaaaattgagtcagtgatcttgaagatatatcagatatattctagtcagaagaatacagagaggctggacgcagcgtggcgcctgtaatcccagcactttgggaggcttaggtgggcagatcacgaggtcaggagatcaagaccattctggctaacacagtgaaaccccgtctctactaaaaatacacacacacacacacacacacacacayacacacacaaagtagccaggcatggtggcgggcacctgtagtcccagctaatcgggaggctgaggcgggagaatggcgtgaacctggaagttggagcttgcagtgagccaagatcatgccactgcactccagcctgggtgacagagcgtgactccgtcaaaaaataataatactaatacagagaaaaaggttggagaaaaaaatgaactttccttcagaaatatgtgtgacaatatcaaatagtgtaacatacatattacttgagtcccaggataagaaaaaaatgagaatggatagaag

SEQ ID NO: 215006 - DNA, 627 bp, Homo sapiens
gtagccaaacatacgctaaaggaacagaatttcttctgaagaaaacacatgggaatactaagaaaccatgtcttgttaaaaaaaagaaaaaaaaaagctgttccatgggtggttggcattgagcaatttgtattwaaaaaaactgcaatgagggcaatattctagcccagagtttgggtaatttttggtgatggtagaagcaaaaaatgttatgagaaaaaatttgtgcaggtatgagtgattaattccaactgaggtttagtggatggtgttaggaaatgaagatcatattaccgcaaagtgagcttccttctaatttatctttgcttgtatggcaataagtagaatcagaaacatacagataaatttatacctggatcgttctttaaacaacagtccttttatttactgggacaagcgttaacaattgcagggatgagagtttatttccattcagaagcaattcatccagtttccattaaccagcttagagtgtggttcagactgcagttaattttatttatgcgaggcttctggcttctaggtgttgttttaagagcaaaatgttaaataagcttctcaacttcccctggtcatccccaaatttaagtgccaggggtggaagta

SEQ ID NO: 215007 - DNA, 623 bp, Homo sapiens
taaattcagccatagcatcaggcaatagtggtagtgctaatattagaacttacattaattctgtatctacttgttattattctttcagagaagacaatagtgcttcataaagatatagttgcaaccagcttttattgtagtatttatgtaccaaagaagtgttgccatatacaccagtcaggataaaggaggttacgctgtagtaaaacattattcatgaatttcagtggtttaatacaataaagctttattacatggttaaagaagcacagaagaggccctgcttcacagttgccaagggtcctggttaagggaggaactgacatctcaacatgaggttcagggtttgctgcagtatcagaaaaaggagaatggagaattgcacagggttttatgtttttgtttctgtttttcttaacctctgtatggaagtgacatgttatttttactcacatttttgtgatacatgtatcacttgtatgggatctgagagtacagaagttggaaaagtgtataagtcaattatctggataaaagacaatggaactgactactsaattatatatataatcccacttagatgaagatttgtgcctatcaatccatctttctttactttgttg

SEQ ID NO: 215008 - DNA, 464 bp, Homo sapiens
aaatacactatggagctaaaaaatgaagtgtaagtgaatagttacatttggaaataattgtctacaggagacataagtttttatgaaaacatagtaagaccagatcctgtctccacagagtatatgagaactgtatatgtaatttcccctcatttatctaagcaatagtgaaaactaagcatgcaaaggcagtgaatatagctttcataaatagcatcaaatgaacagagaagggagatttttaaaaatggaagaatcatttataatctcttatattcaatggcaagagtttaagtgtattaaaggccaaataatatattacattyggctgactttgtatatttttccatagcctatgcaaataataactgaaattatgctattctaatgtgttgtggcaatcttaacttaatcataataatgagggcaagaggaaaatgctgaaaacttgtttatcactaact

SEQ ID NO: 215009 - DNA, 544 bp, Homo sapiens
aacagtcaaaatgccacagttaaaagccacaaggtagcacattggataaagaagcaagacccaatggtatactgtctttaagagagccatctcacatgtaataacacctgtaggctcaaagtaaatggawggagaaaaatctaccaagcaaatggaaaacaggaaacaagcagaagctgtgattctaacttcagataaaacagactttaaagcaacaacagtcaataaaaggatgaagaagggcattacataatggtaaaaatttcaattcaacagaaataactatcataaatatatatgtacccaacacaggagcactcagattcatgaaacagtttttagaaacctacaaagagacttagataaccacttaataacaatgggagacttcaacacaccactgacagtcacagacagatcactgaggcagaaaactaacaaagatattcaggacctgaagttgacccttgaccaaatggacataacagacatctgcagaactctctaccccaaaacaacagaatatacattcttctcatctgca

SEQ ID NO: 215010 - DNA, 544 bp, Homo sapiens
aacagtcaaaatgccacagttaaaagccacaaggtagcacattggataaagaagcaagacccaatggtatactgtctttaagagagccatctcacatgtaataacacctgtaggctcaaagtaaatggaaggagaaaaatctaccaagcaaatggaaaacaggaaacaagcagaagctgtgattctaacttcagataaaacagactttaaagcaacaacagtcaataaaaggatgaagaagggcattacataatggtaaaaatttcaattcarcagaaataactatcataaatatatatgtacccaacacaggagcactcagattcatgaaacagtttttagaaacctacaaagagacttagataaccacttaataacaatgggagacttcaacacaccactgacagtcacagacagatcactgaggcagaaaactaacaaagatattcaggacctgaagttgacccttgaccaaatggacataacagacatctgcagaactctctaccccaaaacaacagaatatacattcttctcatctgca

SEQ ID NO: 215011 - DNA, 608 bp, Homo sapiens
ctttttttgaagagaagggaaacttatataggctatggatcagtacgaggagagaaagaacagggcacccaaccctcccatcatttctcaaagactcctgctggggctagtgtaccaggagaagtgtgcattccaatggagcacaccctcatggaagttcctattttctagaaaaaggatgagaaagcagcctctgggtatgaacatgccagctgcatgccagccattcacaggcattgtctgagaacgacgcagtcagtcaccttragacctggagaccatgggaaactgcagttctgactgccaggggaagaagccaccatccagtcctgtgggaatgtgagcttggctgcagcctctccttctgggaggagaatgggaatcccaggtaccagctggttagctgtctagacaacccagaatgactctctaggactattttcagccatcttattcattacattacaaatgcataataattaatcacatgtaactattatagttttatttaacctttcttctgattgttgctatttaggttatttttctatttttcacttttattaataacgttaaataacattggctttcattaataatgttaaaat

SEQ ID NO: 215012 - DNA, 581 bp, Homo sapiens
atcactgggtcttctgtaaatacacatcctctatcctttcttaacttataattttaaaaaaacatattttttccttttatttttatttgatacataagtatacatatttatgggatacagaatgatatttcaatacaygtatgtaatgtgtaatgatcaaatcagggtaatcagcatatctatcatctcaaacatttttcattttttaatgttaggagcattcaaaatcctctcttctggctttttgaaaatatactttaaattattgttaatcatattcaccacacagtgctacagaactctagaactattcctcccatctagctgtaactttatatcttttaaccaacccttcctatctttccctctctctacctttcccagcctctaataaccacaatcctactatttgcttctatgaactgaattttttagctcccacatataatgagctgaattaagctcccacatacaagcgagaacatgtggtatttatctttctgtgcctgacttatttcacttaatattgtgttctctaggctcatccatgttgctgcaaatgacagtattttattctttta

SEQ ID NO: 215013 - DNA, 581 bp, Homo sapiens
ggaagataagcacaccaaggtaagagaaacatgaatttcattcctctttctaaactaaacgagctcctaaactagatgtaggtgtacatgtgtggttatattcaatacctgcttttatgaattgcctctagatgactttcattataaaccttaacaccaaaaattccatctttatttcatagttttatgaatatatctagaggcctatttgaggagtacactcaataaawcctgttaataactaataactctcaagatcactcaattgcttaaagaagttttattcacaggcactgaaataaatgactacatttttattccacacagctagaagcagagattactaaagactctaaaccccattactaatttcttgcacaatcgataaatacattttgacctcccactgtatctgagaatagtagatatttttgatgcattaaaaaataaaaataaccaatgacttgaaggtatatatgatctagttttgggatacattatattccaaattagtagaattgataaagttatgaaaatttagagttttcttatacaacaacatgaacttctgactagtaact

SEQ ID NO: 215014 - DNA, 643 bp, Homo sapiens
ctcaataaatcctgttaataactaataactctcaagatcactcaattgcttaaagaagttttattcacaggcactgaaataaatgactacatttttattccacacagctagaagcagagattactaaagactctaaaccccattactaatttcttgcacaatcgataaatacattttgacctcccactgtatctgagaatagtagatatttttgatgcattaaaaaataaaaataaccaatgacttgaaggtatatatgatctagttttgggatacattatattccaaattagtagaattgataaagttatgaaaatttagagttttcttatacaacaacatgaacttctgactagtaactgttcagagatcaattttctgggattaatcttttgtcacataatttgtatgcagcctagcaaaactgactagttgagactttgtcrtggacatatgaattttattctttttacataaaaatatggtacctttgaaattctttttttgttatttaattgataatgcatgcatttggtagaatattcacaaagtgaagtgtatcaacagtgaaaggtaaatcccaatcccttttctcttctctggttaccaggccctttcctctgagccaagactttaaccagtt

SEQ ID NO: 215015 - DNA, 567 bp, Homo sapiens
catctctggacctgccctgggacgggaggatcttgccaccctgaagagggcgtaagcctggctagcctcaccacctgctaattatagagccctggggccttgagtgaacataggcagtagccagacactggttaccgcaggccttgagtgagacccagtactgtgctggcttcaggtttgaccyagtgcaatcccagtggtgatagccacaaagatccttatgtcacccctcccctagctccaggcagctcagcagaaagagattccatttgtttgggagaaaggaaagtgaataagaatctctcctggtaatcgaggaaattcttctggattttgcccaagaccaccaaggtggtacatctacaagtgtataagaaccacagcattactgggcttggggtacaccctgatgcagatatggctatggtaataattaaaaaaaaacttagatcacaacaccaaagtctctttgaagacctggatatgccttctcaaaaaggagaggtacaaacaaacccaagactataaagaccacagtaaaaacctaactcttcaatacccagacac

SEQ ID NO: 215016 - DNA, 567 bp, Homo sapiens
catctctggacctgccctgggacgggaggatcttgccaccctgaagagggcgtaagcctggctagcctcaccacctgctaattatagagccctggggccttgagtgaacataggcagtagccagacactggttaccgcaggccttgagtgagacccagtactgtgctggcttcaggtttgacccagtgcaatcccagtggtgatagccacaaagatccttatgtcacccctcccctagctccaggcagctcagcagaaakagattccatttgtttgggagaaaggaaagtgaataagaatctctcctggtaatcgaggaaattcttctggattttgcccaagaccaccaaggtggtacatctacaagtgtataagaaccacagcattactgggcttggggtacaccctgatgcagatatggctatggtaataattaaaaaaaaacttagatcacaacaccaaagtctctttgaagacctggatatgccttctcaaaaaggagaggtacaaacaaacccaagactataaagaccacagtaaaaacctaactcttcaatacccagacac

SEQ ID NO: 215017 - DNA, 599 bp, Homo sapiens
caattactattcaggctcattgtcttcaagatgactattactcttcacaaattcctttgatttgataagctgtgtttcttcccttcatcccacaatgattttcagcaagtctcttccaggttagcagttatacagatgcctggggccatccccccataactctgtgataaacagtttcattctccaaaatgccacttgctgttctgacacctttaaaatgacaattacactatgcagtcctctctttatayctttgtttataattatgatttcaaaagtggtggagatgcatatttcttacttttgaaacaaatcacagcttagtttatactcaatgctcttgcctgacatggagcagaagtgagtgaatagggtgcaaggacatcgcagattggaaagacacatgtgggtgggaacagaaagacagccattgaaaagcttggttattatagggaaacaccagaaagtacaaaatagccaacatgggaaatcatagtattttgcttgctacttatactttcagttcctgttccctcctttgtttcttgcatgagctttggaaagggcaatacagatatttttctttgtcaccccttcct

SEQ ID NO: 215018 - DNA, 567 bp, Homo sapiens
gtattagaaaacaacatctgggcactaggtgtgtttgttgctactggagtatcactacttctgggtcatcatagctgacacagcaagaaaaagcatgtrtatgctaacttgtatacagtcatgcaactctaaataggtctgtgtgtaaccacctgtattttaagcaatatttttgaatgaaagttataggagaatattttactttcatttttattgattgattgactgttaaacagagacagggttttgctctgttgcccaggatgagtactatggtgtgatactagatccctgcagcagccttgaactcctgggctcaactgatcctcctacctcaccctccctagtagctgggattataggcgtgtaccactgcacatggctaatttttttattctaattttgtgtagagacaggtcttgaactcttggcatcaaacatttggcctcgagcaatcctcctgccttggcctccccaaatgctggggttgcaggcacgggccaccacacctggcccaggagaatattttacaaattaatcaatgataagccaaagtgggataaggga

SEQ ID NO: 215019 - DNA, 603 bp, Homo sapiens
caaggaggtttggtctctttcatgagagaatggtattagaaaacaacatctgggcactaggtgtgtttgttgctactggagtatcactacttctgggtcatcatagctgacacagcaagaaaaagcatgtatatgctaacttgtatacagtcatgcaactctaaataggtctgtrtgtaaccacctgtattttaagcaatatttttgaatgaaagttataggagaatattttactttcatttttattgattgattgactgttaaacagagacagggttttgctctgttgcccaggatgagtactatggtgtgatactagatccctgcagcagccttgaactcctgggctcaactgatcctcctacctcaccctccctagtagctgggattataggcgtgtaccactgcacatggctaatttttttattctaattttgtgtagagacaggtcttgaactcttggcatcaaacatttggcctcgagcaatcctcctgccttggcctccccaaatgctggggttgcaggcacgggccaccacacctggcccaggagaatattttacaaattaatcaatgataagccaaagtgggataagggaggag

SEQ ID NO: 215020 - DNA, 603 bp, Homo sapiens
caaggaggtttggtctctttcatgagagaatggtattagaaaacaacatctgggcactaggtgtgtttgttgctactggagtatcactacttctgggtcatcatagctgacacagcaagaaaaagcatgtatatgctaacttgtatacagtcatgcaactctaaataggtctgtgtgtaaccacctgtattttaagcaatatttttgaatgaaagttrtaggagaatattttactttcatttttattgattgattgactgttaaacagagacagggttttgctctgttgcccaggatgagtactatggtgtgatactagatccctgcagcagccttgaactcctgggctcaactgatcctcctacctcaccctccctagtagctgggattataggcgtgtaccactgcacatggctaatttttttattctaattttgtgtagagacaggtcttgaactcttggcatcaaacatttggcctcgagcaatcctcctgccttggcctccccaaatgctggggttgcaggcacgggccaccacacctggcccaggagaatattttacaaattaatcaatgataagccaaagtgggataagggaggag

SEQ ID NO: 215021 - DNA, 603 bp, Homo sapiens
caaggaggtttggtctctttcatgagagaatggtattagaaaacaacatctgggcactaggtgtgtttgttgctactggagtatcactacttctgggtcatcatagctgacacagcaagaaaaagcatgtatatgctaacttgtatacagtcatgcaactctaaataggtctgtgtgtaaccacctgtattttaagcaatatttttgaatgaaagttataggagaatattttactttcatttttattgattgattgactgttaaacagagacagggttttgctctgttgcccaggatgagtactatggtgtratactagatccctgcagcagccttgaactcctgggctcaactgatcctcctacctcaccctccctagtagctgggattataggcgtgtaccactgcacatggctaatttttttattctaattttgtgtagagacaggtcttgaactcttggcatcaaacatttggcctcgagcaatcctcctgccttggcctccccaaatgctggggttgcaggcacgggccaccacacctggcccaggagaatattttacaaattaatcaatgataagccaaagtgggataagggaggag

SEQ ID NO: 215022 - DNA, 578 bp, Homo sapiens
agaatggtattagaaaacaacatctgggcactaggtgtgtttgttgctactggagtatcactacttctgggtcatcatagctgacacagcaagaaaaagcatgtatatgctaacttgtatacagtcatgcaactctaaataggtctgtgtgtaaccacctgtattttaagcaatatttttgaatgaaagttataggagaatattttactttcatttttattgattgattgactgttaaacagagacagggttttgctctgttgcccaggatgagtactatggtgtgatactagatccctgcagcagccttgaactcctgggctcaastgatcctcctacctcaccctccctagtagctgggattataggcgtgtaccactgcacatggctaatttttttattctaattttgtgtagagacaggtcttgaactcttggcatcaaacatttggcctcgagcaatcctcctgccttggcctccccaaatgctggggttgcaggcacgggccaccacacctggcccaggagaatattttacaaattaatcaatgataagccaaagtgggataagggaggagc

SEQ ID NO: 215023 - DNA, 328 bp, Homo sapiens
tatttactatctggccctttgcagaaaaagtttgccaactgcaaagaaccatcaaagcactgtgagtcagcacagatatttttggctctatcatgcratagtaaattgcctggcattggaagtgttcaagtttaggtggctatgggtcaacgtactgaacccaggatccccacctcagcacagaagctccaatctagggtcaggacccggatcttctcagtcatgctcttataacgcacttttcaccattgtccctaaaaggacctcctgattgttaacgtttaagatttggggcacagaagaaaatggtcaccacatcaattataag

SEQ ID NO: 215024 - DNA, 645 bp, Homo sapiens
tataacacagaaaatgaagaagaatccacaggggcacattaaaattgcctgatattttcatgaaaagacactgtcttgcttaaacatgttctcctggcttaattctccatgaagtgtggcccttgccctcagagtttataatctagctgagaagatggcaacagaagatgtcataagactatgttgaatcaatggctgagggctgtgtctgatgcacaggtgtatcatgtttaatcatcctggggaaaggaggcataatgatggtcattttcctggaagaggtagaaaatgagctaaatgagaggtagaaaataagctttgaagttaggaacaaacattttggctagcagaaagagagagggtgaggaaaattaagatgaattgaagagtctggctagtaagagagagaaaagagagctttgccttgttagaggggagctaaggttggtgaaatcacagtgtgctkgttgtttaaggaggaaattacagaggacttagaaaccaggaacggaagcttagacctggtgtgaagcaaatgtgtaggcggtcaggtgttgagatctgtagggaagggctgcagttgggaagagggcatcagggctgctgctgcagtcgtcccaacataagggcttagacagagcctaa

SEQ ID NO: 215025 - DNA, 490 bp, Homo sapiens
aaaagtgcattcatcaaacagataattcactctctcccctggagaagaatgaatgctgcagtgtgctaggagtgttattcttccatgtggaagcaggaaatgaaggagaggcgggctcttatgacactctaatagataatattctagagccatttcaytgcactgtaaaaacaaatcattaaacaaaattctgattgtacagtggtacatacaagtctactgacctctataggaaaagcttgcaaccaccacagaaagaatgatcatttagaaattataaaatttaagtgtcttaaaatgccaagtcctaagttcatcttgataaatcggattaataggctagctttcattatcataggctgaagaatttatccatttatagaaattaatattattatactttaaatctctctgagaatgcatggtataacatcagtaactgtcatctaaatggaatgagggcttgtctatttaaactgactagaaatac

SEQ ID NO: 215026 - DNA, 490 bp, Homo sapiens
aaaagtgcattcatcaaacagataattcactctctcccctggagaagaatgaatgctgcagtgtgctaggagtgttattcttccatgtggaagcaggaaatgaaggagaggcgggctcttatgacactctaatagataatattctagagccatttcactgcactgtaaaaacaaatcattaaacaaaattctgattgtacagtggtacatacaagtctactgacctctataggaaaagcttgcaaccaccacagaaagaatgatcatttagaaattwtaaaatttaagtgtcttaaaatgccaagtcctaagttcatcttgataaatcggattaataggctagctttcattatcataggctgaagaatttatccatttatagaaattaatattattatactttaaatctctctgagaatgcatggtataacatcagtaactgtcatctaaatggaatgagggcttgtctatttaaactgactagaaatac

SEQ ID NO: 215027 - DNA, 490 bp, Homo sapiens
aaaagtgcattcatcaaacagataattcactctctcccctggagaagaatgaatgctgcagtgtgctaggagtgttattcttccatgtggaagcaggaaatgaaggagaggcgggctcttatgacactctaatagataatattctagagccatttcactgcactgtaaaaacaaatcattaaacaaaattctgattgtacagtggtacatacaagtctactgacctctataggaaaagcttgcaaccaccacagaaagaatgatcatttagaaattataaaatttaagtgtcttaaaatgccaagtcctaagttcatcttgataaatcggattaataggctagctttcattatcataggctgaagaatttatccatttatagaaattaatattattatactttaaatctctctgagaatgcatggtatamcatcagtaactgtcatctaaatggaatgagggcttgtctatttaaactgactagaaatac

SEQ ID NO: 215028 - DNA, 247 bp, Homo sapiens
aaaaattgaaattctttttactaagatctgaaaaaagagaaagatgcccacttttaccatttctattcaaccttgtactggaagtcctagtcagagtaattaggcaagagaaagaattaaaaggaatacaaattaggaagattttaaattatccttatctgcagctagcatgatcttatatttagaaaaaccaasagactgcaccaaaaaataaaagtattgataaatgaagtcagcaaagttgcag

SEQ ID NO: 215029 - DNA, 562 bp, Homo sapiens
ggagtgtctccttgcatatgtgggaaacaacaaacatgccagggagtagtatatacagcattttaagcccatttctgtatgtttcctcctctttgagacctcagctcctgaaattctacacatcttttgctgcctggaaatccacctactaaaaatgattcagacatgaagcaacatacttctggattggcctttattatttgcactgagaattatactattccttaggggaaagaacatgttaacatgggaatcactcagggaatttctcatcactgtggcagagaacccctcaagtgctggctcccttagtcaactcttatgctttgaaagagtataattcatatatatactcttatatatacacacatatacatatatatacacacatatacatatactactgatatgatttggctgtgtctgcacctaaatatcatcttgaattaaggctcccatatttcccatgtgttgtgggagggactcagtaagagatcatcgaatcattgggcagttcyccctatactgttctcatggtactgaataagtctctgaataagtc

SEQ ID NO: 215030 - DNA, 567 bp, Homo sapiens
aatctatacctagatttaacagagttaaccacaggaattttgctmtaaaagaggaatgggatacagacaaattcagacacagaaatgtaaaaatagagaaaatagtaaaatatttttaagagaaaccattgggagatatacctaatgctagatgatgagttagtgggtgcagcgcaccagcacggcacatgtatacatatgtaactaacctgcacaatgtgcacatgtaccctaaaacttaaagtataataaaaaaaaaaaagagaaacctcatccattcacatgaaaaacattaaatatctgagaaatgtttagagtctaaaatgtgaaatatatgtgaagttaaagttgaatctaactggattaagaaatacccagctaaatttttttggtgatgtaactgtacttgagaaaaaaatccatagtagttcagagacttggtctttttgttacctctggtgttagccaaattggggtggagtgaggaatttgcttgtgtctgtaacacctcagagaggcatgacccaaccagcccaaactgtgactgagatctgagtactactgagt

SEQ ID NO: 215031 - DNA, 560 bp, Homo sapiens
acctagatttaacagagttaaccacaggaattttgctataaaagaggaatgggatacagacaaattcagacacagaaatgtaaaaatagagaaaatagtaaaatatttttaagagaaaccattgggagatatacctaatgctagatgatgagttagtgggtgcagcgcaccagcacggcacatgtatacatatgtaactaacctgcacaatgtgcacatgtaccctaaaacttaaagtataataaaaaaaaaaaagagaaacctcatccattcacatgaaaaacattaaatatctgagaaatgtttagagtctaaaatgtgaaatatatgtgaagttaaagttgaatctaactggattaagaaatacccagctaaatttttttggtgatgtaamtgtacttgagaaaaaaatccatagtagttcagagacttggtctttttgttacctctggtgttagccaaattggggtggagtgaggaatttgcttgtgtctgtaacacctcagagaggcatgacccaaccagcccaaactgtgactgagatctgagtactactgagt

SEQ ID NO: 215032 - DNA, 595 bp, Homo sapiens
ctcaatatcctgtcctcgtagtattacttttcttgtactagattagcaaccattgtaactcaaactaaagattgtccctaaatacatccactatcgaatgtggcttggattaaattaagtttcccgtattttgtcgttggttgacatggttatctctgtctctagtttctattaaagagaggaagatataacagaatatttcaaagttcatcttgttcttaaattggtcctctgttcaggcttttattactaagacaaaaaaacatgatgcttttaatgcattcctggattctgctttcctgaygattttatataatttaacatttatttttcatatttgggagtaagtgtttagtccttgaactttcttcccagttgaaagaaaaaaaaaatatcagtgttgagaccttgccatctttagtggtgcataccagttaaaaataaatgtaaaatagtgtgccaccctgtttataggaatattgtgcagagaaaaagataatgctgtaaaatatttcacatcatttctggggattaaaatataaagagagtaatagaaatgaaagacacacatgacaaaccatttagaatgaaattc

SEQ ID NO: 215033 - DNA, 600 bp, Homo sapiens
ttaccagtgaaccaccagacaggccaagaaagaatgctttctcataatgaggctttgagagagctccaaatgtgctctgctccctccagtactgaaaagatagcctgttatttttcaagactcgtgaggagctgaggaacaggggattggactagataaaacaccacaaaactctctgtttttaccaaaatccagccagttttcttgacccaatgatacccgcggtgctgtaagcctttaattaatttcaagaattctctaaaagttgattccaactatctttgtcaggtttttgtagttaggtkgtgaaggggtgaagttttgagttctgtattctgccattttcactgatgctaccatctataacattttatttattaaaatgactgtgatctttgaagtcaaatattcatctcccagagaccaacttggtcaaagtttgtcagtgtggaatatgtataattaaaaatgaatgttttggggcagttttattcaaaataaattttaaaatctaaggatttctacttgaattgtcatctaaaaagatcatctatattcagattgaatttggatgatatatcaacaactctcagtgatatg

SEQ ID NO: 215034 - DNA, 571 bp, Homo sapiens
taacattttttatctttaagttgattttgtctgctattagtagtcacataaaacttattacacttactgtttgcttgcaatattttaaacttttatgctttcaacttgaatacctttctatagttcaaatgtgtttcttgcagtcaacatttagttaggtcttgtatatttatccattctatcaatctctgccttttaattggagttttggttcatttataactatatagttattaatatgtttgtgattaaatctatcatattgctatgtatttttatttttaaatgtgttctatggtcccttgatttttttccttgtttgcattcttttgagtaaattgcacatattttagygtttagtattccatctttatctctttacttttaatctactcctcttgtggcaattattgtagttgttactttagaggttacattactttttttaagttatcatagtcaatacagtaagttctcacttatatcctcaataggtccttggaaacaataactttaggtgaaataatgtataacaatatcatttttttcctcagcactataacaaaatggt

SEQ ID NO: 215035 - DNA, 571 bp, Homo sapiens
taacattttttatctttaagttgattttgtctgctattagtagtcacataaaacttattacacttactgtttgcttgcaatattttaaacttttatgctttcaacttgaatacctttctatagttcaaatgtgtttcttgcagtcaacatttagttaggtcttgtatatttatccattctatcaatctctgccttttaattggagttttggttcatttataactatatagttattaatatgtttgtgattaaatctatcatattgctatgtatttttatttttaaatgtgttctatggtcccttgatttttttccttgtttgcattcttttgagtaaattgcacatattttagtgtttagtattccatctttatctctttacttttaatctactcctcttgtggcaattattgtagttgttactttagaggttacattrctttttttaagttatcatagtcaatacagtaagttctcacttatatcctcaataggtccttggaaacaataactttaggtgaaataatgtataacaatatcatttttttcctcagcactataacaaaatggt

SEQ ID NO: 215036 - DNA, 584 bp, Homo sapiens
ggattgcaggcatatgccaccatacctgcctgatttgttgtatttttattagatgccgggtctcgctgtgtttcccagactggtcttgaactcctgacctcaagtgatctgcctgccttggcctcccaaagtgtttgagattataggcatgagccactgtgctcagcctgttcattgaaattttgattgttttcttttcaaataattattttgcccaagttccctctctctttctctggagccctcattgcccacttgttagtctattaaatattgttccgcatatctcagctmcttggttttatctattaatattgggatttggttaatttctattcatcctccttcaagttaacagggtttttttttttcctttcagtatgctgaaagacagtggtgataatttctgacatatttttcattgtaaaatttacaatatttgtttcaattttcatctatgtaaacatattttctatctcttttattaaatcctttagtatattgatcatagtgattttaaatgccttacttgatcaatttaacttctgggccatgtctgcatttttttcttttgcataatgttc

SEQ ID NO: 215037 - DNA, 584 bp, Homo sapiens
ggattgcaggcatatgccaccatacctgcctgatttgttgtatttttattagatgccgggtctcgctgtgtttcccagactggtcttgaactcctgacctcaagtgatctgcctgccttggcctcccaaagtgtttgagattataggcatgagccactgtgctcagcctgttcattgaaattttgattgttttcttttcaaataattattttgcccaagttccctctctctttctctggagccctcattgcccacttgttagtctattaaatattgttccgcatatctcagctacttggttttatctattaatattgggatttggttaatttctattcatcctccttcaagttaacagggtttttttttttcctttcagtatgctgaaagacagtggtgataatttctgacatatttttcattgtaaaatttacaatatttgtttcaattttcatctatgtaaacatattttctatctcttttattaaatcctttagtatattgatcatagtgattttaaatgccttacttgatcaatttaacttctgggscatgtctgcatttttttcttttgcataatgttc

SEQ ID NO: 215038 - DNA, 589 bp, Homo sapiens
tccaagactgactaatcattctctaaatgttatctaacctgaactctaaaataatacctgtgataggcaaaattctaaaatggcttccaaaattcccatcccctgatgtacacaccctatcaaatcatctctcctatagagtgggcagaactatgaatatatgatgggwtatcatacctatgacagtgtactaatcagtagactctgagttaatcaaagtgagatttgtgtgagtgagactgacttaattaggcaaaccctttgaaagaaggtgatgcactagagaggcattcttctgctgacttagaagaaaacaagcagtcccattgtgaatgtctggcagagaaggtctggtatctaggacaggaggctggcatctagaaactgagagtgtcacctggctgatggtccaaaagaaagtgagtacctcagtcgtacaacctccaggaactgaattcggtcaacaactttaataaagctggaaaagaaccgcacactttagaaaagaacgcagactggctggcactttattttcagcctgtgagacccaaagcagagaatcctattaagataatatttaactatagaa

SEQ ID NO: 215039 - DNA, 573 bp, Homo sapiens
ataaaatctgaccaaatgtctgagcaccccatggtctacacaagtttacacataaaattatcaatcacactctcctaaccgaatattttggttctggatcactgtttctcccaagtattttcctctcatcattctagcttgcttcaaccaccacatagatatatttgtaatacccagactctcatttaattggtacccctaattttagtattttttttcatccacccaaccttaacccctatggccttgaaagtacctagacccagagaattagatttctatgatcagacttcgtgcattaaggcaatacttccaaaactttaatgtggataaaagtcacctgtgacactttttaaaaatttaggctgatttggtaaaagtttggagtgaagtattaaagtctgcatctctaacaagataccggtggtaccaatgctgctgctccctggatcacagcttgcttactaaggtgttttgatacctcgtagaagctaacatgtyaaaacaaccacaaccttcagtgtttaaaaagaagttattctttctttatcacataatagtttagacgtataa

SEQ ID NO: 215040 - DNA, 615 bp, Homo sapiens
attgccttggtagaaaaacctttttcatgactaactcagacctactgaggtaggtgcttggtaggctgtcaagggagaaagtggatgaactttcagaaycatgtggatttgtctgtccttggaggtttcaacaagatagcaatttatatatttttcataaaggatgtatggaggtgtattagtctgttcttacactgctataaagacttaccctgagaccgggtaatttatgaagaaaagaggtttaattgactcacagttccacaagttgtatagaaattatggctgagaaggcctcaggaaacttacaatcatggcagaaggtgaaggggaagcaggcacatcttcacatggccagagcaggaggaagagagtgaagagggaagtgctacatgcttgtaaacaaccagatctcatgagaaggtattcactttcatgagaatagcaaggcggaagaccacacgcatgatccaatcacctcccaccaggcccctcttccaacattaaggcttacaatttgacatgagatttgggtggggacacagaatcaaacacatcattccacccctggcccctcccaaatttcatccttctcacatttcaaaacacaggcat

SEQ ID NO: 215041 - DNA, 615 bp, Homo sapiens
attgccttggtagaaaaacctttttcatgactaactcagacctactgaggtaggtgcttggtaggctgtcaagggagaaagtggatgaactttcagaaccrtgtggatttgtctgtccttggaggtttcaacaagatagcaatttatatatttttcataaaggatgtatggaggtgtattagtctgttcttacactgctataaagacttaccctgagaccgggtaatttatgaagaaaagaggtttaattgactcacagttccacaagttgtatagaaattatggctgagaaggcctcaggaaacttacaatcatggcagaaggtgaaggggaagcaggcacatcttcacatggccagagcaggaggaagagagtgaagagggaagtgctacatgcttgtaaacaaccagatctcatgagaaggtattcactttcatgagaatagcaaggcggaagaccacacgcatgatccaatcacctcccaccaggcccctcttccaacattaaggcttacaatttgacatgagatttgggtggggacacagaatcaaacacatcattccacccctggcccctcccaaatttcatccttctcacatttcaaaacacaggcat

SEQ ID NO: 215042 - DNA, 552 bp, Homo sapiens
acatacacacacacgtgtggcactgtttctacaatttttaaaaagtggataaaatacagcaaatattcagggtcgctgtgttgcatcattccagggtgctgtgtaattggtaaagttataaaatgtgcaacctgtgtgtctgcacatggttgccctggcaaccaccatcatctctccagtgtttcatgtattaagacctatcatattaatgtctgctgctctttgagctaataacatatttttaacgattggtgaattggtctgttttccctcygcatgattactaggagctatgagatgttttgaattccacagtaagagcttctcctaacctaggatctttggaataattatttgctacctctcctagacatttggctctggcattttaatactcgttttaccagttagagttttattgtgtcttttattgtaagttgccttggattctttttttaaagcaagcttggtgtaaacaaataaaatcttggtggtaataattaggtacaagggaaacagaaaaaatctagggcagctttcctctacccctcc

SEQ ID NO: 215043 - DNA, 524 bp, Homo sapiens
gaattctttctggtcctgtgtgaactctaggagttgtttgccttgctgtctactggtgtatttttggcgttwtttttctttttttttcattttggacttaaggattttcctgttgtctaggcagaattttaagatacctcccagctcccaccaagattcctaccccctgggatatatgcaccatataatcctcttcctttccttgtgggcaaaacttatgaatatgatgggatttcactctcatgattaggttacactatatcataaaggtaaaggcattttgcaggttaaggtctctaataagttgactttgattcatcaaaagggaaattatcctaggcaggtatgacctaatcagaggagccctttaaaagaaggtcctggtctttcttgaagagagagatccttcttctagctttgaaaaggtgggttgccattttctggaaggaccatgtggctaggacctgagggcaacccctaggtgcctggccaacagccagcaggcaatagggacctcaatcata

SEQ ID NO: 215044 - DNA, 524 bp, Homo sapiens
gaattctttctggtcctgtgtgaactctaggagttgtttgccttgctgtctactggtgtatttttggcgttatttttytttttttttcattttggacttaaggattttcctgttgtctaggcagaattttaagatacctcccagctcccaccaagattcctaccccctgggatatatgcaccatataatcctcttcctttccttgtgggcaaaacttatgaatatgatgggatttcactctcatgattaggttacactatatcataaaggtaaaggcattttgcaggttaaggtctctaataagttgactttgattcatcaaaagggaaattatcctaggcaggtatgacctaatcagaggagccctttaaaagaaggtcctggtctttcttgaagagagagatccttcttctagctttgaaaaggtgggttgccattttctggaaggaccatgtggctaggacctgagggcaacccctaggtgcctggccaacagccagcaggcaatagggacctcaatcata

SEQ ID NO: 215045 - DNA, 525 bp, Homo sapiens
tgaattctttctggtcctgtgtgaactctaggagttgtttgccttgctgtctactggtgtatttttggcgttatttttctttttttttcattttggacttaaggattttcctgttgtctaggcagaattttaagatacctcccagctcccaccaagattcctaccccctgggatatatgcaccatataatcctcttcctttccttgtgggcaaaacttatgaatatgatgggatttcactctcatgattaggttacactatatcataaaggtaaaggcattttgcaggttaaggtctctaataagttgactttgattcatcaaaagggaaattatcctaggcaggtatgacctaatcagaggagccctttaaaagaaggtcctggtctttcttgaaragagagatccttcttctagctttgaaaaggtgggttgccattttctggaaggaccatgtggctaggacctgagggcaacccctaggtgcctggccaacagccagcaggcaatagggacctcaatcata

SEQ ID NO: 215046 - DNA, 600 bp, Homo sapiens
tattcataagacaaatgattttaaatatattcagttgtttgtacctaagtgttttccacccttctgttatgttttgattacgtattcagtctaagaatatacaggctgagagaatagagttattgtgactttatttgtcttacttgtcaaattatttgaagcagactttaggtcaacagcatttaaaatttctattaaatagtgaacagctgaagaattttccaggaagaatgagaaggaatgaatagacttttcatagatcctaacatagaataaacaagctacgaaaaattccctttgtcttcctcataccattttctctttttcttctttactttaaaatctactaaaaaatgcaacccttgctctctttggtttttagaaataagtttattagactatttaacaagtcatttaacttctcagtgcttcagtcttctcatctgcaacataaggtgacaggattagaacatgtggcccacaaactttacktgtgtgtaagaatcaacatggaaagcttgttaaaatacagcttcccaaggccagcttcagaaatcctcatttagtaggattggggtaaccctctgaatctggttgttt

SEQ ID NO: 215047 - DNA, 514 bp, Homo sapiens
tcaatataaaaccttaatttctaagtttatgtcatgctatttaattttaacttaatttattaaagttttttgtggagcaaatacatagggtacaaaataatattttaattaataacatattttttactttaattttcttttaaagtttgcaaataaggcattaaattctaaaaggaagtagccataattgtaaaaggtatctgctataaaataagctaaaakcaaatatttcactgagcctctggaaaaaaaatagactacatttcctggtaacaataaacttgaattgcatcaacataagaactaataatataaagtgagacgttaatagatttctcatattaaaagcacacatgttagtttccttttcaggaaagatgattttaaaaaataaactacacttggtttcaggtctaattaaattcagagtattttcattatcaaagtccatgctcaaatggaatttgttcttttttttaagtttggttttattgctgatttatagactattgaa

SEQ ID NO: 215048 - DNA, 542 bp, Homo sapiens
aaagaaaatttaaaaatgcaattttaaccatgtaactttcctattaaaagcttatgtgactccccattgccactatttactcgtacagcaaatattactaagcatcttctctgtgtcagtcattgccctaagagctgaggatatggtagtgagcaaacaaaataaagttcctatccacatggagctttatttcagtgaagaagactgaaaaacaaagtgcctataatgtcatccttgcaaacatttttagtctcatctgactcaaactgtaagtgccaacaaagctgagtttcttacacaccctgtgctgctggatgtctcagaaatgctccaccattccaacctggttatttacaatgaccaataaagcctatgctcagatgttaccttttccagcagccttgcccaaaccttctaaccttctcccccaactggtttaggtgcctctgttcccagtagtatgccggcaaacgtttaacaaccagttctggaatagagmatattgatttatgacatctgcccatttccatggtttaaacagc

SEQ ID NO: 215049 - DNA, 641 bp, Homo sapiens
atttatattatgtaggtattaaggataaatcttgtgatgttgctggctgtgtttcaaaaagattttctttttggttttcttaaaaatgttctagtttgtacttcttaatgattacttattctgctggtttcttttcgggtacatttattttatgggctaatattaatgtgctttacatgaaacacatgaagaatattagtgggagacaaattgctagctattggttcaatatagaaagcaccagaaaaccaatttctacaacatattttcataacagttccttatttttaattgcaaatatttcaaatcaaatataagtaaaatactcaagcaatattgggaattttacaagaaaattatttttaaaacattattttaaatacaaatgttatattatttatttgtgaaataattgtaaaataagtaccttttcttcttccattagaatataagggcaggaataaactattgtgcctgttctcactgaagattgacaattagttacttaataaataattatttagttaataaatkcatcttttataataaaactaagatatttctattgtttgaatttttaaaatatgaaaatatgataataaaatatcatatgccctgctcaaactaaaattttttcttaa

SEQ ID NO: 215050 - DNA, 417 bp, Homo sapiens
ggataaggagcaccatgtaagactacctctcctcagcctctaaagactccatcaggagttaagaggaagtccagaagatctgtgttcttcaaataaggctactccttgctagtctcaacatcatcattgctcagcaaaagagatggcaccagaactctgcatgctcccagtgaaagcctcattctttcctttcctgaatactattcacagtcccataaccactctgtgcctgagatgactggaaatcattttatgtcttaaatatgggactacttctgtcacaacaaggaagtgcagacacacaggccattactcctctcctgaagtcagttcccctgtggttttatgaacaatgaagcaactgtaagamataacacatatttcatttgttttctgggtcctgtcagcagtgtataa

SEQ ID NO: 215051 - DNA, 524 bp, Homo sapiens
attgaaaacttatgaattgtttatttctggaattttccacttaatattttcaatggttgaactctcacaatgtgaaactgcagataggggcaatactgtatatatcaccacataaaatggttatttcccaaagagtagatgcttttttttwaaaaaaaaaagtaatgttccatttatttatgaattaattatgcaattgaaacaatacatcttaagattagaataagcttaatatgtaaactatacaaagtattcgcagttcttaggatgaaaaaatctagttatcagtatcccacacctgtaaatcgcagttgctccagacaaccctttactcttgcttctgctacacttacttgaacaccacattcatcattgctggggtccactccctttagtttttgcctattcttttactcctggtgttttagctccctttccaatcttatgcaccaaggctttgacagaagtgcctcctctttctgcaggacttctcaaggaaggctggggagaaagactgatgatat

SEQ ID NO: 215052 - DNA, 522 bp, Homo sapiens
tgactctgtgtagatctctgattgaaagtcaattcttcagaaaggccttctgccaggcttagtggctcacacttagaatcccagcacgtcgggaggccaaggcaggacaatcacttgagcccaggagttcaagaccagcctggacaacataggtagaccccgtctctacaaaaatttaaaaatgtgttgggcatggtggtgcatgcctgtagtcccagctacttgggaggctgaggtgggaagattgcttgagtctgggaggttgaggctgcagtgagccatgattgtgccactgcactccagcctgggacacagagtgagaccctgtctccaaaaaacatttaaaaatttttaagaaggaaagaaggaagcaaggaaaaaaggaaggccttctatgaaccctttcccgatatgatttggctgtgtctccacccgaatctcatcttgaactgtagctcccacakgtcctgggaaggacctggtgggaggcagttgaatcttgggggtgagtctttcctgtgc

SEQ ID NO: 215053 - DNA, 537 bp, Homo sapiens
tatgtatcgtttattcctactgaaactgttgagcccctgctttgtgctgcctgaggtgtacatcggaatcactggtgaaaatttaaaatacagttatctggactccacctcagaccagttggttctcagaagcatgcatttaaaaactcctcaagtgattcttgtatgtttgtgttactttttttattttttatttttaatcctcrtgttggttaatcccataatgtcactcaatttctctgtcatccttagcctgatttttctgtggtctgggtcacttttctcaggccaattcccagccttggacagggtgtactaattaggcatttctgccacttgtttgctagagtgttgagttcactacaaatctagcttccttttgggcccatgttgctttccattaatccagaagtactttgcttcccctcctcctaacctactccctttacaactttgtaatttgagtttcaactggaacttgagttctagactcccttacttgaatatcatcttaataaagagtcttgcttagtgagt

SEQ ID NO: 215054 - DNA, 537 bp, Homo sapiens
tatgtatcgtttattcctactgaaactgttgagcccctgctttgtgctgcctgaggtgtacatcggaatcactggtgaaaatttaaaatacagttatctggactccacctcagaccagttggttctcagaagcatgcatttaaaaactcctcaagtgattcttgtatgtttgtgttactttttttattttttatttttaatcctcgtgttggttaatcccataatgtcactcaatttctctgtcatccttagcctgatttttctgtggtctgggtcacttttctcaggccaattcccagccttggacagggtstactaattaggcatttctgccacttgtttgctagagtgttgagttcactacaaatctagcttccttttgggcccatgttgctttccattaatccagaagtactttgcttcccctcctcctaacctactccctttacaactttgtaatttgagtttcaactggaacttgagttctagactcccttacttgaatatcatcttaataaagagtcttgcttagtgagt

SEQ ID NO: 215055 - DNA, 550 bp, Homo sapiens
acctgcttccatgcaacattggggtctctgttcagacatcacccttcaaaaacaaagatcttttcctgactactcatgcaaacgtagctccccatctcagttctctgcataatgttactgatagtttctagttgatgtgtcgtcagctttcctccctagaatgcaggctccacgggacgctcccattcccactctggtgactttacaacagcacatgcccaaaaaacaagtgttgaatgatcgtggtggtgatgtcacaakgctaagggtggagagagctggcatgatactggggatggaggcagtgatggaagggggatggttatagctcaaatgcatgtaattttcttttcttttgttttcctttcttttcttttctttccctatttgtcttcttttctctttttttgttttcttttttagagacaagaccttattctgttgcccaggctggatcacaatggcacgatcatggttcactgcagtctctgactcctgagctcaagcaaccctccccactcagtctcctgagtagctaggactacaggtg

SEQ ID NO: 215056 - DNA, 550 bp, Homo sapiens
acctgcttccatgcaacattggggtctctgttcagacatcacccttcaaaaacaaagatcttttcctgactactcatgcaaacgtagctccccatctcagttctctgcataatgttactgatagtttctagttgatgtgtcgtcagctttcctccctagaatgcaggctccacgggacgctcccattcccactctggtgactttacaacagcacatgcccaaaaaacaagtgttgaatgatcgtggtggtgatgtcacaaggctaagggtggagagagctggcatgatactggggatggaggcagtgatggaagggggatgsttatagctcaaatgcatgtaattttcttttcttttgttttcctttcttttcttttctttccctatttgtcttcttttctctttttttgttttcttttttagagacaagaccttattctgttgcccaggctggatcacaatggcacgatcatggttcactgcagtctctgactcctgagctcaagcaaccctccccactcagtctcctgagtagctaggactacaggtg

SEQ ID NO: 215057 - DNA, 485 bp, Homo sapiens
aatctgttttaactatgatgaaaaatccagatgcaataatttaaaaccttgataaattctattgcgtgaaaaatacaccatgttcatggtttaaaacattaatgtragcaaagtaaaatcaaaggaataagaaatgagaaactgtggaacataattacaacctatactacagataaggagctgaaaaccttaatacgtaaaaaacatttatttatttattacttatttatttacttatttatttatcaagacaggatctcactctctcacccaggctgaagcgcagtggtgcaatcatggctcactgcagcctcgacctccctgtgctcaggtgattctcccacctcagcctccaaagtagctgggactacaggtgtgtaccactatccccagctaatttttttgtattttttgtagacagacttttggcattgatatggtttggatctgtgtccccgcccaaatgtcatgtcaaattggaattc

SEQ ID NO: 215058 - DNA, 541 bp, Homo sapiens
tattatcctttcaaaaaactgattaatattgtggccgggatcggtggctcacacctgtaatcccaatactttgggaggctgaggcaggcagatcacctgaggtcgggagtttgagaccagcccgatcaacaaggagaaattccgtctctactgaaaatacaaaattagcagggcatggtggcacatgcctgtaatcccagctactcgggagactgaggaaggagaatcacttgaaaccaggaggtggaggttgtggtgagctgaaattgtgcctttgcactccagcctgggcaacaagagcaaaactccatctccaaaaaaaaaataaataaataaaataaaatattgtataaccacgcttactgacatgaaagccatacctatgtcataccacattaaaaaaaaggaatggggaggtgtcatacaggtggtatatagttctgcaagatgaaaagttctggatagtgattgyctaacaatgtgaatacacttaactctactgaactgtacacgtggttaaaatggcaaattttaatttctt

SEQ ID NO: 215059 - DNA, 578 bp, Homo sapiens
ctactaagaataaagataatctcccacataatcagaattccatgatcactccaagaaactttcatactaatacaatgtaatcatctgtaacatacaggccatatatattcaattttgcaaaatatcccagtaatatcccttgtcgctgattttctttttttcccaattagtctaccattaaggatcatccgttgcatttaattgtcatgtctttttaaacacctttagtctagaatcattcttggttttgtgttttggttttctttctatttatttatttattttgaaatggagtctcactctatcacccaggctggagtgcagtggcgcaatytcagctcactgcaacctcagcctcccgggtccaagccattctcctgcctcagtctcccgagtagctgggattacaggcatacaccaccacatctagttaatttttgtttttgtttttttttttttttttttttttttagtagagacagggtttcaccctattggccaggctggtctcgaactcctgacctcgggtcatccacccacctcaacctcccaaagtgctaggattacaggcctgagcc

SEQ ID NO: 215060 - DNA, 626 bp, Homo sapiens
tgttattctccaaatgtttatgaaaatttctactcctatcagctctgtatgagatggctcttgttccatgtttctacaaaaacataatcgtttgattttttgaatttttgaaaaatttgtgattgtaaaatagtgtcatttacttaattttcattgaaatttttaatgttcgtgcaggtgtctattgtgagattcctacgcaatctggatatatttctgtgagaggaatctctgagctcatacagtatatyttatcttatggtactattgaaaatacattgacataatatttccttttaagattatgaagactgaaacaacctacacattattctgtgtcttcacttctatgtctttcattatgttttggctccatatagaaaggtcttcatgaaataattacatattgtttatttatatgggtggtgttatttatatgggtggtgatatatcacatgcattcttatgtgatgttatttcttttacttctttttgtgtagtttggatcatttgtctcttgtttctacttaatattatgtttgtgagatatattcaggttgaaatatgttactcagtccttaatatttaattttaaatatcactctattttattaatgtgcttttat

SEQ ID NO: 215061 - DNA, 626 bp, Homo sapiens
tgttattctccaaatgtttatgaaaatttctactcctatcagctctgtatgagatggctcttgttccatgtttctacaaaaacataatcgtttgattttttgaatttttgaaaaatttgtgattgtaaaatagtgtcatttacttaattttcattgaaatttttaatgttcgtgcaggtgtctattgtgagattcctacgcaatctggatatatttctgtgagaggaatctctgagctcatacagtatatcttatcttatggtactattgaaaatacattgacataatatttccttttaagattatgaagactgaaacaacctacacattattctgtgtcttcacttctatgtctttcattatgttttggctccatatagaaaggtcttcatgaaataattacatattgtttatttatatgggtggtgttatttatatgggtggtgatatatcacatgcattcttatgtgatgttatttcttttwcttctttttgtgtagtttggatcatttgtctcttgtttctacttaatattatgtttgtgagatatattcaggttgaaatatgttactcagtccttaatatttaattttaaatatcactctattttattaatgtgcttttat

SEQ ID NO: 215062 - DNA, 403 bp, Homo sapiens
tctttcaaaacatacatagaaactttcaggtcatctgtgcagttcttgagctaagaatttgaatttctaagcccatccttttctttctcaactttgtgcatcagaaataagaataactggctaatcatgtcacactcatgagcttgacctaaacagagtgagatgttaaatgcatggtcycaacagaaaatttctcattataccaagaacagcatgaccttaaacagaatgaaaaatgacagttacagatgccaccaccaaaattacaaagatgctggaaatatgtctcaagaattttaaagcagatatcataaaatctttagtaagaaattatgaatacattttaaatcaatgagaaaatagaaattatcttctaacacattgaatactttgaccaaaaaag

SEQ ID NO: 215063 - DNA, 403 bp, Homo sapiens
tctttcaaaacatacatagaaactttcaggtcatctgtgcagttcttgagctaagaatttgaatttctaagcccatccttttctttctcaactttgtgcatcagaaataagaataactggctaatcatgtcacactcatgagcttgacctaaacagagtgagatgttaaatgcatggtctcaacagaaaatttctcattataccaagaacagcatgaccttaaacagaatgaraaatgacagttacagatgccaccaccaaaattacaaagatgctggaaatatgtctcaagaattttaaagcagatatcataaaatctttagtaagaaattatgaatacattttaaatcaatgagaaaatagaaattatcttctaacacattgaatactttgaccaaaaaag

SEQ ID NO: 215064 - DNA, 404 bp, Homo sapiens
ctgtgtgactgcaggagataaaaatttctttcaaaacatacatagaaactttcaggtcatctgtgcagttcttgagctaagaatttgaatttctaagcccatccttttctttctcaactttgtgcatcagaaataagaataactggctaatcatgtcacactcatgagcttgacctaaacagagtgagatgttaaatgcatggtctcaacagaaaatttctcattataccaagaacagcatgaccttaaacagaatgaaaartgacagttacagatgccaccaccaaaattacaaagatgctggaaatatgtctcaagaattttaaagcagatatcataaaatctttagtaagaaattatgaatacattttaaatcaatgagaaaatagaaattatcttctaac

SEQ ID NO: 215065 - DNA, 583 bp, Homo sapiens
aatgattgattcatctacttattccaacaacttggtcaactgttcacccccttctttatgcactatttatagtggagcacatttgatttcacttgatagctaaattaatgatatacactctcattttcaaagttagtcagccactattgtaggtgtgtactattgtctccaaatatctgtgaattaaaaaaaaatgactattatattcaacaactattatttactgctcacatcacccctttgaaaaaaaaggatgaggatggaaaaaaaaaaacttcaccyatataaggcatgaaaatccatccactgacacgtactttttctccttctaagagtaaagcactcactgaaattttggataaattcagatgtccaaatcaacaaattcctatttgtaagtggaattccttacacgcactgaatataaatggctgggttcagacacacaacacaacctatgttgtttttctcagcctcattccgcaccatgtgcctcacatcttttcctaaccgcacaattacgaggccagtatgtggctgggagggtttccaatcccctgaactgctgtcattggctgcattc

SEQ ID NO: 215066 - DNA, 487 bp, Homo sapiens
taaatggctgggttcagacacacaacacaacctatgttgtttttctcagcctcattccgcaccatgtgcctcacrtcttttcctaaccgcacaattacgaggccagtatgtggctgggagggtttccaatcccctgaactgctgtcattggctgcattcacagattcatctctccctattacttatgagtctgccacacacaaaaactagtaacaagtacaaccctgaaaacacaggtagcaaaacaagtgaaagtgaaaaatccagtcttgagggcttcatttcaacacaaacctattcatgtgacaccagcttaggttggcatctgcacaagttaacctcatgcttgtgcaccagggcacagggaaaggaaagtaaaaaaatatctcatatcttttatagaaaaatgacgattgaaaggacaaatgaaactaatgccatttgctttctagtaagaaaaatggctcaggttgtttttatttgtatg

SEQ ID NO: 215067 - DNA, 585 bp, Homo sapiens
caattcaacactaattcatgataaaaactgtcagcaatctcaaaatagaggtcaatttcctcaacttgataaagaacatctgcaaaaacagccaatrtaacattcagtggtgaatgctgaatgtctgttcctaccgctcttattcaacataatactgaaaccaaggcaatagggcaagaaaagcaaataaattgtgtacacattaaaaaggaagtcataaaaccatcctcattaacagatggcatgtttatgtatctagaagagcccaagaaatctattttaaaaaataaagaaaatttatgttcacacaaaaacctgtccgcatatattcatagtagcttgtaccaaaatagtcccaaactggacacaacccaaatatccttcaagaagcaaggagatttttaaaaatatggtacatgtgtatggtggaatactgcacagaaatgaaatgaaacaaactattaatccatacagcaacttagatgggtattatgcttaatgttagaaagccagtctcaaaaagttacattcaatatactcaattcatataatattttttaaatgacaaaatgatagagacagaga

SEQ ID NO: 215068 - DNA, 602 bp, Homo sapiens
ctgctcatttcagtttttggaactatgtattttgaagacagcatgatatggtttagttgaatgaaaatggattttatctggaagaactgaattcaaactcatggttcatcattcacaaaacagaaggccatgagcgaggtgctaaataratatgagcctggggtctagagcctgcaacacaggaaatgtttccctacctcctttgtagggttattgcaaagcttaaatgagaaaattatatcaaagagctttgtaaatggtaatacaataagaacatattctttttggattaatgaatgtagtagagatccaggtttcactggagatgttttctccctgaatttaggcctgcctgaacctcacaggacagtggtgaatccaagtaagtgggaggctgactgggcatatcctttccatgaaaacttttggcccaaacttttccaaagggaagaaaatgctaaaggcatactaccaggggaactcgcccccagtatttcaacataggttctttctattttccctatttttcagctggtctgagatataaagagaaagagtacagagaggggaattttacaactgggtcactgggggtgacatca

SEQ ID NO: 215069 - DNA, 445 bp, Homo sapiens
gggaaatacatttctgctgtttataaattacctagtctgtggaatgttgttatagcggcacaaatggactaacacacacacacatatacacgcacacacacatacatatatgtgtgtgtatatatatatatatatgcatacacagacacaaaattttttctttttgatattttatttcaacaagcaacatctattttgctgttaaaatcgaattataggatttttaaacaaaatatatagtaacttagytaaaatgttgttcttcattgcctttcctgtaaattttaaaaaatctgtcttctctgagttagaaatagcatttaactcaaaaatcataaaacaaaacaaaaatttattttatctgctctttctctgatttcagtttttttcttaaattacactctttgataaacattatcactctgttctgcctgtcttagctgta

SEQ ID NO: 215070 - DNA, 584 bp, Homo sapiens
gacctttcaaaacaaaatgcaagatttgaaaactgattggctgggggatgaggaaaaggcagacctttaagttcaatccctgttttgctttaggttgttagggggtggttttataacatattgtagaatatgtcatttcagttttgaacgtcttgagttaaattgtcctaacatatcttaagaatttgattttcttccgtgggaagctaatatttcaaaaccttaaagagtatagatttccaacttgtatccaatttataaaattatccctaggctgctgatttcaggaggaagctcatgaatagtctatttgcagacaatatatcaggagttaacaacagcttcaatatttgtgggacaaccagttaactaagccacctcttagtgtatttagatggaaaatcttagctgaagatattaaataatgaaccaacagtgactaaaaaattgaatatttaagtatatttcattgtaatgawtttgaatctaagtagccatatacagcagctagtatttaccacattgaacaatgcaaattagaggaaaaaattaataaccatatctaataccacatgccaaaatcc

SEQ ID NO: 215071 - DNA, 585 bp, Homo sapiens
gacctttcaaaacaaaatgcaagatttgaaaactgattggctgggggatgaggaaaaggcagacctttaagttcaatccctgttttgctttaggttgttagggggtggttttataacatattgtagaatatgtcatttcagttttgaacgtcttgagttaaattgtcctaacatatcttaagaatttgattttcttccgtgggaagctaatatttcaaaaccttaaagagtatagatttccaacttgtatccaatttataaaattatccctaggctgctgatttcaggaggaagctcatgaatagtctatttgcagacaatatatcaggagttaacaacagcttcaatatttgtgggacaaccagttaactaagccacctcttagtgtatttagatggaaaatcttagctgaagatattaaataatgaaccaacagtgactaaaaaattgaatatttaagtatatttcattgtaatgaatttgaatctaagtagccatatacagmagctagtatttaccacattgaacaatgcaaattagaggaaaaaattaataaccatatctaataccacatgccaaaatcct

SEQ ID NO: 215072 - DNA, 459 bp, Homo sapiens
tggagtgccccaagatagaaaaaacttgtctccttgcaggaactggtggagcagaggtaccatcctcattgataattgtttccatctagctatgcatgcctgacataatctgcagacaagtggagtctgtgcacttagcagtccatagtgggttagtaagcaagtgagagtaacatttagaaatgcttgcagcaaaacttgacattgctgagatatattcattctttttacaaagtcacctttctatgttggatcamaaaaaattacttcttcattgatagttggagaagcattatcaattgttacataaaagataaaagcacttgtatgtatgtgaagttgtttttattttgactgaatatgtattttagatataatttcctcactttggcctccttcctttcctccacaaatctatttcaattgcaatatcttcaattctccattccaacttatatt

SEQ ID NO: 215073 - DNA, 579 bp, Homo sapiens
atggggcaagtggtatgaaggctcaagcctgttgagcaggagaaggcaaggaagcaggtctcttatggaattaagggctctgaagaaasagtgtgatgcatatgcccaggactggatgcatgctcagaaaggatctgagaagacgtagacctgcatgtctggcagatatgcgggctttgttcaagcaaagcgtgaaggaaaagggagcgccgtaggcagcctgcttagcattgagcagtatcccagctcagctgtattagaacctaagctgtaataacataatgacaagcagagtagtgttctctctctctctctctctctctccaggcatttaagaaaatctgtctcaggtcaggtcactggctgaccactcagataatggagcagacttctgtgactccagatgacaagagctatactcttttcaataaaagtgtggaaaaggtataaaacaaatgtatgactgcagacctgaataaccagaaacagtaaattttcagaaagagggaaaatctgattttcagagttatgacattataaaattcaaatgctcagttttcaacaataaaagtaatagtc

SEQ ID NO: 215074 - DNA, 629 bp, Homo sapiens
gtgtccttggttataatttttaaatggtaggaattggttattaaatgttgccaaggcactgaaccacgtgagcttttttcaaactctaaactttatttataccatctatattatttttatgatatgctaacttagtaaaatatgaggagatacctcaagaaaacacatgtaacaaactcagggagaaaataaggacagtaatggtgtcaatgtcattggaagatattaatttagatttagctctgagctccctgaacttgaagatgggaagagaaattaaaaacagttttaaaattcccactccatctttccttcamcttaaagtccatttcagtatttatagatttcagacttctttaccccaaaggcattttgatctaggccacaagtgtcagacacaacagaaatggcaagaatttaaatttatcctgacaggtttggatcctagctttgaccacaggctatctaaatgtcaacatggctcagtttgtttacagaaaagaaaaacaagagaagttacaataaccatttaagtattaactaacatgtgaatagtagctaataatggaaggcttactataataatatttattgattattatgccaggtatgatgccaaacattaatca

SEQ ID NO: 215075 - DNA, 608 bp, Homo sapiens
tagttctaacaaaaggcctgcctttcaccctgcacctttggcagtcttcttgtcctgccaccgtaagaggctagtccctgccgatgaagttcccttcaagcatccctctcctgaatggagcatctcccaaatagttcttatttatagagatctttctgtatatatccctctcttaaggagtatgtgtactctcttttgttctttggttctacctcagtgtcttaaaatatctatattctgtgaactcacttgttgaattcactttaggaaatacttgtccatgactcttgtaggagtctaactatagaaaatggtaagttttggggccatttaggggagtccataaaatggtatctagtttttgattatacacaaatatagtttggaaacagtacagagggagattctagataaatcttcattatgggtttttcttttcttttyttttttttttttaaagtcaaggtgtcacctatgttgctccagctggtcttggactcctgggctcaagcagtcctcccactttagcctcctgagtaggtgggacttctgacacgtgtcaccacactggcttatgggatcattttaattgttttgtaattattgat

SEQ ID NO: 215076 - DNA, 479 bp, Homo sapiens
tacaatgtgtaaccctgaggttgtacactcccttgaaaggcaccccagattctctcgggggaggacatatatttttcctcactactgtagttccacccacacattgagaatgactgccatgtttcaccagcatcagtgatgaaatgggattatgcccttgtcactatcactttcagtagaaggaacagcttgagaatcatgtgcaagaaaagcatttcacaaaaaaacagaaacagacatttaaaaatccaatttcattattaattatcccaacacttcgtgataatatttatagtacagcatgytttatgtttattttttgacagaaaacaattctggatattggtggggtacgatgatgatgtttcaaagatacacatagtgtaatgatcaagtcaagatgattaccaccttcgtcactttaaacatttattatttctttgtggtgacaacattcaaaatcttctcttctagccatt

SEQ ID NO: 215077 - DNA, 382 bp, Homo sapiens
gtttcaaggaaaatgcactggggcttcctggcatagagaatgtcacaaagacatgttttcaatagtggtgctatccctagggcagagaagacccggagaaagcccaagtggctgctggaacaaagtcagacaccgtgccacctgtccacactccttggctctgmcatcatgctgaagatcagtttaaaggactggtttccttccccccaaaattaaaagagcacaaactgagaaactgaatgtaggagacagtagtgaattatgctgttctcaggggtcacctcaggtgtggaagcattctttcaaattaacccatgtcaggccacctgcagagaagaaaggtggtacctaactttttttcttgtcagcatttggtaggggt

SEQ ID NO: 215078 - DNA, 610 bp, Homo sapiens
cttatgaggcagtgacatcttatgcaagtttgctgctttstgccacagtggtccttggtcagctggcacaaattgttttacaaacaccgctaggtctaaaaaaagtttggatcacaatgaacacagacacaccttcttcccttcagaaatacctatcaattacttccaatatagaatgaaaaattgacaaagaaaatatgtagattgtaaaaatgccagttagcttgcatctatgtgaaagaaaaatgccatttttattaccttagatcattgttttacacgagttttggtatagcacaacgttgaaccaagggcaaagagagatgaattaattaagtcttaagatatcaagaatttaaaagaaaaggaaggtcatctttgaaggttagtgacatagcattcatcttctgttgtcgccttttccgtaattccccttatgcctgatggacagctttcactcaggttcagagaacagcatgcaaagattagctaccaattaatctttatgaagggagcttaatttctagccagactgagcttacgttttagcaggaagcatttttaggaaatgtttatgttagagtttgcccttcttgacaaggtgagacat

SEQ ID NO: 215079 - DNA, 608 bp, Homo sapiens
accttcatggccacacttttatgttttccttactaggaacgtctttaacactgaaaactaattctgaaatattcctttctcttagcattatctctcctcttttccactgccttactcttagtctttctattttgtaaatacagatgtttccttttgttaaccaagtacaatacctcaactgtgaatttatttacactcatagaagctttaagccaatggcccaaggatgcagccactttcttgctaacattcaaaacttccacaactcatggttggatacatgttaccatttgccttttcagttctacatctggaattctgagggctgagggaaatagccacatggcttaagggtaagrcattttcagattcatggctagggtctcaattcggtctcattcaatcctggccagcaaaattgttatgtaagcttatgtagaaactctctctataccctatagcagttgttccatctctccccatcctctgcaaaccaaattcattcccacacctcttcactcagcaaatcattgaaaacagaaaataacaaagaagtctcaccatacaatcaaatccaattaattataaatctagaagaattaatatgt

SEQ ID NO: 215080 - DNA, 594 bp, Homo sapiens
cttcactttaaactatatattctattagtagctctaaccattcagacttcaaattctaacacatttagtgatctaatttcacagtccttagtaagcacatgaccagagggtggaagagatgacaggattgtgaccagagagaaaggactgacagaaataaaaagctgtcactatgacaaaggtaaagacaaactggacactgtaaaaagcagtcatcataaaattaaaaataatggtgtttggggaacatttaaagaccaacagtccccactaggatcatttcaatcagggccgttctactatacctgattatcaagaccccaggaaaagaccttaactaattattgtgcaaaatattaagttatgaaagtcatttttaaaatcctttttaccatatttaaattaaaataaattattcaggcctatttttaaaataaaacaaagatatatctaagagattagaaaactttttgataaaatcrttaaaactttttgataaaatcattaaatgtttgatctctaattaggtatagcttcagctatctgaaaaattgaatcatgacaaattaaatcatggagtgaattcactcccca

SEQ ID NO: 215081 - DNA, 557 bp, Homo sapiens
atcggtttatccttacgatattgtagttatcagaattggttgcatacaaataatcttcaaacacagttataccataaagatgtctaacctataaagagggcaaaacataactatgatttttaattatgtagcttgcaatttgaaagaaaagctgattgctatttactagtatggaaaatggccacagcagaagaaccgcaaggatgttatttactttttctcaaggagttcaacatttccctgattaaaacttttttttctggagaagaaaacattatgcagtagtgtttaaaacagwtccaaatgtagggacagaattgtattcatatgacattaagagagcatatttagtagttatttttcaaaggcttgtgagagcaagactttcaagcatattcaataatatgcctgtgacactgttatacataatttgagatattttaagggctacttgtttatataataatggatatttagaagctgcaaaaacatagctctccctgtgaaaagactaatgagaaagcacctccgaagatttgttttataaattcaaaatc

SEQ ID NO: 215082 - DNA, 561 bp, Homo sapiens
aaaaattcattgattagaaagtgataatttagtcaacttgattatatcatatagataaacagtccttgggggtttgtggaataaagcatctttctcatctgaaatcagttaaaattgcctggtagactaagtgaataattttctccatgattagaacagacaatgaattcatatatcttcagggcatactttccactctataataatccagtgaatactctttggaataataggtcataacagttcctccagcttcagagttaatgaggtaacacaaattcccacaccatcacaaygtgagatgggtcatacacaatatgagacaggttcatagaagttctttctcattttcctctctaatcaccatagctttcctaatgaaacaaaacaatctgataaaactttgctagaattaaacctgaattattaggcaagaatacagtgacataagaatgtcaaataaaagaacattggttttgataaatttaatatattcttattacaggccaattagaattttagatagaaatatgtgataatgtctatttatataaagcaaga

SEQ ID NO: 215083 - DNA, 605 bp, Homo sapiens
ttaatgttacaataactcactaatattctagcctgtcatccaaacttctaactcataaacacagttgttttgttgatacttttgctgagattcttttggatatctcatatataacatacctagtattaaattcctgctctttctttccaaatctgttctttcacttttctccactttggcaaaaagcgcttccttctatccaatggtttattccagaaacgaaggcattcatccttcataccttctactgtatcctctatgtccaacttatcaccacatcctgccagttacatcttcaatgtatatcttgaatctgtatatttatctctttctctgctcctctttcctaaaccaagtaacagtcatctgttacttggcaatttacactgtatctcagtttcttaagccatttttcttatcgtagccaaagacagcacattaacatgaaaagtagattatgtgttataaaccttcctatagctgctgagakaaataggaatcaaatcttacattcctaacattaccaacaatggcgaacatgagctggtttctgcctctctctccagtttcacctagcagtatctttcctcactcctaacaccttg

SEQ ID NO: 215084 - DNA, 490 bp, Homo sapiens
ttctaagcaatttgagagcaaggactataatctttgtggaataatcctagatataaatcatgtccaatttttaaaggactcgytcaatatcagtatgtctaaatttttatgccaatatgctccacgaatacgtgtctagtgtcaaaaggaaatagtttgacaaaaatcgtttatttcaatataagctatatgctaaatagagctcactcttttggaatcatgatcagctcacattcaggatataaagccctattggaaagcaaatagattgggcacatagaaattgatcaagaagcccttaatggtgggaggatatggcaagcagacttttggggatcctaggtttatccctctctggcaggcatttgctgttcatgccttgatttgtttgctcatgctttggtgttttctctgaaattccaagttctgctgtctggtattcctaactttatgtagttagcaaaatcttactgattttgcttcttagtgg

SEQ ID NO: 215085 - DNA, 429 bp, Homo sapiens
ttactctacatggctctatagatcctaagctttttttttttttaaagacagggtcctytgtgtcacctaggctagtcttggactcctgggctcaagcaatcctcccaaatagctggaactacaggtgtgtgccaccactcctagctgattttaagcatttgaaacaatgatctttgatttcttcaacacattgaatcctcctctcctgaactccatttctagacagatattttcatatgtaactgaactcaataaaaagtgagtaaaagtaaaaaactattatcatccattaacacctgaggggttctctgtcttggttaggcctcaacctcaaggtcatctttaattcttcccctcttcctcatgcccaaaaccaatcatgaagtcattgctgagatttctatcaaattatgccccattgcaactgcc

SEQ ID NO: 215086 - DNA, 387 bp, Homo sapiens
aggcctacccaccccttcccccaagwctgacttctcagtttctttgaaccaacaagccccagcccatcgtccccgtgggatacaggctcaccaccacccactccttccacccactgatgtgcccacccccacccctgcatccttgccatccccaggaagccagcagcaacacagcccctgagtcccgggaacaaagacaaaagagctaacagcaaagccggaactgctgaggttcgctgcctcgaaataagagggtatgtttaaaattctcaaaagcaacctgctcaaagaggaatgcaggctggagggggggtgctcattcttcggagaggagagaagacgggacgggagatggagtgggaggcagaggattcagtgctaagatct

SEQ ID NO: 215087 - DNA, 421 bp, Homo sapiens
ggttgttctgctatactagttgtgtgaccttggaggaattatttaatcctctcctgaacttcaatcttttttttttttcccccgagatagagtcttgctctgtcgccagrctggagtgcagtgtcatgatcttgggctcactgcaacttctgcctcctgaattcaagcgattctccttcctcagcctcccaagtagctgggattacaggtgtatgccaccacgcccggctaatttttagtagagatggggtttctctggccatgttggccagtctggtcttgaacccctggcttcaggtgatccacccgcttcggcctcccaaagtgtggggattacaggcatgagccaccgtgccgcctaatcttttcatctgtaagatggatatagtagttttcctctcaaacagaacaaattagttaa

SEQ ID NO: 215088 - DNA, 309 bp, Homo sapiens
gcgtgacgaccaggcccagcaaactttcttttttgtttrttacatagattagaggtttctatgttgcccaggctggcctcgaatgcctagcctcgcctccttatgcatcaggacaacagtcctgagccatcgcggctcccatgaaatatttaaatattattatttctcttgcaaacttggatgaccattgatattaggggctagttttatttttttatctctaatacctaacatcacagattctcgttcaatttacccaataaattagctgattatatgcaaactgattattgccatcctgttaaattt

SEQ ID NO: 215089 - DNA, 526 bp, Homo sapiens
actgtagtgatctcttatgattaaattgcaattctgctgaactgcatgagtaaagatggacatgaagttgatatggcatctatgggttacagcttggctataatrtttgtccacatgaagtctctccctttatatgtatcacacccaaatgtacaattaaactagaacgtaagattgaattattttgaggaaggaaactaactgctaataaaacagaacttctacctatgattaaaccattcccaagccactctttactggtacaaaatttcccttaaaaaagccaaagcttttaaatgtattatattgataagctaaccctattaatcaataagaaactttttttttataaagtcaatgaaccactaaaagcatttgaaaatgtcaatgaaagtgaaaagttttaaggcacaaattctctaattactactgaaaccctaattaacaggaaattatggaagtctaaatagcacttgccgattcatcatctgggacatattttcccctggctacatttgctgccact

SEQ ID NO: 215090 - DNA, 526 bp, Homo sapiens
actgtagtgatctcttatgattaaattgcaattctgctgaactgcatgagtaaagatggacatgaagttgatatggcatctatgggttacagcttggctataatgtttgtccacatgaagtctctccctttatatgtatcacacccaaatgtacaattaaactagaacgtaagattgaattattttgaggaaggaaactaactgctaataaaacagaacttctacctatgattaaaccattcccaagccactctttactggtacaaaatttcccttaaaaaagccaaagcttttaaatgtattatattgataagctaaccctattaatcaataagaaactttttttttataaagtcaatgaaccactaaaagcatttgaaaatgtcaatgaaagtgaaaakttttaaggcacaaattctctaattactactgaaaccctaattaacaggaaattatggaagtctaaatagcacttgccgattcatcatctgggacatattttcccctggctacatttgctgccact

SEQ ID NO: 215091 - DNA, 488 bp, Homo sapiens
atgatcactagcaactatttcttcagcaaattgacatttttgttatgtggtctatcaatacaccatcacaattcttgctgaacaacacgggtgtccattccataagcacaacctcttgaagtttcatttcaaaattcaaagcattccaaccaatgtggataagttacatctgtgagtgtgaggagacagcgttttcctctagcttcagggtgttctgataaaagtatgggaggctggagcatgtggcttgttctctccaaaagtaagcatctttatctactgcccttcaagtactgcatgtatatatcattttctaggtgtgccatgaygtaaaagaaattggtaagtattgatctatccaatcaagttataaaatttaaaatgctaatattacaatttagataaagatataagtaaattaaagaacagaagaaaaacaggaaaaagggtatggtcaagttctaaaaagtcttttgtatcaccaaaac

SEQ ID NO: 215092 - DNA, 550 bp, Homo sapiens
ctccataagcaccttgaatgaaaatccctcctcaaactctgcttgtagggaaactcacctaagacaaactattctaactaataaattgttaaatattttcgaagtcactgtctatttagtttggtaagaaaagtacagtattcctgacttttcttataatgattggagaaaataatgattggagaaaaataatattcaagagttgcagctgagatacggttgaggaaaatctttgataaatgagagaaaaagaaaaatgcaagtagaatggcaattggatccaattcagcatgtgccatagctgaataagtacagtttcagaaaaaaataagaagagtatattataaagaaaataatttcaaaacattctagagggatatctgaaggatatgagatttctccttagaatactcaccaagtgttcagtaagagagatgagaaaagattcatgacaaggaatgctgttacaaaagtttagrgaagaaatgtcattggattcctccacagtcacactagaaaaaagacaatggagccaacgtagcatgctttc

SEQ ID NO: 215093 - DNA, 596 bp, Homo sapiens
tgggtggggacacaaatccaaaccacatygcccccagaacagagaagcatatatgcagaatcccttactttctctcttttcataatcagaaactcatataaattaattcatgccacggtagaggtaagccagttttgtgctagaaaaagtatacattgcttaatttttatgatgctattgttttaacttctactcactcctcccccatctgcccagccactggtgtattcagaaattgactaattttctttctctattttaaggtatacaaaaatgtaactatgtgactggctgctgttttgtgtcatggaaactttattgatggaatctatattaatcttcaaatttatggcccttctaaattgcagttaggaatgtgaacactgcaaaaggtttacttattcttagaaatccatcagacaccactacattctccagcttacaatgataatggctcaacttacaattttctgactttatgatgatgcaaaagccacacacatttagtagaaaccacacttcgagcacccaatcattctgtttttcactttcagtgcagtatgcaataaattacatgagatattcaacacttataa

SEQ ID NO: 215094 - DNA, 581 bp, Homo sapiens
gtaactatgtgactggctgctgttttgtgtcatggaaactttattgatggaatctatattaatcttcaaatttatggcccttctaaattgcagttaggaatgtgaacactgcaaaaggtttacttattcttagaaatccatcagacaccactacattctccagcttacaatgataatggctcaacttacaattttctgactttatgatgatgcaaaagccacacacatttagtagaaaccacacttcgagcacccaatcattctgtttttcactttcagtgcagtatgcaataaattacatgagatattcaacacttayaaaagagtccttgtattaaatgattttgcccaactgtaggctaatgtaactattctgagcacacttaaggtaggctaggctaagctatgaagtttggtaggttaggcttactaaatgcatttttgacatatgatgtttccaatttatgacaggtttactgggacataacccaatcacaaattgaggagcatctgtagtctattttggctatgttcaagaaagcacattctaagatctttgagtttctacttcacaccctaaa

SEQ ID NO: 215095 - DNA, 566 bp, Homo sapiens
aagacaagatgacagcatctaaaagcttgggccaggatagtccaaggcatgccagagccgggctgcagatgcaggagctaaatcagagaaacaaatgtccaatatagcagggagcccacctatagaagtcaggaagggaaaatagggaaggtagcccccagaccagatttctatggcaaaggcaaggggaatatgaaaccttgaaacagtagtgaggtggaaaagctctctctggggcttctactttgagcacaaatctttatggagaaaataaattcacccayagccagtggaattctctggctactaagttataaatttttaaaaatggaaatatctgcaataaaaatatataattgtttatctcagtgaataagctatacaagattagagagagttgaagagagaattagtaaactggaagataaataaaatgattttatatagaatgatgcaaacagataagatacaaaaaatatgagactaaaagccatggaaaagaaagcctagcatgtttttgctaagcatatattttgttgtgagctaagaatgattttgtattgtga

SEQ ID NO: 215096 - DNA, 602 bp, Homo sapiens
ttataaacctaaaataatcctaataaaacaccatatttgtcttaagctacaagctgattagttagcttattcataaaaatagataaaaagtaaaactttatgaaagaaaatcagtgagaggaaggatgacaagatgaaattttaaaatatgctataaagtctctataaataaaatagwgtgggattagtgcataaacagaccaatgacccaatatagtatatctgattatagaccaaaatatatatgaaatctcagtatatgataaaggcatcatctgaaatgggtggggaagggactttaataaagtgtgagacaataactaaatgtaaaagataaaattgaatccattcttcacactacacacaaggataaattgcaaaaggatcagatatctaaatttgaataacagttctaatgcatgtgtataaaatatatgtatatatcttggaggctttgtttctttttactcttttttctctaaacttcttgcttcatttcattcatttgatcttcaatcactgataccctttcttccatttgatcaaatcagctactgaagcttgtacatgcatcacgtagttctcagctccatcaggtcatt

SEQ ID NO: 215097 - DNA, 509 bp, Homo sapiens
aaattggaaaaggaagccagacgtttctgatagaaatgaagtctagtttggtggactgtgttgactgagagaactggctttgataattacattatatggtaggcattttgcataaatttgtattagttcaggtcttccatgaagatgtgccaagacatggttagatgcacaagtgactaattgggggtaaaatcctacagacaataaaggggaaggagcaagatatgtcagcacagcctgcagaccacaatgtaggtctgacacatgtgaaagatgagtggtaaagaattataggataggaagagtctcaggcagcagtgtaattctgtgaaagttttggctagggcaaaggaaacccctgagctaacgtttcctcttagaggaatcccataccttcagggacaagccagcattattaaasccatcactggttgggagcagctcaagggaagtaaagcctctatgcaagcccagtggtggatccacagagtaccagctgggactatcag

SEQ ID NO: 215098 - DNA, 385 bp, Homo sapiens
aatagcctgagccaaaaaataatagtaaaatatatttatgagttcatactcatataaataaatgattgaataaataagtaaatgggggagaagaacaaaactctccttcagaagaattttaattaaaaaatatagaaggaaagaagaaaaagaaaatcatcattagaacatcaataataattgctatcggcaagatccaccaatgaatrctaacattagcgggtcaaagtttaagaacaaacagagtatttgcatagcttccaagtgtctcctctgcactcaaatttattaactattgtggtagctttaacatattccataaattatctgatacttcccaggaggtggagcttaattctcctctccacgtgtggtatggactttg

SEQ ID NO: 215099 - DNA, 572 bp, Homo sapiens
caaaactaatagttcattttttgtggtatatatagttttgttgtatatatagtattgtactatatacaacaaaaacttaaatcttacaaattaattttaagcaaaatactcaaggtacaaaataacagatacagtacaattctgtcaaataaaattcaagaataagcaacactaaaccatattatttaaagatttatacagaggtggtaaaactatgaagaaaaatcaagaaaatgactaccatgaaagtcagtatgatagttacttytaagagatgacaagaggaattgtaattcgaagggaaaagaggacaccagaaacattggcaacttcctgtttaatatttgttaaactgtacgtatatattttattcacttttctgtctatttattataggtcacaatattttttataaagtaatagaaatgagtgtggttggatgaaaaagccacaagtaacaagcgattaatgtagaaatatttataaggtcctccaattgcccaagggaaaactggaagatacacagcttgaatgaaggagtcagaagataaagtcattaattgtaaaataat

SEQ ID NO: 215100 - DNA, 564 bp, Homo sapiens
agtgacctgtggttcagacctctcaagatgcaagtcactccaaaaagtgggtcacctggaccagtcaagatgctagttcagggagaaggaaatctaaaatagatagtagaggaaggaaacagtgagtatctcttgtggccttaaagccaatgactacactaggggctgcagtttttcttaaccttgctttggggcctatctaaatccagaggagctaatcctgaaacctacaacatgaagtggatccaggcagcagcgtgtgtattctccccatcctggcagattggtggctgacaactctcaagcgaggctcttyctgagaattgctctctattaaagaaagttatctcatccaaagctatgcccttctggggcagcccatccaatacgtggtcaaaattgtcctggccccttgcctaaattcaggacaactctggatggcctttccagttttagaattccccgtgacactggctgaagtcattgttcagaatccaccacaatttaatttctctatcctcccgattctgatttctctactgcctcacaggaattatcctgata

SEQ ID NO: 215101 - DNA, 596 bp, Homo sapiens
tctgtggacaattaaaagatttaggaaaatcatatgattagattaggaaaattagcttcattgtagtgagttaaaaggactgaaggagaaacaaggcagaaaggccagtaaggaggttgttgcaattctctaaacaagaacaaggacctgaactatggtagtaacaatagaaatagtaaacagaagtcagactggagagctgttatagaaaaggatcagcaaaaaaaataaaaataaaaatcatcattggaatgaatatgagagtacaagtataagagaaataccaactatgatgtccaaattcccagcctagggagtagaaagatctgaaactatcaagaaaaatacagcccacagaggaagaaatatatttagaagggaaaaaccatgagttcagttctttacatcaatgacaataaagttattatgaaatcataggaagtgcaagacactcattcaactaacactatttactgagcacatactatgtgacagagttctagcagtgaaacaattacaaatycctgccttcatgaaacctacattctagtagagacataacaaaataaatcagtagaatagtgaaccagagggtc

SEQ ID NO: 215102 - DNA, 591 bp, Homo sapiens
taagatcattcacaagacaaatatttttccactctcaccacttctatccaacaatatattggaaatattagctaagggaattaggcaagaaaataaaatgaataaaagtcatccagaagagacaggaaaaagtaaaactatctctattcacagttgcataatcttttatataggattattaaggaatacacacatacatacaattaaaacaaataacttcagcaaagttacattatacgtgatctatcagggtcagctcaggctgccataacaaaatactatggatgaggtggcttaaacaacagaaatgtatttctcacagttctgaaggctgataagtttaagaccaaagccagcaagacagatttcattctgaggctttttcttttggcttatactggttaccctctcatggtatgctcatatttacctsttttcgtgtgtgcttggggttgggtcagggtggagagcaagatctctggtgtccctttttataaggccactgttaccatcatgacctcatctaaacctaattatctcccaaagattccatctccaaataccattttattgaggtttagagctgtaata

SEQ ID NO: 215103 - DNA, 481 bp, Homo sapiens
aattattatgtgaaaggacactggttctatggttcataaaaaagcaagaataacataattccttcttagaggaactaatatgtttccctgcctctccttggctggacatactataaaatccttccacaggaacagaattgctacttctcttttcatttatcttcacctaaaagcccaacattttcactattaggtttaaagacttcctttgagyagatctattcttggcagattacttacccttggtcttccattatatacaattcaatcaagtaaaatatactcttgcattgttatattccagacatgattactttctcactaagttttaggactaattcatataattggaaactatatttgccttcttctaataaaaatttcaggtttactttaaaatcagtctctatgcattagaagataaatatctgaggccacaagtattgtatctggccactgcctttcataatatctagtttta

SEQ ID NO: 215104 - DNA, 564 bp, Homo sapiens
atgcttatagtaaagttttagaactactagagtaaatcaaaacaaaacaaaatacaagagcagactagatatagttaatattttcacagagaaaggaaaggctatcagtataaaataatataatgaaccaagaaaaaagactggcaaaaattttatttttgaaatttaaaaaattaatagaatatggattagcctgagtgctattaaacttgttcaacttatttaaaacaccaaaacacagttgtttaaacaacacagaagttttttccctttcacatgacaatcyagggattagcaaagcagtttagggctcgtaggaaagctctgtcatatttaacaaatggcttcctacttatatgtcccagatggctggtccacttaccatcttccaaccagtaaatagagggaaaaggaacaaagagcattttaagaatgataactgtaagtggctcacattgtccctcacatctcgctgtccagatcttagttatatggcctcactgatacacaagggaagtgatgaaatgtggtcatcagtggaacagccacatgctcagataaagc

SEQ ID NO: 215105 - DNA, 564 bp, Homo sapiens
atgcttatagtaaagttttagaactactagagtaaatcaaaacaaaacaaaatacaagagcagactagatatagttaatattttcacagagaaaggaaaggctatcagtataaaataatataatgaaccaagaaaaaagactggcaaaaattttatttttgaaatttaaaaaattaatagaatatggattagcctgagtgctattaaacttgttcaacttatttaaaacaccaaaacacagttgtttaaacaacacagaagttttttccctttcacatgacaatccagggattagcaaagcagtttagggctcgtargaaagctctgtcatatttaacaaatggcttcctacttatatgtcccagatggctggtccacttaccatcttccaaccagtaaatagagggaaaaggaacaaagagcattttaagaatgataactgtaagtggctcacattgtccctcacatctcgctgtccagatcttagttatatggcctcactgatacacaagggaagtgatgaaatgtggtcatcagtggaacagccacatgctcagataaagc

SEQ ID NO: 215106 - DNA, 629 bp, Homo sapiens
aagctttttcctatgttttcttctaagacttttacagtttcaagtattgcatttaagactttaattcattttgagtttatttttgtatttggtgtgacataagggtctaatttcattcttctgcatgtggacatccagttttcccaacagcatttattgaagagacwgttcttttcccattgtgtgttctggacacatttgttgaagatcaatcagctgtgaatgcatggattttcttctggactctctgctctgttccattggtctgtatttctttcttttttttccttttgttttgagacggagtcttgctctgttgcccaggctggagtgcagtgcgtcactggagtgcatctctgctcactgcaacaacctgttgaactgcaacaggttcaagcgattctcctgcctcagcctcccaggtagctgggattacaggcgcctgccacagcctggctaatttttgtatttttagtaaaggcggggttttgctatgttggccaggctggtctcaaactcctgacctcaagcgatccacccgcctcggccttccaaagtgctgggattacaggtgtgggccaccttgcctggccaattagtctatatctctgtttttaagtgaccatcat

SEQ ID NO: 215107 - DNA, 485 bp, Homo sapiens
ctcacgcctgtaatcccagcactttgggaggccgaagtgggtgaatcacacggtcaagagattgagaccatcctgaccaacatggtgaaaccccgtctcaactaaaaaagcaaaaattagctgggtgtggtggctggtgcctatagtcccagctactctggaggctgaggcaggagaatcgcttgaacccaggaggcggaggttgcagtgagctgagatcatgccactgcactccagcctggygagagtgagactccatctcaaaaaaagaaacaggacgcagacatacattctaggtaattcttggctgtcccttacgcggttgggtgcatatactttgattaaagtcctctatcattcctttttctcttgcagcctaaaataaagacacctctctgttatggactgaattgtgtcccccccaaattcatatgctggagccctaattcccaaggtgatggtatttggagatgaagtttttggga

SEQ ID NO: 215108 - DNA, 590 bp, Homo sapiens
catttccagatctatgcagtcagtttaactactatttaactaggtttttaaacatgtatgatgaattctagtgggaagacaggttattagattttggaacaaacagcgagagagaggagagccagtatagccagtgttaggtggagaatgggctggaaggtgttgcgagttctctctttttagctccttggtacaacacactaggcccctaatttattaaattgaataattcrccttgactagagactagagagtagagaaaacaggatatgatttttaaacaaaaaattcaggctcatggtctggtagttccagtgggctgcctaggccagtgattataatctgccgtggcagcctcaatgatgttgaaaacacacaatgttttcagtgggaacggacttcctgagaatgggtgtgaccacatcaaggcactaagccactgactttgagagggcttccacttgtgcatggagtgtgggcattgcgctggcacacacaggctatgcctggagcgtgacgggagggggacctggtggacgggagagttgccagggccagatggcccagcaacccatcagtcatggccaggt

SEQ ID NO: 215109 - DNA, 613 bp, Homo sapiens
atgtgcaggtttgttacatgggtatattttgtaatgctgggactttgagcttccagtgtacccatcaccccagtggtgaacattatacccaatagataatttttcaaccctcatctctctaccttccccactttttgcctattattttcccccagtgtctattatttccatctttatgtccatgtgtacttattgtttacctcccacttataagtgagaacatgtggcatttgattttctgttttggagttatttcacttaggatgatggcctacaactgcatccatgttgctgcaaaggacatgactttattctttctcatggctacatagtattctatggtatatatgtaccacattttctttatccagtccacaattgatggatacttaggttgattccatgactttgctattgtgaatggtactgtgataaacagagaagtgcaggtatcttttttgtgtaatgatttcttttcctttggtagatacccagttgtgagattcctgggtcaaacagyagttctatttttagctatttgagaaatcttcatactgtttttcatagaggctatagttgcattcccaccaacagtgtatatttgcattcccac

SEQ ID NO: 215110 - DNA, 616 bp, Homo sapiens
tttttttttaaagcatagtaatggcacaaataagacatatagaccaacgtaacagaataggaaacccagaaataaacccatgaatatacagtcaacaaatttttgacaaggtgtcaagatacacaatgartaaaggacagtctgtttaataaatggtgccaaagaactgaatatccacaagcaaaagagtgaaactggacccttctcttacaccatacacacatatcaactcaaaatggattaaagacttaaacacaaaacctgaaatcataaaactactagaagaaaacaaagaggaaaagtttcttgacattggtcttggcaatgatttttttttttatttgacaccaaaagcacaggcaataaaagccaaaataaaaaatgggactacctcaaactaaaaaatttctggtcagcaagtgaaacaatcaacaaaattaaaaggcaacccatgaattgggagaaaatatttgcaaattacatatccaataagggtttaatatcaaaatatataaggaactcatacaactcaacagcaaaaacaaaacaaaagaaaaacaagccaattataaaatggaaaatgtatctgaatagacacttttcaaaataagatata

SEQ ID NO: 215111 - DNA, 504 bp, Homo sapiens
gtcttcctcttggagtggagggagggcaaccacaggaggagcaaagcgggaggaacctggagcccgtgggccgggcagaaggtgaggccagcagcaggacctgaccaccagggtgacacaatgttgaagaarcctcccatccccagtgcctggccagcccctctgtgaaagcttgtttatatctccaggggtaaaagattgtttgaggaaatccattagcttcggcaattcaaagagggtgagttttatatctaggtcaatatgacaagtgcaatgacagcctggaccgacagcccaggaggtggagaagcctggagaaagcccttctcagagcccctccctggtgcctgctgtgggctccactgtccctgacacccaccctctcctggccagtgagtctgtgggccaaggcactcagcttgagcactgaacccagaattcctactcaccaccagagccagccccacggcctgcagcacccccgtggcccatcctctagggggc

SEQ ID NO: 215112 - DNA, 580 bp, Homo sapiens
taaaagtcggatgagggagtagggggatgggggaggggggtgggaggggttggtggagcaattctttatctatcactgctttccaggaccacaggctcaggtacattcaacactgccaggttggatacaaggataacaggatgttttgtgtgccacaggagcccctctgacattaagttacacaggtatgtaactttctgtcattcactttgaatgttgaattgtcattttgaatttaagaaatacctgctcggatcatgtcttaaattttaattaaagaatttctcctcaacgaagtacatccctgtgggtggctgtgttgtaagcttctagcagcctgcacagtaccagaggccagggagagcttgggccctacatcatcgtgctgggcaaaagcctcccagtctgttgcaggcttctctcaatgcagtgcacatgtgagataaatacaatccgtggcttcatcaaacaatagttgtgtgtggtttatttctggtrtctctcactccttttaaaatcccctgcctctaaaattgtgggcctccatctcttagataaataggtctatacatcacagaac

SEQ ID NO: 215113 - DNA, 487 bp, Homo sapiens
ttttgtggaatttttagggtttttacatataagattatatcatctgtgaacagagaaaatttaacttctttcttccttatttggaagcctttcatgttcttttcttgtcgaattgttctggccaggaccctcagtactatgttgaatagaagtggtgagagtgggcatatacttgcctcattcttaatcttaaaggaaagactttcaatttttcactgttgagtatgatgtttgctgcgggcttttaatatatggcctttattatgttgaggtaatttccttctattccatgtttgttgaagtttttttgttatcattaaagagtgttgaatcttgtcaaatgctttttctgcatcgattgagttgagcttgtrgggttttttaattcattctgttaacgtagtatattgaattgattggtttttacatttagaatcacttttaatttccacttggtcatagagtataattcttttaatatagtatt

SEQ ID NO: 215114 - DNA, 487 bp, Homo sapiens
ttttgtggaatttttagggtttttacatataagattatatcatctgtgaacagagaaaatttaacttctttcttccttatttggaagcctttcatgttcttttcttgtcgaattgttctggccaggaccctcagtactatgttgaatagaagtggtgagagtgggcatatacttgcctcattcttaatcttaaaggaaagactttcaatttttcactgttgagtatgatgtttgctgcgggcttttaatatatggcctttattatgttgaggtaatttccttctattccatgtttgttgaagtttttttgttatcattaaagagtgttgaatcttgtcaaatgctttttctgcatcgattgagttgagcttgtggggttttttaattcattctgttaaygtagtatattgaattgattggtttttacatttagaatcacttttaatttccacttggtcatagagtataattcttttaatatagtatt

SEQ ID NO: 215115 - DNA, 583 bp, Homo sapiens
cattttgacttttggaagcataataaggttctatacattcaaaaaactaagagaaatcaacaagaagggaaagttgtaagaaactaaaaccagaagcaagtggaaaccaatgaaccctgcagtatttcaaataagcaccaaaacttacagcggattagggacagatgacaactaattctagaaacttctgaaagcagcattgcactatagagccacactgttggaagggacatggaagggagtgtgattgcccaaggggttcttcttgccagcagcccagaaaagccaatacactgacaacagcmggagttacagtagagaaagagtttaataatcacaaggcaagccaagagaggagacatgagatatttctcaaatttgcctccctgaaaattcagaagctatgggttttaaggtattttgatgggcagggggctagggaactgaaacaattgattgactgagaatgaaatcacagaggtgttgaaactgtcttcgtgcagctgagtcagttcccaggaaggagtcacaagaccagttgagtcagttccttggtgtgggtcacaggtccaggtggtgtctc

SEQ ID NO: 215116 - DNA, 594 bp, Homo sapiens
ggtaaatcaggttataatggcaaaacaggtaatgggagggagagaagaggaggcctggccgccaaagrtggtcttgttatgtagatgaaacctcactggttgcagccttcgaagaatagatggtacgtttctttcagatctgtaaggggtcaaactcttagttagtctttcctagatctggacaagggaagacctagctgcttcctgcagatgctctacagatataaatttccccttcaaaagacagctttgcagggctacttctgtttgctggctctgtgacagccatctcaaaatatgtcaaataaatatattttggggtaaatatttttatatcattcaccctcaactccaggcttcattgctataggaaaatgtttgagcaatgctcccaccccagcctcttgagtagctggaattacaggctcgagccactatacctgtgacttcagtggctttttttaatgacatataatttaacatccttatgttaaaaattgtttaacttttactgtgtgatccctcccattgcttcaaggctgaagaactttagtcttccatgagactataattttatgttttctgctagttttt

SEQ ID NO: 215117 - DNA, 266 bp, Homo sapiens
attattagcattctcactcttttttccccctagttcttttagttgcaaatayatattatcaatcttaaagaagtattttttaaattcactgttttttaatattagcagtaagctagcataatgcccagatattcattcttttaaatcttcaaattccatttatgtgatcttactgctttagaactaattcttaaaggattgtacccatagtgaccctatggatttctttaagttgtatgaaattttaagaaagtgtttgtggtaga

SEQ ID NO: 215118 - DNA, 555 bp, Homo sapiens
ttgtctgccctgccccaattctttaagaattgcctcatcatcctgaaagatggacccccagagrttttgcttcctgaccccaatcccagctgcagttggttggataacttggaggggtggcacctgaccaaaagtacaatctcattgtttctgctgggagtagagaaagagacagggagtctacagcagccagacagtgatactgcagtaaacctaaaagaaatataaactcttggctgagtggtcttctttagacctttcataaaccctgagaagcagagaaaaatatgggttgcagaaagaaaagagcgaaacacatgtgcaaagggaaaaaggactgagagatggaaatgaggaagaaggtcccttgggctctggctgcctcttcttgctggttacagtccatccccagtgcgttgctgagtgtctcctcctgagttccttgagaaaccccactctctctataacttctgccctcaacacttttgctcctaagcctgtttaaattggattctataacttagaactttccaaaaaaattctttttggagacaa

SEQ ID NO: 215119 - DNA, 555 bp, Homo sapiens
ttgtctgccctgccccaattctttaagaattgcctcatcatcctgaaagatggacccccagagattttgcttcctgaccccaatcccagctgcagttggttggataacttggaggggtggcacctgaccaaaagtacaatctcattgtttctgctgggagtagagaaagagacagggagtctacagcagccagacagtgatactgcagtaaacctaaaagaaatataaactcttggctgagtggtcttcttyagacctttcataaaccctgagaagcagagaaaaatatgggttgcagaaagaaaagagcgaaacacatgtgcaaagggaaaaaggactgagagatggaaatgaggaagaaggtcccttgggctctggctgcctcttcttgctggttacagtccatccccagtgcgttgctgagtgtctcctcctgagttccttgagaaaccccactctctctataacttctgccctcaacacttttgctcctaagcctgtttaaattggattctataacttagaactttccaaaaaaattctttttggagacaa

SEQ ID NO: 215120 - DNA, 555 bp, Homo sapiens
ttgtctgccctgccccaattctttaagaattgcctcatcatcctgaaagatggacccccagagattttgcttcctgaccccaatcccagctgcagttggttggataacttggaggggtggcacctgaccaaaagtacaatctcattgtttctgctgggagtagagaaagagacagggagtctacagcagccagacagtgatactgcagtaaacctaaaagaaatataaactcttggctgagtggtcttctttagacctttcataaacccygagaagcagagaaaaatatgggttgcagaaagaaaagagcgaaacacatgtgcaaagggaaaaaggactgagagatggaaatgaggaagaaggtcccttgggctctggctgcctcttcttgctggttacagtccatccccagtgcgttgctgagtgtctcctcctgagttccttgagaaaccccactctctctataacttctgccctcaacacttttgctcctaagcctgtttaaattggattctataacttagaactttccaaaaaaattctttttggagacaa

SEQ ID NO: 215121 - DNA, 629 bp, Homo sapiens
atgcaggtgctgccctcacaaatctattttgtaaagcattggtcaagggtatatcttctggaccctcccagttgtgatgagtaggactaaagtgactaatccactccaccatcccaatctccctaagcctttggatcccttcctctacattaaaccaagggagataaggcatttccagttcactcacagtgggccatcttytcatccacatttcagctaaccaagcaaataaactattagaaccttttttaactccctaagctgcaacattaaatgcagagtccctactaagtgaacccaaatcaataaattcagcctgatccaactctatgttccttctaccattatcctgtacccttcccattcctgttctctggatttctgtttatataaattagagaactcaagcagttctttttgagtgtagcatacctcttcatgagtaacactctcaacctcacctctaggggcctaccaggactttagttataagtctagaagcaagcaggggtgttgggggtggcttctaaggagaatcaacattattttgcctggcaactgactcaggggaggccatcactgttacctcaggcaggggagagtttatctcctcagacaaaggtgaaaag

SEQ ID NO: 215122 - DNA, 575 bp, Homo sapiens
ttttaaagccactgggggaagtgttggtgttcaagtttctgctgtgaaaagcaatggcatatgaatggtggctgttggcaaaacaatggccagaagtgggtgggttttttgcattcagacacccttgtgaaggcagatagtttccacacagttttatttatcttatccattcaactgctgtgtctgcagaagaatcagtgttcatatgtgtgtatgtatatatgtgtgtgtatatacatatatatgtgtgtgtatatctatatacatacacacatatgaattcttttgaaagakagataaataggtgctcagtgtaaagagatgtcaggggaaaaagcaatgagattccatgtcttgggatacatgacagatgctgaacacactgctgaccaccctggcagtttcttttagtttctaggtatacatattagttttattgaataatcatattctaaaaaaggaaaatggaaactgacaaataagaatggagtataattcagtgaatctagttcatgtcagaatttagattcaaaacatttttaaagagatggaagaaataaactttcagagggata

SEQ ID NO: 215123 - DNA, 541 bp, Homo sapiens
aatgtcaaatgttctgatcctagaggctcagagactggagtggccctagttccacaggtgagagccagttttatgtcaaacttctgctattctttgtcctccagaccttaatgcatttcttcttttgtatggaatttcacaaaggggctagacattctttcagcttctaggctgaactacacaaagattttctcaaaactgggttcttccattgygtgaaattgtgtcctatgtgtgaaattccatcctagtgacccacattcagtccaggactctagatcgaccaaagaaccaaattttttcttccagtttcctcatctctctcctccctctgcctcatcaaaaagaaaaaatccccttttctttccagtgatgaaaccaatatccattctcatctgttactgcacatggattcagggtgctatgtataagtgaggaggaagaaagagtccaatattaatagcttattgttccaaggtagccagcctcacaggtgatccccagtgatcctggcttcctgtagctcccccatccccagttg

SEQ ID NO: 215124 - DNA, 547 bp, Homo sapiens
gatttcctcgagttgtttgacagccacagtataaattcataattttgtgtattttctttgaacagaggagaatacaactcacacagtatttactgagtacatttaatgtatttgcagagttctgggatagactcggaagaagctgggagtatgggtcaccaagggttgggtaggcaaaatcggtatgttatatttcctgctgctggagtttgcacactgttgtaggggagtaagggataatacaaattactacgacacatttaacaaatgccaagtaaaacttatgaatgaaagtactgaaaaaaactaccgtttttatatgattctatatttaaaatttaaaatcgattttatattttatttctgcgggatacaatgaagcttgaggaaaagtagaaatgtatctcttcctccatttcccttcttctgctccccagaagtgcaccagaaagaagtgctattttccgggaygaaatctctctggcctatcagttctagaacgtctattcaaatttaccctcctattttctattacatctggaatttg

SEQ ID NO: 215125 - DNA, 588 bp, Homo sapiens
cgtttttatatgattctatatttaaaatttaaaatcgattttatattttatttctgcgggatacaatgaagcttgaggaaaagtagaaatgtatctcttcctccatttcccttcttctgctccccagaagtgcaccagaaagaagtgctattttccgggatgaaatctctctggcctatcagttctagaacgyctattcaaatttaccctcctattttctattacatctggaatttgctaagtgtttcacaaactaaacaatgagccaattagcaattaagcattaatgactcactgcggtagctcttagagctaatacatgtacaaatttatgggaacttttctaaatcaaaatattggatatggtggtagtaattactgtccacagggtgaatctatggggaaatattttggagctagattaggttttgagtctttcgtgttaaaaactctttatagtcttagatttcatccttcctgcaagacagtttcacacaagctggcaaaatgcataagactcctagatcagatataaaaggcaaggttatatgatagatcatatagtaatgctcacaggaatagcagttg

SEQ ID NO: 215126 - DNA, 620 bp, Homo sapiens
aaacagttttgacagacaatctgtcagcctatataagttgtaaaattaacttcaggttaaactctatccacagtcattaattttttttaatagtctatgtggagctgactaacacacctgrtaataggtttcaaccactttcccatgaaggttagcaaaggcgatgtatcgggcgtggattggtcctcctatgactcaagcttccattttcaggggagacattttgagcatcttaatgatcactgattctcagatatggcttcaaagaatacttggagatgattcttaaacacagccataagggaagggaagttaaatgattttaattccacagaggtcaatgctcttatacaaaatgaggaagaaatatttcagcctagaagttagactgtattttcaagagaattctatttttatcttcattgggagaaagtcatacatggagaacattcagatacaaatctttgtgaggtaattttcccaaaaacagagtcaaaattcaaaagctgtggtcttttagcaaaggctgcttcagaatataaaacaaaaatcatgattaaaaacaacaaagatgaatcaaataccctgaggctcagcaagaaactctaaaactgacaaaa

SEQ ID NO: 215127 - DNA, 620 bp, Homo sapiens
aaacagttttgacagacaatctgtcagcctatataagttgtaaaattaacttcaggttaaactctatccacagtcattaattttttttaatagtctatgtggagctgactaacacacctggtaataggtttcaaccactttcccatgaaggttagcaaaggcgatgtatcgggcgtggattggtcctcctatgactcaagcttccattttcaggggagacattttgagcatcttaatgatcactgattctcagatatggcttcaaagaatacttggagatgattcttaaacacagccataagggaagrgaagttaaatgattttaattccacagaggtcaatgctcttatacaaaatgaggaagaaatatttcagcctagaagttagactgtattttcaagagaattctatttttatcttcattgggagaaagtcatacatggagaacattcagatacaaatctttgtgaggtaattttcccaaaaacagagtcaaaattcaaaagctgtggtcttttagcaaaggctgcttcagaatataaaacaaaaatcatgattaaaaacaacaaagatgaatcaaataccctgaggctcagcaagaaactctaaaactgacaaaa

SEQ ID NO: 215128 - DNA, 620 bp, Homo sapiens
aaacagttttgacagacaatctgtcagcctatataagttgtaaaattaacttcaggttaaactctatccacagtcattaattttttttaatagtctatgtggagctgactaacacacctggtaataggtttcaaccactttcccatgaaggttagcaaaggcgatgtatcgggcgtggattggtcctcctatgactcaagcttccattttcaggggagacattttgagcatcttaatgatcactgattctcagatatggcttcaaagaatacttggagatgattcttaaacacagccataagggaagggaagttaaatgattttaattccacagaggtcaatgctcttatamaaaatgaggaagaaatatttcagcctagaagttagactgtattttcaagagaattctatttttatcttcattgggagaaagtcatacatggagaacattcagatacaaatctttgtgaggtaattttcccaaaaacagagtcaaaattcaaaagctgtggtcttttagcaaaggctgcttcagaatataaaacaaaaatcatgattaaaaacaacaaagatgaatcaaataccctgaggctcagcaagaaactctaaaactgacaaaa

SEQ ID NO: 215129 - DNA, 466 bp, Homo sapiens
caggggtcactattcttgtatcagataaaacagactttaaatgaacaacaggaaaaaaggaaaaagaagggcattacataatgatgaagggttcaattcagcaagaagacttcactatcctaaatatataagcacccaacattggagcacccagattcataaaacaactacttctagacttaggaaaatacttagatagctactcagtaatagtgggagactttaacatcccattgacagtattagacagatcattgaggttaggttagaaaactaaccaagaaactttaaacttaagttkgatacttgaccaattggacctaacaaacatctacagagcgctcaacccatcaatcgcagcctacacattctcctcatctacaccccgaacatgctcaaagacagaccacaaaaaagtcttaataaattcaaaaaagctgaaatcatatgaacatactctcagacc

SEQ ID NO: 215130 - DNA, 447 bp, Homo sapiens
gataaaacagactttaaatgaacaacaggaaaaaaggaaaaagaagggcattacataatgatgaagggttcaattcagcaagaagacttcactatcctaaatatataagcacccaacattggagcacccagattcataaaacaactacttctagacttaggaaaatacttagatagctactcagtaatagtgggagactttaacatcccattgacagtattagacagatcattgaggttaggttagaaaactaaccaagaaactttaaacttaagtttgatacttgaccaattggacctaacaaacatctacagagcgctcaacccatcaatygcagcctacacattctcctcatctacaccccgaacatgctcaaagacagaccacaaaaaagtcttaataaattcaaaaaagctgaaatcatatgaacatactctcagaccgtag

SEQ ID NO: 215131 - DNA, 598 bp, Homo sapiens
atgcattgtggttgaagttctaaaccgagaaattagagcacaaactggtctagaccagagaaactcctgttacctggcaaaaataagtacaaatctgctatgttgaaatacttccacagcctctcttgagacatctacagataaaacaattctctgaagagcagtttaaaataaaacactgcaaacaaaatgatgaaaacatatatcataaaacaggggcagcagataagacaagcataacaattaggatacagaaaacttggggtttgaggatgatctcaaagatactaattaaaaagtgcctttacaattattaaggagaaggtatacaccctacagtaaaaagaggtaactatgaaaataaagtaaatttgaaaaagaaaaaagctgayttttagaaatgaaaaatatagcagtttgaaattaaaactcaatggacagtttaaacaggcagattagacagaagtaaaaagacagtctacaaactgggaataggtacagagagataaagagtttaaaaatatctaatagcagctaaaacatatggagaatagaataaaaaaatggaaaatagatggaaaaaataacatgtgcatac

SEQ ID NO: 215132 - DNA, 603 bp, Homo sapiens
agcaaagagcaggaggattgtatatgtcaagtgtgatggtgaattttatgtgtcagcttggctgtgccagtgtgctcagatctttggtcgarcattattccggatgtttctttgagtgtgcttttgaatgagatttacatttaaattgatcgactttcagtaaagcagattactgtctgtaatgtgggtaagcctcttcaatcagttgaaggcctgaatagaacaacaggatgacttcccctgagtaagaaggaacacaccagcagatcgtcttcagacctcacctgcaacattgactcttcctggttcaccagcagtctgcctttggactcgaactgcaacgaactgcaactttttcctgggtctccagtcggctgacctcccttgtcagattttggacttgccaagcctccataatcacatgtgctaattccttaaagataaatctctctttctctctctctctctctatatatatatatacatatacacacacacacacacacacacacacacacacacacacgcacacacacacacacacacacacatactgttggttcagtttctctggagaacctaactaatacagccagtatgcaa

SEQ ID NO: 215133 - DNA, 603 bp, Homo sapiens
agcaaagagcaggaggattgtatatgtcaagtgtgatggtgaattttatgtgtcagcttggctgtgccagtgtgctcagatctttggtcgagcattattccggatgtttctttgagtgtgcttttgaatgagatttacatttaaattgatcgactttcagtaaagcagattactgtctgtaatgtgggtaagcctcttcaatcagttgaaggcctgaatagaacaacaggatgacttcccctgagtaagaaggaacacaccagcagatcgtcttcagacctcacctgcaacattgactcttcctggttcaccagcagtctgcctttggactcgaactgcaacgaactgcaactttttcctgggtctccagtcggctgacctcccttgtcagattttggacttgccaagcctccataatcacatgtgctaattccttaaagataaatctctctttctctctctctctctctatatatatatatacatatayacacacacacacacacacacacacacacacacacacgcacacacacacacacacacacacatactgttggttcagtttctctggagaacctaactaatacagccagtatgcaa

SEQ ID NO: 215134 - DNA, 603 bp, Homo sapiens
agcaaagagcaggaggattgtatatgtcaagtgtgatggtgaattttatgtgtcagcttggctgtgccagtgtgctcagatctttggtcgagcattattccggatgtttctttgagtgtgcttttgaatgagatttacatttaaattgatcgactttcagtaaagcagattactgtctgtaatgtgggtaagcctcttcaatcagttgaaggcctgaatagaacaacaggatgacttcccctgagtaagaaggaacacaccagcagatcgtcttcagacctcacctgcaacattgactcttcctggttcaccagcagtctgcctttggactcgaactgcaacgaactgcaactttttcctgggtctccagtcggctgacctcccttgtcagattttggacttgccaagcctccataatcacatgtgctaattccttaaagataaatctctctttctctctctctctctctatatatatatatacatatacacacacacacacacacacacacacacacacacacacrcacacacacacacacacacacacatactgttggttcagtttctctggagaacctaactaatacagccagtatgcaa

SEQ ID NO: 215135 - DNA, 603 bp, Homo sapiens
agcaaagagcaggaggattgtatatgtcaagtgtgatggtgaattttatgtgtcagcttggctgtgccagtgtgctcagatctttggtcgagcattattccggatgtttctttgagtgtgcttttgaatgagatttacatttaaattgatcgactttcagtaaagcagattactgtctgtaatgtgggtaagcctcttcaatcagttgaaggcctgaatagaacaacaggatgacttcccctgagtaagaaggaacacaccagcagatcgtcttcagacctcacctgcaacattgactcttcctggttcaccagcagtctgcctttggactcgaactgcaacgaactgcaactttttcctgggtctccagtcggctgacctcccttgtcagattttggacttgccaagcctccataatcacatgtgctaattccttaaagataaatctctctttctctctctctctctctatatatatatatacatatacacacacacacacacacacacacacacacacacacacgcacacacacacacacacacacacayactgttggttcagtttctctggagaacctaactaatacagccagtatgcaa

SEQ ID NO: 215136 - DNA, 551 bp, Homo sapiens
acagtttttcagcccttatttttaaacttttatttcctaatctataaagatatctcaagataggccaatgaccttyggatgccattgcctagtgcattatggttaaccaatatggtatgtggaacataaagcagtgtggtacttttgaactggtgtatattttctgttaaagagcctggctactaattaagttctggaaaaagttgagcaatgtcttggctcaggatgctataataaaataacatagactgggtggcttaaacaacaagtagttctggaggctgggaagtccaagatcaagttgctagcacaggccctggtgagggcctgcttcctggcttgcagacagcagtggacttctgctgtgtgctctctgtcttccccttagaagggcactaatcccatcataagggacccaccctcatattaacctcatctaaacctaattacctcctaaaggctcacctctaaataccatcacattaggggttagaggcccataaccagtaagttacaaaacttacctacaactcagattcttcactctgcag

SEQ ID NO: 215137 - DNA, 588 bp, Homo sapiens
tatgcttatacatttttaattcattttgaaaaatcacatttgaaaaattttagaggtaattagaaactatttagagataatatttgaaataattcaataaatrttaacttctaccaatgaggatttttattttgtcctcaccctcccaagatgtaaccatttggggtctcatgctataatgtttaccagagatcctcctcctttttaagcctgccaaacttattattagtttttaagcctctttgctgctgcattcacatgggcaaataccttaagagaaacagtgagctgactgcgatacacatctcaatttctcttatgtctagaatcttgatcttagaagttattggtaagactcactcagataaattgtccagatttctagttgtaataagcaggaaactcggtccaaagatgattctctactattgtaagatctagaatcttgtatgatttatataggcattatgtgggctatggaaaaaggtggaaggggtaaatgttttggcatgacattttagaacttctttttagaattgtccatttcagaagaatattttggaatcttatctttaatagatgttactt

SEQ ID NO: 215138 - DNA, 527 bp, Homo sapiens
tcagctaatgttatattaatcagtaaattaatattttaatttgagttctttctagttaaaatgcttgcagcttttcccttttgtttttcctacttcagcaatgatgttaagtgatatcattatcatattgtaccttggggttgtgagataacagggtccagcaatagctttattcttagaagagtgagagttttatcrtatcacttccacatttaaaatgacaatccatggcttctgtgtaacaaagtgtcttagagctgagtcatagaattctccaaattatgcttttgaattcatattctaaaatcataccttacaaatctgagtagataatacattttgattagtagaaatcctgtctttattctaggagaaagaaatcttattcaaattacctgaacaatataaatgtaagtttcagcttctattttcttgtttcttgtatcaaccaacaattcaacagtaagttagattcaaagggtttgatggcctattatctgtaagtgaataaagatccagtgaagttt

SEQ ID NO: 215139 - DNA, 577 bp, Homo sapiens
ttcatacggtgaacaaggccacgtaacaatcactcaaatcagaaaatagagcatatctagtactccagaagtctctctctccatactatctcccagtccctacattccatcttaatccctccgcttcactcacagtgtaattcctatcgtgacttctacaactatagtcaagttttcactgtgtttgaactttatattaatataaatgagatccgatatcgtatactctgttgtgtctgaaatatcttgctcaactttatgtttgtaagattcatccacattttgtgtatagttatcatttgctcagtttcctttctataagtacactaygtagtcatagggatatataattttgttttaaattttgctattatgaacaatgctatagtgtacattcttgtctatcttttttggtgcacttatgcagtcttctatacccagaattagaatcgttgagtgaaaagccatgtattttgagctttagtgcttactgccaaacagaggaccaacattacactcatttacactcctaacagtatgtatgaaaattccagttactgcacgtcgccttcaaatt

SEQ ID NO: 215140 - DNA, 590 bp, Homo sapiens
cgctgtctctaactgtgcttagtaattctgccgtcatttattcttaaacgcttgagttgactgttttgtagttgtttctttaaccttctgcatcaaccctttcaattttcccattgtcagctgataacttcactttttatttcaatgataaaatagcagtaagcagaagagacatatcttatcttttccaactccagttcaactttccattcctcttgttctaatgaataaattctttctgcttccatctctagccacttctgtactaaattaaatttcttcttgtctcatcaaagattttccttatcatttttttcacttcttcctgtcctrctagattatttcatcaaaatacaaatacatttcaatatatcttattactaaaaaacaaaacccacaaaactttcccgaacccgtttgtctaaattctttccagctcttgcccatttatctaatcctctttttagcaaaactccttaagataattttatacactgcctgtttacttattttccttcactttctcttaagtttggtgaattagattttcctctccactactctaataaaattcctccaatgtaattgaa

SEQ ID NO: 215141 - DNA, 590 bp, Homo sapiens
cgctgtctctaactgtgcttagtaattctgccgtcatttattcttaaacgcttgagttgactgttttgtagttgtttctttaaccttctgcatcaaccctttcaattttcccattgtcagctgataacttcactttttatttcaatgataaaatagcagtaagcagaagagacatatcttatcttttccaactccagttcaactttccattcctcttgttctaatgaataaattctttctgcttccatctctagccacttctgtactaaattaaatttcttcttgtctcatcaaagattttccttatcatttttttcacttcttcctgtcctgctagattatttcatcaaaatacaaatacrtttcaatatatcttattactaaaaaacaaaacccacaaaactttcccgaacccgtttgtctaaattctttccagctcttgcccatttatctaatcctctttttagcaaaactccttaagataattttatacactgcctgtttacttattttccttcactttctcttaagtttggtgaattagattttcctctccactactctaataaaattcctccaatgtaattgaa

SEQ ID NO: 215142 - DNA, 590 bp, Homo sapiens
cgctgtctctaactgtgcttagtaattctgccgtcatttattcttaaacgcttgagttgactgttttgtagttgtttctttaaccttctgcatcaaccctttcaattttcccattgtcagctgataacttcactttttatttcaatgataaaatagcagtaagcagaagagacatatcttatcttttccaactccagttcaactttccattcctcttgttctaatgaataaattctttctgcttccatctctagccacttctgtactaaattaaatttcttcttgtctcatcaaagattttccttatcatttttttcacttcttcctgtcctgctagattatttcatcaaaatacaaatacatttcaatatatcttattactaaaaaacaaaacccacaaaactttcccgaacccgtttgtctaaattctttccagctcttgcccatttatctaatcctctttttagcaaaactccttaagataattttatacactgcctgtttacttattttccttcactttctcttaagtttggtgaattagattttcytctccactactctaataaaattcctccaatgtaattgaa

SEQ ID NO: 215143 - DNA, 474 bp, Homo sapiens
agcctgactaaaagaacatgtaatacatttaataaaatatagccgggcgcggtggctcatgcatgtaatcccaggcatgggcggtcgaggtgagtggatcacttgaggccattcaagaccagcctggccaacatggtgaaaccccatctctactaaaaacacaaaaactagccaggcatgatggcgcacgtctgtaattccagctactcgggagactgaggcaggaggatggcttgaacctgggaggcggaggttgcagtgagccctaagtggtgccactctactccagcctgggtgacagagtgaaattctgtctttaaaaaaaaaacaaacaaaaaaaaaaaaaaaamaccaacaacaacaattatattttacctcacatccagttcttagccaaatgtccctgattcctttaaatgtttaagtcactgtctacttcaggagtatacattgcatcaggctgttatgtccctc

SEQ ID NO: 215144 - DNA, 474 bp, Homo sapiens
agcctgactaaaagaacatgtaatacatttaataaaatatagccgggcgcggtggctcatgcatgtaatcccaggcatgggcggtcgaggtgagtggatcacttgaggccattcaagaccagcctggccaacatggtgaaaccccatctctactaaaaacacaaaaactagccaggcatgatggcgcacgtctgtaattccagctactcgggagactgaggcaggaggatggcttgaacctgggaggcggaggttgcagtgagccctaagtggtgccactctactccagcctgggtgacagagtgaaattctgtctttaaaaaaaaaacaaacaaaaaaaaaaaaaaaaaamcaacaacaacaattatattttacctcacatccagttcttagccaaatgtccctgattcctttaaatgtttaagtcactgtctacttcaggagtatacattgcatcaggctgttatgtccctc

SEQ ID NO: 215145 - DNA, 474 bp, Homo sapiens
agcctgactaaaagaacatgtaatacatttaataaaatatagccgggcgcggtggctcatgcatgtaatcccaggcatgggcggtcgaggtgagtggatcacttgaggccattcaagaccagcctggccaacatggtgaaaccccatctctactaaaaacacaaaaactagccaggcatgatggcgcacgtctgtaattccagctactcgggagactgaggcaggaggatggcttgaacctgggaggcggaggttgcagtgagccctaagtggtgccactctactccagcctgggtgacagagtgaaattctgtctttaaaaaaaaaacaaacaaaaaaaaaaaaaaaaaaccaacaacaacaattatatwttacctcacatccagttcttagccaaatgtccctgattcctttaaatgtttaagtcactgtctacttcaggagtatacattgcatcaggctgttatgtccctc

SEQ ID NO: 215146 - DNA, 491 bp, Homo sapiens
gcttaagcatcctttgcttccyaatgtcggaaaatatgtaaagggtgcacctctgccacagctattgggcatctcaaatgcgaaaaaaagacctaattttgactttgggagaaactattctcacatgcagacaacgacagggaaacgtggaagtactcagcctgaaaaatgtattctgtgaaatactcagcaagtttgaaaatgtgtttagaatacaaatgtctgttatgagttatttgacagctatcttatcactgatacagaaaattagttaaaatccacagcttccaatctactaagattaaaattccaaatagaagttagaagatttggattttaaactcgagtttattctcagactcccttttaatatttggtaaatttttttaacctttttggtttcaagtcttctaattttccgaatgctagattattattaagaactaatgaggcctagattccatagctaatgtaagaacgcttctgtaaag

SEQ ID NO: 215147 - DNA, 491 bp, Homo sapiens
gcttaagcatcctttgcttcctaatgtcggaaaataygtaaagggtgcacctctgccacagctattgggcatctcaaatgcgaaaaaaagacctaattttgactttgggagaaactattctcacatgcagacaacgacagggaaacgtggaagtactcagcctgaaaaatgtattctgtgaaatactcagcaagtttgaaaatgtgtttagaatacaaatgtctgttatgagttatttgacagctatcttatcactgatacagaaaattagttaaaatccacagcttccaatctactaagattaaaattccaaatagaagttagaagatttggattttaaactcgagtttattctcagactcccttttaatatttggtaaatttttttaacctttttggtttcaagtcttctaattttccgaatgctagattattattaagaactaatgaggcctagattccatagctaatgtaagaacgcttctgtaaag

SEQ ID NO: 215148 - DNA, 580 bp, Homo sapiens
aaaccccgatttatagctggtcagtcagaaccacaacaaaaacaatccggggcttgagattggcatcagaagtgggaggcagtcttgtggagttgagtcctcaacctgtgtgatctgacagtatctctagatagatagtattggaatcgaattggaggacacccagttggtgtccactgcagaattgattgattgtttagtggatggggaaaaaaatcccacacatttggtcgtagaaatcactgtgttaatagttgtggacaagttttrttcatgtcctttgcccgctttttaatggggttgataatttctctcctgtaaatttctttaagttctttataggcactggatattagacctttgttagatgcatagtttgcaaaatgtttctctgtagattgtttagtctgttgagtaattctctgtagattctgtagattgtttactctgttgatggtttcttttgcagtgcagaagctcttaagtttaattagataccacttgtcaatttttgcttttgttgtgattgcttttggtgtttttgttattaaatctttgcccattcctgtgtctagagtgg

SEQ ID NO: 215149 - DNA, 621 bp, Homo sapiens
agaactgatatcatttctctcttaaatgttttggtaaaatttgcttgtgaaaccatcaaggactgatcccccactactcactttttagtagcaaatatgaagtkggggggagagtgtataatcttatgataaaatctcagtcttttaatggatctgtgtttctggcttgtgatctgtactactatttcttcttgtacagctttctctactctgtaggtgaaacaagaagggtagaggtggccagagtcagaaaataaacttccctcatggctttgggacaaggctctggtgtagcctttcctactgaagagtaggcattttctgatggagaagtctgtgtgcatatttcacaatgattacccttcctctctactgccagagtcatgaagggatctttcttggctcttcaatgtgagaacctgatgaagttactgtatataaattcttctgagaacttcagcccccaggagtttctcacacttgctctagtgcacccttactttccagcaattcatcaacatttctatttaagtatttgtattagtcacggttttccagagaaagagaaatgaaaggagatgtagatatacaattggccctttaacaacaaaagtttgaact

SEQ ID NO: 215150 - DNA, 621 bp, Homo sapiens
agaactgatatcatttctctcttaaatgttttggtaaaatttgcttgtgaaaccatcaaggactgatcccccactactcactttttagtagcaaatatgaagttrgggggagagtgtataatcttatgataaaatctcagtcttttaatggatctgtgtttctggcttgtgatctgtactactatttcttcttgtacagctttctctactctgtaggtgaaacaagaagggtagaggtggccagagtcagaaaataaacttccctcatggctttgggacaaggctctggtgtagcctttcctactgaagagtaggcattttctgatggagaagtctgtgtgcatatttcacaatgattacccttcctctctactgccagagtcatgaagggatctttcttggctcttcaatgtgagaacctgatgaagttactgtatataaattcttctgagaacttcagcccccaggagtttctcacacttgctctagtgcacccttactttccagcaattcatcaacatttctatttaagtatttgtattagtcacggttttccagagaaagagaaatgaaaggagatgtagatatacaattggccctttaacaacaaaagtttgaact

SEQ ID NO: 215151 - DNA, 621 bp, Homo sapiens
agaactgatatcatttctctcttaaatgttttggtaaaatttgcttgtgaaaccatcaaggactgatcccccactactcactttttagtagcaaatatgaagttggggggagagtgtataatcttatgataaaatctcagtcttttaatggatctgtgtttctggcttgtgatctgtactactatttcttcttgtacagctttctctactctgtaggtgaaacaagaagggtagaggtggycagagtcagaaaataaacttccctcatggctttgggacaaggctctggtgtagcctttcctactgaagagtaggcattttctgatggagaagtctgtgtgcatatttcacaatgattacccttcctctctactgccagagtcatgaagggatctttcttggctcttcaatgtgagaacctgatgaagttactgtatataaattcttctgagaacttcagcccccaggagtttctcacacttgctctagtgcacccttactttccagcaattcatcaacatttctatttaagtatttgtattagtcacggttttccagagaaagagaaatgaaaggagatgtagatatacaattggccctttaacaacaaaagtttgaact

SEQ ID NO: 215152 - DNA, 621 bp, Homo sapiens
agaactgatatcatttctctcttaaatgttttggtaaaatttgcttgtgaaaccatcaaggactgatcccccactactcactttttagtagcaaatatgaagttggggggagagtgtataatcttatgataaaatctcagtcttttaatggatctgtgtttctggcttgtgatctgtactactatttcttcttgtacagctttctctactctgtaggtgaaacaagaagggtagaggtggccrgagtcagaaaataaacttccctcatggctttgggacaaggctctggtgtagcctttcctactgaagagtaggcattttctgatggagaagtctgtgtgcatatttcacaatgattacccttcctctctactgccagagtcatgaagggatctttcttggctcttcaatgtgagaacctgatgaagttactgtatataaattcttctgagaacttcagcccccaggagtttctcacacttgctctagtgcacccttactttccagcaattcatcaacatttctatttaagtatttgtattagtcacggttttccagagaaagagaaatgaaaggagatgtagatatacaattggccctttaacaacaaaagtttgaact

SEQ ID NO: 215153 - DNA, 542 bp, Homo sapiens
aatagaaatagagaagaagtttacattttaagttaaatatacacatgcattattcattatatattatkatcatattaatatatgcagtatggtatgtacatattatatgtgtgtgtgtatatatatatataaatatatatattatatatatataaaaccattatttggaaaattaagaaaaaaaactggaaaagtattcattcaggaccccaaatttacaaaatcctctttaaagtacagctgtttactctgtttttcaaggttaataattcttactattctatgagacatgattgatctttgatagcattattattggtacaaaaacattgaagaaactacattcagtgtcttgtttccagtaaataatacaacattaagtcctgaaagatattaaatataatagtaaaacaagtggaaatttaacacacaccactattttctcctggtgctatggtcagagtcactggtcatatttcaaatcatcttgctccagcaaagattctaattataacttccagtatgtaaagtaaatactaatt

SEQ ID NO: 215154 - DNA, 529 bp, Homo sapiens
ggagtccccaatgtctataacccgtaagttaagaatagttttttacattttaaaatattagtaaaaatggaaataasaatagcattttatgacataaaaattatataaaattcaaatttcagtattcataattgaatgtgtactagaaactgacaatcaaaaaagaaaattttgggggtgttgaatgcagtactcagaaatatcttatctgaagagtagggaaaaaccaaacttaaaccaaaaggtattctggttcttcctttaaaaaaaagattgggaaagaacaaaatatttctgagtaacaaccccattgcataaaaaagttcaagtatatttatagaaatacaaaattagcaagcactccacaagataaaattcaacatgacataaatgggtgacagatataaaaaatgatatgggtgacagatataaacaagtttcaaaaaaatttataaagatgaaacaacaacaatgtctttgatcaaatatacattggatagaattaaaggcagattagactttgcagaag

SEQ ID NO: 215155 - DNA, 529 bp, Homo sapiens
ggagtccccaatgtctataacccgtaagttaagaatagttttttacattttaaaatattagtaaaaatggaaataacaatagcattttatgacataaaaattatataaaattcaaatttcagtattcataattgaatgtgtactagaaactgacaatcaaaaaagaaaattttgggggtgttgaatgcagtactcagaaatatcttatctgaagagtagggaaaaaccaaacttaaacyaaaaggtattctggttcttcctttaaaaaaaagattgggaaagaacaaaatatttctgagtaacaaccccattgcataaaaaagttcaagtatatttatagaaatacaaaattagcaagcactccacaagataaaattcaacatgacataaatgggtgacagatataaaaaatgatatgggtgacagatataaacaagtttcaaaaaaatttataaagatgaaacaacaacaatgtctttgatcaaatatacattggatagaattaaaggcagattagactttgcagaag

SEQ ID NO: 215156 - DNA, 529 bp, Homo sapiens
ggagtccccaatgtctataacccgtaagttaagaatagttttttacattttaaaatattagtaaaaatggaaataacaatagcattttatgacataaaaattatataaaattcaaatttcagtattcataattgaatgtgtactagaaactgacaatcaaaaaagaaaattttgggggtgttgaatgcagtactcagaaatatcttatctgaagagtagggaaaaaccaaacttaaaccaaaaggtattctggttcttcctttaaaaaaaagattgggaaagaacaaaatwtttctgagtaacaaccccattgcataaaaaagttcaagtatatttatagaaatacaaaattagcaagcactccacaagataaaattcaacatgacataaatgggtgacagatataaaaaatgatatgggtgacagatataaacaagtttcaaaaaaatttataaagatgaaacaacaacaatgtctttgatcaaatatacattggatagaattaaaggcagattagactttgcagaag

SEQ ID NO: 215157 - DNA, 586 bp, Homo sapiens
tgcaaatattgatacctattttgattccttgaggatccataaattaaaggtagagtaagtagtccagaatgcatacttagatacagatggccagcaaactgaaaaacccacatgtgtctaatggagagttgatggtttttatgtttgtttcctacttataaccaaacactgccctctatttcatattgactcaatatgatcaataaccgttagtctaggatcttgtctaaggcatttcaaaagtcagagaaaattgcagctacttttcattcttcatgtgtccaattgtacaatttttcaatattctttaagtatattttttcttaaagaaattagattatatatatatttttaacaagcattatgtactcttactcatcattgtttaatggactcatagttccacatggctggggaggcctcacaatcatggcagaaagtaaaggcccaaaggtatatcttacaaggtggcaggcaagagagcatgtgcagggaaactgccctttatgaarctatcatatctcatgagatttattcactaattcccaagaacagcacaggaaaaacccacccctatgattcaatt

SEQ ID NO: 215158 - DNA, 452 bp, Homo sapiens
actgctgggttcaagtaatcctcttgcctcagactcctgagtagctgggactataggtgggagctaccatgcccagctaattattttgtttgtgtgtgtgtgtgtgtgtgtgtgtgtgtgtgtgtgtgtgtgtgtgtgtgaatttattttttagagatgaggtcatggtatgttgcccaggattgcctggaactcatggcctcaacctatccccctcccttagcctcccaaagtgctttgattacgggtatgagccacttcacctggcctaggatcccttcttactccaattctaaacattgttcaattgttccccatggccttaaggaagaagagcaaacctgcaaacctttyggcctgtttttacatgacttgctttttgcttaatgatttatctcattcatccactattcccagagacttgttctgagccgcagtcaaattaaatgata

SEQ ID NO: 215159 - DNA, 594 bp, Homo sapiens
aagagaaaacctgctagtctcgagcaacttcagcaattacacctgcagcagtagacatgtgagtgaggccatctgggatcctcccaccacagttgagctgtcagatgactgcagcttccaaaatgttccagaaaagactagcaggagagattgccaagccaaatgaaaacataagaaataataaattgttgttttgagccaccaagttttgaggtttataacttggcaacgaataaatgaaaaataagtaaagaatcaccccccaaaattgtaaggaatactgatattcaaatttaggtgacaactggatttacataaaagttcaagaaattatacttctgtaggggtgagtcagagccattattataatttcattttgttaaaattcaaaaatgcctaaaaatacagataaaatactggctatgttaactccaaattaaaatacttacaactgattattaatggtcatatgagccaagaatttaacaactattttatagaaattaaagtagaacaaataktaacaatttagaggaaaataacttcttattttattgaatacttcgttacttagtacctaccatatggctggca

SEQ ID NO: 215160 - DNA, 553 bp, Homo sapiens
tcacaatgctcctaaaaatctttaacaaaacatagttagttgtttacatacttccccattcatcccgggattagttttaaaagctacatgactgctgttttcacatattatgtcagtgctctgaagtcrtccttgcctatgtgcacgaatgggtaaagactccttaaacaaaaatggagttagttatgttagttcttttgctttcttatgttacatcttctcacccaccaccttcagagaaagctctttcttcctctcacaaaacttcacttgtgagttgatctcctttatcccctgattctgaggctcttgactcccacagccactcctctctggagcctcttacatacctcatctcttgtcatgtggacacctccttcatctcagaagtgccccgctgcttggacagctgcccactcccagtactcccatccctcccttagctgaggtgcttcttctccatctccttgacctgtctcacttgcccagcaatcaccttcctctcctcccttccattggtctggcctctggaagtagcatggatgctctctac

SEQ ID NO: 215161 - DNA, 577 bp, Homo sapiens
gttccctggcacttttagtctaattgctgcccaatgaatataatagcttcctgactatcttttcagcaacatgggcttctgaagccattcagaaagggctgaactccaataacactcaccctactgtctgcaggctgaaatctaatatcggccggatggtcctagtttacaactttgttttcatctccacagggtcccttagtctcaggtttactgaccagttgctagacaggagcaatctgtgacatccycctaacccctcttctgtttctcacatcccactcaggataggatcacaggattacttttcaggctgagaacagaagctgcaaacttcagctgaaacacattttgttaagccatcacctactgaacgtggagaggcaactggctcaatttgttctgtgtttgagtttgcagaccatgtggagactttggctaattaatcatgcctgctaatacagttggccagcgtggatccaatgtggaaagtgcccccataaaacaggccttagccgtaggtcaggcaaagagtcaagagaaaaccagttcctgataattaaatattaggtacctc

SEQ ID NO: 215162 - DNA, 584 bp, Homo sapiens
aactcaaggaagttttggatctattattttctctctctagcatttgatccaggcactgggctgaatgctttccagcatactatttggttcaatccttttaacaatcctgttgggtagatatttgtatcctattacatagaagacaagcagaagggctaatgacttcttcaagatgggaaaatcataattggagaattaaaaactctaacactaagagatgggttctacctaamaatttcatacctgagaaaattgtccatggctaatagataatgaatgtcaaaactgagaaatgcatggtggataattcgaaacccaagattattaccacatcaactacctcctcagcacatctggtatcaacaacttatgggccctctacaccaggtattccacatttgtccttccagagccactctctacccttctccacccttcttgtgctcagagatgctgacgttcatgaactgtatcatcaggctgccctgtacactgacttccagttggatttggccaatagaaatacccacaggagactaggcgaggtaggatggaagagagcagagtgaggtcagagtaatcat

SEQ ID NO: 215163 - DNA, 549 bp, Homo sapiens
ggtatcatgctgaatgacgctatgagaaaggcatttgcctaggtggcattccttcccctcaatccataacttcattctaaacatgagaccatcagtcatggtacttctagattgaagtaggttgtacaaaatacctgaccactacttttcaaaagggtcaaagttatgagagacaagaaaagaccaagacactgtccagactggggagactggggacacatggtgattgatacaatctaatattctggaacaggacattagtagaaaaactggagaaatattaagaaagtggtttagttgttggtattgatctgttgttattttctaasttttttaaaaaaattatagatggatttgtatttcaaagataaaacaaaggtgcttcttagaattactgacatagggcataacaaatttccctataactagggatctaattttgggttctctattctattttcttagttttgattaatgtaagatgttatgtaagatattaatattagagggaagctgagcacaggatatataagaataatctttgtaaat

SEQ ID NO: 215164 - DNA, 490 bp, Homo sapiens
aaagctttatgtaatacatgtgtattacacacatactgcaaagataaatatttaacagcatttaatctctgagatagggcataaaattgaggttctgagaagagttgaaggtggcagtctacttcttttcttctacattgtctgaatttttttcttaactaagattatatgttagctttgcaattaaaatgtctcacacatacttttatgagagaaagagaaatatcaagtgatttgtcaatagaaaaatagtaaactctacactgttagttgatcttaagaacagattattatyataaaatatgatatgattaattataatttcctgcccttaatagaggttacattttaaagaaggatgggaagcaaaattgttccatcaaaaatagataaaatgggttaggcacagcagctcatgcctataatctcagcaatttgggaggccaggggagacaactgcttgagcccaggagtttgaggtcagcctggg

SEQ ID NO: 215165 - DNA, 498 bp, Homo sapiens
gaccacgtgatctgcccatcttggcctcccaaagtgctgggattacaggcgtgagccaccacgcctggccccttgacarttttgactctcacccttgaagctactgtctgtagatatgcagaatgtcatggatgggaacttcttcaatggagacccatatgcaaccagtgtctgccttacaggaaacaaagtggtacccgtttcactattttctcatgaattcccttcccttttgaaaatctaaaaggagaatgaggagaatgcattgtgcgttggacaactccacaaattttaaagcattcaagtttagaaatacagctttgtgctttctccatgtgacagaaatggaaagaactaaaactacatatttttctaagcttgcttttagacttttctttttctaaactttctgggggcgcgttcagattccagctctcctacaagaacaaccacgcagggaaattacaaatgtccattctccagatgtaagaggccaaa

SEQ ID NO: 215166 - DNA, 593 bp, Homo sapiens
ggaggccactgtggccggagtggcatcagcaaaggtgagagtgagaggagataagggaaggaaggaggaggatgaaccatttgccrtcatgtagatcttggtgtgtactctgagtagaatgggagccatgggagggttttgagctgaggtgcaatattgggatggttaatttcataggtaaatttcactggtcgcagggtgcccggattaaatattaattctgcacgtgtctgtgctggtgttttcagaagagattagcatttgaatgggttaactcgcccagctgagttattctttttttgtgtgtgtagagacaggggtcttgctctgttgcccaggctggtctcaaactcctggcctcaagcaattctctggccttgttcacccaaaatgctgggatgacaggtgtgagccactgcatccagccctttaaagaaggctttaaaggacctgaagatgtttagtctaaaaaaaaaaagaaaaagaaaaaagactggggctgagagagccctttcttcagatacctgaaaagatgctcttacaaggaccattaaggctcaagataaggaacagccttgtgtccggccaagctt

SEQ ID NO: 215167 - DNA, 592 bp, Homo sapiens
aagctttgcaagttaagttaatttttttcttttttttgaaacagtcacccaggctagggtgcagaggcacaatcttggcttactgcaacctccatctcctgggttttagcaattctcctgtctcagcctcccgagtagctgggattacaggcacacgccaccacgcccagctaatttttgtgtttttgtagcaacgaggttttgccatgttggccaggctgstcttgaactcctgacctcaagtgatccactcgcctcagcctcccaaagtactggggttacaggcgtgattttaaaaatttgatttaaacaacaaaataaaacatcctcaaagaaaaataaacaaagtacaaggtcagttacacaagaaaaaatacacatggatgaaaaacacatgacaattttaaatttatttcatagtcaaagaaaataaaaaattaaatacacagaggtgtttttttttccccctatccgcaaatgaacaaagattcattttttgtgttgatactttacaggcaaggccttagtaatatgaaaaaaatcatatcttctgtgagtgcaaattgaaacaagccttttaaaaagcaatttg

SEQ ID NO: 215168 - DNA, 592 bp, Homo sapiens
aagctttgcaagttaagttaatttttttcttttttttgaaacagtcacccaggctagggtgcagaggcacaatcttggcttactgcaacctccatctcctgggttttagcaattctcctgtctcagcctcccgagtagctgggattacaggcacacgccaccacgcccagctaatttttgtgtttttgtagcaacgaggttttgccatgttggccaggctgctcttgaactcctgacctcaagtgatccactcgcctcagcctcccaaagtactggggttacaggcgtgattttaaaaatttgatttaaacaacaaaataaaacatcctcaaagaaaaataaacaaagtacaaggtcagttacacaagaaaaaatacacatggatgaaaaacacatgacaattttaaatttatttcatagtcaaagaaaataaaaaattaaatacacagaggtgtttttttttccccctatcygcaaatgaacaaagattcattttttgtgttgatactttacaggcaaggccttagtaatatgaaaaaaatcatatcttctgtgagtgcaaattgaaacaagccttttaaaaagcaatttg

SEQ ID NO: 215169 - DNA, 582 bp, Homo sapiens
ttacccctcaatccattcatttctctaaagccaattgaagctcatttcatcttctgcaaaacaacattcttctgctttcccaatagtaatttatctctaattgaattcttgtttatattatacattttgacacaatagtttctaccctgctaaataattatttaggataaataaattgtctcttccacattattttcaaaatacttgagacaggtagtagccatatcttgaattttgttactattccttttagcaaacaacgcagtgttaaccatatgttaatcattctttgaatacctgttaaatgaatgaacctcatttttaatggtcttactaaagagaaatccattttcacagcaaacctcagtttmttggcctttatttaggacattagtgccctcctctctaccaccatctaaaacagcaaatttgcatttctaaaagagaaaactatttttttcatttaaaaatgttaaagcaaattcccatgtcaactaagttttttttcccccaatccaaaacaaactaatatctcaaaccaccgtttaaacccagaaagctctgaatcctagaattcggact

SEQ ID NO: 215170 - DNA, 572 bp, Homo sapiens
cctctcttgactttagcccccttctccatttcaagatcaacaatggtgattgagaacttctcataatcacatccctctcattcatccatctttttatctctctttctgactacggccaggaaagactgttcctttttaagaactcatgtgattaggttaagtccaccctgataatcgagaatcctctccccactcaagatctgtaaccttcatcatacccaaaaggtcttttagccatgtaagagaatatactcacaggctccagggttaaggagtaggtatcatttggaggggwggggattattctgccttcaacataaatagttctaccatgtggcacactaacaaccttgcgtgtctccacattgtccatgtaggcaaggcttggccacactttgacctgagtcctggtaaaatgccctgtgattcttcctagacccaggggaggtacgcagccttggcaggaactgccacaaagctgtttctcatctatctccctagttttagcagagcacaggactttcctatggtacccctaccccctctcaggatatagctgcaggcttctgagt

SEQ ID NO: 215171 - DNA, 400 bp, Homo sapiens
tcacataaatatacactcagaatgaattaaaacccaaatgtcctaaagctggagcttgataaaaaatttccaataacagctccatatacagatattagaattgcagtaactcactctagacagctagataaagtggcatggaaacaattgtgttagacggttcaaaatgccactgtcatgatggcaaaggagctgctttcaaaactgcaatggcagagtttgactacaactattccccaaatattaggctaaaggacatttctgaattattatattaccttaaacatgggtaactaaatttaaacattaaatataagtagacatttgactatgtcwtctatatgcctgagactttacctatttgtcacgcaaggtgtaaggtgacctacagtactagtga

SEQ ID NO: 215172 - DNA, 474 bp, Homo sapiens
  misc_feature (1)...(474): n = A,T,C or G
tcaagtgattaagatgtaaatgaccaaatttactttgagaaatactgacctccagtcattctcttcctaagtccagtctaccacagatctaaatggtcctgtgggtttctttgccttccattgtcattgtcactgacaayttagatattatttatcagttacattccagtagccacgcatctgttctttcttcagtgtctctatgtctcaatccaacttgtactttaatttaatatatcttcccaaaacaatttctgggctaaaacaanaagttcaaataaaaagtagcagaatctagtatgcttcatttcatctacaaatttgaattctatcttttctccagtttaggctcctcaaacttgaagtcttttgctttacacgactacaaagggcatctacttacctggcttttcaaagagtttcctgttttatgcnnnnnnnnnnnnnnnnnnnnnnnnnnnnnnnnnnnnnnnn

SEQ ID NO: 215173 - DNA, 430 bp, Homo sapiens
gctatggcaatatcagagccatggtagggggaaaaaaagggactctaacaaataagataggcacaacagggttgatggctgcaaaatcttgaatcttcagatatccctaaaccctcctgaatgcagaagcagtccactcctctcttttaaaggggaagcaagcactacctcttgcttaaagaagaggccaaaggctctcctacsaaggtgacatgtactatcctcagcatctgtccccactttccctcctggacaaaaggccaataactaggtctaaatcctaacctaaccaagtcagaggatattatctcatttacctttgatattatcaaggaaaagccagtagaacggagagacatcagactgataagcttgagattccagctcacatcctgactatgccaatgcccctctgtgtgaccttgaacat

SEQ ID NO: 215174 - DNA, 318 bp, Homo sapiens
acttgaccttcctctcttctttttagtgcaaggaatacaaataaaaagatcccaaaatagcaaaccactcagcaatcattactttcattgtgattcttagatatatgagcaaaaatgtagcagaagttttcctcaaaaatattaaaaatattattgaaaaaaaccaagttgggcaacctaaggaacatagattgtcttcttggacatttgccagttatatttggaacaatgttgacttttttttaacttgtatttttggttcagaggtacatgtgcaggttagytatataggtaaattgtgtgttacaggagtttggt

SEQ ID NO: 215175 - DNA, 550 bp, Homo sapiens
ttacaacatacatccagagtaatcctgataacatggaagtcagagtatgtcccttctctacttcaaaccttatagtagctcctgatttcccttaaagttatagccaaaatgcctgtaatagcccasaagccctacatggtctggctctcccctagtacctccctgacctgctcttcaccacgctccccatcacttgctctcatccagcctcttgagcctccttgctgttctcagaaacgccacacgtgcttcaagcctttgcctgagctgtcttcggcctggaatttgcatcattttcatatccacgtaactcaccctctcagctttttcgaagtcttttctcagtgaggcatagcctggtcatcttatttacgactgcaaactgtcatccttccagcacctcctccaaagtctttatcccttcccttcctctattttctccacagtacttactatccttattgtatataatttacttattatatctattttttatttcttgcttcccccccgttagaatataaactctgttaaacagggttcaggagac

SEQ ID NO: 215176 - DNA, 575 bp, Homo sapiens
ccacaaacatgtatgttaaggtagtgctcagttttacagtcacttcacgaagcaattctgagaattagcactgtatagtttaagaaacgttgattgtttttgatgcttcagtaaaataagcctcagaactgaaactgagtcatgtataaaaattcaggttttacagtcagagtgccaggttgatctcacctataacctattagccatttcttctgacacactcaaggtcaggctttctcctttcacttagacactcaaacttcaaactaatgtgcacagagtcacctgataaaaaatatggatttctgggccccatagcttatgaagtgaatcataatcaagggttgggcctagtcacagtcattggcttttttatttgctccagagacaagtatgcacactatcgtttgaaatctagacctagagagacaactgagatgacctcttaacccaatcatgttaatatttcatccaatttgccttagatagctttgttaaaataatcaaaagyctttggtggctatttttaaggacttcaataaatatagatctagccaaattttttacttattgct

SEQ ID NO: 215177 - DNA, 552 bp, Homo sapiens
atttatattataggtaggtagctggggaatttggaaactaatgtctcataatggcatattactagctggtgctttcttacaaagtgagagaagaaatacaataatattattatctcttctgctcacaaataggtttgtaagttattgatgaaattatggcattcagcccctaaggaagacataattggatgtggaccagaagataaacacaaacatttccatattctttaaaagaaactctgtgtacatgtattggatttccattgcttctataacaaatgagtatacatattgtgtttaagacaatgcaaatttattatcttatggttctttacatgagaagtattatataagtctccctgaactaaaattaygatgtcctgacaataccaattgctggcaaagatgcaaagcgacaagaactctcaatcattgctggcagatacacaaaataatatggccaatttgcaagacagttttgaagtttcttacaaagtttaacatggtttcaccatacaatccaacaatcaagttcctactatttccctaact

SEQ ID NO: 215178 - DNA, 507 bp, Homo sapiens
ctgctttaaaagcaaattataaattcaacrtactattattatgtggctccgaactttgctttatgaaactctgtgagaatctatatgtcctgagttgtattatttttctaatatgcttttaagtgcggtccctttgtacaagttgagtatccctaatccaaaaatccgaaatctgaaatgctccaaaatctgaaactttttgagggtcaacatgatgttcaaaggaatgtccactggaacatttcagattccagatttttggatgagaaatgctcaactggtaagtacaatgtaaatatcccaaaatttatttttaataatcttaaatctgaagcactttggataagggatattcaacctgtagttaattgcaagcaaacttaactatattaaaatggtcctcactaatcctcaacatgccaccctttaagaagactaatagaatgaatcatgagggtgggataggaaggtcatgtgatgttttgactaaggcaaatgaaggaaacc

SEQ ID NO: 215179 - DNA, 611 bp, Homo sapiens
agttacttagtctatcggtgctttctgctttgtaaaatggaactaataatagtacctaacttaagggagggttttgagaattacataaaataattcatacagaacataatgcctgacacataattcatgttcagtaaatatttagttgttgttatgtacatattttttaatactgcatttaaacaccaaaattctacaattattaatagtggtcatgaaaaagggtgtttcattgtctttgtttttggataaaaggccatttgtcagatggctgaaataccagtgttaaayaaatagatgagtttgccaccacagtgaaatttctctctatagaaatgccgcatgaagggtcttctctgactgtaatagaaaagccagtctacaatttgatgtcgtgaggtgcttacagggaagaaatattccaaacaactgctaattcctggccaacagtgtaagctctatctgattttgggatatcatacatctttctctgaagctgtttatcaattctctttcatcatataaattatcatatatatattatgatttaatttttttcatatgagaaaattcggagtagattaattcaccaacataagacagatgcaaat

SEQ ID NO: 215180 - DNA, 420 bp, Homo sapiens
ttcccctttcactcactgtgccaccatgtgaaaaaaaggtgcctgcttcccctttgccttctggcatgattgtcagtttcctgaggcctcccagtcatgcttcctgataagcctgtggaactgtgagtcaattaaacttcttttcttcataaattacccagtctcaggtagttctttatagcagtgtgaaaacggactagtacgctctaaaatcacttctatctaccaaaacctggatattgtaccatattgaggtcatactcttctgattttattacctgtatggaacacttaagaatcttactaatcctaatgacagaactctgctagcaaaaaaaaaaaaaaaaaaaaatcgtaagaatttatgataaagaccccaaaagcaaatacrataaaattaaaaatgagacttaaagatct

SEQ ID NO: 215181 - DNA, 495 bp, Homo sapiens
aagcttagatttactaattcacagtttcctggatcccagaaactgtggattaagttactaaactgttaagctactaaaaaaaagggatacaactgtaactctaacactttgggaggccacaggggtggatcacttgaaccaaggtgttggagaccaggcagggcaacatggcagaaccccgtgtctacagaatgtttcttttaaaaaacagctgggcatggtgccacatacctgtagtcccagctacttgggaggctgaggtggaaggctcacttgagcccggggcgggtggaggttgcaatgacctgagatcgtgccactgcactccagcctgggygacagagtgagaccctatctcaaaataaataaataaataaagtttttagtatatttggaatttaacattttcaatctatacacctaaaaagtaaactgaactctccctgcctggaattttaatattattttcacttacctctataccttacaatgttc

SEQ ID NO: 215182 - DNA, 495 bp, Homo sapiens
aagcttagatttactaattcacagtttcctggatcccagaaactgtggattaagttactaaactgttaagctactaaaaaaaagggatacaactgtaactctaacactttgggaggccacaggggtggatcacttgaaccaaggtgttggagaccaggcagggcaacatggcagaaccccgtgtctacagaatgtttcttttaaaaaacagctgggcatggtgccacatacctgtagtcccagctacttgggaggctgaggtggaaggctcacttgagcccggggcgggtggaggttgcaatgacctgagatcgtgccactgcactccagcctgggtgacagagtgagaccctatctcaaaataaataaataaataaagtttttagtatatttggaatttaacattttcaatctatacacctaaaaagtaaactgaactctccctgcctggaattttaatattaytttcacttacctctataccttacaatgttc

SEQ ID NO: 215183 - DNA, 548 bp, Homo sapiens
agatctgtttctgcagttacctctagrtcatctgacccaggatggatggacttaaatagaatcaccagaggccaatcaagtgctacctggcttatttaaatacactggctgcttcagactaatgcctgaaaagggaagtaaaaatttcagaccctaacactgataaacattcacccagtagtaaatgatgactactcgaaggtccatcctttataatcttcaacttatcttcaaaactaggaaaaacactctcttttggaataaacatcattattcatttgcacctaagtttctaaattcaaatccattgttgagtaggaggtcatctgaactagttttccaatctctgatctggaactacaactaggaccccgggggaaggtaactagttagcagaaggccaccctcatctgctgctggggacagctttatagaaggccaagaattttttagacgctaaagtatatagaaagtcctttgggttagaaacactcccaggtcttccaatccataccctactttttcgtgtgtgttgttctgtttgatac

SEQ ID NO: 215184 - DNA, 559 bp, Homo sapiens
catctgacccaggatggatggacttaaatagaatcaccagaggccaatcaagtgctacctggcttatttaaatacactggctgcttcagactaatgcctgaaaagggaagtaaaaatttcagaccctaacactgataaacattcacccagtagtaaatgatgactactcgaaggtccatcctttataatcttcaacttatcttcaaaactaggaaaaacactctcttttggaataaacatcattattcatttgcacctaagtttctaaattcaaatccattgttgagtaggaggtcatctgaactagttttccaatctctgatctggaactacaactaggaccccgggggaaggtaactagttagcagaaggccaccctcatctgctgctggggacagctttatagaaggccaagaattttttagacrctaaagtatatagaaagtcctttgggttagaaacactcccaggtcttccaatccataccctactttttcgtgtgtgttgttctgtttgatactttcagagctctcaaaatctcgcagacaccaatcaacac

SEQ ID NO: 215185 - DNA, 548 bp, Homo sapiens
agatctgtttctgcagttacctctagatcatctgacccaggatggatggacttaaatagaatcaccagaggccaatcaagtgctacctggcttatttaaatacactggctgcttcagactaatgcctgaaaagggaagtaaaaatttcagaccctaacactgataaacattcacccagtagtaaatgatgactactcgaaggtccatcctttataatcttcaacttatcttcaaaactaggaaaaacactctcttttggaataaacatcattattcatttgcacctaagtttctaaattcaaatccattgttgagtaggaggtcatctgaactagttttccaatctctgatctggaactacaactaggaccccgggggaaggtaactagttagcagaaggccaccctcatctgctgctggggacagctttatagaaggccaagaattttttagacgctaaagkatatagaaagtcctttgggttagaaacactcccaggtcttccaatccataccctactttttcgtgtgtgttgttctgtttgatac

SEQ ID NO: 215186 - DNA, 402 bp, Homo sapiens
ctctcctttatatttgaaagacattttccgtggatacactatyctaggataattttttttttccttcagcactctaaatatgtcataccattctctcctggcctataaagtttgcaccgagaagtctgctgccagacttattgaagctcctttgtatgttatttgtttccttggtcttgttggttttaggatcctttgttatccttggcttttagatgttttattattaaatgtcctgaggtagtcttatttggcttacatctgcatactgttctataaccttcttgtacttggatattgatagctttctctaggttgagaaagttattcttatccctttgaataaactttctactctgatctctctctgcctcctccttaaggccaataactcttagattt

SEQ ID NO: 215187 - DNA, 587 bp, Homo sapiens
ttacatctgcatactgttctataaccttcttgtacttggatattgatagctttctctaggttgagaaagttattcttatccctttgaataaactttctactctgatctctctctgcctcctccttaaggccaataactcttagatttgcccttttgagccattttctagatcttgtaggcatgcttcattgtttttcctttttttcttgtctcctctgattgtgtattttcaaatagcctgtttttgagctcactaattatttctgctgtttgataaattctgctattaagagactgatgcattattcagtatgtcaactgcatttttcagctccagaatttctgtttggttctttttaactatttcaatctctttgttaaacgtgtctgatgggattctgacttccttctccatgttatcttggattttgttgagcttcctcaaaacagctattttgaattctctrtctaaaaggtcatataattctgtatttctgggatatgtgactggtgccttatttgtttgataaggtcgtgttttcccggatggtcttattgcaggtggatgtttgtctatgtctgagcat

SEQ ID NO: 215188 - DNA, 607 bp, Homo sapiens
cctgtgttgcttttcactgtgacagggtagcactgagttccaagcagagtcccataatcactgcattctccctccccctacaagcacacagattctctgtgccacatggctgctgtcagggaatggggaaggatgatgtcaatgattcagggctgtctcctacccctttcagtgcttcyttccttgatatgatgtgaaaaccaagcactgtgatcactaatcttatttttagttgttatgaaggtgcttttttgtatggatggttgttcagtttggcattcctgcggggaagacaatcactggaggcttctatttggccatcttgctcccaaagttccaggcagccttttcttgaagggtgagatgatttgggatcttgtctagttttgcactaaagcactaagtatttggtagagcccttaactcatcttggtctatttccttatttgtaaaataagggatcttcattaactgatctgtaaaaccattctcaaatgtaaaatcctataattctattgaaaaaattttagatacaaacctctacacttacttgcttgaaaaacattgtaattataattcttgtcgacttgtgggctattactcaatg

SEQ ID NO: 215189 - DNA, 607 bp, Homo sapiens
cctgtgttgcttttcactgtgacagggtagcactgagttccaagcagagtcccataatcactgcattctccctccccctacaagcacacagattctctgtgccacatggctgctgtcagggaatggggaaggatgatgtcaatgattcagggctgtctcctacccctttcagtgcttccttccttgatatgatgtgaaaaccaagcactgtgatcactaatcttatttttagttgttatgaaggtgcttttttrtatggatggttgttcagtttggcattcctgcggggaagacaatcactggaggcttctatttggccatcttgctcccaaagttccaggcagccttttcttgaagggtgagatgatttgggatcttgtctagttttgcactaaagcactaagtatttggtagagcccttaactcatcttggtctatttccttatttgtaaaataagggatcttcattaactgatctgtaaaaccattctcaaatgtaaaatcctataattctattgaaaaaattttagatacaaacctctacacttacttgcttgaaaaacattgtaattataattcttgtcgacttgtgggctattactcaatg

SEQ ID NO: 215190 - DNA, 607 bp, Homo sapiens
cctgtgttgcttttcactgtgacagggtagcactgagttccaagcagagtcccataatcactgcattctccctccccctacaagcacacagattctctgtgccacatggctgctgtcagggaatggggaaggatgatgtcaatgattcagggctgtctcctacccctttcagtgcttccttccttgatatgatgtgaaaaccaagcactgtgatcactaatcttatttttagttgttatgaaggtgcttttttgtatggatrgttgttcagtttggcattcctgcggggaagacaatcactggaggcttctatttggccatcttgctcccaaagttccaggcagccttttcttgaagggtgagatgatttgggatcttgtctagttttgcactaaagcactaagtatttggtagagcccttaactcatcttggtctatttccttatttgtaaaataagggatcttcattaactgatctgtaaaaccattctcaaatgtaaaatcctataattctattgaaaaaattttagatacaaacctctacacttacttgcttgaaaaacattgtaattataattcttgtcgacttgtgggctattactcaatg

SEQ ID NO: 215191 - DNA, 599 bp, Homo sapiens
ttcagcctcattttttcttacattaactggaataatatctgccctactttctcaagtagtggttttaagagtcaaatgatataatgtacataaaagaaattgtgcacacgggagcattattgacattaaagagtggaagtactgtatttttctctgaayagactgtacattatcaactaagttaactgtacatgtcaactaagctgtggtctaagtctgtaaaatatctattttaatgagactttttttacattaattcaagatttcttgaagtttgttccatgaatgtcaatagatgttttacaaataattacaacaatgaaactccttaaaaaatgttttactaaataggctgaataaatgcttggttaggcaaagttaaatggcttctttcctgcaaaacttcataaaacctttcatatgccaatgtgcaatcctccatgggatcctcactgtgtaatacagtgatttccagcttatttgaccagagaaccatttttctagagaacatctcttagaaatactgcccagcaagtatcacttagggaacagcactagtaaattgttttctctggtataacttgctgaatgaagcagaa

SEQ ID NO: 215192 - DNA, 599 bp, Homo sapiens
ttcagcctcattttttcttacattaactggaataatatctgccctactttctcaagtagtggttttaagagtcaaatgatataatgtacataaaagaaattgtgcacacgggagcattattgacattaaagagtggaagtactgtatttttctctgaatagactgtacattatcaactaagttaactgtacatgtcaactaagctgtggtctaagtctgtaaaatatctattttaatgagactttttttacattaattcaagatttcttgaagtttgttccatgaatgtcaatagatgttttacaaataattacaacaatgaaactccttaaaaaatgttttactaaataggctgaataaatgcttggttaggcaaagttaaatggcttctttcctgcaaaacttcataaaacctttcatatgccaatgtgcaatcctccatgggatcctcactgtgtaatacagtgatttccagcttatttgaccagagaaccatttttctagaraacatctcttagaaatactgcccagcaagtatcacttagggaacagcactagtaaattgttttctctggtataacttgctgaatgaagcagaa

SEQ ID NO: 215193 - DNA, 428 bp, Homo sapiens
gtcatgaccacaagataactgtttacatttgataataactatgtaatagttttcaaaggaataaggtttaaaaaaaaagaatcagaagaaatttcatggaacttagtcaaggtaaagctgtcttacaaggtggaattaggccttttttttaagtcacttccatgcttaaggaagaatgacatcttctgacagcatctctgtttattcagtgctccacccgaaggagtgtatttrtcatctaacaatattgactctagggtcagactcgaactgctaaggacacgtcgtcttaatctgtacaaaatctgcctttcatatatggtgaaagtagttactgaacccaatttgttttttaatgcactgtttgtagcctattcaacctcattagcagcatatcatttcgatggaaaattcttattgactgagat

SEQ ID NO: 215194 - DNA, 490 bp, Homo sapiens
gggccttctggttctctgaccgtaggaagagggcactaaggccagtcagcaagggagtcttattggaggcgggtggagtggatttgaagggcttgtggtgactggcatggcacacagtgaactcctcatgtggtctacagtgaactcaggattgctgagggggaggtgtgcacacctgcctcaggtatctggttcctggtctttagcrgcctctgaggtgagccctcacctgagggtgatgcaaagcagcagagcagcctagtggcacccttgctcccttcttagaagatgccctggtgggggactctgatctgaggggtagccctggacctgcctacaaaggcagtcagctgcgtcccaggcaggggcaccccaatgtcagatgcatatccacgtggccagcctgggtgtgtccttctcaggcaccatctgctggctcacattccgtcccttcctaccctctggctaaggggtacatggcctttgcgct

SEQ ID NO: 215195 - DNA, 511 bp, Homo sapiens
tttataaaaggatttcccctctctttgctctgtgcttctccttgttgctgccatgtgaagaaggacatgtttgcttccccttctgccatgattgtaagtttcctgaggcctccccagccatgyggaacttgagtctattaaacctctttcctttataaattacccagtcttgggttatctctttattagcagcatgagaacaaactaatacatgtgtctcctttaatttctcccagcagtgttttgtatagtcttatgctgtttgttaaatttgttcctaagtattttattcttttctgatgcttccgtaaataaaattcaaatatatatgtgtgtgtgtatatatatatatatatatatatatatatatatatatattttttttttttttttttttttttgagacagtctcacactcttgcccaagctggtatataggggtgtgattttgtctcagtgcagcctcaacctcctggctcaagcaatcctctcgagtagctgggactacagg

SEQ ID NO: 215196 - DNA, 511 bp, Homo sapiens
tttataaaaggatttcccctctctttgctctgtgcttctccttgttgctgccatgtgaagaaggacatgtttgcttccccttctgccatgattgtaagtttcctgaggcctccccagccatgtrgaacttgagtctattaaacctctttcctttataaattacccagtcttgggttatctctttattagcagcatgagaacaaactaatacatgtgtctcctttaatttctcccagcagtgttttgtatagtcttatgctgtttgttaaatttgttcctaagtattttattcttttctgatgcttccgtaaataaaattcaaatatatatgtgtgtgtgtatatatatatatatatatatatatatatatatatatattttttttttttttttttttttttgagacagtctcacactcttgcccaagctggtatataggggtgtgattttgtctcagtgcagcctcaacctcctggctcaagcaatcctctcgagtagctgggactacagg

SEQ ID NO: 215197 - DNA, 565 bp, Homo sapiens
ttcccctctctttgctctgtgcttctccttgttgctgccatgtgaagaaggacatgtttgcttccccttctgccatgattgtaagtttcctgaggcctccccagccatgtggaacttgagtctattaaacctctttcctttataaattacccagtcttgggttatctctttattagcagcatgagaacaaactaatacatgtgtstcctttaatttctcccagcagtgttttgtatagtcttatgctgtttgttaaatttgttcctaagtattttattcttttctgatgcttccgtaaataaaattcaaatatatatgtgtgtgtgtatatatatatatatatatatatatatatatatatatattttttttttttttttttttttttgagacagtctcacactcttgcccaagctggtatataggggtgtgattttgtctcagtgcagcctcaacctcctggctcaagcaatcctctcgagtagctgggactacaggtgcatgccaccatgccccactaatttctgtatttttttatagagacagggttttgccatgttgtcca

SEQ ID NO: 215198 - DNA, 565 bp, Homo sapiens
ttcccctctctttgctctgtgcttctccttgttgctgccatgtgaagaaggacatgtttgcttccccttctgccatgattgtaagtttcctgaggcctccccagccatgtggaacttgagtctattaaacctctttcctttataaattacccagtcttgggttatctctttattagcagcatgagaacaaactaatacatgtgtctcctttaatttctcccagcagtgttttgtatagtcttatgctgtttgttaaatttgttcctaagtattttattcttttctgatgcttccgtaaataaaattcaaatatatatgtgtgtgtgtrtatatatatatatatatatatatatatatatatatattttttttttttttttttttttttgagacagtctcacactcttgcccaagctggtatataggggtgtgattttgtctcagtgcagcctcaacctcctggctcaagcaatcctctcgagtagctgggactacaggtgcatgccaccatgccccactaatttctgtatttttttatagagacagggttttgccatgttgtcca

SEQ ID NO: 215199 - DNA, 565 bp, Homo sapiens
ttcccctctctttgctctgtgcttctccttgttgctgccatgtgaagaaggacatgtttgcttccccttctgccatgattgtaagtttcctgaggcctccccagccatgtggaacttgagtctattaaacctctttcctttataaattacccagtcttgggttatctctttattagcagcatgagaacaaactaatacatgtgtctcctttaatttctcccagcagtgttttgtatagtcttatgctgtttgttaaatttgttcctaagtattttattcttttctgatgcttccgtaaataaaattcaaatatatatgtgtgtgtgtatatatatatatatatatatatatatatatatatatwttttttttttttttttttttttttgagacagtctcacactcttgcccaagctggtatataggggtgtgattttgtctcagtgcagcctcaacctcctggctcaagcaatcctctcgagtagctgggactacaggtgcatgccaccatgccccactaatttctgtatttttttatagagacagggttttgccatgttgtcca

SEQ ID NO: 215200 - DNA, 511 bp, Homo sapiens
tttataaaaggatttcccctctctttgctctgtgcttctccttgttgctgccatgtgaagaaggacatgtttgcttccccttctgccatgattgtaagtttcctgaggcctccccagccatgtggaacttgagtctattaaacctctttcctttataaattacccagtcttgggttatctctttattagcagcatgagaacaaactaatacatgtgtctcctttaatttctcccagcagtgttttgtatagtcttatgctgtttgttaaatttgttcctaagtattttattcttttctgatgcttccgtaaataaaattcaaatatatatgtgtgtgtgtatatatatatatatatatatatatatatatatatatatttttttttttttttttttttttkgagacagtctcacactcttgcccaagctggtatataggggtgtgattttgtctcagtgcagcctcaacctcctggctcaagcaatcctctcgagtagctgggactacagg

SEQ ID NO: 215201 - DNA, 386 bp, Homo sapiens
aggccttcctccttcattcccaaacctggtgtttccaattgattcaaattgggagttaatggaaggaagacatcctcttcttccctgcattagtcagggctctccggagcaacagaaatagtaggagatatatacatatacaaagagatttatyttaagggattggcttatatgattgagggggctggcaagtctaaaatctgcagagcaagctggaaactctcaggctggggctgaggctacagttcaatccacaggcagaatttcttccttctcagggaaacctgttttgcttgttagacccttcaactgattggtgaggcccaccaattatcaaagataatttcctttacttaacttcaaatgattgtataggtcaaccaaat

SEQ ID NO: 215202 - DNA, 353 bp, Homo sapiens
ctgggcgcaatggctcacacctgtaatcccagctacttgagaggctgaggcaggagaatcagttcaacwtgggaggtggaggtttcagtgagccgaggtcacaccggcctgggcaacagagcaagactccgtctcaaaaaaaaaaaaaaagatgatatagtttggctgtctccccacccaaatctcgttttgaattgtagttcccataatcctcatgtgtcatgggagggacccagtgggaggtaattgaatcctggagattgttacccccatgctgctgttctcatagtaagagagttcccatgagatatgatggttttataaggggttttccaccttttatttggcacttc

SEQ ID NO: 215203 - DNA, 568 bp, Homo sapiens
acgtgtctctagagaaggattcctggatctagctggtcacgacgatgttttcaccaaggtcacaggagcattgcgtcgctgatggggttgaagtttggtttggttcttgtttcagcccaatatgtagagaacatttgaaacagtctgcacctttgatacggtattgcatttccaaagccaccaatccattttgtggattttatgtgtytgtggcttaataatcatagtaacaacaataatacctttttctccattttgcttgcaggaaacataccttaagttttttttgttttgtttttgtttttttgttttttgttttcctttatgaagaaaaaataaaatagtcacattttaatactactctagttaggacagacttgtgcttttatcctgactaaaaagttaaatatttaagtcacatacatggtaaagatctaagtttcattttccacatggatgaccaggaacctggtcttgttggagctggcataggaggttctactgtcttgtcgtccactcttgtccctcccttctgttatcaaagttaaagcgcctcttcactcaaaag

SEQ ID NO: 215204 - DNA, 559 bp, Homo sapiens
aaagatttgaacaaggtgaacaatgacactatgtaaaatatgtgccaccatgcctggcctctgctagtcctatattctctagagttctttttttggtagccaatctgtcattatgcctttgccctgtcataattagtttttttttttttaaattttaaatttgacactttacacatttgagtggtttatgtctcctgtttggactctgacaaatacagaattgatgctaggaagggtcctgggagatagacccacacaactgggatttgggcatagatttgggtatccaaggggcagygctgagctccttgccaatgggaaattggatgctggtgatttccaggaagtgacctcataatgactcaagctaccacttactgttgattgtgatgaaatgccagctaaggcatatgccttgggagctaagtggctgctgcacttgaccactatgaagactggtgtgggaagaatccttttggattctccagcctgtgttgcccaggctggagcacagtggtgtgatctgctcacttgagcagaggcccctaatccctgggtc

SEQ ID NO: 215205 - DNA, 513 bp, Homo sapiens
gagtggtccctgctggttgcggccaacacttgttctcagggccaggcctagctcgtcattccacactcagtgttttccaaagtgggaaaatgcaccttcttgagcaaaccrtcaactcctatccacaaatcaagccctggtccgggggaaggactcagggatggaaagctgggatgggggcactggcctccttctggggcgagaccagggagagggccagggtggctcacagagatactgtttggggggaatgagtatgttagacttagatggcctctgctgtgtctggtttttaaaaatctcctttcacatttgattctttctttttcctttttaactcctcctctccacccaccccattctttccatgattcttgatccagagggtgacaagaatcagctaattcagcggggctgatgggactgatcccccatctctgaggcagcagctgctccatggtcgggaagtattaattaattaattaaatcaatcccttggctttcaggctgggc

SEQ ID NO: 215206 - DNA, 551 bp, Homo sapiens
gcaatgttacccaggtggtcattctgccacagggcagaaattgtctgacctgaaaattcaagagagatcagtgcaaataataatgaacccaaggtgtgtcccccgtccctaagagaaagggcccctagaattttggctgcaagagcctaggcattctctgggactaatctccctcaaaaatccataaccaggagatttaaaatatcttttttagtatcttcttaataaaataaaaagttcattgctttgccattcacattaagcttttgctttagcaaatccattgaaaggacttttttcttcaagrcatttacacgaaattgtgttgatgtgataacagagccctaaatattttaaatcaatcacagttgatgtggcagcttaatctacttagtgttgttccctggaaggtttatatgctgatgcttagatttctgaggctgggagcacaggagccctgaggattcttgcttccttttttaataatgggaaagtaaactttgatgatcgcttttgcctactctgtgacttaactgtttcaattccaaaca

SEQ ID NO: 215207 - DNA, 472 bp, Homo sapiens
atttatcccaaactgcaagagtttgatcacaccaaccagcatacacaaaagagtaggccatgttgcatatgggatacaaaggatatttttgctgcttgtctgtatcttggaaagatatgatatgaacccatggaaaggtaagtcatcctaaatatggtcgtaacaaaatatgatctcctgcgatgacctcaaagaatgaaaatatgccacaggcagagactaagatcaggagcaattygctcctctgtcagagtttcaatcccctaagccataggtggagaatgaataacttttatcagagcaatgtctttgctagcctttgctagctactagagagctcatgacttcatgacttcgttctctttttatcagtgtcatctaaaatcttgaaaatccgcagaacagggacactcagcctcttgctcaacacaagctcagcccctgacattcttctaagacagcaaggagacca

SEQ ID NO: 215208 - DNA, 422 bp, Homo sapiens
tcaatgaccctgtgaaatgggtagtaaaagaaataatcttctatttgttaagttctttacaatttgaaaagcacatttcttttttttttttttttttttgagatggagttttgttcttgtcacccaggctggagtgcaatgacacaatctgggctcactgcaacctccgcctcccaggttcaagcaattctcctgcctcagcctcttgagtagctgggattacaagcgccaaccaccacacccagctaatttttgtatttttagtagagacggggttttgcaatgttggttaggtgggtcttgarctcttgacctcaggtgatccacctgcctcggcctcccaaagtactgggattacaggctttgagccacggtgcctggcctgaaaagtacatttctaattacattataacagttgatga

SEQ ID NO: 215209 - DNA, 510 bp, Homo sapiens
ctatgaatccataataacaaacaagatcatgtcttttgcaagaacatgcatggagctagaggacattatccttascaaagtaacacaggaacaggaaaccaaatactgcatattctcatttgtaagtgggagctcaatgatgaaacacatcgacacacagagggcaacaacaaacactggggcctaccaggttggagggtgggagtgggagagaagcagaaagaatagctattgagtactaggcttggtatctgagtaattaaatgatctgtacaacagactcccatgacacaattttacctatataaaatccagcatatgtacccttgaacctaaaagtttaaaaataaataaaataaaataaagataaagttagaggttgaaaggccacaattttttcaaataataagggctcactattcagattattagcactctgggaaataaggccagtaggcatttcaaaattaaaatttgaggaaaaatgtttgaagtttaataaaagatgtc

SEQ ID NO: 215210 - DNA, 510 bp, Homo sapiens
ctatgaatccataataacaaacaagatcatgtcttttgcaagaacatgcatggagctagaggacattatccttagcaargtaacacaggaacaggaaaccaaatactgcatattctcatttgtaagtgggagctcaatgatgaaacacatcgacacacagagggcaacaacaaacactggggcctaccaggttggagggtgggagtgggagagaagcagaaagaatagctattgagtactaggcttggtatctgagtaattaaatgatctgtacaacagactcccatgacacaattttacctatataaaatccagcatatgtacccttgaacctaaaagtttaaaaataaataaaataaaataaagataaagttagaggttgaaaggccacaattttttcaaataataagggctcactattcagattattagcactctgggaaataaggccagtaggcatttcaaaattaaaatttgaggaaaaatgtttgaagtttaataaaagatgtc

SEQ ID NO: 215211 - DNA, 510 bp, Homo sapiens
ctatgaatccataataacaaacaagatcatgtcttttgcaagaacatgcatggagctagaggacattatccttagcaaagtaacacaggaacaggaaaccaaatactgcatattctcatttgtargtgggagctcaatgatgaaacacatcgacacacagagggcaacaacaaacactggggcctaccaggttggagggtgggagtgggagagaagcagaaagaatagctattgagtactaggcttggtatctgagtaattaaatgatctgtacaacagactcccatgacacaattttacctatataaaatccagcatatgtacccttgaacctaaaagtttaaaaataaataaaataaaataaagataaagttagaggttgaaaggccacaattttttcaaataataagggctcactattcagattattagcactctgggaaataaggccagtaggcatttcaaaattaaaatttgaggaaaaatgtttgaagtttaataaaagatgtc

SEQ ID NO: 215212 - DNA, 474 bp, Homo sapiens
atagaaagcacagaaatagaccaactgttctttaacaaaagagcaaaggcagtacagtaaaacaaatatagtattttcaacaagtaatgctggagcaactggatatccatatgctaaacaaaattaatctagacatagacattacactcattataaaactaactcaaaatggattacaaactaaatgtaaaatgcaaaactataaaactcctagaagctaacataagagaaaacttagatgacccttggcatggtgataaatttctagctacaacaccagaagcacaatctatgaaaaaaaattgataaactgcactttattataaacatctgaaatttatgctctgtgaatgaccatgtcatgagaataaraagacaagctacagactggaagaaagcgtttgcaaaacacacatctgataagatattcatatacgatgaactcttaactcaaaataagaaaacaagctacct

SEQ ID NO: 215213 - DNA, 532 bp, Homo sapiens
tgaaaatttaaacaactttgagataacactacacatccattagaatggtaggtaccaaaacctagaacactaacaccaccaaatgctggtatccacacctatagaatstataaaaccaagagtaaactctaaattcaactatggacatggggtgattatgatgtgttaatgtaggtatatcaattgtagaagatgtaccatcctagtggggataatagagtaagctatgcatgtgtggggacagggttatatgggaaatctctgtatttccttctgattttttttctgcgagtctaacaccacttggaaaaaaatgtcttaagaaaattttaattgctcattactaaaatttaagaaagcaattgactttgtatactaaccttgcatcctacaaccttgctataatttcttattagttcaagcagttttgttgttgtgcattcttcaggattttttatatagactgtcatgtcatctgcaagcaaagccagctttatttttctttcctaaactgtatataatacttaacttt

SEQ ID NO: 215214 - DNA, 595 bp, Homo sapiens
gtcatttgtaacaacgtggatggaactggaagtcattatgttaagtgaaataagccaggcacagaaagacaaacttcacaagttcttacttatttttggaaactaaaaatttaagtaattgagcccatggagaaacagagaagaaggatggttactagaggctatgaatgatgcaggggggtgagagatagtggaagtgataaatgggtacaaaaatatttagacagaataaataagacctagtatttgctagcacaacaggtgactatagttaaaaaaatttaattatatattttaaaataactaatagagtgtaattggattatatgtaacacaaagaataaatgtttgaggtggtggataccctattttacatgatatgattgttaaacatatatacctggattaacatatctcatataatccgtaaatayataaacctactatgctcccacaaaaattaaaaattaaaattaaaaataaaaaaagtacacatagaaagctgcacaaagtctgtttgtatgtaagcatctcaaatattttcctgtaattttaatgtataaaatgggagctttataggaggaatttcaggttc

SEQ ID NO: 215215 - DNA, 635 bp, Homo sapiens
aactcttccaacctgtgcctgttattcagttcaaaagttgcttccacatattcaggtatctttatatcaatgccccacttctcagtaccaattttctgtattaggccatttttgcattgctataaagaaatacctgaggctgggtaatttataaagaacagaggtttagttggctcatggttctgcaagacgtaaaagcacagctccagcatctgcttctggtgaagatctcaggaagcttaaattcatggcagaaggtgaagggggaacagatctcacatggtgagagaaggaacaaaagagtgagtggagaggtgccacacacttttaaacaaccagatccacatgaactcagagcaagtactctcaacaccaaggggatgccgctaagcsattcatgaggaatctgcccccatgatccaatcaccacccaccaggccccatatccaaaactggggattatgtttcaacgagatttggagtgggcaaatacccaaaccatatcaccattcatttcacctaattcctcaattaatctgaggaaattaataattttgtcagtaaaatgaagagaaaaatagtagctacatccttggtttgctgtgaagtttaaatacgttaacatatataaagac

SEQ ID NO: 215216 - DNA, 635 bp, Homo sapiens
aactcttccaacctgtgcctgttattcagttcaaaagttgcttccacatattcaggtatctttatatcaatgccccacttctcagtaccaattttctgtattaggccatttttgcattgctataaagaaatacctgaggctgggtaatttataaagaacagaggtttagttggctcatggttctgcaagacgtaaaagcacagctccagcatctgcttctggtgaagatctcaggaagcttaaattcatggcagaaggtgaagggggaacagatctcacatggtgagagaaggaacaaaagagtgagtggagaggtgccacacacttttaaacaaccagatccacatgaactcagagcaagtactctcaacaccaaggggatgccgctaagccattcmtgaggaatctgcccccatgatccaatcaccacccaccaggccccatatccaaaactggggattatgtttcaacgagatttggagtgggcaaatacccaaaccatatcaccattcatttcacctaattcctcaattaatctgaggaaattaataattttgtcagtaaaatgaagagaaaaatagtagctacatccttggtttgctgtgaagtttaaatacgttaacatatataaagac

SEQ ID NO: 215217 - DNA, 635 bp, Homo sapiens
aactcttccaacctgtgcctgttattcagttcaaaagttgcttccacatattcaggtatctttatatcaatgccccacttctcagtaccaattttctgtattaggccatttttgcattgctataaagaaatacctgaggctgggtaatttataaagaacagaggtttagttggctcatggttctgcaagacgtaaaagcacagctccagcatctgcttctggtgaagatctcaggaagcttaaattcatggcagaaggtgaagggggaacagatctcacatggtgagagaaggaacaaaagagtgagtggagaggtgccacacacttttaaacaaccagatccacatgaactcagagcaagtactctcaacaccaaggggatgccgctaagccattcatgaggaatctgcccccatgatccaatcaccacccaccaggccccatatccaawactggggattatgtttcaacgagatttggagtgggcaaatacccaaaccatatcaccattcatttcacctaattcctcaattaatctgaggaaattaataattttgtcagtaaaatgaagagaaaaatagtagctacatccttggtttgctgtgaagtttaaatacgttaacatatataaagac

SEQ ID NO: 215218 - DNA, 563 bp, Homo sapiens
gtaaggtgctcaaacaactatctaggaaaaaaatgtaataatccgatttttaaaataaactaaagatctgaatagacatttttcaaaagaagacatacaaatggcaaacaggcatatgaaaagctgctcaacatcatggatcatcaaagaaatgcaaatcaaaactacaatgagatgttatctcaccccagttaaaatggcttatatccaaaagasagcattatataacaaatgctggtgaaaatgtggagaacaggaaatccttgcacactgttggtggcaatgtaaattactacaaccactatgaagaagagtttggagcttcctcaaaaaactaaaaattgagttaccatccagcaatcctacttctggtatatactgaaaagaaaggaaaacagtacatggaagagatctctgcactcctatgtctgttgcagcactgtttacactagctaagatttggaagcaacccaagttccatcaacagatgaaaggataaggaaaatgtgatacatatacacaatagagtactactattcagccccaaaaagaatgagttcctg

SEQ ID NO: 215219 - DNA, 621 bp, Homo sapiens
gatgataatttctgctgacttttgctgggtcatcccgtgtagctgaagctggagccaatgactccatcaaaactgaataccaaattgtgtgccatcctgggatttaacgattaaattctgacaagtgttagatgtggagtcctatttagggaaaaggagttaggctggtgggagtaggggagagcaaaaagagaaagcagataagctatgagtctgcctttcttcatgatacaggacacgtagccctcctgtgcaaataactcagaatcttcctrtgcccgacttatcaacagcccctcggctgatagaaaaatccaagttagctcactgcaacactggcattattagtacaaagccctctgcagcacacagcacagcaccattctataaaatccccagcaagcctttgtctccttgcagtcagctcctttcttgctgacctgtttgttgcacccttacaatgtattttcatactttctctaataaatctgcctttcctaacctaaaattgtctcggtaaattctttttatacatatatatgcttttttttttattatactttaagttctagggtacatgtccacaacgtgcagttttgttacatatgtacccacaccacc

SEQ ID NO: 215220 - DNA, 627 bp, Homo sapiens
gtgggggcgatgctttggccacaaccttgtgatttaaataaaaagatggtaccattagacatggtttatctgaagccgagcttaaagtctccttgctttttaaaaaaaaaaaaattttttttttgaaataaaatccaaactctttaccatggatttcaacggactggcccctttcccaattacccaacctcatttcacgtcactcccttcatcactcactccattttggccacagaggcatttcacttccccaaatacacacattttctttttaccttgggcctttgcctctcctgattctctgagtggaaggcttttcctttcgctgccacatggctgtctcattctcagcctttaggtctcarcttaacagcttttaataaatatcacttcttcagagagtccttctctaccaacttcatctaatgtaagccaactactacctgtcttggcattctgttacagcaccttgtaacaggttcccgtggcttagcataatttgtaattttttcttatctgacccttgctaaactgtaaatgccaggggggtggcctgtttccgtgttttgccctatgctatacctagaatcttgcatattatcctttatattagtttgttagggctac

SEQ ID NO: 215221 - DNA, 589 bp, Homo sapiens
ttgttggataaacaaatgtatgtgcatttctgagaaaccatgcagtaaagaaagctgtttaattatcawtcccaaacatgtgtatctacaaaaccacatttcaaaacataatactgagtaacatctcactgaatacattttggaattccatggatgtaaggtgcagtcctaacttacatgtgctttcagcctagttggggagaaacataaacaaataattcaatgtaacttgataagtgataaaaataggtgtatatgagggatgctataacaggacaggataaggccattttatctaaacaggggcctctgggaaggcagcttccaggaagaaattcctgattgtgctactacaaaatatgcttttgtaactttggccattatatagatctgccagtcattttaagttaatagcgttcactgatgttttatggagtagaataagacttcctactcttgattttaaaaaaaaatggaaaacagaaaaatcataatttaggagcccctttgataaaagcaagatcaaggagaagaccaatgttatttagtccaataatgccgagggtgattattttgtaagaagaagttc

SEQ ID NO: 215222 - DNA, 589 bp, Homo sapiens
ttgttggataaacaaatgtatgtgcatttctgagaaaccatgcagtaaagaaagctgtttaattatcattcccaaacatgtgtatctacaaaaccacatttcaaaacataatactgagtaacatctcactgaatacattttggaattccatggatgtaaggtgcagtcctaacttacatgtgctttcagcctagttggggagaaacataaacaaataattcaatgtaacttgataagtgataaaaataggtgtatatgagggatgctataacaggacaggataaggccattttatctaaacaggggcctctgggaaggcagcttccaggaagaaattcctgattgtgctactacaaaatatgcttttgtaactttggccattatatagatctgccagtcattttaagttaatagcgttcactgatgttttatggagtagaataagacttcctactcttgatttwaaaaaaaaatggaaaacagaaaaatcataatttaggagcccctttgataaaagcaagatcaaggagaagaccaatgttatttagtccaataatgccgagggtgattattttgtaagaagaagttc

SEQ ID NO: 215223 - DNA, 522 bp, Homo sapiens
aggattaggccaaaaagacaacatgaggtaagttatgctacattcataaagccacaaaagtgggtgtgggcaaaccactgaagtaagtaggtaagcagtttccaagttcttagtcaacatcatagaattggttctcttgagcaggcatggtgacacactcctgcagtcctagctactcaggaggctgaggtgggaggattkcttgagcccaggattttgaggttatagtgagctatggtagtgccactgcactacagcctgggaaacagagcaagaccctgtctcttaaaaaaatagaattagttatctttgttttcttgcttattttgttttgcaataattcatgctttataccttttagtgtataaaaacatggatacacttctgctcaaataaattaattctcccaactccacagactattctggcagtaataagttctgttgccaaaggaaatatggaagggtgaggatacacatcaggagagggacggagaaagcatctaatacatatcagtagagt

SEQ ID NO: 215224 - DNA, 561 bp, Homo sapiens
tgatccaagtatcccattttatagacaggaagactgagactcatggcagatgattgacttatgaccacatagaagatttgtgaccaagtgtaaactagaattcagctttcttctccggagcatttccctctatggctcacatcccttcaaatggttagatgtggaggaaaagctgcagaattgaagctcctagacagttattcctaaaactaggattctatctcataagacaggacaaggaaggtttgctcattattgktttttgtttttttaaagaccgagtcttggtctgtcacccagactggagtgcagtggcacaatctcggctcactgcaacctcacctcccaggtttaagcaattcttgtgcctcagtttccctagtagctgggattacaggcatgtgccaccgtgcctggctaatttttgtgtttttagtagagacagggtttcgccatgttggccaggctggtcttgaactcctgggctcaagcaatccacccacttcagcctcccaaagtgctagaattacaggcacgagcctccaacccagcctgctcatt

SEQ ID NO: 215225 - DNA, 561 bp, Homo sapiens
tgatccaagtatcccattttatagacaggaagactgagactcatggcagatgattgacttatgaccacatagaagatttgtgaccaagtgtaaactagaattcagctttcttctccggagcatttccctctatggctcacatcccttcaaatggttagatgtggaggaaaagctgcagaattgaagctcctagacagttattcctaaaactaggattctatctcataagacaggacaaggaaggtttgctcattattgttttttgtttttttaaagaccgagtcttggtctgtcacccagactggagtgcagtggcacaatctcggctcactgcaacctcacctcccaggtttaarcaattcttgtgcctcagtttccctagtagctgggattacaggcatgtgccaccgtgcctggctaatttttgtgtttttagtagagacagggtttcgccatgttggccaggctggtcttgaactcctgggctcaagcaatccacccacttcagcctcccaaagtgctagaattacaggcacgagcctccaacccagcctgctcatt

SEQ ID NO: 215226 - DNA, 629 bp, Homo sapiens
ttagctcactattcataattaatcagctgaaaataacaaagcaaaggggaactaaagaaacatcaaaaacactccaaacttcaaaatgttagctaagcaaacagatgaagtccctcctctccagggagcatcagggaacctaacattaactgttggcttctgctactctgtggaggccaagaagcaaagaatactgggggttgaagacggacaggaaactgcctatcttcccccactccatttcctaattaagttctataagctggaagagtttcaatgccccaagatgtatatgtaaaaataggagaagttgggaaaatgaagtacggcctaacttgaatatttatggcaatgagggcaggtaaggcagcatcaacagctcaaaattatagataatggaggcccattttggttaagatcttgaacacggtatccttccccaagtaaatatgaccaacacttattctgtctcaacaataagtcagaaaatargctatagtctgaattctaccactagggaccttggacaaatttttatggaactcaatggctagatccttctgggttctaaaaactaacattcctcctctatatttgacaaaaacatttagaaagagatcataaagctt

SEQ ID NO: 215227 - DNA, 439 bp, Homo sapiens
agagtcatctagttttaaactaaattactcaatttaaatgaagatttttaaaaggtaattctaaaattgtraactgtttatccatgaaaatgagcataagatacataattctatcagtactaatgcttgtgttctcattaatattacatttattttattggttctgcgctacacagaaaacctgctgttttcacatacgaccttgctataccaatatactttcgcataatgtcataaacgattctagaaagcaagtcataaaaggctgcaaagctacatgttttcttcagttcccttcacgcttcagaagaataggaagttaattataacacttgatagagtcacttcacttattagaggattagggtatgtgggaatgcaatttagttactctaaataaagtcaatttcaaccccttcttaaatataaggcctgtacc

SEQ ID NO: 215228 - DNA, 551 bp, Homo sapiens
ttcagtcaatccccactctcactgccagccttaggagaaaccactgatttgcttcctgtctattctgaaaatgttatgcaaatgaaattgtataacacatagtactttgcatccatcttctttcatttagcataatatttggtggtcacacctgggcacctagtggcatccagtgggtagaggccagaaatgttacaaaaacatttttacaataaacacaacagcccccacaaccaataattatccattccaatgtgtcaatatgctgaggttaagaaatcctgcactagtgaaatgaataaacgtgtgaattaatgaacaaatgaatcctcttttctgacatgaatttaaggattgttctcactatcctttcaaattcttttaaaaaaagaagagtctctgaaaatatttccatatcccttcccttcccacatttcaactttgtttctctaacaactgtgttttcaaagaacggctcagaatrggagaaataccaggattattgcactggggacaccgatgttctgcacaggctcccttagacataaacc

SEQ ID NO: 215229 - DNA, 589 bp, Homo sapiens
atgcatctttttcctgagccacttcaaggctgcagacatcaagccagttcatctttctatattcagcatgtttgcccttgaaaaatagtccctccaccttttctctccttttaaaaatgatggcagcaggtgggtgtggtggctcacacctgaatcccagcacttgggaggccgaggcgggcagatcacgaggtcaggagatggagaccatcctggctaacacagtgaaaccccatctctactaaaatacaaaaaattagccgggtgtggtggtrggcacctgtagccccagctactcgggaggctgaggcaggagaatggtgtgaacccaggaggcagagctggcagtgagccgagatcgcgccactgcactccagcctgggcaacagagtgagactccgtctcaaaaaaaagtcagctttttgaagagacctagccaggtgtcttctaaatgtcattttttaagttctttttgtcctaaaacagaaacaaatcccactaaggatatgctcatcatactgcatttaaaagtctcttgaaagaatgagctcttctacttagtgaagttaccaatttgatataaacttca

SEQ ID NO: 215230 - DNA, 394 bp, Homo sapiens
gaattctttgtaaaatatgagtgccatagactgtaacagacagcttcatgcacactatgcatttattggtttgtttggaaaatgttggccatcaaattattaataggtttatttcaaatagtttggaaattgttgtacttttgaaaacatgctgttcctgtagattttttgatgagagttatagctgttatatatacataaagataattttcttttcattttaagagaatcctttttatcctaaatcttttattatgtttaaattgttttctgtattattatatgtgcctstgaagcgagtacactttttatctatgatacttacataataatcttttccctttatagctattggtagttctactaagttctcatcatagaaatttttatttgc

SEQ ID NO: 215231 - DNA, 591 bp, Homo sapiens
gaattctagtagctatgggacataaaccaggtttcccctgcagtttgatgtgaatgagcccagcatatctccctttaaagctttcttttttgctgttctgaatcctgacatgttatcaagcatatttaaggtgattcaagagtcatgttcattcagcttactacagcaaagaacatgaggttgatttgagtacattggaaactgctgtgtataaatagtacacacttgggagtgatacactcagggtacagatgaggaggtttcgcctttttattcatttttaaaaattgtatatcttacccaagtgtaattagagtttttaaagtgttgtaactaagtagttttagaatttgtcaattagaactgtagaatatgttgaatatgtatgtgtacatacacaaacacatagacactgttacttgctgataagaatcataacaatgtccactaggaaattttttttttttttgaggtggagcctcgctctgtcgcccaggccggagtgcratggcacgatctcagctcactggacctctgcctccagggttccagcgattctcctgcctcattcttccaagtagctgggattac

SEQ ID NO: 215232 - DNA, 591 bp, Homo sapiens
gaattctagtagctatgggacataaaccaggtttcccctgcagtttgatgtgaatgagcccagcatatctccctttaaagctttcttttttgctgttctgaatcctgacatgttatcaagcatatttaaggtgattcaagagtcatgttcattcagcttactacagcaaagaacatgaggttgatttgagtacattggaaactgctgtgtataaatagtacacacttgggagtgatacactcagggtacagatgaggaggtttcgcctttttattcatttttaaaaattgtatatcttacccaagtgtaattagagtttttaaagtgttgtaactaagtagttttagaatttgtcaattagaactgtagaatatgttgaatatgtatgtgtacatacacaaacacatagacactgttacttgctgataagaatcataacaatgtccactaggaaattttttttttttttgaggtggagcctcgctctgtcgcccaggccggagtgcgatggcrcgatctcagctcactggacctctgcctccagggttccagcgattctcctgcctcattcttccaagtagctgggattac

SEQ ID NO: 215233 - DNA, 663 bp, Homo sapiens
ttactgtttgattttaaaaatgtgttgtattacttttgtaaatattaaaaatgaattttaaaaaccagacctaaagaataggtattctcatttatgacccaaaataaattaatagtkggtttggttccttttgctataatttctccaggtcaataagaatatatgtcatacctggttcaaacatgagacaatgcgttaaaacaaagggcttgcaattcacagaattagaaggcacatacgatgaattgatgttcttggggttggggaacacaaggctctcatttgatgctgtttgaaatgaaataaaataaaatccaagccaagtcaaagtgccacaggtaggaagtgattataaaccagcacttgtctgtaagagtttcacaaatatcacatcacttaatgaccagaagcctgttaattgtctgggtaccagagtattgtatcagataaattcagttctatattatacttcatatatctgatttaaaaacattttttaatagaggtagggtctcgctatgctgctcaggctggtctcaaactcctgggctcaagcagtcctcttgctttggcctctgaaagtgctgggattataggtgtgagccaccatgtccagcctgtgtatctgattctaatgctgtgtataactaaaataaaaaataa

SEQ ID NO: 215234 - DNA, 496 bp, Homo sapiens
ggaaatattgttttattatagccttttcattttctagacaagaaaaccaaggccaaaggtggttaagtggcttgccatgtttatctagagggtgaagctgaatgcaagcctgggtattgaacactatctgatgtcctgtctactataccatattgccccatagacttcattcaagcaatgtcagccagagagctgttttgttcctacattctgtagggaagataatactacacacagtatgtctgggactaggttatccaggctttaacacccttcacagccactggctctggctcatcatccaaaatctgggataccccatgaattactaagtccataagccttgaatttttcactcaaygcctactgggtaaaaaaggtgctgacttttggagatgaattggccaggtttgaaaatgcagctttaccacttagctgcgtgcctttggggcaagaaatttagcccactgagcctccgtctcttacccatacaatg

SEQ ID NO: 215235 - DNA, 496 bp, Homo sapiens
ggaaatattgttttattatagccttttcattttctagacaagaaaaccaaggccaaaggtggttaagtggcttgccatgtttatctagagggtgaagctgaatgcaagcctgggtattgaacactatctgatgtcctgtctactataccatattgccccatagacttcattcaagcaatgtcagccagagagctgttttgttcctacattctgtagggaagataatactacacacagtatgtctgggactaggttatccaggctttaacacccttcacagccactggctctggctcatcatccaaaatctgggataccccatgaattactaagtccataagccttgaatttttcactcaacgcctactgggtaaaaaaggtgctgacttttggagatgaattggccaggkttgaaaatgcagctttaccacttagctgcgtgcctttggggcaagaaatttagcccactgagcctccgtctcttacccatacaatg

SEQ ID NO: 215236 - DNA, 582 bp, Homo sapiens
gggggaaggcaaggaggagcaagtcctgtcttacatggatggcagcaggcaaagagagagagcttgtgcacgggaactcctctttataaaaccatcagacctcaggagacttatttgctatcacgagaacagcacaggaaagacctgcccctatgattcagttacgtccctctaggtccctcccacaatatgcgggcattcaaaatgagatttgtgtggggacacagccaaaccatatcactggtgtaatccatttaaaagtaaaaatataaataatacacatacatttttggacacacaaaacctatgaagagtttaaacaacattttytcccccatagaacttatttgttccatgctaatatacaaaccaaagtgacccattaattagtaacatatagaaactgggagatgtaaatactttcagagaaggctttcaggatggccaggaaaacaatacttgtgtgctcctgaaatttcactgtatgtaatgactttgtaattccttttatttcactgaaccaatgtgatgttctatattaagaattcaatctgttgtgatattattgcataggaatattca

SEQ ID NO: 215237 - DNA, 522 bp, Homo sapiens
agaattcaatctgttgtgatattattgcataggaatattcatcagattcataagcttagacacgattaagtccattctcttcagagcctttcagactccattttcmtattaactcatccctattgtggcatttataccttagaaattactttttattttgatagacttaaaagagctgtttttattattcttcccatggtgccatttatttcatcaacaagaatcataaccttcgttttgtgttttctcttctgttactttggttgatgtgtgagacctagtcattgagttcctgagggtcgtgtggggtgggtggctttgcttttgtggccactgatatgcccttctgcgggcttccattcacacatggatttatctaagtcccttatgccacaatagcctggaaaaatcttaattttatggtaaattatttacaaagaagaggcacctaacaatttcaagtctgtataatggtgacaaagaaaaagaaataggaaatttcattttttcaatgtgccttct

SEQ ID NO: 215238 - DNA, 632 bp, Homo sapiens
caatttttcataagctcaaatactttaraattgtaaagtctctggctatcgtcagcctggcaaggagaaaaaaatgaaggaagggggttggactaaatctaagtcagcggttttcatctgtgttaatcagacacccaggttccacagagctgcctggatagctgccagaatcaagcagtaagagaccttcaggctgtggctccagtccccagctccaaccctgcttaactcacagcagctctttcattatctgttttatacgtgagttccaagtatgatcacatctgaaaatttgtaccattaccctaagaaaaaagttcaaaaaccattgttaggtgactttttaaggtcctcattagctctaaatttttaatcctttggactctagtaatatagtaacagtattagagaaaagaaatgtctagtttagacttctacttattacgtgcatttttagatcagttacggctctgacaacttgaaaagtctgaatgagtttagggtaaaatacagaaaccattctgggtttccagcagtcaacagtacagtgtaataaacctataaaagcccagaatatttgtaatgaagttggggaacatttctaacacaacacactttccgaagtccataag

SEQ ID NO: 215239 - DNA, 431 bp, Homo sapiens
atcaggaactaagaagtagaattattttacctaatattctatttacagaattttatttccsttcctggaaacttgtatttagtagctttggaggttctcttttccaaggaaggaacatttctttcaagaaatatagctatgtttccattaaatttggacctgaaattgcacccttgctatttttagctcctaatgccattgacctaactggcaataaagagtttaactatactgaatggattgattaattctgattaacaaaggaaaattaggcaagtaggcctagttggaatccaggagatctgctgtggagacttttagcacttatgtttcccataaagagccaccaaataaagacagtatcactagggactttgatcctatgaaatgaagatttgggtcatcccatgagacaataattcatgtactat

SEQ ID NO: 215240 - DNA, 431 bp, Homo sapiens
atcaggaactaagaagtagaattattttacctaatattctatttacagaattttatttccgttcctggaaacttgtatttagtagctttggaggttctcttttccaaggaaggaacatttctttcaagaaatatagctatgtttccattaaatttggacctgaaattgcacycttgctatttttagctcctaatgccattgacctaactggcaataaagagtttaactatactgaatggattgattaattctgattaacaaaggaaaattaggcaagtaggcctagttggaatccaggagatctgctgtggagacttttagcacttatgtttcccataaagagccaccaaataaagacagtatcactagggactttgatcctatgaaatgaagatttgggtcatcccatgagacaataattcatgtactat

SEQ ID NO: 215241 - DNA, 431 bp, Homo sapiens
atcaggaactaagaagtagaattattttacctaatattctatttacagaattttatttccgttcctggaaacttgtatttagtagctttggaggttctcttttccaaggaaggaacatttctttcaagaaatatagctatgtttccattaaatttggacctgaaattgcacccttgctatttttagctcctaatgccattgacctaactggcaataaagagtttaactatactgaatggattgattaattctgaytaacaaaggaaaattaggcaagtaggcctagttggaatccaggagatctgctgtggagacttttagcacttatgtttcccataaagagccaccaaataaagacagtatcactagggactttgatcctatgaaatgaagatttgggtcatcccatgagacaataattcatgtactat

SEQ ID NO: 215242 - DNA, 431 bp, Homo sapiens
atcaggaactaagaagtagaattattttacctaatattctatttacagaattttatttccgttcctggaaacttgtatttagtagctttggaggttctcttttccaaggaaggaacatttctttcaagaaatatagctatgtttccattaaatttggacctgaaattgcacccttgctatttttagctcctaatgccattgacctaactggcaataaagagtttaactatactgaatggattgattaattctgattaacaaaggaaaattaggcaagtaggcctagttggaatccaggagatctgctgtggagacttttagcacttatrtttcccataaagagccaccaaataaagacagtatcactagggactttgatcctatgaaatgaagatttgggtcatcccatgagacaataattcatgtactat

SEQ ID NO: 215243 - DNA, 543 bp, Homo sapiens
  misc_feature (1)...(543): n = A,T,C or G
nnnnnnnnnnnnnnnnnnnnnnnnnnnnnnngtatgtcatgtacccagtaattcaactctagaaatctaccctatagaaatatttacaccagctctcagataagaatgttcatttgagccttgtttctaatagcaaaattggaaataatctgaattgtgatttacaaaaagggagatgactgaataaattactgcacaaatcatataatactaagtagcaattaaaaggaatgaggttaaactatgtgtactgacatggaatgttatccagcatgtagctttaagtaaatggaaaacaagttgtaagtgtacagtataatttcatttttgtgataaatagaaaccaacaagcatgtatgtgcatgtgtttstttatgcttagaaaaagtctagaaggatatttatgatcattaacataggttccttctgaagagtgagactggggtcagagtggaggaacagctcatgtttgtatcgtttgattttttacaaatgcatattaatttcactttttaaatgttttaactactcttttctcctcct

SEQ ID NO: 215244 - DNA, 478 bp, Homo sapiens
tttcttttctaccataggccacaaagtgcttcaaatgtccacttgcagattctacaaaaagagtgtttccaaactgctcaatcaagagaaaggttcaactctgtgagataaacgcacacatcacaaagaagtttctcagaattattctgtctagtttatctgtgwagataataccttttcctccataggcctcaaagcgttgtaaatgtccacttgcagattctacaaaaagagtgtttccaaactgctcaatcaaaagaaaggttcatctctgtgagatgaacacatgcatcacaaagaagtttcgcagaattcttctgtctagtttttatgtgaagatatttccttttcctccctaggcctcaaagcgcaccaaatgtccacttacacattctacaaaaagagagtttcaaaactgctcaatcaaaagaaaggtttaactctgtgagatgaatgcacacatcacaaagctgtttct

SEQ ID NO: 215245 - DNA, 454 bp, Homo sapiens
cccatctccacacacaaaaaatttaaaaattagctgggtgtggtggagtacacctgcagtcccagctacttgggaggctgaggtgggaggatctcttgagcctgggaggtcaaggctgcagtgagctatgattgtgccagtgtggtccagtctgggaaacagaatgagaccctgtctcaaataaataaataaataaataaataaataaatatttaaaaaattaaaaaataataactcaagtatgttcaagaaaaaattcctgttctcagaaagcagtaaagttaagtgggaaaaagaaatagaaatgaattatagtaagcccttggtaatcatgaattaagtgttcagagctcctgtttgaagtttcaagcataaacttacgaatctggagacccaggctatgayagatgacaattttcaatcttgctgaggcccaaaggtgcacagcatgagc

SEQ ID NO: 215246 - DNA, 501 bp, Homo sapiens
aattaatgtatagagcctgggttgattaagaaaatgtgcatctgtaatttayacaagctgtgccaataattttaccatgaggtctgcatacaatgtcacataatagctctgcttgtcaatgcctgtgtgtatgttctcctggggagaaatcgtgggagagtagaaatggaagagaaggcaacagcaggagctgacttcttggaggagtccttccctctaactgtgcggagccaaatgtcaagggcctctgttcgtggaggacaggtgcttgctggctcactttcctctagtgagcgcctttttttagactgatgttggaatgctacgtatttcagagttagcataaaataatgaaaattaccatcacagcgaatgctccctgatcttggggaccagaaactctcctgtatgagctccatgtttaaaataacatgacctccccctatgccaggttgtttatctggaaaaactccctcttccccagcttgtgttatgctttgt

SEQ ID NO: 215247 - DNA, 392 bp, Homo sapiens
ggactctatcttgcttctaacctccaagctgtccttgtttattcctgggtgttggctgaattaactttgagaggaatttattttattacacatatatatatagagagagacgaagtctcactctcttgcccagtatggagtgcagtggcaytatctgggcttactgcacactctgcctcccaggttcaagcgattctcctgcctcagcttccccagtagctgggattacaggtgcatgcccctattataggagttattcagaaattattttaggcgataggataaggggtctttggcaagctgtttttttcttgtaataaaagcagctccagaaatgtttattttctagcagaaaaacggcttgaagggctaggctagcaagtactgatatg

SEQ ID NO: 215248 - DNA, 568 bp, Homo sapiens
cacattgggtacagcgtatactgctctgtagatgggtgcaccaaaatctcacacaccactgctaaagaacttattcatgtaaccaaacaccacctgtacccccaaaactattgaaatartaatgataaaaacaagaaacacagaaaactccataagtttaagtttatatgctttggcattttattttttttagaaagggtctccctctgtcacccagaatgaagtacagtggcttgatcacggctcactgcagcctcgaccttttgggctcaggcaattcgccttcctcagcctcctaaatagctggtactacaagtgcgggccaccatacccagctaatgtttgtattatttgtaaacatagggttttgccatgttgcccaggctggacttgtattcctaggcttaaacagtctttgtttcttggctttttaaagtgctgggattaggttgggcacagtggctcgtgcttgtaatcccagcattttgggaggatgagacggttggatcacttgaggtcaggcatttgaaaccagcctggccaacatggtgaaacccgtctctactaa

SEQ ID NO: 215249 - DNA, 568 bp, Homo sapiens
cacattgggtacagcgtatactgctctgtagatgggtgcaccaaaatctcacacaccactgctaaagaacttattcatgtaaccaaacaccacctgtacccccaaaactattgaaatagtaatgataaaaacaagaaacacagaaaactccataagtttaagtttayatgctttggcattttattttttttagaaagggtctccctctgtcacccagaatgaagtacagtggcttgatcacggctcactgcagcctcgaccttttgggctcaggcaattcgccttcctcagcctcctaaatagctggtactacaagtgcgggccaccatacccagctaatgtttgtattatttgtaaacatagggttttgccatgttgcccaggctggacttgtattcctaggcttaaacagtctttgtttcttggctttttaaagtgctgggattaggttgggcacagtggctcgtgcttgtaatcccagcattttgggaggatgagacggttggatcacttgaggtcaggcatttgaaaccagcctggccaacatggtgaaacccgtctctactaa

SEQ ID NO: 215250 - DNA, 568 bp, Homo sapiens
cacattgggtacagcgtatactgctctgtagatgggtgcaccaaaatctcacacaccactgctaaagaacttattcatgtaaccaaacaccacctgtacccccaaaactattgaaatagtaatgataaaaacaagaaacacagaaaactccataagtttaagtttatatgctttggcattttattttttttagaaagggtctccctctgtcacccagaatgaagtacagtggcttgatcacggctcactrcagcctcgaccttttgggctcaggcaattcgccttcctcagcctcctaaatagctggtactacaagtgcgggccaccatacccagctaatgtttgtattatttgtaaacatagggttttgccatgttgcccaggctggacttgtattcctaggcttaaacagtctttgtttcttggctttttaaagtgctgggattaggttgggcacagtggctcgtgcttgtaatcccagcattttgggaggatgagacggttggatcacttgaggtcaggcatttgaaaccagcctggccaacatggtgaaacccgtctctactaa

SEQ ID NO: 215251 - DNA, 592 bp, Homo sapiens
gggcggtgtggggttgagggataaaagactacacattgggtacagcgtatactgctctgtagatgggtgcaccaaaatctcacacaccactgctaaagaacttattcatgtaaccaaacaccacctgtacccccaaaactattgaaatagtaatgataaaaacaagaaacacagaaaactccataagtttaagtttatatgctttggcattttattttttttagaaagggtctccctctgtcacccagaatgaagtacagtggcttgatcacggctcactgcagcctcgaccttttgggctcaggcaattcgccttcctcagcctcctaaatagctggtactacaagtgcgggccaccatacccagctaatgtttgtattatttgtaaacatagggttttgccatgttgcccaggctggacttgtattcctaggcttaaacagtctttgtttcttggctttttaaagtgctgggattaggttgggcacrgtggctcgtgcttgtaatcccagcattttgggaggatgagacggttggatcacttgaggtcaggcatttgaaaccagcctggccaacatggtgaaacccgtct

SEQ ID NO: 215252 - DNA, 582 bp, Homo sapiens
tgatataaattgaatacttatataaaatactatttttaataaaaagtagcatttgatgtacaactacaggtaagacttgtatgaagtaataatgttattctattgacagaataactttattcacaatattcttatttcaaacaatatcccttttttggctaaatatatgccagccttttggtgaaatattacctgagctcaagagaaatcagcaaaatgaggccgggygcggtggctcacgcctgtaataccagcactttgggaggccgaggcgggaggattacgaggtcaggagatcgagaccatcctggctaacacggtgaaaccctgtctctactaaaaaatacaaaaaattagccgggcgtggtggcaggcgcctgtagtcccagctactcgggaggctgagacgggagactgagacgggagactggcgtgaacccaggaggcagagcttgcagtgagcagagaccgtgccactgcactccagactgggcgacagagcaagactccgtctcagaaaaaaaaaaaaaaaaagaaatcaacaaaatgaacctttattttaccagaagcattttactattg

SEQ ID NO: 215253 - DNA, 582 bp, Homo sapiens
tgatataaattgaatacttatataaaatactatttttaataaaaagtagcatttgatgtacaactacaggtaagacttgtatgaagtaataatgttattctattgacagaataactttattcacaatattcttatttcaaacaatatcccttttttggctaaatatatgccagccttttggtgaaatattacctgagctcaagagaaatcagcaaaatgaggccgggtgcggtggctcacgcctgtaataccagcactttgggaggccgaggcgggaggattacgaggtcaggagatcgagaccatcctggctaacacggtgaaaccctgtctctactaaaaaatacaaaaaattagccgggcgtggtggcaggcgcctgtagtcccagctactcgggaggctgagacgggagactgagasgggagactggcgtgaacccaggaggcagagcttgcagtgagcagagaccgtgccactgcactccagactgggcgacagagcaagactccgtctcagaaaaaaaaaaaaaaaaagaaatcaacaaaatgaacctttattttaccagaagcattttactattg

SEQ ID NO: 215254 - DNA, 582 bp, Homo sapiens
tgatataaattgaatacttatataaaatactatttttaataaaaagtagcatttgatgtacaactacaggtaagacttgtatgaagtaataatgttattctattgacagaataactttattcacaatattcttatttcaaacaatatcccttttttggctaaatatatgccagccttttggtgaaatattacctgagctcaagagaaatcagcaaaatgaggccgggtgcggtggctcacgcctgtaataccagcactttgggaggccgaggcgggaggattacgaggtcaggagatcgagaccatcctggctaacacggtgaaaccctgtctctactaaaaaatacaaaaaattagccgggcgtggtggcaggcgcctgtagtcccagctactcgggaggctgagacgggagactgagacgggagactggcgtgaacccaggaggcagagcttgcagtgagcrgagaccgtgccactgcactccagactgggcgacagagcaagactccgtctcagaaaaaaaaaaaaaaaaagaaatcaacaaaatgaacctttattttaccagaagcattttactattg

SEQ ID NO: 215255 - DNA, 566 bp, Homo sapiens
cagcctggaaaaaaaatgtcctctccacatgaaaaatcaatgttactgtttcaccattgatatattccatttctgacttgaagttacaaactaacttcaacaggaatatttatgtcttactatggagcatctgttatagaycaagcactgtcatgtttgtctgctatgtttatatagaacagcatcctcatgactcaggaagcctccctagtacttacctgaacaaattcaataaataaataaatttacttatgaaaattatgaaaagtgaaagaaagaataactttaaaaaagtcggcttacatagggttctccaattaaaagaacaaagggcaatgttttaactaaataaataaaatataacttaatagactaatagtaaaattacatctaaaaattactttttgtgcactactaaattttataaaaaaaataattgttgtaatccctgaccagctcatataatacttcataaactgtaaaagaaattgtaagaaaaaagaaatgtatggctctaccatgagtaccaggcaagtaaaaacagaacatctgcatggggagattct

SEQ ID NO: 215256 - DNA, 566 bp, Homo sapiens
cagcctggaaaaaaaatgtcctctccacatgaaaaatcaatgttactgtttcaccattgatatattccatttctgacttgaagttacaaactaacttcaacaggaatatttatgtcttactatggagcatctgttatagatcaagcactgtcatgtttgtctgctatgtttatatagaacagcatcctcatgactcaggaagcctccctagtacttacctgaacaaattcaataaataaataaatttacttatgaaaattatgaaaagtgaaagaaagaataactttaaaaaagtcrgcttacatagggttctccaattaaaagaacaaagggcaatgttttaactaaataaataaaatataacttaatagactaatagtaaaattacatctaaaaattactttttgtgcactactaaattttataaaaaaaataattgttgtaatccctgaccagctcatataatacttcataaactgtaaaagaaattgtaagaaaaaagaaatgtatggctctaccatgagtaccaggcaagtaaaaacagaacatctgcatggggagattct

SEQ ID NO: 215257 - DNA, 389 bp, Homo sapiens
aaggctttaccacattcattgcatttgtaaggtttctctccagtatgaactctcttatgttcagtaagggttgagaatgccctaaaggcactgccacattcktcacatttgtaaggttttgctccagtatgaattatcttatgtttagtaagggttgagaatacactaaaggcttttccacattcttcacatttgtatggtttctctttagtataaattctcttatgtttagtaagagttgtggaccgtttaaaggctttaccacattcttcacatttgtagggtttctctccagtatgaactatcttatgtctagtaagggttgaggactggttaaaagctttgccacattcttcacatttgtagggtttctctccagtatgaattct

SEQ ID NO: 215258 - DNA, 377 bp, Homo sapiens
gaattctcttatgtttagtaagagttgaggaccagttaaaggctttaccacattcattgcatttgtaaggtttctctccagtatgaactctcttatgttcagtaagggttgagaatgccctaaaggcactgccacattcttcacatttgtaaggttttgctycagtatgaattatcttatgtttagtaagggttgagaatacactaaaggcttttccacattcttcacatttgtatggtttctctttagtataaattctcttatgtttagtaagagttgtggaccgtttaaaggctttaccacattcttcacatttgtagggtttctctccagtatgaactatcttatgtctagtaagggttgaggactggttaaaa

SEQ ID NO: 215259 - DNA, 462 bp, Homo sapiens
tgtcacacaaacaggcatagggtaagtcctctattaatgttcaaaataggtctacttttaaaaactgatttttttttgagacagagtctcactctattgcccaggctgaagtgcagtggcacaatctcrgctcactgcagcctctacctcctgagttcaagtgattctcctgccttagcctcccaagtacctgggattacaggcgcgtgccaccacacccagcaaatttttctattttcagtggagatggggtttcaccatgttggccagactggtctagaactcctgacctcaagttgatgtgcccaccttggcgtcccaaagtgctgggattacaggtgtgagtcatcacaccccaccatttatacttaactcttgtttgcatcaataaacctatggtaaaattaactttcttaaacaatatgttgtttcacttacagtaacagtttccaagaatctatc

SEQ ID NO: 215260 - DNA, 605 bp, Homo sapiens
gtccaataatattcaggatttaaatacagggtctagcatttctatttcttcttctgtttccctattactgattttaaaaagaaaatatrtagaataatagctcaataatagttatagatagatgggagagatacagaaaggaagtgttaagtgcagttcagagggatttttaatttttgtgtttgtattttattgagacttgtcgagaaactactaaaaccacagggatgggatgtctctagaagcacctgctttaattaaaaaaaaaaaagattttaaggttccaagtatacagcttttttttcccatttatctgcttttggatttcagaaaattgtgagcaccagctctggagaggcagtaggagcaaccaccccaaactctgacctcctttaagcagttctgtcagagattcccgtgtagagtcagactgggacaagattcagcatagggtgaatctgggcaggtttgggacagagaatgggccctaggcttctaatctcaatgctgctgagtagaagcaatataaataataataataacaacttctcttctgtccatgaatagcccttccagaggtggcataaaaactcaggtaacaataa

SEQ ID NO: 215261 - DNA, 570 bp, Homo sapiens
tccagatctattcattttttgccaaagaaccagagmaactcccatcctagtacaaaccaaaaagaatgttctatgaagggagaaacaaaccctggatgagtcactgttcttcctctgaaatgggaacagaattagattttgttataagcctgaccccagcctgcacaggacatcctcaaatgtctcaaaccctcacaaatgagggtgagagtgtcttcactgatcctaggctgatgcccccagagtgatccaggcaggagactcagggtgactttctgggctacagataataagtggaactgccctggtggagctgcagaccagctgcagatccaccaggtggatcaggatgtgatactccttgtccctgatcagctaactctggggtaagagaaaagatgaaaatactctactccagtaacacagtttacagggaggtatagtagtgattatggctctggatattttgtggccctgacctcccactgctaaggtgcttgtttaacttacagattctaccacaggattctgttgacaccagaagcctcttacacagctgtagcaggacac

SEQ ID NO: 215262 - DNA, 465 bp, Homo sapiens
tccctatcaaaatttaagtggcatttttttcaccgtaatagaaaccacaattgtataatttgagtgtacctaaaacaacttcaaataacctgagaaggccgggcatggtggctcatgcctgtaatcccaacacattgagaggccaaggtgggatgattacacaaggtcaggagttcaagaycagcctgaccaacatgatgaaaccccgtctctactaaaaatacaaaaattagccatgtgtgctggcaggtacctgtaatcccagcagcttggaaggctgaggcagcagaatttcttgaacctaggaggtggaggttgcagtgagctgagatcccaccactgcacttcagcctgggtgacagagcaagatttcatctcaaaacaaaaataacctgagcaatgttgagaaagaacaaagctgggggcatcaaaccacctgatttccaacattatctagaggttata

SEQ ID NO: 215263 - DNA, 558 bp, Homo sapiens
agctattaaaagaaagaggaagtcaacttcagttctaaatagggcytgaagcaaggctggtggaagcatttgtccatctttagtctattcattaattcatctgtccattcatttgcttaaatcacttacttttagctgctgggtttccctgagtgaccacaggaaatccaagactcccgttcatccctcaccccatggcctacccatgcatcaccctttctgagtcagctcacacccctccctgactcaagtccttcacagtctttcttctgtccttcttcctggatgtgctccagctgactccacatgtacccctaggactcatttcctggcatccttctcaggtgttgctgttttcttttaaggcttcaatctgttgggcctcaatgtgggctaaatacccttcttgctcattgaaatctccagaacattatccacctctcttccctttaacctcccatcagaccctaccaccatgtgcctggcacagagcagacattcaatacttttttatcaaattaatgattgtcatctgttaccgccctcttcccaccccac

SEQ ID NO: 215264 - DNA, 641 bp, Homo sapiens
cccattattgaatatacactcaaaggaaggtaaatcgttctaccataaagatgcatgcatatgttcatcacagcactattcacaatagcaaagacatggaatcaacctaagtgcccawcaatgatggactggataaagaaaatgtagttatatatatgccatgtaatactatacagccataaaaaagaatgagatcatgttctttgcagcaacatggatgaagctggaggccattatcctaagcaaactaatgcaggaacagaaattaaatactgcgttttctcacttaaaagtgggagctaaacaatgagtacagatggacacaaagaagggaacaacaggcactggagcctacttgatagtggagggtgggaggagggagaggatcaaaaatctacctatcaggtgctatgtttattacctgggtgaaaaaataatgtgtgcccaaaccgtcatgacacacaatttacctgtataagaaacctgcacatgcatccttgaatctaaaatgagagtgaaaaataaataaaaataattttaaaaataaaataggaaaaaagagcatatctgctgaaaacaaaactaaagggaagtataagaatgatgagaatattcttccaaatagagactatcaaaaaagc

SEQ ID NO: 215265 - DNA, 469 bp, Homo sapiens
ttattttgttctcatttgctatgagctagctagctcttaaaacacgatgttgaataggagtggtaagaaaggacattctgtcttgtgtttattttcaggtggaaagtgtcctgattttttaccattaagtgtgttagctgaaggttttgtagatattccttatcaaaatgagaaagttcttcttatttttctagtttctttttttgagagttttatcatgaacrggacttggattttgttcaattatttttctggtcagctggcatgacataatttttaatttgtgtttatgtagtagattacattgactagtatttgaatgctgaaccaaccttgcatacctagaataaatcccactaagcaatggaatataattttttcctatattgctggacttggtatgaattttttggggaatttttgcacctatcttagggatattagtctgtagtttttgtttcttttgatg

SEQ ID NO: 215266 - DNA, 550 bp, Homo sapiens
aggggtcatttttctgtgcagacaacattgcaatctcccagaagtgctgatgaaactgagctctgaagggaagaagaaatctgrgtttccaaggagcagaggtttaagagacgtggagtctgtaggcagacagctttcactgaattcaaatgagagattgaactaggatagtttctcacagaaataggagaaacagactggataaaggaaatgaaataaaaagcaaagtaaacagaactggaggaagaaatgagagcttcaaaaacttcaaactgagaagggcagaggaaaagagaagccacactcaggatccaggtgaatgtggatggtgcccacagttcctctgtctcaatgtcagctctcaggtcagcaccaggagctcagtcatttccatgtgcaagagctgagaccttcaaatctaaaagaggtcttgcaatctgtgcccaaccgtgctcattctgagtggaatgagaattccacactccaacccaaacccagtgagcctttaatggcatattcttaagcggcagacttggattcagggcaggaa

SEQ ID NO: 215267 - DNA, 501 bp, Homo sapiens
gctggctgctagagggccacagcagcattccatcctgatcctgattccaaagccataagctccagcttggtctccagggactcatgacttctatgtccaccccagctcccagccactgaggcacctggtcccatcattacatgtttaaacacttggcagcccagcttcccagggatcatagcccatgaatagggttttctccattgttaaaatatccatagtgcacctatctggaagaattgggattagaggtgaaagaggccgggcgcagtggctcatgcctgtaatccctgcactttgggaggccgaggcgggcggatcatgaggtcaggagatcgagaccatcctggctaacaaagtggaaaccctgtctctaccaaaaaaatagaaaawattagccgggtgttgtggcaggcgcctgtagtctcagctactcagctactcctgaggcgggagaatggtgtggacccaggaggtggagcttgcagtgagccgagatct

SEQ ID NO: 215268 - DNA, 592 bp, Homo sapiens
caacaacgatgaaacgggtgcgtttaacacactgacagcttttaaaatgtgccctgaggcaggtggctgagcttatgtgtgatattgatccctccaggggtagatgaggcagcaccacagactgaatgctcacccggcatcagcatcacgcatcctaattctcgaagtcatcattcgagtggggttgtatctactttttaaagatgaggaaatttagtaatgtttttgcagacatggtagagctagtggatggcaggagcccctatctctgctcaagggtgtctgtcttagtccatttagtgttgctataacagaatgcytgagactacgtaatttataaagaaaagagggttttttttttttttggttgggggattgctttccagcaaaacctgaaaagcctgctagacaaattctaaaagagctctaacacttaagaaaagaggttgatttggctcatggttctggaggctgtgaagtccaggaagcatggggctggcttctcatgaggaccttgtgctgcaccctaacatggcagagaagtagcaggggaagcaagtatgtgcaaaaggccagccatgagaggcttcct

SEQ ID NO: 215269 - DNA, 511 bp, Homo sapiens
ttacatttttgaaatatgaatatgattttgccacttttctgtttgaaattcttctatagtttcctgtcactttaatgtcaattcttgatctggcttccatgcgccactcttttgctttcactttacaatctcctcggatttcccaacatgttctttccttttgtgaatcagtccctcttcttgaatgcactttcccactaccacaattaattttgttcggctcctacttaaccttacctttcaaagtcyagatcatttgtcagcctcagcttccctagagagttctccctagccattttctccctagccatgtttagttctatttagctgtctttcccttgtgttcacatacttcactgtttttttctttatctttgattttctgcagtttgaaaatgatatgcccaggtgtaattttgaggaacatttactgtgcttggtgttttctgaactttctggatctgtggtttgttgtctgacttaatttaggataaattctcagtgattgttt

SEQ ID NO: 215270 - DNA, 502 bp, Homo sapiens
tgcaaatctgaaactctatgcccattaaacaactcccctttccccctctcccctcagcctctggcaattgycattctgtttgtttgtatgaatttggctactttaaatatctcatagaaatagaatcatacagtaacagcctgtttatgattggcttatttcacttagcatgatgcactcaaggttcattcacgttgtagcatatgataggatttccttcctttggaatggtaatgatatgatcataaggataatgaataatattacacacacacccccccccacattttgtttgcccattcatctgtagatggacatttggcttgcttcccacctcctggctactgtgctgctatgaacatgggtgtgcaaatatctcttcaagaccctgctttcaattcttatggatatatggaattttggggtcatatggtagttctatttttaattttctgaggaacctcaatagtgttttctatagcagttgcacccgcaatgcttg

SEQ ID NO: 215271 - DNA, 587 bp, Homo sapiens
gtgacatcataccagcagatttacctaagttactgtcagtgtttttggtctcaagttggatggtgggttttcaggcgttcgctatagtttagtaaataaatagataacatagaagaaagccacttgtgtacttcaagcatcaggaagaaaagaagagaagagaagaaagggaaaggaaagaaagaaaggcaaggtcaagaaaagataggctctggtgtcagacagatttgaattcygccattactggttagttataatttctctaaacctcagtttgattacttataaaatggaaattatattaggttaaatcatatgaaattactgatctttgacctttttagatctacaacctacctctctagggtttctgtgaggacaaaatgaggtaaggtccagacctaacaaacaagagttcagtaaacgttgtctattattcttctcttcatctcttacaattgcaagtactctggcaacatttattcacacgaacctacttctcctttctgtaataagtgccctcctatctccatcaaaagtggcaaagaattgatataaccaattcaaatcaaagttagtctttggat

SEQ ID NO: 215272 - DNA, 553 bp, Homo sapiens
agcatatcccatttaccttcttgagtgttattttcactgacttaatagatttagaaaagcctactatatcaatccctgttcctagcctaggccccttcaatgtgttccagacatggttgtaaaaccataactacaccagtcttttacacagagaaaagttcttgaaaaaaaaaaaaaggcattattaatcactttcatgtgggtattcagttttcataaccccacctgctcaaaagacacactcctaaaacaatatcaagaaaattcactatctcacaattcagagtgaacttacttgaatatagtsacaaacactgcagttctccaaccccagcgccagccataacgaatgaagcctcgtgtggcagcacgatgtgcagattgctaaagttaattaaaaaactgtgaggttctaagacaccatcatattttccttattctagaactgcggtagaggaattttagctatggattagtcaggtacacccaaacagatagaaatactagaaaatctctagaaatactattctttaagtattgaggcttacgtaaa

SEQ ID NO: 215273 - DNA, 229 bp, Homo sapiens
gtgtggcaccgccccctgccctccttttgctcctgctttttccatgtgatgtgtctgctcctgcttcaccttctgctgctgtgagtaaaagttctctgaggcytctgcagaaaacaagcagatcccagcgccatgcttcctgtacagcctgcagaactgcgagccagttaaatctcttttctttataaattaccaagtcttatagcaatgcaagaacagcctaacccag

SEQ ID NO: 215274 - DNA, 513 bp, Homo sapiens
cgtttaaaagtgtgtggcaccgccccctgccctccttttgctcctgctttttccatgtgatgtgtctgctcctgcttcaccttctgctgctgtgagtaaaagttctctgaggcctctgcagaaaacaagcagatcccagcgccatgcttcctgtacagcctgcagaactgcgagccagttaaatctcttttctttataaattaccaagtcttatagcaatgcaagaacagcctaacccagactacttggcactgaataatttataaagaaaagaggtttatttagctcatagttggccaggctgaaaagttcaagggcatggccctggcttccagagaaggctttcatgctatgctacarcatagtacagaagttcaaaggggaagcacacatgtgcaaagaggggaaaacctgaggagctcctggctttataacagtcaactctcacgggaagcaatctattccttgagaactaattcagactccagagaacaaggactcactcactgctgt

SEQ ID NO: 215275 - DNA, 499 bp, Homo sapiens
tggcaccgccccctgccctccttttgctcctgctttttccatgtgatgtgtctgctcctgcttcaccttctgctgctgtgagtaaaagttctctgaggcctctgcagaaaacaagcagatcccagcgccatgcttcctgtacagcctgcagaactgcgagccagttaaatctcttttctttataaattaccaagtcttatagcaatgcaagaacagcctaacccagactacttggcactgaataatttataaagaaaagaggtttatttagctcatagttggccaggctgaaaagttcaagggcatggccctggcttccagagaaggctttcatgctatgctacagcatagtasagaagttcaaaggggaagcacacatgtgcaaagaggggaaaacctgaggagctcctggctttataacagtcaactctcacgggaagcaatctattccttgagaactaattcagactccagagaacaaggactcactcactgctgt

SEQ ID NO: 215276 - DNA, 549 bp, Homo sapiens
tcacttcttctcaaggccagagtaatcaagagaccccactgcaaagacacattctcaaggtatagcaacatttagtgcatggtctagagcacagaaggagggaaagcatgttggtgtaataaatcttacattatattttgaatatcaagtggaatatttgcttgtgatcataggccaaattttttaaaaataatactctttgccccattttcttccagaaagttttctgaaggtgaaatttagaaaaacagtgaattcaacaatatgttttttagaaataactcaccacaaaaaataaattggataagggagaagtagagaaataaaaatattatggcaaaaaatctcagctcaggaaaagccctatagtattatgaaaattttctgtctaccaagagaaagaaggaaaaagccagcatttccattgttctgattatcaacatatagaaagctgattgttatgagagacaaagttttcctacacatgasatctaaaggaaccaacagtggacaaattcaatctccaaatcaacacgtttgtttgagggc

SEQ ID NO: 215277 - DNA, 498 bp, Homo sapiens
tgtttgctatcatttctttcctcccaggtgattaaatgcaaaagagaaacagtcatttgatagccacagaagctatttactgaaagtatattcaatcactataaacattatttttacagcaagactagcaaaagatactatgggggatcccataaaacatttttaaaaagaaaaaagtgatggtaccatatatttttatgagggtttcagagtgatctgtatgcagctgtttccccaaagtactgcctgacattgcaagctctggtttggaagccaaccggcataaaactcagttcccaaatggcagagatttcayaggccaaaaaattggttcagggtttgttctgttgtgctactaaggatgattctaggtaatctattgtaatataaacactgaataaatataaagcattttactggctatatggtttaaagaaagaaacaaacaaaaatcttcataatatgtcccccaaattgcaatttttttttcccattgcc

SEQ ID NO: 215278 - DNA, 546 bp, Homo sapiens
taaacagctaggtaaacaagattcttaattgtgacatttcctatgagcatgtggttttgttttcagcacagaagtatacattcagaggatattctgagaattcttggcaataatctgaaatgacttcaacaacttgaacaaattgttcttctccatttgctcaaataattatgtgtccttttggcttatctgtgagagtcctgtttacctttgatgttgctggaatatttctctgatcacgtggtcagagtctttaacttgtgtctcaattttgttacaagtagaagcttattaatatctaaccctgtaggcattgcggaaatatttcaaagactctttagccagcagaagtatgagatattttcacttcctcaaagtaataacaataatagttatcaatattactataaaayagagaaaatgttttggagccagagattgtagaacctgatctacattaaacttctggaagattgactctagttggcccactggagagtctttgttaggcagtaggtgcagatgtgtgcttcctttaatgagcta

SEQ ID NO: 215279 - DNA, 548 bp, Homo sapiens
attggattttaaatgggataacattcacaaagttggaatttggtattgagtttctaggggaggacagggagtatgacttaaggtttactctaaataatgcaaagcattgaaaataatkaatcaaagaaagatgaattaacttaatagaagtcctgtacaactagactaaggaatttgtatccagaaattgatagaaacctactagacttttaaacagtaaacataaaagtggattttattttctaataacagattagaaaaataacaaacacgtgtactgctccccatatgatagatactttaattagtctccttgaaatccttatagtgtctctctgaggtagaccattaacccaggtaatagtaaacgaaaaaaagggcaccaaagcttatctaacttgctcagtgtcaccatataatctttcataaaaccagaccaagaaacccctgagtatctcttgctgatcaggattttgactttatcaaataataaccattgcatctattttataagcaaatatggtaaatgaaaggaaatcagagataaa

SEQ ID NO: 215280 - DNA, 612 bp, Homo sapiens
ttttcctgaggaagctaattcattcagttgctcaagctggcagcatttgactgctccttccaaaataaaaaatgaaaaattcgtttgaatccgtcgataaagtatgagctgtattttggttagaaatcgaagccaatgcatagtttatgttattaattaccctagcgttgaaaatttccttttgttttgtcattcttgactgtgtatattcatgaatttytttacccatattaatttgtagaattaagagtagtatattttgttcatttctattgttttgttatgaatcataattattctacatgcatttttaacctaatttgagtttttagagcttcattattattcaaaaataaaacaaacatgatcaatcttattgatttacagaaaacgtcttagaacttataggtagaacttgcaggtagttatgattattcaacttcccagtttgaaacacgatgtcagccatccatcagcactcattttatgtcttattttcacacacatgcagataaggattttgtattctttttatttcttggttgtggctcagtgtgctgaatcttataagacaaaatttctgtaaacatagaccatactctaattccaaat

SEQ ID NO: 215281 - DNA, 434 bp, Homo sapiens
caggtcgccagcaagccaggatggtcagagcttagacagaacagcaggtgagcagtgatgggcaggggccttgtgggcccaaggaggaggaacagaggctgctctgggatgttggaagccactggagggagggctgtgagcaggggagcagtatactgtgatgtgtgtgatttctgaacgacctgaggctgctgtgcgaagayagattgcagggcgaagtcagggagtgtggggaggactttgggccgccaggctgggagggacttgctgtgtgctgtgtggcagtgtcaaccagacctctctgagccttgaacttgggtggcgaccctaggaataaagaggcctgagcagagtggagagacacagagataaaagcaacaagatttggcagagaggtgagagacagggaaggcccaacagtggcgagcctgagt

SEQ ID NO: 215282 - DNA, 319 bp, Homo sapiens
aggaggatgaagttaatttaagaactagttcttatcttttttagacttatgttaaatgttatttctctttttaaaataaattatcatttaaattaatacagatsaactatgaaaagacctcattgtgaacagtgaggacaaagcttctgtaagcattgattatatgccaaatgatatccctgtgtgaggtagattctatctgatccattttgtagatgaagcctctgtggcttaggaaagttaagtgacatattcaagatcacacagcaactaagtggcaagtgtagactctaatctggctctgtcagcctagtgactg

SEQ ID NO: 215283 - DNA, 411 bp, Homo sapiens
gcaacagctaacatttaatgtgtattgagcatgacccaccaggccctgatttaggtgttttatgtttaatcccatcctgtgaggtaagtgctattactgtctattttacaaatgagtctgccaaggcgcagggggattgagtaacttgcccaaggtaacgtaaataatgaattaggtatagtgatgagattaacaatttatcatgtatattacaaagactattaactgatcaacacrtgtgttgaaaatgcttcccttggtttatcattcgtcatttaatttttttgtagtgggtttttgcctgctaggattgcttgactctattgccatcaaacaaatgggcttttattttatagtttctgcttttgatatcttgatcacctgaagaagaatacataagtaaatataatt

SEQ ID NO: 215284 - DNA, 512 bp, Homo sapiens
actgtccccctcccaacccttcaactgcctcagcagaggcctggctcactcctttctggatcccagcatttggatcaaatcactgaacttaccacagaaaggactgggagctccctggaaatggggttcatctttggacacatggtgttagaccatactcagtaactgcttgatgcatgaatgactaaatgaatgagtgaatgaataaatgaataaatgttgttgcaatggcctactcctgtgaagggagacacggttccacctgrgtctcattctgtcctgagatcacactcacccgtgaagatggactcaatgatcttaagaacaggacatgaggatttgtttctggttgcctgctgcatggcctgctactatatgccatgttcttgtattgagcctctgtgagtacattagggcagtcaatactcacacactgattatctgtgttcatcaaaactattcaatatcttgatatttaaaacagttaagcagagtgtgaacagcaatcatta

SEQ ID NO: 215285 - DNA, 512 bp, Homo sapiens
actgtccccctcccaacccttcaactgcctcagcagaggcctggctcactcctttctggatcccagcatttggatcaaatcactgaacttaccacagaaaggactgggagctccctggaaatggggttcatctttggacacatggtgttagaccatactcagtaactgcttgatgcatgaatgactaaatgaatgagtgaatgaataaatgaataaatgttgttgcaatggcctactcctgtgaagggagacacggttccacctgagtctcattctgtcctgagatcacactcacccgtgaagatggactcaatgatcttaagaacaggacatgaggatttgtttctggttgcctgctgcatggcctgctactatatgccatgttcttgtattgagcctctgtgagtacattagggcagtcaatamtcacacactgattatctgtgttcatcaaaactattcaatatcttgatatttaaaacagttaagcagagtgtgaacagcaatcatta

SEQ ID NO: 215286 - DNA, 408 bp, Homo sapiens
gaattccctcttctagtttgttttaaagagaatgttcagggcaggtgagtaacaaaacagcaatcagctatctaacattcttttctttcaatctcctccagaaactagttcagctctgggtctgcagagctcaggggcctacaacccgaggagacagcctcagaatgaaatgggtaggtggttaggaaggtgaggaggacaacagtaagcatttatctccttcatagcctgtgtctgtagagcctgttgaagaccaccaaatactgcacgatcaatgtcaccrctgttaccgagcctgtttcttccgtctctacaccctttctttcagatctgatgcaatcttatgccagacttccaatctccaggaattttttcttcccttatcaacctgttcacatatgttacacc

SEQ ID NO: 215287 - DNA, 568 bp, Homo sapiens
  misc_feature (1)...(568): n = A,T,C or G
aagcttgactctacctctacctgcccagggactctgcgaggtcacccttcccctctgcctatcactgcaaatgcctcagaagaatcacaagatgcagttacagaaatcttgaggccccctgagtgaaacaaaagaaaaaagccccccaaacataaactgatcccaatatccagaaacctccaacatatagtctttcagaatccttttanattttgatactactagctttccctagggcttaaagggaaatgtcttgggctgtttttttcctaacctctttttggttctctgagcatatttgtattctgggaagctgaaccctgtttagggacttgcacttttaagtcattctatctagactgctcagcagaacttcaaagataaygcatctcatggcatgacagcagcccagcatctaggggaaacaaagccaaaatcagtgcccatagccttctgttctccctctgaatggcttgaaaagccctccctgacaggttgccagcattcatttttacagaattctcttttaaggaaggagaatgttacaagttctttccttaacatctag

SEQ ID NO: 215288 - DNA, 578 bp, Homo sapiens
gtgattcagctgttttcatggtgctaagcagcttgatgttctgtttgcaaagagttcccaccctcacagagttgttcatagggttatagggtgaccaactactaccgggatagaggactttcagtgctaaaacgggaaaagatcacagcaaacttagatttgttgatcacccacttatcacactgcagtcaaattctgctttctgtactttcttatttcctaaatgtgtaaaggaaaaaatttccaaactcatcataatactaggtaagatttattgagggcctatcatgtacagacaactgagttaattggtttamtctttccaataatgctgaattcttctaataattcttaattccaacaataattcttacctccattttgctggccgctaaaaggaggcacagaaaagcaaagtaacctgactgaggtcacagagcctataatggtggagcaaaaagctgaacacaggaatctgagcccaaaataagtctaaaagagggatatccagttttctctacattgagtaactgtcattcctgcaaagcctgcctatggaagtggttcctggaggaaaa

SEQ ID NO: 215289 - DNA, 578 bp, Homo sapiens
gtgattcagctgttttcatggtgctaagcagcttgatgttctgtttgcaaagagttcccaccctcacagagttgttcatagggttatagggtgaccaactactaccgggatagaggactttcagtgctaaaacgggaaaagatcacagcaaacttagatttgttgatcacccacttatcacactgcagtcaaattctgctttctgtactttcttatttcctaaatgtgtaaaggaaaaaatttccaaactcatcataatactaggtaagatttattgagggcctatcatgtacagacaactgagttaattggtttaatctttccaataatkctgaattcttctaataattcttaattccaacaataattcttacctccattttgctggccgctaaaaggaggcacagaaaagcaaagtaacctgactgaggtcacagagcctataatggtggagcaaaaagctgaacacaggaatctgagcccaaaataagtctaaaagagggatatccagttttctctacattgagtaactgtcattcctgcaaagcctgcctatggaagtggttcctggaggaaaa

SEQ ID NO: 215290 - DNA, 461 bp, Homo sapiens
gaattctgcctggctactgccaatgtttactcaaggcccaagctctcttcatttaccctatggtaaatgctgctaggcctgggtctctcccttcagggaagtggttttccctttggctcaggatgagtccaaaatgctgtccaargcctgaaactgaggacctcaagagcccacttggtggtctaccttactgtggccaaggtgcaagacaaagtttcctttactcttccccttcctttcctcaaacagaaggagtctctccccataaccattccagctgggaatgtgctgagtcacaactgaagccagcatggcactgggtctcactcaaggttcacggcatgtactgcctggctaccacttctgaatattcagggcccatgggcactttagtcagcaggtgataaatatctccagtattatgttcttctcttcaaggcagctggttccctcgcggccca

SEQ ID NO: 215291 - DNA, 535 bp, Homo sapiens
agggtgacttctagccaatagtcagcaaaagcaactgatgttcagttttaagagctgtaagaaactgaatagtaccaacaactatgtgagcgggacastgagttcttccccagttgagcctccagataagaatgcaactgactgaagccttgaacatggctgttgagaccctcgacagataagtcaaccaagctgtgcccaggctcctgacccacagaaattgtgagacaataaatgtgtgttgtcttaaacactaaagttgtgataatttattacacagccatagagaatgaatacagcaatcaatggcttctataatttagtaaacatttttagcttctttctacattcacatgtatattgtaaattcctgtgacacagactattctctaaatagtcatacttcttatcttcaaaatgtggatattaaataactcactggtgtatgattatcttcactgtaatggaggataatgaaatgttaacaaagtttttgtgattattaagttacaaaacgcatggaagcacctattac

SEQ ID NO: 215292 - DNA, 581 bp, Homo sapiens
gttctcctcttacagtgtattttctaacagtctaacagattcttgagtctccatgtaaatatgcttcaggtaagacatgtatcttatatctgttacttagaataaaaattactaatgataacttattaaataatattctatkatagttacagttttaaattataaagtttggaaatacaattcttagctatgatgaatctctagtagatctagaaccaggcttcaggtttctgaaactttttttttaaatccatagaccaaaagaaactcaggaataaatcacggctcattctgtgtgggaaatccctagataggctccttccctctgaggcagaaatctgccaggatcttattatttcttcaagaaataataagcataaggaaatcaaacaaattgtaaaagagagttaggaaggtcacatatataccaggaaccataagtatcaggtagtatattttggttttgtttaaattaagtcattgattccaatctctgacaactccatggctgatttatctatgtcctaatcaaagagtaattaaatcatcctctgaagtaaattatcattagttaattatac

SEQ ID NO: 215293 - DNA, 564 bp, Homo sapiens
aacacaaagtttattggagcttaaaaaacagccattcagcaatgttaaatggttcaaggtcaagacataaaaataaattacatttctaaacactagcagaaaataatctgaaaatgaaattaagaaaacaattgcaattacaataacatcaaatacataagccaggcacagaaagacaaatattgcatgttgtcatatgtgggagctaaaaacattgatctcatagaattagwgagtagaatgatggttaccagaggctaggaaggataatggggagagggtgataaagaggggttggttaatgggtacaaaaatacagttagtagaaataagatctagtcagtagcacaatagggggctatctttatcgataatttattgaatatatttcaaaataactacaggattagactacattaaatttaaacaatgtacaaaaatagttctcccaagaagatatacaaatggctaataagcacatgaaaagatgtttaacatcattaaccattaggaaaatgcaaatcaaagccacagtgagaaacctcaaaactacaatggaatacc

SEQ ID NO: 215294 - DNA, 580 bp, Homo sapiens
tgtcagttaagcctattaggtctagcatatagttgaactttaatttttctttgctaattttctgtctaggtgatctgttcattacaaagagtggggagttaaagtaccctactattattgtattgcactctgactctttcttttgctcttttaatgtttgctttatatacttgagagctcctgtgttggattcgtagatatttataattgacgtctttatcattataaagtgaccttcttagtcyctttttatggtctttgattgtagccttttttgtctaaaataagtatagctacttctgctcctttttggcttctagttgcatataataccttttctcatcccttcactatcaatctacttgtgtttttataactgaagtgagtattctttaggcagtaaatagttgggtcttgtttctttatttattcagccattctatgccttttcattggagcattgagtccatttacatttagtgttactattgataagtaatgacttactactgtcatttgttgtttgttttctggttgttttgtatctcatttctttttgtcttgttttttggtaaagtaa

SEQ ID NO: 215295 - DNA, 580 bp, Homo sapiens
tgtcagttaagcctattaggtctagcatatagttgaactttaatttttctttgctaattttctgtctaggtgatctgttcattacaaagagtggggagttaaagtaccctactattattgtattgcactctgactctttcttttgctcttttaatgtttgctttatatacttgagagctcctgtgttggattcgtagatatttataattgacgtctttatcattataaagtgaccttcttagtctctttttatggtctttgattgtagccwtttttgtctaaaataagtatagctacttctgctcctttttggcttctagttgcatataataccttttctcatcccttcactatcaatctacttgtgtttttataactgaagtgagtattctttaggcagtaaatagttgggtcttgtttctttatttattcagccattctatgccttttcattggagcattgagtccatttacatttagtgttactattgataagtaatgacttactactgtcatttgttgtttgttttctggttgttttgtatctcatttctttttgtcttgttttttggtaaagtaa

SEQ ID NO: 215296 - DNA, 567 bp, Homo sapiens
taatcaccactccttctccaaaacttctgtttcttttcttttctttcttttttttttttgagacggagtctcgctctgtggcccaggctggagtgcagtagaccaatctgggttcactgcaagctccgcctccctctttcacgccattctcctgcctcagcctccggagtagctgggactacaggcacccgccaccacgcctggctaattttttgtatttttagtagagacggggtttcaccatgttagccaggatggtctcgatctcctgacctcgtcatctgccaccctcgacctcccaaagtgctgggattacaggagtgagccaccgcrcccgtccccaaaacttctttttctagccattgcttttgcgacaaaaattttaacaaattttggcaacttatttattttatgactattttttagacctatatgtgtcaagtgtcctgcatagtagtgaatcttccttgcatttccttgtcttaacataaagtgaaaatgcatgcaacattagaagaactaaaatatctacatcattcattttcaatcttggctgcattgtagagt

SEQ ID NO: 215297 - DNA, 618 bp, Homo sapiens
tctaatgggaagtactctaattgcatcactattcatttttaaccagctttttagcttaatcattgcatatagatgtgtatgattgaacataaaatataattaagtattcaatgtataattattaataaaaaggaaagtagaacttgacttatactggcccattacttatctttaactttacactattggtatttttttaaagttcaaatatgtaatatattaaaaaattgagttttaggtaaagattaaaagaaattttacaccacatgagatgcgtcaaaaggagaaaaacacttacatttacttatgagtcatcaatgacctttcaaaaaatgtgtttttaaacatctatactgatacttttgcggctaagccacaatcgaggaggaataaagtgtctgaattaacctaatctgtaatttgaagaattataagaatttcatgtaaatgytaatgtctatttctgccatttggataaatttgccattatttcaatgtgctacatcaattcatgactctgggatacaccaggaattgtgtgtgtaaatgtgtgtctctgtgtgcatatttctatgtgggttctaaaatatgaattagaactcttcactataaatcttg

SEQ ID NO: 215298 - DNA, 583 bp, Homo sapiens
aatttgccattatttcaatgtgctacatcaattcatgactctgggatacaccaggaattgtgtgtgtaaatgtgtgtctstgtgtgcatatttctatgtgggttctaaaatatgaattagaactcttcactataaatcttgtggaatacataacttgtcatttcttggattggcttcaattaccataaatgttcatttattctttttattttttagataaacttctgattttttttttttacagacagtgtctgaggcagtgtctaactttggtgaatatcttatgcatgttagactcagggaggacttactcaaaaaagagaagaaaacataattgccaaatgacttaatacaactcccttgacagtatcctatgcattgtttctaaatgtccacagcaaaataataaacaagatttttttagtacattgtaatttctcacaataattattttattgcctttctatgtttagcaattttttcttatttaaattgtttttctccacaaacaattaacctcttctctaactctttttgcccctgaatttatttatggaaagcataatgtgtgttcattttcatt

SEQ ID NO: 215299 - DNA, 583 bp, Homo sapiens
aatttgccattatttcaatgtgctacatcaattcatgactctgggatacaccaggaattgtgtgtgtaaatgtgtgtctctgtgtgcatatttctatgtgggttctaaaatatgaattagaactcttcactataaatcttgtggaatacataacttgtcatttcttggattggcttcaattrccataaatgttcatttattctttttattttttagataaacttctgattttttttttttacagacagtgtctgaggcagtgtctaactttggtgaatatcttatgcatgttagactcagggaggacttactcaaaaaagagaagaaaacataattgccaaatgacttaatacaactcccttgacagtatcctatgcattgtttctaaatgtccacagcaaaataataaacaagatttttttagtacattgtaatttctcacaataattattttattgcctttctatgtttagcaattttttcttatttaaattgtttttctccacaaacaattaacctcttctctaactctttttgcccctgaatttatttatggaaagcataatgtgtgttcattttcatt

SEQ ID NO: 215300 - DNA, 622 bp, Homo sapiens
ttaaattaaaaatgaccctccacttatttatcagtttgttttactaaaatagagtcaaaatagaggaaaacctggcatgggcaagtagtcctcagggacagtctgaaaaaaccattagggctttggaaaattttcatggacttgaatagaggtgaggaatgattatttcaacactaagtctagtgtccatcatatagtgccagtcagttcatgtcaaataaaagagtggatgagtgaacaactgtcagaatgagcaaacacatcggacagcagagcttgagtttaggcagcagtgctatgattcttctttgaagatcatcaatctactttgcctctcagtttccgaataatgtagttgcaaataagcatgaggaagcttaatcatatttatttctgtctttatttatattttatgtaatatatgatatagttagaggagggggcatgaaagtataatacacacccatgaactcaccatccaatctgaagaacctaaggacaagaactggacctctattgcaaaagctacttatgtttgttattcctttatsctgtctttgggcaggggtagccattatacatttaaaaaatagttttactacatatttatgtttttgtaagt

SEQ ID NO: 215301 - DNA, 510 bp, Homo sapiens
actgcattcaggaaaacacagcatcagaacagaactgttttctctaggcagactatttcacaagttgtaaatatattctctaacttggctaactgcctgcccttgaaagggaactataaatattgcttttatactacatttaagtgttttaattcctgtatttgtaacaataatgtttgttgcagtgatgcagtttacatctattataattccatctataactaaagagcttctttattctcacttctttattctagcaaagcccaggcttctgtattcgatcacagattttatgtttgttttccttgtcagaccaagtctgatttgtggatttcctttgaatatgtgccccatrctctgatatgtaagttgttttagactataagtcaattatttggtcaccccttacattgtcccaataacttattttttcccttttttctatagcacagcataaaattttcacattatgcactgcctttcacatatggaccacgatgtattattttc

SEQ ID NO: 215302 - DNA, 572 bp, Homo sapiens
gaattcctgcttttaaaatgatgagtttttaaagcaatgactaaacttattttgttcagtccaacttctttttattcctttttccatgccactgacatcatatttttaagttactgactcaaactttggggctttgccacaatgtggagcaaaggatagggaaaagactaacaatagtctaaatgttaacacctgagttcacagaaaaatgcacacagccaatagctaaggaaatgcatttctttaattgctaaaacaccagaattatgcattttagaaaggtaaagacaaattcatgtgtaattctttattgtcaacatcacaataagaagaaaattagaaaatggaggaggaagttatagactcggartgtggaaatcaggattaaaatgatcagtttcttcccatcagagtgacttcaagtaagtcattagactttcctgaactttagtgtactcaatcaaaaaacagatgtaattatatccattttccttgcctactccaccatgcacatgtatagagttattatgattattaatgttgataataaatttaaaatgcctggaattgaa

SEQ ID NO: 215303 - DNA, 510 bp, Homo sapiens
atctctaacctcttagctttctttctctgcttgtattagagaaacttgctaattgactttccacatctttctgtaataagatatatcaactccactcatcactgggtattatttatgaagactcgctattgtttccccaagaagagaagtgattataaaatgatcacaccttatccatgcaagacccaagagaaaaaagctccaactcatgtctggtgattagcagagtgcttcgtatacataggtactcattaagtaattattgaggaaatgaattgctggcacacaaagcaattggaaactctcactacagcaacttgactatggctggcacatgtcctaattcttcttacaaaaaaatccacggtcctttcactattcttaggaaatgatcatctctcatattcttagtcttctcctctacatggttgtcactcggactcattatacaaagaaacaaagataaagagcrttgcacacaaacaaaacaaaaaaatcagcaaagcaaaa

SEQ ID NO: 215304 - DNA, 591 bp, Homo sapiens
atcggtttagggcctgaagataagaataaaaaggcagaggaagggaaaagtttcttttcttcttgagctgggacatccattttttcctactcttggacatcagaccttctggttcctgggactttggactctccccacttcctattctcagatctttggccttaggctgagggattacgctatcattcccctggtcctcaggacttcacactcagactgaattacaccactggcattcctggttctacagcttgcagatggcatattgtgggacttgctggcctccatggttgtataagctaaattatataataaatattatcttatgtatctatttatcctattgttattgctctggagaaccctggctgaaacagtggtcatatttacttctatctttatgtagtagtacacaacagtatcttgtttcagtgaaaaagcataaagttttacartgtcttcaataaatggttttaggacaactggatatccacatgcagaagaattaaattagatcttcatcttacgccatctacaaaaatcaacacaaaatggattaaagacttaaacataaaacctggaactgtaaaa

SEQ ID NO: 215305 - DNA, 569 bp, Homo sapiens
tgagaggtgggcagcccaccaagatggcttagaaatggcagtgagttatgccacatctgtcctgcctgccctctcctcccggaactcctgggccctaggccctgagcccagctctgtggaccccaggaggatcaggatcccactgtttggccaggagctctgaagagctggtgtgtgtggtaagtgtggatgcacagccgagagcagactgtgggccagggttctggcttggctctgygaggggctagctagtgggtggtacaccattctgccaggtcctggcaaaccctccgtgcagtctctggctaatgtctgtgctctgccccctgctctccccagtttctggcccttacagcagcctctccacccacacccacacccgctgtggaggcgacagggagaagagctgtccttcgtggagggaggcagtgtcagtggaggagtctggggacttactgcccactcagctttcagactgtgatgtgggcacaagacaagaccagaagtcctcatagccactggccccaaagctgtgggtggatttggcgtcacgtggcagctgtggagaa

SEQ ID NO: 215306 - DNA, 477 bp, Homo sapiens
ccgaaatgttagacactatcttttaaagtcagttatttccctgttaaccacattttgaatagccaggtgtgcacttaaacctaagtaagagcctcaaagttaatacatacgtatttttgccagtaacccagaagatttagctaacattaaattatgctcatttgtcaaaaaaaaaaaaaaaaaaaaaaaaaaaacgcaaacgagatcgttttgttttggctgggtttatagttttataaccttctatgccaaaccctaacacctcaaaatatctagcagagacaaatataaaacccagacaaaaatatatgctgacaattctgaaggcatttctatttttacttcaccaataattttaaaactagcytgtttaggaaagttatacttaagtcatgtgaacttgaaaattgcttcgacttatttacttaatttatgagtgctcttttacttatatgccaaaacacaacatataacaaa

SEQ ID NO: 215307 - DNA, 477 bp, Homo sapiens
ccgaaatgttagacactatcttttaaagtcagttatttccctgttaaccacattttgaatagccaggtgtgcacttaaacctaagtaagagcctcaaagttaatacatacgtatttttgccagtaacccagaagatttagctaacattaaattatgctcatttgtcaaaaaaaaaaaaaaaaaaaaaaaaaaaacgcaaacgagatcgttttgttttggctgggtttatagttttataaccttctatgccaaaccctaacacctcaaaatatctagcagagacaaatataaaacccagacaaaaatatatgctgacaattctgaaggcatttctatttttacttcaccaataattttaaaactagcctgtttaggaaagttatacttaagtcatgtgaacttgaaaattgcttcgacttatttacttaatttatgagtgctcttttacttatawgccaaaacacaacatataacaaa

SEQ ID NO: 215308 - DNA, 617 bp, Homo sapiens
cctccagtgggcagtaccaaggcctcccacctgcaatgtcagcgtagaccacatggggaggctggacttctaccaccaccccacagtaatgaggaccaacaaatttttgacaaaggtgcaagagcaattcaatagagaaaatataatcttttcaacaaatgctgctgtagcaactggacatccatgggcaaaaaaccaaaaccaaacaacaaaaaaacccctccagcctaagtcttacacctcacacaaatgtaactcaaaatggaccatgaacataaatggaagacataaaactatttttaaaattttttcaaaaaacataggaaagtatctttggracttagggcttagtaaagagttcttagacatggcaccaaaaggcacaattcataaaagaaaatatcagtaaattagacttcatcaaactcaaaaacttttgctttgaaagagaccttgttaaattgctcggagtggtggctcatgcctgtaatcccagcacttagggaggctgaggtggtagggttgcttgaggccaggagttcaagaccagcttgggtaacatagcaagaccttgtctttataaaaacaaaatttaaaaattagctgggtgtgctggc

SEQ ID NO: 215309 - DNA, 561 bp, Homo sapiens
gtatgacaaaagtagttagtaaactaatatattttgtacatttcgttttaagattcccaggaaagacagtcttctgaaaatttgagcattattgcccagtgggttgatggagatgggaaggtgtaggccagaatgttcatacttggaagactcagtcataactgtttttacatgtgttcactttattcaagacttctgtgcatatagtggacgaattaacttcttacctgaaacatcttatctatgtagatgttcagaattgcctgatgtatgttaagtgtagaggtagtaaaatatcaccttgtaaatatctttttgctaaaattcttgggaagtactgtcttttggaagtggaattgtgaagccacctctgtaagcagtatagtactgtctatacttgttcaatggtttagaaatgggagggaagaaattgcyaaaggtaatatgctagtgtgttcatacttggacatttcacttgccatttttctgtctgttttgtgcattttgttttgctgtgtatgtagagtacataatggacaaatgagtcctaattttgcaaca

SEQ ID NO: 215310 - DNA, 459 bp, Homo sapiens
tagaaacttgaggttttagaaatctgcttcctcactatgattcagaaaactccttatactgacaatacagtcacaggttaggtaaaggtagttgtaggaggggaaaaggaaaaagacagacacaagtttgctctcctactattttactaatcctgtctgttgaaaatggtgatgtcttaagaagtaaaaatctaggttgaatatgaagaatggagtttgcctcacagtttgaaacatgcatttcaaataatttcctatttgatttgarctcactgtagcaaactgatgccaaaagagaaaaatcatttcttccacacattcgctcagagtctgcctggtaatgtgtattaaattctttgtgttttagcttgaaggcacctgtcaccagaccagtttcaggattcatgggtcagggctcaaaccaatttttaatagattttcaaactttttcagacacgc

SEQ ID NO: 215311 - DNA, 533 bp, Homo sapiens
aacctcacataaagggggactactgcacctcatcttctgtttcacaactgttagagagctactctcaagttcctgtaagtcctttctttcaagttagttctgttrgttccttttgatttggcacaacaaatccaatgacataagaacaattaactgtttgcaaatgcacaaacgtcatctattactgggagattcttcagagttggctctactttcccaagggaaacatagtctcctgcctgtagttttacaaggtcctttttatgatcgatcatctgtaaacaaccatcaaactcttcagcatctctaggacataatcacttctgtccatttccatcttcaaataaatcagcttttgtttctgcttcatttctgtagcatcccattgtcacattttagccaccgataagaattctacctctgggatgtggtttttcagtattaaagtatccaccttcctcccagttctttaatttaatttcacagcaaactaatgggactctcacttctgccagtcttgtaatccacacatc

SEQ ID NO: 215312 - DNA, 564 bp, Homo sapiens
  misc_feature (1)...(564): n = A,T,C or G
nntccgttttgactgttattatcttgaaaatgagtaaaacataaccatttgagagagtcatcatatcaatgtaatactgaggtaatactctgtatctggtcttgactctggtgcccagtttagtcacctattcacattcctctttctaaaaaaaaaaaaaaagtccattttattcaattaaagatatttgataaggttttagggttaaataggttaagtttaaattatttctctgccacacatgtctgggttaacacttaatctaataactttggtctcaattttctttctataaaaaggagagtcttcacacaacacaatccccttgaaattttaatgttaaatattctgtagaatagaagcattttgtaatatggttattagaaaataaatttatgtgaacatatttgttgacaawatcaaacctcaactgatgggagactatttataagctttacctgtgccacttggtgttaatatgcagacatttcactgcagaattagtaatgtattttgttaggtggttgtgcgtcacatcctgctcataggtatacatagtgttac

SEQ ID NO: 215313 - DNA, 445 bp, Homo sapiens
tcatgaggggttttatgccctgagccctggacattatgtcagacaagcaagccctgcctcagctttttttcccccaacactcagctttttcctaacagggtaatttataagaggtttaagtgactcacagttccacatggctggggaaggcctcacaatcatgggcagaaggcaaatgaggagcaaagtcatgttttacattgtggcaggcaaaagaccttgtgcaggggaactcccatttataaaaccatcaggtcttgtgagactcattcactacaatgagaacagtatgggggaaatggccctcagaattcaattatctacatctggcccyactgcccttgacacatggggattattacaattcaaggtgagatttgggtggagacacagtgaaaccatatcagtgctactgggggataggcactcctggctgtgctccact

SEQ ID NO: 215314 - DNA, 477 bp, Homo sapiens
gctaaatagtattccactgtatagatatgccaaatattgcttatccagttaccaattagtaaaaattacattgtttcaaatttttagcaatttttgaatgatgctgttgtgactattccyatgtatttatttgatacttaggagtagaattgctgggtcaaacggtaaaacaattaaacattttaagaaactgtccaactatttttcaaattggattaccattttacattcccatttgcaaggtatgagagtttcaattttcccatatgctagccaacatttgttattgtttgtttctttgattatagacatcagagtgggtgaaaaatagtttcctattatgggattgatttaaatttcctggatagataatgatgttgaacatcttttcatatccttattagccattttatgttgtctttggagagatatgtatttaaatcctttgcccattttttaattgggctatttgccttg

SEQ ID NO: 215315 - DNA, 577 bp, Homo sapiens
tgggtctggaggacggtggccctcttctcatagctccactaggcagtgccccagtggagactctctttgggggcttttaccccacatttcccttctccattgccctagtagagattctccatgaggactccacccctgtagcagacttctgcctagacatccaggcatttccatacatcctctgaaatctatgaaatctaggtggaggttcccaaacctcaattcttgacttctgttcacctgcaggctcaacaccacgtggaacctgctaagtcttggggcttgcactctctgaagccatggcccaaagtgtaccttggccccttttacccatggctggaggggctgggatgcagggcacygagtcccaaacctgcacacagcaggggggccctgagccaagcccaggaagccattttttttcctcctaggcctacaggctcatgatgggaggggctgccctgaagacctctgacatgatgaagagacattctccccgttgtcttgatgattaacatttggctccccattacttttgcaaatttctgaagtcagctggaatttctccccagaaaat

SEQ ID NO: 215316 - DNA, 420 bp, Homo sapiens
ctacccttcctacaagcagaggagactgtcccagtggataccaccatcagtattccaccaggcattctgccaggccaccactgatgttcacttaaagcccaaggttttttttttttttggtcagcttatcttgatttctgccaggcctgagacttacccttcaggggggkggactcccctctggtccagggaaggtccagaaatgctgttcaagaggctaagcctagattctgtgaacccagaaggctgctttttgttctaccttactgtgtctgagttgggacctgatttttggttgctgtgatggtgcttttctttgtggagatagttgttaaaatttgggtttcactgggggaggatgaacaatgtaggcttctattccactatcttgctctgatctccttgtcttcaattttgaag

SEQ ID NO: 215317 - DNA, 448 bp, Homo sapiens
tgtgacctcttagccgtactacaaggcatctttgtagatgtaccaaaagatctacacatctggtttgtgcctgaatgcttagtctgcttccttccattgatgtgccaccagtaagcctatcaatttcctctctattcagggctctttagggctctcagtctcttcagcttttacacccatcactatctaagctggcccacatagctgatcatttcagctacattcataccagcacctccatgttctttcacttgcatgactctartatgtgtccagcttcttccacaccaagtaagtttggatatgtttcctttcacctagtccttccagatgatgatttttttttcttttaggaaaaataaagcatcgtacttccaactaggtatattaaaaatttgtgttattcaaaatcaggtagggctagataagatccagatttatttttgaa

SEQ ID NO: 215318 - DNA, 573 bp, Homo sapiens
ctcccaaactattaaaggtaacacaggaggagcttgcagacataagattcagacaggagatggtaggcggaggaggtaaaagyagggaggtgagtggggataaagaaagtcaagagttggaagaaaggacagctctatgtattctgttgccaggatgggtgaatctagccaatgaatgaaacttggctagaaaaaaacagtgctgtgaactgcttcaagccagtgatgcatgggaataatagaaactatatttaagaatgtatcactgaagggaaaatttagtcttactatgaatttattcaccattggttaaccttcaaaattgatggtacgtatagtggtaagtgtatttctacagaatgaggcataattataaaaacaacaaaaagtcctacattgagctatagttttataatgccatttgtagctaaagaaaacaaagaatcgttgtctcacatacacacacacatatacacacacgcacatatacacacacacaatcactggaatctctgaagtcccctgaatagctgaatgcagatttcttctgaatatatactctagcctcattca

SEQ ID NO: 215319 - DNA, 573 bp, Homo sapiens
ctcccaaactattaaaggtaacacaggaggagcttgcagacataagattcagacaggagatggtaggcggaggaggtaaaagcagggaggtgagtggggataaagaaagtcaagagttggaagaaaggacagctctatgtattctgttgccaggatgggtgaatctagccaatgaatgaaacttggctagaaaaaaacagtgctgtgaactgcttcaagccagygatgcatgggaataatagaaactatatttaagaatgtatcactgaagggaaaatttagtcttactatgaatttattcaccattggttaaccttcaaaattgatggtacgtatagtggtaagtgtatttctacagaatgaggcataattataaaaacaacaaaaagtcctacattgagctatagttttataatgccatttgtagctaaagaaaacaaagaatcgttgtctcacatacacacacacatatacacacacgcacatatacacacacacaatcactggaatctctgaagtcccctgaatagctgaatgcagatttcttctgaatatatactctagcctcattca

SEQ ID NO: 215320 - DNA, 573 bp, Homo sapiens
ctcccaaactattaaaggtaacacaggaggagcttgcagacataagattcagacaggagatggtaggcggaggaggtaaaagcagggaggtgagtggggataaagaaagtcaagagttggaagaaaggacagctctatgtattctgttgccaggatgggtgaatctagccaatgaatgaaacttggctagaaaaaaacagtgctgtgaactgcttcaagccagtgatgcatgggaataatagaaactatatttaagaatgtatcactgaagggaaaatttagtcttactatgaatttattcaccattggttaaccttcaaaattgatggtacgtatagtggtaagtgtatttctacagaatgaggcataattataaaaacaacaaaaagtcctacattgagctatagttttataatgccatttgtagctaaagaaaacaaagaatcgttgtctcacrtacacacacacatatacacacacgcacatatacacacacacaatcactggaatctctgaagtcccctgaatagctgaatgcagatttcttctgaatatatactctagcctcattca

SEQ ID NO: 215321 - DNA, 575 bp, Homo sapiens
tgctcttttaccttaaagcaaacaaacgaaactcccccaatttttttaaacatgactcaattaatgtctaagtacttttttttttgagaccgctctgtcgccaagctggagtgtagtggtgcaatctccrctcactgcaacctccgaatccctgcctcagccttccgagtagcttggattacgggcacgtgccaccacaccaaggtaatttttgtatttttagtagagacggggtttcaccatgggccagaatggtcttgatctcctgaccttgtgatacaccctccttgtcctctcaaagtgctgggataacaggtgtgaaccactgcacctggccatgtctaagtagtttttaaaactctaaaatcttaatggctgaatatctaaatatagtataagcagtaacaggtaggtgtggactggagattatgtacttatatgcttcataggaatgttggtaaataggacttgctcttcatgtctatgggccaaactgaccaaaaatctcttcaactctgactttaccagataactatttgaaaaaaaaatacagaattttgttctctatcctagtg

SEQ ID NO: 215322 - DNA, 575 bp, Homo sapiens
tgctcttttaccttaaagcaaacaaacgaaactcccccaatttttttaaacatgactcaattaatgtctaagtacttttttttttgagaccgctctgtcgccaagctggagtgtagtggtgcaatctccgctcactgcaacctccgaatccctgcctcagccttccgagtagcttggattacgggcacgtgccaccacaccaaggtaatttttgtatttttagtagagacggggtttcaccatgggccagaatggtcttgatctcctgaccttgtgatacaccctccttgtcctctcaaagtgctgggataacaggtgtgaaccactgcacctggccatgtctaagtagyttttaaaactctaaaatcttaatggctgaatatctaaatatagtataagcagtaacaggtaggtgtggactggagattatgtacttatatgcttcataggaatgttggtaaataggacttgctcttcatgtctatgggccaaactgaccaaaaatctcttcaactctgactttaccagataactatttgaaaaaaaaatacagaattttgttctctatcctagtg

SEQ ID NO: 215323 - DNA, 588 bp, Homo sapiens
cagtatgatgttggctgcgggtttgttacagatggctctcattattttgagttatgttccttcaatacctagtttattgagaattttatcatgagatgtaataaaacttatcaaaagccttttctgcctctattgagataatcatgtggtttttgtctttacttctgtttatgttatgaatcacatttattgatttgtgtttgttgaaccaaccttgcatccctgggataaagcctacttgatctttgtggattagcattttgatgtgctgcaagatttggtttgccagtattttgttaaggatttgtttcaccagtgttcatcaagcatattggcctgaagttttattttcttcttcttttttttttttaatcactgccaggtgttggtatcagcataattggtggcctcatagaatgagttagggaagagtttctcctyctcaatttttcagagctctttattgcagaccaaagttttgttttgtttttaagaagaatttccacttgttctttataagaatgtaaaattccttttgataagctgtgcggtcaacatcatactagggaaaaagtacattctgaatat

SEQ ID NO: 215324 - DNA, 588 bp, Homo sapiens
cagtatgatgttggctgcgggtttgttacagatggctctcattattttgagttatgttccttcaatacctagtttattgagaattttatcatgagatgtaataaaacttatcaaaagccttttctgcctctattgagataatcatgtggtttttgtctttacttctgtttatgttatgaatcacatttattgatttgtgtttgttgaaccaaccttgcatccctgggataaagcctacttgatctttgtggattagcattttgatgtgctgcaagatttggtttgccagtattttgttaaggatttgtttcaccagtgttcatcaagcatattggcctgaagttttattttcttcttcttttttttttttaatcactgccaggtgttggtatcagcataattggtggcctcatagaatgagttagggaagagtttctcctcctcaatttttcagagctctttattgcagaccaaagttttgttttgtttttaagaagmatttccacttgttctttataagaatgtaaaattccttttgataagctgtgcggtcaacatcatactagggaaaaagtacattctgaatat

SEQ ID NO: 215325 - DNA, 529 bp, Homo sapiens
aaactacagcagccatacagaagaaggacctgactcttgaaagaaaaacaaacaagcagaaagcaacaacaacagcatcaacaacaacaacaaaaggcccctgcaaaaaccccatccaagggttagcaacctcaaagactgaaactagacaaagtcacgaagatgagaaagaatcagtgaaaaaatgctgaaaacccaaaaggccagagtgcctcttctcctccaaatgattgcaacatctctccatcagggctcagaactgggcagatgatcaggtgaacaagttgacagaagtaggctttggaagacgggtaataaaaaactacgataagctaaaggagcatgttctaacccaatgcaaagaagctaagaaccttgataaaaggttagaattgctaactagaataagcagtttagacaacaacatgaatgacctgatggagcttaaaaacactgcacaggaaytttgtgaagcatacacaagtatcaacagccaaatcaaccaagcagaagagaggatgtcagagtt

SEQ ID NO: 215326 - DNA, 584 bp, Homo sapiens
ataatttcacatatattttcttactaattcatcacaacatcccttaaataaggcaatattttttataatgcaagtgttttttatttcaatagttttgggggtacaggtggttttcagttacatagataagctgtttagtggtgatttaggagattttagtgcacctgtcatgtaagcagtgtaccctgtacccaatatgtagtgtcttatcctcaccccactcccagccttcctgtctgagtccccaaagcccattgtatcattcttatgcttttgcatcctcatagcttaactcctgcttacaagtgagaatatacaatatttgcattttcactcctgagttacttcacttagaataatggcctctagctccatccaatttattgcaaaagacattatttcattcctttttaatagctgagtagtgttccatgcagtmtatataccacattttctctatccactcattggttgatgggcacttaagttggtccatatctttgcaattgtgaactgcgctgctataaacatgcatatacatgtgtctttttcatataatgatttcttttcctttgggtagatac

SEQ ID NO: 215327 - DNA, 535 bp, Homo sapiens
aaatctttagtttttcttagataaaattacacacaggcaacacaagcacacttatttgagttgatttagatatgctcaaagctttgcacgttgttatcattaatacctaaataagaaaatatgactgcctaattccaaaaatattaagtggatctatagaaataaacataatgtggaaagattttttttttttagaaattagggataaaaaaggacttgaaaaataaaatgattattttgtccttactattctctacttcaaaatctctcattcartccatgtctactataaactccagttagaaaatttttctaaagtattgcattttactcattgctcaataactttcattggttccccatttcctacaacataaagcttacactcccttaagtgtcagttaagacactctaaaatatggccccatgatacttccaaataatctctttgcttcatgcaagctagtgggttaatttttcccttacatggtgggagctttctccacttcctgattttgtgcctccttacctgaaa

SEQ ID NO: 215328 - DNA, 535 bp, Homo sapiens
aaatctttagtttttcttagataaaattacacacaggcaacacaagcacacttatttgagttgatttagatatgctcaaagctttgcacgttgttatcattaatacctaaataagaaaatatgactgcctaattccaaaaatattaagtggatctatagaaataaacataatgtggaaagattttttttttttagaaattagggataaaaaaggacttgaaaaataaaatgattattttgtccttactattctctacttcaaaatctctcattcaayccatgtctactataaactccagttagaaaatttttctaaagtattgcattttactcattgctcaataactttcattggttccccatttcctacaacataaagcttacactcccttaagtgtcagttaagacactctaaaatatggccccatgatacttccaaataatctctttgcttcatgcaagctagtgggttaatttttcccttacatggtgggagctttctccacttcctgattttgtgcctccttacctgaaa

SEQ ID NO: 215329 - DNA, 491 bp, Homo sapiens
ttcatatgagtctctattcactttgagcacattagaatcctctgccttgaatggtgtcagaaatagaagaatggatttgtcttcaatgcatttcctccataggctcatctaatcccacaactatggacaagtcagggacacacttggctagctaacgtcactgcaaacaactctctctttttttwaaaattatacttttagttctagggtacatgagcacaacgtgcaagtttgttacatatgtatacatgtgccatgctggttggctgcaccacattaactcgtcatttacattaggtatttctcctaatgctatccctcccccacccctccaccccacgacagtcccaggtgtgtgatgttctccgccctgtgtccaaatgttctcattgttcaattcccacctatgagtgagaacacgcagtgtttggttttctgtccttgctgtaaacaactctctgtgtgcctctcctttggctacctggctgaca

SEQ ID NO: 215330 - DNA, 497 bp, Homo sapiens
tacgagtaactgtggagaaagacttatgagatttagtggcccaggtaggaaacctacgaatttctatatataaaataaattgatttaagcattgcttctgagctcaatatccatatatttaggtcttagctaacttcttaaatttctttatactcacctcttctcactggggaaatggagtaaattatgctgatgatgacttaaaaagccaaaaagcwctctgacaatagctgcaggagtgcgagggaaaaagtagtctttgttgtccgattgaatccaaaacactacattcttttaatagagatctaaacacagaaagaatgttgctcccagaaagctgacattgtttttgttctgttctttaaatgcctaacttgatgttgtcaggttaagacagagaggagaacttcaaacagcaacagctacctgccttttcatctttcctcataacttccttctctcctgtgcctctgtattcgttaccttctgcaccagca

SEQ ID NO: 215331 - DNA, 558 bp, Homo sapiens
atatcctggatcattctttagaatgaacattttttgacatgatacttgactatttaattatctgtctttgtgatatgattattcatatccttaactaaaacatcttyaagatttaaaaacaatctcaaagcaaatgggtaaggttcatatcagaggataaataagtggtgttatggtttgaatgtgtcccccaaagtttatgtgctagaagcttgattccccaatgcagcattgttgggagatgggacatttaagtggtgataaggctatgaaggcttttgtgtattagtctgttttcacactgttataaagaaatacccaagactgggtaatttataaaggaaagaggtttaattgactcacagctccacatggctggggaggcctcaggaaacttacaatcatggaggaaggggaagcaggaacattgttaggaaagagagaagagtgtgtgtaagaggaactgtcaaacacttacaaaaccatcaagaactttcaaacacttataaaaccatcaagagaagatagtgagaactcactcaccatcatgagaacagc

SEQ ID NO: 215332 - DNA, 456 bp, Homo sapiens
aaagcaacaccaggcagaactcagctggagcccatggagggattatttagacccagccagaagggaagtgcccatcccatagtcagaacctgagttgtggcaagcctcaccattgttgcctaaagtgctctgggattctaaataaactttaaaagcggtctagggcacarggactgcaattcctgggcatgtcctggtactgtgctgggctcagagccagcagacttgaggggcaagtgacctagtgagataccagcttggtcggccaagggattgcttgcaccacacctcctcaactccaggcagcacaacttgcagctccaggaaagactccttcccttctcatgagaagaggagggggaagagtaaaaaggtctttgttttacaacttgaatactggcttagccagagtaggacagaacaccagcagaattgtgagggtccgatttcaggacc

SEQ ID NO: 215333 - DNA, 582 bp, Homo sapiens
aatgatctcaggcattgaactaaaagaataaaatagatgctaatatgaaataaaggacaaaagagacattacagaaagaaatattttatggccaayataatagtgtatcaaaccacttttagaataactaagcatttctgttaaaaacatgaaaggtcaaacagcatatcttataatgcagaaagaaatccattcaattttaaaattgttcttgcactatccagtgttacttagaggacaaaataactgaggttaatagattttattatgtcactggcctaagtggttgataaaaatatgaatttaaaggaataggatgtatatttcaagcctgtaatgacatgtcatcaatctctgaaatgattttgattccagtttgtcctaatttggtggcagttttttttttaagttgcaattctacatatttttccattaagcaagcgactttcaatttctccattactttaacctcacagtcatcatcaaaaacagtaaatccttattcagcactgacccctttagaatcaattgttacagatgaggcttgccagagtctggaggcaggcagaggggcttgattct

SEQ ID NO: 215334 - DNA, 582 bp, Homo sapiens
aatgatctcaggcattgaactaaaagaataaaatagatgctaatatgaaataaaggacaaaagagacattacagaaagaaatattttatggccaacataatagtgtatcaaaccacttttagaataactaagcatttctgttaaaaacatgaaaggtcaaacagcatatcttataatgcagaaagaaatccattcaattttaaaattgttcttgcactatccagtgttacttagaggacaaaataactgaggttaatagattttattatgtcactggcctaagtggttgataaaaatatgaatttaaaggaataggatgtatatttcaagcctgtaatgacatgtcatcaatctctgaaatgattttgattccagtttgtcctaatttggtggcagttttttttttaagttgcaattctacatatttttccattaagcaagygactttcaatttctccattactttaacctcacagtcatcatcaaaaacagtaaatccttattcagcactgacccctttagaatcaattgttacagatgaggcttgccagagtctggaggcaggcagaggggcttgattct

SEQ ID NO: 215335 - DNA, 582 bp, Homo sapiens
aatgatctcaggcattgaactaaaagaataaaatagatgctaatatgaaataaaggacaaaagagacattacagaaagaaatattttatggccaacataatagtgtatcaaaccacttttagaataactaagcatttctgttaaaaacatgaaaggtcaaacagcatatcttataatgcagaaagaaatccattcaattttaaaattgttcttgcactatccagtgttacttagaggacaaaataactgaggttaatagattttattatgtcactggcctaagtggttgataaaaatatgaatttaaaggaataggatgtatatttcaagcctgtaatgacatgtcatcaatctctgaaatgattttgattccagtttgtcctaatttggtggcagttttttttttaagttgcaattctacatatttttccattaagcaagcgactttcaatttctccattactttaacctcacagtcatcatcaaaaacartaaatccttattcagcactgacccctttagaatcaattgttacagatgaggcttgccagagtctggaggcaggcagaggggcttgattct

SEQ ID NO: 215336 - DNA, 453 bp, Homo sapiens
aattatattctctgtagttgatgacatcatttgtctttgttgttcacaaaagcaaaaacaaatttaatcattctattcgtagtttgtatattactttttgtaagctacagaacatttcaacatccattatttgatttgtttatatcaacaaatcagtgaataagaagaggctgggttatttgttccaattataggtggggaggcaaagtcttagtttagaaaagtaaaytcctgaatgtcacaaacttattgagttacaaaaccaagtctagaatgtagaacattaacttctaggagagtgtttctcatttttaacaaaagaacttaatcgctgattttgaaaaaatgaaacaaaacaaaagcaccactggggatgaattctagaagattagaaacctcttgcattctaatacagagtgtttgtttgtttgtttgttttcttgcctggattgg

SEQ ID NO: 215337 - DNA, 563 bp, Homo sapiens
agagtgtttctcatttttaacaaaagaacttaatcgctgattttgaaaaaatgaaacaaaacaaaagcaccactggggatgaattctagaagattagaaacctcttgcattctaatacagagtgtttgtttgtttgtttgttttcttgcctggattggagtatattgtggtaccatattgtaccaatttaggtaggctaaaagtgtgttttccagaattgcctcccatgcataattcttagttaatgtagctcatctgaaacctcatttgacttatctgacttccaaggaggcacatttttagctccttgttgaaaggcatcagcatgtcttgcagaacacttgcagcatcaaagttggaggcttagagatggtaaagactgatgtgggttcctctctgtcctcaggggttccaccttgtgtttgtgggttccagtttgtcttagcttttaccaacttcatacccatcttcccttttatgcttactggtctgtagaattcaggytgtatataccagcttcacagagactaaataaacagctcacacaatggcattaggtcaaa

SEQ ID NO: 215338 - DNA, 591 bp, Homo sapiens
cctcttgcattctaatacagagtgtttgtttgtttgtttgttttcttgcctggattggagtatattgtggtaccatattgtaccaatttaggtaggctaaaagtgtgttttccagaattgcctcccatgcataattcttagttaatgtagctcatctgaaacctcatttgacttatctgacttccaaggaggcacatttttagctccttgttgaaaggcatcagcatgtcttgcagaacacttgcagcatcaaagttggaggcttagagatggtaaagactgatgtgggttcctctctgtcctcaggggttccaccttgtgtttgtgggttccagtttgtcttagcttttaccaacttcatacccatcttcccttttatgcttactggtctgtagaattcaggttgtatataccagcttcacagagactaaataaacagctcacacaatggcattaggtcaaacatctatactaaataccctatttgatatayatgtaaatacaaacacgtatgtatttaatataatacatatagaaaatataatacaaaatcatggggaaaatgtttctgtaataatctagggagatccc

SEQ ID NO: 215339 - DNA, 470 bp, Homo sapiens
caagtttgtactttcttcctagaggcaggtctcacccaacaactggccagtgccatggtgcaaaggtycaggccactttagaaaatctctgaagggtcatctcaactctaaagcttcccacatgattttcggagcttgctgttgcaattacattacagtcgaactactaacactctgagaaagtaggaattgatgcccacccggggaaaaaaaagtaagtaaattttaagtaattatagatccctaaatgggattctgcactttaggtaagctaaatttttataacaaagaatctccccttacctccccggacaggaggagtgactgtggagttgattttttttaaaggccatgattaaagccatggggacaaggatttaacaaaagggtggcagaagcttcaaagttgtaaaagtgtaatgagagcaaagatccaacctttgcgcagcacctccttattaatgcattgc

SEQ ID NO: 215340 - DNA, 528 bp, Homo sapiens
ttgcattccagcctgggcaacatagccagaccctttctcaaaaaaaagaaaaaagaaaagaaagaaagaaaacttatagtatttagaggaaaactgtctcttgaacaagaatcttgtgcttgctcaagcattagtcaggctccactgacccctcttttcaactaggccttgaccttggccctgtcctgtctttggcctgcctaacctagccttagcaagaaacctgctragacaatttagtgagaatctcctcacccttgatatctgatgaagttgctcattccccgcctttaattccctacttttaagtccttggcttgcattcagcaagaatcttgttaggtgaggttaacaagaaccttctacccttaatgtctcctaaatatcgtaatatcctacatatcccacataattgtttctcactgacaaatggaaactatttaatcctgttataataacaatgtaccacaggtacgtaagttaagaccgtaagttttgcatacaattttttttgtttcaatcctggtt

SEQ ID NO: 215341 - DNA, 589 bp, Homo sapiens
cagacttcaattaagtctcacaatatttaattatatgaatatacaacattagctattttgtgcattagaaaaatattcccttttcaaaatattcgtttccattgtttagaatatatatatatatatatatatatctttaaatactgatgcttttatttgtttgccatgagatatatttgtaggagtaaaaatgttggsttaaaagacatgtaattttgaaaacaacaaagatattaccagattatttctctgaaatgctgtaatatttctgttttgtcaagaatatttaaaactacttttttcctctgcactcctaccaggaaaataagttttcactctttgttttgccaactggatgggtgagcaaattgttactttagttatattttaacttccactaacaaaagtaagtaacttttcatgtgttttttgactatttggatcattacttttataaactctcattgcatatttttaaacagtttcccgacccatgcctaaattccctagcttatcatttaataccataaaaatattaataatagctatttcaaaggcagtatttgatcatttcaatatttggatctcc

SEQ ID NO: 215342 - DNA, 589 bp, Homo sapiens
ctagacgctaagtgtttagtatgtgtagtttatctgtgactaggaagaagaaaaagcttggaaacccatctgcctttctctgttactacgtatgagttattcacataataatttcctttagccttttgtgttgcaaatatattttctagctattcatttttcttttaactttgtattttttcggctattatttaagtagaaaaatgttacatctttatgtagctatatttttattcttttcttgatttttgtggttagaaaatctgtatactttgtttgtttgtttgtttgttwgtttgtttttaagacggagcttctctctgtcacctgggctgggatgcagtggtgcgatctcagctcattgcaagctccacctcccgggatcacgccattctcctgcctcagcctcccgagtagctgggactacagggactacaggtgcccgccaccatgcccggcattttttttttttttttttttttttttttagtagagatggggtttcaccgtggtagccaggatggtctcgatttcctgacctcatgatccgcccgccgcagcctcccaaagtgctgggattacaggcatg

SEQ ID NO: 215343 - DNA, 633 bp, Homo sapiens
cagtcattacaaaatataatgttgcaaaatttcaatttttaaaatgtattcatccaaccatcctctcatccttaaacaattactaaatgcccttaatgaggagtaaaagaacctgtttgtgtttcaataagatgcagagatgagtacaataaccttaaagaggaagaaaactataaatggttataatataaatgagtctgtgctaaatgtcataataaaggtagcaataacaagatttctgagttgaatattgaagaaattgctaggtacatgatcaagaaaaactgcatgaggaaataggcatttgggatgctcctcaaggaagaggtaggaaattaaggggattaagggatattaggcaaggacgaagagactataggcaagagcaatggtacactgaagacrgaagcgtaaaacactggggaaaatccataataaacataaaattgtaagaggaaaattctgcacaatagagctgaaaaggaagaatgaagcatgagtgttgggcaccttgaatgccaagctaaggagttttggtattttctttgttcagtggatgggacataaataggttaccagatgtttcagcaactaatctgctacaaaaggacacataagacctcttcgaactct

SEQ ID NO: 215344 - DNA, 509 bp, Homo sapiens
tcctatttcagaatatatctccacccccaactttcttaagagaacaatataatcaagaaataatggtaccacagactagaatagcagtgtatgatgatccccaaaycatacactgaaacatgaacctcagatattgctgcactctagctaaacactggatacataatcacagagggagaaagataagggggaataaaatcagatccactcctggactggatcctcttagcactcaggcaacatggaatacagagtgtgagaaaaccagctacatctatgcacaataattacagccatgcaaaaatcagacaaatccatagcagttcttccttgtatggtcttggtggggatgaagacaagtgagaaactaaaggagctattcctggaaacccttctcttaaggggaacagtgactaactgagggatgacatgctaagttatcaattaagaatgcatcttggaagtacattttccttatcctttgtcttacagtgtacatgcatattaca

SEQ ID NO: 215345 - DNA, 633 bp, Homo sapiens
cagtcattacaaaatataatgttgcaaaatttcaatttttaaaatgtattcatccaaccatcctctcatccttaaacaattactaaatgcccttaatgaggagtaaaagaacctgtttgtgtttcaataagatgcagagatgagtacaataaccttaaagaggaagaaaactataaatggttataatataaatgagtctgtgctaaatgtcataataaaggtagcaataacaagatttctgagttgaatattgaagaaattgctaggtacatgatcaagaaaaactgcatgaggaaataggcatttgggatgctcctcaaggaagaggtaggaaattaaggggattaagggatattaggcaaggacgaagagactataggcaagagcaatggtacactgaagacggaagcgtaaaacactggggaaaatccataataaacataaaattgtaagaggaaaattctgcacaatagagctgaaaargaagaatgaagcatgagtgttgggcaccttgaatgccaagctaaggagttttggtattttctttgttcagtggatgggacataaataggttaccagatgtttcagcaactaatctgctacaaaaggacacataagacctcttcgaactct

SEQ ID NO: 215346 - DNA, 500 bp, Homo sapiens
agaatatatctccacccccaactttcttaagagaacaatataatcaagaaataatggtaccacagactagaatagcagtgtatgatgatccccaaatcatacactgaaacatgaacctcagatattgctgcactctagctaaacactggatacataatcacagagggagaaagataagggggaataaaatcagatccactcctggactggatcctcttagcactcaggcaacatggaatacagagtgtgagaaarccagctacatctatgcacaataattacagccatgcaaaaatcagacaaatccatagcagttcttccttgtatggtcttggtggggatgaagacaagtgagaaactaaaggagctattcctggaaacccttctcttaaggggaacagtgactaactgagggatgacatgctaagttatcaattaagaatgcatcttggaagtacattttccttatcctttgtcttacagtgtacatgcatattaca

SEQ ID NO: 215347 - DNA, 540 bp, Homo sapiens
aggttctgtttcagtctcaggagataagtgctctgtgggtgatgaaaacagggcaacatgatagaaaaggattggatggtcagaggaggcttgtttcaaaagacagtagtaaagttgaaatgtgaattacaagaaaggtagccacgcaaaaataaagtatgtttcggtatgctagtgcaaagaccctgaaagggactgaatatttatgtaccctccaaaattcatatggtgaacacctactccccartgtgatatattaagaggtgacagccgtgggaggtaattaggtttagataaggttctagggtggagccctcataatggaataatgcttttataagaagataccagagagttaaccccacccctgttatgtaaaaatccaacaagatggccatctgaaaaccaggagagggttctcatcagacacagaatctatcagcacctcagtgatggacttcccagactgtaaaactgtgagaaacatatttaaaccaccaagtccataggatttttgttatagcggcccaagctgaccga

SEQ ID NO: 215348 - DNA, 487 bp, Homo sapiens
ggaattcagcctgggaaacttggtttagggaaatccatgcattgttctgaaacggtgtgttctcacaaaatcaattgtattaatgtagaagaatagttgccagttattttgggcaaatcacaacttccctggttttagcttttttctcatctgtagagggataatatttgtccttcctgtatggagattgtgataagattaaattgagatcactgtaattcaacaatcaagtttacacttgtacggtgctttcatatattatgcatgggctccattgacaattgttgaatcctagctattcaagtgagagcatcaacatagtacaaatgagctctcctccattctctgtgacccactatcactaatacatctgacatgcacagattctccagtcagagttcctgattttctctctatgtctgagtttgttaatgcygttgttaaaacactcacagtgtggcccttcattttacctgtggcaggtgta

SEQ ID NO: 215349 - DNA, 555 bp, Homo sapiens
agagaggactatctatatgagcctggcactctggcatgcatcatctcatttttagcctcaacctattcccatgaggcaatattatgtttctcttttcacacctgagaagtctgaggttaagtgataaaacctaatttttagaggctacagagccagtaagaggtaagacaaccctttcttaataaagtctaaaaagtagtttttataaccatcaggcctaacagccttctttttgttacaaatatttttatatcccatttactyacaaaatgatattcataaatagtataacctaattaaatacaaaatcaagcaaatcaatataaaaccttgtatgtaatatggaggaaaagtaaaaggaaggaggaataagaggaaaataatgaaataatatgtgtttatatattgaatacttttgcatgattatattaggtacaatactaataataaataaacccacttataataaatacatttatttgtaagaatccagaagccttttcatataatagtctcaggaagttagtagaatttaaacaagaatgtgctagaata

SEQ ID NO: 215350 - DNA, 561 bp, Homo sapiens
taaaacttttacgagggcagaaaccatatctgtttttcttaacatcatatccccagtgcctagcaccatgtctgacacaaagtaagtgctcaataagcatttctgcaaataagacctgggagcccattgcttcttatcatatttcttattgtaacaaccctagtatggttcgttatcttttcatgagtctatcaggtcagatcttgggctctaaaagtcaataagccttggcagggtgcagtgtttcatgcctgtaatcctagcactttgggaggccaaggcgggcagattacctgaggtcaggagttcaagaccagcctggccaacatggtgaaaccccgtctttactaaaaatacaaaaaattagccaggtacagtggcgygtgcctgtaatcccagctactcgggaggttcaggcaggagaatcacttgaacccgggaggtggaggttgcggtgaggcaagatcatgccactgcactccagcctgggtgacataacgagatttcatttcaaaaataaataaataaataaaaataaaaataaaaataagaggtcaacaa

SEQ ID NO: 215351 - DNA, 634 bp, Homo sapiens
gtgtctactctttaaaaacatggagtggcattttgggaatggggatcaggttgccaactgcagcttggatctgggaaatagcccaagcctccttgcagacagtttttctttcctctaatacctgccttcctttgaacccaggtccagcaggaggagagattagagcatcatacctgttctgactcatagctctccatctgttacagcaagtcattcttggtagagaggtggggggtggggatcggggaaggagataaaatccygttttaattcctatcccttctccaaaagctacctataattttttttgtctgttctaaatctctgtactcatcggaaacaaacagaaagtttgaggcaacacatatgacagaagaataattcctttaatatgcaaagagctcttacaaattaaaaaaaagaataatcaaattctattaaacggatgaaagacatgaaaaggtaatcatagcaaaatataagattatcaacaaacatgcaaagacgtgtggcctcactcattaaagaaaggaagaaaaacaagtatacactactttctaactctcagaatggatagatgaaagagcttgataattctccaacttatcaagtaatgatcaagtaatggtcaagt

SEQ ID NO: 215352 - DNA, 433 bp, Homo sapiens
gtgataaaaccgtcagccaagatttgctacatcttttttttccaccccctagtctcccattaaaaatgatttgtcgttagaacaaaacatgggaaaacaaacgtgattaaaattttcccatattaaatacctgtgtggcaatggcaggcccgagctgagagctctggaaaggctctgattcatccatctggaaggggtctgagcatctggcagagtcgggaagtgagtaagagtctgggtttgtttctctgctgcctcgttcttggcatctttcttccatctcgctgacttcctcaatcgactccattaaacacagattacaggtaactggggcatggggtgggcatcaccatagcattgggaaggtaggaggaaggtggggagggaggrtatgctttaccctcctaccctgccttccccgaggggaaaaaaa

SEQ ID NO: 215353 - DNA, 549 bp, Homo sapiens
tgattgatcatatcacagtgtaatatggcctgccacggaaaacctgagtcctagggaggacacacctaagcccccgtgggagaggtcatacccaagcatccagcttcatcagctcatagccagtcctggtacctccccrctgtgtttaatctctgagcctcagaggcagtggagtaaagacggggcagatctggcatttctgaaatcaggccagtgaggacaagtcctaggaccctcaccatgaagtctgctgtcatctggttttcattccaggtgtcagggaagcatggcccagtcagactccaggggaatagtggaacagtggactttggaccataaaacgggatgaactgaatagatatgaaagcagcagtttcttagtccattctatcttttatgaagccaggaaaatggtttctcatgctggtttggtgaccaaccaattgtatgtgacctaggacatatcatgccaccttcttggccttagttttcctatttatagacttggtggtcgcctaaaacctccccatattagacagataaaaatag

SEQ ID NO: 215354 - DNA, 554 bp, Homo sapiens
ggaaatgggggaatacagtccccacatccattgatggttgaattaggattcgggagatctgatttcctttttgactgttctgacaacaaacaagcygtgtgaccttgggcaaagctcttaacctctctgagtttagttaccacatcttgccagatgggtctcacagcccctggtcatctattgtccaggaagctgtgagattccaataagataatggatttgaatgagatttgaaaacaggaatgcaccagaggaatttgagatattatgattgtgacgcccattgcatcccccttgtgccctggctggcccatctgttctgggagctttccgttctctctctgcctcctttggccgccagtcctgagctgctctgtctgacatttgggcagtttccagggaggattctgtcccttttccatctgctctcaacttaactctttctctcccctcttttggtctaccaggatctgatgttagggtgtgaggcgatggtgtgtgagaagagacactagggagcgactactccttcttttcctggggtcaggaagtgg

SEQ ID NO: 215355 - DNA, 600 bp, Homo sapiens
gcaatgctcccggagatcttcctatttttagaaactcctaagaccaatgaggctggtagaagatagaaaagtgatgtttctaatcatcttccctgactgaacatggtctacgtagataaaatgatgtgaaaagtggactctacttttgaattatttaaaataagtaagacagaaaaatagcccactaataagcaaataaaatatctgttttgagagggacctgaagagaactgattgatctttgcattgtgytcttatgtttataacagattttattcagactacactaagttataaaggtatgatgtaaaaacagacatcacattagagaatacaaattcacaattccagagatgaaacaggagcaattatcttgttggacttcatggaaaatagacctagaaagtcatttagggcccaggaaactctagagataagacttatctttctgtttcagtaggtgcagttcattgttccttaggatggtctccaaaagaaaactgttccctttttgtgccagtttcctaacaattagactttctcaatatttctcagattgaatttccaaaaagaactttattgatctgattaattattaat

SEQ ID NO: 215356 - DNA, 527 bp, Homo sapiens
cattttctcttggctgatccatgggttatgataaaataaaaaggagtggtaaatggacctattttaaaaattcaggattctgtcctgaccattcctgagtatgatggttcattctttcttctaatggcaaatccaggtttgcctgatggatgcagttttactgtggcagcccatccaagatgtgtcctaggagagataagcttaattctgacttaggcttctggagtttttagttgggttgacatagtcctttgccataaggctaataatcacttagttgagtacactgctcaccaaagttacccacatggagcaaagtcaggaatataatatatttctgtaattttataaaattgttttcctcttgtatgtgatcaattcaaatgtaaattttgagtgtaaggaagggctgawtgaaaaatatagtatagtcataactattataaagagctgtgcctagattttggtaatggaggagaaataacaacttaggaacctgaggagggagcatctcagatcccggaagc

SEQ ID NO: 215357 - DNA, 527 bp, Homo sapiens
cattttctcttggctgatccatgggttatgataaaataaaaaggagtggtaaatggacctattttaaaaattcaggattctgtcctgaccattcctgagtatgatggttcattctttcttctaatggcaaatccaggtttgcctgatggatgcagttttactgtggcagcccatccaagatgtgtcctaggagagataagcttaattctgacttaggcttctggagtttttagttgggttgacatagtcctttgccataaggctaataatcacttagttgagtacactgctcaccaaagttacccacatggagcaaagtcaggaatataatatatttctgtaattttataaaattgttttcctcttgtatgtgatcaattcaaatgtaaattttgagtgtaaggaagggctgaatgaaaaatatagtatagtcataactattataaagagctgtgcctagattttggtaatggaggagaaataacaacttaggaamctgaggagggagcatctcagatcccggaagc

SEQ ID NO: 215358 - DNA, 616 bp, Homo sapiens
gtttattttactaatctctcttacttttttamaggactgtgacctctagagagcagaggctgtatctttttcatttgcatattctgagcatctattacaatgcttcatacatatatagtgtctcactacatattaatatttattgttcaataaatgaatccatgaactcattttatgtgaaactatggaaagtaggacaatctctcctacaagaaatattgggaagtagattattccagtcatctgtttctatttaacaatttatacagcgcttagtggcttaaagcaacaactgcatttctgttggtcaggaatttacacagaactcagctgggtgattcttatgatccagttagtgatattcatctgataactgggctgggctaaactgggctgcttccatctccatgtagactcaagccctccccagtgggctagttggagtttttataggatggttcagggatcctagaaaccacagcaaaggctaccagtctctttgaattttaggtctagatctgtatagctttactttagccatattccattgatcaaaatagtcataagtcaacccagattcaaggcaaggaaaaatagactgtatcacaaggggctg

SEQ ID NO: 215359 - DNA, 637 bp, Homo sapiens
gaattcattttatcattgaggagaggcctgggacagaaagagaattggaaaattttccatcaccgatacagactaaaaatggatttagtttttctatcaaatgagaagatttgtagaattggacatactcaatgtactttctaaaattaaagcaagacagtaagaatagtgcttattagttatgagacactactgggtaagttgacagtgaatcagagagaaccaatccaggttacgagatactagaaaacagaaattttataattggctggttttcarattcttaaaacttttctaagtggttcagctttcagaactctgaaaactcaagaaacaatattttaaattctatgtgacaagaaggaaatcaattagcagacatgaaagacaaaagttactaacaaaataggtgctggtaaaaaattgtattagcctgttttcacgctgctgataaagacataccctagctagggctatgtataagagagagaggtctaattggacttagagttctacatggcttggaaagccaataatggcagaaggcaaggaggagcaagtcacatcttacacggatggcagcaagcagagagcctgtgcaggcaaactcccccttatgataaccatcagatctcat

SEQ ID NO: 215360 - DNA, 428 bp, Homo sapiens
gaattcatcaattttaaacttgtcccaacagaagacaaaattttaaccctctctttttgaaaaaatgggcttggccaaggatgagagacaattaagtacatttgcatcatcccattcagggaatgttcctgtgagggattcacagttgcctatattttaagcctactgcaaagattaaagaagcagkgtctgatcaaagtaccccattaattaaagtatgtttcctcatgtcctctcccaccccaaccctaattactcacaagatgtaggcaatcttgtgcctacaagctcataaatctggctgccataactgaatgagggagtggatggccaggtggtttctattacttttagaagtaacttctaaatacagtacattatctaggctctcatttatagtggctgttaagtctatgataatattattc

SEQ ID NO: 215361 - DNA, 595 bp, Homo sapiens
gtaaacattttagactttacagtccatgtgacagctgttagaaattattcagctatgttgagtaagtaaatgggcacgtctgtgttccggtaaatatttgtttacaaaagtatttactcacaggtggaaggcagaacttggaacatgatttgtgtttgccaatcctaggagaaagaagaaaggaaaaacaacataatcatctcaaaagaaaaaaattatcaaaatccattatcttgtcatgataaaaactcacaagaatttaggaagatgagtggggcccagtggctcaatggataacatgtctgactacggatcagaagattctagaagttaggaagagwagggaacgccatcaaccagctaaaacatgaaaaacccatagttaacatcatggtaaatggtgaaagactgaatgctttccccttaagatcaggaacaggacagtaatgcctaccctcactacctttattcatcaaggcactggtagttcttgccagtaaaataatgtatcccctaacccttatccgcctcaaaaatcaaaaagctatccatattgggaggtaaaactatctttattcacaatcatataaactaa

SEQ ID NO: 215362 - DNA, 595 bp, Homo sapiens
gtaaacattttagactttacagtccatgtgacagctgttagaaattattcagctatgttgagtaagtaaatgggcacgtctgtgttccggtaaatatttgtttacaaaagtatttactcacaggtggaaggcagaacttggaacatgatttgtgtttgccaatcctaggagaaagaagaaaggaaaaacaacataatcatctcaaaagaaaaaaattatcaaaatccattatcttgtcatgataaaaactcacaagaatttaggaagatgagtggggcccagtggctcaatggataacatgtctgactacggatcagaagattctagaagttaggaagagaagggaaygccatcaaccagctaaaacatgaaaaacccatagttaacatcatggtaaatggtgaaagactgaatgctttccccttaagatcaggaacaggacagtaatgcctaccctcactacctttattcatcaaggcactggtagttcttgccagtaaaataatgtatcccctaacccttatccgcctcaaaaatcaaaaagctatccatattgggaggtaaaactatctttattcacaatcatataaactaa

SEQ ID NO: 215363 - DNA, 420 bp, Homo sapiens
caaaagtacatcctctcttgcgtattttttttatcccatttcccaattttattttttaaaatctgtgaaatattgtatttactgggcatttttttcctcttgtttccctcctacctagtttagtgttgcatccccatcacttatgatattaccagaacataatggtcttctgtaaatttattaaatggataactkagataagaagaacactagtggttgcaatggatttgagagtaggaagaagaaaaaggataaataggtgaagcacaggtacttttaaggcagtaaagctattatgtatgatattgtaaagaaggatacatgacattatacatctagaaaaacccatagaatgtacaacacaaggagtgaacctaatgaaaatccgcagatcagcagattccctcctgagcctacacc

SEQ ID NO: 215364 - DNA, 645 bp, Homo sapiens
gagtaaaatgcttcaaccccacaaaattataagattttttacccattcaaatacttactgtaagtacttatgtaaacataattatggataaaatctcatctcttatgctcctyacaatttgcagtaaataatttaactttatgtaagtttcataaaagatagaaataaacctgttcctgaggccttatagacactgacacatgttagtttcagaataggcagagagaagatggagcaattaaatggtctcccaagccttaaccacaagaatcaagtaaggaatgagaccttcggacttgaccaggaacagtgacaaaaacagagccagagtcaagcagcgagggtaaaagtggaggacaggaaaggagaaaagagcccagttaaaaggtgttgcaaccactatcagaataactctaaaacacaatccaatgggaaattaagatttgttttgcatcatcctattgattctgatttatgtgcatcatctgtttaaactctttgggccatgaatagtacatttgagttatgtgaacattctgaatatagttactaagatacaacttttggggaggcaggtactaccgatgggctcaaggttatttaatcactgttctacctcacaggctgtgaacttatagttttcaa

SEQ ID NO: 215365 - DNA, 645 bp, Homo sapiens
gagtaaaatgcttcaaccccacaaaattataagattttttacccattcaaatacttactgtaagtacttatgtaaacataattatggataaaatctcatctcttatgctcctcacaatttgcagtaaataatttaactttatgtaagtttcataaaagatagaaataaacctgttcctgaggccttatagacactgacacatgttagtttcagaataggcagagagaagatggagcaattaaatggtctcccaagccttaaccacaagaatcaagtaaggaatgagaccttcggacttgaccaggaacagtgacaaaaacagagccagagtcragcagcgagggtaaaagtggaggacaggaaaggagaaaagagcccagttaaaaggtgttgcaaccactatcagaataactctaaaacacaatccaatgggaaattaagatttgttttgcatcatcctattgattctgatttatgtgcatcatctgtttaaactctttgggccatgaatagtacatttgagttatgtgaacattctgaatatagttactaagatacaacttttggggaggcaggtactaccgatgggctcaaggttatttaatcactgttctacctcacaggctgtgaacttatagttttcaa

SEQ ID NO: 215366 - DNA, 509 bp, Homo sapiens
aggcctcctggcaatgttctctttattccaggttgtgggttaagaggagttttgactgattataaggcaatgtatgtaccactaatgtttctcacctacwttgggccttcatcttttatctgttgaagtgtaaggttattcatgtataaggctggctgcaaaatccttcataaataaaagtatacattataagtgcacatagtagattctctttttatttctactgttcacagaggcataaataaggaaaaaatatttaaagataagagtctagtgatagtagaagttttgatccatgatgttgggaaaagctgttaacattaaggatgccatcttcttctggggaaaaactttcctggttagttttactttaagggtaccaatgggtgtacagttccaggagtgtggagagacccttctcagttgtgagattatgaacccaaggttcaagactccaaagttttgctgtagtgtaaatggcaaggacagtctttctctgatgttctcag

SEQ ID NO: 215367 - DNA, 524 bp, Homo sapiens
ccctgcatttgcatatggctgtacaactgggtatcgacataataggatcttcaattcaaatatcttttccatgatttttatccagcacccttgattgagctcttatgatattaaatctttctatcctgatatctaaaattttctgaagcatgttttcagatgatattcttatggtgtatatgtactatcaattcctgctgagaattaaaattttrtgtaatatagttttcaagattatttcatttttgtaataaatttatgaggtacgccatgccagtactattattactaaatgaaaggtgagcagcggcacaaacacaaaaaagtattctagctataaaataaaataatttcatgaaaacaatggggatagaacgttgttttataatgctccttataatgctggtgattggaaactgatctaacacttgtaaaccaactgttttgcatttctttggataacaggacttaagaggaaaaaaataataaaagttaaaatttctcaacatatataaaaatgaaca

SEQ ID NO: 215368 - DNA, 524 bp, Homo sapiens
ccctgcatttgcatatggctgtacaactgggtatcgacataataggatcttcaattcaaatatcttttccatgatttttatccagcacccttgattgagctcttatgatattaaatctttctatcctgatatctaaaattttctgaagcatgttttcagatgatattcttatggtgtatatgtactatcaattcctgctgagaattaaaattttatgtaatatagttttcaagattatttcatttttgtaataaatttatgaggtasgccatgccagtactattattactaaatgaaaggtgagcagcggcacaaacacaaaaaagtattctagctataaaataaaataatttcatgaaaacaatggggatagaacgttgttttataatgctccttataatgctggtgattggaaactgatctaacacttgtaaaccaactgttttgcatttctttggataacaggacttaagaggaaaaaaataataaaagttaaaatttctcaacatatataaaaatgaaca

SEQ ID NO: 215369 - DNA, 588 bp, Homo sapiens
tatgtttctgcttctttgtggtataactttacaattgttgaaagaactaacagccctataggtcacagagtttttgaaagtaggtctccatctcctcagacaaagcttctgaaaatatagagatacttttgggagtagatatgaatattttgcctaagatttaacattctaaaagcactcagatatttttgttctcacttagaaacaatttaatgttacagatgcaagctttatttaagcagagaattacaaaaggtccaacattttttctcattctctagaggatatttctagtgcataatttagaaatggatatattattcatatttgggatataaattcagaaacatgatttcaaaaatttttttggattaagggaaattagtctgttagaaataacagatactaataaaaacatttkttaaacatgaataaagtcaattagctatcctgaatgggatcctcatagagaataatttcatttcatttcaagaagcaagatcaacacttttggctcaatatgaacatagttgtatccatatgtctacaacttcccaattttccaattttatactaagactgagtaaa

SEQ ID NO: 215370 - DNA, 610 bp, Homo sapiens
aactgcttccccacatgttacaaaaatattaagggcagatttcaaatgtcactgacaaagaattcctggcaatagattacagtacataagaaacacaccctgtagaatctctacggtttgatttagtcctaccaaaaccacttgcagattcaattatgcagcacgyggatacagtaccaggaagagcagtcctgagagataatctcattcacatcccattaaagcaatgaagaaggctcttgaggagcaactaacatttcaagagctagggtctggggcccaaggcgtgcatatgattaaaccaacccagctagaagcaattatctacagattacctcaggcatcctctgaggatgagttgtttctgagaggacacagtgtcattcaatctgaattcagtaattacaacaattcatgtggaagatagaaatttaccctctgctttacagattaaagaaaacgagcttgcaaatgccaccacttcaaaaatattccaagtctcatctatcatttttttttagagactttccaaacttcaaaagtaccctaagtctgaaatatgcatactgcttagatatatgaaggcttataacttttgatctagaaacaa

SEQ ID NO: 215371 - DNA, 521 bp, Homo sapiens
ctcactcataggtgggaattgaacagtgagaacacatggacacaggaaggggaacatcacactctggggactgttgtggggtgggcagaggggggaggtatagcattgggagatatacctaatgctagatgacgagttagtgggtgcacgcaccagcatgtcacatgtatacatatgcaactaacctgcacattgtgcacatgtaccctaaaacttaaagtataataattwaaaaaaaatttaaaaaaaaacactaatataaatgccaggcacagtggctcatgcctataatccctagcactttaggaggctgatgcaggtagatcccttgagcccaggagtttgagaccagcctgggcaacatggcaaaaccttgtatccacaaataattaaaaataaaaaaatagctaggcatggtattgtgtgtctgtagtcccagttacctggaagggtgaggtgggaggatcaccccagctggggaggtcaaagctgcagtgagctgtggtgataccagtgcactc

SEQ ID NO: 215372 - DNA, 467 bp, Homo sapiens
gaaaagaaatggaggtttgtgcccacccagggatacctaaataaataaatagataaataaataaataaaatggaagaatctgaaatacatttactaagtgaaagaagccaatctgtaaaggctacatactgtatgattccaactatgttacrttctggaaaaggcaaaaccatagagatagtaaaaagagtggttgccaagggctaaggagtagagggatgaataggcagagcacagaggagttttagggcagtgaaactactgtttgatgccttaatggtagatacatgttgttacacattggtaaaaattcatagaatgtacaacatctagagtgaaccctcgtgtcaactacagacattgggtgataatgatgtgttaatgtaggttcatcagtggtaacaaatgcaccactctggtgacgatgacagcggagatggctgtgcttgtgtggagaaaggagatat

SEQ ID NO: 215373 - DNA, 314 bp, Homo sapiens
ttttctcacatatttttgtttgtttgcctcagggatttgaaatctctgactgaacagaagtgactttagaatttgcaatagcagagtaaagaagagtgctgtattctgcccactacacaatgcatccaaaaaagtggagacagaggacattgtattgctgggcacagggtttctgaatcaagcatctcasttgacggtggctgagggagtagcatggggcaaggggtgaggattggaggtaggaggtagttggttgttatacaacaaccttgttttcttcctatctctatttcttcttagtctcaactctactt

SEQ ID NO: 215374 - DNA, 569 bp, Homo sapiens
gtctccatgtgaacaatttatgaggatgtaggatctatctagattctgttggtataaattggttcacaaattgctgaaactaaaccaagctgctggctaaaagaatagtttataaaatactgtgctctgaggtttgcttgtaaagaacctagttctggactatcatgttccatagaaataggcacccttatagccaactatgcaygcaactatttcacctcagaacataccagattaagtgcaaagacaaatgtggaattcacccattgccactgctacttgttttaaagtctgatttcttggggaatggacagaattgatttctcaaattcttcattggatctctatctatcccagtttcatgccacatttattatactttccccaactcattccttaaccacaggatcattctacaacattttctgagctattactatgcagtggacattgtgtatgtccagcccttcaaagagtacctagctttatagtatactcattttgcttaagagcaactaaaggtaagccatgtcagcctagttattaaatgactaagatttacgcttcag

SEQ ID NO: 215375 - DNA, 569 bp, Homo sapiens
gtctccatgtgaacaatttatgaggatgtaggatctatctagattctgttggtataaattggttcacaaattgctgaaactaaaccaagctgctggctaaaagaatagtttataaaatactgtgctctgaggtttgcttgtaaagaacctagttctggactatcatgttccatagaaataggcacccttatagccaactatgcacgcaactatttcacctcagaacataccagattaagtgcaaagacaaatgtggaattcacccattgccactgctacttgttttaaagtctgatttcttggggaatggacagaattgatttctcaaattcttcattggatctctatctatcccagtttcatgccacatttattatactttccccaactcattccttaaccacaggatcattctacaacattttctgagctattactatgcagtggacattgtgtatgyccagcccttcaaagagtacctagctttatagtatactcattttgcttaagagcaactaaaggtaagccatgtcagcctagttattaaatgactaagatttacgcttcag

SEQ ID NO: 215376 - DNA, 541 bp, Homo sapiens
gggggcgggtctttcccatgctgttctcctgatagggaataagtctcacaagatgtgatggttttataaaggggagttcccctacacaatctctcttgcctgccatcatgtaagacatgactttgctcctcatttgctttctgccatgagtgtgaggcctccccagccaggtggaattgtgagtgcattaaacctccttcctttataaattacccagtatcaagtatgtctttattagcagcatgagaacagactaatacagactgccagtactatgttggatagaagtgggtaaagggggaatccttgttacttttaaactatctgagttttttttaagttggcttctgataaataagaaatagtgggtctgtttctatacctactctgacaacctacttctttcaattgatgtatttagaccagtcacatttgaagtgcttattaatatagttgaattaataacaatgtattttctatttgttgcatttttaatttttttctgtcttctctggttytaatttagtattttatataattc

SEQ ID NO: 215377 - DNA, 568 bp, Homo sapiens
tagctccacttgtgtgtatcatagcactgttcacaatatcaaaaatatggaattgacttaagcatccatcaaaggaaaattggatgaggaaaatatggtatctatacacaatggaataytattgaaccataaaaataacaaaatcatgtcttttgcagcaacatggatggaaccggtagccattatcttaagtgaaacaactcagacacagaaagacaaatattacatgttctcactaacaagtgggagctaaataacatgtacacatggaagcagagtatggaatcatagacaatggggacttggagaagttgggggttgggagggtggataatgagaggttgcttggtgggtacaatgtatgttgctccagtgatgaatatactgaaggccctggcgtcatcaaaatgcaatatatcaatgtagcaaaattgcacttgtactccattaataatacacaagttaaaatgaaataaatccctttcatcttaaaaaaacctctgcattttgaaatgtttcattgttcattacaatcagccttaactaaaatttattatagggtcgatag

SEQ ID NO: 215378 - DNA, 568 bp, Homo sapiens
tagctccacttgtgtgtatcatagcactgttcacaatatcaaaaatatggaattgacttaagcatccatcaaaggaaaattggatgaggaaaatatggtatctatacacaatggaatactattgaaccataaaaataacaaaatcatgtcttttgcagcaacatggatggaaccggtagccattatcttaagtgaaacaactcagacacagaaagacaaatattacatgttctcactaacaagtgggagctaaataacatgtacacatggaagcagagtatggaatcatagacaatggggacttggagaagttgggggttgggagggtggataatgagaggttgcttggtgggtacaatgtatgttgctccagtgatgaatatactgaaggccctggcgtcatcaaaatgcaatatatcaatgtagcaaaattgcacttgtactccattaataatacacaagttaaaatgaaataaatmcctttcatcttaaaaaaacctctgcattttgaaatgtttcattgttcattacaatcagccttaactaaaatttattatagggtcgatag

SEQ ID NO: 215379 - DNA, 568 bp, Homo sapiens
tagctccacttgtgtgtatcatagcactgttcacaatatcaaaaatatggaattgacttaagcatccatcaaaggaaaattggatgaggaaaatatggtatctatacacaatggaatactattgaaccataaaaataacaaaatcatgtcttttgcagcaacatggatggaaccggtagccattatcttaagtgaaacaactcagacacagaaagacaaatattacatgttctcactaacaagtgggagctaaataacatgtacacatggaagcagagtatggaatcatagacaatggggacttggagaagttgggggttgggagggtggataatgagaggttgcttggtgggtacaatgtatgttgctccagtgatgaatatactgaaggccctggcgtcatcaaaatgcaatatatcaatgtagcaaaattgcacttgtactccattaataatacacaagttaaaatgaaataaatccctttcatcttaaaaaaacctctgcattttgaaatgtttcattgwtcattacaatcagccttaactaaaatttattatagggtcgatag

SEQ ID NO: 215380 - DNA, 585 bp, Homo sapiens
gcacgtactcaggtgtgccctgcgtggagggagcaagccagccagtgagcagagagactggtgggaggcagaggaggaaatccaggagaggaacaccagggagggaggcgcccccaggccagggagggcatcgggaagaagtggcatttaaaggtgattctgatcgagcctctagacctaaccaccatcgacaggaaatccagggtatggcgctgcaatgggctaagtcctggctgtgggacctacaggacaaacaacccagggtccctccactatgctgtgtgggaaaacggaaaggaccaggggaacgtgtggatgaaaagtgaattcatccacgtgacagctcagggaatgtgtggaccttatttggattctgattttttttttyaatttaacatttataaggaattggcacttggaatgttttctggatatttaattatattgaggaattattgctaaatatctcttggggtatgataacggtaatattatttcatatgtatatacacatggatataacatgtaaaacatgtatgtctatataaaacaatattactattatacatgtgtatatatgcatat

SEQ ID NO: 215381 - DNA, 531 bp, Homo sapiens
agctactggtagtactgggggctgccgggtaatttattggctgagtccctctctgggaatcactctctggaagagagagctgcctcacccagagtctcttgtccagtccacatggagatacaaatacccagccctcttcctcagctggaacaaccgagaggcatcccagctccagagctccctgggacaggctgaggcctctgtggcaggtgcactgcagttcagcatctccccctgcccggccctgcttccctcacacccacagctgttgttcccaaaagctctccctgataaatcacctgaggcaaacctctgtctgagtctatttccagaaaaccctacctgggacagcccctaacacagtcctgagcttaagaaatgcctgcagaatggattgatgccacacataacacacaacacacacatacacacacgcgcacacacacaaacacacatgctcccagggctaccaatgactccacgcatctggcccarccttttccctccagacagacgccccagcattgcccc

SEQ ID NO: 215382 - DNA, 556 bp, Homo sapiens
ctggtgacagaccctggccagcaccccttccatcccagccagcaagggccgtggccacacttaccatgtgcagcatgtctgaggccgkcggggatacctgggcccggtagaggttgtgcagctccaccatcaaacgtttctcctcatctgtgagggctccaacggggcctgtggtggccaccagcagtagcagtagcggcagcagaagcatcaggaaactgcaggagccgtgcatggtggccagccgtctctccttctcccgtccaggggtctggcagctggatttaaagtccttcccacacaagcaccaccctggctggggtggggcagtgggggccgtgtttgaggcccagcccgactcacacaatgtctcagggagggctgggtgctttgggtcccgaccagcatcaagtgcactccccttggagtccttggcaaaaacctcctttctcttggtaacgggggctcaggccaaaagctgtgtgagttcctaagttgtggacagatccttcaggggcaaaatcacagtaacctctgcagagctgtgactggttgc

SEQ ID NO: 215383 - DNA, 556 bp, Homo sapiens
ctggtgacagaccctggccagcaccccttccatcccagccagcaagggccgtggccacacttaccatgtgcagcatgtctgaggccggcggggatacctgggcccggtagaggttgtgcagctccaccatcaaacgtttctcctcatctgtgagggctccaacggggcctgtggtggccaccagcagtagcagtagcggcagcagaagcatcaggaaactgcaggagccgtgcatggtggccagccgtctctccttctcccgtccaggggtctggcagctggatttaaagtccttcccacacaagcaccaccctggctggggtggggcagtgggggccgtgtttgaggcccagcccgactcacacaatgtctcagggagggctgggygctttgggtcccgaccagcatcaagtgcactccccttggagtccttggcaaaaacctcctttctcttggtaacgggggctcaggccaaaagctgtgtgagttcctaagttgtggacagatccttcaggggcaaaatcacagtaacctctgcagagctgtgactggttgc

SEQ ID NO: 215384 - DNA, 605 bp, Homo sapiens
tcaattttaatcatacctttaataattcacaaaaattctgaggttcaatttcacctgaatgttactattaacatgttttagccagattttgtaaggtaaggcsacagtcacaaattactccaacactttaatgtttatgatgtcatgttatcactttatggtgggccagcagtgactttgctcttgacctaggtgtgtcctcatttgcgaacccagcctgattgccatccctaatttaacaccctattttattctgcaagagagaaaacaacaagaatactgttggaaatacacacgtgttcttaagtatctaatcaggactggcgcatatcgttccagcacatattgtttgaaccaaagcaagttgcagagcaggtatagagtactcctcttgtagggagacactcaagtcacatggggtaaggaggtatacagtctttcttcttggaataaggagcaaatgatttgaaacaacaatgcaagctataaccaccaaccccccttgcgcacacacacacacacacacactcacacacatgtctaaaagtaatacaataattaaaatctcctcattcttactcagttctgatgtctagaaataacca

SEQ ID NO: 215385 - DNA, 549 bp, Homo sapiens
atattattgaagaaaatcagctttactcaaagtctaccaacttaaacataaatctcatataaaagcactgttacagaaatatgcagaataatgtttgaccaaatatttgggttctatggcctagccaagttgacaaataaaactaaccatcaaaggaggggaatactaaagaaattgtagccataggtcttttttttcttctctagtgagagccatctaatagctaattgatatgtctttttaaaaagaaaatttatcattctaactttcattactttaagcactacatttaccaaatattagtaaagaaaaaaaaagtcaaagtacattcttgaccaaatctgagcagttgatattctagatattgagaggaacattaaatattttgtcacactaacaatattaggcatttaagggaaagaaagaatttaatctatatattttrcttttattaggaatatcctgtattttttttgacacccagaaatccaaagctctccaatctatgacaaaaatgttaagaaaaatccgcagccttaagtttagtaa

SEQ ID NO: 215386 - DNA, 481 bp, Homo sapiens
gggaaaaaccctgttctgggaaaaacctctgttttcctcatggaaccccaggaagtgaaaacagatatatacttctcaaaatccaaggctctgttatactttacattatgttacctgatttttttgacttttggggatatcagaaattactttgcattgtgtgagggatggctaatgacagttatggagggatacttggctctttacawacttggatcagagaagcatgctgttggccacatggaaagtatggaaacatccccacctccccaccccccaactgagagatgagagtgccatgggggatgcgctgattccaaaatgagttgaaaatgctttaaggtcataaactgcttctttgacttttgaaaattgttcaacttacctgctttggagccattagattctagataaggcctgggaacatatggagttagccatgtccactacctatgatggaaacaagtcagaccttatttga

SEQ ID NO: 215387 - DNA, 648 bp, Homo sapiens
tttgttgagctatcactatggccagttggaaagagctgatgctttcctgcatccctttattattttatttgtgtttgtgttatatcatagtttctatcatgattgttttatagcttaccagaggatagcatagtggttcagaggcagttgagcatgaatgattagatactaccactccgaagtcaaactaaccactttgaaccttaccaaagtcagagattatctaaggtacttggacaacttacttgacctctcaatttgtcagattctttgaaaataatggcagctacttatttgggttgttgtaatgattaaaggcagtaatgtttacaaaacacttcatatcattaacaaacacatagcaatctctgacaaatatgttaaagactgtcacatacttattctcatctctaaatagtgaactctttgaatacataaatattgcctttttattatgcaataaataatgcaaattctatcaaagtttctttttttgccatttggtctctgaaacagcttttacttataaagtagtagtaattttattttttatgtttttctaacattgtttcttttttgctttcataatatctagaattttaaaartaaaaactcgacaacactactttttcttttttaagctgggca

SEQ ID NO: 215388 - DNA, 503 bp, Homo sapiens
tgccaaggaaacataaatcagaataatgtaacaatggagctgaacctctggagctttctctcatcctctctacctgcacttaggcaaaaaaccttaatcatctgcacatgtatttgycaattttgtttgtaagtgtttggcattttagagatctttttgctcataaaccaaatctcagatgatagtttggtgatagatgtatgtttgcacaaaaatgtttattatctggcacaaagataattttcattcaccttgtccccattcatacataaaacaacaggtttgtaataacctgattatacatctatcatataaaactgtatttttggatatttttgttacgtttgtagaaatttaaactctttcatcttcatataaatttgagaagtgtttctctgtcacattttttaccattttttcctctgatatttaggaatagagatatagaaatattagacttaaagaagcattactagtaatatgatgaacaggatgattaatta

SEQ ID NO: 215389 - DNA, 503 bp, Homo sapiens
tgccaaggaaacataaatcagaataatgtaacaatggagctgaacctctggagctttctctcatcctctctacctgcacttaggcaaaaaaccttaatcatctgcacatgtatttgtcaattttgtttgtaagtgtttggcattttagagatctttttgctcataaaccaaatctcagatgatagtttggtgatagatgtatgtttgcacaaaaatgtttattatctggcacaaagataattttcattcaccttgtccccattcatacrtaaaacaacaggtttgtaataacctgattatacatctatcatataaaactgtatttttggatatttttgttacgtttgtagaaatttaaactctttcatcttcatataaatttgagaagtgtttctctgtcacattttttaccattttttcctctgatatttaggaatagagatatagaaatattagacttaaagaagcattactagtaatatgatgaacaggatgattaatta

SEQ ID NO: 215390 - DNA, 503 bp, Homo sapiens
tgccaaggaaacataaatcagaataatgtaacaatggagctgaacctctggagctttctctcatcctctctacctgcacttaggcaaaaaaccttaatcatctgcacatgtatttgtcaattttgtttgtaagtgtttggcattttagagatctttttgctcataaaccaaatctcagatgatagtttggtgatagatgtatgtttgcacaaaaatgtttattatctggcacaaagataattttcattcaccttgtccccattcatacataaaacaacaggtttgtaataacctgattatayatctatcatataaaactgtatttttggatatttttgttacgtttgtagaaatttaaactctttcatcttcatataaatttgagaagtgtttctctgtcacattttttaccattttttcctctgatatttaggaatagagatatagaaatattagacttaaagaagcattactagtaatatgatgaacaggatgattaatta

SEQ ID NO: 215391 - DNA, 566 bp, Homo sapiens
atgctattatctgccatcttgacacaaactagcataactctctgagttgtgcatgtgttggctctgatgcttttgaaaaaattacataaaagtccttctccatatcaaggaaccatagtctgttgaaaagagctaaagttaatgaattaataattgcataggggccgtgaattatgaaactgatttctgaattcaggttacatgtagagttaaagaaaaaacaaacacaaatagaaatttaagtgcagtagtccccctttatccaaagtttcactttctatagtttcagtgacatacagaaagttactacagaaaaattttgaaccactgcctkaaaatattaaaaggaaaattccaggaataaacaattcatacgttttaaattgtgtgcccttcggagtagcgtcacgaaatcctgcactatccctcttgggctgtgaattactcctttgtccagtttatccacactgtatgcactacccatccattagtcacttaacagccatcttagttaccagattgaaaaagccatgtatatatatatagatagatagatagatagatag

SEQ ID NO: 215392 - DNA, 626 bp, Homo sapiens
gatccagtaagtagcagaactcagagtcaagaatagcctttgagtctagaacttccaaattcagaaatatcacactattttgtttcaagttttatcatttggccagtagaccaacaactatttaaatgaaaaacatagtttttaatacttatgttttcagtgcctagcctattccttgggttttaataggttgtattaaatgttttcaaagaaaatagtctgttattatatattttttaagccttgcaatacattgaaattgaattggtaattaagaatataaagtgcatgacatcttattgacctgtttagtatatcctacatgttcagaacagtgcatcacatttgacagatattcattgaataatcattgaatggttgatcttaatttactataataggaaaaatataaggatgtaatattgagtaatattggattgrggcaaaaagggaaactaaaatttggagaagataattcaaaagttggagtagagaaatgagagatgtgagctggaaagtgcacactccaataaactcaaattctcattcagagttttcaaaaagcattcagtgaagagatcacaggggagcactccacatgacagaaaccatgccatataaacagc

SEQ ID NO: 215393 - DNA, 434 bp, Homo sapiens
ctacctgcatatctaatatatctgtgtatttatttaatatataatgtatgtcatgtatatgtttcactacaaaaaatattaaaaagagctctaattcattggcgtaaagaaaaaaaagtgcttaaatcaaatgctgtatcagaaaaatagaggctttaagcccaaatccattttaagtttacctgacttaaattaatatttaataagtaagctcgttggtaaaataaaattagaaatgtcttcagaattgtcagcatacattattgtttakatttattggtcaaatagttttaaatttatctctgctagatattataagctgtcaaaatttgccatgagggttataaagctataaatgcagcccaaaagagaattatctttatttgtgtcattttttataaataaggcatttaatattgcttgttcaatacaaa

SEQ ID NO: 215394 - DNA, 554 bp, Homo sapiens
tttcttacttgtaaaacctgttcaaaaatatatatgtgtggtgtatttcttaggtatattgctctagagaaagtttagcactactgaaatttacacatttttctgcaaacggcagtattataaaatgaatagtcttgcttcaattacattaaagttttactctctcttatctactgatagttcttctactttgcaaacatttcatttctagccaggcgtggtggctcacacctgtattcccagcactttggaggtcaaggtgggaggattgtttgaagccaggagtttgagaccaacctcagcaaaaaagtgagactctgtctccacaaaaagatatttttaaaaatagctgggygtggtggcatgtgcctgtagtcccagctacttgggaagctgaagtgggatgatttgagcccaggagtttgtggctgaggtgagcaccactgtactccagcctgggcaacagagcaagactctgtctttaaatacataaaataaaaagaaaatgaaagcattcaaattattttaactcccatggaacatatttttatgta

SEQ ID NO: 215395 - DNA, 598 bp, Homo sapiens
ggcctgagtttaaacttaatgtggactcttgccatttgttaattgaagcatttctgatgagcattctaattccatcaaactcacatactggatctgttattttatactgattatttccatgtaggctccaatgcaaattagcatctaacttacaatacctcaaaggagttccagaacatgaccatttagtacttcagaaatcaaagttgcattatttttatacagtaattatatcagatgtatgtatgcctcttgtctttcaagcctgaaattaatttttggaaatctgcatttttaccatatgataagcattgagtctcaagaaacagtttgcttcactgaagaatgagtcaagggtattgctttcagtctttaatagaatgcagattacctactgaaaaggaaggcctttatttcataaattgaatagaaagataagtgaaaataattgtaagtatttaaaagtagatcacctgaaaagtcaaatctaaatatctctcttgagagcctgtacttttatttaaataaaaagtattttcatttattttaaagattttaatrttttgttctattcattttaaactagatttgactagca

SEQ ID NO: 215396 - DNA, 604 bp, Homo sapiens
tgtctctagggtgattatggtaggggcatagtggctccagagtctgagtggcagatcaaaaatctggttggatcttaacttaatcaccttctcaagaagagcaattgactggcttctagccagagaccccaaattgggtcaagacaacattaaaaacaaagaaaacgaaacacactatattgcattatatatatttgtaattactactgtgtgtcttatttttttcttcttatcactcatatcagaattttgttcacaagtcactatcaaatgatcttcaatacaggtcagcaacaacatccacattgacaaatcaaaggctaattctcagtgctggcctgtgtatggcatttgaaatggtctgtccctcatgttctttaaatatgttatcctgttatttcctgcacagcccttcatcactagtcatcaccttgtagtcttctttgcccattccttgactttccaacttttaaacattgtttgtaccagagtyagtcaaacttcttttcatgtctgtgtgcattcactgccagagtccccttattcaccccagactttaaataccatcattaaactgatgactcagaaatatgtaagaacatca

SEQ ID NO: 215397 - DNA, 553 bp, Homo sapiens
taaaaacaaagaaaacgaaacacactatattgcattatatatatttgtaattactactgtgtgtcttatttttttcttcttatcactcatatcagaattttgttcacaagtcactatcaaatgatcttcaatacaggtcagcaacaacatccacattgacaaatcaaaggctaattctcagtgctggcctgtgtatggcatttgaaatggtctgtccctcatgttctttaaatatgttatcctgttatttcctgcacagcccttcatcactagtcatcaccttgtagtcttctttgcccattccttgactttccaacttttaaacattgtttgtaccagagttagtcaaacttcttttcatgtctgtgtgcattcactgccagagtccccttattcaccccagactttaaataccatcattraactgatgactcagaaatatgtaagaacatcacattgaacttactcttgtcttacttaaatttacatcaatcttaaatttatattttacttacatcaactcttaagttaaactatattaaacttttatcac

SEQ ID NO: 215398 - DNA, 580 bp, Homo sapiens
tagtctaaaatgatacatataatcattatttactcatttcaattccatttttcctggtcctgtctttaaaatcccaattctgaccatcatcacttactagtgcctataatgccaatacaagtcatcattcttctttagttaagatttttgaaattcattttaagtttttatctttactcaattttcccccttgtaaactatkttcataacattatatttcttatgttctgtattatcttttaatttcagctaaaacagaaacaatcttactttggcttaaagaaacttaattatcatgttctggtttcctctctgactttttcgtctgttatttttttttccctttctgctgcacccatactgatctgtgttctgttcattgaatacaacaagcacttctgccttagggcgtttgaatttgccattccctctgactggaatgctttccctccaaactttttcaatcaggaatgcttcagttacacgttgaaaatttcaccctgcctcccacacagatcattctggtcttgtatcttgcttcatttagctttaaaagtatgtattagttttctatcattgc

SEQ ID NO: 215399 - DNA, 573 bp, Homo sapiens
tcctgatatgaaaggatctggcaaaattccaggattataggatctgggctaatgatataatctgggccagaagtcgtaataatgaaatcatttttattgattcataatgctatcaagagaattwtgaacacccctactggctcaaaaatggaagctgatgtttgagtaaaacctgagacagattttcagctttgaactcataatcattttgttatatctctaatcttacgttctcacagtcacaatataaaggacagaaacagaaaatccagaaactattttttccccaagactattctcagccctttggtcctctagtccctttcaggtccatgccttcatttctccacagcaattgtggcccacctactatcggattctcaactgtttttcacatgtttccaatcattttgacttgattttcatctaactttaagcaattttttctgaaatttctggagttttacttaacaattgaaatgattagtgctttcatgccaactatcttattctactaaacatttcaaatctgaatcaaccagaaaataactcaaaacttttgcctttataagc

SEQ ID NO: 215400 - DNA, 488 bp, Homo sapiens
ccttgctgaaacagtgggagagatgaagagagaatgaggtcagagaagtgatgggatcagacgttggagggctttgtaggccattttaaggactgtacaagggccataacaattaataaattcaatcttctataatcagcccattaataaactcagatccagaaagaataaatgaactggtgtcctcccaaaagagcccagaacaatgcaattcatctactaattcaacaaatatctatggagtatctacattgcatcagtaggtatagtaacaacttggggacgaaggccataaaagtaggcagctatgattcagctctgtacattttataataatggtgttcataccatggaggacacattatagaagcaggaaaggggaattggttgccaagagaggagtctcytaatgagcaggaatgcttgaaaaatccttaagtacgaggagagaagtgtaaacaaaatgaagtcataaaagtgggaattct

SEQ ID NO: 215401 - DNA, 412 bp, Homo sapiens
aacagtgaccaagctaagagtcaaatcaataactcaaaccattttacaatagctgcaaaataaataaaataaaatacttaggaatatatttaaccaaggaggtaaagacctgtacaaggaaaamtacaaaacattgctgaaagaaatcatagatgacacaaacaaatggaaacacatcccatgctcatggatgggcagactcaatattgtgaaaatgaccatttgtagattgctgccaaaagcaacctacaaattcattgcaattctcataaaaataccaccaacattcttcacaaaactagaaaaagcaatcctaaaatgcatattgaaccaaaaaagagcctgcatacccaaagcaagactaagcaaaaataacaaatcctgaagcattacattacccaacttcaaacga

SEQ ID NO: 215402 - DNA, 501 bp, Homo sapiens
gtaatgttgcttttggtttactattttgttcggaaggggcagtcccagtagtgcttactttgggccaggaagccaatttgaggattctgctattacctgggtttatccattcaaactataaattaggaaatgggggaaataaccagagactggattcacagaaactctgtacccatcatgagatggacttagactcaaactctctatcactggattcccacaaataaggccctgttctgagtaggggaaacagtgatattctaggttcccagggattagtacaagtkcaaagccatgttcaataatttgtgaaaggtataaatatttttccttctctagtacacagttaccttggtggatggatgctggtccttttggggaaggggtagaggaagattttcataggttcttgtgatgtccttcctcaaaggtcctccctttcattcactgaattgagagtgtgggtattgggagataggtcctgactctctagtgataatg

SEQ ID NO: 215403 - DNA, 507 bp, Homo sapiens
ttgcttttggtttactattttgttcggaaggggcagtcccagtagtgcttactttgggccaggaagccaatttgaggattctgctattacctgggtttatccattcaaactataaattaggaaatgggggaaataaccagagactggattcacagaaactctgtacccatcatgagatggacttagactcaaactctctatcactggattcccacaaataaggccctgttctgagtaggggaaacagtgatattctaggttcccagggattagtacaagttcaaagccatgttcaataatttgtgaaaggtataaatatttwtccttctctagtacacagttaccttggtggatggatgctggtccttttggggaaggggtagaggaagattttcataggttcttgtgatgtccttcctcaaaggtcctccctttcattcactgaattgagagtgtgggtattgggagataggtcctgactctctagtgataatggaagtcaagtat

SEQ ID NO: 215404 - DNA, 589 bp, Homo sapiens
aatgctagtttccagattggggttttgatacacagatgaaagctacagtgtcatttctatatatagtatattaaaatagagcccctttgactgattttttttaaaaaaggcattctttctccccaccctttaccaccctatctttctgcagctgcaccctgccacattaatggaacactagtattccaggcatcccattttacagatggaaaataaaggccaaaagagaattgagtggcccaaattttacagcactgtaagagaaggaccagggttagaatccaagaaccctgacttccattctgtgaaatggccgttgaccactatttgtaaggccccggtgaaaacacaagcttaacgaagttaaaatgaaacacacagcatgccacttgcattatwtgccaaatgaaagagaccctgaaataaaagctgcaatcttcttatgcaatgttattccttgcactactgttcttcctacttctggggaaaactcagaaataagaacctgagtcaatgctgtttcccagttagcttaatgaaaatgagtgaggcaaaggatcttctttggaagggaagtagaagaatagga

SEQ ID NO: 215405 - DNA, 606 bp, Homo sapiens
tcacatgtttacatatgctttagtcatggagaatttcaatagagagatccatttacctcacatcagaaaaataaaaattcacattagttatcgttttcatggtggaatctaaaatatgctcaatccattttagtgtgaagaaatgaaaactaattgttgctgaacaatataaaatcacagaatggcatgtaagattcaactgtatctgcttttgaccattttgccactcaattattraaaactagaagtagtagactcacaagtgcccagtccctgcagtcttgtgaaatataatcaactcttaacacaaaaacataaactgccctgttttaagacctaacatcccataatagtaaagctttcccttttcaaatgtaattgcacatttttagctactgtctttccttccattaaatcttgcctgaaatgagctcttcctgccacttttacctttgtcctcaattctgtgcactcagaattattttgactgtcaaaatcactaattttggatttcgtctttctcaactttaatcttctcaatctcttacatatcaatacagataaatatgaattgtatgcatctacatagtaataactacataggta

SEQ ID NO: 215406 - DNA, 550 bp, Homo sapiens
gagcaacaggactcaataggtctcttcacctttttctctttctctaccctccagatgaccaaagttagtccaggtgcccagaatgaaaattaaccagtcttgaatccttaacaggaaaagttgttcagctccttctaaagagcctttgattcttttattccagaccatcaggacactgctaacagcagagaacctgttcaccaaccaccatagcagctcccttcccagctaagagatcaactttcatcttcttcacctcccccctctattcaatcatttctcttgtcctcaccttcccatagagggttcatttcctcattatgtctattgtgatagccaacacataaatgaaaatattatagatcattgactttcccaatagcaccagccatgtctcagccactgcagttcaaccaggctgcagaaytgagttgttaattgaatggaattagagttggaggaaaagtgggttaggatctcaggtggagggtctggggtaaaggtagaaattacaaacttgtgtttcccaaaatatttatgtggtgacttg

SEQ ID NO: 215407 - DNA, 523 bp, Homo sapiens
aattccagagacacatgggtatggaacttgatctaaaagcctcctagtaatagttgcagattagattgaaagccaaactagactgtacacaagtctgtataaatcccaaaatagagctttaaaataataacttactgagtcatgatttctgcatctcatatgcagtattccttaaatcacatgttgatggctaatcaacaaaatccaaagacgcaaattagatggtacaatatttacagagaaaatatatgtgtagtttgaaaagcaaggattctcagggttacagtcccacccccattccccccagaaatgatagcagttgcaatctgaactctccacattgtaaccaagaaaggaatgaatataacaatggaaagagagagatttaagatagaacttcttagttaaaggagtctggaccttcaagaaatatgtttaagaaagattcagaagaaatactaggtaagatgaattattccttttyctcaagtaaaattctagcagcgtacttgttaaatgttta

SEQ ID NO: 215408 - DNA, 622 bp, Homo sapiens
ataaatgacttattttacaatgatctgtgatatcaagtgttttaagcctytgatattcgacaaacctcaaaatcaaattataagttgtgtctttttctgacccaactaatcctttaaggtgtcgtgttccctaaagtccaaaaatgacagaatttggcttattttgtgtaaaaattatacaggaagcattgtcaaatatgaaattgtgtttggttttttggggggctatctttgtataaatatgttattggtatgtgttccaaaattatgggaaatgcctatatttctgatatgacttattatacattatcagtaataattataattgttattttaaattattatgtgccacagaggtaacacatttccttgtcaattttgtctttgactatagctaccctaaaactttttgtcatccacagatgattgttgtcttgttttggtcctctttagaaggcagttttataatcagctacaaaattctaacaattgctcttgaatccaggtttctgttaactttagagatggtgacatcagaatagaggaaaaactttcaggactcacagagagctaaaatgttcatgaatatcaagcaaaacaggaattaactgcatggactgaa

SEQ ID NO: 215409 - DNA, 597 bp, Homo sapiens
aagcttgatgtgagataagtttccaaggttcagagctaatatgtgcatgacagagctgagacatgcaataaaaaccctgctggaataaaaggccatgctatttctagacactacaacagagttgggaaatgatgaagccatacccagtcgccacctgttttggtacaacccaaaagccaaatakgcttcttatacttatgaatagttgaaagaaatccaaagaagaaaagagtacattgtgacacatgaaaattattggaaatttaaatctcagtgtccctgaagaaagtttgatgtaaatggccatgatcactcatgtatgtacttgccacggctgctcgcacgctactacagcagagttgaatagttgggacaagaccacatggctcccaaagactaaactatttcatctctagctttttacagaaaaagttcacagacccctgaattcaaccaatggttctcaaacttgaacacgtatatgaataatctggggagatgatttttaacaagggaaaagcatacagatttggtatagtaatttttacacaggcatgggagccctcacaagaaaaacaaagactcacagaagcaatt

SEQ ID NO: 215410 - DNA, 515 bp, Homo sapiens
acccagtcgccacctgttttggtacaacccaaaagccaaataggcttcttatacttatgaatagttgaaagaaatccaaagaagaaaagagtacattgtgacacatgaaaattattggaaatttaaatctcagtgtccctgaagaaagtttgatgtaaatggccatgatcactcatgtatgtacttgccacggctgctckcacgctactacagcagagttgaatagttgggacaagaccacatggctcccaaagactaaactatttcatctctagctttttacagaaaaagttcacagacccctgaattcaaccaatggttctcaaacttgaacacgtatatgaataatctggggagatgatttttaacaagggaaaagcatacagatttggtatagtaatttttacacaggcatgggagccctcacaagaaaaacaaagactcacagaagcaattagggctgaaagcttacatactgggttggacaaagagtagtaaatatgaaaatgtgacaa

SEQ ID NO: 215411 - DNA, 577 bp, Homo sapiens
agctttttacagaaaaagttcacagacccctgaattcaaccaatggttctcaaacttgaacacgtatatgaataatctggggagatgatttttaacaagggaaaagcatacagatttggtatagtaatttttacacaggcatgggagccctcacaagaaaaacaaagactcacagaagcaattagggctgaaagcttacatactgggttggacaaagagtagtaaatatgaaaatgtgacaaggtctgagcctcactctagaggtcctgactcaataggtctgtggtggattctgagaatttccatttataaagtgttcctgggtgccactcttgctgctgatctagggttcacccttggaaaacccatgtgctggatgaattaaaggaggtgaacatactttctaatgtgctaacatggttttgctgataagattcttcagttattaaaaaaagcaatagattttgcagctagaggataaaccttagcaactctacartcctgcccactctgtatcttctctttgtatgatgtgtttaggatttatactgccagatcactcacactgtttgcattt

SEQ ID NO: 215412 - DNA, 563 bp, Homo sapiens
gcatattactgtagcaattacaaaggctttacctgactggcttcgtgtgattattgagcatgtgggtatccagtacttcaagcaacattttttgaaaaggctatttgcttctcttcatcacatgtttagttgcccttatcacatgtcaattgactgtaactgcaagggtttatttttggagaatgaattcagtttcattggtccacatgcctatgcttatgccagtgcatacgctgttttgattaatgttgcgttgtgttaagttttgaaattgaaaggggtgaacctaacaagtttgttcttttttcacaagattgtttgtttattctagattctcttacatttccatagaaattttaatatcagctttacatattctgcaaaattgtcagctaggatttagatagggattccgttgaatttattaatcaaattggcgagtgtagccctattaacaatattaaatccgattcataaatactggatgtcyttccatatatatagatgttctttaattattttatgtacattttttagatcttagagtacaagcctgtcatgct

SEQ ID NO: 215413 - DNA, 588 bp, Homo sapiens
gtaatacttagttattaacattaatgtacttgtatggtcttttctgacatatcattttattttgtcttgttatgtgaaccgagattttcagaaacgattacttattttgatgttttctttccaagaaatatggccatttagcccctagagtggatcagctycacccattagttttcttaatctcttccaggaattcctgtgagatagcttctagtaaatagcagttactaggacatgcactgcttcaactgagttacgtaatgcagaactcagggaaatttttattcacatcactgtttagtggcatattttcacttgaagagataagaagaagacaaaatgatcttattaaataatgatatttcaaacatattctccaggaacgagtttatccctaaaggatattccatgtaatcaaaccatttccttgagcttctctaatttcctaaaataaaaacagcaaaagaaaaagaagagaattggtgtgggaacaccagtgcagtataaatgccctccttctcttatgtcacggatctcatttcctttttactccatagggtagttgcatgttctgaatgttacatgctt

SEQ ID NO: 215414 - DNA, 455 bp, Homo sapiens
tcattccctgctgcttgcttcctaatccagatcagcttcttataacatgctgtcacatatgtgatctggtcttctgacattcgcatctggatgctgggtatgtccatcttggctccagtcacctaagatctaacacctttggtactggcagccatagtctcaaatgtcatatgcctgcagggtcaactttcatttacctgtttgctggtttatttttgtttgcatggtcattgtagaactctgttaatttacacgagtccagttgtttcttacaagtatgtgatawctgggtttggttatgtccacaagtatgcttgtatcatacatatttttttctttttctcagtgtcctttcctggttttggtatcaagattataaaataaattagtagtgatttttttaaataataaaaaagattggaagagtgctctttaaatatttagcaaaaattttc

SEQ ID NO: 215415 - DNA, 531 bp, Homo sapiens
cacatgttctctcttataagtgggagctgaaggatgagaaaacatgaacacatgacggggaacaacgcacactggggcctgttgtagggtggggttgggaggagggagcacatcaggcagaatagttaatggatgctgggcttaatacttggtgatgggatggtctatgcagcaaaccaccatggtacacatttacctatacaacaaacctgcacatcctgcacatgtattgataaacttaaaacttaaaaaaaaaactcaaaaaggaatcaatgatctaaatataagagctaaggctctaggccacaaakaaaatctggcattgacccaatagcacttaaaaaaaaaaaaaataaaaaaaaataaaaaaataataattggagcataaggaaggaagaaaaaataaaagaaaatgctggcagaaatatgtgtaaatacaatacagtatgctgttctgtgtgagttttacatcatatttgatgactgaaacaaaaatcatgaccccatctgatacttaatacaatagtattt

SEQ ID NO: 215416 - DNA, 533 bp, Homo sapiens
ttaaatgacgagttaatgggtatagcacaccaacatgggacatgtatatacatgtaacaaacctgcacgttgtgcacatgtaccctaaaacttaaagtataattaaaaaaaaactaatagtcaaatattaaagaggcagacaagtgtcatcataataattatcttaaatgtaaatattctaaatacaccaatcacaagacatagattagcagagagcataaagcaatatgactcaacaatttgcaatgcgcaagaaacaatttaaaattcaataaagaagctagattaaaagttaaaagatggaaaaaaactaccaagcatacrctaataaaaactattttaaaaataagagtggctttgttaacacatggcaaagtggactttatagcaagcaaaattactagacaaagattaccattatatcatgataaagaatcaagccaccaacaatacattacaatcttaaatatgtacacacgaaaagttggaacttcgaaatgaatgatgcaagaactgacagcactggacaacac

SEQ ID NO: 215417 - DNA, 191 bp, Homo sapiens
ggctcagggcttgcttttggagctttctcctgrtatctgtggctgattgggtaataaacttatcttttagaatcaattgactctcaagtgattcaggtgacaggggagtatattttcttaaggcctctcgtagccgctcgaggaaggcagaaggattttcttcctttccctgatttatggtggacatcatt

SEQ ID NO: 215418 - DNA, 191 bp, Homo sapiens
ggctcagggcttgcttttggagctttctcctggtatctgtggctgattgggtaataaacttatcttttagaatcaattgacyctcaagtgattcaggtgacaggggagtatattttcttaaggcctctcgtagccgctcgaggaaggcagaaggattttcttcctttccctgatttatggtggacatcatt

SEQ ID NO: 215419 - DNA, 191 bp, Homo sapiens
ggctcagggcttgcttttggagctttctcctggtatctgtggctgattgggtaataaacttatcttttagaatcaattgactctcragtgattcaggtgacaggggagtatattttcttaaggcctctcgtagccgctcgaggaaggcagaaggattttcttcctttccctgatttatggtggacatcatt

SEQ ID NO: 215420 - DNA, 191 bp, Homo sapiens
ggctcagggcttgcttttggagctttctcctggtatctgtggctgattgggtaataaacttatcttttagaatcaattgactctcaagtgattcaggtgacwggggagtatattttcttaaggcctctcgtagccgctcgaggaaggcagaaggattttcttcctttccctgatttatggtggacatcatt

SEQ ID NO: 215421 - DNA, 581 bp, Homo sapiens
aaataaaaacattgctgccaatcaaaaaatcacaaaatgactaagaaaaaaatttaccatgagagagatatgacaaatataacaaaagaaggataaaagctcccaagaacttgagatgacagaactaactgaaggagactaaaacaaaatattttaaactgactaaaaagataaaaggsggctgggcgcggctgcacgcctgtaatcccaacactttgggaggccgaagcgggtggatcacttgaggtcagttgttcaagagcagtctggccaacatggtgaaactctgtctctaccaaaatattttttaaaaaatagccgggtgtgatggtgggcacctgtaatcccagctacttgggaggctgaagcaggggaatcacttgaacccgagagcagaggctgccgtgagccgagattgtggcactgcacttcgggctgggccacagggtggggctccatttccaaaattattattattattaaattaaaaaaaaaaatttttaaacagaaaaataaaaagataaaaggggaataaaaactattttaaaaacccatatttttaaaaatgcaaacttaaaaaa

SEQ ID NO: 215422 - DNA, 581 bp, Homo sapiens
aaataaaaacattgctgccaatcaaaaaatcacaaaatgactaagaaaaaaatttaccatgagagagatatgacaaatataacaaaagaaggataaaagctcccaagaacttgagatgacagaactaactgaaggagactaaaacaaaatattttaaactgactaaaaagataaaaggcggctgggcgcggctgcacgcctgtaatcccaacactttgggaggccgaagcgggtggatcacttgaggtcagttgttcaagagcagtctggccaacatggtgaaactctgtctctaccaaaatattttttaaaaaatagccgggtgtgatggtgggcacctgtaatcccagctacttgggaggctgaagcaggggaatcacttgaacccgagagcagaggctgccgtgagccgagattgtggcactgcacttcgggctgggccacagggtggggctccatttccaaaattattattattattaaatwaaaaaaaaaaatttttaaacagaaaaataaaaagataaaaggggaataaaaactattttaaaaacccatatttttaaaaatgcaaacttaaaaaa

SEQ ID NO: 215423 - DNA, 581 bp, Homo sapiens
aaataaaaacattgctgccaatcaaaaaatcacaaaatgactaagaaaaaaatttaccatgagagagatatgacaaatataacaaaagaaggataaaagctcccaagaacttgagatgacagaactaactgaaggagactaaaacaaaatattttaaactgactaaaaagataaaaggcggctgggcgcggctgcacgcctgtaatcccaacactttgggaggccgaagcgggtggatcacttgaggtcagttgttcaagagcagtctggccaacatggtgaaactctgtctctaccaaaatattttttaaaaaatagccgggtgtgatggtgggcacctgtaatcccagctacttgggaggctgaagcaggggaatcacttgaacccgagagcagaggctgccgtgagccgagattgtggcactgcacttcgggctgggccacagggtggggctccatttccaaaattattattattattaaattaaaaaawaaaatttttaaacagaaaaataaaaagataaaaggggaataaaaactattttaaaaacccatatttttaaaaatgcaaacttaaaaaa

SEQ ID NO: 215424 - DNA, 452 bp, Homo sapiens
tacacacatattgttttttactgcattatatgctaatgatagctaaaacttgttgagtggaccagacactcttctgatccctttatgtgtattaatacctacaacagtctccatctccaattacagaaaagaacactaaggtacaaagatattaagtaatttgccccaggtcaaactactaccaaatggttgctttgcacctcgcatttccacttaatttgtcatgggcattttcccttattaatacatgtagttatgcctacawgtataaaagactgcatagtattccactgtatagatagattgtaatttaattaaacagtcttcatctcccaccaatgaacatttaggctatttttcaatactgtggtgacatctttatacatatagctttatatatccatgctaatggattcttataaattcatgacggctgggtcatgggtcatgta

SEQ ID NO: 215425 - DNA, 452 bp, Homo sapiens
tacacacatattgttttttactgcattatatgctaatgatagctaaaacttgttgagtggaccagacactcttctgatccctttatgtgtattaatacctacaacagtctccatctccaattacagaaaagaacactaaggtacaaagatattaagtaatttgccccaggtcaaactactaccaaatggttgctttgcacctcgcatttccacttaatttgtcatgggcattttcccttattaatacatgtagttatgcctacatgtataaaagactgcatagtattccactgtatagatagattgtaatttaattaaacagtcttcatctcccaccaatgaacatttaggctatttttcaatactgtggtgacatcttyatacatatagctttatatatccatgctaatggattcttataaattcatgacggctgggtcatgggtcatgta

SEQ ID NO: 215426 - DNA, 525 bp, Homo sapiens
tagaatctttttgccttctacttgggtagctattacaattgctccctcctttgctaacccagttacccatgactggttgaatagcatggactccgatgcttgctatttgaatttgatcgcccagctgctatgttggctagaagaaattattttattctctctcatctttttttccccatggactcaatagattagatgcctttttcttcaataactttycatattcaaagggtcctcctgtaagtttcaatggtagccattagaagcattagttgattagaagagcagaatgagaacattaggaatttttattttctaattttacttcgttgtaattaaggtagaaggtttgggtagttagattaatatctttcatatacacaacaaatgtttctagtgtatatacttataccagctactgtgctaggcaccaaggatacaataatagtcaaagctgaaaagacaaacactctctactcattagccactccctttatttgtttgagtattagtgtataatcacct

SEQ ID NO: 215427 - DNA, 627 bp, Homo sapiens
aaagcgcatgaaaggggcgagcgacttcgagcccttgatccagcaaaaccttatgccccaactactggatgtcccacttatactgagccaacacattgcttcaagaacatctataacccatgaagtatcctgattcatacaagcttcaccttgtgttgatcataaactttcaatacctgcaaaattgcactgatcctatttaccttcaccatggtgatygccttccctaccaacaccaaatctaaattctcgccttgtcaataaacttttaaaaacatgagcactccttttagctgaaaagacgtccctaaagcttcttaccctgccgtcaaaagaaggtaatcaatgagccagaggaatgtcccatcttttttctacaaacatcctccttagcgttactaaatttaacaccaatgtaagttttaccgctgagcaggtccatggttgcctgcagactaggtggggggtttaagggtgggaaagagggatttcaaagaaggatgaggagattttcaggggtcttgaatgtggtcatgggttcacaggtgtacacatatgcccaaacttataaaatgttatactttaagtatattcaccttactgtgtcgataatatttcaatagatct

SEQ ID NO: 215428 - DNA, 437 bp, Homo sapiens
taataatttccacatgtcaagggtgggaccaggtgggaggtgattggatcacgggggcggtttccyccttgctgttctcatgataatgagtgagtctcacaagatctgagagttttataagcatctggcatttcccctgcttgcactcactccatcctgcctccctgtaaagaaggtgcctgcttctcctttgccttctgccacgattctaagtttcctgaggcctcctcagcaacgctgaactgtgagtcaattaagcctcttccctttgtaaattacccagttgtgggtatttcttcatagcattgtgagaacagacttatacaccattacatggagataacaagattatatttaagtgctgaaaatattatgaattcaagttttcttcagatcaaaattatgtttccctaaaccgtccagaaaaatctctaaaa

SEQ ID NO: 215429 - DNA, 590 bp, Homo sapiens
agggggtttccgttccttgtgggttgctggaatgagagcctcagtccctcactggctatctgtttgctggaggcctccctctgttcctgggcaygtggacttctccatagggcagctcacatcatggttcttagagcaagcaaacgagaaaatgatcaagagcaggtagctaagatggaacggaaaccacagtcctttgataacctggtattggaagtgacatcttatttccatcatctttcattaattagaaatgagaaatggctgggtgtggtttttcccacctataaacccaacactttgggaaacagagggagttcaagatcagcctgggcagcataaggagaccctgtctctaaaaataatttttaaaattagccggcatggtggcatgcacctggggtcccagctactcaggaggctgaggcaggaggatcacctaaggctggaaggctgaagctgcagtaagccatgattgtgccactgcactccagcctgggtgttggagtgtgaagggctattgaagggcttgtatccacagtgagatcatgtctcaaaaaaaaaagtgagaaataagtccaaccacaact

SEQ ID NO: 215430 - DNA, 502 bp, Homo sapiens
agctagaaatatttaacggattaggactgcgtgtaccagcagacagacctgatttaagtttttcacatgatatgaattctccagggtaaaacccaacatgctggcatcattccaggttaaagcaggagataaaactggaagaattcagactgctccattcatttcaaacccagaaagcgaggctctccttatagcttattgtttcaggattagcgtatgtaatgttagtgccacactgaataccgatgagatggggcctcacttcattaagcatttgatatgtttaaactgctaccccatttcaaagcctatggaaatcatcgcacactgacaacttgtcctacaaacggaatgcaaaagcgtgacttcaccggctgcaggtgagctttctctctttctctctcaccttctagtcatttttaaatgtggaggaaaaaartgtgctttttccaactcccttgtgtcttagagtaagaaaagaacacattttctaccatttcca

SEQ ID NO: 215431 - DNA, 541 bp, Homo sapiens
tggacctgacagaaattttcaccagatcccagatcttggatctgattagatggaatggttgggtgtcttctttcagaagggaaagaagagtgcaaacacaggttttggtcaccagcaccaaaatccatttctggttcttcctggacacacagctaatctaacttctcagcctctcttacaggtaggtctgaccatgggactgaccaggctctgtgcaatgaaatgtgagtgaaggtgtgtgttgcttccaggtctggcccgtaaacactgcccatgcatgtgtgctccttggaatgccttttctctgctggctcactgggatgactcaccgtcaacggtgaccttgaaaagcatgtaaagtcaaatacagcctgatattagaactttagagtgaattatccttgctcagactataaactcagcccaactgaggcatcagtaatatttaaattaacatgcttcctccaatatttcatcacagctccccatgattatrccttcaagctctcaatataatggaaactcagcccctcagctccag

SEQ ID NO: 215432 - DNA, 541 bp, Homo sapiens
tggacctgacagaaattttcaccagatcccagatcttggatctgattagatggaatggttgggtgtcttctttcagaagggaaagaagagtgcaaacacaggttttggtcaccagcaccaaaatccatttctggttcttcctggacacacagctaatctaacttctcagcctctcttacaggtaggtctgaccatgggactgaccaggctctgtgcaatgaaatgtgagtgaaggtgtgtgttgcttccaggtctggcccgtaaacactgcccatgcatgtgtgctccttggaatgccttttctctgctggctcactgggatgactcaccgtcaacggtgaccttgaaaagcatgtaaagtcaaatacagcctgatattagaactttagagtgaattatccttgctcagactataaactcagcccaactgaggcatcagtaatatttaaattaacatgcttcctccaatatttcatcacagctccccatgattataccttcaagctctcaayataatggaaactcagcccctcagctccag

SEQ ID NO: 215433 - DNA, 487 bp, Homo sapiens
tgttttctttgcaaattcaaatctttgtstaagctgccctgaagccatagtgtgctggaactggcttgtgctgactcttgacagcttctgtaccccatgctgcattaggtcatatcttgtggttagcttgaaactggctatggtgggagtatttacaacatggaaatctgcaaatgttacgattcatagctttcctctactcccccaacaccaaagagctggtggttaaatattcaccagcacaccactgccttttaggaaaagccttctgacatggccttattttaacaactttcctatttccttgtgcttttagggccatttaaaaaattacggcatagctgagttatttagtttctctctttatctctcctacactgctacttttaatattttccctcaccagagagcctgacaatgcagtagactagttggtatatatctgattgctggggacaatcagtgtaacaaaaccctgaactctgca

SEQ ID NO: 215434 - DNA, 576 bp, Homo sapiens
agtcctgtcaattgggaatctatttggaaacatattttcaagctttgtgtttcatcctgtcttcttttcctaaagatctttagaagtgctgcacacagtgaacctccttaatcaygtattttctcgcaacctttctttgtcttagaaccacagaaggttagagctgggatcacaggaggttagaattggggaaccttagaagccacgagtctaattcttttctaacagctgaataaactaaggcccaaatgtctgagcttattttgtttattttcccaaaccatctccaaaaatgtttatggacattgaagaagactgtattgcaatgcaattccttgacaagtcatttctccctgtacctgtcaccagccatgtgggatgagacagcacattgtcattgcatattctttattccattgctagcctgccagacactcttatgctgctgctttctaggtttcccaacccactgattatattgcattttggatgatttctcccccagctgccttcatttgcatttttctgaaatcaaatctcattgtgataatttctattcatatttctaacctcttt

SEQ ID NO: 215435 - DNA, 606 bp, Homo sapiens
gctgcacacagtgaacctccttaatcatgtattttctcgcaacctttctttktcttagaaccacagaaggttagagctgggatcacaggaggttagaattggggaaccttagaagccacgagtctaattcttttctaacagctgaataaactaaggcccaaatgtctgagcttattttgtttattttcccaaaccatctccaaaaatgtttatggacattgaagaagactgtattgcaatgcaattccttgacaagtcatttctccctgtacctgtcaccagccatgtgggatgagacagcacattgtcattgcatattctttattccattgctagcctgccagacactcttatgctgctgctttctaggtttcccaacccactgattatattgcattttggatgatttctcccccagctgccttcatttgcatttttctgaaatcaaatctcattgtgataatttctattcatatttctaacctctttggatccatctgtgttattcctctttcctcaatgatgtctgcagcacctcctaatttagtaccaatcagaaatgttattaacaaaatgtgtaagccttgttcccagacattaatgaag

SEQ ID NO: 215436 - DNA, 618 bp, Homo sapiens
ttatatttcattctgttatactcttcattctgttaaaacgtgattatcacatttttttatttgcatatttgagccttcctgtgtccctgggataaatctcacttggttatggtatattatctttttggtgtgttgttgaatttggtttgctaatattttgttgaggatttttgcatctatgttcatcaggaatattggcctggagttttcttgttgtgtcttggtttggttttggtatcatggtagtgctggctttgtacaatgagtttggaagaattctctacccttcagttttttgggatagtttgagaattggtatttgttctttaaaagttttaattcagcagtgaagtcattkagtgaatttaaaagtacagttcagcagtgaagccatttagttcgggcttttctttgttgggaaactttttactacaattcaatcttgttacttatgattggtctgttctagttttctgtttcttcttggttcagtcttacgttatatgtgcctaggagtttatccatttcctctaggttttccggtttgttggcatatagttgtttcataatgatctctgtagtctctagtgatccttgtatttctgtggtactgcttgt

SEQ ID NO: 215437 - DNA, 579 bp, Homo sapiens
tacctactccctgcactcagtgaaatgaacttctttccttataccagatggggaaataaattaacttccaaacaaatggacagcctaaattagcaatcagtaaactttttctacaaaaggaggagawtactaatctggctttacaggcacacaatctctgctgcaaccactcaactccaaccttgtagtatgtaagcagccacagacaatacataaacagaggcatgctgcattccaataaatattaacaaaattaggcaggggcatatttggcccacaagttctaatcaacccctgctctaaactaacatctttatacaaatccaagtgatgtttttgttcaatggaatttattttcaaaatggagacactggttttcaaaatcaaaatttaggaaaaaaggtaaatcacatagttgagttattttgtttctcagctaaaacagtattttctgaaataccagtgatgctaagtgcttatactaatacatgtgaacctagccatctgatgacagatgaactttaattttcactcaagattatactattttaaaaaataaaatatgaaatagcagttaga

SEQ ID NO: 215438 - DNA, 579 bp, Homo sapiens
tacctactccctgcactcagtgaaatgaacttctttccttataccagatggggaaataaattaacttccaaacaaatggacagcctaaattagcaatcagtaaactttttctacaaaaggaggagattactaatctggctttacaggcayacaatctctgctgcaaccactcaactccaaccttgtagtatgtaagcagccacagacaatacataaacagaggcatgctgcattccaataaatattaacaaaattaggcaggggcatatttggcccacaagttctaatcaacccctgctctaaactaacatctttatacaaatccaagtgatgtttttgttcaatggaatttattttcaaaatggagacactggttttcaaaatcaaaatttaggaaaaaaggtaaatcacatagttgagttattttgtttctcagctaaaacagtattttctgaaataccagtgatgctaagtgcttatactaatacatgtgaacctagccatctgatgacagatgaactttaattttcactcaagattatactattttaaaaaataaaatatgaaatagcagttaga

SEQ ID NO: 215439 - DNA, 573 bp, Homo sapiens
attttgaattctgtgtctgaaagatcacatatctctgtcagtctgggattggccactggtgccttatttagttagtttggtaaggtcacattttccyggatgatcttaatgtttgtggatgatcgtcagtgtttgagcattgaaagtttagatattcattttttaattattttttaattatttttttttgagacagggtctcactctgtcacccaggctggtgtgcagtgatgagattgcagctcaatgcacccttgacttgctgggctctagcaatcctcccacctgaacctcccaagtagctaggaccacaggcatgtgccaccacacccagctaatttttgcatttttggtagagatggggtttcacttgtttcccaggctggtcttgaactcctgagctcaagcaatccacccaccttggcctcacaaaatcctgggattacaggcatgagccaccatgcccggcctggttagataatttattatagtttttgcagtctggcttatttgttcctgtccttcttgggaaggctttccaagtattcaaagggaattgagtgttgtgatcta

SEQ ID NO: 215440 - DNA, 384 bp, Homo sapiens
ggtgagctgagctgcactgttgggccaccctggagagactttggtaatatatgatgcatttcagatgataacaataactgatgacagcagttcagcttcttcattaccaaygttttgtgtggaatttcccccaaacaacctacaatgaatagacgaactcctgagttgatctagaaacgaactgaatagaggttggggaacaggccccatctccctgacctatgtaaaccgaaaccaaatgttgtccaacctgcacatcaaatcagcttccagataggttaaacaagtcatatcagaccatctagtcacaactgaaccacagggtaactgcagacacatgagcaggctcagcagagatcagttcagccagcccagaatggagga

SEQ ID NO: 215441 - DNA, 384 bp, Homo sapiens
ggtgagctgagctgcactgttgggccaccctggagagactttggtaatatatgatgcatttcagatgataacaataactgatgacagcagttcagcttcttcattaccaacgttytgtgtggaatttcccccaaacaacctacaatgaatagacgaactcctgagttgatctagaaacgaactgaatagaggttggggaacaggccccatctccctgacctatgtaaaccgaaaccaaatgttgtccaacctgcacatcaaatcagcttccagataggttaaacaagtcatatcagaccatctagtcacaactgaaccacagggtaactgcagacacatgagcaggctcagcagagatcagttcagccagcccagaatggagga

SEQ ID NO: 215442 - DNA, 530 bp, Homo sapiens
aagaatacacattgaaatactttggagagacagaaattacagggaaagacataaatcaatacatataagatttacattagtttgtcctggaaaggtrggatagcttgaagtaggggcttccaggtcataggtggattcaaagatttcctgactgccaactggttgaaagagttaagctctgcctaaacacttgaattcatcataaagaaatgcttgagtttagaaaagagggtgtggaagcaaaggttcttgtcacctagatgaatcctgtgggtagcaaacaaagtaggtggctaatgttgtttatcagaccttaaaaaaaagtcagactctttggaaaagacttagtaaggggaggagattctctgcagaatgcaaatttcccccacaacaggcagcttgcagggtcacttcagaatatgtcaaagaaatacttttagggtaaaatattttgattttcttcagggcctattatctgtcatgttggagtatggtatcttattgctacaaagcatctgttttgtcaatcc

SEQ ID NO: 215443 - DNA, 530 bp, Homo sapiens
aagaatacacattgaaatactttggagagacagaaattacagggaaagacataaatcaatacatataagatttacattagtttgtcctggaaaggtaggatagcttgaagtaggggcttccaggtcataggtggattcaaagatttcctgactgccaactggttgaaagagttaagctctgcctaaacacttgaattcatcataaagaaatgcttgagtttagaaaagrgggtgtggaagcaaaggttcttgtcacctagatgaatcctgtgggtagcaaacaaagtaggtggctaatgttgtttatcagaccttaaaaaaaagtcagactctttggaaaagacttagtaaggggaggagattctctgcagaatgcaaatttcccccacaacaggcagcttgcagggtcacttcagaatatgtcaaagaaatacttttagggtaaaatattttgattttcttcagggcctattatctgtcatgttggagtatggtatcttattgctacaaagcatctgttttgtcaatcc

SEQ ID NO: 215444 - DNA, 530 bp, Homo sapiens
aagaatacacattgaaatactttggagagacagaaattacagggaaagacataaatcaatacatataagatttacattagtttgtcctggaaaggtaggatagcttgaagtaggggcttccaggtcataggtggattcaaagatttcctgactgccaactggttgaaagagttaagctctgcctaaacacttgaattcatcataaagaaatgcttgagtttagaaaagagggtgtggaagcaaaggttcttgtcacctagatgaatcctrtgggtagcaaacaaagtaggtggctaatgttgtttatcagaccttaaaaaaaagtcagactctttggaaaagacttagtaaggggaggagattctctgcagaatgcaaatttcccccacaacaggcagcttgcagggtcacttcagaatatgtcaaagaaatacttttagggtaaaatattttgattttcttcagggcctattatctgtcatgttggagtatggtatcttattgctacaaagcatctgttttgtcaatcc

SEQ ID NO: 215445 - DNA, 530 bp, Homo sapiens
aagaatacacattgaaatactttggagagacagaaattacagggaaagacataaatcaatacatataagatttacattagtttgtcctggaaaggtaggatagcttgaagtaggggcttccaggtcataggtggattcaaagatttcctgactgccaactggttgaaagagttaagctctgcctaaacacttgaattcatcataaagaaatgcttgagtttagaaaagagggtgtggaagcaaaggttcttgtcacctagatgaatcctgtgggtagcaaacaaagtaggtggctaatgttgtttatcagaccttaaaaaaaagtcagactctttggaaaagacttagtaaggggaggagattctctgcagaatgcaaatttcccccacaacaggcagcttgcagggycacttcagaatatgtcaaagaaatacttttagggtaaaatattttgattttcttcagggcctattatctgtcatgttggagtatggtatcttattgctacaaagcatctgttttgtcaatcc

SEQ ID NO: 215446 - DNA, 552 bp, Homo sapiens
cccaattctatagaaaggaaatataaacacctgaatctcattgagttatctgggtaatcaccctgctgtgatattccactgcactttaagtgaattttgtttgccttttctcttattaatctttcttttgtcagtttattttcagcaaacatttagaggataaatggaactttcttcctttctcccaatataagcaagttcccttaaaattcagatcrcttgcaaagcagcaggaaggtttgtgcatgggctacagcactgtgattttgctcccctagtcaggcatcagtaaaattttgtggagccctagactgtagcccactgatgctgatgtagttggatccacttcccctgctactgagccaggctgggacatttttggcacattagagatgtgagatataacgagtgaaaatcgtgtccagtttcatctggatccaactgatttctccatgtacatgggaaattgcttgataagagattgactgtctctttcctaaaaatggtaacaagcaggctggtgtctgggtcatgatgatgtccccagtcact

SEQ ID NO: 215447 - DNA, 483 bp, Homo sapiens
gagtttaacattgttcctatgtaaaaaaattaaaaataaaatttattgacatgatggtacatacatttgtaagtatcaggtaatggtgttatgccattgttcttaccagtatgcgatcaaactatgtactatagatacacaaagatgataccgtgttttctcgatgcatgcarcagtcacagatccacaattatcaagagcgacaggtctctatagtactcagacactaaatgggctgcaccttattcttgttttgggcaccttcatagtctaccttcttttctgccattcagtattatttcccaaagttcatctctcttactgagggtgaccactgcatggagcatgtccctgccatgcaccatcaatgacactttcctcttttactttttatcagtgattggggaaatcattctgacccagacaacagcctccctgttaactgctttaggaaagagacactgaatctcttatcaagcagtt

SEQ ID NO: 215448 - DNA, 384 bp, Homo sapiens
caccatcaatgacactttcctcttttactttttatcagtgattggggaaatcatyctgacccagacaacagcctccctgttaactgctttaggaaagagacactgaatctcttatcaagcagttgcctatgtacatggagaaatcacttggatccagatgaaactggacagggatttgcactcgttatatctcatatctctaatgtgcccaaaaatgtcccagcctgactcagtagcagggaaagtggatccaactacatcagcatcagtgggctgccacctaggactccacaaaattttactgatgcctgactaggggagccaaatcacagtgctgcaggctgtgcacaaaccttcctgctgttttttaagctgcctgaattt

SEQ ID NO: 215449 - DNA, 483 bp, Homo sapiens
gagtttaacattgttcctatgtaaaaaaattaaaaataaaatttattgacatgatggtacatacatttgtaagtatcaggtaatggtgttatgccattgttcttaccagtatgcgatcaaactatgtactatagatacacaaagatgataccgtgttttctcgatgcatgcaacagtcacagatccacaattatcaagagcgacaggtctctatagtactcagacactaaatgggctgcaccttattcttgttttgggcaccttcatagtctaccttcttttctgccattcagtattatttcccaaagttcatctctcttactgagggtgaccactgcatggagcatgtccctgccatgcaccatcaatgacactttcctcttttactttttatcagtgattggggaaatcattctgacccagacamcagcctccctgttaactgctttaggaaagagacactgaatctcttatcaagcagtt

SEQ ID NO: 215450 - DNA, 599 bp, Homo sapiens
gaattctgataatttctttttctttgacatgtaggaatattcaggaggcacttaattttttttttttttttttaccaatctgttttacattcaatttktgaactgattttgtttttctgtgtgttaaaaccaaaaattaagttgtaagccaccaacctgctgaatggactcctcttttgtaaagagcacttcaaagaaatttgaaaaactaggttaggccatgactggcaggtgggtttagatgtgcctcattatactttggagttcagacacaactgaccaacattgtcattacaacagagatctttgggctgacaaaacagacgctttgtagcattaagataccatattccaacatgacagataataggccctgaagaaaatctaaatattttaccttaaaaatatttcttcatcatattctgaagtggttctgcaaagctgccagttgtgggggaaatttgcattctatagagaatctcctccccttactaagtcttttttaaagtctgacattttttaaagctctgataagcaacattcaccttgtactttatctgctactgataggattcatctacatgacaagaaccttggct

SEQ ID NO: 215451 - DNA, 466 bp, Homo sapiens
ctgttttacattcaatttttgaactgattttgtttttctgtgtgttaaaaccaaaaattaagttgtaagccaccaacctgctgaatggactcctcttttgtaaagagcacttcaaagaaatttgaaaaactaggttaggccatgactggcaggtgggtttagatgtgcctcattatactttggagttcagacacaactgaccaacattgtcattacaacagagatctttgggctgacaaaacagacgctttgtagcattaagataccatattccaacatgacagataataggccctgaagaaaatctaaatattttaccttaaaaatatttyttcatcatattctgaagtggttctgcaaagctgccagttgtgggggaaatttgcattctatagagaatctcctccccttactaagtcttttttaaagtctgacattttttaaagctctgataagcaacattcac

SEQ ID NO: 215452 - DNA, 458 bp, Homo sapiens
aaaaattaagttgtaagccaccaacctgctgaatggactcctcttttgtaaagagcacttcaaagaaatttgaaaaactaggttaggccatgactggcaggtgggtttagatgtgcctcattatactttggagttcagacacaactgaccaacattgtcattacaacagagatctttgggctgacaaaacagacgctttgtagcattaagataccatattccaacatgacagataataggccctgaagaaaatctaaatattttaccttaaaaatatttcttcatcatattctgaagtggttctgcaaagctgccagttgtgggggaaatttgcattctatagagaatctcctccccttastaagtcttttttaaagtctgacattttttaaagctctgataagcaacattcaccttgtactttatctgctactgataggattcatctacatgacaag

SEQ ID NO: 215453 - DNA, 504 bp, Homo sapiens
gctgggaagctttcctatgcaaatcatagccattagaaactggattcacccaaacatggtgattcccaccrttttcttccttgtcaacacatgtgcctgggaaaaacctgaaagatgctataggaagctgagagcagctgcaaccccacccttaagctttcagacaggactgaggaccacatggttagatagcccatacttcagtggcagatgcattctattttctgagggagtaccagagaatcctgcttctactgtcaacctgcctgactactatatccttggctttgaaaggttgtagtgtaaaagttaatcataggaattcggtcattcttgacatacccaacagagccaagaaaccaggaggaaaaaccactcagggtgcaaaatattgtctgaagaaagcaattgaaataggccctattatcctatggaactaatgtttatgattttttgaataaacatagaaactgactcccccagtcttaaaactcaaggtagtta

SEQ ID NO: 215454 - DNA, 538 bp, Homo sapiens
ctggctcttagagccaggctgggaagctttcctatgcaaatcatagccattagaaactggattcacccaaacatggtgattcccaccattttcttccttgtcaacacatgtgcctgggaaaaacctgaaagatgctataggaagctgagagcagctgcaaccccacccttaagctttcagacaggactgaggaccacatggttagatagcccatacttcagtggcagatgcattctattttctgagggagtaccagagaatcctgcttctactgtcaacctgcctgactactatatccttggctttgaaaggttgtagtgtaaaagttaatcataggaattcggtcattcttgacatacccaacagagccaagaaaccaggaggraaaaccactcagggtgcaaaatattgtctgaagaaagcaattgaaataggccctattatcctatggaactaatgtttatgattttttgaataaacatagaaactgactcccccagtcttaaaactcaaggtagttacatttgttaatctgagt

SEQ ID NO: 215455 - DNA, 504 bp, Homo sapiens
gctgggaagctttcctatgcaaatcatagccattagaaactggattcacccaaacatggtgattcccaccattttcttccttgtcaacacatgtgcctgggaaaaacctgaaagatgctataggaagctgagagcagctgcaaccccacccttaagctttcagacaggactgaggaccacatggttagatagcccatacttcagtggcagatgcattctattttctgagggagtaccagagaatcctgcttctactgtcaacctgcctgactactatatccttggctttgaaaggttgtagtgtaaaagttaatcataggaattcggtcattcttgacatacccaacagagccaagaaaccaggaggaaaaaccactcagggtgcaaaatattgtctgaagaawgcaattgaaataggccctattatcctatggaactaatgtttatgattttttgaataaacatagaaactgactcccccagtcttaaaactcaaggtagtta

SEQ ID NO: 215456 - DNA, 538 bp, Homo sapiens
ctggctcttagagccaggctgggaagctttcctatgcaaatcatagccattagaaactggattcacccaaacatggtgattcccaccattttcttccttgtcaacacatgtgcctgggaaaaacctgaaagatgctataggaagctgagagcagctgcaaccccacccttaagctttcagacaggactgaggaccacatggttagatagcccatacttcagtggcagatgcattctattttctgagggagtaccagagaatcctgcttctactgtcaacctgcctgactactatatccttggctttgaaaggttgtagtgtaaaagttaatcataggaattcggtcattcttgacatacccaacagagccaagaaaccaggaggaaaaaccactcagggtgcaaaatattgtctgaagaaagcaattgaaataggccctattatccyatggaactaatgtttatgattttttgaataaacatagaaactgactcccccagtcttaaaactcaaggtagttacatttgttaatctgagt

SEQ ID NO: 215457 - DNA, 543 bp, Homo sapiens
tattttaaatggtaatatattgatgccaacatactgtgagaagctatgcatataaaggaaataccatgacaaccaatttgaaaatcattataaaaagagataccccaaaattaggyaaaattaaaatgaaattgtaaagatgttcaagtaacccaaaagaaggcagcaaaaagaaaacagagaagcaaaaaaagatacagcaaaaaagtagagtgcagacttaaattttaatatatcaatatcaatatattaaatatgcaaattatgaaactttgaaaaagacaacaattgatgaataaaaagaaatgtcccaactgtatgttatctacaagacactcacatcaaatataacagtataagtagattgaatataaaaggaaggaaaatggtatactatgcaaacattaataaaaagaatcagtagcaaatactaatatcagataaagtagactacagagccaaagaatgttaccagggacagaaaggtacattacataatgaagaaagtcattttggaaagaagacagagcagttctaagtgcg

SEQ ID NO: 215458 - DNA, 543 bp, Homo sapiens
tattttaaatggtaatatattgatgccaacatactgtgagaagctatgcatataaaggaaataccatgacaaccaatttgaaaatcattataaaaagagataccccaaaattaggcaaaattaaaatgaaattgtraagatgttcaagtaacccaaaagaaggcagcaaaaagaaaacagagaagcaaaaaaagatacagcaaaaaagtagagtgcagacttaaattttaatatatcaatatcaatatattaaatatgcaaattatgaaactttgaaaaagacaacaattgatgaataaaaagaaatgtcccaactgtatgttatctacaagacactcacatcaaatataacagtataagtagattgaatataaaaggaaggaaaatggtatactatgcaaacattaataaaaagaatcagtagcaaatactaatatcagataaagtagactacagagccaaagaatgttaccagggacagaaaggtacattacataatgaagaaagtcattttggaaagaagacagagcagttctaagtgcg

SEQ ID NO: 215459 - DNA, 543 bp, Homo sapiens
tattttaaatggtaatatattgatgccaacatactgtgagaagctatgcatataaaggaaataccatgacaaccaatttgaaaatcattataaaaagagataccccaaaattaggcaaaattaaaatgaaattgtaaagatgttcaagtaacccaaaagaaggcagcaaaaagaaaacagagaagcaaaaaaagatayagcaaaaaagtagagtgcagacttaaattttaatatatcaatatcaatatattaaatatgcaaattatgaaactttgaaaaagacaacaattgatgaataaaaagaaatgtcccaactgtatgttatctacaagacactcacatcaaatataacagtataagtagattgaatataaaaggaaggaaaatggtatactatgcaaacattaataaaaagaatcagtagcaaatactaatatcagataaagtagactacagagccaaagaatgttaccagggacagaaaggtacattacataatgaagaaagtcattttggaaagaagacagagcagttctaagtgcg

SEQ ID NO: 215460 - DNA, 543 bp, Homo sapiens
tattttaaatggtaatatattgatgccaacatactgtgagaagctatgcatataaaggaaataccatgacaaccaatttgaaaatcattataaaaagagataccccaaaattaggcaaaattaaaatgaaattgtaaagatgttcaagtaacccaaaagaaggcagcaaaaagaaaacagagaagcaaaaaaagatacagcaaaaaagtagagtgcagacttaaattttaatatatcaatatcaatatattaaatatgcaaattatgaaactttgaaaaagacaacaattgatgaataaaaagaaatgtcccaactgtatgttatctacaagacactcacatcaaatataacagtataagtagattgaatataaaaggaaggaaaatggtatactatgcaaacattaataaaaagaatcagtagcaaatactaatatcagataaagtagactacagagccaaagaatgttaccagggrcagaaaggtacattacataatgaagaaagtcattttggaaagaagacagagcagttctaagtgcg

SEQ ID NO: 215461 - DNA, 520 bp, Homo sapiens
atgttaccagggacagaaaggtacattacataatgaagaaagtcattttggaaagaagacagagcagttctaagtgcgtagacaccaagcaaaagagcgatatagtgcatgtggcagaaactaacaaaacaattgcacacggagacttcaaaaccccttgttaatcttcgataggacaactggacagaaaatcagcaaggatttaggactcaacaatatcatcaacccacgagatctaactgacatttatagaacactccaacccataacaatagaagttcacatttttttcttccaagtgcccacaacatataccaagataggacatatcctgcccacataacctctcaacatatttgcaataattaaaatcacagtgaatgtgttctctgaccatggagggatcaaactagaaatcaatattgaaaatgtaaccyccaaattttcaaatatatgggaactatacaatattgttctttccaaagaaccagcctttggtttgcctggtgttcagtgtcac

SEQ ID NO: 215462 - DNA, 613 bp, Homo sapiens
accatgatgtacatcaacaggacccgagcactggcctaccaactgaggatgtgacacctaccacatgggagaaaactggaggccccccgtttaactaaattgactstgtggcaaatgtcatgatcacaactaaaaaaaacattggtggactgatattttgatgcaccatatttctttgattgcatagataagaaatgtcccaatggcaaagacaaaaacaaggagaggactaatgctaccctctgtctatgaacaatattgtctgagaaaaactttgctccttcaactctgccatcagtgagacttggctaatgaacacaccaatacctgcataaccatgactgggtgattaaacaataaaatgggagaaaaggggctgtatgcacccaagggctacatatttctctgtgaatggtctgggagtgaacaaaatgcaggatgtgtgatgccatctctggataactgtgggatggtgagattctgcatgttgggcatgctggggttgtctctggatattactccttggaattaggtgaaccattgagcctgcagcccaaagctgtacctcagacttactagggacctgccagaaggtataacagattatcggttt

SEQ ID NO: 215463 - DNA, 446 bp, Homo sapiens
ctgggggatatatgcttaatgcagctcccctgaatttgtgagcagtttccttccctgaagcccctgccaggcagccatgtgccagggcctgtggttcctctcagattctcagccctgtggctcaggagagcagctgcttcctccacagcccagggccagtgcctggcagctctcaggcactgccagcctgaccttagccctgggctaaggaccctattccaaatgtctcctcatttattgcagtatctgaaagtctgtcttgttcttaaactcaaagtccacatttccacaattsgtaaagctagcatttgccatctgaaaatttagaaatgtgaattcattgtcactctcagaaactgccctcttccaactctaccagacagagttgcccatatgttctcttctctccacacaactttacttagaattatagtgaaatgtaacat

SEQ ID NO: 215464 - DNA, 446 bp, Homo sapiens
ctgggggatatatgcttaatgcagctcccctgaatttgtgagcagtttccttccctgaagcccctgccaggcagccatgtgccagggcctgtggttcctctcagattctcagccctgtggctcaggagagcagctgcttcctccacagcccagggccagtgcctggcagctctcaggcactgccagcctgaccttagccctgggctaaggaccctattccaaatgtctcctcatttattgcagtatctgaaagtctgtcttgttcttaaactcaaagtccacatttccacaattcstaaagctagcatttgccatctgaaaatttagaaatgtgaattcattgtcactctcagaaactgccctcttccaactctaccagacagagttgcccatatgttctcttctctccacacaactttacttagaattatagtgaaatgtaacat

SEQ ID NO: 215465 - DNA, 576 bp, Homo sapiens
tgtggggggtgtacaccaccatgtgatattgttcataatatccagagaggggagaggatgatattatgcccaatatcgtggggggtgtgccccccctgtgatattcttggtaataatcggggggagatgwcattatttccaatattgtggggaatgtacacccccttttgatattgtttgtaacatttggaggggagaggatgacattactcccaatatagtggggggtgtaaaatccccctgtgatattgtttttaatatccggggggatttgagatgatattactttaaacatcgtaaacaccttttgtgtacacccccctgtaatatcgttcataatatccaggtggggagaggatgatattacgcccaataccacggggttgtacatacccctgtgacattgttcctaatatccaggggaggaggggatgatattattcccaatatctcagggagtgtacacctccctgtgatattgttcataatatccaggggtgattggagatgatattactttcaatatcataaactttttgtgtatacacgcccctgtcctattgtttgtaatatcca

SEQ ID NO: 215466 - DNA, 410 bp, Homo sapiens
cataaagatgggaacacatttttagcctctttctgtcttctcctttgtgattcctaatacaaatttgttggtattatacacatggacctatgatgtctgaggttttattcattcttctttataattttttccttctttatatgagaycatttctattgacttgtttttcagttcactgattcttgtgtcatcttaaattgctattgagtctatctaatacatttttcaattgagttgttgtacttttcatttctagatttcccagtatgcttgttttcatagttttgtctctgtttgagagcctctattggttgaatcattgtctttacaaattcctttttcagtcttttattataggttaaaataattctttgaacatatatttgataagggtggagcacatagacacc

SEQ ID NO: 215467 - DNA, 423 bp, Homo sapiens
aaatgtgactgtaaaaatgcccctggctgctactctcggccctctgcctatgaattacccctgctccgcaggagtagtcacagagctgtaacactgctgccccatcaataaagctgttttcttctattactggcttactcttaacattccttcctgagcaaagctgaggacttgccttgcatcagtattgagccagccactcaccactagagatggtgagaagcagcatttgatgtggcagtaagacagtggaaacagcggagaagcaagacagcaagagacagcaagagatggcactttatgagaagatggacacartgatcagcaatgggcaagacagctattggagaagtggcaagacagcgatcagtgagagaggatgagacgctgatatgcgctacagcgatcaaagctacagagttg

SEQ ID NO: 215468 - DNA, 422 bp, Homo sapiens
caaataagtaacatcagaaattaaatagaaaacattacaatatatgccacagatataaaaaggatcataagagattatatgaccaattatataaaaacaattggataacatagaagatatatattcctagacacatgcaacttaacaagactgaatcatgtagaaatagaaaatctgagcagaccaaaaatgagtgaagagattgaatcwgtaataaaaagtctcccatcaaagaaaagcccagaatctattggcttcatcattgaattttaccactgaaagaacagtgaatgccaattcttctcaaatacgtctgaaaaatagaacaggtaatacttccaaattcattttacaagaccagcattactcagttacctaagccagacaaaaacactagaagaatagaaaactacaggccaata

SEQ ID NO: 215469 - DNA, 467 bp, Homo sapiens
agatatagatagagttagctaaaatatattgtgaatgccacaaaatgtagtgcaagcccaaacatgttaaaaaaaattcactttcaaagcctgataatctaaggcagggctgctctggctgagcagggcctggtcaaggcagagctgggagcctgtagggtgatgagtctcttctctgagatgttgactctgaggctctcctaggcaagatggcttctgctcatactttgtggtttgcaaggcaggaagttttgayggtagttgcatggatcattggaaacagaacgtactaccattgccaatccaggcaaagagaagggcttggcaattttgttttagtacacaagattgagcaatctgattggttttaattttttgcagtgtgaattagaaaaactctctaatactggggaaaataggaaatgacccattgttttaaatagtttttgaaatacttccatgagatg

SEQ ID NO: 215470 - DNA, 622 bp, Homo sapiens
cattcctttaaacagcaaaagagaccaaaaaagaaaacattaaaggactcaagtgctcttacaaagaaactgccagtttggtcaacaaaatttaaacttccagtaaaaacaaaaaactctctgaggtgtagaccccaatggctaagaaaaaccacaagttcaacttgacctcaccaaaagcatttatacttttagccaaacttattaaaaacaaaattcatttgaaagggagaaaaacatgctactgggtttcataacatcaagatgacaggctaccaagggattttatttttaatactattgcctactaaacacttctcaaaatctgtttttctttcaagttcttttgtttcccacttttcagctactcctagaataggctgtctacccttgtgactagaaaacaaaacatcakttctgataacattccattttcaggaagtatttctttttttattcatattagaaagtaaagattttcccatctagtcctaggatggctgataaaccaacattagagcgaatgctttgaaaagacaatagctgaccaatgctctcaccttaggaaagtctaaaatggttcaaaggcagagtctaaacttaagatggtatgcttctttct

SEQ ID NO: 215471 - DNA, 469 bp, Homo sapiens
cttataccctaataacgcccaatatatcactataagyttgcttatctgcccttcagtagccctccttatttaatcacttttgttacttttttcttttaaaaatattaagatgttgcatctcattacttctttaagttactcacccattgccctccatcttttcagcataatttctttaaaggggtaattccttacctctactttcttactatccaccttctaaagaatgaatgcttttctgacctaaggttcccttacagtcattttagattttccttccttacagagctaatatttgagaaaagtagtgtgcattcattgtctctttccctgtcacatattcactatttacttcacctcaatatggtatctcctcccattactacactaaaagcactattttcatggtttttgataactttcttgttgctagatccaatgggtggttatcggttcttatgtcaatgga

SEQ ID NO: 215472 - DNA, 595 bp, Homo sapiens
aaacccacatgtgtgtggggtgtgttcacaaattatattaaacttgtgtctcccttctggcaaattggctatagataagaaatgtaaatcacataagatgctacacgttggtttacatgagcctctatatcttcctaagcacacatatccactggcaaccacaagaatgcgatgtaggcacaatactagtcgatttaatgtgattctatgattctcgtttatagaactggaggtttcgcatttcccattcctacctaattcaataactcagattgcttgatttacttttagagcaatgattccctcctgggagcaattttgcttcctagcaaaatttggcaatgyctggagacatttttgtttgtcacaagagggggttgtgtgctactggcatcttgtgggtcaaggccgtggatactaccaaatatcctataatgtacaagacagtcacccacaactaagaaatatcctgcaaaatgtcagtggcaccagaggagatgaatgcaaacatgctaaccacattcctagagactagtacgtgaaccagaatgccatttattaatttgcaatgatagctagaactgtcaaggggacc

SEQ ID NO: 215473 - DNA, 540 bp, Homo sapiens
tactcctcatagaacttatcacaatgaaaactgatcatttgtgtgattatatatgtattcctcctctttaagtctaaaaactctattgggatatggaacctatctcaatatgcatcatcttaaccaaggcatctaactgtactgcctgtcatgtagtaggtactaacaaatgtttattgaatccatgaatgaatgaatctttaatgtttcagtttaaaaatacatattaaacrtataacatatacaaagcacaatttgaagcactgggattacaaaatataataagataatccctacttgtgtggaagttcctgaattctgatggactagatggacacttccagttatgtcaggctgctgaagccatagcctgccctgccaacaggcaccatgaaagagctgagcctcagcagccatgttaggtatcatgtgactctgtgccttgaccacatttgaatggactgaggtgaaagagtatgaaagcaggaactggcggcatcctatcatctgagctttagcaagaagatgtggaccctgaca

SEQ ID NO: 215474 - DNA, 628 bp, Homo sapiens
agcttcactcaaacataaattatgatttagtatgtcttgaaggtatcattttgcctgacagtataagcaaaaagcagaaaatagtgattgattaaccttattttgtagtgatgcaggaatctaataaacccaaattaaggattgaaatgaagataacaaaattgaagtaaccaatatttctggttggagcccacttttattacagcgctaaaaatagtcattgacataagaaaggatagatgaatgycatcttgttattttccagcactgagataggtttagatgagtatgtcggagataggaacattaagaagttggtagccctcgcacatatgatgaataaagatagatcattataaatggcttcaaaactcttttcttcgaaggttcttactgggcttattataaaaggaacaaagattgttagaagatatgctgtcttcactgtctcaaaaacaatactttttgaaaccttctcaagaatatagtgaaatggataaagaacctctctgagaaactcctgttgtcattggattttgaaagttgtcataaaccacctctgtacctaacctaaataatgaatgttgttgtctttgttgtatttaaaatataagtattgctaccaagt

SEQ ID NO: 215475 - DNA, 628 bp, Homo sapiens
agcttcactcaaacataaattatgatttagtatgtcttgaaggtatcattttgcctgacagtataagcaaaaagcagaaaatagtgattgattaaccttattttgtagtgatgcaggaatctaataaacccaaattaaggattgaaatgaagataacaaaattgaagtaaccaatatttctggttggagcccacttttattacagcgctaaaaatagtcattgacataagaaaggatagatgaatgccatcttgttattttccagcactgagataggtttagatgagtatgtcggagataggaacattaagaagttggtagccctcgcacatatgatgaataaagatagatcattataaatggcttcaaaactcttttcttcgaaggttcttactgggcttattataaaaggaacaaagattgttagaagatatgctgtcttcactgtctcaaaaacaatactttttgaaaccttctcaagaatatagtgaaatggataaagaacctctctgagaaactcctgttgtcattggattttgaaagttgtcataaaccacctctgtacctaacctaaataatgaatgttgttgtctttgttgtrtttaaaatataagtattgctaccaagt

SEQ ID NO: 215476 - DNA, 474 bp, Homo sapiens
tgtatcatttgggcagattttcataagtagggtcatyggctgcccacttcatgcatgctttcacacctccacccctagaatctgatccttacttttctggaatatggttcaggcatagacattttcaaagctcctggggttgtttggaggcccagccagctttactaactcctggcctaatcctaccaatagaatctcattctctttgctacagtgcttgctgcaagcttgggaagctctaagccattcagtgaccagccacagggactggctcaggaaccttctgagccaaagagacaccatgcaagattacctgaggaacttctcagggtgaggatgggagcagaaacttccttttcctttcctgaacatttcagaagtgaccgtcaattcctggaaaccttggccatcttgctccctctgtgaggatgagggttgacctacaagaattacagagagaaggaggcagaattc

SEQ ID NO: 215477 - DNA, 478 bp, Homo sapiens
tgcaatttgctagtatggcactccttacattgcctgtcccattgcttgcttggaaccggggtattcacatatgaaagacgtttggctgatgcgtggggccactagccatatactttatgccgtcgtaaaaacactgggggatgacaaaattatgagctgatatttttaatatgaattataaatgtagtttaaatatctaagatgttttaactctatggttgaaacatttgaaaagtatttactatatgatccacgaccacattaaaccaccaccaacaaacgactggcatgagagagactccatacaaagataatctgtcagttttctgggttttggaatttgggcaattttcataacctttctactgttgtttctgtttgtaaactaggcatktaaatatctacttcagaagagatataatgtatatttactcataattgtgacatatgcaaagcatccatatcagtgcatatcaga

SEQ ID NO: 215478 - DNA, 542 bp, Homo sapiens
aaacaattatccacaatgtttcaaagcatacatttgcgtttgtttgtttttagcattttaatttgtaggttcattcaagttaccacatccaccaattaattgcaamagacctagccacaggaatagttgactacttttgctttcctttatttgaacaactgttattatgcagatttcttgttagaattattctgctgtaagagagtgaagtctacctaatttcatgaatataaagggggagatgaattatgagaaatatacaggagtactccatgaaacccagcaacaaaaagtacaactggaaattacaaccagagccagaagcaagagtggtataggaagaaagatggctacttcttacatctctgcctctttttcttatctttctatatatctgctctgtttccctttctgtgtcagtaaggcaataccttctgctgtttacaaggccccaaaatgactgttttacttatacctaggtgtacttgactttccattttcaaaaactatcacgtacttccagatgtaaaaggattatgtct

SEQ ID NO: 215479 - DNA, 542 bp, Homo sapiens
aaacaattatccacaatgtttcaaagcatacatttgcgtttgtttgtttttagcattttaatttgtaggttcattcaagttaccacatccaccaattaattgcaaaagacctagccacaggaatagttgactacttttgctttcctttatttgaacaactgttattatgcagatttcttgttagaattattctgctgtaagagagtgaagtctacctaatttcatgaatataaagggggagatgaattatgagaaatatacaggagtactccatgaaacccagcaacaaaaagtacaactggaaattacaaccagagccagaagcaagagtggtataggaagaaagatggctacttcttacmtctctgcctctttttcttatctttctatatatctgctctgtttccctttctgtgtcagtaaggcaataccttctgctgtttacaaggccccaaaatgactgttttacttatacctaggtgtacttgactttccattttcaaaaactatcacgtacttccagatgtaaaaggattatgtct

SEQ ID NO: 215480 - DNA, 542 bp, Homo sapiens
aaacaattatccacaatgtttcaaagcatacatttgcgtttgtttgtttttagcattttaatttgtaggttcattcaagttaccacatccaccaattaattgcaaaagacctagccacaggaatagttgactacttttgctttcctttatttgaacaactgttattatgcagatttcttgttagaattattctgctgtaagagagtgaagtctacctaatttcatgaatataaagggggagatgaattatgagaaatatacaggagtactccatgaaacccagcaacaaaaagtacaactggaaattacaaccagagccagaagcaagagtggtataggaagaaagatggctacttcttacatctctgcctctttttcttatctttctatatatctgctctgtttcccttyctgtgtcagtaaggcaataccttctgctgtttacaaggccccaaaatgactgttttacttatacctaggtgtacttgactttccattttcaaaaactatcacgtacttccagatgtaaaaggattatgtct

SEQ ID NO: 215481 - DNA, 542 bp, Homo sapiens
aaacaattatccacaatgtttcaaagcatacatttgcgtttgtttgtttttagcattttaatttgtaggttcattcaagttaccacatccaccaattaattgcaaaagacctagccacaggaatagttgactacttttgctttcctttatttgaacaactgttattatgcagatttcttgttagaattattctgctgtaagagagtgaagtctacctaatttcatgaatataaagggggagatgaattatgagaaatatacaggagtactccatgaaacccagcaacaaaaagtacaactggaaattacaaccagagccagaagcaagagtggtataggaagaaagatggctacttcttacatctctgcctctttttcttatctttctatatatctgctctgtttccctttctgtgtcagtaargcaataccttctgctgtttacaaggccccaaaatgactgttttacttatacctaggtgtacttgactttccattttcaaaaactatcacgtacttccagatgtaaaaggattatgtct

SEQ ID NO: 215482 - DNA, 579 bp, Homo sapiens
  misc_feature (1)...(579): n = A,T,C or G
caattgtcattttcaccactgaagacagggacgttggattcaggtttgaaatttgaatttagttgtataaaatcctactttattwtcgaatgaaaactttgggaacattctggctagaggttttttgaatcatgaaaggataaatctttgtgaacctagtcaattagaaatcgttgaggtcaagggggaataatgtcaatgccatttccacagaaggagagccccgcaaacctcagtgtgtgcttcttttccccttttgctccacttctccactagtcctgattgtatctcttagtgagtggtaaaagacaggcaaattgtatactaagaaagatgtcaagttgtatgagggagaaaggatggaatagattgtgctatttatttgatgtggtggtggtggcgactttccaggggagggctgggtggagagagcatgaagccactatcgatgtcatacaatagctgtggttcttcacgcacgcgtttgtgaggtcaccagacatcttgttcctattacagtgtcatgctcgacggtncaccctcctctatacagaggcactggacaataatcagaattat

SEQ ID NO: 215483 - DNA, 431 bp, Homo sapiens
tacacatggttgctaattaattacaagattcctccagttatccacacagaaatgaaaacacgtaatgatcagaacttaattaattattgaagatctagtgtggtggtaactgaatggttccaaaggcaatgcccctcaatcacatcatagtcagaatcattaatctgagaaatgaaaacaagaaagaggagagaaaaatcaggaattttgtggtcaaaaaggagaataaatwcaataaaatttttggaatgtagagaaatctggaccactaaggtggctgcgcagtgtatgtttcaataagaatttctcaaccttggtactattgatatgctgggctggaaaattctgtgctttgggggtggtcatgtacacagtaggatatttagcagtatccctggcctccacccactagatgtcagtagcattcctct

SEQ ID NO: 215484 - DNA, 540 bp, Homo sapiens
ctatttacattttaagaatgcataatgcattcaaacaacttacctctattcaagaacctagtaaatattaaagctagggccagaaatcagtctcttatatcccgtttctatcctctttcttcctagttactccactagccctgcatcttaaaacactcattgcagtgtaattgtatttattcttgcagaaaaagtcttagtttagtctcaaacttagaaataattttttaaagtctagtcaggtcactagtattgttgagggaagcccaygaatggctttttcctaagggaagagtgattctgagagcaggtaattgtcactcagaatatcatcccacccaactctggtaaatgtgagtagaacatgaaagaaccctcaagcgttagcacccttgcttcagacatcttctgctctaacagaagatgggtcacagcagaggtgttacatgtgggaggtagaccacactgttggcaggcctgatggctgcttttggcaatggtagaagcaaaggaagttcacccactgagagccgaagaaga

SEQ ID NO: 215485 - DNA, 590 bp, Homo sapiens
tagaactactggctggaatttatgggagtgtaaatctgtatcaatgcaaggaaggacttgacaaaagtaagaactgtataaagatggaaccagtgagctttaaaatgcttgagcatccttatactttgaatattacagcacagaggtatttgggctaatttcatgtaatggtataatgcaaccagtacagtacctaatatgatgaaacatgtttactaaagtctagttcctttaatacaaccattccctaatacctatcagcctaagggaaaaaatacaggctctgctcatgcagattgtggactaatagaaaagagagtaatgtgtttttagtaggcatcactgcagggatcattgtgaagaatataaaatttgaaacagsgttcgctagactggccaactttgaaatggttcagaagtgtgtactaagttgcaaaggtaaggatgaagacggagtttaaaatataaacaaatagaatagaagtaactatttttatacttataaaattatatttttgtcatattaaaagtggaaatgaaattcattgacatttcataacaacttcaacaatatcaacgcatctgctgga

SEQ ID NO: 215486 - DNA, 590 bp, Homo sapiens
tagaactactggctggaatttatgggagtgtaaatctgtatcaatgcaaggaaggacttgacaaaagtaagaactgtataaagatggaaccagtgagctttaaaatgcttgagcatccttatactttgaatattacagcacagaggtatttgggctaatttcatgtaatggtataatgcaaccagtacagtacctaatatgatgaaacatgtttactaaagtctagttcctttaatacaaccattccctaatacctatcagcctaagggaaaaaatacaggctctgctcatgcagattgtggactaatagaaaagagagtaatgtgtttttagtaggcatcactgcagggatcattgtgaagaatataaaatttgaaacagcsttcgctagactggccaactttgaaatggttcagaagtgtgtactaagttgcaaaggtaaggatgaagacggagtttaaaatataaacaaatagaatagaagtaactatttttatacttataaaattatatttttgtcatattaaaagtggaaatgaaattcattgacatttcataacaacttcaacaatatcaacgcatctgctgga

SEQ ID NO: 215487 - DNA, 490 bp, Homo sapiens
actggtctgtatgtagtctcacagaagagctttgctcagaagggatcttagttattaattagaccaataaaatttgtcttgatgggtcaaaataggatacaaagaaagaatcattcactggtaggattactacgcaaaagcacagagtttctgctgattacgctttaatttaattatattttgtgctcattctacattcacatacctgtaccttgyttttctataagtcagcagacatgggagtaagtggatactataagcaggtcgatgtttaaagatgatgaacattaaacaaaggaggaggtgactagttgctgcgaacaggactgattgatgcagaagtagagtagagctagtcacaatactgaaggaaaacaggttcactcctgcgtcttactaaggagatgtggccaagagtaccactatagctttaccttgtttctgaactgggacctgggtgtgccctatttccatgttgcagggtcagaac

SEQ ID NO: 215488 - DNA, 384 bp, Homo sapiens
  misc_feature (1)...(384): n = A,T,C or G
aggcaatgatggacttgacttycctaagaaaggtctgctgtcatggttggccagttcaggttgcctctcatccttcataatatgaagccaanttgccatgccacacatgaagcaacagctatctgaacaaggcagtgcaaccgctggaaagtgtatacagagttagttggaattaataatgtttacatttgtttaagtaattatttaaatatgtttaccctttcggttgttatgttgaacagtaattttcttcttaatacttaatcccaacacaaagacttcaacagtaaaatacagtatcattgtactacattttcctttaactataagttatgcaacataaattttggatcatttttccaaaccaaaactagcaatacttaa

SEQ ID NO: 215489 - DNA, 512 bp, Homo sapiens
aacattctgcaacaacagggatccattgaaaagcaaggaaacattgccactcagagatcctcctctcttcaaccaagttatattaggctgagggacacctttggaacaaaaacaaatatgacaaaggcaattcctttaagaacagggccacagaaccacttgacaaataccattcactgttttgaccgtaagtcagcatatgggtttaatcatatataataggaaaaatggctatttctatttctatagctactctatggcagatggaggatcctcttaaagcaaagggctttggtctacrgggcatgtgactggtttacacatataagttatggaatggaaaccaaggagtaggattgctctgtattgggaagggagagaattttgaaggtgggtagggtagtgggagtgtggttggaaagaaggagtcggtgaagctgggggaatgtggaggtagagacacagtgagaaactcccagggggtaggttgtcacaaggaagtctttggaaaa

SEQ ID NO: 215490 - DNA, 582 bp, Homo sapiens
tagaacaaacagtatttcttgcagctagattttctgttacgagcttaattattaccttaaagcaaaagtaaatcaaataacaaaaatcaattgtatttctatagactttgcaatgcataatctgaaaatgaaatttttaaaaaatgaaattttaaaaaaattttacttaaaatagcaaaaataataaaatacttaataataaatttaacaaaaaaagtgtaaaacttatactctgcaaaataccaaacattattgaaataaattaaagmcctaaataaatgaaaagacattcatttacatggatcagagactcaataagattctacataatttacattttaaaaatcccagctgaagcggagcttgcagtgagccaagatcacgccactgcactccagtctgggtgacagagcgagactctgtctcaaaaaaaaaaaaaaaaaaaaaaaaaaaatcccagctggtttcattgcagaaattgacacgctgatcctaataaggaaatgcaagggacccagaataactaaaacatattcaaaaacaaaaaacaaagttggaggattcaaacttcccaattccaaa

SEQ ID NO: 215491 - DNA, 602 bp, Homo sapiens
ctgggtatgtatccccgttgggccgttgtctagctgtaaaggagacatactaattgctgtcttacgtgttgtggtaagggcaaatgaaacagcttataaaagcatctaccctccccctttgcactgtatatgcttcatagaggactccattagttcatgaaataccttgctctccagccactctggaagaatgtttctagtctccttgttcctgtgatatggctgggagcagggctttctggggtggcaggagttttgattgagttcctgggrgtgcctgtggctgggatgctgtgtaaggtgcctacttgcttcacctgctgagcaggtgaacaatatgcagtgggtgtctgggggaagcttggatagtgtttttagataaaggcctgaaaggaaagctgataagtgactataactgacatgatgagaccccttggtctccagccaaaagtgttaagtcttagcttgtgtcccagcacagccagttcctcatcttattgcctcacttctctggcctagccagtcaccacttctccttgccactactcaccatcagtgagtgacgctccagaagaggaggagtgtttttcacatagcctcag

SEQ ID NO: 215492 - DNA, 527 bp, Homo sapiens
taggcattcgcttgacatggtttggctctgtgtccccacccaaatctgttgaattgtaatccccagggttgggggaggggcctggtgggaggcaactgaatcatgggggcggacttcctccttgctgttctcatgatagcgagttttcacaagatctggttgtttaaaagtgtgtagcacttgccccttcgctgtctctcctgctccagccatgagaagaccgtgtgattgtaagtcttctgaggcctccccagaagcagaagactaagagttactagcaaytggttttgaattttactgcttttctaaaaactgcattagaaaaaatgcagtgtatgcaaatgttcagtattgtttaatatttgtgtttattacagttgacttagataaatggatacttcctgaggctcacaactaggagtatgtaaattatatatttgttaatttaaaacactctaattacataagcatacatcccaccttttattgaactgccattgttattgccatatgtcctcaatttttat

SEQ ID NO: 215493 - DNA, 527 bp, Homo sapiens
taggcattcgcttgacatggtttggctctgtgtccccacccaaatctgttgaattgtaatccccagggttgggggaggggcctggtgggaggcaactgaatcatgggggcggacttcctccttgctgttctcatgatagcgagttttcacaagatctggttgtttaaaagtgtgtagcacttgccccttcgctgtctctcctgctccagccatgagaagaccgtgtgattgtaagtcttctgaggcctccccagaagcagaagactaagagttactagcaactggttttgaattttactgcttttctaaaaactgcattagaaaaaatgcagtgtatgcaaatgttcagtattgtttaatatttgtgtttattacagttgacttagataaatggatacttcctgaggctcacaactaggagtatgtaaattatatatttgttaatttaaaacactctaattacataagcatacatcccaccttttattgaactgccattrttattgccatatgtcctcaatttttat

SEQ ID NO: 215494 - DNA, 532 bp, Homo sapiens
aataatgtgactttccaacggttttcactttcagaaatgttctcaatattttttatacaataaatagttgtactctaagttgtaatccccagctgctagttccatttgtcccccaaaatcactcctcactttttacccatctctaccttctatccccctactccatgtctggggattccaactatcatgaactgaatcaaaaggttttcttgtcctctggtttcataggatttggccaatggaaggcacagcagaggatagggaggctggaagggagtgaggccaaggtatttgtttctttggcttctttcttgtcagattgcttgtgcagttgctgtccctccatcaaagaccacagaaagcacctatgctgagttctggctatctttcccttctcttgcctttaggcttagggtggtagcagtttccagctgggtattgctggggtgttaacttccttcttgggtactgcttmccttaacactttccaggcctttgtaaatagaccctttagcaaactcatcaattaacc

SEQ ID NO: 215495 - DNA, 554 bp, Homo sapiens
ctgaatgagttgtgatgtcaaccataagaaaagcctctattttcagactttgtaagagttcagaattgtgggtaaggaatttttgacctttattggctatttatgccttacagggtaaattacttcctaagttttttaaccctctgctcttgttgtataacacactgtctgacataggacagacataagacctatcaaaggcaagaatgctgtttacttccctgatagctgagacctgagcaccccacacaaaaatatggtcttaatttagttagttgttatttttaggacagaatggcttctttgaaataattcctagggaaaaaatcccatcagaaaagggaaagttctattrggaattcaacataaaccttgcctaaatccagccctccctaagaatagatgcctaactaccatccaagtcattgtgccttgatagaggagaatataaaacttatttgtattgggaactgagagggttatggagtagcaatagaataataaattgaagtagaagtagtactactaatagtattattgccacgtttttatat

SEQ ID NO: 215496 - DNA, 564 bp, Homo sapiens
tatgttgtgtttaaaatgtttatcattgcttattatatttgcagttcttgagcccatgaagagggtatctaagcctctttaaatgttactccttcccactcttattaatcttttagatgttggcgaagaatgctgtctgcccgaatggtcgtttctctgagaaggaggtctttttgccgcctggaaactccagcatatggggtggtctccagggactgttgtgctattgtaactcctctgagacgagtgttttaaacaagctacttggttcagtagaggatgctgtaagtattctaccatcttagctcttctaagggcacmaatttaagattaaattcaccaaagatgctaatatttaacctggagtttcgatgaggaaagttttgccgtaagcccacacacttaaaggaagctggctctctgaactccagctgcccttcaatgctggcctttctgtctgactgaaaggttgtatgccacccgcctggccaaaacctacttgaaattcctcaaactttcaaaacataccacttcttcttttctggcttcctggatccttgatct

SEQ ID NO: 215497 - DNA, 564 bp, Homo sapiens
tatgttgtgtttaaaatgtttatcattgcttattatatttgcagttcttgagcccatgaagagggtatctaagcctctttaaatgttactccttcccactcttattaatcttttagatgttggcgaagaatgctgtctgcccgaatggtcgtttctctgagaaggaggtctttttgccgcctggaaactccagcatatggggtggtctccagggactgttgtgctattgtaactcctctgagacgagtgttttaaacaagctacttggttcagtagaggatgctgtaagtattctaccatcttagctcttctaagggcacaaatttaagattaaattcaccaaagatgctaatatttaacctggagtttcgatgaggaaagttttgccgtaagcccacacacttaaaggaagctggctctctgaactccagctgcccttcaatgctggcctttctgtctgactgaaaggttgtatgccacycgcctggccaaaacctacttgaaattcctcaaactttcaaaacataccacttcttcttttctggcttcctggatccttgatct

SEQ ID NO: 215498 - DNA, 550 bp, Homo sapiens
atatttatctttgttttcgttgcatttgcttttgggttcttggtcatgaagtatttgcctaagccaatgtatagaagggtttttctgatgttatttttctagactcgttatggtctcagggcttagatttaagtcttttatccaccttgagttgatttttgtataaggtgagagatgaggatccagtttcattcttcaacatgtgggttgccaattatcccaacatcatttgttgaatagggtgtcctttccccactttatgtttttgtttgctttgttgaagatcagttggctgtaaatatttggktttatttctgggttctttattctgttcgattggtctatgtgcctatttttataccagtaccatgctattttggtgactatgtccttatagtatagtttgaagtcggataatgtgatgcctccagatttgttctttttgcttagtcttgctttgactgtgtgggttattttttggttccatatgaattttaggattttttttttagttctgtgaagagtaatggtggtgttttgatgggaattg

SEQ ID NO: 215499 - DNA, 577 bp, Homo sapiens
tttgatttgctgtctctttccttagattgtgagccctttgaggaaaagaacatcaatctagcctattggaatgactcctcttggtttcagagggaaatggtgtaaaagtttgcattcagtcaacgtgtatgtgtaggcagttgcttggcagaatggttatttgaactattcgccagtggctygagattttatctctggtaaatgagggacttcatcatcaactgcatggaattttctctggaacaatgagctttccacccaagcggtcctgggcaaatcccatcaccctctcctttttcgtaagcttctgaattgctcattaaagggcactgtctgggttttaatagtatttggcccatcactagcgctaacactagatatccattggttttgtctgcccgacatcgcttctcctttcttttggtagaggaaagtgtcttcccgtggggaacccatttcctgtggtttgggtgggctggctgtcatcccatcctgttacaatggtgggacaaaccccaggcctgacaatcagagcaccccattgctctggctggagtgattggcttagggacaggca

SEQ ID NO: 215500 - DNA, 570 bp, Homo sapiens
ttgagggaaaggcttagagaggagccaaagcactgattctctgaaaaccatttgtctcctgtttctgaaagaccagatagaacctgtggctctttctaaacattggcttgccacatgcctgaaccttccagggagcaccaactcgactttttaagggagaacgagttcacagaatctgcctgtaccttggagggaaaattcatctacagtcacatccaaattctagcaagactaaccctytgaacttctcactcccaagagctacaaggctctgtctattttacaacacaaaatcttttaagaaagctgagacaaaagaaattttatagagaaaaattttcataagagagagaaagataacaccagttcctgtcctggagatagactgttcactcttgttaattctctagtcataccagaagtataagcaaaagtgtcagtgaaatcaatccctgcactgggagagagagcccggctgtgtattgttcataacctcctgttaaattagccgattgcttagccatcagggatgatcttgattatgaacaagacacagccaggtctgtgtct

SEQ ID NO: 215501 - DNA, 569 bp, Homo sapiens
tctttctaagttctgtccctgtatgagtctgttctcacactgctataaagaactacctgagactgggtaatttataaagaaaagaggtttaattgactcacagttccacatggctgtggaggcctcaggaaacataatcacggcggaaaatgaagtagaagcaggcatagtcttcacatggctggcacaggagaaagagagagagaagagggaagtgcttacacctttaaacaaccagatttcatgagaactttatcamaagaacggcgagggggacgtccacttccatgattcaatcgcctcccaccaggctcctccttcaacaagtggggattacaatttgacatgaaatttgggtagggacacagagccaaaccatatcagtcccttgctggcctcatgactgggtaagtcacacatgctaagaagtgtgctttctcatttgtcaaacgggggcatcatgagattgtggagaaaaataaaacagattgtatatataaattggttggagcagtgcaggtttatatgttcaatcaatggaaaacagttacaaacaaggtagatattaa

SEQ ID NO: 215502 - DNA, 569 bp, Homo sapiens
tctttctaagttctgtccctgtatgagtctgttctcacactgctataaagaactacctgagactgggtaatttataaagaaaagaggtttaattgactcacagttccacatggctgtggaggcctcaggaaacataatcacggcggaaaatgaagtagaagcaggcatagtcttcacatggctggcacaggagaaagagagagagaagagggaagtgcttacacctttaaacaaccagatttcatgagaactttatcaaaagaackgcgagggggacgtccacttccatgattcaatcgcctcccaccaggctcctccttcaacaagtggggattacaatttgacatgaaatttgggtagggacacagagccaaaccatatcagtcccttgctggcctcatgactgggtaagtcacacatgctaagaagtgtgctttctcatttgtcaaacgggggcatcatgagattgtggagaaaaataaaacagattgtatatataaattggttggagcagtgcaggtttatatgttcaatcaatggaaaacagttacaaacaaggtagatattaa

SEQ ID NO: 215503 - DNA, 530 bp, Homo sapiens
agcttctgtcccagattggtgtcccaggatggtacccacctcctgtacactacctcctggggtggcagtggcccttggtgctccaggtacrtaccctggattctgatggtgctggttgaagcctcagctcccaccctggaagaaggagttggtgccaccctccatttctgagaaggttgcctttccttctagtatagctctattcccccccaagaaactcaaccaccagttcagaaacaactccccttagcccaggtatgccctgaacctcaaacaagagcagtgtcctgggagaccctgtctttaatctagggcagaagctgggggctggcttccctgcctgaatgccagcagcctccttctccctttctccttgttcagtctctaaaccttgactctctagtgatgactaagatccagaggagcatcttctctagaatcttctagaatcctagctgcctggagcccccccatggctgctacatccactgttggttctcttcacgggtaccatttgcaggaagtagtca

SEQ ID NO: 215504 - DNA, 530 bp, Homo sapiens
agcttctgtcccagattggtgtcccaggatggtacccacctcctgtacactacctcctggggtggcagtggcccttggtgctccaggtacataccctggattctgatggtgytggttgaagcctcagctcccaccctggaagaaggagttggtgccaccctccatttctgagaaggttgcctttccttctagtatagctctattcccccccaagaaactcaaccaccagttcagaaacaactccccttagcccaggtatgccctgaacctcaaacaagagcagtgtcctgggagaccctgtctttaatctagggcagaagctgggggctggcttccctgcctgaatgccagcagcctccttctccctttctccttgttcagtctctaaaccttgactctctagtgatgactaagatccagaggagcatcttctctagaatcttctagaatcctagctgcctggagcccccccatggctgctacatccactgttggttctcttcacgggtaccatttgcaggaagtagtca

SEQ ID NO: 215505 - DNA, 570 bp, Homo sapiens
catgagcttctgtcccagattggtgtcccaggatggtacccacctcctgtacactacctcctggggtggcagtggcccttggtgctccaggtacataccctggattctgatggtgctggttgaagcctcagctcccaccctggaagaaggagttggtgccaccctccatttctgagaaggttgcctttccttctagtatagctctattcccccccaagaaactcaaccaccagttcagaaacaactccccttagcccaggtatgccctgaacctcaracaagagcagtgtcctgggagaccctgtctttaatctagggcagaagctgggggctggcttccctgcctgaatgccagcagcctccttctccctttctccttgttcagtctctaaaccttgactctctagtgatgactaagatccagaggagcatcttctctagaatcttctagaatcctagctgcctggagcccccccatggctgctacatccactgttggttctcttcacgggtaccatttgcaggaagtagtcagttttgccacaagcaaagtaaacaggtggaaagctt

SEQ ID NO: 215506 - DNA, 583 bp, Homo sapiens
acatggaatagaacatgagcttctgtcccagattggtgtcccaggatggtacccacctcctgtacactacctcctggggtggcagtggcccttggtgctccaggtacataccctggattctgatggtgctggttgaagcctcagctcccaccctggaagaaggagttggtgccaccctccatttctgagaaggttgcctttccttctagtatagctctattcccccccaagaaactcaaccaccagttcagaaacaactccccttagcccaggtatgccctgaacctcaaacaagagcagtgtcctgggagaccctgtctttaatctagggcagaagctgggggctggcttccctgcctgaatgccagcagcctccttctccctttctccttgttcagtctctaaaccttgactctctagtgatgactaagatccagaggagcatcttctctagaatcttctagaatcctagctgcctggagcccccccatggctgctacatccactgttggttctcttyacgggtaccatttgcaggaagtagtcagttttgccacaagcaaagtaaacaggtggaaagctt

SEQ ID NO: 215507 - DNA, 432 bp, Homo sapiens
tcaatttttacctcttagaagtgtgtgaatttggggacatcatcccctggcttttgcagaaatgtctgatgtcagattaatttttgtttgtttttaaataatctgccctcttttctcttttgtctaaatatatgtgaatttttatctttttcctttaaaaaaatcccatgtagtgtgttggtcttgcctagtatatggtgagtgttcttccccctgtggattaaatgtttgttctacccagagaagttttcatgaattacaacctcccttgaactaccctgtccacrtgcaggtggccaagtgaccttcccccacccaccaccatgtcgagaactagagctcaaagatatagaggaggaataaaggtagatgaaagtaggaacaccgctgatagcttcagagatagtccttgtgcagtgaccttgtgcagtg

SEQ ID NO: 215508 - DNA, 585 bp, Homo sapiens
agatcttgtatttagaggtgatttttgaagagggtgtggygagaaagaacaaatggagaacttagaaaaacatattgattctctttatattataaaaggaatgctgttatattggatgccatagcatctcccaggtccaaatattaggtttggatttgagatcatgtatttagaggtgatttttgaagagggtgtggagtgaaagaacaaatggaggacttagaaaaacatattgagtctctttatattataaaaggaatgctgttgtattggatgccatagcatctcccaggtccaaatccaccaactttctttgccctgatttgtgggactatagctggaccttgtaaacatttctccttctccagctgctggaatgttaggcttcatcaacagagggtgctggagtgaccctatcaggccacagcagcagaaactcttccactttgcagtctattcagcatgggacctgatatggtttggctgtgtccccacccaaatatcaccttaaattgtaataatccccatgtgtcaggggcagggccaggtggagataattgaatcacgggagcagtttcccccata

SEQ ID NO: 215509 - DNA, 574 bp, Homo sapiens
tgaagagggtgtggcgagaaagaacaaatggagaacttagaaaaacatattgattctctttatattataaaaggaatgctgttatattggatgccatagcatctcccaggtccaaatattaggtttggatttgagatcatgtatttagaggtgatttttgaagagggtgtggagtgaaagaacaaatggaggacttagaaaaacatattgagtctctttatattataaaaggaatgctgttgtattggatgccatagcatctcccaggtccaaatccaccaactttctttgccctgatttgtgggactatagctggaccttgtaaacatttctccttctccagctgctggaatgttaggcttcatcaacagagggtgctggagtgaccctatcaggccayagcagcagaaactcttccactttgcagtctattcagcatgggacctgatatggtttggctgtgtccccacccaaatatcaccttaaattgtaataatccccatgtgtcaggggcagggccaggtggagataattgaatcacgggagcagtttcccccatactgttcttgttgta

SEQ ID NO: 215510 - DNA, 574 bp, Homo sapiens
tgaagagggtgtggcgagaaagaacaaatggagaacttagaaaaacatattgattctctttatattataaaaggaatgctgttatattggatgccatagcatctcccaggtccaaatattaggtttggatttgagatcatgtatttagaggtgatttttgaagagggtgtggagtgaaagaacaaatggaggacttagaaaaacatattgagtctctttatattataaaaggaatgctgttgtattggatgccatagcatctcccaggtccaaatccaccaactttctttgccctgatttgtgggactatagctggaccttgtaaacatttctccttctccagctgctggaatgttaggcttcatcaacagagggtgctggagtgaccctatcaggccacagcagcagaaactcttccactttgcagtctattcagcatgggacctgatatggtttggctgtgtccccacccaaatatcaccttaaattgtaataatcyccatgtgtcaggggcagggccaggtggagataattgaatcacgggagcagtttcccccatactgttcttgttgta

SEQ ID NO: 215511 - DNA, 306 bp, Homo sapiens
taagcaaggggttggactggatgaaaytgaaggtcacggctaaccttgagagtcgacagttttacacaacattctgaatcttattcttgcctccactaataattaactctcctaattcccattagtcttcccaagggcatgattatagtttggcattataaaagccatggactcaatgtgagaaaagtgcaaactattattgtcaaattagtgttttcctggagatttctcaaattgtcttgtgacattccatatcaatgttattgctcaggtaaatatgatattccatttcccaagcatctagat

SEQ ID NO: 215512 - DNA, 306 bp, Homo sapiens
taagcaaggggttggactggatgaaactgaaggtcacggctaaccttgagagtcgacagttttacasaacattctgaatcttattcttgcctccactaataattaactctcctaattcccattagtcttcccaagggcatgattatagtttggcattataaaagccatggactcaatgtgagaaaagtgcaaactattattgtcaaattagtgttttcctggagatttctcaaattgtcttgtgacattccatatcaatgttattgctcaggtaaatatgatattccatttcccaagcatctagat

SEQ ID NO: 215513 - DNA, 563 bp, Homo sapiens
ccttttttacaactagagaactttgtggagcaacctgtaagaaatcccagtgttggccaggcacagtggctcacgcctgtaattccagcactttgggaggccaaggcaggtggatcacctgaggtcaggaattcgagaccagcccggacaacatggtgaaaccccttctctactgaaaatacaaaaattagctggaygcagttgcatgtgcctgcaatcccagctacttgggaggctgaggcatgagggtcatttgaatctgggaggtggaggttgcaatgagccaagattatgctactgcactccagcctgggtgacagagcaagattctgtctaaaaaataaataaataaaaacaagaaaaaaatcccaatgtcccaatgtccaattgctcctttcctggaagttaagggcaattttcagatcctgctcctgatcactctcctcttctctatacttccattgtcacaggaagtttataagcagaagccacccaaggtccaagggagggaggagggtgatgtggagaatggagtgtcataataacctaaaatactatgaccc

SEQ ID NO: 215514 - DNA, 563 bp, Homo sapiens
ccttttttacaactagagaactttgtggagcaacctgtaagaaatcccagtgttggccaggcacagtggctcacgcctgtaattccagcactttgggaggccaaggcaggtggatcacctgaggtcaggaattcgagaccagcccggacaacatggtgaaaccccttctctactgaaaatacaaaaattagctggacgcagttgcatgtgcctgyaatcccagctacttgggaggctgaggcatgagggtcatttgaatctgggaggtggaggttgcaatgagccaagattatgctactgcactccagcctgggtgacagagcaagattctgtctaaaaaataaataaataaaaacaagaaaaaaatcccaatgtcccaatgtccaattgctcctttcctggaagttaagggcaattttcagatcctgctcctgatcactctcctcttctctatacttccattgtcacaggaagtttataagcagaagccacccaaggtccaagggagggaggagggtgatgtggagaatggagtgtcataataacctaaaatactatgaccc

SEQ ID NO: 215515 - DNA, 563 bp, Homo sapiens
ccttttttacaactagagaactttgtggagcaacctgtaagaaatcccagtgttggccaggcacagtggctcacgcctgtaattccagcactttgggaggccaaggcaggtggatcacctgaggtcaggaattcgagaccagcccggacaacatggtgaaaccccttctctactgaaaatacaaaaattagctggacgcagttgcatgtgcctgcaatcccagctacttgggaggctgaggcatgagggtcatttgaayctgggaggtggaggttgcaatgagccaagattatgctactgcactccagcctgggtgacagagcaagattctgtctaaaaaataaataaataaaaacaagaaaaaaatcccaatgtcccaatgtccaattgctcctttcctggaagttaagggcaattttcagatcctgctcctgatcactctcctcttctctatacttccattgtcacaggaagtttataagcagaagccacccaaggtccaagggagggaggagggtgatgtggagaatggagtgtcataataacctaaaatactatgaccc

SEQ ID NO: 215516 - DNA, 432 bp, Homo sapiens
tcatctgtggcactggccctgcctgctcaggcctgggtagcagagtgcacaatacatggaatgtctgggcaggccaccatgggacagagcacagaggacacccatacagcagctgagaatgaccacaggccctctggacccagtcsccggctgctcccaaagctgtctgctccttcagtgtccagctatgccatctaccccagaagattcccccttggcttgatgacctggttgcagcatttaccttggtacacaatttgtattgttttaggtgattaaaagtaattctcaccaactccacatgccataagcctgggtaagaaatgccccacctggtgcactcccaggccccaagccctatgctaattgactattcaaggcattctctggcacccactcactcactatgcctcagttcccacctgtaggtta

SEQ ID NO: 215517 - DNA, 544 bp, Homo sapiens
ccccatctccactaaaaatacaaaaattagctgggcgtggtggcacggacctgtagtcctagctactygggaggctgaggcaggagaaccgcttgaacccgggaggaggagactgcagtgagccgagatcacgccactgcactccagactggcgacagactgtctcaaaaaaaaaaaaaagaaagaaaaagaaaaaagaaaagaaaaaaattccatacatagaattctgtgtggcattttagagaaaatcatggtgactagagacaccaggtgaaatttttttttttttttttttggtgacacaaccccaggagatcctgtgaacatgtgtcccttgaccaggtgaatttcaggagcttgcactagtcccaggttagctggcaccaggttggccctagtttgagtgccttccacataccaggtactgtgttggagaagtacatcaaaaaggaaaatcaaatttcatcctcaataagtaatcacaatacactgtgatgagagttagggtgaaggaggttcaggttaccatgggcttatattagga

SEQ ID NO: 215518 - DNA, 544 bp, Homo sapiens
ccccatctccactaaaaatacaaaaattagctgggcgtggtggcacggacctgtagtcctagctactcgggaggctgaggcaggagaaccgcttgaacccgggaggaggagactgcagtgagccgagatcacgccactgcactccagactggcgacagactgtctcaaaaaaaaaaaaaagaaagaaaaagaaaaaagaaaagaaaaaaattccatacatagaattctgtgtggcattttagagaaaatcatggtgactagagacaccaggtgaaatttttttttttttttttttggtgacacaaccccaggagatcctgtgaacatgtgtcccttgaccaggtgaatttcaggagcttgcactagtcccaggttagctggcaccaggttggccctagtttgagtgccttccacataccaggtactgtgttggagaagtacatcaaaaaggaaaatcaaatttcatcytcaataagtaatcacaatacactgtgatgagagttagggtgaaggaggttcaggttaccatgggcttatattagga

SEQ ID NO: 215519 - DNA, 566 bp, Homo sapiens
tataaatgaccctatctcctttgttgggtgtactctcatggcaaaactgcccgtgagtgtaccctttctgcaggaagtaaaaatggccttactaagtaaactaaatttatgttcaagtgctgtttcttcacggcaccggggaacaagcatttcaaacaggagatttagaagtcagttcatccttgactcctytcctcccgctcaccacatcccagcctaaccaatctatctcattcaggattcattctaatgcctgaattattttctgccaggtgctgtggctcacacctgtaatcccagcactttgggaggccaaggcgggtggatcacttgaggtcagaagttcaagaccagcctggccacttgaaccgaggaagaggttgcagtgagccaaggtcatgccactgtactccagcctgggcgacagagtgagactctgtgtcaaaaaaaaaaagaaaagaaaagaaattaaaattgaatttgcaataatccagcaaataatcctatttatatacctaagagaaatgaaaatatatgtatagataaaaacatgtacacgaatgtgc

SEQ ID NO: 215520 - DNA, 566 bp, Homo sapiens
tataaatgaccctatctcctttgttgggtgtactctcatggcaaaactgcccgtgagtgtaccctttctgcaggaagtaaaaatggccttactaagtaaactaaatttatgttcaagtgctgtttcttcacggcaccggggaacaagcatttcaaacaggagatttagaagtcagttcatccttgactcctttcctcccgctcaccacatcccagcctaaccaatctatctcattcaggattcattctaatgcctgaattattttctgccaggtgctgtggctcacacctgtaatcccagcactttgggaggccaaggcgggtggatcacttgaggtcagaagttcaagaccagcctggccacttgaaccgaggaagaggttgcagtgagccaaggtcatgccactgtactccagcctgggcgacagagtgagactctgtgtcaaaaaaaaaaagaaaagaaaagaaattaaaattgaatttgcaataatccagcaaataatcctatttatatacctaagagaaatgaaaatatatgtatarataaaaacatgtacacgaatgtgc

SEQ ID NO: 215521 - DNA, 583 bp, Homo sapiens
aattatgttttaattctctcgttttgcttgtcaagaacagtttttacttcatttcaccatagttcagtctagcacacaaggcatccagcagccctaagaactacctgagacaactgatgatggctccatgctacacactaaagaccctgtatcttttctctcctcctcatcttcatttcactcttttctccaactcactcaattctccttcctttccctattcctctcccatctcacccactccttagycctaaccctgacaactagaccctagtaacatcactgacattgcttagtcgtggctagaaatattcaggctttaaaaaggtacagacccctaacacagagaaaaagggataaataataatttccatgagaacttctaattaacgagagtgccttaaattgaggagttttggtttggagttattcttccttgttacttgcctcctctggcattttcatttgtgaagactgagtgagtgtgacgctattttctatacgcatggaaacaagcacatactcagtctaacatttacgcaatgcctgacagaacgacagagttcattctacaataagataa

SEQ ID NO: 215522 - DNA, 592 bp, Homo sapiens
gtctgccccttaatttgcatrtaattaaaggtcaatgtaaatatgactgcagaactgccctgagctgctactctggtcacactacctacagggtagccctgctctgcaaggagcagtccctctgctgttgctataggccactgcttcaataaaagttggcatctaggccaggtgcagtgagtaatacctgtaatcccagcactctaggaggctgaggcgggtggatcatttgaggccaggagtttgagaccagcctggtcaacatggtgaaaccccatctctactaaaaatacaaaaaaattagttgggtgttttggcgcacacctgcactcccagctactcaggaggttgaggcgggagaatcacttgaacccaggaggcagagtctgcagtgagccactgcactccagcctgggtgacagagtgagaccctgtcccgaaacaaaaaaaagttggcctctaacaccttcggtttgcccttgaattatttcctgggtgaagccaagaaccctctcagtctaagccccagttttgtggcttacctgccctgcatcaacaccagaaacttaaccctttgggaatctcgatcttg

SEQ ID NO: 215523 - DNA, 592 bp, Homo sapiens
gtctgccccttaatttgcatataattaaaggtcaatgtaaatatgactgcagaactgccctgagctgctactctggtcacactacctacagggtagccctgctctgcaaggagcagtccctctgctgttgctataggccactgcttcaataaaagttggcatctaggccaggtgcagtgagtaatrcctgtaatcccagcactctaggaggctgaggcgggtggatcatttgaggccaggagtttgagaccagcctggtcaacatggtgaaaccccatctctactaaaaatacaaaaaaattagttgggtgttttggcgcacacctgcactcccagctactcaggaggttgaggcgggagaatcacttgaacccaggaggcagagtctgcagtgagccactgcactccagcctgggtgacagagtgagaccctgtcccgaaacaaaaaaaagttggcctctaacaccttcggtttgcccttgaattatttcctgggtgaagccaagaaccctctcagtctaagccccagttttgtggcttacctgccctgcatcaacaccagaaacttaaccctttgggaatctcgatcttg

SEQ ID NO: 215524 - DNA, 566 bp, Homo sapiens
cccttaatttgcatataattaaaggtcaatgtaaatatgactgcagaactgccctgagctgctactctggtcacactacctacagggtagccctgctctgcaaggagcagtccctctgctgttgctataggccactgcttcaataaaagttggcatctaggccaggtgcagtgagtaatacctgtaatcccagcactctaggaggctgaggcgggtggatcatttgaggccaggagtttgagaccagcctggtcaacatggtgaaaccccatctctactaaaaatacaaaaaaattagttgggtgttttggcgcacacctgcactcccagctactcaggaggttgaggcgggagaatyacttgaacccaggaggcagagtctgcagtgagccactgcactccagcctgggtgacagagtgagaccctgtcccgaaacaaaaaaaagttggcctctaacaccttcggtttgcccttgaattatttcctgggtgaagccaagaaccctctcagtctaagccccagttttgtggcttacctgccctgcatcaacaccagaaacttaacc

SEQ ID NO: 215525 - DNA, 552 bp, Homo sapiens
tataattaaaggtcaatgtaaatatgactgcagaactgccctgagctgctactctggtcacactacctacagggtagccctgctctgcaaggagcagtccctctgctgttgctataggccactgcttcaataaaagttggcatctaggccaggtgcagtgagtaatacctgtaatcccagcactctaggaggctgaggcgggtggatcatttgaggccaggagtttgagaccagcctggtcaacatggtgaaaccccatctctactaaaaatacaaaaaaattagttgggtgttttggcgcacacctgcactcccagctactcaggaggttgaggcgggagaatcacttgaacccaggaggcagagtctgcagtgagccactgcactccagcctgggtgacagagtgagaccctgtcccgaaamaaaaaaaagttggcctctaacaccttcggtttgcccttgaattatttcctgggtgaagccaagaaccctctcagtctaagccccagttttgtggcttacctgccctgcatcaacaccagaaacttaac

SEQ ID NO: 215526 - DNA, 622 bp, Homo sapiens
gtttgaaagtcgtgtggaaaatgagaatttattcctttgtctgactatatcccctgggttttatttgttaagaatgttattttcccataggcattagctcccttgtttagaggggaaaaaaaaatcctttttaaatctttagtttgggccgggcatggtagctcatgcctgtaatcccagcactttgggaggttgaggtgggcggatcatgaggtcaggagatcgagaccatcctggctagcacagtgaaaccctgtctctactaaaaataccaaaaagtagctgggcatggtggcgggcgcctgtagtcccagctgctcaggagactgaggcaggagaatggcatgaacctgggaggcgtagcttgcagtgagccgagatcacgccactgcactccagcctgagcgacagagtgagactctgtctcagaaacataaataaataaataaaaataaaaataaaataaaataaaaatctttagtttggtgatattaatagagtttaggagaagagagtttgaagagcataaacaaactgktggcaattttagattgttggaacattttaaacaaaatgaaaaattgcttgaccttgtacaaatatcataatttataaggaattc

SEQ ID NO: 215527 - DNA, 434 bp, Homo sapiens
gcccttctaaatatttaataaattgcttcgtattgctaaacccaaaatggaaatgatccgaaaagaaagaaaaattaacaggcttctttgccctctgtgattaaacatacttccctcgagtactataaaggaaacaaatttatggttcacaaaggcctatcaccctacactacactcagtaaaaaatatttccaytgagcagtgtaagtgcttttcctattttaaatcaacaatgctgagaaacactggctgctagaatttaaataactcatgattcacagaaaaagttcttaaatttaagattataatatatagtcatatcctattcagatctgttttctacctagatggatctgcactgtctattaataacagaactttctttaatgacagaaacattctatattggtcaatccagtaggatagccaccaat

SEQ ID NO: 215528 - DNA, 670 bp, Homo sapiens
tgccatttgtacataacaaaggataagaacttggaaacagaatacaccctgaaaaaggagtatcatttactgtgcaacgagaaaaagacctatggagtctgcttgcttcaaagaatccacaacaggaagcactaatatcataactcatggtttcatgcaaataagagatgccgccaggaaacaatacaaacattgtttagactttcaaagaataaccatggtagccagagttttttaaaaaawaaatggttaagcccctggaaccggacaaaattcatgctgagattttgaagcaaggaagagaaatgttgcttaggtatctgcataacattctccttaatatatgaacattgagggatgaaagtttgatctcctttttttctttgattttttatgttgccaatctttaacataaaaggcagcaaaaaattgtacctgtaatccccatcactctataataattgttttcattttgtcctgtctccttctggtctttgatatttatggttacatagtttcaagcaattgtaaacatattgcatagcttgatgttctgattttttaaatctttatacgcacatttgttttcacacagtatttgtgaacactgtcttgtgaatagtttaatcatctatcaaagtcaggtgtgaccacttgtttaatcagtccc

SEQ ID NO: 215529 - DNA, 588 bp, Homo sapiens
tacagcaagacttcagaatggagactccactccattgcatatgcagttaaaatgcaccrgagaactctgccaagctggagcagtatgtcgggggggggtgcggggggaggcgtggagagactagaagcaagctctggctcgggacagagtggcttttggagggtccaggagatcaagttcttgtgtgtaacatggcacagcacagctggtctctgtactgtctgtacggtaagccagtggttagaggctgactctagggaccaactaacggagttctttgccacccaccagcttccaacattctcttaaaagcaagtcaggcatagagctccttcactcagttctctgcaagcctgtcccatctcattcagaataagagccgacatccttacaatggccccagccccacatgatctgacccctgctgctcctctgacctcccttctgctgcccctcacatactccagccacactgaaccccgcccccacctgtgctccagtgtggaaagcagccacctgcccagggcctttgcacctaggcgttctctaacggacctcctatgttttttcctcggatagctataggat

SEQ ID NO: 215530 - DNA, 588 bp, Homo sapiens
tacagcaagacttcagaatggagactccactccattgcatatgcagttaaaatgcaccagagaactctgccaagctggagcagtatgtsgggggggggtgcggggggaggcgtggagagactagaagcaagctctggctcgggacagagtggcttttggagggtccaggagatcaagttcttgtgtgtaacatggcacagcacagctggtctctgtactgtctgtacggtaagccagtggttagaggctgactctagggaccaactaacggagttctttgccacccaccagcttccaacattctcttaaaagcaagtcaggcatagagctccttcactcagttctctgcaagcctgtcccatctcattcagaataagagccgacatccttacaatggccccagccccacatgatctgacccctgctgctcctctgacctcccttctgctgcccctcacatactccagccacactgaaccccgcccccacctgtgctccagtgtggaaagcagccacctgcccagggcctttgcacctaggcgttctctaacggacctcctatgttttttcctcggatagctataggat

SEQ ID NO: 215531 - DNA, 377 bp, Homo sapiens
gaattccattctactatgttttatcataaatattaaccctagtcactccaggaattgtctttttatatgtcgatgataagtgtaactttataagttatttggaagagaaagaaaacaatgcaatctctgtatgaacaaatatcattaaatactgtagctactaaaatgctaagtaagtgaagacagcctgcaaaagatctatgaataagaagacggcagatacacttcaacactggcaaatgcaaagtataagaaaagtgcctaaactattcayatagggccaaaggctctacttgttgtatatgatctattaggggattccaggccttgttgtaaagtgttccctaatgacatacacctaagaaaagccaacagaa

SEQ ID NO: 215532 - DNA, 608 bp, Homo sapiens
aatttagataataataaggcagacaaaaatgtcaagagtaaagattagattgtcttcgttactgaaaatgagggctcaaaatatgccttaggtgcaattttgaataggaacaattctttctttatttaaatgtacttaatattccatttatcaaagaaaattgtccatatataatagaaaaaaaagattttctctttttatggttacatgaattaattcaaagtgtaacatggtctttcaacttagtaaattttaaatgatatatatgcattatttgctgttaaataaaagagaaaaaaagggaatgacaatgctctgggtttgaaaccataactaatcaagaccaaggaaaaaactttctctgatatcttaaaatatctaaaagcaatagcccaatttacaaactacagatgtatgttataaatctttttttttttwaaatgggtcttcgatttcagtacccatagcaacaaagtttatgttttaaaaaccaggtggcatctgggataccgagataagtgaccagttctaccacctcattaactacaagttttatgactcacatatgtggttaaaaaattacaaggtgtatgtctgtcatgtcatta

SEQ ID NO: 215533 - DNA, 633 bp, Homo sapiens
gcaactttttgagtcactctggaagacatattcacattcatgtggcttaaacttactccttgaaagtcttggaggaaaatgcttaaaataaaacaaatttgagtttgcgacatgggccccttatttaactgcggaacaaatggttgttattttaattaccttttgtttcattgtattttaactcatgaaatgcaagtgttactgctactggtaggctttttccagatggaactaagcctrtttattcttaaaaacatgaaaatttagagccatgtggccctctgataggtatgaccaatttatcatgtaaatttctttaaaacatattaaagttaagtggatacttagaagcaaggtttaattttaactctgtagtttctggggaagcttgaggaatctgcttacattatatatttgaacacagtggataaggtctgaaaaataagacttcctagaaatgttttagcaaggcttacataactaatacaatataaatttagaattgaaatattttgtgtatgatatcaactgaatttaatcatgtgtctctttagggttctattggagcacctggaattccagggatgaatgggcaaaaggtgagttctatagaatattgtattttaaaaataa

SEQ ID NO: 215534 - DNA, 508 bp, Homo sapiens
tttgaacacagtggataaggtctgaaaaataagacttcctagaaatgttttagcaaggcttacataactaatacaatataaatttagaattgaaatattttgtgtatgatatcaactgaatttaatcatgtgtctctttagggttctattggagcacctggaattccagggatgaatgggcaaaaggtgagttctatagaatattgtattttaaaaataatttggtgagcattgaaatcacaaaattattctagtccataatgttagtaataagcttatatgcttataaaaacactatgttttgaaatacaggaaaattgtgctacaaattaccaaattagtttaatttttaaagatgcattaaatagtcaggaattctttgaagattttccatttcaagtattttggatgtgttrcttttcaataaattatgtatgtgatacaactatatccttcccataaatagatatggaattgggaaaatttatgtttaacattgatagtgata

SEQ ID NO: 215535 - DNA, 591 bp, Homo sapiens
tgttttctagttaattagcttaaaattttcctttagcagaatttacccagtaatttattatgcagtatgtttatgactttctaatgctaaactttaagaaaagatattgagactaaattaagtgattgattgatgattccagattagttagtagttcaaggaaagtatcttacaaccattcaatcttttttgtgttaaaagtgagaattatrttttttaatttttcagttttttaacattaataattgtatagattagaattccaagagtacgtgaccattttcctctagtaactataataagaggatgaatgcttttcttctaaaagaagcaccatcatttcctattacagatatttcataaagtcaaataacttcatccattcctgggaatgatttatacattctcagccatttttatacacaaggctactctactcttaaagacatttttcactcaattttacttgttaagcagaacacaagatatttcttttcttcatgtaattatttttgggtttctttagggggaaacaaaaagttagttgaaggaagttttttcctgctggcttgaaataaaataagtaagatt

SEQ ID NO: 215536 - DNA, 591 bp, Homo sapiens
tgttttctagttaattagcttaaaattttcctttagcagaatttacccagtaatttattatgcagtatgtttatgactttctaatgctaaactttaagaaaagatattgagactaaattaagtgattgattgatgattccagattagttagtagttcaaggaaagtatcttacaaccattcaatcttttttgtgttaaaagtgagaattatattttttaatttttcagttttttaacattaataattgtatagattagaattccaagagtacrtgaccattttcctctagtaactataataagaggatgaatgcttttcttctaaaagaagcaccatcatttcctattacagatatttcataaagtcaaataacttcatccattcctgggaatgatttatacattctcagccatttttatacacaaggctactctactcttaaagacatttttcactcaattttacttgttaagcagaacacaagatatttcttttcttcatgtaattatttttgggtttctttagggggaaacaaaaagttagttgaaggaagttttttcctgctggcttgaaataaaataagtaagatt

SEQ ID NO: 215537 - DNA, 591 bp, Homo sapiens
tgttttctagttaattagcttaaaattttcctttagcagaatttacccagtaatttattatgcagtatgtttatgactttctaatgctaaactttaagaaaagatattgagactaaattaagtgattgattgatgattccagattagttagtagttcaaggaaagtatcttacaaccattcaatcttttttgtgttaaaagtgagaattatattttttaatttttcagttttttaacattaataattgtatagattagaattccaagagtacgtgaccattttcctctagtaactataataagaggatgaatgcttttcttctaaaagaagcaccatcatttcctattacagatatttcataaagtcaaataacttcatccattcctgggaatgatttatacattctcagccatttttatacacaagsctactctactcttaaagacatttttcactcaattttacttgttaagcagaacacaagatatttcttttcttcatgtaattatttttgggtttctttagggggaaacaaaaagttagttgaaggaagttttttcctgctggcttgaaataaaataagtaagatt

SEQ ID NO: 215538 - DNA, 574 bp, Homo sapiens
gctgctgctctgaccttgtgaagtgctgctccccctttgccttataccgatgattggcaaggaagcttcctgaggcgtctccccgaggcgcaggttgttgttgcttcttctgcgcagtgcgcagttgtgagccagttaagcctsttttctttgtaaattacttagtctcaggtatttctttacagcagtgcaagaatggactaatatagggattgggcatcctttaaagtttattaaaagacttggacagaattgtaattaacttgtttttcccgtgcaaatgtttacatcagtgagaattgtctcgcataggctgaacattctctttgttaagctgttcttgcatcgttataaataaatacatgaaactggtaatttataaacagaagagatataactggctcacggtactgcaggctttacaggaagcatagtgctggcatctgctcagcttctagggaagtcttaggaagcttacaatcatagtggaaggcaaagggggagcaggcacgtcacatggcaaaagcaggagagagagagagaaggtgccacacacttttcaacacccagatct

SEQ ID NO: 215539 - DNA, 574 bp, Homo sapiens
gctgctgctctgaccttgtgaagtgctgctccccctttgccttataccgatgattggcaaggaagcttcctgaggcgtctccccgaggcgcaggttgttgttgcttcttctgcgcagtgcgcagttgtgagccagttaagcctgttttctttgtaaattacttagtctcaggtatttctttacagcagtgcaagaatggactaatatagggattgggcatcctttaaagtttattaaaagacttggacagaattgtaattaacttgtttttcccgtgcaaatgtttacatcagtgagaattgtctcgcataggctgaacattctctttgttamgctgttcttgcatcgttataaataaatacatgaaactggtaatttataaacagaagagatataactggctcacggtactgcaggctttacaggaagcatagtgctggcatctgctcagcttctagggaagtcttaggaagcttacaatcatagtggaaggcaaagggggagcaggcacgtcacatggcaaaagcaggagagagagagagaaggtgccacacacttttcaacacccagatct

SEQ ID NO: 215540 - DNA, 531 bp, Homo sapiens
acatgcccagttgtgagaaaataccactctgtcagagaaaggagttcagggtggtaagaacatgtggggagtggagatagaaaatagcaggaaagagattttaaaaggctggttaaccacactcaggcgtttgagctggattctgtcatcaatgtaacaaggagtgcggagatgaagtgtgctctgttttgtggaactctgagaacacggggtgttcgggattcttaggaagtatttgccttggtccaaaagagagatggtaaagctttgaattaagrttgtgctagtggaggcacagggagaggtctagattcaggagacatttctcaagtaaaaaacaacaagactggttaactgattggacatgggggccactgacaggtgtcaacatgttttaacaagtcctacttatttcaaggttcacaatttagtgtatttgcagacaagctttggcctaagctggttcaacgtagatgaacacagcagttccacagccaagtgaatcaaatagagtttaaatctggttttagt

SEQ ID NO: 215541 - DNA, 531 bp, Homo sapiens
acatgcccagttgtgagaaaataccactctgtcagagaaaggagttcagggtggtaagaacatgtggggagtggagatagaaaatagcaggaaagagattttaaaaggctggttaaccacactcaggcgtttgagctggattctgtcatcaatgtaacaaggagtgcggagatgaagtgtgctctgttttgtggaactctgagaacacggggtgttcgggattcttaggaagtatttgccttggtccaaaagagagatggtaaagctttgaattaaggttgtgctagtggaggcacagggagagktctagattcaggagacatttctcaagtaaaaaacaacaagactggttaactgattggacatgggggccactgacaggtgtcaacatgttttaacaagtcctacttatttcaaggttcacaatttagtgtatttgcagacaagctttggcctaagctggttcaacgtagatgaacacagcagttccacagccaagtgaatcaaatagagtttaaatctggttttagt

SEQ ID NO: 215542 - DNA, 600 bp, Homo sapiens
gaaacttcctagagactgagagcgtgtggtgatagagactttgtcccagactaatcaaaaagaaacacctcagcatttccttaagttgcttctgagtagcttgattaatacaaatattttcattcgttactgagtagtattgttctagtctattgtaatttaaaggtagtgaccactattaataattaactgtgaaggttaactttttctaaaggacaacctgaatgagtagttrtaaattatgattaagggtcacaaaacacaccgtaagttgcctttttaaaaatggaattcctgaaaagatcatttttcccaagcaaatcaccaaaatgcttcataaataaaaacctgaatctagtaaacgtaaaagccatgccaagtgaaacagttaagtcacaaacatactgaagtcaggaaaatacatgagaaagtggagaatactgagtgctctgggtcactgactcactgtacgtcaacagctaaatgcaatgctcagggcaacttaggtaccagcaggaagaagaagaaacagcaggagaagctgatcttaaaaactggtaatcagaacagcaaaatggaaaacaatcagccagtagctga

SEQ ID NO: 215543 - DNA, 600 bp, Homo sapiens
gaaacttcctagagactgagagcgtgtggtgatagagactttgtcccagactaatcaaaaagaaacacctcagcatttccttaagttgcttctgagtagcttgattaatacaaatattttcattcgttactgagtagtattgttctagtctattgtaatttaaaggtagtgaccactattaataattaactgtgaaggttaactttttctaaaggacaacctgaatgagtagttgtaaattatgattaaggktcacaaaacacaccgtaagttgcctttttaaaaatggaattcctgaaaagatcatttttcccaagcaaatcaccaaaatgcttcataaataaaaacctgaatctagtaaacgtaaaagccatgccaagtgaaacagttaagtcacaaacatactgaagtcaggaaaatacatgagaaagtggagaatactgagtgctctgggtcactgactcactgtacgtcaacagctaaatgcaatgctcagggcaacttaggtaccagcaggaagaagaagaaacagcaggagaagctgatcttaaaaactggtaatcagaacagcaaaatggaaaacaatcagccagtagctga

SEQ ID NO: 215544 - DNA, 600 bp, Homo sapiens
gaaacttcctagagactgagagcgtgtggtgatagagactttgtcccagactaatcaaaaagaaacacctcagcatttccttaagttgcttctgagtagcttgattaatacaaatattttcattcgttactgagtagtattgttctagtctattgtaatttaaaggtagtgaccactattaataattaactgtgaaggttaactttttctaaaggacaacctgaatgagtagttgtaaattatgattaagggtcacaaaacacaccgtaagttgcctttttaaaaatggaattcctgaaaagatcatttttcccaagcaaatcaccaaaatgcttcataaataaaaacctgaatctagtaaacgtaaaagccatgccaagtgaaacagttaagtcacaaacatactgaagtcaggaaaatacatgagaaagtggagaatactgagtgctctgggtcactgactcactgtacrtcaacagctaaatgcaatgctcagggcaacttaggtaccagcaggaagaagaagaaacagcaggagaagctgatcttaaaaactggtaatcagaacagcaaaatggaaaacaatcagccagtagctga

SEQ ID NO: 215545 - DNA, 506 bp, Homo sapiens
ctgtcaatgaggtttctcaagaaattttggtttctaaactataatcatattagaatgtgaaacatataaccatatatgtttgtgcatgtatacctgtacatatcatgtcataagtacataatatgctcaataaattttcacaaactcagcacatgtatgcaagtagaactctagttaaagaaatagaacattacctgcaagttagaagctcctgttgggacatttccttgtcaccaccctctaccaacagtaaccactattctgacccctgacaatatagattagcttgtctgtttttgtacttcatgtacataaaatcatagagtcyggcctcttttgcttaattagtatgaaattcatccataattttgtgtgtagttgtagattgttcttactgctttataatactccactgtatgactatatcatcatttacttattcattctagtgttggcagccatttgtttccaggagtttctaggtcttggctattataaaaatacgc

SEQ ID NO: 215546 - DNA, 612 bp, Homo sapiens
ttatagtctatttaactccaaaatgaccctagggttttagcatgctctaaaatttaattggaaaaagagaaggcagaaggaataccacacctagtattactgtgatgaaggggttacttaaagaaagagtcttgcagcataggctgtgagcccaaactatgagctattcaaagcgcagactgtgagctacatattcaaacatgacagagttaygttttaaaaaaacaaaggcagatactttagtgttagagctcatcaagtctcttaacttctcattatttcaataacattttaagttaatttaaaaaataaacctttatcttttattctgcataactgagcctaaggacattttaaaaggatatcagaggtctttggatcatgcatcctaactcttcacacagtcaatggattatgtgacctctgtccaatctaatttattttgaatgtcattttcttatttaagctgatcaaaaatttcaaagcagtataactgtaaatgcttctagctaaagatcaatcacctgtgaataaaagtatggatttcatatcaccttcttaaaatctccaactggattttgtatcagatgagattaaagaaaatgttcacac

SEQ ID NO: 215547 - DNA, 612 bp, Homo sapiens
ttatagtctatttaactccaaaatgaccctagggttttagcatgctctaaaatttaattggaaaaagagaaggcagaaggaataccacacctagtattactgtgatgaaggggttacttaaagaaagagtcttgcagcataggctgtgagcccaaactatgagctattcaaagcgcagactgtgagctacatattcaaacatgacagagttacgttttaaaaaaacaaaggcagatactttagtgttagagctcatcaagtctcttaayttctcattatttcaataacattttaagttaatttaaaaaataaacctttatcttttattctgcataactgagcctaaggacattttaaaaggatatcagaggtctttggatcatgcatcctaactcttcacacagtcaatggattatgtgacctctgtccaatctaatttattttgaatgtcattttcttatttaagctgatcaaaaatttcaaagcagtataactgtaaatgcttctagctaaagatcaatcacctgtgaataaaagtatggatttcatatcaccttcttaaaatctccaactggattttgtatcagatgagattaaagaaaatgttcacac

SEQ ID NO: 215548 - DNA, 612 bp, Homo sapiens
ttatagtctatttaactccaaaatgaccctagggttttagcatgctctaaaatttaattggaaaaagagaaggcagaaggaataccacacctagtattactgtgatgaaggggttacttaaagaaagagtcttgcagcataggctgtgagcccaaactatgagctattcaaagcgcagactgtgagctacatattcaaacatgacagagttacgttttaaaaaaacaaaggcagatactttagtgttagagctcatcaagtctcttaacttctcattatttcaataacattttaagttaatttaaaaaataaacctttatcttttattctgcataactgagcctaaggacattttaaaaggatatcagaggtctttggatcatgcatcctaactcttcacacagtcaatggattatgtgacctctgtccaatctaatttattttgaatgtcattttcttatttaagctgatcaaaaatttcaaagcagtataactgtaaatgcttctagctaaagatcaatcacctgtgaataaaagtatggatttcatatcaccttcttaaaatctccaaytggattttgtatcagatgagattaaagaaaatgttcacac

SEQ ID NO: 215549 - DNA, 599 bp, Homo sapiens
agtgactgcattccagcctatggaatatgtgaatagtaatgcattgttatcattaatagcttatgatgtgccagatactgccctagttgctttacacacagtgtagtacttatttcttataactgtgtaaattatcctttctattacattgcacaggagaaacctgatgcaaagagaatctcatttgcccagtaggtgctggaactggtctgtctccctggctccaaagtccataacatttccacataacatattgtaagacttatattgaagaattcagaatttaaggaagataataaacgaatgcttatttccctaatgcattgctttgtaggcagaaaagagatgtcagtgagggaacaggcataggaagtctcaaaaataacaacaaaaaaagcataaactatgatttaaaaaatttttctagtaaagcataaaacattcatttcacaaatgcaaaccatgtaggcccagataaatcaatattcagtccacaggttttgagggccctgtcmtgtactttgaggccctggagattttgagatatgcttgaagacaggacaggatttatacagatggaaagggaaagagaggggagg

SEQ ID NO: 215550 - DNA, 483 bp, Homo sapiens
tgtgcatgcatagtgacacagacttttccaaacatgacagtctctttctacaccagatttcaaaaaaagaaaaggaaagaaagaaaaaaatgaattacctttcatgctttccatcaataatatttttgcactacatatattagaaaatgatcattgtaatgcaggacaaggacaaggattataacttcattgttcactgttatctcccagctctcagcatctattaatagatatgtctggcacacaattagtgcttgctaagtatttgttgaatgaattaatgactgataaaaataagtcactacattmacttcatatatccacatgtgccttattaacacacacatataattatctgagtgttgttttgaaaataatcacaaacaaaaatggaaactgtgcttgaatgaaacatagtaaagtcaaattcatttatctcaagtatcttctcatagtatttcctcatctataacttaccctgta

SEQ ID NO: 215551 - DNA, 501 bp, Homo sapiens
tttctgtggatactttctcgtattctgggttaattttctttataatattttgaaaggaagtaaaatatgcagagtgccaaagacagcaacagaaacctcccatactcctgaggctttaggaacacctgtcatgaaagtgggtttggctgacgtaggaataacagtgatacaatatgaatgccttttatttttgacagtctctgcgtttatcaattgcaaatgtacggtgtayacagccagtaatttgtcaaagagtgttgtagaaatatgtctgacccagataaaaagaccctatgcgtagaaaagttttgtttatctgaactgtatgctcagtaatctaatggggaaataagaacaacaggtttctaatctttcctggccactgagaaaaggggcttcatatattgtaaaatgcagatacatgctatctaaagtaataataaagattgttttcagtcctactcttaacttcctacaatttagacattaccagtagaattc

SEQ ID NO: 215552 - DNA, 529 bp, Homo sapiens
gttaaatttacaagaattataactaaaaaaagtttattattggtgcaaagttttaggttaaaagaaattaatgcaatataatgttaataacactaaattttaaattagaccatctgaatttcagattttatatactcatcccactagctatgttggccaaaagcaagttaattaaccctctgaccatgagactatcctgaaaagtaacacctattcccctcatagtagaaatttctcaaaagcagaaacttcatcttctataccttttgattttctatatcaaataagaaacttccatggctcctgagttgcacaacaaagagagagagagaaaagtttgcattgaagtttctgtgaattgcacacttttgatttgtgtatcacaaagccctgcagagcggccctgaatgagtgcmtggcacacataggggattcaataaatcctattgcaatccactctgaactgccacaagtttctttttttttccccaggaattaagtataaaacaatatatattaaatttctaat

SEQ ID NO: 215553 - DNA, 569 bp, Homo sapiens
actttgttccaaccatcaaaactttctcttactcactaaccagctgtgtgactttggtgtgacttttgtctattgatccttatgataacgcagtcttctcattatgaaaatggaaatggtaatacaacttaactcattgatctattataaaaattaaattattgattcacataaagcatatagaaatatgcctggcaaatagtacgctcttcayaggttggctataaatattgcagtcataaacatagaaatcatatcttatgaagaataactaaagcaattttatgtacaagataagattgttctgagcagttattccaaagggcaaagccaaaaatcaacaaatggaggttgcaggaccagagacttaaatgaaatcaatggaaatattctttaataattagaattgttattaactatgggctctgtacacattgaagacatttaagaagagaatgcatgataaattttcaaagatattagaaggcatttattgctactaaatgagcataataaatgcctttctgtttctataagtttatattttttaaatggagcaaatcttacta

SEQ ID NO: 215554 - DNA, 569 bp, Homo sapiens
actttgttccaaccatcaaaactttctcttactcactaaccagctgtgtgactttggtgtgacttttgtctattgatccttatgataacgcagtcttctcattatgaaaatggaaatggtaatacaacttaactcattgatctattataaaaattaaattattgattcacataaagcatatagaaatatgcctggcaaatagtacgctcttcataggttggctataaatattgcagtcataaacatagaaatcatatcttatgaagaataactaaagcaattttatgtacaagataagattgttctgagcagttattccaaagggcmaagccaaaaatcaacaaatggaggttgcaggaccagagacttaaatgaaatcaatggaaatattctttaataattagaattgttattaactatgggctctgtacacattgaagacatttaagaagagaatgcatgataaattttcaaagatattagaaggcatttattgctactaaatgagcataataaatgcctttctgtttctataagtttatattttttaaatggagcaaatcttacta

SEQ ID NO: 215555 - DNA, 648 bp, Homo sapiens
aagaggtaaaaagactggaaagaaaggaatgtaaaataaaatgagaatagagaatccatatgaaaaggtggctaactacaataattaaataactagcattakgtacattttgcaagaggccagaaaataattttagtagtgctgtaacagtattttcttcacagaaaatacagagagctgaagacagaaaatgtcttaatcttgactttgatttatatttcatcccttttatcttatgatgcactacatatatctccaataaggcatattttaattaattttttgctaaagtataagtaaactagcttctcttttgaatgggcagactatcactactttaaaaattaagcatttgtgagccttgtgatggttcaggtcagcaattccagcactttaggattccaaggcaggcagactgcttgagccccaggagttcaaaaccagcctgggcaatgtagaaagaccttgtctctaccaaaatcaataaattagttaatttaaaaatataaaaataaaacagcattggtattagtggatattttgtgttgtgtgctacaaggcaatttactcttataaattgtcatgctttgagcatttgatagagagtttttcaaatagagatgaaaaatgtcaagtgggaaaaaaaaa

SEQ ID NO: 215556 - DNA, 648 bp, Homo sapiens
aagaggtaaaaagactggaaagaaaggaatgtaaaataaaatgagaatagagaatccatatgaaaaggtggctaactacaataattaaataactagcattatgtacattttgcaagaggccagaaaataattttagtagtgctgtaacagtattttcttcacagaaaatacagagagctgaagacagaaaatgtcttaatcttgactttgatttatatttcatcccttttatcttatgatgcactacatatatctccaataaggcatattttaattaattttttgctaaagtataagtaaactagcttctcttttgaatgggcagactatcactactttaaaaattaagcatttgtgagccttgtgatggttcaggtcagcaattccagcactttaggattccaaggcaggcagaytgcttgagccccaggagttcaaaaccagcctgggcaatgtagaaagaccttgtctctaccaaaatcaataaattagttaatttaaaaatataaaaataaaacagcattggtattagtggatattttgtgttgtgtgctacaaggcaatttactcttataaattgtcatgctttgagcatttgatagagagtttttcaaatagagatgaaaaatgtcaagtgggaaaaaaaaa

SEQ ID NO: 215557 - DNA, 648 bp, Homo sapiens
aagaggtaaaaagactggaaagaaaggaatgtaaaataaaatgagaatagagaatccatatgaaaaggtggctaactacaataattaaataactagcattatgtacattttgcaagaggccagaaaataattttagtagtgctgtaacagtattttcttcacagaaaatacagagagctgaagacagaaaatgtcttaatcttgactttgatttatatttcatcccttttatcttatgatgcactacatatatctccaataaggcatattttaattaattttttgctaaagtataagtaaactagcttctcttttgaatgggcagactatcactactttaaaaattaagcatttgtgagccttgtgatggttcaggtcagcaattccagcactttaggattccaaggcaggcagactgcttgagccccaggagttcaaaaccagcctgggcaatgtagaaagaccttgtctctaccaaaatcaataaattagttaatttaaaaatataaaaataaaacagcattggtattagtggatattttgtgttgtgtgctacaaggcaatttactcttayaaattgtcatgctttgagcatttgatagagagtttttcaaatagagatgaaaaatgtcaagtgggaaaaaaaaa

SEQ ID NO: 215558 - DNA, 603 bp, Homo sapiens
cttgcccatttactattgaatttttttaattaaagaatataaaaagaagatatttctggtcacttttattgttctctgataataattggaattaaaatggccaatccacataggtatgaaatctttgttagttccctcaggcttccataaagaagtaccacaaactgggtggcttacacaagaaaaatttattgtcctacattccaaaggtgatatggtttggctgtgtccccacccaaatctcatcttgaaattgtagctcccataattcccaagtgttgtgggagggacctggtgggagataattgaatgatgagggcagtttcccccatactgttctcatggtagttaataagtcttrgaagatctgatggatttataagaggtttctccttttgtttagctttcattagctcttgtttgctggcatgtaagatgtgactttcaccttctaccatgattgtgaggccttcctagccatgtggaaccctgagtccattgaacctctttttctttataaaaaaatcattttctttatagaaaaataaaggcataccccaatctcaggtatgactttatcagcagtgtgaaaatggacaaata

SEQ ID NO: 215559 - DNA, 610 bp, Homo sapiens
atacatctaatggaaatcagaatgagttgcattatgctaacagttaaaattttcaaagagttcattaagcattacacttaatttttcttttggcaataaaagccaatacagtgtcattttactagctgtactatttttgtaaatacacataaagatttttttgaagtaaattattttgaagtaaaaacacaatgtgtttgaaattaattcctaatattgtaacacaacctagcttaatcaaaacgagtacattttaaagttggcaataacagaaaaacacaaataaaaagtattcattttaaaattcactactcttcttcctccaggaaggygatcattgtgtgtatgtgtgtgtgtatgtgtgtgtggtgtggtatgtgtgtgtgtgtttctccctgaagcagagtgctcaccatggcagttactttcttcatggactgtggtgctttgctccttatgaattgaagctgtcaattgtgatttttccagttgaagcactgttacaagctaacttgcttcactaggcacacaaaacttggaatattaaccgatggcattctgcccttcgctgccaaggcttcctaagttactttttacaagtattagtcat

SEQ ID NO: 215560 - DNA, 610 bp, Homo sapiens
atacatctaatggaaatcagaatgagttgcattatgctaacagttaaaattttcaaagagttcattaagcattacacttaatttttcttttggcaataaaagccaatacagtgtcattttactagctgtactatttttgtaaatacacataaagatttttttgaagtaaattattttgaagtaaaaacacaatgtgtttgaaattaattcctaatattgtaacacaacctagcttaatcaaaacgagtacattttaaagttggcaataacagaaaaacacaaataaaaagtattcattttaaaattcactactcttcttcctccaggaaggcgatcattgtgtgtatgtgtgtgtgtatgtgtgtgtggtgtggtatgtgtgtgtgtgtttctccctgawgcagagtgctcaccatggcagttactttcttcatggactgtggtgctttgctccttatgaattgaagctgtcaattgtgatttttccagttgaagcactgttacaagctaacttgcttcactaggcacacaaaacttggaatattaaccgatggcattctgcccttcgctgccaaggcttcctaagttactttttacaagtattagtcat

SEQ ID NO: 215561 - DNA, 537 bp, Homo sapiens
aatattctcatcatgacccagtttttgtgatagatgttttagatatcatttatttatcatattgacatatctgatatttaaaggacaagatgttcaaaaattctaattggttgaatgttttctgctttacttcttgaattatgtaatcacttattyatcctgtgctatatggataaacatttccaactaataaacatttctaatgtatctttaaaactaaaaaattacttaattgctactaaaactctatttaaaatttgttttctttttaagcgattggctagtttttaggtgatttcaagtgatttgttttaagcaatggtttttaaatcataaattataaaaggtgtcatcttattagccttgcaaaatgacttatacctttagatatttaatactgtattgatttttctggagaagaaacactgactcaaaattaaaatgacgtcttgaatgacttcatggaatttatttacattccccaagtagagttgtgatgcacaacataatttatttatcatgggtaagaaaatatag

SEQ ID NO: 215562 - DNA, 208 bp, Homo sapiens
tgctctggtttttcagataccttactctgatacaaaaggttctgcgaggttgactcaaggcagtccccagaggaggaggtgtagtcccctctgtgtgatgccaggttcagcccaagmctgaaacccctttgtcctcctggctgttctcctccacctcctcttctgactgagtctttgactgggtgcttcaacgattaagccttgccaa

SEQ ID NO: 215563 - DNA, 483 bp, Homo sapiens
gtttttaaataataatttttgtcatagcccttatgacagagaggctgcaaatagatatatgtgtattccacaatctgacaggcaccatcaggggttcaagtgacttagcctaaactattaatcaaaataatgactaatgtttcctaataatacccatggttttcaataacttttaagatataaaagcattttccttacagtacagatatttaaaatatatgatcatatttttgtgtaaatatttccttaatattgattcaatataaacaaataagatacattttgctctggcagaattaaatcaaaattagaatgtatctgtacttgaaatattaaaaatatcaaagaattacagtaaagacataacagaacttaatctggyatgtgctatcaatttagtaatttaaactgttcatcctaagcatatgcatctctcagaaaatgtatagtgttaaaattcttgttaaaatggcttgataccaa

SEQ ID NO: 215564 - DNA, 560 bp, Homo sapiens
cgctctggtgtgtgatttcactcacatgaaggtcaagaacaggcaaaactaatctatggtgctagaaaaacaatccttacttatgsgagggggctgaatggaaacgggaatgagggaatgttcttgggtatggggtataccttgactgaggtttatgtatgtcaaagtcactcaccatggacctatccattttatatatgtaattcatcatgtaacttaaaaaatgttttattgaaaggtgttaatattttaacttatactttctcatatttggttgaacattagaatcacctggagagtttttcttaaaaaattatttacttatttaaataaaaaaaatttattaagtgcaatatgatgtttatatatgtatatgtatagtgcaatggttacatttgggtaattaacattgcattatctgacatagttttatcattttttgtggcaagaacatttaaaatctactcaaccattttcaagaatactacattattattaactatagtcatcatgtggtacaatacatttcttgaatttattcttcttatttgactgaaatt

SEQ ID NO: 215565 - DNA, 560 bp, Homo sapiens
cgctctggtgtgtgatttcactcacatgaaggtcaagaacaggcaaaactaatctatggtgctagaaaaacaatccttacttatgcgagggggctgaatggaaasgggaatgagggaatgttcttgggtatggggtataccttgactgaggtttatgtatgtcaaagtcactcaccatggacctatccattttatatatgtaattcatcatgtaacttaaaaaatgttttattgaaaggtgttaatattttaacttatactttctcatatttggttgaacattagaatcacctggagagtttttcttaaaaaattatttacttatttaaataaaaaaaatttattaagtgcaatatgatgtttatatatgtatatgtatagtgcaatggttacatttgggtaattaacattgcattatctgacatagttttatcattttttgtggcaagaacatttaaaatctactcaaccattttcaagaatactacattattattaactatagtcatcatgtggtacaatacatttcttgaatttattcttcttatttgactgaaatt

SEQ ID NO: 215566 - DNA, 560 bp, Homo sapiens
cgctctggtgtgtgatttcactcacatgaaggtcaagaacaggcaaaactaatctatggtgctagaaaaacaatccttacttatgcgagggggctgaatggaaacgggaatgagggaatgttcttgggtatggggtataccttgactgaggtttatgtatgtcaaagtcactcaccatggacctatccattttatatatgtaattcatcatgtaayttaaaaaatgttttattgaaaggtgttaatattttaacttatactttctcatatttggttgaacattagaatcacctggagagtttttcttaaaaaattatttacttatttaaataaaaaaaatttattaagtgcaatatgatgtttatatatgtatatgtatagtgcaatggttacatttgggtaattaacattgcattatctgacatagttttatcattttttgtggcaagaacatttaaaatctactcaaccattttcaagaatactacattattattaactatagtcatcatgtggtacaatacatttcttgaatttattcttcttatttgactgaaatt

SEQ ID NO: 215567 - DNA, 560 bp, Homo sapiens
cgctctggtgtgtgatttcactcacatgaaggtcaagaacaggcaaaactaatctatggtgctagaaaaacaatccttacttatgcgagggggctgaatggaaacgggaatgagggaatgttcttgggtatggggtataccttgactgaggtttatgtatgtcaaagtcactcaccatggacctatccattttatatatgtaattcatcatgtaacttaaaaaatgttttattgaaaggtgttaatattttaacttatactttctcatatttggttgaacattagaatcacctggagagtttttcttaaaaaattatttacttatttaaataaaaaaaatttattaagtgcaatatgatgtttatatatgtatatgtatagtgcaatggttrcatttgggtaattaacattgcattatctgacatagttttatcattttttgtggcaagaacatttaaaatctactcaaccattttcaagaatactacattattattaactatagtcatcatgtggtacaatacatttcttgaatttattcttcttatttgactgaaatt

SEQ ID NO: 215568 - DNA, 611 bp, Homo sapiens
tattttattcagtagggagagcaacatactgtttaggaaatcctttatgagacttgcattatattgtgattttagaatacttctctcaccaaaacccttgacatggcaattactggatcaattgtttcactctcctgagagaataaattctgtattcattccttagctctgaagtacaaggaggaagaagaaaagcaggtggaggcagaggtgacagactatttctgtttcagtatgttctgaaaaaatgagactaaaaggattaatagtggagatattttagaacaattatgctttataggtttcttagagtcagaaaaattgctatcaaaaataaaaatgatagagacaagttatctgcttgatggcaatttggggatataaagcttgacaatcaaacactccttaggtcaaatgaggatttgcaaattattcaccaataggatatgcataatgaaacacgcattctgtaatgacaacatttcccctcaaaaatttagttaacatttttctaayagtaagttaaaaataaaagaaacagaagtatgcaagttcccttaattggcactagccctcaaagagcagtactgcatgccgtattgtttgaggca

SEQ ID NO: 215569 - DNA, 611 bp, Homo sapiens
tattttattcagtagggagagcaacatactgtttaggaaatcctttatgagacttgcattatattgtgattttagaatacttctctcaccaaaacccttgacatggcaattactggatcaattgtttcactctcctgagagaataaattctgtattcattccttagctctgaagtacaaggaggaagaagaaaagcaggtggaggcagaggtgacagactatttctgtttcagtatgttctgaaaaaatgagactaaaaggattaatagtggagatattttagaacaattatgctttataggtttcttagagtcagaaaaattgctatcaaaaataaaaatgatagagacaagttatctgcttgatggcaatttggggatataaagcttgacaatcaaacactccttaggtcaaatgaggatttgcaaattattcaccaataggatatgcataatgaaacacgcattctgtaatgacaacatttcccctcaaaaatttagttaacatttttctaacagtaagttaaaaataaaagaaacagaagtatgcaagttcccttaattggcaytagccctcaaagagcagtactgcatgccgtattgtttgaggca

SEQ ID NO: 215570 - DNA, 579 bp, Homo sapiens
tgtgatagaaactgctcctacagcctggattctaggatgcatggtaaacatgagcacaagtcaagcagctccaggctgaccttcaggtgagcagagccagacccacagctgctttatgtaacttgagcaagaaatcaatgctcattgttgtaaattactgacatttggggaaagacttgaggttgtttgtcatggccacataaattaaagttgattaatatagcccatatccaagatactggataatcctattagctcttccttccaaaccttgtaaatatttccaaaaccagattacttctcatcacctttgttgcgattactgtggcataggctaccatggtctctcatatgattactctaatagcctcctaactggcttggatatttcttcctttcttttctgactcaccatctattttcaatatagtactagaataatccttttcaaatgtaaatcagattatgtyattcctgtgttcaaatcccttccatagcgtctcacatcaatcacatgacagccaaaattcttataaagacttacctagccattgtagtttcattcaatctacctacctc

SEQ ID NO: 215571 - DNA, 418 bp, Homo sapiens
cataggcgttctttgtttctttccattatttttctcctgtgactctattttyaagtagcttgtcttttagttcactgattctttcctctggttgatcagtcctgctgctgagactctctgatgcatttttcatctaattcaatgtattctttagttccaggatttctgtttgatatttttaatgactttaatctatttgttgaatttctgtaataaatttctgaattgcttttctgtgttttctgggagctcatcaaagagttttgttttttttttcttccagtaactcaactcataccatctcattagggtcaatcactagtttctttctttgtacatttgaggtggccacggttgtgttgtttcttatatatgtacatctatattcttgcattgaataattggttatttattgtag

SEQ ID NO: 215572 - DNA, 597 bp, Homo sapiens
taaaatataaagtgggaaggtggaggtaagtttagcatcagaaaatgtctgatgtggcttgaatgtggaatggacagtgaatgggataagaaggttgacatagcacagatcatggagagactcagggacttgtttggatttaattctgaaagtaactggaagccatcgggagatataggcagttgagtgatataatttaatttgtattttaaaagatcactttggcaggtttgtaaagaaaggattgtctgatgggcattaatggaagcagagaccactccaggaactctggaattagttcaattgatagcacaaaacaacagagaggtggttagcagccatgcagatggagagaactggcctgagttaggatattttggagacatacaaaatgattttgatactatttagcagctgcataatagcccattatatgaatgcrccatgacttatttaaacattggaagaggcgctttcaaatttaagcaatcaagtgtattctgagatctactattaagattcctgcttcccaaattgtcttcatttacatttacccagtaactatctatttaaaacgcataaggtggtaccctggct

SEQ ID NO: 215573 - DNA, 401 bp, Homo sapiens
aattccataacgggaattgtatctttaataacatgaaaccaatcagtcaactcttgggtatttataacaggaagaactagtgtttaagatattctaratcactaaatatttttaagcggtgtttttattttcaaacaaaatgatgtgatttataaacatttttgggtcctgcttacctcctaatgctgctgtaatgagtctagaacttagagttggcatgtcctcagtaaaggccaatggcatgggggcctggaggcaatttaagaaagggatatggagaagtagaaagttggctcaggttgaagaatgtactgtgactaatccacaaaaccaatcatccacaggtggacaatattttagaaatggcccaggggatgctgctctggtcttttggagctgaa

SEQ ID NO: 215574 - DNA, 526 bp, Homo sapiens
tctcattgatccaaatcaaaaagtggtcattctcaactcctctatctcttccatctcttacaataaattggtcactaaaatccattgcaaccttcaaaagatgttcttaatctatcccttctgtcmatttcaccatcattgtcttagctattgtttcattgtgtctcacttggacctttgtagtaggcaaatggaattcacactagctattcctttactcagatccatcttcttgtatcacttaggagatctttctaaaatgggaaactggccattcacattctggcttaaaatgttttcaatggtgctttactccctgcagttgaattcaaattcttctgtgtagcatatacacgtggcccttttgtgatctgtgctcttctggatatttctcctctgtgcatccatattattgagccatactttatccttccacgagcaccacagtcttgtggtttcacttctttactcatgttcttcattggtctgtaatgcccatacatcccttttctgcatggaaattcct

SEQ ID NO: 215575 - DNA, 634 bp, Homo sapiens
gtagctcttaaaataagcatccaccactgctccagagaagggtagagacgtgagaaaggcctgcactgtgcctggtccaggaggaaaaatgggaatctgggtcaagagacagccagattcttcatgtcatctctagcagcaagtgctagaatagagggaacattcttttcttcacccagcctaacctttccatttctatatgttacccaagttatttctaactggtaaggattatccctattttcaattatcattgtgacattcatgattgtgttgttggtgttgttggagctttgactgttagggcagtgactggtaacagaactataatctttcaaaggtgcagcatttattggcttttatttgaacttaaaataagtgacctattgcttcttgcactattgtcractataagtgtgtgggaaaaaatcctatctttgcccttgatttatgacaaaaatatttttaaatgtgaaatcattcttttgatgtttgcagtacatttcaaatgaagatggaatcttttgccactattcagaatttgtcccatctgccccaataaaaatacaagttatagattcaagaatatccataggaatcctttaactctgtatcaacagacaaagaaatcatt

SEQ ID NO: 215576 - DNA, 606 bp, Homo sapiens
gtaccccccaaaattactgaaataaggataaaaatttaaaaatatattgcatgcacaattatacctctttttatcatcagttttttcctggtgacttaggttacagatattatatcttatacatccaaaaattaagacaagtaaaattttgatatgtagaccaaaagatgtttttatctgacattttccttaaagtgtattccattcaattgagtgacaatgtaaggagtcaaatatagggcagattaagtgaacaaaagttctaaatcagtrttatgcactaggtccaccttcctttttaagtttcaaatcatgaaaaaataaaagaaggttatattatacgatgctgaaggatttgaactgaattttttttgacttgaatgcaataaatttctttctaatgtgctatgttttaaatattcaataaaaacactaaatgatttctcatgatataatttcaaatccttgacatttaaaaggatgttaaggaagtctacttctgtccaatcagtgcttttttttgccatgaaacatacaatattgccacaggtttctttctaaggatggcaggattcaaatggacggtgtaagttagttgagtttaat

SEQ ID NO: 215577 - DNA, 593 bp, Homo sapiens
ttaagggtgtctttcctgcccttgagctctatcttctaattcctatgggcatctcattttaatatcctctttcatcaacactaagaatcactcccmctcttgcacttagaactgtgcctggcacattatggaccctttacatattccaactcatttaatccataaaaccacacacagaaggtactattattatctccattttacagatgaggaagctaaggcccagggaggtcaactaacttgcccaaggtctcctagataactgacacagggtaggattccaactcacacagttcacctctgggctctgtgtccttcactattacaatctgctgcccctgatttttaagcatctctgaatctcccaaaaccacaatactcctctaagatatttaatattactacttcacaagagccactcaaaatattcacattgccattgtcccagtgaatgtcccagactgctgaaaagagaatatgtaaaattctgctttttagttctgacatcttgctaatatagcaagtaagcattaagatggtcatgattccacatacaataaacttcaaaataacaaactgaaagatatccttgg

SEQ ID NO: 215578 - DNA, 610 bp, Homo sapiens
aagctttatatcagtttttctttttgaatacttaaatgtggaaaaaacccartagtcaggaggtatctttttttttcttttgctgatgtttgcattctttagggctcaagggacagcagtcttcagtgttgacatgttggttttctcttcctttaacctaaattgagttatttgtgaaataagtatggttctataattctgaaatccaggaatctctgtaaactgttttttttttaataactcgtttagctaaacctgatctctgatctgaattaacatgagattatttatagtctgtctttatcccagttaggctggaaatattcatatttcactatagaaatatgaatatgttttgttgtagatcattgccttccattctgctggaaatatgaaaaaatggtgtatgtacatactacatctctaaatgcctcaaaaattctgagtcctaaagcatagctgatctcaagggtttcagaatagcaattgtggacttgtgtcaccctctgcaattgattcactgggtcccttctaataaggcatactgtcttactgcttcacaagttctatagtgtacttagaaaatcacaagcaatgagagtaatttata

SEQ ID NO: 215579 - DNA, 494 bp, Homo sapiens
taatctttgagcagctctgctgacttccagacttcctctggatcaggtatccaaaccctggcaaactagaagacaaaaagaaaaaaatttaaactagcaaatcaattattttacaatcatatataaacatatgataactatttataattaaacaatttatgaaaaaagacatcttggccaacatgaaattcacttttttttttttttttttttttttttgagacagagttaagctcttgttgcccaggctggagtacagtggcatgatctcagctcacagcaacctytgcctcctgggttcaagcaattctcctgcctcagcctcctgagtagctggaattacaggcgcctgccaccacactcagctaatttttttgtttttaataaagatggagtttcgccatattggccaagctggtctccaaactcctgacctcaggtgatccacccgcctcagcctcccaaagtgctgggattacaggtgtgagccacca

SEQ ID NO: 215580 - DNA, 472 bp, Homo sapiens
atatgcatatgaaaagatactcaacatcatatgtcatcagggaaaacagcaacgagctacctccacatgcctgttagaatagccaaacccaaaacactgacaatatcaaatgctggcratgatgtggagcaactctcagtcaatgctggtgggaaggccaaatggcacagctaccttggaagacaactcgtcaatttcttacaaaactaaacatattcttatatgatccagcaattttgctacttggtatttacccaaatgaattgaaaacttatgtccacacaaaaacctgcatgcagatattgatagcacctttactcataatgccaaaacttggaagcaaccaacatgtccttcagtaggtgaatggataaactgcggtacatcgagacgatggaatatcattcagcactaaaaagaaatgagctatcaagcataaaacgacatggaagaaatttaaatgcttgttact

SEQ ID NO: 215581 - DNA, 445 bp, Homo sapiens
atacatatttcttatttacatgacttcttggtgtattttcccctttgtcattttgaaacattattcttcatccccagtgatatttcctgttctgatgtctactttgctcatcacagttttagggggttttggtttgtttgtttttctattatttggttcaagtaagtttcttataagtctgttcaattccatttgatgattccatttgattccattcgaggattccactcgattccattcgatgattattccattcgagtccattcaatgattccattcgagtccatttgatgattccattcgattccattcaatgatggttccattagagtccattcratgattccatttgattccattcaatgatgattccattagagtccattcgaggattctattcaattccgtatgataatgtttccatttgagtccactcgatgattcc

SEQ ID NO: 215582 - DNA, 567 bp, Homo sapiens
atatatagaaggaaatccacctctggggtggcaatgaytcacttaacatacatccagtgatgatgccagggtatatttctccatagaaacatgcttaaaatatagtaagtgacaaaagaccatgtattgtgattctactttttaaaatgtttacagcataaaaagtgtgaaaagcaacaaaccggaatgttttgagtggcaaaattaaagatttttctttacattttgtcatccaaattattacaaaaacaatgtgatttcctttataatcatggaaagtgttattttcatttattaatatttacatttcttttctttttcttcttttttctcctgtatgtatcccacataggctacagagcttaaatccctgcctcttgagagaaatcagcccattttcaggacatgcaatacacaaagctgccccatcttccctttatttttatttttatcttatttatttatttatttatttatttatttatttatttatttatttatttatgttgagatggagtctcactctgttgcccaggctggagtgcggtggcgcatctcagctcactg

SEQ ID NO: 215583 - DNA, 567 bp, Homo sapiens
atatatagaaggaaatccacctctggggtggcaatgactcacttaacatacatccagtgatgatgccaggrtatatttctccatagaaacatgcttaaaatatagtaagtgacaaaagaccatgtattgtgattctactttttaaaatgtttacagcataaaaagtgtgaaaagcaacaaaccggaatgttttgagtggcaaaattaaagatttttctttacattttgtcatccaaattattacaaaaacaatgtgatttcctttataatcatggaaagtgttattttcatttattaatatttacatttcttttctttttcttcttttttctcctgtatgtatcccacataggctacagagcttaaatccctgcctcttgagagaaatcagcccattttcaggacatgcaatacacaaagctgccccatcttccctttatttttatttttatcttatttatttatttatttatttatttatttatttatttatttatttatttatgttgagatggagtctcactctgttgcccaggctggagtgcggtggcgcatctcagctcactg

SEQ ID NO: 215584 - DNA, 586 bp, Homo sapiens
tgattagaaggttgatgcagcattccaggcaaaggatgatggtgatttaagctggagttagagcagtgaatatgctgagtacagtttggaggtagaactgacaggattgctaaggaattagatacagaatagagaaaagtgaagacatcaaaatagcagcctagttttatgtgcgagcaactggagagacagaactgccatttactgcgataggcaaggcttgagtggtggagcaaggggaaaggacttcagcggatggcagagtgtaggtgggtagaaacaacattctactgtattttggacacrgtgaatttgtgatgctgagaggaccaaaatttaaaaaattgttaaaagccgtacggtgcggatatcccagttgtgcgctactgaattccaactaagctcagtctggagttgcttgtgagcaaggaactcaagggagaggttggagtttgaaacataaatgagtcataattttataggtcatatttgaagttcttcaacaaaatacacataaaacgtttgtgttgggaagagacatgaaagttctaattctcaagaagcttagtggggtagacagacaagt

SEQ ID NO: 215585 - DNA, 490 bp, Homo sapiens
tgcacttacgtgaggatgcactcgggccagccagtggctttgcccacctccctcagacaccgctccagggtccgtcagcgccaggcccatgggccatggctgtctgcaactcccgacacaagctgcaaggcaagagagccgctgggaaaccgcaccgcaaggatgctggsattggaacaggaattaaaagaaatgaaaaaatgtgtaagcaaaaactcagctgtatgtaaaaaaaacccaattccccctgagaatgagaaagagccttagtcctttaaaaaaactacctgttttcctatggctagtgagccttatcgctcccttcccaggcattatcaaaaccctaattccctaactgtgcaactgcaaggtcactaaacaaacaaatgcaagtcacaaaacatatttttcctaaaaacgtaaaaaaaaaaaaaacataatgcgtgcttcaattaaataactctctgtttctcgcttctgtaatatgctt

SEQ ID NO: 215586 - DNA, 351 bp, Homo sapiens
gcatagtcatcacagaccagtgcaaagagtgaaacagaaacatccagcttaatctgcaaaagcctttttggatctttgagaggcgttcattaacttacagcaaattgatgagctgatattcttctttcatccaggtgagtgcattaactaggttaattttcctgtctcaagggactgctgtaggttagggtgaatgaatgaaagaagcaagtttttaaacaggaaaaaagcttcagagaagttgaggtgacaagcatcgcttcacccccaatggaaggtgagcttgtctgttaggtsccagggactgaactggagttccgtggttaggggatgacccatctcaacaagaaa

SEQ ID NO: 215587 - DNA, 365 bp, Homo sapiens
tgccctgccaagtcttcagtctacaacagcactgacccgcttcmgacacagcccagatccttcccagacacgctgttattccgactttttgccctttcagtccagccttccctatcacttatgctgaaattgggaacatttcccaaaccaacagtttcccagtccacaatgttcccttgctgagtgtccccacaggacaggcaggcagcctgataaataaaaccagtcataaaacctccctgccttagcaaagggactgctttgccaggctgctgtcacatagcactcctgtctcccgtttgacttcacatagtgaaaattgtctaaaagataaggcaggagctctggttgacaccaccaccccc

SEQ ID NO: 215588 - DNA, 610 bp, Homo sapiens
acattgcccattcctttctgtctcctcagagctgcaaccagagattgctgggttggttcacaggaatacrcggggttagtttaaagtgcaggcaaaaacataaaaacagccaatgagactagatgttaatgacaaatgtatgataagttttgaaacataatttctctctctccattactcattttttaaaaaacaaatcaaaataggactgagctgtttgcaaaagggactttagtcttatattgggcctgattatttgcataaattgcagcaagaataattctttttacatacacccttttagattggctttaatggaactctgttctacaaggaatctcagataggattttctgaagctgcaccgagccatgggtttgtgtcctcaaatacctgtgagttgggtaaactcctcttttttttgaggtcccaagagcatgtgtttcctgggcctgtcagaaagtgacgttctttactcactgcaggttaggaaccaggtacggggactgtagagacaaggtatgaggtcagttttctcaaggggcttttttttattggctctgcaaatggagcttgactccttgaagagtctccttaaagccttggtaaa

SEQ ID NO: 215589 - DNA, 610 bp, Homo sapiens
acattgcccattcctttctgtctcctcagagctgcaaccagagattgctgggttggttcacaggaatacgcggggttagtttaaagtgcaggcaaaaacataaaaacagccaatgagactagatgttaatgacaaatgtatgataagttttgaaacataatttctctctctccattactcattttttwaaaaacaaatcaaaataggactgagctgtttgcaaaagggactttagtcttatattgggcctgattatttgcataaattgcagcaagaataattctttttacatacacccttttagattggctttaatggaactctgttctacaaggaatctcagataggattttctgaagctgcaccgagccatgggtttgtgtcctcaaatacctgtgagttgggtaaactcctcttttttttgaggtcccaagagcatgtgtttcctgggcctgtcagaaagtgacgttctttactcactgcaggttaggaaccaggtacggggactgtagagacaaggtatgaggtcagttttctcaaggggcttttttttattggctctgcaaatggagcttgactccttgaagagtctccttaaagccttggtaaa

SEQ ID NO: 215590 - DNA, 610 bp, Homo sapiens
acattgcccattcctttctgtctcctcagagctgcaaccagagattgctgggttggttcacaggaatacgcggggttagtttaaagtgcaggcaaaaacataaaaacagccaatgagactagatgttaatgacaaatgtatgataagttttgaaacataatttctctctctccattactcattttttaaaaaacaaatcaaaataggactgagctgtytgcaaaagggactttagtcttatattgggcctgattatttgcataaattgcagcaagaataattctttttacatacacccttttagattggctttaatggaactctgttctacaaggaatctcagataggattttctgaagctgcaccgagccatgggtttgtgtcctcaaatacctgtgagttgggtaaactcctcttttttttgaggtcccaagagcatgtgtttcctgggcctgtcagaaagtgacgttctttactcactgcaggttaggaaccaggtacggggactgtagagacaaggtatgaggtcagttttctcaaggggcttttttttattggctctgcaaatggagcttgactccttgaagagtctccttaaagccttggtaaa

SEQ ID NO: 215591 - DNA, 610 bp, Homo sapiens
acattgcccattcctttctgtctcctcagagctgcaaccagagattgctgggttggttcacaggaatacgcggggttagtttaaagtgcaggcaaaaacataaaaacagccaatgagactagatgttaatgacaaatgtatgataagttttgaaacataatttctctctctccattactcattttttaaaaaacaaatcaaaataggactgagctgtttgcaaaagggactttagtcttatattgggcctgattatttgcataaattgcagcaagaataattctttttacatacacccttttagatyggctttaatggaactctgttctacaaggaatctcagataggattttctgaagctgcaccgagccatgggtttgtgtcctcaaatacctgtgagttgggtaaactcctcttttttttgaggtcccaagagcatgtgtttcctgggcctgtcagaaagtgacgttctttactcactgcaggttaggaaccaggtacggggactgtagagacaaggtatgaggtcagttttctcaaggggcttttttttattggctctgcaaatggagcttgactccttgaagagtctccttaaagccttggtaaa

SEQ ID NO: 215592 - DNA, 489 bp, Homo sapiens
ggcagaagggggggcctttctcaaactccatctctagaggtttatattgctgtcctctcaagagattccagattcagaccttcagttctgtggctgtgggcaaaagccaacaaagacccaaatcctctgtccttgggagcttgaggagagtttaccagttcgagttcccactgggtctgagaactttgcctttaaaatccattcctggtccctgcctaccacttcctgctctggggaatagagttgagggggccaccctccatcaccttaatgtgactctccccacagaaacaacagaakaaacaagtggtacatcagctggaagaagtaacatgatttctttgtttgctcgcgacatgactgctcggtttgggggacactcagatgtagaggccccgagtctcgtctcacccactcccagcctggggaagaaggctcaccccccagagtccaccccatcccccacagggtctctgataacccggtccc

SEQ ID NO: 215593 - DNA, 489 bp, Homo sapiens
ggcagaagggggggcctttctcaaactccatctctagaggtttatattgctgtcctctcaagagattccagattcagaccttcagttctgtggctgtgggcaaaagccaacaaagacccaaatcctctgtccttgggagcttgaggagagtttaccagttcgagttcccactgggtctgagaactttgcctttaaaatccattcctggtccctgcctaccacttcctgctctggggaatagagttgagggggccaccctccatcaccttaatgtgactctccccacagaaacaacagaagaaacaagtggwacatcagctggaagaagtaacatgatttctttgtttgctcgcgacatgactgctcggtttgggggacactcagatgtagaggccccgagtctcgtctcacccactcccagcctggggaagaaggctcaccccccagagtccaccccatcccccacagggtctctgataacccggtccc

SEQ ID NO: 215594 - DNA, 589 bp, Homo sapiens
ttccaatctctgacatgccacctagtggaatgggatttttttctccatgggggccctattrgcccgttggccaaaacctctcatttcccaattcatttccctcctattccctctactgggtaccaggctccatgccccatttgtagacagaaaaactcctccttcaatatctggaggaagctacccttgagagacaaattctagcctcagtactgtccccatcaaagggacgacagccatttcatccttatgttcttttgagacacctgttctgcatccaactacattggcatttaaacaaagaggggttttatgtttggaagtcagttggacctattctctatgaatgaatactttagtctgggccataatagtggaatatagaggtagagccagaaccctcccttcattaaggggacttgcccagcaacaactattatgcagtttttcccaggacccatccaatttgtctccccctacctgggggacctagtggccatactggtcatgcaagattaggaagttaaaggggaagcacccacggaagactagggctatgaacagttaagtgtgattattcctgccaaat

SEQ ID NO: 215595 - DNA, 589 bp, Homo sapiens
ttccaatctctgacatgccacctagtggaatgggatttttttctccatgggggccctattggcccgttggccaaaacctctcatttcccaattcatttccctcctattccctctactgggtaccaggctccatgccccatttgtagacagaaaaactcctccttcaatatctggargaagctacccttgagagacaaattctagcctcagtactgtccccatcaaagggacgacagccatttcatccttatgttcttttgagacacctgttctgcatccaactacattggcatttaaacaaagaggggttttatgtttggaagtcagttggacctattctctatgaatgaatactttagtctgggccataatagtggaatatagaggtagagccagaaccctcccttcattaaggggacttgcccagcaacaactattatgcagtttttcccaggacccatccaatttgtctccccctacctgggggacctagtggccatactggtcatgcaagattaggaagttaaaggggaagcacccacggaagactagggctatgaacagttaagtgtgattattcctgccaaat

SEQ ID NO: 215596 - DNA, 575 bp, Homo sapiens
aattctttcttctcgtgtctaatccatccactagtttcttatttcaacaattacatttttatttccttatttcattttattctgmgactgagtctcattctgtcacacaggctgaattgcagtggtacgaacctgcagactcggcctcctgggctcaagtgatcctcccacctcagcctcttgagtagctgggactataggcaggtgccccatacccagctaataccatacccacacagcagagacataaaagatttccatcctcaaagaaggttccattgaacagcactgctctaattcaataaaaaataccactgagcacaacatagtaatagaaaagattgaagaggcagtgctgatacttaaaaacctggtattttcagccaggcatggtggctcatgcctgtaatcctggcactttgggaggctgaggtgggaagatcgcttaagcccaggagttctagaccagcctgggcaacatggtgaaaccctgtctctacaaaaaatacaaaaaattagctgggcatggtggcatgtgcctgtagtcccagctacttgggaggctgaggtgggag

SEQ ID NO: 215597 - DNA, 603 bp, Homo sapiens
ttgaatactacaccttcatgttctaagaatcaggggacttatataaaacctcagttgcctgataaggactacatcaaagtgaaaagccatgggaaagaactagaaagtatacttttgaccctagttctgtaaagtttccttatgccacaggtaatacacatcgcaattcctgccaaattctttccctcacytctgtttatggtctcgattccataaataggagaagggcatgaatttgctttagttagatagacagatagatggatagatagatagatggatggatggatggatggatggatagatagatagacagagataaagatagagacaaagatggagacagagatggacatagagacagatttgcagaagataagttctaggtgaactagtgtcaacattaaagtggtatgcctacatctaactattctggagagaaaaacatacctcaaagaaattgacttaaatatatacagagaaaaagtttaagctgaaagctactgcctttttatatgagacactttaggaaattacttggggggcaagagagaaaatgggtggacatagctcagaggttacacagtagcagatatgtaggat

SEQ ID NO: 215598 - DNA, 621 bp, Homo sapiens
tgggcaacatggaaaaaccccgtctctacaaaaaaaatatataaaaattagtcaggtgtggtggcacataactgtggtcccagctactccagagagtgaggcgggaggattgcttgagcccacgcagaggttgcagtgaaccaagatggcaccactgcactccagcctgggtgacagagcaagaccctgtctcaaaaaaaaaaaaatcactataaaattgaaattcacaacaaaatgtgcatacttaaccttctttttatttatttatttatttatttttaatattttgagacaacatcttgctatgttgcctaggctggtcttgaactcctgggttcaaaccatcctccagtcttgacttcccaaagtactgggactacaggtgtgagccaccagccccgccagccctgttacactattcttggyccctcaagtgactgtatgaattttaggatcagcctctcgagttccacaaaaaaattctattgggatttgtgtaggaatttcttgaatttatagattaatttgttgagaagtagtatgtttatagcattgagtcctacgattcataatatatatggcatatatttcagtttagtcagttctccctttaagtccctg

SEQ ID NO: 215599 - DNA, 400 bp, Homo sapiens
gaattcgttcattcagtaaattttttttttagtatctacccaatgccaagccccacataaaacattaagagtagggacaataatacattaaggtctctgaccccatgaaactcatggtcagaggaggaagatcaacatgtatgcagagaaatgaaagcaatttaacaaatgcttgcatacagttatgtgcacaggagcaggaagaatgggcaagagaatagccagactagctaggacatgtgggagacttcagagagaagactgggtgcagagagatgttctgagtttgaagaggccaaggctgtatataacctccaygaaaaccactgtctgcagtgcccagccataggccacccccttagacctcctaactccctagtcacaagaggctgtgttagtt

SEQ ID NO: 215600 - DNA, 630 bp, Homo sapiens
ttttaatatcctcaaggtgattctaatacatagaaaactttgagaccactgactaagagatctaagctagggagaggtcaattgaaggtgtaactttgagtatcttcagggtatagatgattcttaaaagccacaggactgattgagatactttggtgagatagtgaggctgaagaagagaaagccaaggcccaagtcctagggcacctgtattagtctgttcttatgctgctaataaagatgtacctgtaactgggtaatttataaaggaaagaggtttaattgactcacaggtccacatagctgggaaggcctcacaatcatggcaggtgaatgaggagcaaagtcacgtcttacacggtgacaagcaagagagcttgtgcagggttactcccatttataaaaccatcagatctcatgagacttattcactaccacaagaacagtatgggggaaacagacgccccccccgacccatgattcaattatctccacctggccctgcccttgacccatggggattattacaattcaaggtgagatttgggtggggacacagccaaaccgtgttagycccccaatccctggggcaccccaggtttggaggttgagcagaggagctggcaagga

SEQ ID NO: 215601 - DNA, 555 bp, Homo sapiens
ggtgctgttgacattcaggggaggacatgtgaccttgcccagaactatagtcttctgcatcccactgtaaatcctttagcattcttgactcctggggagtaagtatcaggagatgtcccctaattagtatgacaacccaaaagagatgtttccaaacactccctggggaacagggtgcgggagtgtcactccccaactttgagaaccactggcttccaaatgctcacccagaaatccactgttatacctggccttcattattgctcacggatacacatgtagtccaccatacacttgcccaaktggtttaatcttccagagctgggaaccagagtttctttgtgtcagagcatttctctttcccattcagaaggaagctggcagtctggacagcaacctggcttaaggctttcgacactgagatctgtagtcatgccacctgctttccttatttccaagcctatgcatttactagatttccttcctccccaacggctgccactcagatcctactcactggtcaagctactcatatactcttcctccatgaagtct

SEQ ID NO: 215602 - DNA, 399 bp, Homo sapiens
cacagtcagcctctataaatctatccccatctctgcagtaaaagggcaacagtagggttactgtcatgattattcattggatctgctggtgagaggcacactccaagagcaatggttggcttggcctggaaggggggctgtagggaagcagggacaaacacactaagggaaggacaatggcctaagagttggacacttgggccaccagacagaaggcaacattttgacttaraagatctgacttcagcactcctctctgccacttattggctgtgtgatcttggaaaaggcagaattcagtaaactgctttggctttttgagtctcttaaactgggagatggagctaattgtgctggttctatatatatattatagggtaattgtgcaatgcaaagaaa

SEQ ID NO: 215603 - DNA, 547 bp, Homo sapiens
tttgttcttttcaccacaacaaacttagaatgtgagaacataaagctataagaactatgattattgaaaagctagaattcttataaagtactgataatttgagaaaagggctcttgtgttaccaggctctgctatttttttcattctctgaataatgagcacccatttagccgaatcacraatgtgaaggaagagccgtaatttccaattcctccctgcccactctctcctcaggccacaaactgaaatcatccctcataggtgtagatttaaaaattggtgttctgcagatttcttttgtctgtaattccttcttctctctccatctgagcacattcttgcttgcatctaaactaagcttctcccatcaccaccgaagtccattgtcttagcaagagcaatcatcgccttctcagtcatatctcccatgtttgaaaccagtgtgtctctacccacccacctgaatgtggcctcatcaggtatctagagaaggtccaaccttgtaaaataaccatagtgatgaggaccccagcccacctcccaaaga

SEQ ID NO: 215604 - DNA, 619 bp, Homo sapiens
tcactagtgcagcctaagagagagggcattgcattagaagacagcctcctgcggtcaactcattatcccattgactccagcctaatctgcatcataactctggcctggacccccaggatggcatatgacagccaccatcctcctccacttgactctgatctccctgctgatgcttcatcggaagaaaggaggaaggtgttacattacaaaagacaatattaaagacaggcattaactggaatttgatcagggttctgcctcagacctgtcaccatggagaccatggctattatcattttacaagtgttgaatgaggccttcgtttatttagtaaccagtgacactgcagttacaggcatgagtaccgctcacaacatttccgtgaactagctgtgttttttaactcatttccaacgctgcaggaataaaatcaatttgaaaaagaggtgttaaataagaatgacctatattcgttgggactctgatactatcagtggccaatgaaaatttgtagaggttccaygaaaggtcacatctctcacttccagacatagacctggacttggaaaggacaagtctactccaagtgtccatctaaagtgacagtgtcagaggagga

SEQ ID NO: 215605 - DNA, 560 bp, Homo sapiens
aaatgaagctgaacatcaagtcccagcaagaaaagaaggaaaaggaatgccaagcagtcatgttagcagtttgaaggggctggagcaagatggaatcaggaataaggagtaagtctaggaatctatgaaattggaagtttgagtgaatccctttagtttaccacttgaggcccacaagctatgaggattctgtgcaatgtctggttgcagggcaggacacaccagataggacgcttgagaattcagacctaggctttccatctcccatgagcgtctgcttctagtcactcattttctcttccctgtctcatttggccttcttaatatctcaccccttgctaactgctttctccaatttctcacagctgagatttagaactcttgcagtatctttccattccaaatccttatagtaagaaggacaaattcattttttataaaatacaatgcacaaaatattartcacaaatgatgaaaagtctccttcaagttcttacctcaaattcctaagccatcatgtggtttatgcctcacagaaattaccatagatcccacatata

SEQ ID NO: 215606 - DNA, 211 bp, Homo sapiens
aagtgtggcttttgctcacagaaaatggagaatgtgttgttccataataatttctctagtttttcaataagcagcactttgctttattgttggtaattgttctgagagtaataatgggcgatawgtccctaatactttatgtttaccattttcatgttcctataattgaaaacactgaaccaactttattatatgcacatagataattact

SEQ ID NO: 215607 - DNA, 509 bp, Homo sapiens
ggctacagcatcttgagtggcgtgagataaactggagtgcatgagcctgtggtactttaatgtccaaaataaaaacttcaaaaagaagtcactaaaggatttaagcagaggagtgacataacatgacttacatttttaagaaatccttctgcacattgtgtggataatggattatggggaggacaagattgaaagcaaaaaaaaaaaaaaaatcaggaagctaaactatagatcaggtggcaaaatgatgacgggcttggtctgtatcagtggagatatcactccactcaagataccagtggagacaaagaagataaataataattattagagtttgaatttaatcatttgtttgacaygtatggaaatttgttttcttttcttctgtaagtacctacataatatctttgattttgcctctcagcctgaaaagcctaaaatatttacaatctggccctttacagaaaaagtttcctgaacctaacctacagagtctgaaaaatgatgga

SEQ ID NO: 215608 - DNA, 518 bp, Homo sapiens
ggaagggctagaataaggagaacattctctgggctatgaaggcagaaaacagcaagatgattgtatgagctggaagtcccctactcttgaagttaggtactaagcaatgtaattgttgcttttattttaggatctatgaattyataattttcacaagatttctcatgtggtcctgatgatcagccaggttgggaattattgctgtgaatagcagtaaagtcctgaggccaagataatttataatctctcggtatcactagcatccaaagttgtacttgaaacacagaagattctaaatggttagttgaatagtttattaataatttttaacaatattacatttttcctacaatgtgtagataaaataaaataggcaatgtcaaattacatataacaaacacatattacatataacagaacaaacacatattacatgtaacaagtattcagataagaaagtgcctacatcacttagacaataagttactggttatattagaaaatttgtgtatggatca

SEQ ID NO: 215609 - DNA, 623 bp, Homo sapiens
caatattctgactccttgtgctgtgctcttcctaaaataaacaggctgtgtatgttaaaattaaataccgatgctattattcagtggcaaatggtaataagcgtgattaaagatagcactgtggcaaaggcgttctccatcttaactcctaataccttgattggagaaacagaaagcaacgttgttgtccctgttgctagttctctctctacagttacttaagttagatcccaagaaagcccctgaaataactgctaggtaccacatgggatgccctgcaatgaaggtaagcctacagtgttttgaaccctaatacaaaaaacaaaaataagaatacaatattcagttattgcagtagtttcaagaaggtctgattttcagacccttaagtaatgagaagtgggagttactttaatgcatttagaatatttagttttactttaaaaagctttaataacctcaggtgcataaaagtcaaaaaagttatctatattaaacataattctgagactatyaacaatatcatgaaaattgcatgacatcttgtccttttttttaaacgttagcctgccaccatttcccctccattttaaaaaccattgtgccttataataaaacacaca

SEQ ID NO: 215610 - DNA, 487 bp, Homo sapiens
tctggaatgtagcagaagtcaagtaaacatctgttggatgaatgcatgttcaaaatagcagatgaaaatattaatcctagaaacatgaaggactataaataaatctgcattctgataatgactgtaagagtctttgaaattaatataaagtattaacaaatcagtgaaaggaacatctatagatatacatgagtgtattatcatctgagcataagtatkaatgtgtctgaatgtgaacatttttctttaaggctatgtgaacacttaatacaatttatttcccaagtatatttctctggagacagggactaaatgtccatctacagatgaatggataaacaaaagatggcatatgtgtatgatgcattatttagtcttaaaaaagaaggaaattctgtcacattttacaacatggacaaatcctaataacataatgctaagtcaaatatgccaatcacaaaaagacaaatagtattgatttcactta

SEQ ID NO: 215611 - DNA, 586 bp, Homo sapiens
ctgatagaaaagataaaaatgctcccatgttttgaatgttttatttacatttaaaggatagatttaacttgacgtctatgtattaatctacatttagggtatttcctggtgtttcaacaacgtagtactaaaacatggtaaggactgattaaagaacaagggaatagcaatatagcaaaggaaaggacttggagatagccaggacatatacagtttcccccaaatagacttatgtgaaaaagattgtattcatttcttctgttgctccrgagagaagaataggaccaaatatgtgaaggtgtgtatcataaggagatagaagttaagtaactaaaaaaaaaaaatactcaatattttcagaactctaacaataaaatacagtcagaaattcagtatactcggttctggctgaaagtcaggagtagcttcagtaaactaggcttgattttgtttcttttaagataagcaatgaggtagaaatttcagagtacaaagaggctaaaggaaagtcatcagctatgctccaaatgctattatgcaatgttcaaatattgccacaacagtatcagctatagattcagaagga

SEQ ID NO: 215612 - DNA, 574 bp, Homo sapiens
aagcttattagcaaaggttattttacatcttgcaatgtagcattcctgagtaaccagccatgagatacaatttcagtggctctttaaaaggcaggaaaataaattaagtacagtgtgttggagaatcaaagctaaattgggtcataattataaaatacatgttacaatatttttattttcctacaagtaggcgaaacgttttggttggaaattgttgtttaggctagtaaattctgtatgaacacagaagcaaatccctttatatgagagggcaacaggagcagccatgtaagcagataaatgttacacgcctcaattgtcggaagacacattcctttaaaaagttcctaagtccgcttccattgtaggagactaaaagaaaaacaaaaataatgaattytaaatacaaaatgaccatttacaccaagaagaaataaaaagaagtggaaactgtagaaatatatatagtagatagcgctgcccagagatttccaggagacactgattaaaaaaaaaaaaaaaaaagacaaattttaaaaatacatgcatgtaatcagggaccaataaaaaagag

SEQ ID NO: 215613 - DNA, 621 bp, Homo sapiens
gtggctatcttattggacagaacagatttaatacttagacctccctagaaagtatattaagatttgtatttgtattgatttgtaaatctattacattgtttgccagaggcaattacttgccacctgtgttctaaccaagcttgcccatatttcacatgtygagtttgttcattttaactgtcaattggcctaattttcccatttctagcattttaatttctccagagcttgcatactacattgaacaccaattcagtgacctggaacaattccactcgcatttgttccttttagaccatttcactgggagtatgtttccaatccacttatatatagattctcatcctcttcccaaagtgttactgtgaatccacttcccagcccaggaccacggtattacatttaacctgttctaaactctagtcccatatagaaactctttatatattgattggtttcagacacctttttagatagagaatatgggttatagtttgttcttgtaatcgaccacttactattcctatggaatcctaatattttttctcattccagttactcctgttaaattcaaatttcatcatgattcactgtgacttcttcttgattattgaaactggg

SEQ ID NO: 215614 - DNA, 560 bp, Homo sapiens
gctcactaattacttggtaacaatttgttttaaataataaaattaagtaaaaaccaaataataaatatcaacaatagtggtcactagagcagatccaaatttacagtcaaaactttttacctaaatacttttatatttatatataatttggatataagaatgtgctcaaattttaagtgtatagattragaaagtttgacaaatataggcattcataaaactgtcacctaaatcaggctataagatattgacatcaccccagaaagtttattcatgccgacttacaattccccaccctaagaaacaactgatttctattacaaaagcttagaaatttgatatatgtatgcattgttttgtgttttgcttctttcaatcaatataatgtttttgagattaatttagcttttttcttatatcaatagttatttgtattatggagtaatattccaatgtataaatatatcagaatttgttaacattcatattataacatgggtttttccagttacagataaaactgctattaacattcttgtactagttttatgtgtacatat

SEQ ID NO: 215615 - DNA, 499 bp, Homo sapiens
acactatcaaaatttaacatttctatttttcaaaaagtattataaggagaatgaaaagacaaaccaaagactgggagaaaatatttgcaaatcctgtatcttataaaggactgtaattaccagttttytgaggttttttttttttttttgcttttaattatgaatgtacattaaatttttaaaaaaatattttttctgcacatattgagatgactactttgttctgttaatgtcatgaattaattagattcattcttgagtgttgaactaaccttgcattatttttattgatgtcacctcatcattatataataccttttatagcttgcttgattcaatttgctaatgtttttttgagaatttttggatcttagttcatgagggactttggtcttttttggtaacatccctgtcaggttttgctcttttttttttgacctgtgggttacttggaaaagggtttttttttttttttttttaaccagataattgggatttt

SEQ ID NO: 215616 - DNA, 551 bp, Homo sapiens
taataccttttatagcttgcttgattcaatttgctaatgtttttttgagaatttttggatcttagttcatgagggactttggtcttttytggtaacatccctgtcaggttttgctcttttttttttgacctgtgggttacttggaaaagggtttttttttttttttttttaaccagataattgggatttttctatgtattttaatgttactgatttccaatctgttgtaaagagaatgtactttgtatgacttctttcctttggaatttgtcaaaaccttgttttatggtcccagcgtaaagtctctcttagggttggcaaagtatgctctgtagactggcagttattgtgtgtgtgtgtgtgtgtgtgtgtgtgtgttactgaatgtactatgcacatttcaagagatgtatacagttagccctccatatctgcaggttatacatttgtgaattcaaccactgtggattgaaaaaaatgttttaaatacaacagtgtaagtaagcaaataaaaatacaatataacaactgtttatacagcatttacactg

SEQ ID NO: 215617 - DNA, 551 bp, Homo sapiens
taataccttttatagcttgcttgattcaatttgctaatgtttttttgagaatttttggatcttagttcatgagggactttggtcttttttggtaacatccctgtcaggttttgctctttyttttttgacctgtgggttacttggaaaagggtttttttttttttttttttaaccagataattgggatttttctatgtattttaatgttactgatttccaatctgttgtaaagagaatgtactttgtatgacttctttcctttggaatttgtcaaaaccttgttttatggtcccagcgtaaagtctctcttagggttggcaaagtatgctctgtagactggcagttattgtgtgtgtgtgtgtgtgtgtgtgtgtgtgttactgaatgtactatgcacatttcaagagatgtatacagttagccctccatatctgcaggttatacatttgtgaattcaaccactgtggattgaaaaaaatgttttaaatacaacagtgtaagtaagcaaataaaaatacaatataacaactgtttatacagcatttacactg

SEQ ID NO: 215618 - DNA, 551 bp, Homo sapiens
taataccttttatagcttgcttgattcaatttgctaatgtttttttgagaatttttggatcttagttcatgagggactttggtcttttttggtaacatccctgtcaggttttgctcttttttytttgacctgtgggttacttggaaaagggtttttttttttttttttttaaccagataattgggatttttctatgtattttaatgttactgatttccaatctgttgtaaagagaatgtactttgtatgacttctttcctttggaatttgtcaaaaccttgttttatggtcccagcgtaaagtctctcttagggttggcaaagtatgctctgtagactggcagttattgtgtgtgtgtgtgtgtgtgtgtgtgtgtgttactgaatgtactatgcacatttcaagagatgtatacagttagccctccatatctgcaggttatacatttgtgaattcaaccactgtggattgaaaaaaatgttttaaatacaacagtgtaagtaagcaaataaaaatacaatataacaactgtttatacagcatttacactg

SEQ ID NO: 215619 - DNA, 517 bp, Homo sapiens
ttacgttaggaagcatttctagagcccayatttgagctaatcttcatatttggaagttaaaaagcttaagatgtaaagtatcttgcaaatatgtactgaacaacttgctatttttaatgtctgaatatcaactttttatctttatattttctaatataaaatgcttattttttatttttaatataagtattaatttgatatgtttaggttatattttgtgatttattttatatatgtatatttttaatttcactattttgctgaaagtaagaaaactcatggtaccaagataagaaatatacccagcctcatcttggtattgtttcagaaagaaatcagatggtttgtgattacttcttgctatgacgtttgcttgcaatatttcattgctctctcctgtgacattggaggacaccatcttgatgtcaataaacttgtctatgtttctgcaaatcagactagctttctcttaccctaggaccccaaggatcctataactagtaagtagatattttta

SEQ ID NO: 215620 - DNA, 534 bp, Homo sapiens
gaagaaaaaacataagaatgcattccttataaatgtcaagaggctcacctatatatttatgaaaaaataatttgctaaccttatctgtcctattttgtgacagggttaaatcataccctagtggtcttaaaaaatactttttatcatcaactgtctaacactaataaaattacagagtgcrtgcctctgtgtgcatgtgtgtgtgtacacatgtacatgtgtgtaaacttatttttatctcctgtgaaatctgagttatctttaaagcttccagagtagggattatatggaattggtgttcagtagaatatgccaaattaaaccgttttttataataagctcttttattttaatacactgttgtattaaaggtgtgctaaacctttaatacacctttatgttaagtgtaagagcacttaagagcactcaagtgtaagtgctctttggggagcactcctcaaggcattagcagccccaacatcagccagtcacctttgtgtattaaaataaacacatttcgcaaatactcatata

SEQ ID NO: 215621 - DNA, 417 bp, Homo sapiens
gatcatggtttctaggccctttcagtggactgagcaaggaaacaactgcacttgtatgcaaagataacaaaccttatgagatcatattgattccaattcaaaatcaggactacagagcctttattttacctcttctcaatgacatctaagcatccttcctttcatagcaagaatcctggttctcaaggatacacataactgcttgcttgttttaagcctatattacacatgccagttgcaaaataatcacattaatgctattattaatataattataaaaacatgaataacttttgcatttattttccctgttcttccgtcatttaaaaacaattatcctatatttaaaagagtacatgaccagggcctactatgctcactmcttcttaaaccgcatttagttttcatttcagatct

SEQ ID NO: 215622 - DNA, 495 bp, Homo sapiens
atgttgctgccacgagaagtggcacccatccatgccatctgtgggtctgggactggcctaccaagcccactgtagccaacaccaacacaagcacaaaagcttgggtcccagcagattgtcccaccactgctattgctatcacccatgtcacacccactgcccaggggctcaagaacctgctcacctacctggcccattgctgccattcccagtacatgaagaagccacctggatgcccaagaatcagccccattttacccactaatacccgtgccagcgtctgccacagctgtccctattaaggyccaaagcctggcccatctggcatcccagtcctcagcaaaacttcataacactttcactcacaactgcaccctaagaaatcgaggaaagcacaaacactactggcactgtttatagccaaagaaatcatacagaaactacactactgcacacacacaaaatcaaagccaaagagccctacccaaccaacac

SEQ ID NO: 215623 - DNA, 397 bp, Homo sapiens
tcttcttccagcatgatttactggtgtaaaatttgttctcaaaatgactccagagattttttaaaagctataataaaacaggacaagaagctactgtataagttgtttatattaaatcctcacaaaacgcttgtgagataggtattttgcatgccaatttgaaaaaaaaaatgtgtatcctgagactttatagtaacaraaacattcacaaagcgatttggttggaacacacttaaccataacaaccatactacctgacaaagtaaatacaataatagcaaaaataagataatgattttataagggtggatatttctatttggtgcctattggatttctgctaatacattcaagattatttgaatcttcacttccataatcaaccacactcagacaa

SEQ ID NO: 215624 - DNA, 510 bp, Homo sapiens
atatttatttatttgggtaaattggcatctttagaatttttggtctttttatccagggttttgacatgtctctgtctcttagatcttttagtgacttcgataaagtggtactatttttatcttctagatttttacataatcgtgctagttttattcttaagtattttatatatttttgttgcccgagttagatatattttataattgtttacatattacaattatttcacagtaacatatagaaatgttattgtattttataatttctgtrtatagtacaattatttcacagtaacatacagaaatgctatttgtctttagtgtttttttccaaataccttagtcaaacatgttttaaaatagctaaccaagagtgtcagcaccactgaaaaacataatttttcattttccaattaattttgatgcctacttaatcataggtattaatagtattaatcctgcatcataaattatttatttcttattgtatctttacaatgtactatggga

SEQ ID NO: 215625 - DNA, 513 bp, Homo sapiens
gtttttttccaaataccttagtcaaacatgttttaaaatagctaaccaagagtgtcagcaccactgaaaaacataatttttcattttccaattaattttgatgcctacttaatcataggtattaatagtrttaatcctgcatcataaattatttatttcttattgtatctttacaatgtactatgggattatggctccttcattttatttttacgtatttaatttcttttagagaaataataaatcacttttccaaattcgtaaaataaaataaaaaattatatttcagattggaattacattattttttaaggacttacatggcaaatgttcaaactttctgttctataatatgctaaacatttaatttctttctttttattatatttaatatttgatagttttttcttcctatacaacccatacttttctgtttgtgtttattctaattattttatggctatatttgctactgttaatgaggggtttaccattatatattttgaactaatc

SEQ ID NO: 215626 - DNA, 604 bp, Homo sapiens
ttcccatgagtcaatgatcaaagcagataaagacagaatttggagatatttaagcattctagggagagagaacatgtaattactttggtctgaaataagaaaaaaattgaacaagatactataagattcaaaggaaatgaatatcacaaagctaaaaatggttggtcaaaaacaaacaaaaaaaatattcaggaaccaaaatatgagacatacattctctaattaattttcagtctcracacagcattttaattagtttattgtgaatgcatatttgcttgtcttctagttcctgcatgtagaatgatcagttctagctgtaatcatcttggaattcatagatatagacatagaagtaattgtatccatttggaacagagacaggcaggacagaaacaccaagcaaacttgcttcatgtcttccctcattttattaactggctgtaacatggatgttttgccttctgaggttgttaaagggcactatgatgttcatcactgtaatactacacattacatatacatgttaaataatgtatcaatggtgaaaatgaatgttttagataaatattgcccatttggctagatagatgtaattttatga

SEQ ID NO: 215627 - DNA, 452 bp, Homo sapiens
aaattcaaacttctattcactagataactttagaaaataatattcccaaacaaaattcaccctgctaaaggaattctatctgatccaataaacatttattatccattattctcttacatatgctcgtcttctctcccaaaccactttcacattcatgctaatcctggaccaaggattgtatctttgttgaacgttttctctattccttttttgctgggawaatatttacttacgtttccagtcagtttatcactaatcatttactattgacatgcccctgtgtctttttcacagttcaaagaatagacagcataatgctgtttaatattaggtgtttttttctaaattgatataaattttgaaagttatatactctttcttagctagaagaattctcattttatcttaaacatttttttctgttactaacttgaaagaaacttcagttaaaa

SEQ ID NO: 215628 - DNA, 402 bp, Homo sapiens
gataatctgaattccgtttgtcttttttcagccatacttttttttgaaaagtgtcaattcatgaaaatgatgttaatatttgagagcttatgataaacttattaaacccatctacctagtaaaataatgtattgaacttaataccacaacaaatagatacattttaaagtttagctcaacatactctataaagattaatatattacctctgtgtatattgcaatgttctgtttcttttaaaagasaccagtaactttaaaaatgttttttttatttaagtagcacaaactccttaagagacatgggcacattatccctctcaatcctagaaacgtgaaggagcaggccataccacctcagaatccagagtgatgtgtatgggtctattatacatgtttataa

SEQ ID NO: 215629 - DNA, 601 bp, Homo sapiens
aacgatgcatttgattaagttatgactacttttctgttcatttcctaaagataaattttgagaaatcaaattgtttggtcaaggactgggcacatttttaaagcttttgtcacgttttgacaaaaacaaacaaamaaaaaattgaaagatgttttcaatttgaactccctttgagaatggataattcttgaacctttaccaaaaactataattagagattatttaaaaaattatcttatttgaaagatgcttctaactctctgattaacaggaattcaaattttttataatcacatttattagatattcttatgacagactgaccttgctctttgaccatttataattgaaatgatagtttcttactgattcctaagagcttatatatgaaatatattcacaagttttgtcaaatatattgccaatttgtctccatgttgccttttaaaattttgtttctgctctttttgttctatagatgtgaaaacatttttataaatatattaatcttttgtgttttaatcttgaaaattacacatattatgtatacacctgaaggaaagcctttttctaattcctttatttttattttatccattag

SEQ ID NO: 215630 - DNA, 537 bp, Homo sapiens
tttgaacaaaacatcaccttaagttgaacgatgctatattgatgtcagatgctctgtttgccaaactatttttcgccattcaatctccttgttctttatactttgatactttggttgctagaaatgtagctcttgggaaaaaataaaaataatacattcttaataaaagtatgatgaaatactcacttgcaaaatgtccagaacaacatatgacagaattttgacatctatgaaaggcaccagccctctttggatttctgcagcattttcttttgtacaaggaaataatgctcatatagaaaagacactactgaactttcagaggtctcctwcgaacggaactgtagtactcattgtattttaatcaattggagttttattctatttttatattactttaaaattggagtttacacattggtaatattaacattttttagtggtaataaaattacatgctgcaaggaaatcaggatacagtagcatactgctttaatttttagaagttagtgtgaacccaagatcatgaaatcactt

SEQ ID NO: 215631 - DNA, 597 bp, Homo sapiens
atgtttagaatacaaattttttattagttgtgattttgtcactctgaatatatattcacctggatgaatgcatttgctgcttattttgcaactaatggaggtgaatagaatacaccatgccacattaaaaactgggtaatgctaaagaagtgaaaataaatactctttccacctaagagcagagttactgcttggagaattaggtgcctatttacctgccaattcaaaatgtcttgaatataattcatcaaaattccatcatcttccttcctttcttgcatgtatcacaatgtcaaggaaaatgatttaacagtgaaatttcagattgtagcatatcccagctcaccttatatacatatgaacatggttattatgttccagaaatgaattcactgaacttgttaaaattgtgaactgctcccttcaaccaaaggaagaaaaaaagagaatagggaaaaaagaaccttagaaasaaaaacataaagacttttactaaccgatctttatttcctttcacatattttataaagactcagtgtgtgggagctaattatattagctgtcttgggtaacaagctattaattttgtgcttcaaa

SEQ ID NO: 215632 - DNA, 341 bp, Homo sapiens
acatccactctcgtcgtgtgccagtgttgttaggagtgccccaaagtttcaggacttgcttggcagccatacttcctcggaagatgcctcattttcaactctatgtaatttactaattttagattatgcataccacgttttagtattgggattccaaatactgattcttgacccacaagcttttaggaataagtagcccatttgtaggtgaaagtctgtactattgtatgtcagttgccaaaagagcattgsatggggaatgggagctgattctttttttgttgctgttgttgtttttcaatagctttaggggtacaagtggtttttggttacatggataa

SEQ ID NO: 215633 - DNA, 505 bp, Homo sapiens
acatgggaatacaaaggatctaaaatagccaaacttcagaaaagtctgtataagttgaatgacttatacaacctaactttcaaaacttattatagagccacggtaatcaagacagtgtggcactgacatcaagatgaaacagtctatkaatacttatacacacatggccaactgactttcaataaagttgcaaaagcaattcagtggagaaaggatagtcttttccacaaatggcaatggaaaaattaaaaaactatatgtcaaaaataaaatttaaaaaggaattttaatctgtccctggcaccataaacaaaaattaactaaaaatcgatcctagacctaaacataaaacctaaaactataaaacctctggaggaaaacagaagaaaatctttgtgaccatggggtagatcaagatttcttgggatttcatcaaaattatgtctcttgctcttcaaaagaaactgtgaagacaatgagaaagcaaaccagagactgagagaaa

SEQ ID NO: 215634 - DNA, 505 bp, Homo sapiens
acatgggaatacaaaggatctaaaatagccaaacttcagaaaagtctgtataagttgaatgacttatacaacctaactttcaaaacttattatagagccacggtaatcaagacagtgtggcactgacatcaagatgaaacagtctatgaatacttatacacacatggccaactgactttcaataaagttgcaaaagcaattcagtggagaaaggatagtcttttccacaaatggcaatggaaaaattaaaaaactatatgtcaaaaataaaatttaaaaaggaattttaatctgtccctggcmccataaacaaaaattaactaaaaatcgatcctagacctaaacataaaacctaaaactataaaacctctggaggaaaacagaagaaaatctttgtgaccatggggtagatcaagatttcttgggatttcatcaaaattatgtctcttgctcttcaaaagaaactgtgaagacaatgagaaagcaaaccagagactgagagaaa

SEQ ID NO: 215635 - DNA, 564 bp, Homo sapiens
aggcttccaacaggttggagaggtgcctttggaagtcagtctccgcaggctgcgctcgcatgaccgctctcgtctcrccaccgagaactttcatttctactaagagtaaaacactcggagcaacttctccaaaagcgcgagttctgtccgtgaaaaagcatgcctttcccacaccgagccaacgtccagaggagagggacaccgtccccacacgtgtcagtgtgcgggagtcgccaattacacccgatttacctcctaagggaaaagtgtaaccggcatgtcagcgacgacaggcagacgtgcctagtggaccccaggctcatttcaatacaataagccacattcctacaattacgccctctttcctgaggtcctccgagtgcgtctgcaactctgggcgtcgctgcctaggcccttccctcctaagcttccttccagagaaccagctcggtgccaccattagcaacatttacttggacccaccagagctcctattttcaatcctacttaaaaggcaggaaaattactgccgttcatcaccggagctgcaactccctgccgctg

SEQ ID NO: 215636 - DNA, 354 bp, Homo sapiens
acagtcaaaatatttaatatcatgcttaggactttcctttatcattaaagtttggatcattacataagccrctggctcatctccatctattagcccattagctaagtggtgatgctgttggtcctattgggtggttcactgaattaatcagtctgtgtaacagatgttcttttctgggtatgtggtagaggggtgtgacttaggtctgtaatcagagatggtttccctaccttccatgtttaagtcacaataaggtacaggtaagaaggaaagatcatagcatatccatttctaccactgctggaaaaaacttcttatagccaatgccccctttataccaagaggaacccaagt

SEQ ID NO: 215637 - DNA, 635 bp, Homo sapiens
tgttttcctggctggccctgatgcttgtgaatgttctttggtggtaggcattgaagagtcacatacttattgtaatcttcacagtctgggcttgtttgtacccatcctttttgggaagactttccaagtattcaaagggacatagtaagtctttggtcactgcagctatatctgctttggggggcatcccaagtctaataatgcaatggctcttgcaaactcatagagatactatcttgatggtcttaggtaagatctggaagaattccctggattaccaggcagagaaccttcttctcttttattacttcccctaaacaaatagagtctccctctctgtgctgagctgcctagagctggggaaagggtgacacaagaacccctgtggctacaaccactgggactgcactgggccagatccaaagctagcacagcactgtgtctctcccaagacccagtgaccactgcctggctactgcctatgttcactcaaagcccaagggatctacaatcagcaggtggaaaattcagccaggtttgtgtccttcccttcagggtattgatttccctcagccccaggtgggtttggagatggcatccgggtgccayggcctggagtcaggaaactcaggaat

SEQ ID NO: 215638 - DNA, 467 bp, Homo sapiens
cacagcactgtgtctctcccaagacccagtgaccactgcctggctactgcctatgttcactcaaagcccaagggatctacaatcagcaggtggaaaattcagccaggtttgtgtccttcccttcagggtattgatttccctcagccccaggtgggtttggagatggcatccgggtgccacggcctggagtcaggaaactcaggaatctactggtgctttgttctcctgtgactaagctagccctcaagttgcaagraaaaattcttgccactctttcttccactttcctcaagcagaggaatctctctgtggccaccactgccccagcttgcagccaagtactcctggctactgctgatgttcactcaaggccccagggctcttcagtcagcttgtggtgaatgctgctagtcctgggtctcccctttcagggaaatgggctcccctgtggccccgggcaggtccaa

SEQ ID NO: 215639 - DNA, 606 bp, Homo sapiens
ttttagctgccaaagttaggataaagttgactctagttctgagtgagcccaaataatagatgtagcattgagataatcttgtcagcatcaaataactctcttttataatatcagtactgatttttttacatgtctgccctttctattcaaagatctgtaatttatattctcagtgtggaggaaccataagtaaacatgagaccctgtaaggtttaatcaattgccatcatgataaaagtgagtacttagaagtattaaacaataaggattataggtagtacaggtagttatgcagtatagtttttaaaattcaagcagagtcacttctcctaatgagatttacaatataaagaggaagcaattaaaacggcataaaatacatatcagatatgaaataagaacaatatraaaattcagcacaaactgtattatctgcacctaggtgacagtgaataaaagtttctctgaacaatttcccaagatgtattgatgtgctatgtctgttggtatctgaaagggaagtttgactgtgacactcctctcagagccactttaagcatctgaaagagcctgccaacagtggctatctttgtttggcacaggcag

SEQ ID NO: 215640 - DNA, 364 bp, Homo sapiens
attaggaataaaaaagttttaattcyttaatttcattgttgaaagtttagtttacctttaacctaaatttcttacatgtaatcataatatatttattcatttatacatttttgatagaaagtggaaacaattatgagaggatagtttgagcaaagccattgtagccattttgaaacacttggagataagcagaagtagcgcttactgagtctaaggacaaaacaaaggaataggaaatatgctgctgctgcttttctaggtgaaataactgaattccagcaaggcagagcaaatttggatgtctccatttttgttttagaggaacttagtttcacaagaatacaccggaaactcacagaaatac

SEQ ID NO: 215641 - DNA, 586 bp, Homo sapiens
cttttgtttatttatttatttattcaatgtggataacataaagaaaaacacgaggcaatagaatcaacatgccaaaaaaatggctaacatttatttggtttcttcttaatttttattgtactttgacatatgttatttataacaatattatagaagaaatgattatccttatgttacagataaaatacctgagggtcagggaatttagrtaacttgaaatacagttacttctggctctaaatccaagtagtgataggcaaattagcatttccttttcagtatattgggtatattcagtatattgggaacagaaacaaagtttgaggaagttcttcaatctaattatagaagttcaaattgaagtactactattctaacatagtgtaagagaattctataagccttgaaataacatacattagatatgatcaggtcttcggagaaaattctttatatagttctaagaaagctaaaagtttatcatatctttagagtgctatgctgaataaagcctgagagtttaaatctgtgttgtttcattttggtacttagtcatacactgcttttttcaatacatgtcatgatg

SEQ ID NO: 215642 - DNA, 509 bp, Homo sapiens
tacaccctccgggaaccacgcgtggcatctctcataacaagctgcagcacctctctgaagcacrgctgctatgttgtggggaatccagggaatctttagcttaactggctgtgtcttggagcctctagcaggaatggaaagtgagtggtgggagaggaatcctgtgtgtggatgattgtcatacttacatcactcattttgagggaaaaggagcagtggttcaaggaacagattcggtatccttgggataactgggatttgtgggagcaatcgtggtaatgtgagttctagccagctctctatgactgcctcagcattgagcttctccagtcctgtgatcagaggagggtgctgtctccccagtagcttgtgccttacccatttgacattctctatcaagtctaagtaaaaagataaatgattcctgattgcctctccatttcaaagataactctgaagcctgagaaggatggtgggcagggagaggggagagcttggctaaacagaaa

SEQ ID NO: 215643 - DNA, 541 bp, Homo sapiens
taaaagacacttttctagaccttgacactgaatcaaaartagtttcctagtagctaactcagcctttgggtctccacttaaaacatcactttcttaaagaagccttcccataccctccagcctatattagagcctgtgtaatatgttgccatataatctttatttctgcatcatgcttattacaattacaattatttatccagtcatctgcctaattcttatcccctctgctggatgtaatgcttcactaggcaggaacaatgtctctcgtttcctgacacatagaaagctgccaatgtttatttattgaataatcagtatttggagactgaatttcaagattgtcatatctaaaaacttaagagtattagacctttatcagtctttaaatccaaactggtccaacttcaattccaatgcaggaatcctctcttaaagtgcttaattgaggacaatctggttgttccttgaacacttccaatgaaggatcagaaagcaatttgtgagacatgatattctatcattcactacttgttagaaa

SEQ ID NO: 215644 - DNA, 541 bp, Homo sapiens
taaaagacacttttctagaccttgacactgaatcaaaagtagtttcctagtagctaactcagcctttgggtctccacttaaaacatcactttcttaaagaagccttcccataccctccagcctatattagagcctgtgtaatatgttgccatataatctttatttctgcatcatgcttattacaattacaattatttatccagtcatctgcctaattcttatcccctctgctggatgtaatgyttcactaggcaggaacaatgtctctcgtttcctgacacatagaaagctgccaatgtttatttattgaataatcagtatttggagactgaatttcaagattgtcatatctaaaaacttaagagtattagacctttatcagtctttaaatccaaactggtccaacttcaattccaatgcaggaatcctctcttaaagtgcttaattgaggacaatctggttgttccttgaacacttccaatgaaggatcagaaagcaatttgtgagacatgatattctatcattcactacttgttagaaa

SEQ ID NO: 215645 - DNA, 618 bp, Homo sapiens
ttataccatgcacgcttacaaagcattctttttttaatcatgaaatagacaagtaytctctctgtcaccattcctcctccatattgaactgggtgtccttgcctatgcagtgagaaaaaaaaaaaaaagaaatgaaatatgtaaagaatgaaaggaaaaaaatggtcactaaactgtcacagaaaatatatcagcaaaggaagaaaatacagataattagaatttataagaaagtttagaaaagcaatgagagctgtaatattcatatatattttttccatatcatacagaatataaaatgtacattatttttaactcagtaattcaacttctatgtaaccactctaaagaaactcccaccaataggcacgaggaaatacataaaggacatttaaagttctgtcaataggggaacagataaactatgacattcatatgctggaatactatacaacagttaaattgaatgaatgagagtcatacatatcattatggataaataaaagagtaagtgggaaaaaaagagaaagtggtaagaccctatgtaagttaattaccctctctgtactcagttttcttgtctataaaatgatgataatattagcacccactttctaa

SEQ ID NO: 215646 - DNA, 618 bp, Homo sapiens
ttataccatgcacgcttacaaagcattctttttttaatcatgaaatagacaagtattctctctgtcaccattcctcctccatattgaactgggtgtccttgcctatgcagtgagaaaaaaaaaaaaaagaaatgaaatatgtaaagaatgaaaggaaaaaaatggtcactaaactgtcacagaaaatatatcagcaaaggaagaaaatacagataattagaatttataagaaagtttagaaaagcaatgagagctgtaatattcatatatattttttccatatcatacagaatataaaatgtacattatttttaactcaktaattcaacttctatgtaaccactctaaagaaactcccaccaataggcacgaggaaatacataaaggacatttaaagttctgtcaataggggaacagataaactatgacattcatatgctggaatactatacaacagttaaattgaatgaatgagagtcatacatatcattatggataaataaaagagtaagtgggaaaaaaagagaaagtggtaagaccctatgtaagttaattaccctctctgtactcagttttcttgtctataaaatgatgataatattagcacccactttctaa

SEQ ID NO: 215647 - DNA, 552 bp, Homo sapiens
gcccagatagaacaaaaaggcagaggaaaggcaaattcacctctttctcctgacactggggcaccctccttctcctgaccttggatatcaaatctccaggctggctggcttttggattctgggacttgcaccagcagtcaccctctcccccaggttcccaggccttcatccttggactgagttacaccattggcttctttgggtctgaatcctttggactttgactgaaccatgctatgggcatcccagggtctccagcttgcagtcagtctgtcacaggacttctcatactcacctgaaccattgcccctaataaatcccctctgctgtatgtgtgtgtgtgtgtgtgtgtgtgtgygcgcacatctatatgcacacgtatatatatttcctattggttctgtctctccggacaaccctgactaatacaaccttaatgagaaaaaatttccaacatgcactcccgcttccacccacccttctaggcccctccctgtgccagcctagtcccttcttctcattcaacagcagtgtatttcaggattagcattg

SEQ ID NO: 215648 - DNA, 540 bp, Homo sapiens
tgaatattcattcattcatttagctgataatctagagaaaaagataggatgtgctcctcctacagggtgattaggaaaggcttctctgagaaaaagacatttgagcagagacttgaaggacatagggaaacagggcatagatttaccagccaaagatgattccaagctgagggaacaggaggtgcaacggtgagggtgtgttggtatrtctaaggacaagcgaggaggccagtgacaatggagcagacagaggaaggaataaagtggtggaagctgaagcaggtggggttgggtggaaccatgctctgagattgagcagggctttttcagccattgtaaaaccagtgaggttttactgtcaatgaaataaacagtgttggagggctttgagtggagcagtgatgagttatgacttgaattcgtaaagattttttctggctgctggatggtaaacaggctggaaataagcgaaagtgtaagcagaaagaccactctggaagtaatgacagtaatccatatgagatatatgggggaggggac

SEQ ID NO: 215649 - DNA, 540 bp, Homo sapiens
tgaatattcattcattcatttagctgataatctagagaaaaagataggatgtgctcctcctacagggtgattaggaaaggcttctctgagaaaaagacatttgagcagagacttgaaggacatagggaaacagggcatagatttaccagccaaagatgattccaagctgagggaacaggaggtgcaacggtgagggtgtgttggtatatctaaggacaagcgaggaggccagtgacaatggagcagacagaggaaggaataaagtggtggaagctgaagcaggtggggttgggtggaaccatgctctgagattgagcagggctttttcagccattgtaaaaccagtgaggttttactgtcaatgaaataaacagtgttggrgggctttgagtggagcagtgatgagttatgacttgaattcgtaaagattttttctggctgctggatggtaaacaggctggaaataagcgaaagtgtaagcagaaagaccactctggaagtaatgacagtaatccatatgagatatatgggggaggggac

SEQ ID NO: 215650 - DNA, 509 bp, Homo sapiens
atcaaaaacaaggaaagaaggagaataggaaaggcaagagtaggataggggawgatctgacacagaacaaaaaaaaaaacaaataaaagcaaaatcaagccccaaaatgaatgagcgtgctctggctatttgggagggatggtactaaacagactgcataacaaaccacttaaagggttctatttgtgtccaagtcctctaggccagaggtcagttactttaactgaataaggaactatttggtctaggaagtagggtgcaaagtgtttccactttgttatgaatgcgttaaaagttgaagacagaatgagcataaggaaatcttcatgtggatcctaagtaaagtctattatctaataacatctgtagaaatcatccagagtaaagagcataaacccctgaaattctactctttcttattcagagaataaggagtacccagactaagtgtccacatccacagtcacccaaaaattttactttagagatatcagcctctgtcagttttc

SEQ ID NO: 215651 - DNA, 492 bp, Homo sapiens
aaggagaataggaaaggcaagagtaggataggggaagatctgacacagaacaaaaaaaaaaacaaataaaagcaaaatcaagccccaaaatgaatgagcgtgctctggctatttgggagggayggtactaaacagactgcataacaaaccacttaaagggttctatttgtgtccaagtcctctaggccagaggtcagttactttaactgaataaggaactatttggtctaggaagtagggtgcaaagtgtttccactttgttatgaatgcgttaaaagttgaagacagaatgagcataaggaaatcttcatgtggatcctaagtaaagtctattatctaataacatctgtagaaatcatccagagtaaagagcataaacccctgaaattctactctttcttattcagagaataaggagtacccagactaagtgtccacatccacagtcacccaaaaattttactttagagatatcagcctctgtcagttttc

SEQ ID NO: 215652 - DNA, 494 bp, Homo sapiens
caaaaacaaggaaagaaggagaataggaaaggcaagagtaggataggggaagatctgacacagaacaaaaaaaaaaacaaataaaagcaaaatcaagccccaaaatgaatgagcgtgctctggctatttgggagggatggtactaaacagactgcataacaawccacttaaagggttctatttgtgtccaagtcctctaggccagaggtcagttactttaactgaataaggaactatttggtctaggaagtagggtgcaaagtgtttccactttgttatgaatgcgttaaaagttgaagacagaatgagcataaggaaatcttcatgtggatcctaagtaaagtctattatctaataacatctgtagaaatcatccagagtaaagagcataaacccctgaaattctactctttcttattcagagaataaggagtacccagactaagtgtccacatccacagtcacccaaaaattttactttagagatatcagcc

SEQ ID NO: 215653 - DNA, 509 bp, Homo sapiens
atcaaaaacaaggaaagaaggagaataggaaaggcaagagtaggataggggaagatctgacacagaacaaaaaaaaaaacaaataaaagcaaaatcaagccccaaaatgaatgagcgtgctctggctatttgggagggatggtactaaacagactgcataacaaaccacttaaagggttctatttgtgtccaagtcctctaggccagaggtcagttactttaactgaataaggaactatttggtctaggaagtagggtgcaaagtgtttccactttgttatgaatgcgttaaaagttgaagasagaatgagcataaggaaatcttcatgtggatcctaagtaaagtctattatctaataacatctgtagaaatcatccagagtaaagagcataaacccctgaaattctactctttcttattcagagaataaggagtacccagactaagtgtccacatccacagtcacccaaaaattttactttagagatatcagcctctgtcagttttc

SEQ ID NO: 215654 - DNA, 583 bp, Homo sapiens
taaaaataaccctgaacttactaaaaaaaaattataataacacctgggtggcccagtaagtttgtatttctggaaatttactaaaatctaaattaccttttcatagtgaagatggggaaargataaacagagtgaataccatatggcctgcctcttgttactggtagaaatagcattgtcctttacccaggccattcatcttgaaaaatcatacttgccctttatttttgagatctgatcacctcatttttgattaggttctatgtccccagctaactgcacactttgaagaacctgaaccagtttgaaggctgcccttctcatttagcagcaggtacagcaataatagcagctaaaaacattgattgtgaataacccctcaaagacatccaatagcattctcgcctcttcagctctaattgagtctgcatttcctcatgtgtttcctggcttcatggttcatgatgagttttaacacaagagaaaagaaaacaagatgattgccatgacaccctttgggtcacaaatccacaaaaaaaagagtagattgagaaatctgtggcaaaaataaacaaaataataa

SEQ ID NO: 215655 - DNA, 468 bp, Homo sapiens
gattaaattattattcccatagtcattctggtgtgctatcaaatattggtcttattcattatttctatcttttgtacgcattaatcatctccaccaccatctctcactacccttcctagcctctggtaaccatccttctacactctatctccatgagttcaatttttttttttttgattcgtagatcttagaaataagtgagaacatacaatgtttgtctttctgcgcctggcttatttcacttaacataatgacctccggttcaattcatattgttgcaaatgactggatctcattctttttcatggctgagtagtactccattgtgtatatgtaccacattttctttattcatacatctgttgatggacacttaggttgtttccaaatcttggctattgtgaatagcaccgcaacaaacatggragtacagatatctctttgatatactgttttctttggggtata

SEQ ID NO: 215656 - DNA, 603 bp, Homo sapiens
aaggtatataggagatggtgactcacacctgtaatcccagctgctctggaggctgaagcaggaggatcacttcagcccaggaatctgagatcagcctgggcaacatagaaagaatctatataaagaaaaaacaaagtttacttctgccgctatatttttagaggactatttctagccttctccttgaaaattgttgatttccgattgaatgtgctcatagtaggtatctgctagaggcaaattcttcttgcaaaaaggcaatatatgcaatacacaatcctcagttaaaactgcragtcatgtagagtaatgaaacagtaaaagaaaagataggaaaataataacaaaatagaaaaagacccacttgacctccaattaatatagcaaatagacttaacacttaaaatagctatgcttaaagtattcaagaagatgaaagaacacactgaggattttgggagaggcctagtaactctaaaaattccaagagaaattataaaattggaaaacctaatatctgaaatttagaactcaacgtatgggattaaaagcagattagatatagctgaactttttttttttaatgtagcaactggaagttag

SEQ ID NO: 215657 - DNA, 603 bp, Homo sapiens
aaggtatataggagatggtgactcacacctgtaatcccagctgctctggaggctgaagcaggaggatcacttcagcccaggaatctgagatcagcctgggcaacatagaaagaatctatataaagaaaaaacaaagtttacttctgccgctatatttttagaggactatttctagccttctccttgaaaattgttgatttccgattgaatgtgctcatagtaggtatctgctagaggcaaattcttcttgcaaaaaggcaatatatgcaatacacaatcctcagttaaaactgcaagtcatgtagagtaatgaaacagtaaaagaaaagataggaaaataataacaaaatagaaaaagacccacttgrcctccaattaatatagcaaatagacttaacacttaaaatagctatgcttaaagtattcaagaagatgaaagaacacactgaggattttgggagaggcctagtaactctaaaaattccaagagaaattataaaattggaaaacctaatatctgaaatttagaactcaacgtatgggattaaaagcagattagatatagctgaactttttttttttaatgtagcaactggaagttag

SEQ ID NO: 215658 - DNA, 603 bp, Homo sapiens
aaggtatataggagatggtgactcacacctgtaatcccagctgctctggaggctgaagcaggaggatcacttcagcccaggaatctgagatcagcctgggcaacatagaaagaatctatataaagaaaaaacaaagtttacttctgccgctatatttttagaggactatttctagccttctccttgaaaattgttgatttccgattgaatgtgctcatagtaggtatctgctagaggcaaattcttcttgcaaaaaggcaatatatgcaatacacaatcctcagttaaaactgcaagtcatgtagagtaatgaaacagtaaaagaaaagataggaaaataataacaaaatagaaaaagacccacttgacctccaattaatatagcaawtagacttaacacttaaaatagctatgcttaaagtattcaagaagatgaaagaacacactgaggattttgggagaggcctagtaactctaaaaattccaagagaaattataaaattggaaaacctaatatctgaaatttagaactcaacgtatgggattaaaagcagattagatatagctgaactttttttttttaatgtagcaactggaagttag

SEQ ID NO: 215659 - DNA, 603 bp, Homo sapiens
aaggtatataggagatggtgactcacacctgtaatcccagctgctctggaggctgaagcaggaggatcacttcagcccaggaatctgagatcagcctgggcaacatagaaagaatctatataaagaaaaaacaaagtttacttctgccgctatatttttagaggactatttctagccttctccttgaaaattgttgatttccgattgaatgtgctcatagtaggtatctgctagaggcaaattcttcttgcaaaaaggcaatatatgcaatacacaatcctcagttaaaactgcaagtcatgtagagtaatgaaacagtaaaagaaaagataggaaaataataacaaaatagaaaaagacccacttgacctccaattaatatagcaaayagacttaacacttaaaatagctatgcttaaagtattcaagaagatgaaagaacacactgaggattttgggagaggcctagtaactctaaaaattccaagagaaattataaaattggaaaacctaatatctgaaatttagaactcaacgtatgggattaaaagcagattagatatagctgaactttttttttttaatgtagcaactggaagttag

SEQ ID NO: 215660 - DNA, 597 bp, Homo sapiens
cctctccctctgctccatctgtcctctgattttctcttctaccacatctctctgactcaaattggagaaatctctctgctttcaagagctcgagtgattagattatgtccacctggacaatccaggatttttttttctattttaaggtccataacctttatgacatttgcatagttgttttacagcagtaactagtgtttgactgaataatcaggggatgggaatcctgtggagacttagaattctgcctatcacaattgtgcaaaatataaccattggaggaaattgagtaaaggttacatgaaacccctccatatcacttttgcaacttcttgtaaatgtgtaattatttcaaaataacaagcttttaaaaatgcatggaagaaaaaaataaaaacaatataaacaaatatattttctatcaagattattttgcactactggaagacctacaatgaaagaaaggctaagraatgtcctccaaataaaggaaaaattatttcattggacacatggaattgtaggaaacaaagaacagtcaaaggggtaaatatatgaagaaaatctaagttaatattactgttataattaaaataa

SEQ ID NO: 215661 - DNA, 597 bp, Homo sapiens
cctctccctctgctccatctgtcctctgattttctcttctaccacatctctctgactcaaattggagaaatctctctgctttcaagagctcgagtgattagattatgtccacctggacaatccaggatttttttttctattttaaggtccataacctttatgacatttgcatagttgttttacagcagtaactagtgtttgactgaataatcaggggatgggaatcctgtggagacttagaattctgcctatcacaattgtgcaaaatataaccattggaggaaattgagtaaaggttacatgaaacccctccatatcacttttgcaacttcttgtaaatgtgtaattatttcaaaataacaagcttttaaaaatgcatggaagaaaaaaataaaaacaatataaacaaatatattttctatcaagattattttgcactactggaagacctacaatgaaagaaaggctaaggaatgtcctccaaataaaggaaaaattatttcaktggacacatggaattgtaggaaacaaagaacagtcaaaggggtaaatatatgaagaaaatctaagttaatattactgttataattaaaataa

SEQ ID NO: 215662 - DNA, 524 bp, Homo sapiens
ttaatatttatgatagcatttcaacctacaaaaattatccacattaaagctccttgaagacacatatactacaatggttttacaatatgcagcaaaaatttcaaatataaattggatgttttgattaaacccaataaactgactaatggtgaattcctacaggaaaaacccatcattctaaactcaacaacaacaacatcttttgaaagcataggtgaatttagaaggctgctctttcaaaactcaaggatttgaaatacttgyaaaagaacaggataacatttgctcagctatttctaacttcttgagaaatgtaattgaatctttagccctacattttttcctaatctatgtatataaagctataaatttttctttaagcacaagattttactataccctgcaaattttgatatgctatattttagttatttttacttcaaaaatattttttaatttccactttagtttttttctttgacccatgggttctttagaaatgtgttgcttagtttgcacatatt

SEQ ID NO: 215663 - DNA, 412 bp, Homo sapiens
ggtgtggcggcacgcacacctgtggtctcagctacctgggaggctgaggtgggaggatcacttgagcccaggaggttgaggatgcagtgagccatgattgcgccactgcactcaggcctgggcaacagagtgagacactgtctcttaaaaaaaacccaaaaacctaaataacagggctrggggtggggagagctcacccagtttccagaggcttccaccacagaatctctaaaacccagcaagtgaggcaccaggcatgtcacagttggactgcctgttagctttctactttttggggaaattcacagcagaattccagcctttgtagtagccagaacccaaattccaagtctctttggggctaggacagaggtatgtgtgaaaagttgcaagaatagtacaaagagctcat

SEQ ID NO: 215664 - DNA, 412 bp, Homo sapiens
ggtgtggcggcacgcacacctgtggtctcagctacctgggaggctgaggtgggaggatcacttgagcccaggaggttgaggatgcagtgagccatgattgcgccactgcactcaggcctgggcaacagagtgagacactgtctcttaaaaaaaacccaaaaacctaaataacagggctgggggtggggagagctcacccagtttccagaggcttccaccacagaatctctaaaacccagcaagtgmggcaccaggcatgtcacagttggactgcctgttagctttctactttttggggaaattcacagcagaattccagcctttgtagtagccagaacccaaattccaagtctctttggggctaggacagaggtatgtgtgaaaagttgcaagaatagtacaaagagctcat

SEQ ID NO: 215665 - DNA, 589 bp, Homo sapiens
ctgaatatttctagatttttacccttccatagttattttagaatgagtttgttgattcttccactgataacaggttaaaactggattttcaaaaataaaaataccatcatcatcattctgttactcataaagaaatagaaatttgtttaaaaggttcaaatcatttttatttcctaataaatacattatttgaataatatgtagctattacttgtggtacttgtgactccactcatagataggacccgtccatttccaaggggtttgctgtcctgaacggacatgaatacagatatcaaaattaatgactgacatctataactatgacagccataaatttccagataaaggctttagcaagcaagggraaatttctgatttcttcctataaattttcctgtagcaactgtaaggcaaaatctgtccacagaaattcttagtcttaatatacttactcctcaatccattactatattctatcagaattgaatttaaaaaatagtagtaaacattttaagtaagagtaactttacacctgaacagaattctaataagaacctatattcattctactcagagaacacttgtc

SEQ ID NO: 215666 - DNA, 450 bp, Homo sapiens
ctctctttaaagcatatgactaattattttgttttttttaattcctttacttttaggtttygctatcctaaaatcagatagtaaatctgcatttgatctcaatattacatgctttcatttattttacactttaattagtctggaattaatttttctgtagcacataattagggtgtggtattttaaaaagtatattttcagagctttttcttcttatgtatgatgaccttattattattagtgtgctttgccatcaaatagtatatacattacagcaggttcatggaagtcaatgctctttgaatttattttattatctgcactgtaacgaaagaccttaaacactcaacttaattcttatttgtaaaaattggataaagcagagctcactatagtaataaatccattggactctgcaaataatttgtacatttttagagtcagcagagt

SEQ ID NO: 215667 - DNA, 450 bp, Homo sapiens
ctctctttaaagcatatgactaattattttgttttttttaattcctttacttttaggttttgctatcctaaaatcagatagtaaatctgcatttgatctcaatattacatgctttcatttattttacactttaattagtctggaattaatttttctgtagcacataattagggtgtggtattttaaaaagtatattttcagagctttttcttcttatgtatgatgaccttattattattagtrtgctttgccatcaaatagtatatacattacagcaggttcatggaagtcaatgctctttgaatttattttattatctgcactgtaacgaaagaccttaaacactcaacttaattcttatttgtaaaaattggataaagcagagctcactatagtaataaatccattggactctgcaaataatttgtacatttttagagtcagcagagt

SEQ ID NO: 215668 - DNA, 644 bp, Homo sapiens
gaattccaccacacctgttaatttttccaaactgaaaaaaaaaatttagtttttgtaaagatggggtcttgctatgtcattcaggctggtctggaactcctgggctcaaacaatcctccctccttggcctcccagattgctgggattacagctataagccaccttgcccagcaagagtaccttttcaaacaactttaaataccaccatttcaaaaaatttccatgagtaaaaatttgacaacttctctytaaatttttttgaagtcagttaggttatttacagtgttgcatgaactggagtgttctagatcaatattcctcagaacatggtgtaaactagcagcatcaacatcacatggagcttgtcagaaatgtgtaatctcaggccaaacccctgctgaaatgtagtctttattttaacaagatccacagcttatttatatttaggttgagaaatactagtatagataatgcattaagatagaatctcaatgtaggaagtacctatctctgataatatgtattagccatttctatgtcatatgggtggcaaatgttttcctactctataatctgagtgttttttttaattcatggtatctttgccatacatttaaaaactgttatgtactcaagaatgttta

SEQ ID NO: 215669 - DNA, 615 bp, Homo sapiens
tttaacccctgttttaaaaatttctggctattattttctttgcttttggatttcttttcttttttgctrgtagcaaacatgaaaacttcctttgacaagtagttttgagttaaagtcagtcttggattgagtaactttctaaatccctttcctgttgagggttctctcatgtgttgactggcagtggacatttcagtgaggagggctgaaatgcgtagccgtctttgtcttctttttctcagaatgagttatttggcaatgagcttctgtccatttcttttaattggcattttgtgacttccagtaaggctctcccctactttaaaaacccataattgtatgtgaaagacagagggcaagatgtaaagaacagattcactagaaagcaaatatgttcatgcctcttcttagttactttattcctacattgatagaaaatgacttaatatatacaaagaaatgggtatcagcccactgaatttgcaagggagctgaatgaacaaaatgctctgctgggtcagtcagctggaaaaaagtggtttagtactgtgtgtaaacagaataatgaagctatgtaattttaattgtgcattttatatctatctggtgagatta

SEQ ID NO: 215670 - DNA, 598 bp, Homo sapiens
tgctcccacaatacattttgcatgctaaaattatagccatcatttgttcactcagttatttaaaatttttttttttttttttttttttgagwtgaagtcccactctgtcacccagggtggagtgcagtagcataatctcagctcactgcaacctctgcctcttgggttcaagcgattctcttgtatcagcctcctgggtagctgggactacagttgtgtgagaccacgcctggataatttttgcatttttagtagaggcaggttttcatcatgttggccaggctggtcttgaactcctgacctcaagtgatctgcccgacttggcctcccaaagtgccaagattatatgtgtgagccactgcacccagccaaaaatatttttaaatgcctactatataataggcactttttttagcctgtgaaatcacaaggatttataagatgtgcataattactaccttcatcaagtttacactttgatggaggagaacacactataaacaagaaagtagacaaataaaatattttcagttttaataaatgctttgaaagaaacaagcaaagggaagagatggaaaataatacaaatataaggact

SEQ ID NO: 215671 - DNA, 415 bp, Homo sapiens
attgagatcttgtttctggatttaacgcccagatttccttctttctagayaactgaccttagctttgtttacttttgttctctgaatctccctttcttcatgtgcaaaatggagatgataatagtgtcaacctcatagggaggtttgtaaagagtttaagtgagattaatctgagaaaaaaatacttggcacaatgcctgccatgcaatcctgactgagatggttgttgtgaacagttggattgattataccctccaaaggaaggtctatctgcaaaaaattacattaagtgaactaatgcctcctttcttcatcagagatgttcaaacttgagatttatttacagtctatgcttatatttcaaagaagttaactatgtcagacctgtgctaaaaaataaaacaaaaaaatacaa

SEQ ID NO: 215672 - DNA, 615 bp, Homo sapiens
acctactatcttaaggaaaagtcagcattacacattataacctaaccatcacttgaaagctaaggttctgcaacagaaagactagaaattcaattgttttcaaatgacatattagattatgatatttttgtcagcaattattttgtcacaaaatcatttcttcttcttttttttttctttatttttttcccctgtggagttgtggagatagtgaggggactctggcttttcccaaaataacctttaattatagtttttgatcttgacattctygaaaaatgccctactgactagtcttctgtaagtaccatctgtaagttttgatcataaactaactggtcctagaatctccctggcaaagagcattgcgagtcattttgggaaaagtcaggcatagtcaattttcacagtcttgaaacttgaaatgatttcttccagctttcaggaagaaaaaaaaaattctggcacgaaattctgtgttagaattttcaaacaaaaatagagaagaaagctggaatatagcaaaaaaaattatacagtggaaatttgaatatactagaaactgcatttgttaataaaataagaatttgtgactatattgttacagttacacct

SEQ ID NO: 215673 - DNA, 440 bp, Homo sapiens
taatgataaacaagggcaagaaataacaaattgctcttaatcgctaatgttctgaattaagagagaaataatttggttcactgagaatcatgcagacactgcagaaagggttaytgacaaaagacatgttaaagaaatcttggttgggaggccaaggtgggcagatcacaaggtcaggagtttgagactagtctgataaacttggtgaaaccccgtctctactaaaaatacaaaaattactctggcgtagtggtttgtgcctgtaatcccagctactcaggaggctgaggcagcagaatcacttggacccgggaagcggaggttggagtgagccaagatggcacaatttgcagtccaggctgggcaacagagcgagactccatctcaaaaaaaaaaaaaaagaaaaaaaaaaagaaagaaatcttggaacaatttcaaaa

SEQ ID NO: 215674 - DNA, 459 bp, Homo sapiens
ctatagccagtgcaaactatatgtaatggtcttagccaaatatatttattaaaaccttggaactctgatcttatacctaagattctgtttagcaatgaggtgcagtgaattataaagcatgactcctaggacattgtgctgactgggtggccaaatatttacaaaacaatccagttaaccattggcttagttttatcatccatgaaatggggagaatatcagcctcatgttattgttgctgtggytggccaagacatcctatgtgaaaatgttatgaaaagttacaagaactatataaagattcgggttattgtcttattttacaaacaccattactaaattgattatttgcttatctgcttctcccacatttttgcatatgtgaatatatggacagggctgggtaaggtggctcatacccataatcccagcactttgggaagccgaggcaggaggatc

SEQ ID NO: 215675 - DNA, 399 bp, Homo sapiens
ccggtttgaagaaaccttcattctagtgagaaacacagaaaagaacgagacaggaagtacttcagtgtagggtagcgtggttattggggagtgctattatatagggtggtcagagaaggcttctctgaggtaatgacatttgagccaagatctgaagaatgtgagggaaggagctatgtgggttatcttaaagaataacattccagtctgatgatactacaggtacaaaacccctgggaactatgtttagtctttatttttttaaaaatttttgtgggtatatatatttgtgggtttcatgagatattttgatatgggcatgcaatgtgtrataatcacgtcagggtaaatggggtctccatcaccttaagcatttatcctttgtgttacaatccaata

SEQ ID NO: 215676 - DNA, 450 bp, Homo sapiens
ctccattatgtatatgtaccacattttgttttttatccattcatctgttgatggacacttaggttgcttctaaatcttggctattgtgaatagtgcttcaataaacatgaaagtgcagatatcgctgtaatatactgattttcttttttttgggtatatacccaagtgtgggattgctagattgtatggtagtgtcatttttagatttttgaggaatcttcaaattgttctccataatggttatactaatttacattcttatcaaaagtgtatgagggtttccttttccccatgttcttgccagcatttgttattgyccttcttttgtataaaaaccatattaactagggtgagatgatatctcattgtagttttgatttgcatttctctgataagcaatgatatttagcactttttcaaatacctgtttgctattagtatgtcttcttt

SEQ ID NO: 215677 - DNA, 578 bp, Homo sapiens
gtgaaaacagaaagaaacgtaaaacttgctttagagagaacacragatgtttctgtacaagtagaaatgagttctgctatttccaaagtaaaagatgagaatgagtttcttactgaacaactttctgaaacacaaattaaattcaatgccttaaaagataagttccgtaagacaagagatagtctcagaaaaaagtcattggctttagaaactgtacaaaatgacctaagaaaaacacagcagcaaacacaggaaatgaaagagatgtatcaaaatgcagaagctaaagtgaataattccactggaaagtggaactgtgtagaagagaggatatgtcacctccaacgtgaaaatgcgtggcttgtacagcaactagatgacgttcatcagaaagaggatcataaagagatagtaactaatatccaaagaggctttattgagagtggaaagaaagacctcgtactagaagagaaaagtaagaagctaatgaatgaatgtgatcatttaaaagaaagtctctttcagtatgagagagagaaagcagaaggagtagtaagtatcaaggaagataaatattt

SEQ ID NO: 215678 - DNA, 578 bp, Homo sapiens
gtgaaaacagaaagaaacgtaaaacttgctttagagagaacacaagatgtttctgtacaagtagaaatgagttctgctatttccaaagtaaaagmtgagaatgagtttcttactgaacaactttctgaaacacaaattaaattcaatgccttaaaagataagttccgtaagacaagagatagtctcagaaaaaagtcattggctttagaaactgtacaaaatgacctaagaaaaacacagcagcaaacacaggaaatgaaagagatgtatcaaaatgcagaagctaaagtgaataattccactggaaagtggaactgtgtagaagagaggatatgtcacctccaacgtgaaaatgcgtggcttgtacagcaactagatgacgttcatcagaaagaggatcataaagagatagtaactaatatccaaagaggctttattgagagtggaaagaaagacctcgtactagaagagaaaagtaagaagctaatgaatgaatgtgatcatttaaaagaaagtctctttcagtatgagagagagaaagcagaaggagtagtaagtatcaaggaagataaatattt

SEQ ID NO: 215679 - DNA, 572 bp, Homo sapiens
cacagtgaaagtgtgaaaacagaaagaaacgtaaaacttgctttagagagaacacaagatgtttctgtacaagtagaaatgagttctgctatttccaaagtaaaagatgagaatgagtttcttactgaacaactttctgaaacacaaattaaattcaatgccttaaaagataagttccgtaagacaagagatagtctcagaaaaaagtcattggctttagaaactgtacaaaaygacctaagaaaaacacagcagcaaacacaggaaatgaaagagatgtatcaaaatgcagaagctaaagtgaataattccactggaaagtggaactgtgtagaagagaggatatgtcacctccaacgtgaaaatgcgtggcttgtacagcaactagatgacgttcatcagaaagaggatcataaagagatagtaactaatatccaaagaggctttattgagagtggaaagaaagacctcgtactagaagagaaaagtaagaagctaatgaatgaatgtgatcatttaaaagaaagtctctttcagtatgagagagagaaagcagaaggagtagtaagtat

SEQ ID NO: 215680 - DNA, 572 bp, Homo sapiens
cacagtgaaagtgtgaaaacagaaagaaacgtaaaacttgctttagagagaacacaagatgtttctgtacaagtagaaatgagttctgctatttccaaagtaaaagatgagaatgagtttcttactgaacaactttctgaaacacaaattaaattcaatgccttaaaagataagttccgtaagacaagagatagtctcagaaaaaagtcattggctttagaaactgtacaaaatgacctaagmaaaacacagcagcaaacacaggaaatgaaagagatgtatcaaaatgcagaagctaaagtgaataattccactggaaagtggaactgtgtagaagagaggatatgtcacctccaacgtgaaaatgcgtggcttgtacagcaactagatgacgttcatcagaaagaggatcataaagagatagtaactaatatccaaagaggctttattgagagtggaaagaaagacctcgtactagaagagaaaagtaagaagctaatgaatgaatgtgatcatttaaaagaaagtctctttcagtatgagagagagaaagcagaaggagtagtaagtat

SEQ ID NO: 215681 - DNA, 572 bp, Homo sapiens
cacagtgaaagtgtgaaaacagaaagaaacgtaaaacttgctttagagagaacacaagatgtttctgtacaagtagaaatgagttctgctatttccaaagtaaaagatgagaatgagtttcttactgaacaactttctgaaacacaaattaaattcaatgccttaaaagataagttccgtaagacaagagatagtctcagaaaaaagtcattggctttagaaactgtacaaaatgacctaagamaaacacagcagcaaacacaggaaatgaaagagatgtatcaaaatgcagaagctaaagtgaataattccactggaaagtggaactgtgtagaagagaggatatgtcacctccaacgtgaaaatgcgtggcttgtacagcaactagatgacgttcatcagaaagaggatcataaagagatagtaactaatatccaaagaggctttattgagagtggaaagaaagacctcgtactagaagagaaaagtaagaagctaatgaatgaatgtgatcatttaaaagaaagtctctttcagtatgagagagagaaagcagaaggagtagtaagtat

SEQ ID NO: 215682 - DNA, 572 bp, Homo sapiens
gtgaaaacagaaagaaacgtaaaacttgctttagagagaacacaagatgtttctgtacaagtagaaatgagttctgctatttccaaagtaaaagatgagaatgagtttcttactgaacaactttctgaaacacaaattaaattcaatgccttaaaagataagttccgtaagacaagagatagtctcagaaaaaagtcattggctttagaaactgtacaaaatgacctaagaaaaacacagcagcaaacacaggaaatgaaagagatgtatcaaaatgcagaagctaaagtgaataattccactggaaagtggaactgtgtagaagagaggatatgtcacctccaacgtgaaaatgcgtggcttgtacagcaactagatgacgttcatcagaaagaggatcataaagagatagtaactaatatccaaagaggctttattgagagtggaaagaaagacytcgtactagaagagaaaagtaagaagctaatgaatgaatgtgatcatttaaaagaaagtctctttcagtatgagagagagaaagcagaaggagtagtaagtatcaaggaagataa

SEQ ID NO: 215683 - DNA, 572 bp, Homo sapiens
gtgaaaacagaaagaaacgtaaaacttgctttagagagaacacaagatgtttctgtacaagtagaaatgagttctgctatttccaaagtaaaagatgagaatgagtttcttactgaacaactttctgaaacacaaattaaattcaatgccttaaaagataagttccgtaagacaagagatagtctcagaaaaaagtcattggctttagaaactgtacaaaatgacctaagaaaaacacagcagcaaacacaggaaatgaaagagatgtatcaaaatgcagaagctaaagtgaataattccactggaaagtggaactgtgtagaagagaggatatgtcacctccaacgtgaaaatgcgtggcttgtacagcaactagatgacgttcatcagaaagaggatcataaagagatagtaactaatatccaaagaggctttattgagagtggaaagaaagacctcgtrctagaagagaaaagtaagaagctaatgaatgaatgtgatcatttaaaagaaagtctctttcagtatgagagagagaaagcagaaggagtagtaagtatcaaggaagataa

SEQ ID NO: 215684 - DNA, 572 bp, Homo sapiens
gtgaaaacagaaagaaacgtaaaacttgctttagagagaacacaagatgtttctgtacaagtagaaatgagttctgctatttccaaagtaaaagatgagaatgagtttcttactgaacaactttctgaaacacaaattaaattcaatgccttaaaagataagttccgtaagacaagagatagtctcagaaaaaagtcattggctttagaaactgtacaaaatgacctaagaaaaacacagcagcaaacacaggaaatgaaagagatgtatcaaaatgcagaagctaaagtgaataattccactggaaagtggaactgtgtagaagagaggatatgtcacctccaacgtgaaaatgcgtggcttgtacagcaactagatgacgttcatcagaaagaggatcataaagagatagtaactaatatccaaagaggctttattgagagtggaaagaaagacctcgtactagaagagaaaagtaagaagctaatgaatgaatgtgatcatttaaaagaaagtctctttcagtatgagagagagaaarcagaaggagtagtaagtatcaaggaagataa

SEQ ID NO: 215685 - DNA, 572 bp, Homo sapiens
gtgaaaacagaaagaaacgtaaaacttgctttagagagaacacaagatgtttctgtacaagtagaaatgagttctgctatttccaaagtaaaagatgagaatgagtttcttactgaacaactttctgaaacacaaattaaattcaatgccttaaaagataagttccgtaagacaagagatagtctcagaaaaaagtcattggctttagaaactgtacaaaatgacctaagaaaaacacagcagcaaacacaggaaatgaaagagatgtatcaaaatgcagaagctaaagtgaataattccactggaaagtggaactgtgtagaagagaggatatgtcacctccaacgtgaaaatgcgtggcttgtacagcaactagatgacgttcatcagaaagaggatcataaagagatagtaactaatatccaaagaggctttattgagagtggaaagaaagacctcgtactagaagagaaaagtaagaagctaatgaatgaatgtgatcatttaaaagaaagtctctttcagtatgagagagagaaagcagaagkagtagtaagtatcaaggaagataa

SEQ ID NO: 215686 - DNA, 514 bp, Homo sapiens
gtggaaagaaagacctcgtactagaagagaaaagtaagaagctaatgaatgaatgtgatcatttaaaagaaagtctctttcagtatgagagagagaaagcagaaggagtagtaagtatcaaggaagataaatattttcaaacttctagaaagamaatttaaacatttggttctggatacatgttgaacttagttgaatataaaaatctagataaaaagtgtgtttaccatactgtataattccatttacatgaagcatccagaaaagataaatgtatagggacaaaaagtagattaatgtttgcaaggggctggggctggaagctggtagtgactgctaatgggcatgaggaatcttacagtgatggaaatgctctaaagttggattgtagagatggctgcacaactcagtaaatgtactaaaaatcttttaactttaagtcaaaacagatacattctatagtatgtaaattatatttcaacaaagctgttttaataaaaaaggaaaaatgttt

SEQ ID NO: 215687 - DNA, 514 bp, Homo sapiens
gtggaaagaaagacctcgtactagaagagaaaagtaagaagctaatgaatgaatgtgatcatttaaaagaaagtctctttcagtatgagagagagaaagcagaaggagtagtaagtatcaaggaagataaatattttcaaacttctagaaagaaaatttaaacatttggttctggatacatgttgaacttagttgaatataaaaatctagatwaaaagtgtgtttaccatactgtataattccatttacatgaagcatccagaaaagataaatgtatagggacaaaaagtagattaatgtttgcaaggggctggggctggaagctggtagtgactgctaatgggcatgaggaatcttacagtgatggaaatgctctaaagttggattgtagagatggctgcacaactcagtaaatgtactaaaaatcttttaactttaagtcaaaacagatacattctatagtatgtaaattatatttcaacaaagctgttttaataaaaaaggaaaaatgttt

SEQ ID NO: 215688 - DNA, 414 bp, Homo sapiens
ttcagtatgagagagagaaagcagaaggagtagtaagtatcaaggaagataaatattttcaaacttctagaaagaaaatttaaacatttggttctggatacatgttgaacttagttgaatataaaaatctagataaaaagtgtgtttaccatactgtataattccatttacatgaagcatccagaaaagataaatgtatagggacaaaaagtagattaatgtttgcaaggggctggggytggaagctggtagtgactgctaatgggcatgaggaatcttacagtgatggaaatgctctaaagttggattgtagagatggctgcacaactcagtaaatgtactaaaaatcttttaactttaagtcaaaacagatacattctatagtatgtaaattatatttcaacaaagctgttt

SEQ ID NO: 215689 - DNA, 546 bp, Homo sapiens
ttaccatactgtataattccatttacatgaagcatccagaaaagataaatgtatagggacaaaaagtagattaatgtttgcaaggggctggggctggaagctggtagtgactgctaatgggcatgaggaatcttacagtgatggaaatgctctaaagttggattgtagagatggctgcacaactcagtaaatgtactaaaaatcttttaactttaagtyaaaacagatacattctatagtatgtaaattatatttcaacaaagctgttttaataaaaaaggaaaaatgtttactatatcggcttagaaacatgcctcatttctaggaaataaaagaggtgagagatgatttactttgagaaaagacattgtgtcacctatgaaattttattaggcacagagtcatattttaaggtagatagttctgtactgctgaaatagtaattttaatgtctttatattgccacatgttaagaccataatgtagttataaatggaaatgtttacacctgaagtattttcaaattaaaatttaattaagtgattt

SEQ ID NO: 215690 - DNA, 341 bp, Homo sapiens
tcatattttaaggtagatagttctgtactgctgaaatagtaattttaatgtctttayattgccacatgttaagaccataatgtagttataaatggaaatgtttacacctgaagtattttcaaattaaaatttaattaagtgattttcttcgacacttaattctagattccccagatgaattgaagtgtattgctgtgtcttgtagtaccttgctttaactagctttttatgtattttagttggtatagctttgttattattcatattaatttaacaaatctgaaaatatgtcaaattacgtatttttatgaccacgtaatgttttaaaggcacctacttgt

SEQ ID NO: 215691 - DNA, 548 bp, Homo sapiens
tagataaaaagtgtgtttaccatactgtataattccatttacatgaagcatccagaaaagataaatgtatagggacaaaaagtagattaatgtttgcaaggggctggggctggaagctggtagtgactgctaatgggcatgaggaatcttacagtgatggaaatgctctaaagttggattgtagagatggctgcacaactcagtaaatgtactaaaaatcttttaactttaagtcaaaacagatacattctatagtatgtaaattatatttcaacaaagctgttttaataaaaaaggaaaaatgtttactatatcggcttagaaacatgcctcatttctaggaaataaaagaggtgagagatgatttactttgagaaaagacattgtgtcacctatgaaattttattaggcacagagtcatattttaaggtagatagttctgtactgctgaaatagtaattttaatgtctttatattgccacatgttaagaccataatgtagttataaatggaaatgyttacacctgaagtattttcaaattaaaatt

SEQ ID NO: 215692 - DNA, 341 bp, Homo sapiens
tcatattttaaggtagatagttctgtactgctgaaatagtaattttaatgtctttatattgccacatgttaagaccataatgtagttataaatggaaatgtttacacctgaagtattttcaaattaaaatttaattaagtgattttcttcgacacttaattctagattccccagatgaattgaagtgtattgctgtgtcttgtartaccttgctttaactagctttttatgtattttagttggtatagctttgttattattcatattaatttaacaaatctgaaaatatgtcaaattacgtatttttatgaccacgtaatgttttaaaggcacctacttgt

SEQ ID NO: 215693 - DNA, 331 bp, Homo sapiens
ctgtgtctgcacttaacataacatccctcagactgatccacatggccacaaataacgggattgaattcctttatatggtgaatagtattcyattgtgtttgtgtgccacagttttttgtccattcatttggtgatggacatgcaggttgattccatacatcagctattgtgaatagtgctacaatatacatacaagtacaagtatctttttgatctattgttttcttttctattgcctgaatacccaatagtgggtttgcgggatcccttggcagtcccattattagttttttgagaaaccctcatgttgttttctatagtggctgcacta

SEQ ID NO: 215694 - DNA, 331 bp, Homo sapiens
ctgtgtctgcacttaacataacatccctcagactgatccacatggccacaaataacgggattgaattcctttatatggtgaatagtattccaytgtgtttgtgtgccacagttttttgtccattcatttggtgatggacatgcaggttgattccatacatcagctattgtgaatagtgctacaatatacatacaagtacaagtatctttttgatctattgttttcttttctattgcctgaatacccaatagtgggtttgcgggatcccttggcagtcccattattagttttttgagaaaccctcatgttgttttctatagtggctgcacta

SEQ ID NO: 215695 - DNA, 331 bp, Homo sapiens
ctgtgtctgcacttaacataacatccctcagactgatccacatggccacaaataacgggattgaattcctttatatggtgaatagtattccattgtgtttgtgtgccacagttttttgtccattcatttggtkatggacatgcaggttgattccatacatcagctattgtgaatagtgctacaatatacatacaagtacaagtatctttttgatctattgttttcttttctattgcctgaatacccaatagtgggtttgcgggatcccttggcagtcccattattagttttttgagaaaccctcatgttgttttctatagtggctgcacta

SEQ ID NO: 215696 - DNA, 331 bp, Homo sapiens
ctgtgtctgcacttaacataacatccctcagactgatccacatggccacaaataacgggattgaattcctttatatggtgaatagtattccattgtgtttgtgtgccacagttttttgtccattcatttggtgatggacatgcaggttgattccatacatcagctattgtgaatagtgctacaatawacatacaagtacaagtatctttttgatctattgttttcttttctattgcctgaatacccaatagtgggtttgcgggatcccttggcagtcccattattagttttttgagaaaccctcatgttgttttctatagtggctgcacta

SEQ ID NO: 215697 - DNA, 409 bp, Homo sapiens
tacaatgcccccctcagcccacagaccatccctccctgtatgtgtgcccagaggtcaggccctggggttttttttgggacatggcttttcctccaagacagagggagagacagttggcctcaggctccaggtgcccagctycacactcaccccaaaagccctctgggccaatcttaaaggagatagtgaggtggcctggcactgcctggacatgccatgtagcctattcctgagtgtcagagtgggaggaaggcagggacatttggcagatgagacatcttgtgctgttgggcctcccagggcccttcccacagagacccgatctacagacacagcacagaggctacaggaagactaatgcagaacccttgaggctgagccagggaccacatgaggactgtgcccagac

SEQ ID NO: 215698 - DNA, 409 bp, Homo sapiens
tacaatgcccccctcagcccacagaccatccctccctgtatgtgtgcccagaggtcaggccctggggttttttttgggacatggcttttcctccaagacagagggagagacagttggcctcaggctccaggtgcccagctccacactcaccccaaaagccctctgggccaatcttaaaggagatagtgaggtggcctggcactgcctggacatgccatgtagcctattcctgagtgtcagagtgggaggaaggcagggacatttggcagatgagacatcttgtgctgttgggcctcccagggccctwcccacagagacccgatctacagacacagcacagaggctacaggaagactaatgcagaacccttgaggctgagccagggaccacatgaggactgtgcccagac

SEQ ID NO: 215699 - DNA, 409 bp, Homo sapiens
tacaatgcccccctcagcccacagaccatccctccctgtatgtgtgcccagaggtcaggccctggggttttttttgggacatggcttttcctccaagacagagggagagacagttggcctcaggctccaggtgcccagctccacactcaccccaaaagccctctgggccaatcttaaaggagatagtgaggtggcctggcactgcctggacatgccatgtagcctattcctgagtgtcagagtgggaggaaggcagggacatttggcagatgagacatcttgtgctgttgggcctcccagggcccttcccacagagacccgatctacagacacagcacagaggctacaggaagactaatgcagaacccttgaggctgagccagggaccacatgaggaytgtgcccagac

SEQ ID NO: 215700 - DNA, 453 bp, Homo sapiens
taccatcattatacgttagaagctgtgaacttgctttttatttcagaggctcgtaagaaaaagagactgtagccttgactcagatgagactttggactttgtaagtttgagttaatgctgaaatgagttaagactcaytctggcaaggcatgattgtattttgcaatgtgagaaggacatgccgttcatggggtcagggacagaataatatggtttgtctctgtgtccctatcaaaacccatgtggaattatactccctaatgttagaggtggggcctaggtggaaaaagatttagttataaaagggtatgggtagattcttcacgaatgataaaggaccatcaccttgatgctgtcctcctgatagtgagtgagttctcatgagatctggttgttcaaaaggctgtggaacctctttcctcactctgtcttcctcctactcctgccttagga

SEQ ID NO: 215701 - DNA, 453 bp, Homo sapiens
taccatcattatacgttagaagctgtgaacttgctttttatttcagaggctcgtaagaaaaagagactgtagccttgactcagatgagactttggactttgtaagtttgagttaatgctgaaatgagttaagactcactctggcaaggcatgattgtattttgcaatgtgagaaggacatgccgttcatggggtcagggacagaataatatggtttgtctctgtgtccctatcaaaacccatgtggaattatactccctaatgttagaggtggggcctaggtggaaaaagatttagttataaaagggtrtgggtagattcttcacgaatgataaaggaccatcaccttgatgctgtcctcctgatagtgagtgagttctcatgagatctggttgttcaaaaggctgtggaacctctttcctcactctgtcttcctcctactcctgccttagga

SEQ ID NO: 215702 - DNA, 453 bp, Homo sapiens
taccatcattatacgttagaagctgtgaacttgctttttatttcagaggctcgtaagaaaaagagactgtagccttgactcagatgagactttggactttgtaagtttgagttaatgctgaaatgagttaagactcactctggcaaggcatgattgtattttgcaatgtgagaaggacatgccgttcatggggtcagggacagaataatatggtttgtctctgtgtccctatcaaaacccatgtggaattatactccctaatgttagaggtggggcctaggtggaaaaagatttagttataaaagggtaygggtagattcttcacgaatgataaaggaccatcaccttgatgctgtcctcctgatagtgagtgagttctcatgagatctggttgttcaaaaggctgtggaacctctttcctcactctgtcttcctcctactcctgccttagga

SEQ ID NO: 215703 - DNA, 453 bp, Homo sapiens
taccatcattatacgttagaagctgtgaacttgctttttatttcagaggctcgtaagaaaaagagactgtagccttgactcagatgagactttggactttgtaagtttgagttaatgctgaaatgagttaagactcactctggcaaggcatgattgtattttgcaatgtgagaaggacatgccgttcatggggtcagggacagaataatatggtttgtctctgtgtccctatcaaaacccatgtggaattatactccctaatgttagaggtggggcctaggtggaaaaagatttagttataaaagggtatgggtagrttcttcacgaatgataaaggaccatcaccttgatgctgtcctcctgatagtgagtgagttctcatgagatctggttgttcaaaaggctgtggaacctctttcctcactctgtcttcctcctactcctgccttagga

SEQ ID NO: 215704 - DNA, 444 bp, Homo sapiens
atccaaagcagtgaattctgcatttcacattggccaggactataagctctgctcactacagttatgagaaaaactgggaaactcatttaaagacataagccagggccaggcatggtggctcatgcctgtaattccagcaatttgggaggccaaggtgggagaatcacttgagcacaggaatttgaaaccagtccaggyaacataacgagacccagtctctacaaaaacaaaacaaaacaaaagctgggtgcggtggtgcacacctgttatgcctgcagtcctacctactcaggagtctgagctgggagatcacatgaggagttcaaggctgcatgagctttgattatgccactgcactccagcctgggagacagagtgagaccatttttcaaaaaattataaattaaataataaaatgtgataaacacataaatacatttaaac

SEQ ID NO: 215705 - DNA, 444 bp, Homo sapiens
atccaaagcagtgaattctgcatttcacattggccaggactataagctctgctcactacagttatgagaaaaactgggaaactcatttaaagacataagccagggccaggcatggtggctcatgcctgtaattccagcaatttgggaggccaaggtgggagaatcacttgagcacaggaatttgaaaccagtccaggtaacataacgagacccagtctctacaaaaacaaaacaaaacaaaagctgggtgyggtggtgcacacctgttatgcctgcagtcctacctactcaggagtctgagctgggagatcacatgaggagttcaaggctgcatgagctttgattatgccactgcactccagcctgggagacagagtgagaccatttttcaaaaaattataaattaaataataaaatgtgataaacacataaatacatttaaac

SEQ ID NO: 215706 - DNA, 444 bp, Homo sapiens
atccaaagcagtgaattctgcatttcacattggccaggactataagctctgctcactacagttatgagaaaaactgggaaactcatttaaagacataagccagggccaggcatggtggctcatgcctgtaattccagcaatttgggaggccaaggtgggagaatcacttgagcacaggaatttgaaaccagtccaggtaacataacgagacccagtctctacaaaaacaaaacaaaacaaaagctgggtgcggyggtgcacacctgttatgcctgcagtcctacctactcaggagtctgagctgggagatcacatgaggagttcaaggctgcatgagctttgattatgccactgcactccagcctgggagacagagtgagaccatttttcaaaaaattataaattaaataataaaatgtgataaacacataaatacatttaaac

SEQ ID NO: 215707 - DNA, 444 bp, Homo sapiens
atccaaagcagtgaattctgcatttcacattggccaggactataagctctgctcactacagttatgagaaaaactgggaaactcatttaaagacataagccagggccaggcatggtggctcatgcctgtaattccagcaatttgggaggccaaggtgggagaatcacttgagcacaggaatttgaaaccagtccaggtaacataacgagacccagtctctacaaaaacaaaacaaaacaaaagctgggtgcggtggtgcacacctgttatgcctgcagtcctacctactcaggagtctgagctgggagatcacatgaggagttcaaggctgcatgagctttgatyatgccactgcactccagcctgggagacagagtgagaccatttttcaaaaaattataaattaaataataaaatgtgataaacacataaatacatttaaac

SEQ ID NO: 215708 - DNA, 267 bp, Homo sapiens
ctttgattatgccactgcactccagcctgggagacagagtgagaccatttttcaaaaaattataaattaaataataaaatgtgataaacacataaatacatttaaacagtgctccttggaaaaagtgaatctatgttcccttagtgaagaagatgagaataayggatatagcagggaaatggacagcattggccacattagaccaaaatgaaagtcataacagtaccccaaatcagtaccattaaaaccacataatgtgaccataat

SEQ ID NO: 215709 - DNA, 518 bp, Homo sapiens
tctagatggtggttcatggatatagttgctckctaattttttgagcatattaaggacttaaaagctaatgatggtgtgttgttatgtcaaggccagcagagcatatcactttaaaaaactggcaatagaaacttctctttaaaaattgtaaaagtaagtaaagtttagaaaccaaccaagtacgagcaatgcaatgttagcatctcattggttcacaccagtgaaaagtatttaagaacaaagaaatagtatactgtaccacacagaaacttgcatgcaaatgtttattgcatgtgcagctatattcttacttactaaaacttagaagcacccagcttatcctttaataggtaatcattccttaattagataaacaaactctgctatatccatgcaatgacataattatcaggggtaaaaaaataagccatccagtcatgattagacatggaggaaatttgaatgcatatttctatgtgaaagaagccagtctgaaaagtctacatattgtatgagtc

SEQ ID NO: 215710 - DNA, 501 bp, Homo sapiens
ggatatagttgctcgctaattttttgagcatattaaggacttaaaagctaatgatggtgtrttgttatgtcaaggccagcagagcatatcactttaaaaaactggcaatagaaacttctctttaaaaattgtaaaagtaagtaaagtttagaaaccaaccaagtacgagcaatgcaatgttagcatctcattggttcacaccagtgaaaagtatttaagaacaaagaaatagtatactgtaccacacagaaacttgcatgcaaatgtttattgcatgtgcagctatattcttacttactaaaacttagaagcacccagcttatcctttaataggtaatcattccttaattagataaacaaactctgctatatccatgcaatgacataattatcaggggtaaaaaaataagccatccagtcatgattagacatggaggaaatttgaatgcatatttctatgtgaaagaagccagtctgaaaagtctacatattgtatgagtc

SEQ ID NO: 215711 - DNA, 500 bp, Homo sapiens
gatatagttgctcgctaattttttgagcatattaaggacttaaaagctaatgatggtgtgttgttatgtcaaggycagcagagcatatcactttaaaaaactggcaatagaaacttctctttaaaaattgtaaaagtaagtaaagtttagaaaccaaccaagtacgagcaatgcaatgttagcatctcattggttcacaccagtgaaaagtatttaagaacaaagaaatagtatactgtaccacacagaaacttgcatgcaaatgtttattgcatgtgcagctatattcttacttactaaaacttagaagcacccagcttatcctttaataggtaatcattccttaattagataaacaaactctgctatatccatgcaatgacataattatcaggggtaaaaaaataagccatccagtcatgattagacatggaggaaatttgaatgcatatttctatgtgaaagaagccagtctgaaaagtctacatattgtatgagtc

SEQ ID NO: 215712 - DNA, 501 bp, Homo sapiens
ggatatagttgctcgctaattttttgagcatattaaggacttaaaagctaatgatggtgtgttgttatgtcaaggccagcagagcatatcactttaaaaaactggmaatagaaacttctctttaaaaattgtaaaagtaagtaaagtttagaaaccaaccaagtacgagcaatgcaatgttagcatctcattggttcacaccagtgaaaagtatttaagaacaaagaaatagtatactgtaccacacagaaacttgcatgcaaatgtttattgcatgtgcagctatattcttacttactaaaacttagaagcacccagcttatcctttaataggtaatcattccttaattagataaacaaactctgctatatccatgcaatgacataattatcaggggtaaaaaaataagccatccagtcatgattagacatggaggaaatttgaatgcatatttctatgtgaaagaagccagtctgaaaagtctacatattgtatgagtc

SEQ ID NO: 215713 - DNA, 518 bp, Homo sapiens
tctagatggtggttcatggatatagttgctcgctaattttttgagcatattaaggacttaaaagctaatgatggtgtgttgttatgtcaaggccagcagagcatatcactttaaaaaactggcaatagaaacttctctttaaaaattgtaaaagtaagtaaagtttagaaaccaaccaagtacgagcaatgcaatgttagcatctcattggttcacascagtgaaaagtatttaagaacaaagaaatagtatactgtaccacacagaaacttgcatgcaaatgtttattgcatgtgcagctatattcttacttactaaaacttagaagcacccagcttatcctttaataggtaatcattccttaattagataaacaaactctgctatatccatgcaatgacataattatcaggggtaaaaaaataagccatccagtcatgattagacatggaggaaatttgaatgcatatttctatgtgaaagaagccagtctgaaaagtctacatattgtatgagtc

SEQ ID NO: 215714 - DNA, 518 bp, Homo sapiens
tctagatggtggttcatggatatagttgctcgctaattttttgagcatattaaggacttaaaagctaatgatggtgtgttgttatgtcaaggccagcagagcatatcactttaaaaaactggcaatagaaacttctctttaaaaattgtaaaagtaagtaaagtttagaaaccaaccaagtacgagcaatgcaatgttagcatctcattggttcacaccagtgaaaagtatttaagaacaaagaaatrgtatactgtaccacacagaaacttgcatgcaaatgtttattgcatgtgcagctatattcttacttactaaaacttagaagcacccagcttatcctttaataggtaatcattccttaattagataaacaaactctgctatatccatgcaatgacataattatcaggggtaaaaaaataagccatccagtcatgattagacatggaggaaatttgaatgcatatttctatgtgaaagaagccagtctgaaaagtctacatattgtatgagtc

SEQ ID NO: 215715 - DNA, 501 bp, Homo sapiens
ggatatagttgctcgctaattttttgagcatattaaggacttaaaagctaatgatggtgtgttgttatgtcaaggccagcagagcatatcactttaaaaaactggcaatagaaacttctctttaaaaattgtaaaagtaagtaaagtttagaaaccaaccaagtacgagcaatgcaatgttagcatctcattggttcacaccagtgaaaagtatttaagaacaaagaaatagtatactgtaccacacagaaacttgcatgcaaatgtttattgcatgtgcagctatatwcttacttactaaaacttagaagcacccagcttatcctttaataggtaatcattccttaattagataaacaaactctgctatatccatgcaatgacataattatcaggggtaaaaaaataagccatccagtcatgattagacatggaggaaatttgaatgcatatttctatgtgaaagaagccagtctgaaaagtctacatattgtatgagtc

SEQ ID NO: 215716 - DNA, 501 bp, Homo sapiens
ggatatagttgctcgctaattttttgagcatattaaggacttaaaagctaatgatggtgtgttgttatgtcaaggccagcagagcatatcactttaaaaaactggcaatagaaacttctctttaaaaattgtaaaagtaagtaaagtttagaaaccaaccaagtacgagcaatgcaatgttagcatctcattggttcacaccagtgaaaagtatttaagaacaaagaaatagtatactgtaccacacagaaacttgcatgcaaatgtttattgcatgtgcagctatattcttacttactaaaacttagaagcacccagcttatcctttaataggtaatcattccttaattagataaacaaactctgctatatccatrcaatgacataattatcaggggtaaaaaaataagccatccagtcatgattagacatggaggaaatttgaatgcatatttctatgtgaaagaagccagtctgaaaagtctacatattgtatgagtc

SEQ ID NO: 215717 - DNA, 500 bp, Homo sapiens
gatatagttgctcgctaattttttgagcatattaaggacttaaaagctaatgatggtgtgttgttatgtcaaggccagcagagcatatcactttaaaaaactggcaatagaaacttctctttaaaaattgtaaaagtaagtaaagtttagaaaccaaccaagtacgagcaatgcaatgttagcatctcattggttcacaccagtgaaaagtatttaagaacaaagaaatagtatactgtaccacacagaaacttgcatgcaaatgtttattgcatgtgcagctatattcttacttactaaaacttagaagcacccagcttatcctttaataggtaatcattccttaattagataaacaaactctgctatatccatgcaatgacataattatcagggrtaaaaaaataagccatccagtcatgattagacatggaggaaatttgaatgcatatttctatgtgaaagaagccagtctgaaaagtctacatattgtatgagtc

SEQ ID NO: 215718 - DNA, 508 bp, Homo sapiens
catgtgggggataagtaggtggagcacagggaatttttagggcagtgaaattattatgtatgattctgtaatggtggatacatgacatcatgcatttagcaaaacccatagaactgtataataaaaagagtgaaccctaatgtaaactctggtctttagacaataaatgcatcaatgttggcttcttaatgcaatttcattttaaaatataagtttccttattttttccacatatttcttaggggaaaattttaaataatttctagcttcactgttttctaatggataaaagcataaattaaatatgcttttactactgagaggatatgacattgtagtaacagatttattaataatcaagaatgtattaacatatttatataaggtaacattctgtgkatttttgtttccaaataactcagaattgacaaaataaaaatataattattcaatgatgaatatcacaatgagcaatattgatctatttcataattaaacatttcatcct

SEQ ID NO: 215719 - DNA, 456 bp, Homo sapiens
gccccagtggggactctgtgtgggggtgcccaccccacatttccatttcacaatatcctagcagggttctccatgagcaccctgcccctrcagcaaacttctgcctgaacatccaggtgcttccatacgttctctgaaatctaggcagaggttgccaaatcaattcttgacttctgtgtaccctcaggctcaacatgtaaaacctgccaaggcttggggctagcacccttggaagccacggcctgagctgtaccttggccccttttagtcatggctagagcggctgggatgcaggacaccaggtccctagactgcatatagcagagggaccctgagcctgcctcatgaaaccattttttcctctaaaacctcccagcctgtgaggagaaggactgccacaaaggtctctgacatgccctgcagacattttctccattgtcttggtgactaactttc

SEQ ID NO: 215720 - DNA, 456 bp, Homo sapiens
gccccagtggggactctgtgtgggggtgcccaccccacatttccatttcacaatatcctagcagggttctccatgagcaccctgcccctacagcaaacttctgcytgaacatccaggtgcttccatacgttctctgaaatctaggcagaggttgccaaatcaattcttgacttctgtgtaccctcaggctcaacatgtaaaacctgccaaggcttggggctagcacccttggaagccacggcctgagctgtaccttggccccttttagtcatggctagagcggctgggatgcaggacaccaggtccctagactgcatatagcagagggaccctgagcctgcctcatgaaaccattttttcctctaaaacctcccagcctgtgaggagaaggactgccacaaaggtctctgacatgccctgcagacattttctccattgtcttggtgactaactttc

SEQ ID NO: 215721 - DNA, 456 bp, Homo sapiens
gccccagtggggactctgtgtgggggtgcccaccccacatttccatttcacaatatcctagcagggttctccatgagcaccctgcccctacagcaaacttctgcctgaacatccaggtgcttccatacgttctctgaaatctaggcagaggttgccaaatcaattcwtgacttctgtgtaccctcaggctcaacatgtaaaacctgccaaggcttggggctagcacccttggaagccacggcctgagctgtaccttggccccttttagtcatggctagagcggctgggatgcaggacaccaggtccctagactgcatatagcagagggaccctgagcctgcctcatgaaaccattttttcctctaaaacctcccagcctgtgaggagaaggactgccacaaaggtctctgacatgccctgcagacattttctccattgtcttggtgactaactttc

SEQ ID NO: 215722 - DNA, 414 bp, Homo sapiens
acacaatgtacagaactcaactttctactaaagagtcaaaggctaaatttttggctaagaaattatgcttcttatatgataaaaatcatacatgccaaaacttaccatactttattaaacaacataaygtaaggtctgattcaacagaaatattgcagaatggtgattttttaaaatatgtgtaagtatatgtttgttttcaaaaatattggaaataactatgatgggactgtaagttcaaacagtttgagctaagcagataaacttgcatgcatgaaaacacattaaacagactcatttggctgggaatattcgttgcaaatctcaaggctagatgtgtttttgtggcttgtctcagtcattgcttccctcccattgtattcccattctatcattaaataaatgtaaatcatc

SEQ ID NO: 215723 - DNA, 430 bp, Homo sapiens
tgtctatctttagaacacaatgtacagaactcaactttctactaaagagtcaaaggctaaatttttggctaagaaattatgcttcttatatgataaaaatcatacatgccaaaacttaccatactttattaaacaacataatgtaaggtctgattcaacagaaatattgcagartggtgattttttaaaatatgtgtaagtatatgtttgttttcaaaaatattggaaataactatgatgggactgtaagttcaaacagtttgagctaagcagataaacttgcatgcatgaaaacacattaaacagactcatttggctgggaatattcgttgcaaatctcaaggctagatgtgtttttgtggcttgtctcagtcattgcttccctcccattgtattcccattctatcattaaataaatgtaaatcatctc

SEQ ID NO: 215724 - DNA, 439 bp, Homo sapiens
aacacaatgtacagaactcaactttctactaaagagtcaaaggctaaatttttggctaagaaattatgcttcttatatgataaaaatcatacatgccaaaacttaccatactttattaaacaacataatgtaaggtctgattcaacagaaatattgcagaatggtgattttttaaaatatgtgtaagtatatgtttgttttcaaaaatattggaaataacyatgatgggactgtaagttcaaacagtttgagctaagcagataaacttgcatgcatgaaaacacattaaacagactcatttggctgggaatattcgttgcaaatctcaaggctagatgtgtttttgtggcttgtctcagtcattgcttccctcccattgtattcccattctatcattaaataaatgtaaatcatctctaaatgaatacagaaaaaagaa

SEQ ID NO: 215725 - DNA, 430 bp, Homo sapiens
tgtctatctttagaacacaatgtacagaactcaactttctactaaagagtcaaaggctaaatttttggctaagaaattatgcttcttatatgataaaaatcatacatgccaaaacttaccatactttattaaacaacataatgtaaggtctgattcaacagaaatattgcagaatggtgattttttaaaatatgtgtaagtatatgtttgttttcaaaaatattggaaataactatgatgggactgtaagttcaaacagtttgagctaagcagataaacttgcatgcatgaaaayacattaaacagactcatttggctgggaatattcgttgcaaatctcaaggctagatgtgtttttgtggcttgtctcagtcattgcttccctcccattgtattcccattctatcattaaataaatgtaaatcatctc

SEQ ID NO: 215726 - DNA, 414 bp, Homo sapiens
acacaatgtacagaactcaactttctactaaagagtcaaaggctaaatttttggctaagaaattatgcttcttatatgataaaaatcatacatgccaaaacttaccatactttattaaacaacataatgtaaggtctgattcaacagaaatattgcagaatggtgattttttaaaatatgtgtaagtatatgtttgttttcaaaaatattggaaataactatgatgggactgtaagttcaaacagtttgagctaagcagataaacttgcatgcatgaaaacacattaaacagactcatttggctgggaatattcgttgcaamtctcaaggctagatgtgtttttgtggcttgtctcagtcattgcttccctcccattgtattcccattctatcattaaataaatgtaaatcatc

SEQ ID NO: 215727 - DNA, 386 bp, Homo sapiens
tactaaagagtcaaaggctaaatttttggctaagaaattatgcttcttatatgataaaaatcatacatgccaaaacttaccatactttattaaacaacataatgtaaggtctgattcaacagaaatattgcagaatggtgattttttaaaatatgtgtaagtatatgtttgttttcaaaaatattggaaataactatgatgggactgtaagttcaaacagtttgagctaagcagataaacttgcatgcatgaaaacacattaaacagactcatttggctgggaatattcgttgcaaatctcaaggctagaygtgtttttgtggcttgtctcagtcattgcttccctcccattgtattcccattctatcattaaataaatgtaaatc

SEQ ID NO: 215728 - DNA, 407 bp, Homo sapiens
aatcatctttcatttcaatcataattactgggttccttaattttttggtttctgtatcattacaaaaattttcatcatctgtgttagaaacaagctatgtgtctggtttgctatcacttttatagtctgatttattttcatttaaatgaagcttagaagatgactggtaactgtatttcagggacctggagtatgaatggaataaaaagacatttgacatgggcttcctctgttcaggcgctgcctggamtgccacagagttggaccctccagatgcatcttcctcctcacaatcagggacctgattcatcagattagagggcactccttttttgttcgtccctctttagagttactacataggagctcttcctcagggcaagcagtaattctggagttttcaaaac

SEQ ID NO: 215729 - DNA, 407 bp, Homo sapiens
aatcatctttcatttcaatcataattactgggttccttaattttttggtttctgtatcattacaaaaattttcatcatctgtgttagaaacaagctatgtgtctggtttgctatcacttttatagtctgatttattttcatttaaatgaagcttagaagatgactggtaactgtatttcagggacctggagtatgaatggaataaaaagacatttgacatgggcttcctctgttcaggcgctgcctggactgccacagagttrgaccctccagatgcatcttcctcctcacaatcagggacctgattcatcagattagagggcactccttttttgttcgtccctctttagagttactacataggagctcttcctcagggcaagcagtaattctggagttttcaaaac

SEQ ID NO: 215730 - DNA, 475 bp, Homo sapiens
cctttcttgctcttcctctgaagccactggtaaggcttgttctgttgacaaattcaytggtttagttcaaatgaactaagaacagttagataaagactataatctatataaaaataaatagagaataacatttctttgtattttatattttgagagtttcaatgaagcttaatgtttactgaaatatttagttctttaagaaatacttctaatcatccaaaacttcaacaaaccacttggggagacactagatatcaccaggttcaagccatatgaaatctcagggtcactcacaaattgttccacccaacataaatcaacaaaactgttagaaacaaaacaaaattttgaaatacagtcaaaatatacaatgtaacactttactatacttcataacagtatctttttaacaagacactaattgagttggcagttactaataatttgcaaaattattgttgttcataccttaatt

SEQ ID NO: 215731 - DNA, 475 bp, Homo sapiens
cctttcttgctcttcctctgaagccactggtaaggcttgttctgttgacaaattcactggtttagttcaaatgaactaagaacagttagataaagactataatctatataaaaataaatagagaataacatttctttgtattttatattttgagagtttcaatgaagcttaatgtttactgaaatatttagttctttaagaaatacttctaatcatccaaaayttcaacaaaccacttggggagacactagatatcaccaggttcaagccatatgaaatctcagggtcactcacaaattgttccacccaacataaatcaacaaaactgttagaaacaaaacaaaattttgaaatacagtcaaaatatacaatgtaacactttactatacttcataacagtatctttttaacaagacactaattgagttggcagttactaataatttgcaaaattattgttgttcataccttaatt

SEQ ID NO: 215732 - DNA, 538 bp, Homo sapiens
gccatatgaaatctcagggtcactcacaaattgttccacccaacataaatcaacawaactgttagaaacaaaacaaaattttgaaatacagtcaaaatatacaatgtaacactttactatacttcataacagtatctttttaacaagacactaattgagttggcagttactaataatttgcaaaattattgttgttcataccttaattagtgtgcaccccattttttacatcgcaaatgttttcccctactattctgaaaaatctattttcatcttttaagactcagaaagtaggctgggcataatagctcacatctgtaatcccagcactttggaaggccaaaatgggagaattgctcaaggccaggagtttaagaccagcctgggaaccatagataaccttgactctacaaaaaattggacaggtatggtgatatgtgcctgtagtcccagctactcaagaagcttaggtgagaagatccctcgagcccaggagtttgaggttgcagtgagtctcgatcacaccatcgcactccac

SEQ ID NO: 215733 - DNA, 538 bp, Homo sapiens
gccatatgaaatctcagggtcactcacaaattgttccacccaacataaatcaacaaaactgttagaaacaaaacaaaattttgaaatacagtcaaaatatacaatgtaacactttactatacttcataacagtatctttttaacaagacactaattgagttggcagttactaataatttgcaaaattattgttgttyataccttaattagtgtgcaccccattttttacatcgcaaatgttttcccctactattctgaaaaatctattttcatcttttaagactcagaaagtaggctgggcataatagctcacatctgtaatcccagcactttggaaggccaaaatgggagaattgctcaaggccaggagtttaagaccagcctgggaaccatagataaccttgactctacaaaaaattggacaggtatggtgatatgtgcctgtagtcccagctactcaagaagcttaggtgagaagatccctcgagcccaggagtttgaggttgcagtgagtctcgatcacaccatcgcactccac

SEQ ID NO: 215734 - DNA, 538 bp, Homo sapiens
gccatatgaaatctcagggtcactcacaaattgttccacccaacataaatcaacaaaactgttagaaacaaaacaaaattttgaaatacagtcaaaatatacaatgtaacactttactatacttcataacagtatctttttaacaagacactaattgagttggcagttactaataatttgcaaaattattgttgttcataccttaattagtgtgcaccccattttttacatcgcaaatgttttcccctactattctgaaaaatytattttcatcttttaagactcagaaagtaggctgggcataatagctcacatctgtaatcccagcactttggaaggccaaaatgggagaattgctcaaggccaggagtttaagaccagcctgggaaccatagataaccttgactctacaaaaaattggacaggtatggtgatatgtgcctgtagtcccagctactcaagaagcttaggtgagaagatccctcgagcccaggagtttgaggttgcagtgagtctcgatcacaccatcgcactccac

SEQ ID NO: 215735 - DNA, 584 bp, Homo sapiens
cttttaagacaagtcaaggaaaagagcaaaaaatgcaaaagtgaaacttgaaaggtcattttcccatcaagggctcatgatccactggacattcacaaactatattgttcaaaacattagttctgaattttgatctgagtatcccyggagttgcagtttcattcaaagatgtccaagaggtcaaataagacaatatcatttgctattttcagttttcttttttgagaacagcacaacaaacttcttcagagaaatgaatcgtcctaacttcataggctaaaggctcatgagtcacagttctaagggcatttataaaatatggtggtgcatgcttgtattctgaacttttcaactttaaactctcatatagtaaatattaataaatacaaactgattaaagaaaagcccacttaatctgacattatttttatttttctttctttcttcatttatcagcaacaggagagtctaactaaatgtggtaaagtggtataagggaatacaatgaaaagtgtaaaatgaattaaaccagagataatcatatcaatgtggatacatctggaaaatataatacaaaatacacc

SEQ ID NO: 215736 - DNA, 318 bp, Homo sapiens
accctgtgaagaaggtacttgcttctcctccaccttcagctatgattataagttttctgaggcctccccagcaattcagaactrtgagtcaattaaatctttttcctttataaattacccagtctcagaagttctttatagcagggtgataacagcctaatacacttagcttccttgaattaggtttcgatgttcccctgaatttcaatgatctttgttcctatctatattctgaaatcaatttatgtcatttcagccatctcagcctagttaagaacccttgctggggaactagtgtgatctttgggaggaaagaag

SEQ ID NO: 215737 - DNA, 318 bp, Homo sapiens
accctgtgaagaaggtacttgcttctcctccaccttcagctatgattataagttttctgaggcctccccagcaattcagaactgtgagtcaattaaatctttttcctttataaattacccagtctcagaagttctttatagcagggtgataacagcctaatacacttagcttccttgaattaggtttcgatgttccccygaatttcaatgatctttgttcctatctatattctgaaatcaatttatgtcatttcagccatctcagcctagttaagaacccttgctggggaactagtgtgatctttgggaggaaagaag

SEQ ID NO: 215738 - DNA, 318 bp, Homo sapiens
accctgtgaagaaggtacttgcttctcctccaccttcagctatgattataagttttctgaggcctccccagcaattcagaactgtgagtcaattaaatctttttcctttataaattacccagtctcagaagttctttatagcagggtgataacagcctaatacacttagcttccttgaattaggtttcgatgttcccctgaatttcaatgatctttgttcctatctatattctgaaatcaatttatgtcatttcagccatctcagcctagttaagaacccttgctggggaacyagtgtgatctttgggaggaaagaag

SEQ ID NO: 215739 - DNA, 406 bp, Homo sapiens
ttttcaaacaaacacattcagagggaattcattaccaccagactgccttacaagagttcctgaaaggagtagtaaatatggaaaggaaagactgttatcagccactacaaaaacacctttaagtacacagaccagtgacactataaagcaaccacacaaaccagtctgcataataatcagctaagaacaggatsagaggatcaaatccacatatatcaataataatcttgaatgtaaatggcctaaatgcctcaatgaaaaggcagagtggcaagctggataaagaaaaagacccaatggtctactgaatttaagagccccatcctacatgcaatgacacccataggctcaaaatgaatggatggaaaaaaaatctaccatgcgaaaggaaaacataaaaaagcag

SEQ ID NO: 215740 - DNA, 406 bp, Homo sapiens
ttttcaaacaaacacattcagagggaattcattaccaccagactgccttacaagagttcctgaaaggagtagtaaatatggaaaggaaagactgttatcagccactacaaaaacacctttaagtacacagaccagtgacactataaagcaaccacacaaaccagtctgcataataatcagctaagaacaggatcagaggatcaaatccacatatatcaataataaycttgaatgtaaatggcctaaatgcctcaatgaaaaggcagagtggcaagctggataaagaaaaagacccaatggtctactgaatttaagagccccatcctacatgcaatgacacccataggctcaaaatgaatggatggaaaaaaaatctaccatgcgaaaggaaaacataaaaaagcag

SEQ ID NO: 215741 - DNA, 406 bp, Homo sapiens
ttttcaaacaaacacattcagagggaattcattaccaccagactgccttacaagagttcctgaaaggagtagtaaatatggaaaggaaagactgttatcagccactacaaaaacacctttaagtacacagaccagtgacactataaagcaaccacacaaaccagtctgcataataatcagctaagaacaggatcagaggatcaaatccacatatatcaataataatyttgaatgtaaatggcctaaatgcctcaatgaaaaggcagagtggcaagctggataaagaaaaagacccaatggtctactgaatttaagagccccatcctacatgcaatgacacccataggctcaaaatgaatggatggaaaaaaaatctaccatgcgaaaggaaaacataaaaaagcag

SEQ ID NO: 215742 - DNA, 406 bp, Homo sapiens
ttttcaaacaaacacattcagagggaattcattaccaccagactgccttacaagagttcctgaaaggagtagtaaatatggaaaggaaagactgttatcagccactacaaaaacacctttaagtacacagaccagtgacactataaagcaaccacacaaaccagtctgcataataatcagctaagaacaggatcagaggatcaaatccacatatatcaataataatcttgaatgtaaatggcctaaatgcctcaawgaaaaggcagagtggcaagctggataaagaaaaagacccaatggtctactgaatttaagagccccatcctacatgcaatgacacccataggctcaaaatgaatggatggaaaaaaaatctaccatgcgaaaggaaaacataaaaaagcag

SEQ ID NO: 215743 - DNA, 505 bp, Homo sapiens
ggttaaatgaaagtagttactcctgtcagctaggtgattaaatgctgcctacatcaggcacatttatgtgcaaaattaaaattttggtataaagcatgaatctttatgcatgccagttaattatcttgcggttcctccagttattaaatgcccactgcatttcttcttaatcatcagcttcctttcaaaacttatttcatacttcacattacaccagatttcaatgtttaaatgaaatgccttaccaatgaaaacttcctctttttgagggcttggctgtactatgctactgaaaataatcacgatgaacattttctcattattatatacaagtatttctagaagacaggttgactaatgccaagatattttgaaagtgattctgttcaggctggaccaaggcttggttttgacctgggattcagcttcctgcatgcccctttacttyaccactgcaggtggccactgcacggtgacttgcgctgattgtaaggcattgcttctt

SEQ ID NO: 215744 - DNA, 526 bp, Homo sapiens
gaattcatgatcttcagtcaaggttaaatgaaagtagttactcctgtcagctaggtgattaaatgctgcctacatcaggcacatttatgtgcaaaattaaaattttggtataaagcatgaatctttatgcatgccagttaattatcttgcggttcctccagttattaaatgcccactgcatttcttcttaatcatcagcttcctttcaaaacttatttcatacttcacattacaccagatttcaatgtttaaatgaaatgccttaccaatgaaaacttcctctttttgagggcttggctgtactatgctactgaaaataatcacgatgaacattttctcattattatatacaagtatttctagaagacaggttgactaatgccaagatattttgaaagtgattctgttcaggctggaccaaggcttggttttgacctgggattcagcttcctgcatgcccctttacttcaccactgcaggtggccactgcrcggtgacttgcgctgattgtaaggcattgcttctt

SEQ ID NO: 215745 - DNA, 575 bp, Homo sapiens
aagcttaagatatttgttacctgttcctttccaaaaamacaccaaaaacaaaaaacctttctgattcctggtttacagcacaaaatctaaattatcatgtgtgagaaatgtcaggacattagcttatctatgctcatcacgggtcctaatgaacacagtttaacccgatgtctttttaaaaaataatgtcaccatagttcacacacccttatactacttacaggagcatttcctcaaacagtgacatccagatttctgcttccagttgtgacttctgccctgagtttctcgttgcatgttcacctgtctgctagatgcattcacttggggaatccttaaactcaacgtgttcaaaatggaactagttaccttcccctgaaagtctgtttcactttattatttcttagtgtggtataatcaaacacatatgtttggcctttgcccccagtttccggcacagaccttcataaactcttggaattttctgattcagaggagtgtcgtctgtcttttgctcctttcaaccacacccgagtttatgctaatgaggtgactcccagtgggcccttggatag

SEQ ID NO: 215746 - DNA, 557 bp, Homo sapiens
agaattacaacagtttaatrttactggagatttgagtcagaaagtggaagcatacttaaggtgttagactaaatcatgaagggtttcatatgccctgttaagaaatttaaactatatcctctgaaatagatatatcactgcagctttcatacaggatgaattagaagagggcaagataggagtaaggaaatcaggtaagagatgagagcttaaactaaaatagcagcaatgacaaggaggatagcaggcagtaatgtatccaggaaatatttaaaaggtaaaatttataaaaattgaagagtaagttgaagacgactacagatgtctaggttagatgactatttacatgtccatgtgattagctaagttaaagaattagggaaatgaagcaggttagattggtgttttgttaggatggtggggccaaaacctgccaggttcaatcttggtcatcctgacatttatgtaacctttggaaatcaagttaatcatttaataaatggttaaaacgcaggtaagaagcagagctggatttgtaaaccatcagtaaacaaatg

SEQ ID NO: 215747 - DNA, 558 bp, Homo sapiens
cattaaacctttctttcttccccatctcgggtatgtctttatcagcgtgtgaaaatggactaatacacctgtgatatagtaataaattaatttctgattaaaaaacaatctgtgtggaagaagtaacacctagcagttaagcatgtgcctccatcgttttcatgtgtacaacaaaaataataatcatacctgaacataaatgttatgcaggaactaaatgagataatacacggaaaacacagttctctttctgayatctgttaagcactcaataaatattagtaccacatgactgttgttataattagaaaatgttcaccacactatttgcagatgttatatttattacctggaaaccacaaaaatctaaatacaaaataagaagattcttgctgagctgaccttgttcacagggctctcaaaggctggtcttatctcacttttggccaccatctatgtgatctctactttgtggtctttctctataagtgaaaatgctaaagtctgaagccatgccttccctcaatctgattcaacctttgttttaggccacaaaac

SEQ ID NO: 215748 - DNA, 559 bp, Homo sapiens
ttaagcattgtattaatttgacaaatcagtaaagcacatagaaaataagtacgttatttgacatttaataggcaattaaaagaaaaacaaaaaattaatagtggtttcctttggatagcgagactagctgggaatggattttagagagggaagatgtcaactagatttgatattttgtttaatttactaaatagaataacttaaccgaaaaaagaattggttttataataaaaagtttaatacaaaacatattgaagtaaatattatctctgaaatattactaatagtttaaaaataagtttaattttgcttaagcaytacggaagtcatcacctcagaaatatcagaaatactttaagattgtcaatgtgttgaatgatagtattgaatgaactaaaccatttaagacaaaacagtcaaaaccactattaacatactgaaagtcttgatgtagtcatgcattctataaatactctttttttattgataatatgatctggacaaggttgagaggatggatacttagtaaaaccaggaactatgatcttcagccaaacat

SEQ ID NO: 215749 - DNA, 514 bp, Homo sapiens
tgtttctaaattgtccactgtttgtcaagctacaatcttggtacaatgtttcttgtttaaaaaaatggctgcaaatggatctatttataaaaatttaactgaaacatatagtcatttatatattttattctttcaaataatgtttaggaataatacttggattctttcaaataatgtttaggaataacacttggattctctatggccaagtattaaaatacaaaatggagaataattttttgcatttttrtattttataagtagtaaaaccaaaactgacaagttaaattttggtggcagccacataacaagtcattcctcgtgccagaaaatttagtgcaccaaacttttatttcttttcctctaggggaatttactagaaacatgtttcttcagaagcagaagagattgtcaaaaaattgccttggaattaccgtcatgtcttcactatatagaggtatctctgaagagcatgtttggtatggaggagtaagaaagtaacagacagtagctg

SEQ ID NO: 215750 - DNA, 521 bp, Homo sapiens
ttgtttgccacttgtatgctgtcttttgagaagtgtctgttcatgttcatgtcttttgctcactttttaatggagttatttgttttttgcctcttgaattgttccttatagatcctgaatattagaccattgttgaatgcacagttcatgaatattttctcccattctttaggttgtctgttttctctgttgataatttcacttgttgtgcagaaactcttgtttaattaggtcccactcatcgaatttcatttttgttacaattgcttttgaggacctagtcataaattctttctcaagaccaatgtccagaatggtgtttcctaggttttcttctaggattcttacactttaacattttacatttaaatatttaatccaccttgagttaagttttgatatggtaaaatgtaggagtccagtgtcagtcttctgcatgtgaccagccaactatcccagcaccatttattaaacagaaaattcttttcccattgcttwtttttgtcaactttgtcaaagat

SEQ ID NO: 215751 - DNA, 497 bp, Homo sapiens
aacatggggcctctcatgatgtcctaaaatgcaaacgggctgattttataaaaccttttgttaaaaataacatttaaacattctcagtagtattgagaatggaggaattgttacagaaaggagatagagggtgtattcatttcctatagttcctgtaacaaattatcacaaacttagtggtttaaaacaacagaaatttattctctgtgttttagaggccagagtttgaaatcaaggtgttggcagggctgcgccacctccaggtgctcgtgaggagaacccttccttacctccttcagcctycaatggctactggcattcctggcctatgtctgcatcactccaatctgcttctaatgtctgtggtcacattgtcttctcctcttgttctatattaaatctccctctggtgctctcttagaagacatccgtgatcgtatttagggcccacccagaaaacccatgatatccccatctttagatcctttgtttaatca

SEQ ID NO: 215752 - DNA, 583 bp, Homo sapiens
catattcaaacaatagcaatgtccaaatctgtaatatttagytatgcattttatgggacaatttacttaaaattgaattttttagatttcttgactaattcaacacatttgcatttgctctccttctcttacatatacaactttatacttggtttaaagcaggtcatcacagaggcatggatattatttattattgaatttgattctcacaacaaccctatgatgtaggaaggatagatattttaaatcttcattttgtagatgagggaaactcagtaatactagatccttcaacccatgatgtacatttaaggtaaagggatttgcttgcattcattctttgcattttgttcccttcctgctacaatggtgtctaggtaattactaagggcctccacatttaacattcagtgatctgaatgaattcactgtacactatgctataattcatctggtgggaaactgaatgccaaaagactgttagctttagtaagtggttaccgagttgcttggttgtctaggcagtttggtggtgggagattctgtttcaacgtctgtctggggaggcaaacaaacaaagctt

SEQ ID NO: 215753 - DNA, 583 bp, Homo sapiens
catattcaaacaatagcaatgtccaaatctgtaatatttagttatgcattttatgggacaatttacttaaaattgaattttttagatttcttgactaattcaacacatttgcatttgctctccttctcttacatatacaactttatacttggtttaaagcaggtcatcacagaggcatggatattatttattattgaatttgattctcacaacaaccctatgatgtaggaaggatagatattttaaatcttcattttgtagatgagggaaactcagtaatactagatccttcaacccatgatgtacatttaaggtaaagggatttgcttgcattcattctttgcattttgttcccttcctgctacaatggtgtctaggtaattactaagggcctccacatttaacattcagtgatctgaatgaattcactgtacactatgctataattcatctggtgggaaactgaatgccaaaagactgttagctttagtaagtggttacygagttgcttggttgtctaggcagtttggtggtgggagattctgtttcaacgtctgtctggggaggcaaacaaacaaagctt

SEQ ID NO: 215754 - DNA, 560 bp, Homo sapiens
gttgcttggttgtctaggcagtttggtggtgggagattctgtttcaacgtctgtctggggaggcaaacaaacaaagctttaaaccctgttgacacgtgtgccctgggtgactcaagattctgacaggaagatagtctctggcgtcccgttaccttacgactggagcaatgttccactggatgtggaattccttggagaggaacaatgtggttagttaaattatgggcaactgtctttaggatgcaaatcaggaaggcagtgggctcaaggtagacacttaggggaatgggtggttttaagagactctgagtcaggtctgagggaatgaatggaggatatgtaccatgggaaatcatattatatgctctgcaaagtgaaaagcaataagtagaccacttttatcttttccmgtttaccacatcctcaaattcacaccacacacctacagatatagtttattttccagcgctataggattcttgccattctttgaatgcagatcctcccataaggtatttcacagtctaggtagaaaggcatatagcaaatataataatggc

SEQ ID NO: 215755 - DNA, 525 bp, Homo sapiens
actctgggcactatttctagtttgcagcagatcattctctgatgtggcggctggcttgtacactgtagcgtttctagagcagggtatctcactctggacactatttctatttggagcagattattctctgatgtggcgactggcctgtacactctagggtttctagagcagtgtatctcacactgggcactatttgtatttggggcagattattctctgatgtggcggctggcctgtacactrtagggtttctagagcagggtttctcactctgagcactatttctatttggagcacattattctctgatgtggcggctggcctgtacactgtagggtttctagagcagggtttctcactctgggcactatttccatttggagcagattattctctgatgtggcggctgtcctgtacaatgtagggcttctagagaagggtatctcactctgggcactacttctatttggagcacattattctctgatatggcgactggcctgtatactgcagggtttctagagc

SEQ ID NO: 215756 - DNA, 563 bp, Homo sapiens
ctgttactgacgggcagagctgggattcctgttgtaagcctgatgtggctgtcttcctctccctgttccatttctagaagttgtaatgttaagatgccacaatgcctgctgatggtactagacagagtattgcagatgttctttgaatacaaatactgcctgcctcacatacccgtgagaatagcygcagaatggaggccatgattagaggatggaattcaatgaccattactcctgcttatgttattaattagaaacattctacacataaacaagagtttcggaggagcctgttattaatgtaacaaagagatcttttcagtatctgccatttacacacacacggttctcagtgattcccagaaattgttagtaacagtaaaatcaagttgtttagagcgcatggccagatttttctcatttcccaacctctgtgcagagcatgctggaatgagttattgagggaaactctaagaatagaaatactattaattcatgcatgtataaagtgcttaacagcttacaaaacacatgcatacctgctacctcattaatcttcacaa

SEQ ID NO: 215757 - DNA, 559 bp, Homo sapiens
ttatttttttcatacctagaagttgcagattatcttgttagagttttcacaaatatatataaaagtatcatctgtatgtatcactactttcagtaattctagaccctgtcatttcatgtgttaataataaagcaaaatacttccttatcaaaaatttgttttcttaatawggtgacaactctatttcaatgtcattgaaataatttataatccaatataatttatctctagcatttaaaaacactattctgtgaaggggtatgtagggttctccagactgccaaagcgggtcatggagcaaaaacttctcagaactcatacgttacaattagcagtttggttttagcaactcccacccctctctctatcaaattagttctccgacagtctccattgagctccagctattaattcgtattatgtatctctaggattcttaggtaaatggttcctattgttgtatgtggacaagattaataatttttacatcccctttttctgtttttctttactctctcttttgtccattttcattccattaaaataaattccctatctc

SEQ ID NO: 215758 - DNA, 520 bp, Homo sapiens
gtttgaactttacaataaacatatgtcacaataaatacaatgaagctgttttcatttgagaagaaaagcaggtcatgaacatgcagatatctggtaaatcagataatatttttmaaaagtaagttaaacaaatttctttgtgcctattagatattaaagtaaactcttcaagttaaaatacatttagtttcaatataaaatattatttttatgaaaaggcacagaggcttattaaattcaataaaagttaatcttattactaatatttagtaaagagatatatgatggatggatagatagataaataggtagaggacagttccagaattaagctaccaagtatttagatagataaatagatatagttccagaattaaagctaccaagtacttcttccaggagcagtttggcttttcccctgtggcctctgcctaggctggtgtaccctgtggagcaccgaacatttgtgacggggccagctgtggcagatgctactccaggatgacttgaaagtagggca

SEQ ID NO: 215759 - DNA, 520 bp, Homo sapiens
gtttgaactttacaataaacatatgtcacaataaatacaatgaagctgttttcatttgagaagaaaagcaggtcatgaacatgcagatatctggtaaatcagataatatttttaaaaagtaagttaaacaaatttctttgtgcctattagatattaaagtaaactcttcaagttaaaatacatttagtttcaatataaaatattatttttatgaaaaggcacagaggcttattaaattcaataaaagttaatcttattactaatatttagtaaagagatatatgatggatggatagatagataaataggtagaggacagttccagaattaagctaccaagtatttagatagataaatagatatagttccagaattaaagctaccaagtacttcttccaggagcagtttggcttttcccctgtggcctctgcctaggctggtgtaccctgtggagcaccgaacatttgtgacrgggccagctgtggcagatgctactccaggatgacttgaaagtagggca

SEQ ID NO: 215760 - DNA, 643 bp, Homo sapiens
agaagtgaaagagaaagaaaaatgagaaaagaaataacaacaaaaatatgaaactcatttcttgccagatactgacctgatgacaagatcctgttttgccaccaagaagcccagcttctcttcttgtttacaaatgtccatgctaacaggattaatattatatttcttgcctaactgttcaatttgattyttcatgtcagatcctatttcagtaattaaaagtcacatttttagatatgtcagagtaaaatatattttaacatctccaaaaataaattttcaaatttcagaaacaaagtagtcttctaaaatgtagaagtcaacacgctataaaatacatttttcttcttcaaaaattagggcttatttacctactgttatttctatattgccatctcttgataaatattctaatacaggctcagatatgtagccagatccaagaaccaaaacctttctcctggtgcccattgaaagtgactgagcacgttccctatttaaaaaaaaaaaaaaaaaaaaaaaaagggaaggggctaattaaaaatttttttttaaataacagaatcttgcattccacaaatcatactaaaacctaaataatgaagcaacattttctcttcacattacttaaaataagaatttc

SEQ ID NO: 215761 - DNA, 463 bp, Homo sapiens
ctcaaactgagatcaatagtgtcataacaattctactggtttacataaaagaccttgcaaaacttaggtctttacttctgtttctgggtaacatgtgaatggaattttcgggcagcataagggcaaattttcttatgtgttatatgctgtcagctcagcagagtattatttaacagaacagtcagttgagctctttcttataatggaaggaggaacttgtaagaatatcctcctcaaaagcagataatccaatctactaattagagccaccacccccaagatatatggagagcagaaaaagaggtaggaatcagagatttttctaagatatgatgatatcatcactcygataaaaattcctcatatgtccttcattgtctacaaagcaaacctgaggtccttggtatattatataaaacccatcacaacatgctcatctagcctaactcacagatctccactt

SEQ ID NO: 215762 - DNA, 617 bp, Homo sapiens
ggagaatgtgatttaaaaatttctgtttaacctttaagatgatgacattgcacattttctattaatatttggttctaatagttttgcgagtattttgctcagtggtttccaaaagtctactaaatttgttagcagtaattatttttggtttwaggtaacaaaaacacagagaccaggagcctttgatactgataaaagacatacacaattttattctgcattataataaatttaaatagcaatactctattctgttgacctgaggaggaataaatgcctgaaaagtggttttattgttttttttttttatgaagtagagaaaatctgaactatgcagaatgaatttgacaagtacaatgatatagtgtgatattgtttctgttggtttttatttttttttgttggtactgtagacagctttaccaaataggcattaaaaaacaaattaaatattatcatgtaattaacagagtattttattattcctagaatagaatatggatatgctcatttttataacactcatatttatgaaaatttaatttcttttgattatgcagtcccagagccaaattattataccacagccaaatttgttgaaaaccgaatcaaagttg

SEQ ID NO: 215763 - DNA, 617 bp, Homo sapiens
ggagaatgtgatttaaaaatttctgtttaacctttaagatgatgacattgcacattttctattaatatttggttctaatagttttgcgagtattttgctcagtggtttccaaaagtctactaaatttgttagcagtaattatttttggttttaggwaacaaaaacacagagaccaggagcctttgatactgataaaagacatacacaattttattctgcattataataaatttaaatagcaatactctattctgttgacctgaggaggaataaatgcctgaaaagtggttttattgttttttttttttatgaagtagagaaaatctgaactatgcagaatgaatttgacaagtacaatgatatagtgtgatattgtttctgttggtttttatttttttttgttggtactgtagacagctttaccaaataggcattaaaaaacaaattaaatattatcatgtaattaacagagtattttattattcctagaatagaatatggatatgctcatttttataacactcatatttatgaaaatttaatttcttttgattatgcagtcccagagccaaattattataccacagccaaatttgttgaaaaccgaatcaaagttg

SEQ ID NO: 215764 - DNA, 594 bp, Homo sapiens
atggtaatttaagaaactaaatttcttactccttcttttccctaggagcactgaatcaaaaaaattggggaaagaaatatccaacatgtaatagcccaaaacaatctcctatcaatattgatgaagatcttacacaagtaaatgtgaatcttaagaaacttaaatttcagggttgggataaaacatcattggaaaacacattcattcataacactgggaaaacaggtaaaatatttgcattctgtttgcctttaatatatttttcagacctggagtatgtttagactagtttcatctcattttcctttgaatagtgtactatgaactagatagaagttacatgtagaagaaaccaaatggagcagagaaaatgggaaatttagacaatattttgacaatttgtacaaaaaaaaaatgaccaatgtcatcatgtcatgttttcctacaaggtaacaataatgatgctgcctctagaagatgtgataatgtratttacagctaatataatttagtcaattacttagtcaatcaggatttctttttcttgagcattatagtttgatcttttctgcctagcctcatgttatagtcagt

SEQ ID NO: 215765 - DNA, 614 bp, Homo sapiens
ttcagaaaatatacttgaaaagtaacacagattaagaaacgaatttcaatcttataattataaaccatctgacatctttattggaactttgtactagcactatttactatgaagcagaattggtcatattctccatcttattttcaattcttaacactgactcccattaattaaaaaggtagtttggtagggaaaatcagattagatagaaacctgtaatctgaatacacatatcaatgtggtaaaaaatttggtcaacaagttcagtggggaacggggagaaaagcaatatttatttttgttgaacacacatttatggattatggattakgttcaaagcactctgctaagcatgaaccctttagcaaaaaaagaaaaagaatctttggcaattattggaatcaccgggatacagactaaagaaaccaggtttgtttgtttcttattataacaaaatagactcctgacccatgtggggtaacaaaagcatgatctgttctccatagtgtgcagtctactctgttctagtaaaggaagtcagatatgaaatacagttgatcatgaagacattctaccctagccaaccaatgtccaactacatgcaactattaata

SEQ ID NO: 215766 - DNA, 445 bp, Homo sapiens
cagctgctgccatgggattaggtccagatcaggactgttcgagcaagacagcaaaggtcagaatcacacycaggatgccctaggaagtccaggacactagctagtcaaaaatatttatgtgatcacttctcaggcttttggctaagattgaatgcaaacttatttatttgccttatccatttgtgcagtcagtcctaaatgccacagggagagagggaaacaaactgaagaaaacatagtccctaaccttgaactgctcacacactccactgaaaagcagaaaaggcacaagaaaatgtcttcagagaacacttacagaacagcccaagtgcaaatgaataccatgtcatatagcttttctctttcttcatccttcacttagatcccaacaaaataatcaagaaagccacttctcccccaagagagagaaaaagtattcacaata

SEQ ID NO: 215767 - DNA, 559 bp, Homo sapiens
gatggggtttcaccatgttggccaggctggtctcaaactcttggcctcaaatgatctgcctgccttgcgctcccaaagtgctgggattatagtagtgaaccattgtgccctagctgttctcacattgctataaagaaatactccagactgggcaatttatgaagaaaagggttttaattggctcacagttccacaggcgttacaggaaacatggtactggcatctgcttggcttctggggaggcctcaggaaacttgcaatcatggtggaaagagaagggggaggagcagtgtccatgaccagagcaggaggaagagggagggggggaggtgccacacttttaaacaaccggatctcatgagaactcactcaatatcatgagaacagcaccaaggagatggcatcaaaccattcctgagaaatccaccctcatgatccaatcacctctcaccaggcctcacctccagcactgggaattataattcagcrtgaaatttggttggggacacacatccaaatcctatcacaaacaaacaagcaataagaacacagcaaaccc

SEQ ID NO: 215768 - DNA, 450 bp, Homo sapiens
ggagcttgatgctttctgaagagaccaaggaaaataagatgtccacggtaaactgcgtaaccccagtcaaggtgattttctcaacaacccaccaacaggtttcctaggaagattagtaattttccgtatgaattcacgattttgtaaaacaactagagacccaagcaagattcaatgcaaaagttaggctaactgtgttaattccatggttaccttttgaattaggttttgctgtagctgtgtgttttgaaggcagcggtgctcacaattatcttaactccccagggtagagtatatctccagtggtccacatgtctttcaraattgggcctccgataaatttcataagacatagccctctttttttttttttggttagttggtggggggggggtgaagttcctcgtcccttctgcacgagaagggaaccgccatatcattagaagtgtg

SEQ ID NO: 215769 - DNA, 422 bp, Homo sapiens
gtattgtgaaagtataattttaaacaaatgtttttgtagagacagggtctcactatattgcccaggctgatctctaactcccaggctcaagtgatcctattactttggcctcctgaagtgctaggattgcaagtgtgaaccaccatgcccatcctgaaggtataattattaaaatgctatccagtgttcataatctgcttatctaataattcaaatgctttgtttgccctgctgaggtcagactttggcytactctgtgaatgaatcagtttttgctgttgttacggatggtagagttgagtcaagatgttaatggcccttgtccaatatggggagctagttaagaatgtcttctgattctatcctgtggagtgagagtatctatttgttcacttgatggaaacttacagttccctcgtgtc

SEQ ID NO: 215770 - DNA, 502 bp, Homo sapiens
gaattctctccccaagggtaaatggaggtctgcatttatctgcatgtccagcatgcttcatgatgcagtgccttgtcattttcttaggtggcaaaggtgtcttttgactggtagtttctctgaactcaaagacgttatctttttattgctattgtggatgattgtttcacagtgttgcttccacttagagttgccacataaaatataggatggcccgttatgaatttcagctaaacaatgaataatttcatttaatgtaagtatgtcccaaatattgcacaggacatacttatgtaacagaatttttggttgtttatctgaaattgttggttgtttaactggccatcctatatttttatttgcttaatctagcaaccctccatgggaagattttaggraaagtgacactttatctggaccaataaatataagcaacagatttagagagagtattttaagagaagaaaaaggcaagaatgtctgtatatgagaaatcagatat

SEQ ID NO: 215771 - DNA, 494 bp, Homo sapiens
ttatcaaaggaaacatttgttttctgaatttttstactgtggaatttttcaacagcataaatgtacataggcattaccagaattctggtgcctgtatcacattgttgggtttagtttgagcatggttatctcctgatctgacaccacaaagtctccaggggcaggtcacatgccttatacacagttcctaagtgggtgtatttgagtgtgctgggcactcgatcaatgtttaatgaatgcattaatatctatacaaatagatgcagatatgtttgaatacttaagcataaacgttaactggatattttcccttttgctgcaaaaaatttgatgcagttttaaaaatttgtgtaacagaatttattctaggatccccaacgatggagaagcagcagcctctgaaagcagcacacatttggcacagttaactctcctccatgatgtcagccctaatgacaaaggaggaaacattgtgtgtgagtcagaagacattt

SEQ ID NO: 215772 - DNA, 663 bp, Homo sapiens
aatcacttgtctgtgacttgatttttttttcttcttctgaagcttttaggatgcacttcatattttcagtattctaacatttcacagtgataggctttgatgtaatgtatttttacctctgctttattgagtctttggtaagctttttaaaactagaagtatatatgtttttcattttgttaatcttttttctaataattttctctccaatattttttcccttatctctttcaagaattctattactcatgtattaacactaaaatggtttatccaaattttttagcctctatgtctcccagggagagccctgattttcttaaatatttcttctaaatcttttatgctttttctgctattacttttgtaatactcaagggccactatttgttaatgaatacttattttaataagatacaagttttttgtttctcacacagttatagtcagtaattcaaacaatatttttttagcatctactatgtgttaagcactgtttttgggactgggaaaatagcagagaacaacacacaaacaaacatctctgtgtctttggaacttacaatccagaagaggtgacagacaataaatgaggtaaactactgaaacytatggtaaattagataacaataagtccttacaagaaaaacaactaggaatgga

SEQ ID NO: 215773 - DNA, 338 bp, Homo sapiens
taaattttcccaaattgtaagttcactagccatagagataacataattacaattctatcttagcaccgcagttatacatgcagaattaagacaaatttttaaaaagttttgaattagtaaaatttcagaatgtcagctgccatacttgataagcytcaataacattatttgatcattaattaagctactggttccatgatactgaatctactgggagccagatctctgaagcttttaacagttatgacttctgaggcccacatactcgggaaaaactttgcggaattacagggaaagttcagccaggacagaaaagagtagtattggaaatgaagtgg

SEQ ID NO: 215774 - DNA, 501 bp, Homo sapiens
actctgggcactatttctagtttgcagcagatcattctctgatgtggcggctggcttgtacastgtagcgtttctagagcagggtttctcactctggacactatttctatttggagcagattattctctgatgtggcgactggcctgtacactctagggtttctagagcagtgtatctcacactgggcactatttgtatttggggcagattattctctgatgtggcggctggcctgtacactgtagggtttctagagcagggtttctcactctgagcactatttctatttggagcacattattctctgatgtggcggctggcctgtacactgtagggtttctagagcagggtttctcactctgggcactatttccatttggagcagattattctctgatgtggcggctgtcctgtacaatgtagggcttctagagaagggtatctcactctgggcactacttctatttggagcacattattctctgatatggcgactggcc

SEQ ID NO: 215775 - DNA, 436 bp, Homo sapiens
aaccaaacaactcaacacaaagacaaaattgaagaaagctttcagaacgaaaaaggcaaggatagaaaacaggagagcaggctgagtgtggtggctcacacctgtaattccagcactttgggaggctgaggtgggtggattccttgagctcaggagtttgagattagcctgggaaacatggtgaaaccccatctctacaaaaatacaaaattaacaagtcatggtggtgcatgcctgtggtcccagctactctggaggctgaggtgagaggattgcctgagtccacaaaatcaatgctgcagtgagccgagatcatgcgactgcactccagcctgggcgacagagggagaccctgtctcaaaaaaaaaaaaaaaaaaaaaarggagagtaaaggcacaaaaacttatagtccaagaatagtccaagagttctagtg

SEQ ID NO: 215776 - DNA, 417 bp, Homo sapiens
gtgttatgctccctccctctccttatattcaactggtcaccaagtcttatagattctatagtctaaatgtctccaacagtgtcccttctttttcatccccaattgccactacctttgtttttgtttgtatttttgagatgcagtctcagtctgttgcccaggctggaatgcagtggcgcaatttcggctcactgcaacctccacctcctgggttcaagcgattctcatgcctcagcctccagagtakctgagattagtagtgcatcaccatgcccagctaatttttgtatttttagtagagacagagttttgccatgtggcccaggccggtctcgaactcctgacctcaggtgatctgcccaccttggcctcccaaagtgctgggattacaggcgtgagccaccgcgcccggcaaca

SEQ ID NO: 215777 - DNA, 337 bp, Homo sapiens
tttatttatatgatataccttttaggatatatattcttgactctgctaacagccaccagcatgcatctgtctgaaggtcagtgtaggatttctggctgatggtgttctgggcctgaacaccagtggcgtgacttgctsttgagttggatctccatagaatctgacatttctgatgtgtcctaaatttctgaaatttaaatttttaaagatattatttcagtagtcaggatatgctcatttttgttccatttcatgtatacttatttaataactaaagttatcttttcttactgactccaggtttgttttacgactgataagatttctaatgaattca

SEQ ID NO: 215778 - DNA, 496 bp, Homo sapiens
gcctcggcctcccaaaatgctgggataacaggcgtgacacactgcacccagtctactaaatacttcttacatattttctacttaaggtgccctcctttttctaagaataagcaaggagctgcagaaagttctgggaaaatgtctcaaagattcaatgcataaggaaaaacttatttsagtattttgctgttgtttgcttacacacatccatgtatatttcacatgcaatccccaccaaaacatttaccattcttaaaagtgatgctcaaagtctttttatatgttcaaaaactataaaatgggtgctgaggggaacaccatatgccccaccagaaacgagaggtggttggaatatgtaaagaattactctcaatgattgtgtggcagacaggctatgaaggtgccaccctccccatccctgccttctggagtcataccttctctttagtgtggcatggcctgtgacttgcttctggtcaacaaggagctaaggtga

SEQ ID NO: 215779 - DNA, 496 bp, Homo sapiens
gcctcggcctcccaaaatgctgggataacaggcgtgacacactgcacccagtctactaaatacttcttacatattttctacttaaggtgccctcctttttctaagaataagcaaggagctgcagaaagttctgggaaaatgtctcaaagattcaatgcataaggaaaaacttatttcagtattttgctgttgtttgcttacacacatccatgtatatttcacatgcaatccccaccaaaacatttaccattcttmaaagtgatgctcaaagtctttttatatgttcaaaaactataaaatgggtgctgaggggaacaccatatgccccaccagaaacgagaggtggttggaatatgtaaagaattactctcaatgattgtgtggcagacaggctatgaaggtgccaccctccccatccctgccttctggagtcataccttctctttagtgtggcatggcctgtgacttgcttctggtcaacaaggagctaaggtga

SEQ ID NO: 215780 - DNA, 514 bp, Homo sapiens
taataataataataaaataaaaattttgttgtttaagctacctagtttgtggtatttcattatggcagtctgagctgactaacacaaatgaggaggctctttagctacaatctagggttaaaaagagtcccaagtgattctttggatcactcaggtttgagaaatttgacatcacacttcaaattagcaatacctaggaaccactgatcacaaaaatcagacctasagaggaaaataattttatggttgtcagagcagtacatcacagagaaagcgtagcttaagtaatattccccagctgtacataaggaataattattttcatcgaaatttatgtatttttgccaaagtagcaagtttatgtgtgtgtatctgtggactttaaagtcccccagaaaatgaaattacctttctcaattatgagtacaagtgcaaagaactcttcctttaacttcattgtttcatcttcaaaatttatcttttacatgctccatttaacacaaatgtgcttaat

SEQ ID NO: 215781 - DNA, 514 bp, Homo sapiens
taataataataataaaataaaaattttgttgtttaagctacctagtttgtggtatttcattatggcagtctgagctgactaacacaaatgaggaggctctttagctacaatctagggttaaaaagagtcccaagtgattctttggatcactcaggtttgagaaatttgacatcacacttcaaattagcaatacctaggaaccactgatcacaaaaatcagacctagagaggaaaataattttatggttgtcagagcagtacatcacagagaaagcgtagcttaagtaatattccccagctgtacataaggaataattattttcatcgaaatttatgtatttttgccaaagtagcaagtttatgtgtgtgtatctgtggactttaaagtcccccagaaaatgaaattacctttctcaattatgagtacaagtgcaaagaactcttcctttamcttcattgtttcatcttcaaaatttatcttttacatgctccatttaacacaaatgtgcttaat

SEQ ID NO: 215782 - DNA, 463 bp, Homo sapiens
tgatggtgagtctcatcaagtgtgttaattctcactggctggaagaatctccaattctgaacgtttcctgctttattaggctgggcttctactgacattttctgtttcattgctctttatgcccccaaaatgattgatttgatcttgtaattgaaagcacgtctttataaatgtcaacttgctggtaatcaacatgtaatatatgtactatatgaatataaacatcaaatcatggtatggcctttggcttggaagtatattgtctaggagaatagccgtcmacatcaaacaactaaggtcacatcaacatatcgcattcaacaaatattttctgaggcactgacatgcaggtcatcattccaagtgtggagaatgcatcatgagacaaagatccttgcatgacatcattgtgagagatccacattccgtgcctgctttgctcttccgataaaatgctggcagt

SEQ ID NO: 215783 - DNA, 549 bp, Homo sapiens
ctaccttttttttaaataaagaaatgcatgcctgtaatcccagtactttgggaggccgaggggactggatcacctgaggtcaggggtttgagaccagcytgaccaacatgacaaaaccccatctctactaaaaatacaaaaattagctgggtgtggtggtgggtgctgtagtcccagctactggggaggctgaggtgagagaattgcttcaacccaagaggaagaggttgcagtgagctgataccatgccattgcactccagcctgggtgacagagcgagactctgcctcaaagaaaaaaaaaaagaagaaggaatgatctttcctttttttccttgtcttcatcaaatataaagtaacaatgaacatcctaaatacaggtggataatctaaatcctgatgtcagtgtgccaaagtaatctttgcaactccatatatacctcctggagcataagagaataaaatttgaataccttcaagacctctataaaaatagttgattcagctgactcacagtaaaattaccatgagctgctcctacagagaaata

SEQ ID NO: 215784 - DNA, 549 bp, Homo sapiens
ctaccttttttttaaataaagaaatgcatgcctgtaatcccagtactttgggaggccgaggggactggatcacctgaggtcaggggtttgagaccagcttgaccaacatgacaaaaccccatctctactaaaaatacaaaaattagctgggtgtggtggtgggtgctgtagtcccagctactggggaggctgaggtgagagaattgcttcaacccaagaggaagaggttgcagtgagctgataccatgccattgcactccagcctgggtgacagagcgagactctgcctcamagaaaaaaaaaaagaagaaggaatgatctttcctttttttccttgtcttcatcaaatataaagtaacaatgaacatcctaaatacaggtggataatctaaatcctgatgtcagtgtgccaaagtaatctttgcaactccatatatacctcctggagcataagagaataaaatttgaataccttcaagacctctataaaaatagttgattcagctgactcacagtaaaattaccatgagctgctcctacagagaaata

SEQ ID NO: 215785 - DNA, 549 bp, Homo sapiens
ctaccttttttttaaataaagaaatgcatgcctgtaatcccagtactttgggaggccgaggggactggatcacctgaggtcaggggtttgagaccagcttgaccaacatgacaaaaccccatctctactaaaaatacaaaaattagctgggtgtggtggtgggtgctgtagtcccagctactggggaggctgaggtgagagaattgcttcaacccaagaggaagaggttgcagtgagctgataccatgccattgcactccagcctgggtgacagagcgagactctgcctcaaagaaaaaaaaaaagaagaaggaatgatctttcctttttttccttgtcttcatcaaatataaagtaacaatgaacatcctaaatacaggtggataatctaaatcctgatgtcagtgtgccaaagtaatctttgcaactccatatatacctcctggagcataagagaataaaatttgaataccttcaagacctctataaaaatagttgattcagctgaytcacagtaaaattaccatgagctgctcctacagagaaata

SEQ ID NO: 215786 - DNA, 590 bp, Homo sapiens
taagcttcatctttgggaattatttgaggccagtgttaaaaaaaaaagytctaggataaactacggtgccattatcaagcaaggtttgctctaaaataagtcagggcttgaggcctctcaggaaatgcaggtaatgcaaaggcggacgtgggagggcagctgtagttacagattctgaggggagatatctttcccatttctccaataccagtaatgacacagcagatatccttattgacctacactactgtgtgtgtctgtgtatgcgtgtgtgtatgcatgtgtgtgcatgtatgtgtgtgtgcacttgtgtgcatatgcacttgtgtctacatgtgtgccttgctgtgtgtgcacacatgtgtgtgtgtgcatgtgtacatgcctatacatgtgtgtgtgcttgcatctgtgtgtgtttagttctttgtttgattagatcatcctatattcgagtgcaggctcttagtgtcctgtctttggggatcctgtgtcagactcccaccttgatgagctacctggctgagccatgaacacctgagctgtagctctctggtctttagcacatagtccagtacgaagtagcttca

SEQ ID NO: 215787 - DNA, 590 bp, Homo sapiens
taagcttcatctttgggaattatttgaggccagtgttaaaaaaaaaagctctaggataaactacrgtgccattatcaagcaaggtttgctctaaaataagtcagggcttgaggcctctcaggaaatgcaggtaatgcaaaggcggacgtgggagggcagctgtagttacagattctgaggggagatatctttcccatttctccaataccagtaatgacacagcagatatccttattgacctacactactgtgtgtgtctgtgtatgcgtgtgtgtatgcatgtgtgtgcatgtatgtgtgtgtgcacttgtgtgcatatgcacttgtgtctacatgtgtgccttgctgtgtgtgcacacatgtgtgtgtgtgcatgtgtacatgcctatacatgtgtgtgtgcttgcatctgtgtgtgtttagttctttgtttgattagatcatcctatattcgagtgcaggctcttagtgtcctgtctttggggatcctgtgtcagactcccaccttgatgagctacctggctgagccatgaacacctgagctgtagctctctggtctttagcacatagtccagtacgaagtagcttca

SEQ ID NO: 215788 - DNA, 585 bp, Homo sapiens
cagtgttaaaaaaaaaagctctaggataaactacggtgccattatcaagcaaggtttgctctaaaataagtcagggcttgaggcctctcaggaaatgcaggtaatgcaaaggcggacgtgggagggcagctgtagttacagattctgaggggagatatctttcccatttctccaataccagtaatgacacagcagatatccttattgacctacactactgtgtgtgtctgtgtatgcgtgtgtgtatgcatgtgtgtgcatgtatgtgtgtgtgcacttgtgtgcatatgcacttgtgtctacatgtgtgccttgctgtgtgtgcacacatgtgtgtgtgtgcatgtgtacatgcctatacatgtgtgtgtgcttgcatctgtgtgtgtttagttctttgtttgattagatcatcctatattcgagtgcaggctcttagtgtcctgtctttggggatcctgtgtcagactcccaccttgatgagctacctggctgagccatgaacacctgagctgtagctctctggtctttagcasatagtccagtacgaagtagcttcagtcttttcttaatgatctaaagctt

SEQ ID NO: 215789 - DNA, 673 bp, Homo sapiens
ttgtcctcagcaatttttttgtccccacccatcttttttggtttctactctaagatctgtaacaaatcacattgtccttattttataaacgaggctactgaggtaaaggcgaaggttgagctgatgatctgtaatgccatctctaattttaatattatatsagtctagtatgtcatagtccttaattttaaaagaaaacatgtagtgctgtgtacatgtccattttacatacagatttttaaaaaattggcatacaaccgcattatgagttaacagatttcacacttataaaatataaacaaaataacaaatgcattaaagagagctactattgtgtttctacgaaaggccctgataatacattgtgtacagtgacatttagcaatcttttgaatgactgagctcgagttcctgacaaatgccttccacaggtaaaaacaggacgtggacaggatggtagaagggccagcgaggagtcatcatggagctgcattctttggaagcctcgaaaagagctctatgaggttatcattctgggacttgattatccccggtgtaaaaaaaaaggaattgaatgaaatggtttctgaggatgcttctcactctagatttctgagcttctatttaatattcactgattccagagttccccaggtacagagaatgagcagct

SEQ ID NO: 215790 - DNA, 553 bp, Homo sapiens
catcttttttggtttctactctaagatctgtaacaaatcacattgtccttattttataaacgaggctactgaggtaaaggcgaaggttgagctgatgatctgtaatgccatctctaattttaatattatatgagtctagtatgtcatagtccttaattttaaaagaaaacatgtagtgctgtgtacatgtccattttacatacagatttttaaaaaattggcatacaaccgcattatgagttaacagatttcayacttataaaatataaacaaaataacaaatgcattaaagagagctactattgtgtttctacgaaaggccctgataatacattgtgtacagtgacatttagcaatcttttgaatgactgagctcgagttcctgacaaatgccttccacaggtaaaaacaggacgtggacaggatggtagaagggccagcgaggagtcatcatggagctgcattctttggaagcctcgaaaagagctctatgaggttatcattctgggacttgattatccccggtgtaaaaaaaaaggaattgaatgaaatg

SEQ ID NO: 215791 - DNA, 553 bp, Homo sapiens
catcttttttggtttctactctaagatctgtaacaaatcacattgtccttattttataaacgaggctactgaggtaaaggcgaaggttgagctgatgatctgtaatgccatctctaattttaatattatatgagtctagtatgtcatagtccttaattttaaaagaaaacatgtagtgctgtgtacatgtccattttacatacagatttttaaaaaattggcatacaaccgcattatgagttaacagatttcacrcttataaaatataaacaaaataacaaatgcattaaagagagctactattgtgtttctacgaaaggccctgataatacattgtgtacagtgacatttagcaatcttttgaatgactgagctcgagttcctgacaaatgccttccacaggtaaaaacaggacgtggacaggatggtagaagggccagcgaggagtcatcatggagctgcattctttggaagcctcgaaaagagctctatgaggttatcattctgggacttgattatccccggtgtaaaaaaaaaggaattgaatgaaatg

SEQ ID NO: 215792 - DNA, 598 bp, Homo sapiens
ggtcaggtggaagctgcctctgggagtttgcctaagtttcggcctggcttggcttcctctccttcttcagcaatttccatcaaatttacaacggaaacctcttcaagtcctctaaagccctctccatcaagcagaaccagaatgcccaaacttaatcccagctccaccccttactagctggttgaacttcgcagtcatgttatctgttatgaactgtaaaacagkcataaaaccttcaaaggatggttgtacagattcaacgtcaagtactcagaactgtgcttgatacatgccattgttactcttttctttcttctttctttttttttgagacaagatctcattgtgtcgcccaggctggagcgcagtggcaggatcatagctcattgcagcctcgacctccatggctcaggtgatccacccacctcagcctccagagtagctggtactatagatgtatgccaccgtgcctgcctaatttttgcatttttttttgatagaggtggggttttgtcatgttttccaggctggtctcgaacccctgggctcaagtgacctgcctgcctcggcctcgcaaattgctggagttacaggcgta

SEQ ID NO: 215793 - DNA, 598 bp, Homo sapiens
ggtcaggtggaagctgcctctgggagtttgcctaagtttcggcctggcttggcttcctctccttcttcagcaatttccatcaaatttacaacggaaacctcttcaagtcctctaaagccctctccatcaagcagaaccagaatgcccaaacttaatcccagctccaccccttactagctggttgaacttcgcagtcatgttatctgttatgaactgtaaaacaggcataaaaccttcaaaggatggttgtacagattcaaygtcaagtactcagaactgtgcttgatacatgccattgttactcttttctttcttctttctttttttttgagacaagatctcattgtgtcgcccaggctggagcgcagtggcaggatcatagctcattgcagcctcgacctccatggctcaggtgatccacccacctcagcctccagagtagctggtactatagatgtatgccaccgtgcctgcctaatttttgcatttttttttgatagaggtggggttttgtcatgttttccaggctggtctcgaacccctgggctcaagtgacctgcctgcctcggcctcgcaaattgctggagttacaggcgta

SEQ ID NO: 215794 - DNA, 598 bp, Homo sapiens
ggtcaggtggaagctgcctctgggagtttgcctaagtttcggcctggcttggcttcctctccttcttcagcaatttccatcaaatttacaacggaaacctcttcaagtcctctaaagccctctccatcaagcagaaccagaatgcccaaacttaatcccagctccaccccttactagctggttgaacttcgcagtcatgttatctgttatgaactgtaaaacaggcataaaaccttcaaaggatggttgtacagattcaacgtcaagtactcagaactgtgcttgatacatgccattgttactcttttctttcttctttctttttttttgagacaagatctcattgtgtcgcccaggctggagcgcagtggcaggatcatagctcattgcagcctcgacctccatggctcaggtgayccacccacctcagcctccagagtagctggtactatagatgtatgccaccgtgcctgcctaatttttgcatttttttttgatagaggtggggttttgtcatgttttccaggctggtctcgaacccctgggctcaagtgacctgcctgcctcggcctcgcaaattgctggagttacaggcgta

SEQ ID NO: 215795 - DNA, 576 bp, Homo sapiens
acttaagtagattttttagagttgaaaaggcagacattggacaattacatgatcagttatcctttttttcttgaatattcatcttctccatctcagttctatttttctcatgagcttttaaagctgatcaggtgtctccaattattcttcaaagaactcaactctcttgatcttctctgtcttctctcagctacaatccttataccttttttcctttatagccacgtttcccctggagtaaattcccttgagttccacacctttccctcaactccagtcctcgtagtctggttcctgtttactgtctttgaagattatatattttctctacctaagaagcttctgtggacaacgcccagttgttattctatatgactgtccagcagcaatcaccaccattacctccttcctctctagccactccttttattcccagttgaaatttaccctgtcagtcggtcattaagtaatgggtccttttaaggcctgtccaaactcmccttctaaatgctgtccacgtctctcttggcaaactcccgagtacccatggctggaattatatcacctagatacaaa

SEQ ID NO: 215796 - DNA, 610 bp, Homo sapiens
caaggaaatccagctcatggtaggctataaggaaatttcaatcttaagatcaaaaagtaaagagctagccagtgtggaaatgtcaagcggaagttagagagttattgatatagtgccatatcctatccggacttgattttctatgtacatggacagacattgaatttttatattttggcttcaggtgctcatgrcaggtgatgaaagcaatgatctgtggctatacaagcttgccaagtgttcttgcatctcaatagcgtaggtaccatcttgtactctaccaggtcctgtccagtgcacacctctcctgtcggcaagtgtgagttggaggacaggatgggatgggggatgagttatcccataagtgtggcttctctactttttttctcagtagcaccgatggcctaaaaaatatccaaatccctcttccaacctctgaagactcatctggatcttacctgcctcacggtctgtctctcatcctttgccatgactccctttctgaggtaaagctctggaaatgctgtccacatttattcaccattcctttacctactacacctcaactccacagaatctaaactttgcctccaccatcgtgtagaagctg

SEQ ID NO: 215797 - DNA, 610 bp, Homo sapiens
caaggaaatccagctcatggtaggctataaggaaatttcaatcttaagatcaaaaagtaaagagctagccagtgtggaaatgtcaagcggaagttagagagttattgatatagtgccatatcctatccggacttgattttctatgtacatggacagacattgaatttttatattttggcttcaggtgctcatggcaggtgatgaaagcaatgatctgtggctatacaagcttgccaagtgttcttgcatctcaatagsgtaggtaccatcttgtactctaccaggtcctgtccagtgcacacctctcctgtcggcaagtgtgagttggaggacaggatgggatgggggatgagttatcccataagtgtggcttctctactttttttctcagtagcaccgatggcctaaaaaatatccaaatccctcttccaacctctgaagactcatctggatcttacctgcctcacggtctgtctctcatcctttgccatgactccctttctgaggtaaagctctggaaatgctgtccacatttattcaccattcctttacctactacacctcaactccacagaatctaaactttgcctccaccatcgtgtagaagctg

SEQ ID NO: 215798 - DNA, 610 bp, Homo sapiens
caaggaaatccagctcatggtaggctataaggaaatttcaatcttaagatcaaaaagtaaagagctagccagtgtggaaatgtcaagcggaagttagagagttattgatatagtgccatatcctatccggacttgattttctatgtacatggacagacattgaatttttatattttggcttcaggtgctcatggcaggtgatgaaagcaatgatctgtggctatacaagcttgccaagtgttcttgcatctcaatagcgtaggtaccatcttgtactctaccaggtcctgtccagtgcacacctctcctgtcggcaagtgtgagttggaggacaggatgggatgggggatgasttatcccataagtgtggcttctctactttttttctcagtagcaccgatggcctaaaaaatatccaaatccctcttccaacctctgaagactcatctggatcttacctgcctcacggtctgtctctcatcctttgccatgactccctttctgaggtaaagctctggaaatgctgtccacatttattcaccattcctttacctactacacctcaactccacagaatctaaactttgcctccaccatcgtgtagaagctg

SEQ ID NO: 215799 - DNA, 610 bp, Homo sapiens
caaggaaatccagctcatggtaggctataaggaaatttcaatcttaagatcaaaaagtaaagagctagccagtgtggaaatgtcaagcggaagttagagagttattgatatagtgccatatcctatccggacttgattttctatgtacatggacagacattgaatttttatattttggcttcaggtgctcatggcaggtgatgaaagcaatgatctgtggctatacaagcttgccaagtgttcttgcatctcaatagcgtaggtaccatcttgtactctaccaggtcctgtccagtgcacacctctcctgtcggcaagtgtgagttggaggacaggatgggatgggggatgagttatcccataagtgtggcttctctactttttttctcagtagcaccgatggcctaaaaaatatccaaatccctcttccaacctctgaagactcatctggatcttacctgcctcacggtctgtctctcatcctttgccaygactccctttctgaggtaaagctctggaaatgctgtccacatttattcaccattcctttacctactacacctcaactccacagaatctaaactttgcctccaccatcgtgtagaagctg

SEQ ID NO: 215800 - DNA, 506 bp, Homo sapiens
ctgtgtatttatgtcagttagggctctcatgggaaacacacccccagtaggagaattcagtaagctttatttactgagggactaccaatgtttgggtggctacagaggcatggggctgctggcagctgagcttttacccttcctaaacctgagggaggaggatgaggggagagagacctgcggagtcacagagtcatggagaatgacattctttgaaaagatggacgaccttcagtctgagcaagcagccaccccgaggccaccttgctggcatagattcacgacyttgctcttcccagctagcccatcaggagaaccttcctgcagtccacaggccacggaggtcctgctcacaccaccctgactcagcctctcaagcagcctatggtgggtacaggaccccaagatctattcccgttttcacccagagcccccagtactccccatcagtttcagccacactgggctccctggctcctgccttgtggctcctgtccctttcacac

SEQ ID NO: 215801 - DNA, 543 bp, Homo sapiens
ggagaaccttcctgcagtccacaggccacggaggtcctgctcacaccaccctgactcagcctctcaagcagcctatggtgggtacaggaccccaagatctattcccgttttcacccagagcccccagtactccccatcagtttcagccacactgggctccctggctcctgcctygtggctcctgtccctttcacacagggatccttgtctctcttggtctcatttagagggacagagctaacctggagtgatgacagagaaggggcctgtttccagggcatgtgcagtggagctaaatctggatgaaaaggagtagcaacatcgggagactgaggcagggtgggctgagaggggggtgggccatggagaccatcactgtccaccttgtttggatatttgacacttgaataaagtcctgggacatttactcctgcttttggccatcagatattcctaccatttccccataaatagaacttttttgggtggacaatcaggaggctgtcccacacgcctttactcctccactgagggattatttca

SEQ ID NO: 215802 - DNA, 543 bp, Homo sapiens
ggagaaccttcctgcagtccacaggccacggaggtcctgctcacaccaccctgactcagcctctcaagcagcctatggtgggtacaggaccccaagatctattcccgttttcacccagagcccccagtactccccatcagtttcagccacactgggctccctggctcctgccttgtggctcctgtccctttcacacagggatccttgtctctcttggtctcatttagagggacagagctaacctggagtgatgacagagaaggggcctgtttccagggcatgtgcagtggagctaaatctggatgaaaaggagtagcaacatcgggagactgaggcagggtgggctgagaggggggtgggccatggagaccatcactgtccmccttgtttggatatttgacacttgaataaagtcctgggacatttactcctgcttttggccatcagatattcctaccatttccccataaatagaacttttttgggtggacaatcaggaggctgtcccacacgcctttactcctccactgagggattatttca

SEQ ID NO: 215803 - DNA, 543 bp, Homo sapiens
ggagaaccttcctgcagtccacaggccacggaggtcctgctcacaccaccctgactcagcctctcaagcagcctatggtgggtacaggaccccaagatctattcccgttttcacccagagcccccagtactccccatcagtttcagccacactgggctccctggctcctgccttgtggctcctgtccctttcacacagggatccttgtctctcttggtctcatttagagggacagagctaacctggagtgatgacagagaaggggcctgtttccagggcatgtgcagtggagctaaatctggatgaaaaggagtagcaacatcgggagactgaggcagggtgggctgagaggggggtgggccatggagaccatcactgtccaccttgtttggmtatttgacacttgaataaagtcctgggacatttactcctgcttttggccatcagatattcctaccatttccccataaatagaacttttttgggtggacaatcaggaggctgtcccacacgcctttactcctccactgagggattatttca

SEQ ID NO: 215804 - DNA, 582 bp, Homo sapiens
ttttacagatcctctggcggcggatgcatttcagtttcaaccggttctgcctcggtagcaagctgtggaggagtttctcctcacttaaacctccagggattattcaattatttgtttatttattttggcacccacatattaatctgactcttagtttgtaatatcttctgccaagaaatcggattagaagcaacaatcccttgggctttagtcaaatgtggctttcccttgaatccatcatgtgccttagaaaggagacttagcacttctctctttacaggaggcttccctgctcccctggctttcctgtcaacctcttgctccctgtgttatcttagtctaaggggtgccaccataaatagggttcacagagtactgttctaatatcctggccattgacagattgtgtggttcccccagggccttcaatatgaagccactgaaaagcatgatggagtaaaaatgaaggccctatttggctagtcttcactccacaaaagaaaatttttwaaaaaatcagatgcatagtgttcaatttgattcctgtgtcctgaacacaacatttgtctttaatgccggagg

SEQ ID NO: 215805 - DNA, 524 bp, Homo sapiens
actttgctcctcattcatcttcagccatgattgtgaggcctccccagccatgtgaaactgtgagtcaattaaacctctttcctttataaattacccagtcttggatatgtctttattagcagtgtgagaatggactacgggaagatataatccagtgtgaatgatacaaatttctgtgtctaatacctgaatacctgaactgtatttgatcactaagttgccatctgcttctaaggtactcctagagtggacaaggatacctgcatactagcattggctgatgatggcttttttcccctcttggaagagagtggccattctgataagatggcttcttcaacaagtcaataatccctaaagtctagtttctttctatggcttttgggaaaaagatgcatgagactcttggaatataagcaaaaacttataawattcaatgttgactcaacttggagtatttttctcacattctaaagagtaatgaggatgataagatgatgaattccatgtaataaggagaatgt

SEQ ID NO: 215806 - DNA, 608 bp, Homo sapiens
tcaaactagcatagtcagccaaaagagaggtgcccacatagatccccctgaagaagtcgctgatgtgaaggtggcaaagtacaagaaagacagatccaatctgggtcaactgggttacacagagatcagctctgcactcctaaggccatgggaacctgttcccgaacctgtggagcatcaattttctgttctactctgagttgtaccacaattagaagcatcattatgtggaaaggaattcccagaggttcctaaacatccttctcctcctttaaccaataaagacatatgcatcttgcattaatactgtggaataaataatgaattataaacggaatagaaattataatacagtgatgtgatgtctgcacagatttttatggtccctggagtcagtccctttagaaatgtacattattttctctatttaaagatattcacaactctttgttaatccagctcaccatactcatctagggacactgggagggaaaatgtatttggaattcyacgggctccattcttccattgcttttcaattagagacaccattcgtcttgtgtgttttatctcttggagcattctcccatgtgctgccggaagataac

SEQ ID NO: 215807 - DNA, 573 bp, Homo sapiens
aaataggacacagggaactaaattgatacaggtacttggagtaagtaaggcataagcattctgcctgggcctttattcatcatawacatatggattatactacttcgtgtaatgtttcctccccaacatctttcacattctttatattttacatttatccattaattcaacaaacatttattttatagttattgctgatagggacaggaggcaagaaaatcctgggcagaagaaggggggtccccagagaggacctgagaccagggcccaaagtgagaacttacattcctgttctcctgctcaaatgtcaccttttctaagaccaccatggccccaccccaccccatcctgtgcctataaaaaccccagacccagctagacatcagagagatgtggcttgacttcaaagggacagcttgacggcataacttttgagaagaatccagctggggatggctggacttaggggaagataaccttctccatctccttttcagttccccttccttcttagagccacctccattagcaataaaatcctctgcattgtccatctttcaattcatttgtgtg

SEQ ID NO: 215808 - DNA, 348 bp, Homo sapiens
actttaaaatactaaaatatgctatttatttttttctttcctattgagtcacatatacaaatttaggatttatagaattgtaatatatatgtgtatgtgatgggyaatttgtagacttatatgtatgtaggtaaatggtatgaccgatttttctacaaatttcctgagtaatatatgtttaacatttcaactatctgaaaacagttacaatataagatcatttcttctatatgtcatagctgaattctttttggtgcattgtttcttaagaattcactagctctttggatcactacaacctcatttaaataaaattcagtaacagtagtttaatatatgataaatcag

SEQ ID NO: 215809 - DNA, 561 bp, Homo sapiens
tgagaaataaagaaagaatgttaaaagattaatagtgtaaaagcttaatctaatttttttcttacattcaaagtactaaagagataaaggaagaaatcacatctaggatcaggttttgtactttgttaatataatgtgttgcactaagagatgtactaatattaaactatcttcctttatccaatttatgtgctattatttattttaacatactcttggattttaatsgtgcataacattgttgtgttcatatttattagcaaaattaacctatacttttcttttttggagttgtctttgttcacttaagttttcaagtattgtaacaggaaggttgctagatacaagagcagtatctaaaataaatagcatttatctcaaccagaaatcaattcttcattcttaatatattaggactaaaactaagcaaatatatgtaaaattctgtagagcgaattatcaaactgcatttttttaaaaagaggtatagaagaggacataatagagaaccatgccaacttcacgtttgggattgttcaatattacagggatgtattatat

SEQ ID NO: 215810 - DNA, 456 bp, Homo sapiens
ttatttttactacttttaagatagatgcttgagtaatctcaatgtgaacacattacatgacacgcaaatgtaggtgagagttgctgttcatacactcaacataggcaaagcttttctttcaaacagaatgccatgcctctcacagctgcagtacatcattcagcttcagagctggagctgcttgaatgtcactggcagccccaaccttggagggtcagatcgcttgccaatggtttcaccagcaaacaaaagcccaccaaaatctcattctttggacaggggttgcctcttagccrttgccagagtctctggtgagaagctcactatgcatctggtggttatgaaatctcatttcattacactactaatttacagagaatgaaattataaacaaggtgattactgagcataatttatggcccacgtaattatatagctgtcaaagtagtgttggca

SEQ ID NO: 215811 - DNA, 581 bp, Homo sapiens
tagacaaaatataaaagaatgggcataattagcttccaatgaaactttactaaaatagatggtaggtaggatttgttctacagatcatagtttgctgaccctaaactactatgttgtcttgatcaacagaaatttccagactgtcattcgacacagttgtttattacaatagcagtccagtaaggtaaggttatattccctttgattgataaggttttattttcttttttcctaaaattactttatatctgttaggactcctttttctctgtacatacaaacatccagagatatcccagatataccttgggtgttgctgccaatgtttgcattttcaaaacctgtatcttattaaatacatctagaaacgatattttcatagataattttttgttgttgttttcctttgaagcatttatcctttcagttacaaacaatccaattatactcttttttgttatyttaaaacgtacaattaagttcttattgactatagtcacctattgtgctatcaaatagtaggtcttactcattctttctactttttgggacccagtaagcatactcacctccacgtcagc

SEQ ID NO: 215812 - DNA, 457 bp, Homo sapiens
aaatgtgtggactgcattgtgagtagccagaacctagcaacaatccctcatttataatagagctcaataagttggtattgattgaaggagcattcatatcactgtgcctatactagccttaaggtgtttacgaccttttacattgcacaaatctcttatagatgctaaatcttcttatacaacactatcttrcataaaagaaaggatcttgttctatatttttatcatccacaaaccatctagaataatatcttagaaatgaaatattattagtgaatttctcctgaatgaatgtataaatcagaaaagaactaaactaatcaacaaatcaactaaccagagagtacaagctgaactggttagtacaaattttggggaacatacttctaaatgatgactaccaaatataaattatgctcatattttccatctccaactgcaatagcaccatcacact

SEQ ID NO: 215813 - DNA, 622 bp, Homo sapiens
ggcttaatgaaagtgaggccactcattagagctggcttgaaaggcaaattctatgtataaaatttgcaaatgtgattcaagaaccaactggagttcctgatcaaaagaattcctgattctctttgttcatggagtctgaaatttcaacattgcwgacacattcagttgtctcatagggtcattgatcttcatgatttatgttaaaatgaatatacccctcaggggggtgacaccacaagcccttatcaactagtattttggaggagtatgacagctagatcagagtccaaatctgggtgaatatggcagaagattagtgttgcagcctatgagaaaagggacaagaaagggagaaaaattagaaaataattgggaaaacagagacagaaagtcagaaaggcaaagcttttagaaggacttcagggattattggttttcaatgactcttttaacatgagctcttcttaacagccacctctgaaactaactacatgcatactcccccacacacattttatacaatttattatttgtaatcacacctacactttctcacagagttaaaagtatgcttaatttctttgaaaaatgattttgaaatattatctatttacaaaaaaag

SEQ ID NO: 215814 - DNA, 622 bp, Homo sapiens
ggcttaatgaaagtgaggccactcattagagctggcttgaaaggcaaattctatgtataaaatttgcaaatgtgattcaagaaccaactggagttcctgatcaaaagaattcctgattctctttgttcatggagtctgaaatttcaacattgcagacacattcagttgtctcatagggtcattgatcttcatgatttatgttaaaatgaatatacccctcaggggggtgacaccacaagcccttatcaactagtattttggaggagtatgacagctagatcagagtccaaatctgggtgaatatggcagaagattagtgttgcagcctatgagaaaagggacaagaaagggagaaaaattagaaaataattgggaaaacagagacagaaagtcagaaaggcaaagcttttagaaggacttcagggattattggttttcaatgactcttttaacatgagctcttcttaacagccacctctgaaactaactacatgcatactcccccacacacattttatacaatttattatttgtaatcacacctacactttctcacaragttaaaagtatgcttaatttctttgaaaaatgattttgaaatattatctatttacaaaaaaag

SEQ ID NO: 215815 - DNA, 571 bp, Homo sapiens
ggttttataaaagggagttcccctatacaagctctcttgcctgccaccgtgtaagacataactttgctcctcctttgcctcctgccatgattgtcaggcctccccagccatgctgaactgtgggtcaattaaacctctttcctttataaattacccagtcttgtgtatgcttttattcgcagcttsaaaacagactaatacaccaagcatccacctaggcaaggtgggagagggaatacttgcaatatatatatctaacaaagaatttctaactagaatatataagacatttttcaaattacttgtaagaagatggcatattataaaatgggcaaaaattaaacactatacaaaggatcatatataagcagtaagtatgtgaaaatgatgaccattattcactgtgacaattcatgttaaaatctcatagatattgcactacacatccacgaaaagagccaacaattaaaagactgttatttccaagtacaggagaggatgtggaagcatgctatataataagtaacacagagaaaaaaaaatacaatactcagctagattagctaatttt

SEQ ID NO: 215816 - DNA, 540 bp, Homo sapiens
tgagatcttcattctggtgcctagggggccaccctcttcccacgcagtcatcgctctagggatgggcatgtgaacctgaattgccccatcagcagcgatctcagggctgttgcttggaactgctgccgcagaaccctgctctgtaggaaacacctggagtcaccaggaccycaagcaggcatgtggccacctatgaatacagacaaagctgacccatgggaaagacactgctaaggaagtcacagggatatgcagctggagccttgatcatacatacctgaagtcctgtcacctctacacagttacagaagcccttacgacagttctagccaggatgcactggtattttccacttcttatcctttttttttttttttttttttttttgagacagggtcttcctctctcacccaggctagggtagtgcagtggtgcaattatggctcactgcagcctccactgcctgggctcaaccgatcctcccacctcagcctcctgtgccactgctctcaggtaattttttttttttttttttttttt

SEQ ID NO: 215817 - DNA, 540 bp, Homo sapiens
tgagatcttcattctggtgcctagggggccaccctcttcccacgcagtcatcgctctagggatgggcatgtgaacctgaattgccccatcagcagcgatctcagggctgttgcttggaactgctgccgcagaaccctgctctgtaggaaacacctggagtcaccaggaccccaagcaggcatgtggccacctatgaatacagacaaagctgacccatgggaaagacactgctaaggaagtcacagggatatgcagctggagccttsatcatacatacctgaagtcctgtcacctctacacagttacagaagcccttacgacagttctagccaggatgcactggtattttccacttcttatcctttttttttttttttttttttttttgagacagggtcttcctctctcacccaggctagggtagtgcagtggtgcaattatggctcactgcagcctccactgcctgggctcaaccgatcctcccacctcagcctcctgtgccactgctctcaggtaattttttttttttttttttttttt

SEQ ID NO: 215818 - DNA, 628 bp, Homo sapiens
gaattctgctgagtcacttcggaggccacagctgcaaccttgggaacaatacgagtcattcaattcactaggcagcgtcccagcgctcacctgggggacttggccacggtctcttgttagaagcctcttcatggacaacgtggccaaccccacctcacccctatcgtctcccccggccacaccctgggccaatcgggctcccacgtcagggtctttgcagtaasttgtgttgcatgcctgatacctccttcccgccggggcacctgtagcctgtacatcctcccaccctcactgcgaaggcccctgctcccgctgaggctgcgtcagggaagagcgagcgagcgtctgcgagcctgatccgcaggcggctcggattggcacttagattggcaacggtgtccaggtacaaactgcagacctggagcgcccacaggctggatggtactaggggacaggtgtgcgcccaggtctgtgtggccgtgcgcgagactgctcgtgggcagcgtgggaataggggcaccgagtgtgcctttcacaatttccctgctgagctggatgtcggccacagaactattgtgtgccagctccgagcccacccatcacagcgggcgcgtgactccggcatggg

SEQ ID NO: 215819 - DNA, 425 bp, Homo sapiens
ctttgcagtaagttgtgttgcatgcctgatacctccttcccgccggggcacctgtagcctgtacatcctcccaccctcactgcgaaggcccctgctcccgctgaggctgcgtcagggaagagcgagcgagcgtctgcgagcctgatccgcaggcggctcggattggcacttagattggcaacggtgtccaggtacaaacwgcagacctggagcgcccacaggctggatggtactaggggacaggtgtgcgcccaggtctgtgtggccgtgcgcgagactgctcgtgggcagcgtgggaataggggcaccgagtgtgcctttcacaatttccctgctgagctggatgtcggccacagaactattgtgtgccagctccgagcccacccatcacagcgggcgcgtgactccggcatgggggctgcaca

SEQ ID NO: 215820 - DNA, 484 bp, Homo sapiens
tcctcacccccttttcttccttcattctctgctggtgtcaatcacagcttctagcagagggaaggcaggccaggcttggtttcttcttgcgagagtatttaactcagggccctgtagaacaatgagaatctgacctgcaactagctgggcgtgctggggcwtgcctgtgtagtttcagctacttgggaggctgaggcaggagaattgcttgagcccaaagttgaagctgcagtgagccatggttgtgccattacactccagcctgggcaacacaagaccccgtctcagaaataaaaagagaacctggcctgcagtgccaggcaggccctgaggtccaggagcctgggtatctccctctgcagcatgggtcacgaacaaactgggccctcagaggccacgggatggcgcccagtctccagtcacaaggcagaatccagacctcagcccatagctaaccagagctgtctgcaggccagatatggcc

SEQ ID NO: 215821 - DNA, 586 bp, Homo sapiens
ggcggcggggcttggtgggggtggtttggccaggtctgcgaggaagggaccttccccagcaggcagtcggccggcggctgtgatcccagccctgacaagactccttatctctgcggcagccgccagcccattgtccagggaaggaagacgacaggaggccggccagccccgtccaccttcccccaccmgtcttccccctcccccacccctccctgtccttcccagcctgccaggccccctctctgaccagacacagcccccggataaccaggcagcaattttaccagaagttgtatagtgaaaacgctgtatcacgttaaaacaaaaggaagtgtgttctagactgaagtgcacacggggcatgaatttttaagctaaaacaagaaccggagaaagcctccttccttctcttcccttagttccttcccctttccgtttccttccagaataatcagtcccggagccatttgctggagcagagccaggtgggcgtcccagtggggtgggggagggtggtggctctgagcagcgtcaatggggtggagagggctcgggggtggtggggtaggagagagctggctgcttg

SEQ ID NO: 215822 - DNA, 577 bp, Homo sapiens
agatctagggaactctggcttaaakgacacagtctcttggttaacaaagtccttatgagcagaaatctccctgataaacacttaaatctgggggtaggaattttcattccgcacctggccagggcctatggagactccagggtggatccttctttgcctggaagaaggcaaagtgtgtagggtgtttcttccagccctgggatgctaacaggctttgccagtccaggaatgagaggccaggcatcaagagtcctgacaacccgactcaggctctgctggactgtgccaggagatgtggggccctgccatgcccaagccgggtagatgccagctggtggtcaaggcaaatcacttctggggatggaacatggggccccaaagacaaatgatcttagatcgggctctgatgtcacaaggaattcatcgcctcctctccctacgctcacccacatcccaaacttgatcctcctcacaaagcccccagaacacagctgcgggaatcaaatgaactctaatcatgatcgttgaagatcaaggcatgacaaagcccagtgggaaaacctgctaaataatggtt

SEQ ID NO: 215823 - DNA, 485 bp, Homo sapiens
gggagctctccaagcagtctgggaggcgagagggagccgggcatggggagaagaggctcatgggaagagagtgtgtttgaagctgggagatgccctgcgtcgcaggcccctgtcctcaggagcagatgaagccctggcttccgggctggttccagcatgggattgttcaggattgttcagggagggggcctgggagggaaaaggggaagagtgacgccccagttccaggcagcagacttaatgctaggcttggagggktgcttctgtcctagcactaagcacctggaggggtctcccagcttcctgcagcatctaaagctctgtcttgtgggcccggcagagcctctgggccgccctctgcctgcagaccacagggccccagggaacctgaggtgggaggagcagggtgaggtcggtaaggggtccctccttgccagggcctggtccctcctcccagctccccagctctagaggtactagagcag

SEQ ID NO: 215824 - DNA, 424 bp, Homo sapiens
agaattcttgttagagctacaggacccagggttcctgacactttgcctggagatgtctgggaagctgccytttcctttcctgaggcttaaaccagggaagtttctctcagcacctttcagcacccccatctgggcctccaggaaatctgtgcagtcacctctgagccaggttctgtgcacagatgggggacaccaaagagggtcagggacagaaccctgagcttcgcttatccctcttgctttcaatctttcagtccactaggctgtgagctccctccaggggagcctgtgggatgggtcctgcatctcagcccctacacgtggcagcactcaatacacagctgatggctctgggaatggatgactacactttctctaaagcacagatttctgcacagctctccctcactgccagtgtgccctc

SEQ ID NO: 215825 - DNA, 555 bp, Homo sapiens
ctcttgtgcatccctgcttgtggactttgcctactgtttattcatatatttgttaagtaatcctgcatcttttgcagatggatttggttttggaaaacagccagagccaggttggagaaggtgggtggaaagtcaaggtcaggaagggtggactgtgggtcgggatggctctcaggggcccatcacctagacccaggtgagcagagttgaccrgtgggtggggtcattggggctggcatgttggtgaggaaggccgccctgctctgattctctggtgctgcctgcgtgtgtagagctgggcaccgtgggccaggcttgctggtgagatggagaaaggggcctaaggagaaccattgatcaggtccctcttgcaatccagctggagggtctgagtgggagggaggggcccagccttgagcaggtcatcaatttggagagggaagtctcaaggcacccagtgatgggggcccccaccaaagccagggcaaagcttttcttttggtgcctctgattccagactggaatgatctcccttccatcagcttcagagttccc

SEQ ID NO: 215826 - DNA, 555 bp, Homo sapiens
ctcttgtgcatccctgcttgtggactttgcctactgtttattcatatatttgttaagtaatcctgcatcttttgcagatggatttggttttggaaaacagccagagccaggttggagaaggtgggtggaaagtcaaggtcaggaagggtggactgtgggtcgggatggctctcaggggcccatcacctagacccaggtgagcagagttgaccggtgggtggggtcattggggctggcatgttggtgaggaaggccgccctgctctgattctctggtgctgcctgcgtgtgtagagctgggcaccgtgggccaggcttgctggtgagatggagaaaggggcctaaggagaaccattgatcaggtccctcttgcaatccagctggarggtctgagtgggagggaggggcccagccttgagcaggtcatcaatttggagagggaagtctcaaggcacccagtgatgggggcccccaccaaagccagggcaaagcttttcttttggtgcctctgattccagactggaatgatctcccttccatcagcttcagagttccc

SEQ ID NO: 215827 - DNA, 542 bp, Homo sapiens
ttgcttctggtcaaggaattcaatttagccaaagaagtgtggcagtgggtacatgttcatggaattcactagtcctaccatgtttcctgcaaccctaaagcttctggcttgctaggacagtggaaaggcctttagaagattcagttacagcacaagctaggtggcagtaccttgcagggttagggcaaggtccyccagaggtgtctatatactccaaattaacattcagtatttggcactgttcctctaataggcagaatttatgggcccaggaatcatggggtgaaattggacacactagcaaattttttacttgctgttcttgtgcccttatgctctaggggcctgtaggtcttactttcagaaggagggatagttctaccaggagacacacagtgatttcattgacctggaaagtaagacttccagcaggccactttgggctcctcatacctctgaatcaataggcaaagaaggaattacaatgctgtttgggataattgatcctgatgaacaaagggaaattggactactactgtaac

SEQ ID NO: 215828 - DNA, 585 bp, Homo sapiens
ggggaaaatatattttcaatgtatataaccaacaaaattgaatactcagaatttacagaaatttatttcatttaaaaaagattcaacagcctaaatggagaaacgtacaaaggatataaacagacaactaacagaggaggagactaaaataktcaacgtgtatgcgaaaagtacttttcactaggaatcaagaaagcataaaacaagtaaattcatgtctatgagattagcaaaattgcaaagatttacattgtcactttctattaaggatttggaaaggtggagctctgttactgtagaataggatataaagaccaattcacttttgataacaatttggcaatatattttaaattttaagatcgaaatatctaactgcctactgagagaggcaggagaccaccaagatgcctaggcagataggggcaggtccccagtaaaactccaccttcaagctgaagacagtttaaagcatgaaatgcaagctacaagttagatcctcagaatggattgagaacttgtcttcctgtttgacatgctttcctctgattgatccccacccttcacctattttacatataccta

SEQ ID NO: 215829 - DNA, 584 bp, Homo sapiens
aattgtattttttaaaagacaatcagattagaaaaatgagctatatgcattataaaacagartaaaaacttgtaaaaacataagggcaatcatatacatatagtgacctaacaatttgcctgtaagtatatccagcaagcaacatgaaaattaaaaattacaattgaaaaatagacaattatagtgggaaaaaggttttacatatttgtcaaaacttgagagataaagtagaatataataaggctataaaactttgtttcaaacctcaaaaacaaaaaaagttattaaatatacatttatagaatgctacatctaagaaattgagaataggtattgaaatgtatgaaaactttatttaaaaatgtctgtatactagctcatagaaatattctcaccattcttcaaagaagcaatattatagacaccatgttaatggaccacaattacataaaattaggaactaacattaaaaatgtaaatgaaaacaattacaaattagataatttagaagattctcctgttccttcgagaattaaatatgaattcaccatagcattacaatattccataataacaataaaatt

SEQ ID NO: 215830 - DNA, 584 bp, Homo sapiens
aattgtattttttaaaagacaatcagattagaaaaatgagctatatgcattataaaacagaataaaaacttgtaaaaacataagggcaatcatatacatatagtgacctaacaatttgcctgtaagtatatccagcaagcaacatgaaaattaaaaattacaattgaaaaatagacaattatagtgggaaaaaggttttacatatttgtcaaaacttgagagataaagtagaatataataaggctataaaactttgtttcaaacctcaaaaacaaaaaaagttattaaatatacatttatagaatgctacatctaagaaattgagaataggtattgaaatgtatgaaaactttatttaaaaatgtctgtatactagctcatagaaatattctcaccattcttcaaagaagcaatattatagacaccatgttaatggaccacaattacataaaattaggaactaacattaaaaatgtaaatgaaaacaattacaaattagataatttrgaagattctcctgttccttcgagaattaaatatgaattcaccatagcattacaatattccataataacaataaaatt

SEQ ID NO: 215831 - DNA, 392 bp, Homo sapiens
cggagcaggaacagcaaaacatctgtatttttttttcaattttaaaaatagatttggagaaatctagtcaacttcactttttatatcatactgatatagcagaatgtttccagtatgcttgaaggtaatgtaaaaacaaaatataaaaccaagatccctatctcaagatttccttgagaaaggaaatagtgactgaattatagatgaaaatkaagcaataattgtggaaaaataaagacaacagaggtcagacccatgtatcctgttgagcaagatctgtgcctatttctaataaaaacacatgaaaaatcatttatgatgtattttattgtactcattgcatttttgactaactacacaccctagattacggtcgagtacaggccatctga

SEQ ID NO: 215832 - DNA, 406 bp, Homo sapiens
gtaaaactgctaaacggagcaggaacagcaaaacatctgtatttttttttcaattttaaaaatagatttggagaaatctagtcaacttcactttttatatcatactgatatagcagaatgtttccagtatgcttgaaggtaatgtaaaaacaaaatataaaaccaagatccctatctcaagatttccttgagaaaggaaatagtgactgaattatagatgaaaattaagcaataattgtggaaaaataaagacaacagaggtcagacccatgtatcctgttgagcaagatctgtgcctatttctaataaaaacacatgaaaaatcatttatgatgtattttattgtactcattgcatttttgactaactayacaccctagattacggtcgagtacaggccatctga

SEQ ID NO: 215833 - DNA, 564 bp, Homo sapiens
aaaaagattttccattccctcctggcctgtattgtttccaytgaggagtctgtcgccagatgaattgaatctccgggatatgctatttacttcttctttcttgctgattttaggaacttctctctattttgatctttgagaatttgattattatatgacttgagatagtcttaaaggggttcaatatctgtagcagtcttagagcttcttgtgcctgcatatttatatctttctcaatatttgaaaagtttcctgttattatttatttgaatactctttctacccattgctcttgaacaccaatatttcttagattttgttttttgaaataattttccatatcctgtaggcagtctctgttactttttgtttttttcttttttctcttctttgtattttcaaatagccagtctttgagctcactcctctacttggtacattctgctctttagagcctttattgagattttcagtgcagcaaatgtatttcttagttccaagatttttgattttttaaattatttcaatctgtttgctaaattcctctgataaatttttgaattc

SEQ ID NO: 215834 - DNA, 564 bp, Homo sapiens
aaaaagattttccattccctcctggcctgtattgtttccattgaggagtctgtcgccagatgaattgaatctccgggatatgctatttacttcttctttcttgctgattttaggaacttctctctattttgatctttgagaatttgattattatatgacttgagatagtcttaaargggttcaatatctgtagcagtcttagagcttcttgtgcctgcatatttatatctttctcaatatttgaaaagtttcctgttattatttatttgaatactctttctacccattgctcttgaacaccaatatttcttagattttgttttttgaaataattttccatatcctgtaggcagtctctgttactttttgtttttttcttttttctcttctttgtattttcaaatagccagtctttgagctcactcctctacttggtacattctgctctttagagcctttattgagattttcagtgcagcaaatgtatttcttagttccaagatttttgattttttaaattatttcaatctgtttgctaaattcctctgataaatttttgaattc

SEQ ID NO: 215835 - DNA, 564 bp, Homo sapiens
aaaaagattttccattccctcctggcctgtattgtttccattgaggagtctgtcgccagatgaattgaatctccgggatatgctatttacttcttctttcttgctgattttaggaacttctctctattttgatctttgagaatttgattattatatgacttgagatagtcttaaaggggttcaatatctgtagcagtcttagagcttcttgtgcctgcatatttatatctttctcaatatttgaaaagtttcctgttattatttatttgaatactctttctacccattgctcttgaacaccaatatttcttagattttgttttttgaaataattttccatatcctgtaggcagtctctgttactttttgtttttttcttttttctcttctttgtattttcaaatagccagtctttgagctcactcctctacttggtacatyctgctctttagagcctttattgagattttcagtgcagcaaatgtatttcttagttccaagatttttgattttttaaattatttcaatctgtttgctaaattcctctgataaatttttgaattc

SEQ ID NO: 215836 - DNA, 596 bp, Homo sapiens
aacccatgggacatatcttctatagtgtggtactgctgaacaactattctgatttagcatttccttggtctgagttagagaagtttccagaggtagaaattatagtcccacttcccctttttgtctctgactgtccttaggaatatttcttcttcagacaatcacatgcttcccatgggttaaggcaaggacaggtctcctgccaggtaacccaagatggtgggaaagctggttaaccacctcaatctaacttttttcagcatagtaccatgaggtgggggatgatattttgtgtgcttcttacaggagcagaatcagagttgaggcacactactggtgtagaagtttgattctcctaccatctgcccagaaggcttttgttgtttgtctttgtttttaacttctttgtgtccttaggatctatcktactctcagatttgagttgtggtttgttgccggtaaaaatcttggcactgtgtatttatttggagttgtcttggggcaggcgggatagcttgcttctatcctgcatttttcccagtaatagaaattatttttttaaaaagaagaaaatgcaaaaaaaataaaagcaagct

SEQ ID NO: 215837 - DNA, 590 bp, Homo sapiens
agaatatgtgatatttctctttctgtgcctggattatttcacttaacacatgatcttcatttttatttatgttgcagcaattataggatttcctttctaatggctaaatcatactcctttgtgtatatataccctctttctttattcattcattcactgataaacaattagaatgattccgtatcttggctaacatgaacagtagctgcaattaacaagagagtgcagatatttctttsatacatgtgtttcctttctcttggacatacatacagcagtgagattgcttgatcctatggtaaattctattttgagttttctgagaaagctttgtactgttttccatagtggaaatactcatacatcaacagggcatgagtgttctcctttcttcctatcctcgccactatctgttatattttgtctttttaataaaagccattttgattaaggtgagatgatatctcactatggttttgatttgcatttccctgatgattagcaatgttgaatattttatcgtatacctgctttccatttgtatgttttatcttgaaaatgtctatttggatatgttgtgcatgttttaa

SEQ ID NO: 215838 - DNA, 537 bp, Homo sapiens
tgcagaactcctgaggcaaaactcttctttattcatttcacatggctcactctttctcataatttaactctcagtggaaaaaatctccttggagagaacttacatgaacttttatgaccttatgttgattatgacactaaaataatgcttcatttttatctatacttgccctggaataattactatacataaaatatatttactttatactttttctcattagttttttttttactatttatgcttccaactattcaatgtctttcaattaagacacaccaacatttccaactatctatttctattattacttytgtaatcaaatagctttgaaatttgaagagttttttttttcatttatcctcaattcttatatacattcatatatcacattttcaggattatatttctcactcactcattatagctccttcttcttttaacacctgctatcatatccctattatatattatcaaattcttattatatctcttctgaatcatgatgtgttatcaggaaaagaaaatattttaaag

SEQ ID NO: 215839 - DNA, 498 bp, Homo sapiens
aaagaatgatagtctatcatttgcaacaaaatggatagaactggaggtcattatgttaagtgaaataagcccatcacagaaaaacaaacttctcatgttctcacttatttgtggaagctaaaaattaaaacaattgaactaatagagatagagagtaaaatgatggttaccagaggctgggaagggtagtggggcactggaggggaagtgaaartagtcaatgggtaccaaaaaaaatagttagaaagaatgcataatattcagtatttgagaatataacagggtgactatagtcaatggaaatgtaattgtacattttaaaataactaaaagtgtataattggattgtttgtaacacaaaggataaatgcttgaggtgatgaatacctgatttaccctgatgtgattattacacatcatatgcctgtatcaaaatatcccatacaccccataaatatatacacctattatgtactcacaaacattaaaaacagaaaa

SEQ ID NO: 215840 - DNA, 523 bp, Homo sapiens
gatcccataaaatggaacacaagattctaacaaagaatccagcagggtacttttatgttcagggctctcagttcttcaaagaaggattggagaggtttaaagcaatgtttagtaacacaggcttgagtaaatggcactggaaagttctatttcctaacagagaaggactaaacacatgttgccaccactaagactatatcattttggcagtaatgtatstttaaaaaaaatcttctggctttctgcaaagagtaaatcattacctacctttttctgtaagaggtaatgtcttacactgttaaaatgacacctacagtaaggaacagaaaattgatgttaaatgcattcctattatgttaaatagaaaacattagaaattctttttctgacattttttatagtaggaaaaagtgtagctaaatacacaaactatttctttccattactgataaaaatgtggtctgtattatatatttttctattgtaaatctagaattagttgtaattggtgtaacttagtcat

SEQ ID NO: 215841 - DNA, 521 bp, Homo sapiens
atttgacacctttttagcctgcaaatatttagacaacatattatgttgtcaaatatttaaaaattataaagttgtagagttgtagttttattaggagacaggttattatgatgtgccttggttgaattgactatagtaaacaaagaaccagagagagagagagagagagagagactccataagaattagcragcttgcaaatgagaataaatggaaatagagaccaaacagacattcagaattgtaagatgcaactattcctcatactttctcagtcaaaaataaaattcataagtaatttttgtaagaaagcataatgaaaatttagcttcaatgctgaaaataacctatggcattgctttcaaaattcttgttaaaatgactaagtgaattaagttttcctcttccagaaaaacaagttttctcaagaaaaagaaaatactagcttttactttcaagggagcctgataagctcaagttacctgaaatatttctatagtgagaggcagttttcaaaaatc

SEQ ID NO: 215842 - DNA, 580 bp, Homo sapiens
tatatcaaaatctcattacctgtaatgacataaatttaatatgtaagaaatagaaagattttacttttccaagtccaagttaaactttagtttacatttcaaaccatgtaaaacatttaaaatgtgggagaatagacaatatttgtttagttaccaaaaatatgactttttatttttgtattctctgagwttcacttaaacaatgggttatagaaaacagcttcaaggagaggttgataaatgctgataacatatttctgtttattcttttgtactctaactggattaaagatttatcctccctttcagtatctttcagtacagaacaatttttctctttttaggtaaaaatgaagtgcttaaagttaacaatgcaacagatttcattatttttaaaagagaacaataatttcatcctaccctctattctgaatctgatttgttgtatattgagtgaaatttctaagccttaaatactttaggtaaaagactgtgacccgttgtgataattccaccagcatgtatttaaaagttaattacaaaaagtaaatattagaatggctgtattttagttaccatt

SEQ ID NO: 215843 - DNA, 480 bp, Homo sapiens
cttatttaaggtccttccctaattcaacatcaaagataatagataatttgagtttcttttctattagctgtgtttattttcttttattggttatattttcctgttttacctctagtctgaagtttttttgtgtgtgtgtgtgtgtattgaatgatatatatactccacatctgtgactttatcctttcttgagttgttcccttccatttctaagcactatggaaattccaatcctgagacccttaaagttcrtatgttgaaatctccaatgtgatgttattagaaggtgagggctttgggatgtaattatgtaatgaggatataacactcaagagtgggattagtgcccttattaaacaaacaaaaaaaagctagctcttcttttcttgcttttgctctcttttgccctttccctctctctctcttccccttctccatgtgaggatataattcaaagacagccatgttcaaattaggaag

SEQ ID NO: 215844 - DNA, 480 bp, Homo sapiens
cttatttaaggtccttccctaattcaacatcaaagataatagataatttgagtttcttttctattagctgtgtttattttcttttattggttatattttcctgttttacctctagtctgaagtttttttgtgtgtgtgtgtgtgtattgaatgatatatatactccacatctgtgactttatcctttcttgagttgttcccttccatttctaagcactatggaaattccaatcctgagacccttaaagttcgtatgttgaaatctccaatgtgatgttaktagaaggtgagggctttgggatgtaattatgtaatgaggatataacactcaagagtgggattagtgcccttattaaacaaacaaaaaaaagctagctcttcttttcttgcttttgctctcttttgccctttccctctctctctcttccccttctccatgtgaggatataattcaaagacagccatgttcaaattaggaag

SEQ ID NO: 215845 - DNA, 615 bp, Homo sapiens
taatagattattacctacagaatacaattaaagtctataagtacctgtgacaaaaatgaatacataattaggaattaaaaatccttttttaaaacagaataaaactgttatacataaatttaatgatgaaagtagaaaatcaccgtttggaaactatcacagaagtaagttaattaggcaagaataaatgatagtgtctaaagagagtgattctaggagaaaaaagatattttcatagtctcaaaatatctccccatgaaacatttattcattacaaaaggaaaaatactagcttcacattatataaaactggaagataccatctaaaccaagtgattaaagtaaacttttattcttaaataaaagttactagtatttctgaaggacattgtaaataagttcacatttatctaaaattaccttactaaagacaatctaaaatggtagacaacaactaatattataattttgatcatgactagcaactatgtaaaaatataatttcttagcccrgttaattggcaactacatttctatttttggtatttcaggaaaacttgcagaataagccttcagtcttcatttctactttccaaaatgaatttttaaattcat

SEQ ID NO: 215846 - DNA, 574 bp, Homo sapiens
gctggccgatgctcccagctgaataaagcccttccttctacaactcggtgtctgacaggttttgtctgtggctygtcctgctacactaggacccagacagaaatgcagataaggtctgactctttctaatatctcactccatgtgtctcaggccttacctaactgtaaagcagggaagttgtacagggagcatggctaattccacatgtccccaggccttatctaatgctccaaaataaattaaacaatttttaaaagtcaaagcagtttatgaccttaaagcatttaggaaacctaatatctgacctacataatttagaccaaatgttttatttttgccaataatctttaaagctgtttttattatccaaagattactaaagttacatgaactaaaaggcattacagttttactttttctttctaaacatttgacttaagtgcttatttttgtttaagtcaattaatcagagctcttttatgtaactacacagacagacagatagaagattactatagtagttgtgttacaggggagtccttgttcccagagctcccaagatggtggcggcag

SEQ ID NO: 215847 - DNA, 481 bp, Homo sapiens
atttctctgtcccttcccttgggttagtatgagggtatggaggtaacacataccttcatactcctgtgtatgaggagttgaggaggtggcaggagcaaggatattggagggagctggatcttggcatcacttcgtatagcagatccacactggcaggtctggacctctcacctttggagagcatatctctgtttcattacagaaaaagaaattttaatcttatttaatccactgtactattgagtttctttggtatagcaattaacctgtaccttaactaacatagcaagaatgctactaccagggacaaaataatgatttcatagaattagaagttcagacttatttctgtccatttaagkcttctcaggacactgtacacataagcaaaacagaggataatctcatgttaggtgggatgattgatggtgattatattattgatatagggttgtcatacaatgggagcaggaaggtgctc

SEQ ID NO: 215848 - DNA, 609 bp, Homo sapiens
cccaggtcaagaataaacactgtgagttttgccgtgagcattgtttgtgcttctttcacagggtctcctggggctggagaactgccgcactccccggaatcactcagaggcgcccagcagcacaaagcgccttctgactcgctgtgggtttctgaactaaaatgcgcaactaacttatcaatgtttaccaaaatatcgcttattttaatcatgggaaaactgatactctaggcaccggacataaacaactgtcacttkatcccaatgtttagttaacataaaaccgtcatccttaaccagtctgaaaaaaacatggcctcccagaccttgaagcagggtccatcttccaaaccaaatcttcacacctgggagggaggaaaaggcttgaggccactcatccagccctttaactctacacggtaggacatgcacaggttctgtgacttcacacaaccaggtagaccacctcaggcaggacaaaagtcaccaaaatgccaggacaaggattatattagaaaacatgccacgtcatgagatcacagaaagcgacatatggcccagagtaaaacacaggttagcagctccatagaaacacagatgtaggaattc

SEQ ID NO: 215849 - DNA, 452 bp, Homo sapiens
cgcgggagaaaatggagctattgagggccctgcagcgtggggtaaacattcatatggcctggaaaacagggccactgatatggttggcctttatgcccccacccaaatctcatctcgaactgtaatccccacgtcttgagggagggacctggtgggaggtgattggatcatgggggcagtttcccccatcctgttttcgtgatagtgaatgagttctcatgtgatctgatggtttaaaggtgtactacttcctctctctttctcctgccaccatgtaaaacgtgccttgcttccccttccatcatgactgtaagtttcytgaggcctcccagccacgtgaactatgagtcaattgaacctgcttttctttataaatgacccagtctcaggtgtttcttaaagcagtgtgaaaacagccaccactgaagtcaccctggcacagtcactttact

SEQ ID NO: 215850 - DNA, 444 bp, Homo sapiens
cgcgggagaaaatggagctattgagggccctgcagcgtggggtaaacattcatatggcctggaaaacagggccactgatatggttggcctttatgcccccacccaaatctcatctcgaactgtaatccccacgtcttgagggagggacctggtgggaggtgattggatcatgggggcagtttcccccatcctgttttcgtgatagtgaatgagttctcatgtgatctgatggtttaaaggtgtactacttcctctctctttctcctgccaccatgtaaaacgtgccttgcttccccttccatcatgactgtaagtttcctgaggcctcccagccacgtgaactatgagtcaattgaacctgcttttctttataaatgacccagtctcaggtgtttyttaaagcagtgtgaaaacagccaccactgaagtcaccctggcacagtc

SEQ ID NO: 215851 - DNA, 280 bp, Homo sapiens
accaaaaagtaattatattaagaactcttgggggtagggaggaaatggggatatgtagttccaaggctgctaagttgcaattagtagaatgaataagtttagaaatttaatgtacagcacgaggataatagctaataatattgttttgtatactggaagtgtgctgagagagtagattttaggtgacctcacacacacacacaaacacacacacacacacacacacaygcactccaagggataactgtaagatgacagatatgttaatttgcctgaatat

SEQ ID NO: 215852 - DNA, 318 bp, Homo sapiens
tagagggaaaacaaagtgaaaagactgmgaggtttccacaatccctgtgttttcaaaggtcaacaagaatgccagtgttggagttgagagaaaaaggagaacatttgaaaatgaggctttccatctgggattctcaaatgctattttaaatccaatatttctttgatgtaacggggtaacctggacattctaggatatttagcaacatccgtggactccattcactggatggtagcaacatccacagccccccaactccctacccccattgccacccagtaatgatcatcaaaaattatcacattttccctgggggag

SEQ ID NO: 215853 - DNA, 318 bp, Homo sapiens
tagagggaaaacaaagtgaaaagactgagaggtttccacaatccctgtgttttcaaaggtcaacaagaatgccagtgttggagttgagagaaaaaggagaacatttgaaaatgaggctttccatctgggattctcaaatgctattttaaatccaatatttctttgatgtaasggggtaacctggacattctaggatatttagcaacatccgtggactccattcactggatggtagcaacatccacagccccccaactccctacccccattgccacccagtaatgatcatcaaaaattatcacattttccctgggggag

SEQ ID NO: 215854 - DNA, 478 bp, Homo sapiens
ctgcttttgtgttgagaataggctacaggataacaagacagaaatagcacagtaatccaagcaggagataaaagttgttcagatctgtacgacagaagtggaagtgatgagaagtggtcacattctggaaggtcaccagatttcccagcatattgtaatgggtgtgagaaaaagatagcaatcaaggataattccaatgttttgggaacattagacttgctatgaactgagatacagaaggctaaaattggaatgggctctgagagaaagaaaaaaggaaaaaacagtcattaagactaaaaaggtgttgacacggatgtgtttaaaagggaacacttccacactgctggtgggaatgtaaactaggacagttactatggaaaacagggcagaaattccttaaagaactaaaagtasaaataccgtttgatccagcaatcccaccactggttatccacccagaggaaagtaagtcatt

SEQ ID NO: 215855 - DNA, 566 bp, Homo sapiens
atttgttgaaactaattgcctaacatggcaactgcctgaggccaagataacaattgaggcaaacaagaggttgggcaaaaaggaagatgagaatgagatgttcctagtgggcttggaaaagcttcaatgtattactggggatctagaaggccccatgcatgtgcaaagctgtgcatgtrcccaggaaaacctagaaaggtcctaatctctaagcagaaagtaaaggctgaggcacagctttaaactgcttgaatgctaaaggcatgccctaatacatacagagctcctctgcaaagggtaggatacgttgtttgaagaaaaaatcaatttaagaaaatctctgtcctatcattagctgaccagtaaactaaccaagccatgacttcagtgctgttcatgacagaaaatagagactttgcagaattcatacagcaaagctgctacacgaagaggatcaaaaatatcagatgacaaaaacaacatccctggggaaggtagagaatctgatttccacaattattatattatagaatgtccagttttcaacaaggttataagacacaaag

SEQ ID NO: 215856 - DNA, 502 bp, Homo sapiens
atttttagtgcaatggaaaaaaaaaaagaatatacagcagtaaaacattttcgttcactgttaaatcaatcctatttaatcttaattcatttttttcaattgaatatatcttagtgtataattgtcaatttattaacaaaaaatctatcaaaagtattttaatgtatgttattaattttattgaaaacgacttactttaaatatatttttatttgatagattttcacacatataaaattttaattttctgccttacagccctttaaaaacatggaatgggattgcctattttagagggatagtctaagtgacatattaattcattaatttggcctccccaagacttcacaactatatcaattctgaattaggttacttcacaatgggaataattgctcattccacaatcatttattgcatatatactrtgtactctgtactaggtactgggatggtaataaaacatccagtatctataaagcactttctatgtgctaaacac

SEQ ID NO: 215857 - DNA, 585 bp, Homo sapiens
caatcatgaaagctgcaaagtccgcgagctctgggagcccaatctattggtaatccaacagagaaacaggtggtgagaatgtggaggtcaaaagggcacatagcattaagcacatgatttacagctgtgrtggtttagcatttgctctgctacttgagataatggagagcaggttcttttaactcaagacacagtcaatcctgggagagcaaagagcggggagccagcaagtctagacacattccagaactacgagccctggattctatccaagccgcaagggattttatgccctgggcttagattatggtgtgtcagggtagccttccaactgtttagcgcagagcttggtgttccagaggccacaagggattttagaccctggaccccggacatgttccaagactcttttatattatgtcgacacgcaagccctgcctcagcttctccaaacactccacttttcccaacagttgaaactttctacaatgtatacatgaatcaaaatataatgttttaccttataaatacacacagttattatctgtcaaatacagataaataaataaataaaataaaaagctt

SEQ ID NO: 215858 - DNA, 541 bp, Homo sapiens
catgtgattttgccgtgttggccaggctgatctcagctattcctgacctcaagtgatccgcccgcctcagcctcccaaagagctgggattacaggtatgagccaccacgcctggcctgcgttttttacacattgaaggtttaktgcaaccctgtgttgagcaattctatcagcaccatttttttttccgccagcgtgtggtcactttgtgtctctttgtcacattttggtaattctcacaatatttcaaactttttcattattattttatctgtatgttggcctgtgatcagcaattttaatgctactgttgtaattgttttggggaaccatgaactgtacccatataagacagcaaacttagtaaatgtgtgagttctgactgctccaccaactggccatttcctcagctctctccctcactttaggcctccctattccctgacacacaccaataataaaattaggccaatgaataaccatacaatataggctctaagggttcaagtgaaagaaaaagtcacacatacctcactttaaat

SEQ ID NO: 215859 - DNA, 509 bp, Homo sapiens
tcttttaatacatagatgaaataatccagttgaagtacttgaagcataatgtgggtggaagatagaacacagagttggtagaccacactagctagaagatcagggccatgattccaagacttgcaatgaaaacataagctaacttaaattcctgcaccctactgatgtatgtagtaagatttacctagaagatctgcaggtattagcaggcctgaaatttttaagtgaatgtagatggataaactgacattttttaagttgaattattattcttacascatgtcccgctgaagaccatttgtaaggttttcatgtgctggctcattacaaatttaatgatgtgaagaaaatgtatttagcatctgatgatttttctcagtttgaagagagagaagatgttgtgaaataatattagtgaatggcatctcaagtttgctagataaaaatagtaaagttcctgcaaatcttgagcgtacctttgaggtttttgattattaattcagagttca

SEQ ID NO: 215860 - DNA, 513 bp, Homo sapiens
tacaggctgaagaagagggaaaggaggtgggaaccaccacagggttcttttcccaccctttgtctaattttcacttgctttttggatccagaatttgtctctcttctcttaactaaatatgggtatatgaattcaacttcatgagaatttttgttttattgccccaaacttacattatttgtgtgcttattggtattttattttaaatatctgaatgctgcttttggtcctctaattattctttgtaacaaactacaaactatggctttctgtaccttgtcttgacttcatggctgcataagcttagagaggaaatgtttttctatgaacayattaaattcaataatgtttacattttctcttcttgtatggatttcatttcttccagtttgttttcactattttttcattttgtgcctttgttttgtaataaagatattcttgagctatcaggtgatcatcgactatcccttcatatgtaagaaagaagcatgaaaaaaatttgtgagcata

SEQ ID NO: 215861 - DNA, 499 bp, Homo sapiens
gttatcacactttctctcatgcttttctctcagacgtcagcatttccgttctttccttcctccctcccttcctccctcccttcctcccttcctttcctcccttcccttcctctcttccctccgtcccttcctcccttcctcctttcctcctttcctcctttcgtcttgctctgtcgcccaggctggagtgcagtggcgcggtcttggctcactgcaacttccgcctcccggtttgaagtgattctcctgcctcaggctgtgagtagctgagactacaggcgcacgccgccacgcccggctaattttgtgtgtttttagtagagacagggtttcaccatattggccaggctrgtctggaactcctgattttgtgatctgcccgccttggccttccaaagtgctgggattacaggcgtgagccaccgcgcccaggccccatttcccgtacatttatctccctttactgctttctttgtggtgtcttcagattcaccgttga

SEQ ID NO: 215862 - DNA, 471 bp, Homo sapiens
atgggaagctcactgaattctgattctttttaactgtacaaactctaggtgtaatgggaaaaaaagtcaaaattaacactgagttaccaccttgggaagtcaggagccctcacccaattcttacatcagagtcattgcatagcctccacccatctttttgagtgaatggaaatgtgggtacttctgaaaaagactcttgtggaaacatcattagtttttattatagattttcctcctatcttttccttaagacaccaagagccttttgtgagagtcagcgtgcccgctgatatttggagggtgttgaccactggctctgagatgaygctggtacttgggggtacataacaccattgttgtcttccaggcagggttgtgtcttacaggcatcagttgacaagtggagctttgtcccaactctatctcacagccagcccaggggctcacgacacagttgtgggtttttgtttc

SEQ ID NO: 215863 - DNA, 442 bp, Homo sapiens
gaattctcctaccaccaagtttacagcttataaaggctaaacaaaacagaataaaatattaataactatggttaagtgtaaggaacggaaggagcagatttctgtgagacaaaaaaatagtatgtgggagtctaggtcagaatgggaggccagggcgtgcctatctaaaaacaaaaatgtcttaaagtgtgacctaagctatgaatataagttagctgcagaattgtgaaagaattgttaaggactatataggaaatggttttacttccactttctcctgaaacagctctctctgtatctgtctctgtcacacacacacacacacacacacacacacacacacacacgaaacattgaatgggattgcarcagacttctgagagttggaaagtagatgaacaagaggttttaataaagcaagtaagagagccaagaaacaagc

SEQ ID NO: 215864 - DNA, 624 bp, Homo sapiens
atgaattgctatttcattctgcaattttcaagggctcacaaactaagatgctgaagaaaagtggaggtgctgacttctgcaaagggcatcaaatcaaaatcagattgtaaactcaaaatgaaaattagattgtaaaattcagtttggagacaagaaataaagaattttaaatgacggcacaggtgaaaaacaaaagtattggaaggaaaatatcaatgtgatacatttttaaatatgctagtcaggaggacccatacgaaaggctcycaacatgattgttctttgtttctatatgtttcagtaactggtactgatgaagcacaatcaaattccaaaaaaatgggatataagaggaattgtatttatatgtccagtttagcattagctgtaatcagcgaaacattgataatgagattaaaaggatcttagacagaagatctaaactgttcttgattaataacaagtaaaatgaagcccaaaaactgccttgtctaaggtgaccacaaccagttctggcagaactgactgaaaattcacccttagtccagtcctctttcctctatatctcatctgtattccttgaggccacctctaatagtagatcaaggaattttaaaatatttg

SEQ ID NO: 215865 - DNA, 624 bp, Homo sapiens
atgaattgctatttcattctgcaattttcaagggctcacaaactaagatgctgaagaaaagtggaggtgctgacttctgcaaagggcatcaaatcaaaatcagattgtaaactcaaaatgaaaattagattgtaaaattcagtttggagacaagaaataaagaattttaaatgacggcacaggtgaaaaacaaaagtattggaaggaaaatatcaatgtgatacatttttaaatatgctagtcaggaggacccatacgaaaggctctyaacatgattgttctttgtttctatatgtttcagtaactggtactgatgaagcacaatcaaattccaaaaaaatgggatataagaggaattgtatttatatgtccagtttagcattagctgtaatcagcgaaacattgataatgagattaaaaggatcttagacagaagatctaaactgttcttgattaataacaagtaaaatgaagcccaaaaactgccttgtctaaggtgaccacaaccagttctggcagaactgactgaaaattcacccttagtccagtcctctttcctctatatctcatctgtattccttgaggccacctctaatagtagatcaaggaattttaaaatatttg

SEQ ID NO: 215866 - DNA, 514 bp, Homo sapiens
attcatttattcaacacatttttattgagcatctgctatctctgtgccagacattgttctgtgtcccagaatatggtggcaacaagacaaagttcctgccatcatggagcttacttttttagaakagactttatttttcagaggagttttaggttcacatcaaaattgaacaagagatacagatattttctatttacccccattcccactcacgcatagcctccttcattatcaacatccaccagtaaagtggtatatttgttaccattgaggaatgtaatttgacacaaaattattacccaaagtccataatttacataagggctcactcttgatgttgtacattctgtggatttggacaaatatataatgacatgtgataccattattgtatcagagtgtggtttcactgccctaaacattctcttggagattacttttattgaggtacaaaagcagtgagataggtagaagggtagtttagacagagagatggaaaaatagatatagaaag

SEQ ID NO: 215867 - DNA, 514 bp, Homo sapiens
attcatttattcaacacatttttattgagcatctgctatctctgtgccagacattgttctgtgtcccagaatatggtggcaacaagacaaagttcctgccatcatggagcttacttttttagaatagactttatttttyagaggagttttaggttcacatcaaaattgaacaagagatacagatattttctatttacccccattcccactcacgcatagcctccttcattatcaacatccaccagtaaagtggtatatttgttaccattgaggaatgtaatttgacacaaaattattacccaaagtccataatttacataagggctcactcttgatgttgtacattctgtggatttggacaaatatataatgacatgtgataccattattgtatcagagtgtggtttcactgccctaaacattctcttggagattacttttattgaggtacaaaagcagtgagataggtagaagggtagtttagacagagagatggaaaaatagatatagaaag

SEQ ID NO: 215868 - DNA, 514 bp, Homo sapiens
attcatttattcaacacatttttattgagcatctgctatctctgtgccagacattgttctgtgtcccagaatatggtggcaacaagacaaagttcctgccatcatggagcttacttttttagaatagactttatttttcagaggagttttaggttcacatcaaaattgaacaagagatacagatattttctatttacccccattcccactcacgcatagcctccttcattatcaacatccaccagtaaagtggtatatttgttaccattgaggaatgtaatttgacacaaaattattacccaaagtccataatttacataagggctcactcttgatgttgtacattctgtggatttggacaaatatataatgacmtgtgataccattattgtatcagagtgtggtttcactgccctaaacattctcttggagattacttttattgaggtacaaaagcagtgagataggtagaagggtagtttagacagagagatggaaaaatagatatagaaag

SEQ ID NO: 215869 - DNA, 408 bp, Homo sapiens
agcatttttaatatatttaggaacttatttatgacatatataacttaggtagctcaacagaccaaaattccatcaagtgaagagataagcatgcattacatggcttctttatttaattacaaaatacaaaagcccattagcagaatagcctgttggcctggagagagaatgctggcctgccatgtggtagacctgcagttttctcccctgctctggcttgccaagttggcgggggcttggagaggagtcactgtgtacagagtcaacatcaagaaggaaatgtgtaatgatgctgaactctgaccacttcattgtcttcacattagggaaataaacattaaattcctacaaaatatgattataaaaggccttttrtaagtgttttatttataatttgaatttgaacca

SEQ ID NO: 215870 - DNA, 421 bp, Homo sapiens
ttcccaagttccaagatgtggatatattctggggagccatcgttcagccaactacatggaccaagatcaaggccacctgggcatagtggcacatgcctgtaatcccaacaacttggaaggctgaggtgggagaatcacttgagtccaggagtttgaggccagcctggataacacagtgagataccatctctacaaaaaaattagccaggcatggtcacgcatgcctgtggtcccagctacctggaaggctgaggtgggaggattgcttgagcctaggagatagaggctgcagtgagctatgatcataccactgcattccagcctgggtgataaagcgagaccckgtgtccaaaaaaaaaaaaaagaaaaagaaaaagaaaaacaaacaaacaaaaaaatcaaagccaaattactagaactt

SEQ ID NO: 215871 - DNA, 547 bp, Homo sapiens
aatggcagtattgctgctgtttttctacctttgcattactttgatccttaasatgtttaataactcagcaacaccattctctacctttactttctcaagtggacatatttctctctctctccctctatccctttgttcctccctccctctcttcctcacaaaatcccttcattcttctttctctttttttttctttctttcctctctctcattctcgttaccttcttccctctgtcactccctctccccctgcccctgttctcctctctgctctctctccctctcctatcttcctccctctttcttcctcccaccctcctatcttccctctttctttctccctctctttctctttccactctctctttcttccacccatgtatatagccttactaatataaattatgtccatctcatactcacaaagcttacaatgacagccttcctaaattgaagccatgaccatcatagaacttctcctaaaatccttcttcatgtgcccagggtcaccctggcataaaccttcactagaagctaaccatggaca

SEQ ID NO: 215872 - DNA, 227 bp, Homo sapiens
tactttcttaataaacttactttcgctttactctatggattcatgtgaattctttcttgtgtgaaattcaagaaccctctcttaggggtctagatcaggacccctttccrgtaataccatgaatttgatattagactgccaggtgattttttttttttcataaacttcagtcttttgaaacaaaacgttcccaaactatgaattagacagtgtcctttatattattg

SEQ ID NO: 215873 - DNA, 574 bp, Homo sapiens
tgacatcattctattcatgttgtctcacactgttgctggaagaattcagtgctgtccttctgactctgctggaagacaaggactggaaactcttgtctgggctctcctgaactttgccatatgtaycttttacctttgcaaatttgtgaaacatttaactatatttatttattttgcaatactatcatgaagttctacattcaattatttttgaaaaattcttttttttctagcttaattgtggtataattaacaaagttgtgtaattttttttttttgagacagggtctggttctgtcacccaggctagagtgcagtggcgcaatcttggttcactgcaacctccacctcccgggctcaagtgatcttcccaccttagcctctcaagtaactggggctacaggtgcaagccaccatgcctggctggctaatttttatattttttcttgagacaaggttttgccatgttgcccatgctagtctcaaacacctgggctcaaggaatccacctgcctcagcctcctaaggtgtataaatttaaggtgtgtgatgtgatgatttgatatattctaac

SEQ ID NO: 215874 - DNA, 574 bp, Homo sapiens
tgacatcattctattcatgttgtctcacactgttgctggaagaattcagtgctgtccttctgactctgctggaagacaaggactggaaactcttgtctgggctctcctgaactttgccatatgtaccttttacctttgcaaatttgtgaaacatttaactatatttatttattttgcaatactatcatgaagttctacattcaattatttttgaaaaattcttttttttctagcttaattgtggtataattaacaaagttgtgtaattttttttttttgagacagggtctggttctgtcacccaggctagagtgcagtggcgcaatcttggttcactgcaacctccacctcccgggctcaagtgatcttcccaccttagcctctcaagtaactggggctacaggtgcaagccaccatgccyggctggctaatttttatattttttcttgagacaaggttttgccatgttgcccatgctagtctcaaacacctgggctcaaggaatccacctgcctcagcctcctaaggtgtataaatttaaggtgtgtgatgtgatgatttgatatattctaac

SEQ ID NO: 215875 - DNA, 525 bp, Homo sapiens
  misc_feature (1)...(525): n = A,T,C or G
cacaggctcactgtgcactggttactaacttatctaagtctgggaagacagaactcccacacacctaagtcacatggatcaggtttgctacttgcagatagcaaaggamaacagaagcctaggtcttaggggcagttggtcccctatggctcaggaaagctgctcagggtggatgcagtctcttctgcatgtgccctaatttgcactacatgtgagggacccaagaatgcagcccaccctgggttttataccctggggtacaggagccactgggttaaagtggtcaaggaggtcctgtttctacagggaactggaacagagtccaggctgttctagtcagttcctgttgcattcctaacacatcttacagttattcttgttgaaaagtacaagtgagaaagtggggagaaccaggttggcccaaggcactgagagaactttcctgcactcttctcctcctgggccatcctcaggaataatatccaacctggaagacagcctgctgttgggaattnaacagcaagg

SEQ ID NO: 215876 - DNA, 525 bp, Homo sapiens
  misc_feature (1)...(525): n = A,T,C or G
cacaggctcactgtgcactggttactaacttatctaagtctgggaagacagaactcccacacacctaagtcacatggatcaggtttgctacttgcagatagcaaaggacaacagaagcctaggtcttaggggcagttggtcccctatggctcaggaaagctgctcagggtggatgcagtctcttctgcatgtgccctaatttgcactacatgtgagggacccaagaatgcagcccaccctgggtttyataccctggggtacaggagccactgggttaaagtggtcaaggaggtcctgtttctacagggaactggaacagagtccaggctgttctagtcagttcctgttgcattcctaacacatcttacagttattcttgttgaaaagtacaagtgagaaagtggggagaaccaggttggcccaaggcactgagagaactttcctgcactcttctcctcctgggccatcctcaggaataatatccaacctggaagacagcctgctgttgggaattnaacagcaagg

SEQ ID NO: 215877 - DNA, 573 bp, Homo sapiens
actttttgcatgcttccttaattagagagaaaatgatgagaattgacatagctgttggaaatattaaatgcaatgtgtataattttctttcatctgagagtcgagactttatttaaaaattgcctttccctagaaaataattgtatatgttaatsaacaagaagtaattactgtgtctaattatagctggtggagtacctaaaaacaaaacaaaacaaaccagtaggtagtggatcaataaatgtgacatataaaggaaaattcccttctataagcatcaaaaaatgatagaggagaacaaagaaaaattaaacaaattaaattaaattaagcaatttcatatgttttaaaatggtggcgaaggaaactcatttcctccatgaaaaaattaaaattttaggtaagactagaagaattcagtataactcctttcccctcaattattgtttttattgccttgctgtggctcattaaatctttatgtattatttgtagaaatgtaaggggtagaatatacaactgcagtttcgttacatggatagactgcacagtggtgaagtctgagcttttaga

SEQ ID NO: 215878 - DNA, 501 bp, Homo sapiens
gtttcacttaccagctctgtgcctctttcatatctacatcatggatgcacttccactagcttcactctcatatctccaaccacatacctgtgatgccttcctggatatacacagacactcaaagtcagcaaggttacaacacactcagcatgtctctgcctaagtggttcgtccacctgcatttcttcctttcatgtgctgtaccaatcactcacamtggaaaatctgattatcaaccttatcttcttttccctttaagccaggggtcctcaaaccccgggccatggaatggtactggtctgtgtcctgttaggaaccgtgccacatagcaggaggtgagcgacaggctagcgagcgaagcttcatctgtatttacagcctcttcccatcactcgcattaccacctgagctctgcctcctgtcagatcagcagtggcattagattctcatgggagcacaaaccctattgtgaactgagcgtgtgagggatctagactgtgt

SEQ ID NO: 215879 - DNA, 439 bp, Homo sapiens
atagcagcacatttttaaatgtatacctattatgtgggggttcacaccagaaataaagaataattcattataaaacagaaatatattaatttcattttgcagataaagaattcatagagaaaaaaattataaatatcatcatagaacatgaaaagacacatcgatttgttattttcaaatagaaaacaaattggaaaaacattttaatattrtatatgcacgtttatagagacagaaatgagaattgtgtttagtggtaaaaacatagaaattcttgcaacatcacaactttttgaaagatgttccccaccacaccatgaagagtattatggaagttgtactcaaagcaatttgacacaagaaacatgagaaatagaaaattggaaagcagatgacaaatagataattacatatattttgcataaatgaaaatgttata

SEQ ID NO: 215880 - DNA, 281 bp, Homo sapiens
tgaatctcttctttctgcaagccctttaaaaggagtcactgatttttagaaagggcgggtgcagcttgtggagctggagggaagttcctaaacaggagtggctctagttcacaggcttgtagagtccataattcccctcaaggctgtggaatttgtgatgtatatgcctggtgtgagctcagtgagacccagataacacacattgtcacccctggtcacactctacctggcctttttttktttttttatggctctggtgtgttgggagactaaagtacacc

SEQ ID NO: 215881 - DNA, 269 bp, Homo sapiens
tagttccgaaaaactttcaataaataaagctggacactgaaagatttggtctgaaaatgtccttgtccattaatggtaaatattgtattttcttagtggccatttkaaaatttacaatcagatgatcattattttcagatgtagtattaacacgatcaaaatagcatcattagattttccttcatgttgtgattttcacaataaaattctcaaacactaacctgggggtcattctaaaatatttttaatatgatctgaagttccaggtg

SEQ ID NO: 215882 - DNA, 491 bp, Homo sapiens
atgtggagagcaaatcatctttggttctgatatttgttgggtcatttaagacaagggccaggactggaaagcactggagagggtaacctgtaagttagtgaaaggctggctgtatttatcttcactcacacaaaattttaatgcagagggctctcaaaagacagctttctccatacggatttgttgactcaggggattmttctgcctcttaaatgggtgttcctactatttgatcagctggatgagttctcttcaccatattattaaaatgtggcaatggtcttcaagtcagttatgctctgtcgaattctccacactaacactgaaatgaacattgacaaaatgcagaaggggtactctcaaggcaaacttctcaggatagagcattgtcaatctctgtctctcttttctctctctctctctatatatatatgtgtgtgtgtgtgtgtgtgtgtgcacgcgcgcgcacgtgtgtgtatgcaaacatattt

SEQ ID NO: 215883 - DNA, 418 bp, Homo sapiens
catgacttgagctaagtcaatcagagaattccatctttctagcttcaataatttgctcagaaatgtgcatgagatttaaattggtccaattagagtgagacttgagacttttgctgagaatgctggaacaaagatgctttctttcaaatagggtgaaaagaaagaagcatgtagccttggagccactggcagctaccttgggagcatggggcatgggggaagtccctttaagataaaacacatatggcaaaaggtaaaatagagagccaaacagaaagcagtcccctcragagtttactgagctttgcctgaatccagcctcatctctacatattgcagttatataagccagtaagtcagtacttttaaatcagtttctactacttacaattgaaagcattccaaatgactccatcca

SEQ ID NO: 215884 - DNA, 555 bp, Homo sapiens
ttagtcttttagtgagcctgtgcctctaggttgtgaacttcacaagtgactctcagtttccccccatattagatgggacagggtggatagaagttgctggagttaggtatttccctttcsccagtttggttagtctgtctaaacccctgataggttaggatctggtaaaataatttctcttgagggcaagccttgttaaagagaacagaatgctctggcatacttcaagatggccactttttctccatccccctgccagaaccatgaggagatgttcactgtgagaacatagtagagctccaggcagtaagactcgaaaaagtctgaggagcctcctagagtttttaattcacagatttgtccacactgagcttttagtaattaatcaattacagttcaggttttcctatcccagcattggtttctataaaggtttctgcttgtgggtttctacttcggtaagttgtcattctcttatctgtctgtctgtttccccggttttaagggcaatggtttaccctgtaacctcacttcctgacagatctaaaaagaatt

SEQ ID NO: 215885 - DNA, 516 bp, Homo sapiens
ataggatagatgcatatataaagaggagtttattaaggagtgttgactcgyggaatcacaaggtacggtccaatagtaggctgtctgcaagctgaggagcaaggaagccagtccgagtcccaaagctgaagaacttggagtctgatgtttgagcacagaaagcatccagcataggagaaagatgtaagctgcaggctaagccagtctagtcttttcagtttcttctgcctaattttattctggccacactggcagctgattagatggtgcccacccagattaagggtgggtctgcctttcccagttcactgactcaaatgttaatctcctttggcaacaccctcacagacacacccagggacaatatcttgcatacttcaatccaatcaagttgacactcaattaaccattacatttcactactcctattcaaaatagtattggaagttctggccagggaaatcaggcaagataaagaaataaagggtattcaaataggaagagaacaagtcaaat

SEQ ID NO: 215886 - DNA, 578 bp, Homo sapiens
ttacatccatacattcagagtaaaggcatggaggaaaatcttccaagcaaatgcaaatcagataaaagccagatttgcaatcctaatttcagacaaaacagattttaaaccacaaagatcaaaaaagacaaaagaggtcatgacaataatggtaaagagtgcaattcaacaagaagacctaactatcctaaatatatatgtacccaaaacagaagcacccagattcataaaccaagttcttagagactcacgaagatacttagactcccacacaataatggtggagacatcaacaatccactgacagcattaggcagagacagaaaattagcaatgatactcaggacctgaactcaacattaaaccaaatggatctgatagatctctacagaattctccatcccaaaacaacagaatatrcattcttctcatcgtcacctgacacatactgtaaaatagaccaaataatcagatataaaagaatccttagcaaataggaaaaaactgaaatcataccaaacacactttcaaaccataatgcaataaaattagaaatcaagactaaaaaaatttatcaa

SEQ ID NO: 215887 - DNA, 537 bp, Homo sapiens
acttggaaaaaatattggacatgttttgcttctaaaaaatagaactaaggtgaacgagtgggggtttcatgaaggtaatttggggtccatatgaacaaaagtttttkaacacaatcattttaaaatagaaagggctgccttagggaagtaataaattttttaacattaaaaatgttctgacagaagctagctcaccagtagccagaaatatacctgaatattcatctgtagagtggagataattatccaaacggattgttatgaggtttaaatgagataatgcgtgtatggcagttagcatagtgattgacatattgcaaatatgtgcagtgaatgatgaatggtaattgttgatactaccactatcatgaccgcctccactactactgctatcactattatttttaatgaggattttagaattagttaagaagtggactatatgatttctctagttttgatgcaaatagaatgttagcttatgcctttaaagctctctttccatttaggaagtttaaaatacttagaaatgggaga

SEQ ID NO: 215888 - DNA, 574 bp, Homo sapiens
tatcttctatgatatcatctagaaactttgttttacctttgctgtgtagatttacaattcatttggaactgaattttgtgtgtggtgtgaggtagaaagtgaagcttttttgttatgttgatgaaaatagaaaatgtccagcttctctgtagagacatatttgccataaatcaaatgtccgtatgttgtgtcaatttctgtaccttctgttctattttattggtctatttatttttgtgttgctacttaatcattctaatcatggtaggtctataatttttaatatatgataatgygtttctattttgttgttattcaagtttgtattgcccattcttggccctttatgttttcataaaatttacctacttgtctatttctaccccaaaagggaaaacaattaagattttgatacaatctattacagcaaatatattgatcagttttaggaaattgccatcttaacagtattttcttccataccatgaactttagcatgtctttccatttgtttagatcatctttaaatcatctcatgatttagacttttctgtttagtaatcttgcacatctt

SEQ ID NO: 215889 - DNA, 574 bp, Homo sapiens
tatcttctatgatatcatctagaaactttgttttacctttgctgtgtagatttacaattcatttggaactgaattttgtgtgtggtgtgaggtagaaagtgaagcttttttgttatgttgatgaaaatagaaaatgtccagcttctctgtagagacatatttgccataaatcaaatgtccgtatgttgtgtcaatttctgtaccttctgttctattttattggtctatttatttttgtgttgctacttaatcattctaatcatggtaggtctataatttttaatatatgataatgtgtttctattttgttgttattcaagtttgtattgcccattcttggccctttatgttttcataaaatttacctacttgtctatttctaccccaaaagggaaaacaattaagattttgatacaatctattacagcaaatatattgatcarttttaggaaattgccatcttaacagtattttcttccataccatgaactttagcatgtctttccatttgtttagatcatctttaaatcatctcatgatttagacttttctgtttagtaatcttgcacatctt

SEQ ID NO: 215890 - DNA, 638 bp, Homo sapiens
tgtgtatctgttaatttatttgtcatcaaaagagcactttgcctaaaagaaaggactgacaagtgtgcaaaatgtttacaatcttttgtgaaattgtagtttatcattagtttgtatctgtaagttattgtaataaatattacctgtattttttgttatatacaactttatactttgaagcttgtatctgtgaatttgcaactgaaatttattttgccaatgttttctgaatgaactgaataaagcttctgttgtagcatgccatgcaaacacattattgtgtttgtggttgatgaattatggctgtaaataacactatagtttaataagcccaccattctgagtttattaaacattttccattcttgtgaaaatttcaaccagtttgtcctttttgtgtgttttcagcagtaagttgactttagtctctttaaaatctaacaactaataagtttaaaaagtattgtgttttgagctgcattgtatgaayacatttgagtaggaaacatattattcaaaaaaaaaaaacacagtaaaacatttaatttggcaaaaattgtcttttaggccagctaataaaatcaatgtgaaagagaaggcagaacacttttcagaatggacttcggagggtattacaa

SEQ ID NO: 215891 - DNA, 427 bp, Homo sapiens
taatattcataaaataacttgccaaaattttgattgggattgtgttgaatctatatatcaagttgagaagaactgaaatcttgacagtattgagtctttctatccatgtacrtggaatggctctccatttacatcttttatttttttcatcagtaatttggagttttcctcctatacatcttgtacatttttcttagatgtatacctaagtatataattgtttggtgttaatgtaaatagtattgtgtttttaatttcaaatttgtattgttcattgctggtatttaagaaaggatttgacttttctttgtttttattctttaaaattttaggtttttttttttcaacatgtctaactaggcacatcagtcaccagttctcctcagaagaaccaaagttataggtgaataattatggccagagtgga

SEQ ID NO: 215892 - DNA, 465 bp, Homo sapiens
tcataaatgacggggttaagatttgaactcatatatcctaacttcattttgtcagacagaaccttaaaagtaattttgttgaaacacctctgatattttccttttaaagacatttgtatttaaataatcttatccattgtaatttggcaccactccaaatatgcaggcagctgtgtatgatgccaaaattcatctcaagtttatatactaatcttcatttccattactgtcaccctcaagacattatctctcatctaaactactgcaaaagattgctaactagtctccctttgtctactcttacctttcctacttctttcttctctccttaacataaatcagatcatgtaatgmtactgctaaattctttcaatgatttcctatggcactgaaataaaattcaaattcctgaccatgacctacatgacctgattcttggcccaatctccagtgtcatcctacttt

SEQ ID NO: 215893 - DNA, 631 bp, Homo sapiens
gagagattgaccccaatacaatgctagctggagatattgtcaccccactttcagcattggacagatcatctagacagaaaatcaactaagaaacatcatactttatctccactatagacaaaacggacctaatagaggtttacagaacatttcatccagtggctgcagaatatatatttttctcagcacatggattatctcaaggatagaccatattttaggccactaaagaagtttttttttttttttttgagacagagtctcgctctgtctcccaggcaggagtgcagtggtatgatctcagctcactgcagcctctgtctcccaggttcaagcaattctcatgccttaccctcccgagtagctgggattacaggcaygcaccaccacgcctggctaatttttgtatttttagtagagacggggttttgctatgttggccaggctggtctcaaactcctgacctcaggtgatctacccacttcagcctcccaaagtgctggggtaacaggggtgagccactgtgcctggccccacaaaacaagtcttaaaattaaaaaaacaaaaaacattgaagtcaaatacagtatgttctctgacccaagaaaataaaactagaaatcagtaatga

SEQ ID NO: 215894 - DNA, 560 bp, Homo sapiens
tatattcaaagaaaacctcctggaaaaaagtctggccttgttttttgtttgtttgtttctgagcctgttaaaatcaattctcaataaccggacaaagaattcaagagaactttatgtactagttagctcttcctctggttgtaaatggaaatgaaatgtttaatgttttcctagtgcttcagtggtctaaggaaagccatctatctacaaaatatcacatgaacaaacagttcaggtatgggatggaagaaggagcacgagtaaggtcaagcactaaaacatggtggacgcagggctctagaatgctcaaagatctctcctctcatctccaacattaaccatgggagcaatamctggaaatcactatgtgaccttccccattcttgtagctgaaaatacttatgaaaatttgtctcaggaaatgtctagaacctactagcttccagtctttggaagttttggctaatatgtggattttaagtttggcagttgattttgaattttgacagtaagaaatgttttccaccatctttattaattgccaactccttgaaagccag

SEQ ID NO: 215895 - DNA, 542 bp, Homo sapiens
ccattcttgtagctgaaaatacttatgaaaatttgtctcaggaaatgtctagaacctactagcttccagtctttggaagttttggctaatatgtggattttaagtttggcagttgattttgaattttgacagtaagaaatgttttccaccatctttattaattgycaactccttgaaagccaggtacatcagcttgattcagtgtattgcatgttgacatgaatcatttcctttcagagacacttgtctgtgataacaaagaacaaggaaacttaaattgtgtttctcttcctcccctagctgttactatgggcaacatcacactttgtaaaatattcttcttaaatgatgccctgagccaaattctgaatgtgtagatttatttatttatttattcctattgtcttggctgccagaaaactggtgatttttacaatgcaaaccatttgtaaacacttcatttttagaaacatggaatctttttattattacaaggtactgagattcatcatctcagagtgggaaaaaaataatagttgtag

SEQ ID NO: 215896 - DNA, 622 bp, Homo sapiens
agctccccatttattccttcccccagctcctggcaaccatcatcctattgcctgctgctattagtttgactattgttaataccttatataaatggaatcatacagtttttgtctttcggaaactggactgtttcatttagcctaaggttttccaggttcatctatgttgttacaaatgttagaatttccttattttcttaaggctgaataataagtcttggcatattattttacaaagttatcactctaatttatactcctactagcattgtgaaaaagccactatcaccaaatgctgccaatattgattattactgtttgggtaattctactgttgaagaactatgctattttaatttcccgattattattaggtaaacttgggttatttataacttctggccatttatctgtgtctgtgtgtgtatttctgtaaattgtctcttcatgccatttgttcattgttttctgtgggttagattgttttttcttattgttaataacaggctttttatkaatcaccttatgtgcaattttttatttttaatttttaaaatgagtttaccatgtagaaattcccaattaccctgatttgactaatcactctcctaatcactctcca

SEQ ID NO: 215897 - DNA, 420 bp, Homo sapiens
agatctccatgctgctttccacagtggctgaactaatttacattctcaccaccagcattccctttcctccagatccccattgccagcatctgttttgttttgttttgtttttgttttaactttttaataataataattctgactggtgtgagatagtatctcattgtggtttgaatttgcatttctctaacgattagagtattagtctgttctcacattgcttaaagaaatactgaagactgggtaatttataaagaaaagaggtttagttggctcacagttctgcaggctgtacaagragcgtgaatgctggcacctgcttcacttctgagaggcctcagcaaactttcaaccatggcggaaggtgaaaggagagcacacacatcacacggccagagtaggagcaagagagagacagaa

SEQ ID NO: 215898 - DNA, 465 bp, Homo sapiens
ctttatccatggccttccaaagaaattaaactctccaggttttgagccacacaaacaccccttttccatccctacagcagcacatatgcactgtcaatttattgttgattcagccatatgtctttctatccatgctagatagtcatttttttacaggtagagactgtcttttctatatccatttataagcatccaacacagagcttgacgtgtactgtactagacataaaagttatggtataaaagaataaatgaataaaccattagaaactaaattaagaaaactaaatkacattccaataacaagtataattagtaccaactttaaaatttgattgaatttttctgtattttggtattctcaaattcactttattttcaatttaaactcacttaacggagaggaattttaattcgtagaattgtaagtaaactcacctaggcttagagaagcaggccaagtgc

SEQ ID NO: 215899 - DNA, 547 bp, Homo sapiens
tatatgcatatacatttagatatacatgcacagataaaacaatgtaaaactattttgatgtatgtaaacacaaygaagagagcatctaacttagttcagtcaagatatggacagcaaagtattaccctgagaagtgatattttagctaagacctgaaaattgaaaagagttggtaaggtagatgaggacagagatgacagaaggcatcccaggtggaggaagcagcatttgaatatgtcaggctgcaggatgatttggttaccagtgggatggaagtacagtttatattaagggaatacttggaaaagaagaaagaaaaacaatttggaatggcctttagtgctatggcaaagtgtggggggttgttagcttttgtctttttctggtcagtgatagggacccaataaagaattttaagcaatgaaatgactttttagtttatacgttagaaatacaattatgtttgcttaggattgtttggctattggggctcttttattggttccatatgaattttacaatttttttaattctgtgaaaaatgaca

SEQ ID NO: 215900 - DNA, 566 bp, Homo sapiens
atagttcaatttggctatcatggagggtatggagagtgggatataagattggaaacctagttttacaccagattctggagagcctggaaggctgggctaaggagtttaacctttaggttctgtggtgtagtcaatggagatccattaccacagaggaatcttctatgtccaggcaaaggccaaaggtttaagggcctgaggctgtgtaatggaagaatgatccaggcatttggcatcacacaatctggttggagcccgagttctgaattttcatatacataaagcagtagaatatttgtattcaagagtttgccttagggctcacctagccagctaaataatctgaaaaacgaatacaacccaawgttgacaagtaataataagttgatatttcactctgtctgctactgtattaacttagccctgctggaaacaaacagacttttaccaaagacatgatggctaatgagcacatttccagaattctgatgctttaataaaggtgatccattaggatcacagcactgtagatggtattaacttattctgcacaagcacatatttca

SEQ ID NO: 215901 - DNA, 477 bp, Homo sapiens
caactggtcttaaatggtgagtctccttgacttctctaaagaatactattttccataagatttcacaagtttggtaatatttccaagtttgatgagaagttttattgtgagcagttctggaggctaatagtagataatgaagagctctgctgccatgtccatggaatacctgaaggctacaagagaacattaatagaccttcaagggtaaacagtggaaatggaaagtagaaaatgcttttagctgcttttctgatgctcctagcactagtgaaatcaatcttcaaagtgagatggaaacctaatggccagytcctttgatagcttctggttgtggctctggctctgtgtggctttattttttaaaacattaccaactcctgggataaaacagtttatttttcagtcccaggcacaattcagaactataaactgcttattagtaataatcaaacacctcattatttaaatggtaggc

SEQ ID NO: 215902 - DNA, 477 bp, Homo sapiens
caactggtcttaaatggtgagtctccttgacttctctaaagaatactattttccataagatttcacaagtttggtaatatttccaagtttgatgagaagttttattgtgagcagttctggaggctaatagtagataatgaagagctctgctgccatgtccatggaatacctgaaggctacaagagaacattaatagaccttcaagggtaaacagtggaaatggaaagtagaaaatgcttttagctgcttttctgatgctcctagcactagtgaaatcaatcttcaaagtgagatggaaacctaatggccagttcctttgatagcttctggttgtgsctctggctctgtgtggctttattttttaaaacattaccaactcctgggataaaacagtttatttttcagtcccaggcacaattcagaactataaactgcttattagtaataatcaaacacctcattatttaaatggtaggc

SEQ ID NO: 215903 - DNA, 573 bp, Homo sapiens
acctacttaaactaaggagcttttgcacagcaaaaaaactgtcaacagagaaaacagacaacatacagaaagagtgacaataattgcaaactatgcatctgacaaaggcctaatatccagagtctgcaaggaacttaaacaaatcaagaggaaataaataactctattataaagtaggcaaaagccataaatggacacttcctaaaagaagatacacaagcagccaacaaacatatgaaaaagagctcatcatcactaatcaacagagagatgcaaatcaaaaccacaatgatataccatctcataccagtcaggatggctattattagaaagtcagaataactgatgttgatgaggttatagagaaaagggaatgcatacactgtgggtggtaatgtaaaytaaattagcccctgtgcaaagcaatttgaagatttctcaaagaactaaaaatagaattaccatttgacccagcagtcccattactgggtattacacaaaggaaaataaattgttcttccaaaaagacacttgtttattgcaagtttatcacataagtattcacaatagcaa

SEQ ID NO: 215904 - DNA, 573 bp, Homo sapiens
acctacttaaactaaggagcttttgcacagcaaaaaaactgtcaacagagaaaacagacaacatacagaaagagtgacaataattgcaaactatgcatctgacaaaggcctaatatccagagtctgcaaggaacttaaacaaatcaagaggaaataaataactctattataaagtaggcaaaagccataaatggacacttcctaaaagaagatacacaagcagccaacaaacatatgaaaaagagctcatcatcactaatcaacagagagatgcaaatcaaaaccacaatgatataccatctcataccagtcaggatggctattattagaaagtcagaataactgatgttgatgaggttatagagaaaagggaatgcatacactgtgggtggtaatgtaaattaaattagcccctgtgcaaagcaatttgaagayttctcaaagaactaaaaatagaattaccatttgacccagcagtcccattactgggtattacacaaaggaaaataaattgttcttccaaaaagacacttgtttattgcaagtttatcacataagtattcacaatagcaa

SEQ ID NO: 215905 - DNA, 497 bp, Homo sapiens
actcagctaaccttgacatgccttttccaatggccacactgaacaatctattgtggtttgcaatcttggaattcyttaaatttggtagaaaagagctaaatgggaagagaaacatcaatagagagaataaggagaaagagtattttgtgtatgctgtgttttctggaaaatttagtcaaatgcttctattaactgaaaatattcccatagtttgactataattttggaaaactgctttttttcttagggtactttttaattaagaagatgctttctgtgtttccttaagaaaacaagggtgagaaaggtggctaattctaacactactagctgtgttctaatagatgaagagtcagaatcatttattcacttatgaaatcatgcattattttacactaactcaatcaaaatattattacaagagctcctgagaaatgtctcagtagctcaatctatacaaaatggaaagtaaaaatacgtgtgtcatagggttaagg

SEQ ID NO: 215906 - DNA, 507 bp, Homo sapiens
tactttgaggaataaaggtgtctttggagagagaacttcaagtgcaaattaacttgaaataatttaacctgagtgtggaataatttgcagtctttcttctgtgcagctgtgggaattgcttctgtaggcccagttggggaagttgcctggctacttgcaattttgtcacatctgtcagctgtagctaaatggcaaatatagtaagaggtaacattacatagatttgggacattccctagagggtcttgtctccttgcagcagtgaataaattatatgaaagctgaaatgaaataccgtattgtatttgccaactcatgcaatttgaaagaatgaaaaaaaaaacttcactgcttagattcactatttaaattctccacaaccaacaagctcctwtctaccacgaccatattttctgatccaaaaatcagacctgtgttatctgtggcaggttgtattcttttctgatctgtaaatttttatgaaactattttacaaagaaataatcg

SEQ ID NO: 215907 - DNA, 507 bp, Homo sapiens
tactttgaggaataaaggtgtctttggagagagaacttcaagtgcaaattaacttgaaataatttaacctgagtgtggaataatttgcagtctttcttctgtgcagctgtgggaattgcttctgtaggcccagttggggaagttgcctggctacttgcaattttgtcacatctgtcagctgtagctaaatggcaaatatagtaagaggtaacattacatagatttgggacattccctagagggtcttgtctccttgcagcagtgaataaattatatgaaagctgaaatgaaataccgtattgtatttgccaactcatgcaatttgaaagaatgaaaaaaaaaacttcactgcttagattcactatttaaattctccacaaccaacaagctcctttctaccacgaycatattttctgatccaaaaatcagacctgtgttatctgtggcaggttgtattcttttctgatctgtaaatttttatgaaactattttacaaagaaataatcg

SEQ ID NO: 215908 - DNA, 648 bp, Homo sapiens
ctcatatttgtcttgatactcattcaagaaatatttactccatattaaatatcatacaaaatactatgtagcacataaaattgtgtatgtaagtcatcagtagcatgaggaagtttttagttgtaaaatatgaaaccayataaaagcatgaaaaattattacagagttaaaaataaataagaattgttttgtgaagacgtctgggcatgagttaagccttacagagttaatgggtagttgacagtctgagtaaagtggagaggttattccaggtatggaaaatgtaatgcaatgaggttttggaggattttaggccaaagacaggttggccaatggcaaataatcaattaaatttaaacatgggaaaacattaagttatatattaaaacaatgagaattataatatttacttggagctcatatgttgaaagaaccataaatcttacattagggaaagtcatcaaaatcgttattaaattcaaggagatagcaatcaatttggcctggccaaattcaaagatattgaatccattgccactatttaaaggtttgatattctccacagaattcctatttccagtcttcttgagcttctaattgaaactataatagtggatccatattctctcatggccataatcagttaga

SEQ ID NO: 215909 - DNA, 578 bp, Homo sapiens
ccctaagatttgaaatttacagctatcgcaagaaatctcagtctcctaggggactctttacttatatttccaaaggctgaatatttatctgtagataagcagagtttcaggattttataccctaaaaattccagtcttacgttattcgatttcttgcggttttcatgacataaggaattctaaagcagaggctactagtgtgggaattcctttgtctctggcatatctgtagcttctggaatataagttttgtttctcttgaaaagaaaatgagcacatgtaagatgtactgtatcttaagattcagagcagaactcagaataaatatagtgtatgcctaaaaggatgagtgaaaagaaaggagggaattatcaactgtgggtatatttctttgactcaaactgcacttttagaggtatttytgaaagaaaaatacatgacacattttaggttttgaactcacttaaacacacacacagacactcctatctttaattaatctccaactcttccagttattactcatttgtcactgatttccttattatgtaaatgcttggccatgagtggcttagatc

SEQ ID NO: 215910 - DNA, 460 bp, Homo sapiens
ctcaacttctctaacctgaagaggatcctggcttctctccctactcatgygttattaatcttcaaaatacccagcttaaagcctagagttaaagctagctaagcaaatattttatgtattgcagataaaatgtagagagaaggtttatattttaataatgttaaacttttataattattcctttaattcatgtagaattacttgtcataaatcagtaacaactttataattataggtatttaaaaatataattagtttttaaaaaatataaaatggattttgttcatgcttttcaaaggtttgagaaagtttccatatgtttgtaaaacaaaataaccatcaatgagtagaaagcataattatttattgcttgctttttaatatatttgccaaaagaacaacatctctgcacaaagaacttctaataaaatgaatagaaaattagcaacttgagagaaca

SEQ ID NO: 215911 - DNA, 475 bp, Homo sapiens
gagagaaggtttatattttaataatgttaaacttttataattattcctttaattcatgtagaattacttgtcataaatcagtaacaactttataattataggtatttaaaaatataattagtttttaaaaaatataaaatggattttgttcatgcttttcaaaggtttgagaaagtttccatatgtttgtaaaacaaaataaccatcaatgagtagaaagcataattatttattgcttgctttttaatatatttgccaaaagaacaacatctctgcacaaagaacttctaataaaatgaatagaaaattagcaacttgagagaacaaagtacaagtcaacataaaattgtatgaccttgaaaataaatcacttaatctttcaggaattaggtkttctctgctgtaacatgtaaatttttgagtagattatctttaaattccatcctagctctgaattgctatgacattattttct

SEQ ID NO: 215912 - DNA, 431 bp, Homo sapiens
aaggaggagtgccatgatatttacagaaaacttcttttaatgatttgggaaagtgtgtgggtgtgtgtacatgcatgtgcatgtatgtttctgtgtataaacagcaattgtgggaagaaatcaatagttcatgaacataaggagaagtaaacaggggtacactgtacattcawtgttttttggggtttcagaaaattcaatttaaaaatatcagaacatattattcctctgccccaaaccttgtaccagaatcccattttattcgcaaccaaagccagtcattatgatgacctacattatctggttcttcataacgtctctaaccactgtgtgtgcaattcttcccttgtggttactttcctccagtcacatcagcttttttactgtttctcaaacataccaagcatgtgtctgcactgcctgttccctta

SEQ ID NO: 215913 - DNA, 467 bp, Homo sapiens
agagttatataggatttcagtataaatgtgattggcagcagagtatttatgaaataagaatagaaattgttgatcataacaaacatataatctcaatggatttgaagacatgacaagtcttcagaggctgctttagagaatggattgaaggtagcaactagcaaatctagtaaatgcatatgtttgtgagtgtttaaaataggttgtcttaaaattggtgtcaaagaatagcactaagaactgcataacatttcactcaaaaatgtgaaatgsacaaaactttttacccatttcaggctaccgatcttccattacaattgtccaaaagtgagctacctttggagaatacatattcaacagtccgacttgatgctaagggagtcaaataaacaagatattggaggtaaaggagtcctatcacaattttcactctatctcagggaactttgataaaaaatagtaagtga

SEQ ID NO: 215914 - DNA, 611 bp, Homo sapiens
ggtgatggtggcacaacaatgtgaatgcatttagtgccactgaatttttcacttagaaatggtcaaaatagtaaattttatgttttctctaccactgtatccatctattatctatctatctatcaactatctatctatctatctatctatctatctatctatctatctagcactacaatgaactatagcccacccttttttagtcatgtatataatattctgaaacttagagaatacttctatatatagcaacattacctcaaggttctaaggagttaatgccaagttcaaagccttggggaacttttaaacyccttagacctaaaggcaatttatttgagacagtcaagcaaaaagtaaagggccaattatagatctggtagcttttctttgttttattaaacactgaaaaaaggaaataatagctcagaaatgcccattatcatcttagttttagtggctagtatattaaattggtggttgttactagaaataatatattctaagttcatcatctgatgacattatattatcaattgtatacctcaagaactgcaatatagttttagccaataaataataaattgtagaaaccatcttctcagaatgga

SEQ ID NO: 215915 - DNA, 614 bp, Homo sapiens
actggtctcctgattagaatcctattctgtacaaaggatgacactgtggttgagtcttcatgacaattctcccaaaactgaagataaacattgtagtcattttcatgtttgttcagccaacactggtttgcttcccttttccagttaatttgctcttgtttgtaacccctcaagatgtgggtatttcctaagaagaatctctggatcacagtacaattataaaaatcagaaagtgacagccttacggtactgtgatctaayggacagacacaattccagtttcaagggcatattccagattccctgccatatccccagtgcctggggtaaataataaattgcacacagcggtctcagtaagtgaacggacgggatggaggaagagcagttcccaacaggaaaaccccaaaagaatggtgaatggttgtagggcggccaaaccagcagatgatcttcctctccacctgcgggagcagatgctccaggagtgaagccagagaatcccaactgttaccaagattccccaggtgatgccaacccacagccaggtttaagaatcaccgtctggggaatagatataaccagacacaaacacagcatttccccagaagctt

SEQ ID NO: 215916 - DNA, 522 bp, Homo sapiens
gttttcttcttagcatttatcatctttcaacatttgctaaaattgggggtttacgttatgcttcttacccattttctcccagcaaaaatgtaagtttctgaagagcaaaggcttttgttgtttggttcattggtatttcaggatttatgcccataaaaacatatagaaggccctcaatatatttttcatgaataaatgaaatgtataaatttctgttatttcatgatttgtattatattsactgtgtgtaatcatatcccttgggtatttaggttgcttccactatttttctatttcctaaaacactacaataaagtcttttacaaaaatatttttctcagttattttttaatcaccctaggaaataatcctattaatgggaacacaggtgtattttcatatatttgtttcatgcagccaaattgctttttgtcttacatctctaatgttaatgtttaggaatacttactgccaaaatgaagtcaatatttttctaaccttgaccaattcatgagacaaaca

SEQ ID NO: 215917 - DNA, 458 bp, Homo sapiens
cgtgggtatttagcactataaactttccttttaacactggtttcattgtgtcccaaagattctggtatattgtgtctctgttttcattagtttcaaagaattgtttgatgtctttcttaatttcattctttatccaaaagtyattcagaagtagcttgttcaacttccacattattgtatggttttgatggattttcttggtacttatttctatttttactgcactgtggtccatgagtgtatttggtacgattttgatttttttaaattttttgagacttgctttatggccaagcatgttaatgatcttagagtatgtgtcacttgcagttaagaatatatattctgttgttgttgaatttttctgtagatgtctattaggtccaattgtacaagtgctgagtttaaatacagaatatttttgttagtattctgcctcagtgatctgtctaatgctt

SEQ ID NO: 215918 - DNA, 545 bp, Homo sapiens
ggataacagacagcagggtatacagatcagactcagcccagttccatggcaaagatagccctgctctctccaagtcyggcagcttacacaggtcagagccaccccttcctgaggaacttttcagagtctggaacatgtcctagcacttggcaaccatgtttgggttttcagcttttgtcccattcagccctggcatctgagttatctgtcaaaactttctcaatgtgttctctcagatggtctgctcagattatactggtttgctagatattttggtctgtctcagtgggaaatgttcttcctggctgtggcaactcagccattgttttgcagaagggcagcagtattattttcatcagtatttgtatttgcatagcagaaaccctgcagttgtgataccgtgtctccacaagatgctggctttcttatttgttgatatggtttggctctgtgtccccacccaaatctgatcttgaattgtattcccataattcccacatgttgtgggagggatccagtgggagataattgaatcatggggatgg

SEQ ID NO: 215919 - DNA, 545 bp, Homo sapiens
ggataacagacagcagggtatacagatcagactcagcccagttccatggcaaagatagccctgctctctccaagtctggcagcttacacaggtcagagccaccccttcctgaggaacttttcagagtctggaacatgtcctagcacttggcaaccatgtttgggttttcagcttttgtcccattcagccctggcatctgagttatctgtcaaaactttctcaatgtgttctctcagatggtctgctcagattatactggtttgckagatattttggtctgtctcagtgggaaatgttcttcctggctgtggcaactcagccattgttttgcagaagggcagcagtattattttcatcagtatttgtatttgcatagcagaaaccctgcagttgtgataccgtgtctccacaagatgctggctttcttatttgttgatatggtttggctctgtgtccccacccaaatctgatcttgaattgtattcccataattcccacatgttgtgggagggatccagtgggagataattgaatcatggggatgg

SEQ ID NO: 215920 - DNA, 467 bp, Homo sapiens
ccctccatgtctggctccccactaattctaaaactgcattttcgactgttctatagttggttatctatgccccagccatgttggactcatttcagtttgtagttcattcctagtaatctcccttacctcctggccttatatacacataaagacaactctaaatgttcttttaggcattcttcaagtataaacttctaaattttcctttctccaggaggccctgaacttgaaattaagataggtctccaatgccactcattccactatatttttgcttctcatgacrtctatcgtttttgtaattactttcttaatgtctattattctcattaagctgcatattcattgaaggctgggaccatctcagttttgtttgtagctaaagctgtaagagtaaatagttaaatctattgtatagaaggaacataataaatatttattggataaataaatttttgaaagactac

SEQ ID NO: 215921 - DNA, 598 bp, Homo sapiens
aactgacgcaataagattcattagactgagccatatgaaattgctgatatagaccatatttaacctcaaaattagccatttaaaattgagcaacctaataattagaactcattttgtctcatttttgtctgaagccctcaagactggtaataatgcaacagatatcaattctcccagaagtttccaagaaaggtgttagctmttttaaccaggatgggctaagagatggctaaattgattttgcctgcagtgatcacccaccttcaaccttaaaagcatggagaaagaaaattaatggagaaggcttcctttagagaatgtgggagacagttgtgcgttctttcttccaggggcaagaggagaatggattcctattacaccttaagtcaagtggaaggagtcacaaggcagcccccatctcaacccacctaggctggagggagccttcctggaagcattttgaaaggaaattaatccaaaacaattcttgggtgacatagtctatccagggcctgaattgttgtgggatccaagtcttagaatcagtcaggcaccgtgtgcattacaggtatatagtaggaggctgcagcaaaggaat

SEQ ID NO: 215922 - DNA, 413 bp, Homo sapiens
gaattcctgttctcccactaaacgactcaccccactcactaccacttctcttttcccccaagggtcctctaggggaaaaggaactacttatcttcagaaagctttatattgcccaggcttawgtaaaacaaaatactgattaattgtgatgacctttaggaatggcagcaagggatatccagtaaacttaataaaggtaatatttagacggtttctcaatgtatgtggattccatatcagtgcagttccacatagtaagcacaaaatatttttgccttttcagatctggtggcaatacctcacacaagccctttgacctttacttctgaattatttattactgtgactgattctgcacataattttggattcagtctttcccatggttcttagttgtcaccgttgcaacacat

SEQ ID NO: 215923 - DNA, 516 bp, Homo sapiens
agtaccaacgcttaggcacaatattaagggaacctatagttgtattcattttatgccctaaggtcattttttacacaacccattcttttgacattaagatgtaaattgaattatctggaagctctgactcaggaggtgagaacatagttccctcttgagccgttcagtggagaaccaaggctttttacgttttctctagtaagaaagtggggaggttgtgttcatctccttgttttttcttgcccttttgataaggkaagaattcaggttcaaggaatgcctaggattattccgtttactgcatatgaatatcagcggagtttgaactccctttagcaggccttgagttgcctgataaaattagtggagtagtgggtttgaaatgtatgcctccagcctccctaaagctaaggaagacagtggccaaaatctttcttttcagcatccacgtgtccacagagcctaagacttagccaggttctgtgtagactagaaaagatattgcatactggttcc

SEQ ID NO: 215924 - DNA, 588 bp, Homo sapiens
taagcttctccctccggactcatttgtgtatcctctatcttcaaggggttaaggttttcctgggatgaacagccagggaaggtggcagtgctgggctgagtgaggtagagatggggagagagtcctgcctggaagggaactcgtttattttcctcagaaaataaacctgctgctccaaggcaggtcccttagggttgatgtctacccttaacccaccccgcagccctaccctagaatatttgaagcacacaggaggactgggggagtgrtacttattcatgaaccccttctccttgacccccaggcctgcatgacttagaacatcccgatgtgtccttggcagatgaatggtaagaattaaaccatccctccttgaccatggcatccttcattgccctctttgattccacatggtttgtgctcccttgcccagttttcctgattccaaggcaaaggaagcagatgctgtaaatattgacatgctcttgttttgggccatgtcatgttcttaggtcctactgcaacactgacctacaccctgagcaccgccatctgtctcagttagaagcgattaagctctacctaaaa

SEQ ID NO: 215925 - DNA, 631 bp, Homo sapiens
gactgccctgtgagaatacagcactgtgaggctggaacattctagaaatgtcacttttttatcttaggargctgcggcttgagaagaggagcaacttgcccagaatcacagtgagtggcacccctaggttgtaagacggcagaggagtcctaagcacaggccaaagtgatggggaagagcaatgcaatcagtccccacctaaggcggggagggcaagatgttcactgctttgaacttgccactgcttggatttacaacagtgaacaactggaaaaatgcaaatggcctggcggaggaaaatttccaaacaagttttgatgtgcccatatgttagcatattatgtagtcattaaaaaacccatgtgcagctgttcaacttaacacatagtcagagaaaggcaaattaaaacatcagtggcataccttgatttttccatatcagatatcaagcattcgcaagtgtggtaatgcaatggacattaaagcagcttgtaccacagtgtactcaataaaataaaaggtaaaatctcctcaagctgaaaatactcatctggcgacagtgatcagcctctccgctctctggaaccaccctttcccctgggccctgcattgtccagttcagatgtgcttc

SEQ ID NO: 215926 - DNA, 468 bp, Homo sapiens
aagggttccctggtggtaagagggaccaagaagaactatgggctcacagacaaagtctctgcttttccttagaggaagggtgccctgagatgcagaagggcttcccagaggaggtsggggaggactgcactcagcagatactctacagtctccccaggatcactgacctcaggcctgacttctctgtctcatctcaggaccatgcattctgccggccacagcctatgggggtggggggatggggagttgggcctagcattgttcacggaactttcggtggtccccaaatgcagggatctgttgccagcctcctggacccccgctctcaggctgctgctgaactgaaagagactgtccagtaggtggcgcgcgggcaccgccgagtacccggtccccatgcagagccagcccctgccagtgcacattctcagaacagagcccgggcgactgcaacctaggcctggtctg

SEQ ID NO: 215927 - DNA, 590 bp, Homo sapiens
tgacaccacctcctgctgccctgtcacccctcctttgtaaaactttagtcctctcagcctccccttcccccacagaggggtctgtccccattcctcaagtcttcttgcatggacctttgagtctgggctccccacgacattgtagaaatatcatgacacatctgctcctctgtgctgcaagtagcatgaagacactgatgagactgtgttttgttcagctttgtatatccagggcctggtgaggtacttggcaaaggaggtggaatgacaaataaatgacgagagaaaacccatgtgtaggaaatcgagcacacratgaaacaatatgttatcaagcaccacggttgagagtactgacaagaaggagaatttatgaaagtacctggtgtctcgctgtgcactgggtagctagggaaggctgcagggagctggtttgcagcctataactttgaggccacagtccagcatgcttgggagcagcagaaggcctttcagataacatggatgagttacttgctcatttgtgtgtgactggaacccttcctcccttcctttttcctcccatctttccctcccccacctgctcctgt

SEQ ID NO: 215928 - DNA, 581 bp, Homo sapiens
agttccactgttgagttggcgttgtttccatctctcactgcatcctgctctccaaagggatgttgaggagaaccatttgaaagcccagcctgggttctcatgccttccagaacaggggccagcatcacagtgcttccgctgcagctttccttcttccacacgctctgcactttgtcaccagctcaactagcataaatctctcattttcatccttgctggtaaaatgtgagagccatacctgttttagaaacttagcctcttttcttcttcatctgctctaagtctacttaaacccaagtttagacaaaataactttgccatttgataaaagctccttcctcctccatacccttttccccgcaagccaatgagctgacatagtgtcagctcaatagcatggtcgagttttctatcttcttattccttaaacactgtcacaaggatccggtcakttcttaggactgtcctgcacctaatgtgcccaccctggcttagcgcaattgtgaggagtgccactcaggttttagactcctgccaggttcaaatcccgccttctctgcttgccggatgtttgtcttggg

SEQ ID NO: 215929 - DNA, 535 bp, Homo sapiens
tgtccctgggagcatttgtttggcctgttgctggggtttttattggcttggccacttctgtgtgccagctaaccaaggacagaaatcccaaatgacaaacggacctaccagctccaacctggtagcctctgggttcaggtcttaaattccatgcttttgatgcctgtctcttcctggaagggcaagggcctcttgaggagcaagtcaaggggacatttactgcagccatgacagtttctttcctttgaatccaatgactataataccaaagtccataagatcaaggtaggcaattcaccccaggcagagctgaagccccactctgcaagagacaaatttagaacatcatctggaaagtagatgcacacacacacacacacacacacacacacacacacacacacaaacacacatattccaaattagatcggcagcccaaggatccctctgctaaggaatgctcaagctggatttaaattgggactgrgacctggcttggcagaaatgtggccaagcagaaaggttggcccagtga

SEQ ID NO: 215930 - DNA, 485 bp, Homo sapiens
cccaatactgttggtccctggggcttgacttttccccttaaggctccatctccatccctggctttccctcttccttctcagcatctagtcttgtaatgtagaatttaaacacaggaagcagggatgaccccacaccagagcatagcctactgcattcagcatgcgaacattaatcacaggtataaggccccttgcacagacatgctttggagaagtgtgtaaaggacttcttggatttgcccaaggtggttaccagacacccaaagtagattcgaaaattttctggaactcctgaacatgtgtattcaaggatgaataagcaacttmttgcctctatttttgctgttttatagagaaaaaaattaaggccctggaaactgaagtgcttttcccaacagtggggtaaatgtcagagtcaatgctttgttttaatatcctggctttccctatacatcccaccctagagttctgttgtgctgttcctt

SEQ ID NO: 215931 - DNA, 545 bp, Homo sapiens
actaccaactttttgtagaaggctagagaagagaggaggacacagagagagggcaagagtggaaaatagaatgaggctcagaataccaaaccttagtgctgtccctatcatctgcctcactcgatcactgggtaatcttgggcaagtttcttcctttccatcagcttattccctcatctttaaggtaagtgacaagacgagacagcctatgttcattgtaactctagcttttgttcctaaagcaaatggctggaaaagacatagtgyccacaatatgcaatacacaaggtttacaagaaaagaacaaatgaaaacgaaagatttttaaaatccctaatgttacttgaattcttacaaatgaacaatggtacatcataattttaaaaagtcttttgtaatttcagtttttaaaaataatttcaacctttattttagattcagggagcgcatgtgcagatttgttacatgggtatattgtgtgatattgaggtttggggtatgaataactctgtcacgtaagtagggtgtacccaaagcgtagcttt

SEQ ID NO: 215932 - DNA, 545 bp, Homo sapiens
actaccaactttttgtagaaggctagagaagagaggaggacacagagagagggcaagagtggaaaatagaatgaggctcagaataccaaaccttagtgctgtccctatcatctgcctcactcgatcactgggtaatcttgggcaagtttcttcctttccatcagcttattccctcatctttaaggtaagtgacaagacgagacagcctatgttcattgtaactctagcttttgttcctaaagcaaatggctggaaaagacatagtgcccacaatatgcaatacacaaggtttacaagmaaagaacaaatgaaaacgaaagatttttaaaatccctaatgttacttgaattcttacaaatgaacaatggtacatcataattttaaaaagtcttttgtaatttcagtttttaaaaataatttcaacctttattttagattcagggagcgcatgtgcagatttgttacatgggtatattgtgtgatattgaggtttggggtatgaataactctgtcacgtaagtagggtgtacccaaagcgtagcttt

SEQ ID NO: 215933 - DNA, 545 bp, Homo sapiens
actaccaactttttgtagaaggctagagaagagaggaggacacagagagagggcaagagtggaaaatagaatgaggctcagaataccaaaccttagtgctgtccctatcatctgcctcactcgatcactgggtaatcttgggcaagtttcttcctttccatcagcttattccctcatctttaaggtaagtgacaagacgagacagcctatgttcattgtaactctagcttttgttcctaaagcaaatggctggaaaagacatagtgcccacaatatgcaatacacaaggtttacaagaaaagaacaaatgaaaacgaaagatttttaaaatccctaatgttacttgaattcttacaaatgaacaatggtacatcataattttaaaaagtcttttgtaatttcartttttaaaaataatttcaacctttattttagattcagggagcgcatgtgcagatttgttacatgggtatattgtgtgatattgaggtttggggtatgaataactctgtcacgtaagtagggtgtacccaaagcgtagcttt

SEQ ID NO: 215934 - DNA, 598 bp, Homo sapiens
ctgtgaactgagagtaacaacaaatttccacacaaacatattgcaagttagaaaatagctgtattttaatcaattattccacaatcatttactgaatagctattataagcyaagactttaatcagattctggaatatacatacagaggagaataaggtatgattcctgtcctcaagaaattcattatcaagaattgaggtcagatgggaaaacaccacccgtggtagaatgcaagaagtactaccacagagggatgttcaagagtgatttatcacatatcacaagacaggtcagtggttcttcctctacactatactaatctcttatgactctttcagctgcaaagggccaattttagcacaaggccagtgggcttgggtactactatacgtagtagctgactacttacagataaaaggaagagatggaaagctcagagatcaaaaaactcagatttctgcctgtttctaccaagtggtcaaccttgacaattaccactgtcttcagaaaagcatgacctttatttcccaatttgcattatagatataaatatgatgttgcatatatttggtcttcacatcaatccactaaccgcttt

SEQ ID NO: 215935 - DNA, 598 bp, Homo sapiens
ctgtgaactgagagtaacaacaaatttccacacaaacatattgcaagttagaaaatagctgtattttaatcaattattccacaatcatttactgaatagctattataagccaagactttaatcagattctggaatatacatacagaggagaataaggtatgattcctgtcctcaagaaattcattatcaagaattgaggtcagatgggaaaacaccacccgtggtagaatgcaagaagtactaccacagagggatgttcaagagtgatttatcacatatcacaagacaggtcagtggttcttcctctacactatactaatctcttatgactcttycagctgcaaagggccaattttagcacaaggccagtgggcttgggtactactatacgtagtagctgactacttacagataaaaggaagagatggaaagctcagagatcaaaaaactcagatttctgcctgtttctaccaagtggtcaaccttgacaattaccactgtcttcagaaaagcatgacctttatttcccaatttgcattatagatataaatatgatgttgcatatatttggtcttcacatcaatccactaaccgcttt

SEQ ID NO: 215936 - DNA, 598 bp, Homo sapiens
ctgtgaactgagagtaacaacaaatttccacacaaacatattgcaagttagaaaatagctgtattttaatcaattattccacaatcatttactgaatagctattataagccaagactttaatcagattctggaatatacatacagaggagaataaggtatgattcctgtcctcaagaaattcattatcaagaattgaggtcagatgggaaaacaccacccgtggtagaatgcaagaagtactaccacagagggatgttcaagagtgatttatcacatatcacaagacaggtcagtggttcttcctctacactatactaatctcttatgactctttcagctgcaaagggccaattttagcacaaggccagtgggcttgggtactactatacgtagtagctgactacttacagataaaaggaagagatggaaagctcagagatcaaaaaactcagatttctgcctgtttctaccaagtggtcaaccttgacaattaccactgtcttcagaaaagcatgacctttatttcccaatttgcattatagatataaayatgatgttgcatatatttggtcttcacatcaatccactaaccgcttt

SEQ ID NO: 215937 - DNA, 638 bp, Homo sapiens
aggaccaaactgcctggcctgtctttccccagcaaaatctcaccacagcctccattaacaacgaaggctaagacactgaggagctcacagacatcagtgatgctgattatagctgaagatatcatagaagtctaaactactgaaccaacccagaactaaaggcaaagtgtcttactgattcaacagtatagatacagctacagaagtcagtcttttactaccaaagccaatctataaaattagaagaagcaactgttttaccagatattcaaatatcaatgtaaggacataagaaacattraagagcaaggaaacatagcatctctgaaggaaaaccaataattcttcagcaacagatttcaatcaaacaaatccataaaatgagtgaaaaggaatttaacagctgaaattgaataattcaataaataaaataaataatacaatttgagaacctcaacaatagactagattaagaagatgaaagaatttctaaacataaagatcggtcttcatatgcaggattaaagattaaagactgaagtgtgaaacacaaaactataaaaatcctggaagacaacctaggcaataccattcaggacataggcacgggcaaagattttataacaatgacaccaaaa

SEQ ID NO: 215938 - DNA, 638 bp, Homo sapiens
aggaccaaactgcctggcctgtctttccccagcaaaatctcaccacagcctccattaacaacgaaggctaagacactgaggagctcacagacatcagtgatgctgattatagctgaagatatcatagaagtctaaactactgaaccaacccagaactaaaggcaaagtgtcttactgattcaacagtatagatacagctacagaagtcagtcttttactaccaaagccaatctataaaattagaagaagcaactgttttaccagatattcaaatatcaatgtaaggacataagaaacattgaagagcaaggaaacatagcatctctgaaggaaaaccaataattcttcagcaacagatttcaatcaaacaaatccataaaatgagtgaaaaggaatttaacagctgaaattgaataattcaataaataaaataaataatacaatttgagaacctcaacaatagactagattaagaagatgaaagaatttctaaacataaagatcggtcttcatatgcaggattaaagattaaagactgaagtrtgaaacacaaaactataaaaatcctggaagacaacctaggcaataccattcaggacataggcacgggcaaagattttataacaatgacaccaaaa

SEQ ID NO: 215939 - DNA, 593 bp, Homo sapiens
tacttactggctaaacaaagtagtgtctgcagttgctgacacatctaattacacacggaggaatacatagggtattatagagactcagttgtaggggattaatggacaggctgcttggttgaaatgagtaaactctttatcgagtttattgtttgatctatttgattttagttggtttggttcatgcggaacctggatacagagcatactccaaactcctggtgttatccttctgatagtcataattgtaatctccctggtgtgctgtattctctcaaaagttctaaatgtttgtacgtagccatctccagaatgtcagatggtctctcctagattggaatgacaataactcaaagaattgtgtggccataaggacaccgtaacctatgaactatgtgctgagactgaaaacccaaaatgatggtaascgagagtggagctcatggcctaagttttggtcacactctcacctaagtgagaacctgaccagaagggggaaaattttaaacaaaattataggaggcaattgttttggactgagattgtgcattagaccccagcagaccagaccaaaccaaaacagagtcactcaa

SEQ ID NO: 215940 - DNA, 406 bp, Homo sapiens
agatcttcacctaggcacattgtcatcaggttatccaaagtgaagacaaaggaaagaatcttaagagctatgagacagaagyactaggtaacctattaaaaaacaaaacaaaacaaacctatcagattaacagcagatttctcagcagaaatcctacaagctagaagggactgggactctatcttcagcctcctcaaacaaaacaattatcagccaagaattttgtatccagcaaaacccagcatcatatatgaaggaaagatacagttgttgtcagacaaacacatgctaagagaattcatcattaccaagccaccactacaagaactgctaaaagaagctctacatcttgaaacaaatcctggaaacacatcaaaacagaatctctttaaagcacaaatcacac

SEQ ID NO: 215941 - DNA, 365 bp, Homo sapiens
gaacatagcagttaaaagttggtgctattgcttcattcatttacaatttttctatcactccattattctgcttatttattattcttttattattcaatttattattctattcatttatcaattattctatttagctattttattattgttatatattatacatcttatatataatatataaataaatatatataatatataaatgtaaattgtatatayatatatttgagacagggtctggctctgttacccaggctaaagtgttggggagcgatcttggtttactgcaacctctgcctcctgggctcaagagatcctccccctttgtcctccctagtagctgcatgcaccaccacacctggcta

SEQ ID NO: 215942 - DNA, 629 bp, Homo sapiens
ctctttaatataatttttccttcagtaaaacttaccgactctctactctctaatggagataactggtagttcatcccatatgaagactggcttctggtgagacatcccaggcccctcaccttggaggacacaggaacacagggctttagccttcccagcgagcctattatgttccctttctcttcagggacctgtccatgtctctctacttttctcctctgccattggagaaatacgaaaggtcactcaggggcctagagtctcttcattcaggccaagactttcactcttcaaaaactcataattggaacaatcactggggaccaagttggtgcaaggcacaggctttgctgtatgatgagaagctggtcaaggatgtgtagygtaagctctccttcttttaaaagcttacagactagttagggagagggagacacctgactcatcacagctgtgaccttttatagttttaattaccaactttagtcttacatgtttccaatataaaatacttcttctggttttgatgtgtatatttattcatttattgaacaaatatttaatgtgtacctaccatatgccagacactgtctggttactggggatatgatgttgaacaaaatgggcca

SEQ ID NO: 215943 - DNA, 583 bp, Homo sapiens
tgtcaaactaatagaacgtttcctagtagacctaagaaatgagatagacatcaacacaatcatagtaggggacttcaacactccactgacagcacagacaggtcatcaaaacaaaaagtcgacaargaaacaatggatttaaactataccttggaacaaatggacttaacagatagatacagaacattccattcaacaaccacagactacacattctctttaacagtgcatggaactttctccagaatagaccatatgacaggccataaaacaaacctcaataaatttaagaaaattgaaattatattaactctcagaccacagtggaataaaactggaaatcaactccaaaaggaaccttcaacaccatgcaaatacatggaaattaaataacctgcttctgaatgaccattgggtcaaaaacgaaatcaagatgggaattaaaaaattcttctaactgaatgacaagagtgacacaacctttcaaaacctctgggatacagcaaagctggtgccaagaggaaagttcatagccctaaatgcctacatcaaaaagactgaaagagcacaaactgacaatcta

SEQ ID NO: 215944 - DNA, 646 bp, Homo sapiens
caacccacctaacatactttttgtgtatccatttacagataaacaactacataatttaataaaacttatatattccttaataatttgccttaaatgatataaytatctttggttaatgtatgtaaaacaaatacacattttttaaaacaatcctttacggtatctctctatgcttcagtgaaacaaaaaatgtaggttgcttaaatgttattacttcatttatattatagttgttgttgttgtataataagtgacataaaaaactgtgtctaaaaactgcagattctagttcatcggtacctttaaaatccaactaaatagctcaagaccactccacatgtgtttgggaagtttgacacatttcttcagatatctgaggatggcttcccgggtgagtaatgtgaaggcttacattctcctggtcatttgtgctttaggttcagttgcctcttctcaggttgactcttggtgcccactccacttcaccctttgcagaggcactggccctctcccttaattttttaagcaaagcatcaataatgcagttgcagcatttagtgaacttttgcttaggtttcaggaataaactagaggcctactttgctgctcaaaacagaaaaataatcttaaaacaaaaattagaccc

SEQ ID NO: 215945 - DNA, 646 bp, Homo sapiens
caacccacctaacatactttttgtgtatccatttacagataaacaactacataatttaataaaacttatatattccttaataatttgccttaaatgatataactrtctttggttaatgtatgtaaaacaaatacacattttttaaaacaatcctttacggtatctctctatgcttcagtgaaacaaaaaatgtaggttgcttaaatgttattacttcatttatattatagttgttgttgttgtataataagtgacataaaaaactgtgtctaaaaactgcagattctagttcatcggtacctttaaaatccaactaaatagctcaagaccactccacatgtgtttgggaagtttgacacatttcttcagatatctgaggatggcttcccgggtgagtaatgtgaaggcttacattctcctggtcatttgtgctttaggttcagttgcctcttctcaggttgactcttggtgcccactccacttcaccctttgcagaggcactggccctctcccttaattttttaagcaaagcatcaataatgcagttgcagcatttagtgaacttttgcttaggtttcaggaataaactagaggcctactttgctgctcaaaacagaaaaataatcttaaaacaaaaattagaccc

SEQ ID NO: 215946 - DNA, 646 bp, Homo sapiens
caacccacctaacatactttttgtgtatccatttacagataaacaactacataatttaataaaacttatatattccttaataatttgccttaaatgatataactatctttggttaatgtatgtaaaacaaatacacattttttaaaacaatcctttacggtatctctctatgcttcagtgaaacaaaaaatgtaggttgcttaaatgttattacttcatttatattatagttgttgttgttgtataataagtgacataaaaaactgtgtctaaaaactgcagattctagttcatckgtacctttaaaatccaactaaatagctcaagaccactccacatgtgtttgggaagtttgacacatttcttcagatatctgaggatggcttcccgggtgagtaatgtgaaggcttacattctcctggtcatttgtgctttaggttcagttgcctcttctcaggttgactcttggtgcccactccacttcaccctttgcagaggcactggccctctcccttaattttttaagcaaagcatcaataatgcagttgcagcatttagtgaacttttgcttaggtttcaggaataaactagaggcctactttgctgctcaaaacagaaaaataatcttaaaacaaaaattagaccc

SEQ ID NO: 215947 - DNA, 624 bp, Homo sapiens
cacagtagccaaatacagagtaaactttctagaaatattcattattacttttattattattaataatacttggataaaataattcatgtgctattgctgtaattctttacttttcattaattttttcattgcttcctctccctattcaaggaacttgcactctattttttcttcctagcccacaccaggcatcccttaatgtcatagctccatgtctactccctctaggcaggtaaggtggtcaaaaaagaactatctggccagtctgtctgacatagctctgtggcttcaagaaaatgtatgtgaatgaagctccaagaaacatggaagagtgtccccgatagtcttttccttttttttttgagacggagtctcgctctgtyacccaggctggagtgcagtggcacaatctcagctcactgcaagctctgccacctggattcacaccattctcctgcctcagcctcccaagtagctgggactacaggagcctgccaccacacctggctaattttttgtatttttagtagagacgggttttcaccatgttagccaggatggtctcgatctcctgacctcatgatccgcccgcctcagcctcccaaagtgctgggattgcatgtg

SEQ ID NO: 215948 - DNA, 624 bp, Homo sapiens
cacagtagccaaatacagagtaaactttctagaaatattcattattacttttattattattaataatacttggataaaataattcatgtgctattgctgtaattctttacttttcattaattttttcattgcttcctctccctattcaaggaacttgcactctattttttcttcctagcccacaccaggcatcccttaatgtcatagctccatgtctactccctctaggcaggtaaggtggtcaaaaaagaactatctggccagtctgtctgacatagctctgtggcttcaagaaaatgtatgtgaatgaagctccaagaaacatggaagagtgtccccgatagtcttttccttttttttttgagacggagtctcgctctgtcrcccaggctggagtgcagtggcacaatctcagctcactgcaagctctgccacctggattcacaccattctcctgcctcagcctcccaagtagctgggactacaggagcctgccaccacacctggctaattttttgtatttttagtagagacgggttttcaccatgttagccaggatggtctcgatctcctgacctcatgatccgcccgcctcagcctcccaaagtgctgggattgcatgtg

SEQ ID NO: 215949 - DNA, 543 bp, Homo sapiens
caaagctgttggtccttcaacattaaattggttaggcttgggtgtcagaggtttttggaggtttttttaataacattattgaatttaaaatattccctgagtacattcatgttaaytataggaataacaggggtgggaaaaaaatgccatattaaggatctgcaaaatatttacattataatagatggatgtgaatgaatatttaaataatacctgagcttttcaaatctctttgatactggggaccataagtgaggttgcaaagacagctgccacttgattttccactgtggtcaaatttttgtgtgacaaaaaaattctttgtcatttttttctgtgccccataaagtgtttaacaaattctgatttgtcatgttgaggtaatcacattaaaaaaatggtattagaattttaggattcacatttaatgtatactatactttctatttcctctttacaaagcctacatttctattccttctccccatttccccatttctattaattagctactatttggcatagagctgttaaaacacaaat

SEQ ID NO: 215950 - DNA, 543 bp, Homo sapiens
caaagctgttggtccttcaacattaaattggttaggcttgggtgtcagaggtttttggaggtttttttaataacattattgaatttaaaatattccctgagtacattcatgttaattataggaawaacaggggtgggaaaaaaatgccatattaaggatctgcaaaatatttacattataatagatggatgtgaatgaatatttaaataatacctgagcttttcaaatctctttgatactggggaccataagtgaggttgcaaagacagctgccacttgattttccactgtggtcaaatttttgtgtgacaaaaaaattctttgtcatttttttctgtgccccataaagtgtttaacaaattctgatttgtcatgttgaggtaatcacattaaaaaaatggtattagaattttaggattcacatttaatgtatactatactttctatttcctctttacaaagcctacatttctattccttctccccatttccccatttctattaattagctactatttggcatagagctgttaaaacacaaat

SEQ ID NO: 215951 - DNA, 543 bp, Homo sapiens
caaagctgttggtccttcaacattaaattggttaggcttgggtgtcagaggtttttggaggtttttttaataacattattgaatttaaaatattccctgagtacattcatgttaattataggaatmacaggggtgggaaaaaaatgccatattaaggatctgcaaaatatttacattataatagatggatgtgaatgaatatttaaataatacctgagcttttcaaatctctttgatactggggaccataagtgaggttgcaaagacagctgccacttgattttccactgtggtcaaatttttgtgtgacaaaaaaattctttgtcatttttttctgtgccccataaagtgtttaacaaattctgatttgtcatgttgaggtaatcacattaaaaaaatggtattagaattttaggattcacatttaatgtatactatactttctatttcctctttacaaagcctacatttctattccttctccccatttccccatttctattaattagctactatttggcatagagctgttaaaacacaaat

SEQ ID NO: 215952 - DNA, 652 bp, Homo sapiens
gcctggcttcaaagcttcacaggaaaggctgactctctgttcaggagctaatgaagctggtggctttaagttgaaatcaaagctcatttgctattttcaaaaatcctaggatttttaaaaataaagaatccactctttggaataacaaagcctggatgacaacacatctgttcattgtatagtataattaatattttaagccccctcttgagacctactgctcagaaaasatttttttccaaaatattaacactcattgacaatgcaccttgtcacccaagaggtttgaaaaagatgtacaaggagattaatgttgttttcatgtttgctaacaaaatgttaattctacagtccatggatcagagttattttgacttttaaatcttattatttaagaaacacattttatatggattttatatggattcttttcatggatatggacaaagtcaattaaaagccttctggaaaagatttaccattttagatgccattaagaacattcatgattccttggaggagatcaaaatatcaacactgataggagtttggaaaaagttgatttcaactctcatgtatgactttgagggcttcaatacttcagtggagaaagtaactgcaggtgtgccggaaatagtaagagaactaaaat

SEQ ID NO: 215953 - DNA, 652 bp, Homo sapiens
gcctggcttcaaagcttcacaggaaaggctgactctctgttcaggagctaatgaagctggtggctttaagttgaaatcaaagctcatttgctattttcaaaaatcctaggatttttaaaaataaagaatccactctttggaataacaaagcctggatgacaacacatctgttcattgtatagtataattaatattttaagccccctcttgagacctactgctcagaaaagatttttttccaaaatattaacactcattgacaatgyaccttgtcacccaagaggtttgaaaaagatgtacaaggagattaatgttgttttcatgtttgctaacaaaatgttaattctacagtccatggatcagagttattttgacttttaaatcttattatttaagaaacacattttatatggattttatatggattcttttcatggatatggacaaagtcaattaaaagccttctggaaaagatttaccattttagatgccattaagaacattcatgattccttggaggagatcaaaatatcaacactgataggagtttggaaaaagttgatttcaactctcatgtatgactttgagggcttcaatacttcagtggagaaagtaactgcaggtgtgccggaaatagtaagagaactaaaat

SEQ ID NO: 215954 - DNA, 461 bp, Homo sapiens
cttactaataaataaatatgacacatataaagatgtatataaaaaggaaagttttagggaaaacaatgccatgggaatcaggaaacttttagcccagctctgattatgccagtcatttattttataaataactactgagcatttaccatgtgccaggatcttggtgggcaccaaggatttgatgaagaacaattaagatcaacatacaaagttttacagatggggaaatayacacctgtggatgaatacaaagtagttctataggaatgcagaggagagatgctgaaccaagatctgggaggatcagagaagaatcttttgaaaacatacatttaagcaaagacccagttttagtagagttagccaaaatgaaaaggacacctgatatcctaggagggagaacggagtgtcattgtatttgtttatttaggctgccacaacaaattgccacaaactgagta

SEQ ID NO: 215955 - DNA, 428 bp, Homo sapiens
tacattagtcagttattggctgtgtgtctgtcactgggagccacagatgtgaccgttcaggcattttgggtgagctggctcctgtgtgccaggccattatctgaagaaaggatggttgtggaccattagtgtccaacccttacaggtggcaggggctgagtcaggtaaaaggtatctggacacagtagcaatagcatctatgccagtgagtgtcataaataatcacattttacaaaagtaacaagtaaggcttaaataagttaagtcattttccaaggctactcagccaataaatggcagaattagaaartaaattcagctcttgcttcatagactatgttcttcctgtagcctctggagaagctcccttctgatgaatgtctcacaaccacttctttgataaattctctctgctgttatgaatgatc

SEQ ID NO: 215956 - DNA, 572 bp, Homo sapiens
gccaataaaatctggagacagttaatttttgtctgcaagagaatgggaatgtagtaatccttacctatatagacttggttaatgtttgcaaagtgctttgagttcttgcataatctccatagcaggatgaaacagactattatgaaaacctgagtaagccacttggaaaagctgtcataaaaactcaggcttcaaccactaagaagaaaatgatacattagtgtgtgttaccatcagaggagacttttgacctatcactyccaaagaaaaaataaatgaaataaaagaaatattcatttcagcaccatctcatgccctcctacagcccaagttgctaccttagccatttagtttttgatccattccagggaggtcttgaattgagagaggtgctgtatgattaatattatctgttactgttagctggttaatattcatgtgtaatcttttctcataggtgtctgagtttaataagagggctattgggatgcatataaaacattcttcaatactcctttattgaaaaacctactgatctctaatgctattattttcatcaaatagatagtttt

SEQ ID NO: 215957 - DNA, 411 bp, Homo sapiens
tggtgaaagcatgcaacactggctcagaaaagttctttctggctcctttgtgcatttggcatcccacgtactctatcacaaaaataattattttggaaaatctcagagcctgtggtcagtgcttgctcctatggagagccctggcatcaccctgcaagttagccaatgcacattttggaaagctccaactgagtgctcagtagtgagttcagtyttaaaagaaatatagtataaatctaaaatatggccttaagggctcacaaactagttgtggaaagaagattaaccctgatggaaaggggaaatattaaaatgatatttgatgagaagacccaggaacactcaaatcctatcctcaggttgacatgactcattactgtggaacaaactattttaaatgagtggaggaaa

SEQ ID NO: 215958 - DNA, 632 bp, Homo sapiens
ataactaaaacagcatggtactaagataaaaagaaacacaaacaccaatggagcagaatagataacccagaaataaatccacagttttatagctaactcatayttgacaagggtgccaagaacattggtaaaaagacagtgtttttaataaatagtgtggagaaaactggatattcatatgcagaagaataaaaccaggctcctatctctcatctcatacaaaaatcaacccaaaattgactaaagactgaaatgtaaggccaaaaaccataaagcaaccagataaaaacataggagaaatgctttaggacattggtctaggcaaagatttttatgactaaggtgtcaaactcataggcaaaataactaaaaatatataaatgtgtctacattaaactaaaaagcaaacgaagcaatcaagacagtaaatagaaaacctgtagaatgggacaaaatatttgcaaactattcatctgataagataataatatccagaatatatgagaaataaaacaactcaataataaaaaattctggtgaaaacatggacaaagggtctgaatagacatgtctcaaaaaaagacatacaaattgtcaacaaatatatgaaagaatgcttaacatcactaatc

SEQ ID NO: 215959 - DNA, 632 bp, Homo sapiens
ataactaaaacagcatggtactaagataaaaagaaacacaaacaccaatggagcagaatagataacccagaaataaatccacagttttatagctaactcatacttgacaagggtgccaagaacattggtaaaaagacagtgtttttaataaatagtgtggagaaaactggatattcataygcagaagaataaaaccaggctcctatctctcatctcatacaaaaatcaacccaaaattgactaaagactgaaatgtaaggccaaaaaccataaagcaaccagataaaaacataggagaaatgctttaggacattggtctaggcaaagatttttatgactaaggtgtcaaactcataggcaaaataactaaaaatatataaatgtgtctacattaaactaaaaagcaaacgaagcaatcaagacagtaaatagaaaacctgtagaatgggacaaaatatttgcaaactattcatctgataagataataatatccagaatatatgagaaataaaacaactcaataataaaaaattctggtgaaaacatggacaaagggtctgaatagacatgtctcaaaaaaagacatacaaattgtcaacaaatatatgaaagaatgcttaacatcactaatc

SEQ ID NO: 215960 - DNA, 631 bp, Homo sapiens
agaccggtattacaaagaaagttcttcaaactcaaagaacaaacatcaatgagtaacacaaaaacatctgaaagtataaatttcactgttaaatgaaagaacacagtaaaattcataatattttaataggatatggtggatatggtggtataaaggttgaatgacaaaactactaaacataataattacaataatttgttaagggttatacaacatagaaagtgcaaattatgacatcaaaaatycaaaatgtaggaggggatggagcttacggatagagtgtgtgtgtgtgtgtgtgtgtgtgtataatcaaacttaagttgctatcagcttaaaataagatgttattcctatgagaatttttggtaagcctcatggtaaccacaacgcaaaatactataataaatacactaaaaataaaaagcaagaaatcaaaacataataatagagaaaatcacttaagaacaaagaatgataataagagagacataaaaatctacaaattaactagaaaacatttaagaaaaagctagagcaagatattacctatcaataattactttgaatataaatggattaaatattccaattaaaaactgaatggctgaatggagtaaaaacaagacccaac

SEQ ID NO: 215961 - DNA, 631 bp, Homo sapiens
agaccggtattacaaagaaagttcttcaaactcaaagaacaaacatcaatgagtaacacaaaaacatctgaaagtataaatttcactgttaaatgaaagaacacagtaaaattcataatattttaataggatatggtggatatggtggtataaaggttgaatgacaaaactactaaacataataattacaataatttgttaagggttatacaacatagaaagtgcaaattatgacatcaaaaattcaaaatgtaggaggggatggagcttacggatagagtgtgtgtgtgtgtgtgtgtgtgtgtataatcaaacttaagttgctatcagcttaaaataagatgttattcctatgagaatttttggtaagcctcatggtaaccacaacgcaaaatactataataaatacactaaaaataaaaagcaagaaatcaaaacataatratagagaaaatcacttaagaacaaagaatgataataagagagacataaaaatctacaaattaactagaaaacatttaagaaaaagctagagcaagatattacctatcaataattactttgaatataaatggattaaatattccaattaaaaactgaatggctgaatggagtaaaaacaagacccaac

SEQ ID NO: 215962 - DNA, 694 bp, Homo sapiens
gttgcattcttcaaaaattttatataaatgacatcatacagtgtgcactctttcgctcagcatgattttgagacttatatatgccattgtatgtatcaatagtgtgttcctttttgtagctaagtagtaagtaaatagtaagtccattatggatatgccataatttgttaatttttcatccatcgaaagacatttgagttgtttcccaaaatgtagccaaattgctatggccattcttgtacaaatctttttgtggaaatatatacatgtatttatttataaacatatatatatatttttawcttgagtaagcaactacaagtgtaatggattggtggatagaatatgcatgtttagcttgttatgaaaccaacatagcaaaagtggctgtacaattttctctttctaccagcaatgtaagtgcattccagttactccacaaccttcccaacactatgtcaactttttcattccaatgggtgtatatcatgcagttttaatttgcattttcctaatgattactaatgttcagtatcttctcaagtgcttattgatcatttttgtacttttataaaatgtcttctcaaatcatttgcttgtttttgatgagttcttcattttcttaacattgatttgtaatgttcctttatggactctgaacacaagtcttttggttgacatatgtgtcatttat

SEQ ID NO: 215963 - DNA, 620 bp, Homo sapiens
gagagaaaaaaaataaattcgaagttgtcatgaagaaaagttcttttgaaataaagcaaaaaatattaatctgaagaagaaaagagtactgagtgcttgaaaaaaaataatctggaatgatcaacattaatacatggcctggcaaattattaaatttctagagcaagagaaatgttcatatgttcaggtacaaagacacataatctgtaagggtgaacggttttgactgatacagacttctctactgcgagataaagtcccaaagagaaaaaaatgatgcatgtacaattgtgcagaaaataaatgtgactcaataataatacatccagttgatatgagtttcaagtatgagggcaatggagagacagcctcaaacgtcagaactcrgggaaataacattcggtcactcatcttggaaaatcttcccagtgaccaaatgcagctgattcagtgttgaatcagaatgctgagacctgaaaatgggaatggcagcaaggagaatgatggtgagcacttaactaatttacacacagaattaagactaagcacatgtgggaattaagattatggaacaaaatatagttgtattacatcttgacaatgtaaaaatagtaatgtaa

SEQ ID NO: 215964 - DNA, 450 bp, Homo sapiens
ttagtagtctcactggttgatttccagatgtagctctccagtaagagctttgaaaatgtaagcattttgccagctttttctagagaagaagggttacaattctggaagacagcttgsaaacaagtaagattcccagccttaccagagttaggaagccacagagcaataaccatgagccgaaagctttattgagcccttggtttcagcctctcccaggtatatcctgctagcaatctctgtggataagaagttcagaggaagccaagggctgctcagactctgtgccacttattgggatattttctctccgctcccaacccagtcttttctactctcctttatgatgtgacaactatattgccacttttccaccagttctctattaggatctgccaataagaggcactgaagggagacttcaaagcccaaagaaggacttgtgctctccta

SEQ ID NO: 215965 - DNA, 591 bp, Homo sapiens
acaggttaaaaaagaacaaatttctcaagaatgctgtggtcaactgtattaacaagatggagactatccagagcccattctctttggtactgtgaaagttattgatagttacaacaaaacagtcttaacaagttcaaaataagtgaatatgattggtaggaagtggagacaaggatacatggtgtattagtccgttctcatgctgttatgaagaaatactcaagactggttaatttatcaaggaaagaggtttaattgactcacagttctgcagggctggggaggcctcaggaaacttacagttatgacagaaggagaagcaaacacgtccttcttcacttggcagcagaaaggagaagaatgagagccaagcgaagtggggagccccttataaaaccatcagatctcatgagaactcactcactatcatgagaacaggattggggatactacccccatgattcaattatctccacttsgtacctcccacaacacaggggattatgggaactgcaattcaagatgagatttgggtggggacacagccgaaccatattacacagaaattctttgaggtatgattcatgctga

SEQ ID NO: 215966 - DNA, 626 bp, Homo sapiens
ctagaaatggaagtatctcattctctttttcacatgttttcatcagaatttcatccccattgctctacagaaacttcttttttctaggtcaacaatgacatccacttgccagatcttatattcatcttgctgggctcacatagtttgacctgagcaggayttgacagtttgatctctttcttcttcttaggaaagtttctttactttgcttctgctcactaagtttttaagtaaactatacagtttacttcctgtgtcacatatttggtgttactttcctgaatctgtctcttttatcagaactcagccctcaaactctatctcttcttaatttatactcttgataattgcatttgcctgaactctcatcctgaccttccagatttgtagatttctgcctgaggactaatgagatctcaacagagcaggtgtaaaatagaaattttgatttttgttcctcaaatttggccctcttaacttgcctcaaactcactaaatagcactatcatccttctagttgttaagccaaaactctagacctagttcttaatcctgctctttcctttataccttacattccattagctgcagtcttcttacttcacttttgtaatatatgcagagtc

SEQ ID NO: 215967 - DNA, 626 bp, Homo sapiens
ctagaaatggaagtatctcattctctttttcacatgttttcatcagaatttcatccccattgctctacagaaacttcttttttctaggtcaacaatgacatccacttgccagatcttatattcatcttgctgggctcacatagtttgacctgagcaggacttgacagtttgatctctttcttcttcttaggaaagtttctttactttgcttctgctcactaagtttttaagtaaactatacagtttacttcctgtgtcacatatttggtgtyactttcctgaatctgtctcttttatcagaactcagccctcaaactctatctcttcttaatttatactcttgataattgcatttgcctgaactctcatcctgaccttccagatttgtagatttctgcctgaggactaatgagatctcaacagagcaggtgtaaaatagaaattttgatttttgttcctcaaatttggccctcttaacttgcctcaaactcactaaatagcactatcatccttctagttgttaagccaaaactctagacctagttcttaatcctgctctttcctttataccttacattccattagctgcagtcttcttacttcacttttgtaatatatgcagagtc

SEQ ID NO: 215968 - DNA, 626 bp, Homo sapiens
tagttttttttaacaaaatagttagaaattgtgattgtttgagtatttcactctctttctggcccctttcatcttccaaattaatggactgtgtttatcctttcccaactgtctaactgcctatcaaacaaaacaacaacaaaacagatgggagaataagataattctcaggagatttgttaatacagtgagtcctccatatccgcaggttccacaaatgaaggttcartgaatcatgaatcaaaaatattcacgaaaaaacaaagaactataaaaaaattcaaatttaaaaaccaatatagtataataattatttacatagcatttgcattgtattaggtattataagtaatctagagattacagtctatgaaaggatgtctgtaggttacatgcaaatattatgccattttatatcactgacttgagcattcaaggattttgatatttgacaagtgtcctgaaaccaatcccctatggatactgagagacaactgattggaatgggatggtaatatcacatcatatgaaattccaaaatttaatagtgacatcctggaagagaatatatggatgcaaataatttatgcagaataaaagttacatttttatatgagtatgactaa

SEQ ID NO: 215969 - DNA, 607 bp, Homo sapiens
ttcaaatatcagtaaagtactgtagtatgataagaaatatatttggtcttttttcaggcttcctggcacagagttccaaaaatccttggaatttcctgagtgatagcagtagcttttgttatttataatgarcctgttttgatcatacctgagtttatgctaatgaggtgacttgtggtggagctctaggtagcctcaggctgggttcagtcccccagaaagaccaagtgattagaagattggaacttcaagccccaaccaacaacctccaggaaagtagggtagggctgaagattaagctctataaaatctcttgagcaatgagatttgatgagcttccaggttgataaatacatcagggtgagacagcctagaaattctgtgtcccacttccttcataccttgccctatgcatctcttttatttggctgttcctgagttgtatacttcattataaaccagtagacataggaaaagtttctctgaattctatgaaccattctagcaaattatggaaaataaggagaggatcatgggaaccctgaattcatagccagtcaaaattgtgataagtatcttcagcaggggaagacttatgaaactaagc

SEQ ID NO: 215970 - DNA, 583 bp, Homo sapiens
ttaataaacataaagatttacaaacatacttttaaaactagatatatttatgtacaagaggtatgtatagagaagtaagtgactctcaatgggctaagatagaatgaaaaatgactgtatagtgtgaaaaattattaataatatactaataatttaaaaatatttgcaacaaaattctcatcacttaaacttcaaaacatatatcataatcaagatgatttgcagaagctagacaatttgagatgggagatttgactggaatgaagtgttaattgaagaaacagtgagaaatactattctaagcactgcgtctcaggtcacagaatactaactactgattattctttgtctaagttaattttgttttctgtacatatttcctctatgattcaatttatattaataagcatttactgacaatccatgtaccaggtaatatgttaaatattggaggtgatacaaaggcragtcagtacaaattcttgcccttcctttgcttaaaatactttaagttagatgagcagattttaagagcataatctcctaattcataccacctgcgtttgcatcttgactccaacct

SEQ ID NO: 215971 - DNA, 578 bp, Homo sapiens
acacactacattgctcagtttgatttactttttaatttttcagttgaagytttttgtccctttaaatggattgtgattactgttatatatgtctggatttatttccctcatctatcttatcttgtgctttctgatttttctacttcccctccttcttcctccatctctctcttcctcctttcttttttacttcctctttctttgtcttttccttacctgttagaaatttatatgctttagtctactttcttcttagaatgtttagcatgtatatttaaattaatataatctcatcaatatctttactctccttctgaaaaaatgttttgctcatattaaatctcttctgaattgtttgctatggttgtcaagattctatcataattatttaagcttacaaattaggcataatcattgtcacttaatcagccatataatttgggctcatcagaaaatttataatttaatttttcttaccctttcttctaacatttttacagatttcctttggggaccatttttctttctttttctgaagtgtatccattagatttttcttttagtgaatgtctgttctt

SEQ ID NO: 215972 - DNA, 578 bp, Homo sapiens
acacactacattgctcagtttgatttactttttaatttttcagttgaagttttttgtccctttaaatggattgtgattactgttatatatgtctggatttatttccctcatctatcttatcttgtgctttctgatttttctacttcccctccttcttcctccatctctctcttcctccwttcttttttacttcctctttctttgtcttttccttacctgttagaaatttatatgctttagtctactttcttcttagaatgtttagcatgtatatttaaattaatataatctcatcaatatctttactctccttctgaaaaaatgttttgctcatattaaatctcttctgaattgtttgctatggttgtcaagattctatcataattatttaagcttacaaattaggcataatcattgtcacttaatcagccatataatttgggctcatcagaaaatttataatttaatttttcttaccctttcttctaacatttttacagatttcctttggggaccatttttctttctttttctgaagtgtatccattagatttttcttttagtgaatgtctgttctt

SEQ ID NO: 215973 - DNA, 578 bp, Homo sapiens
acacactacattgctcagtttgatttactttttaatttttcagttgaagttttttgtccctttaaatggattgtgattactgttatatatgtctggatttatttccctcatctatcttatcttgtgctttctgatttttctacttcccctccttcttcctccatctctctcttcctcctttcttttttacttcctctttctttgtcttttccttacctgttagaaatttatatgctttagtctactttcttcttagaatgtttagcatgtatatttaaattaatataatctcatcaatatctttactctccttctgaaaaaatgttttgctcatattaaatctcttctgaattgtttgctatggttgtcaagattctatcataattatttaagcttacaaattaggcataatcattgtcacttaatcagccatataatttgggctcatcagaaaatttataatttaatttttcttaccctttcttctaacatttttacagatttcctttgrggaccatttttctttctttttctgaagtgtatccattagatttttcttttagtgaatgtctgttctt

SEQ ID NO: 215974 - DNA, 385 bp, Homo sapiens
tcatttgtaggtaatttttttctgactacttttgaaatgttattttttgcctttggaggtttgtagattcactaaaatgtgaatatcattttatcttggaatttttagctcctttaatctaaatgttaatatctatattagtcagggttctctagagaagacatttagtaagatgtataagagcgagtgtgtgtatgtctgtgtgtgtgtgtgcgtgtgtgcatgcggagagagggatttagagagagatttattttaagcaattggaccacacaattttggggactggaaagtccaaactctgtagggcaggctggcaggcyggagacccagggaactgttgtcattgaagctggagtccaaaggcagtcagaaagcagaattc

SEQ ID NO: 215975 - DNA, 539 bp, Homo sapiens
actgattttgtatattgactttataaggtattactttaataaattatctttttttgtagtaattttctccataatttccactgggctttccagatgtattatcctatcatgcaaacatagaaacagcatttcctctcccttttcgactctttctcatgctgctgattactttcttttttctaattgccttgtttaatatctacaatacagatgctgggtagttagttggcatcttaatcttatttctgactttaccaggaaaacttcttgtgcttccacattaagtatgatgctgtcttttgktctatgatacatatttgattatgttaagtaagtttctatgcaatcctgttgtactgagagaagggtattaattttctgcatctatagaaatgatcaaaaaacattcttacttattctgtaaatgtgatgaataatattaatggatttcttaatattaaaccacttatgcatctatgaaataaacccacatgaacatgctgtattattttttataaaggctgtgtttctgattagct

SEQ ID NO: 215976 - DNA, 470 bp, Homo sapiens
cacagttcacaataggatttgtmctcctacaaaaatctaatgctgctgctgatctgacaggagacggagctcagacagtaatgagaatgatgaggaatggctttaaatacagatgaagctttgttcactggcccactcctcacctcctgctgtgaggcctggttcaggccatgattggtactggttcatggtctggggtttggggacccccgacctagaagacccatcaatgggtttcaggtagttgtgcattttctgattttatacatgcatacagagagagcaaaagagaatgagataaagagagataatgcacagttatcataaaagttaaaaggatttatgtactaaaaatgttaagaacagttaccctacaagataaagttcatattccttaagatgaatgtaaaatccttataaccattccattttgcttttcctccattgtcctttaagtatctgatagtcca

SEQ ID NO: 215977 - DNA, 380 bp, Homo sapiens
tcccgtcttcttggtttccccacgcttgcttggaaaggtttttgtctgcctctgatatggtctcttccattcctgggactgttaacagtaagacttttttctggtgcacgtcctgggacccactagtaaaggattctggctgcatgggcgtcattgtgctctggcgcarggcgagtcagaattggtccttctccagctggtgtccgtgggtggcaagaggtacacggtgccgtatgggcagctgttggcctgctgtccgtgtttgtcctttgacaggtgcaggcagtgcggggagcctagtcggccgcattcccggtacaccctgttcaccagcccatggtgcctggtagtcaggctggtgtccaggcccaaggattgga

SEQ ID NO: 215978 - DNA, 474 bp, Homo sapiens
gtgaagattttatgatgaagatgccaaaagcaattgcaatggaagcaaaaattgatgaatgggatctaattagactaaagagcttctgcacagcagactagcaacaaagtaaacaggcatcctacaaaatcagaaaatgtttgcactatacaactgtgaaaggtctaatatctagcatctgtaaggaacttaaacagatttacaagaaaaaaaacytaattaaaaagtgagcaaaggacatgaacagacacttttcaaaagaagacaaatatgtggccaacaagcatatgaaaaaaagctcagtatcactgattattagagaaatgtaaattaaaaccacaatgagataccatctcgcaccagtcagagtggctattattaaaaactaaaaaaataacagatgttggtaaggttgtggagaaaagggaacatttatatactgttgttgggattataaatcagttcaaccattgt

SEQ ID NO: 215979 - DNA, 546 bp, Homo sapiens
agacatatgctatagtcagcacctacctggcttcttcccatgggctagataatcacccatttataaggcaatgtatgttaaggaaaaaaaattactcctgttaataagatacgaagattgattaagacatgtatctctggattcttaatagcctaaatttgaaaaaaatttcacattaaatatataccatttaatttggaaattaaaaatattasattaaaaagggcaaaaagaaagtaaattttttaaaaaatagaatttaagcacaagagattatcccatcttgtctcttaactagtacttcatctaacactggaagtgtgttctcacctgagatgccatctccttttttcatttagaattagtacctagtactttatcacttgagagttatgttcctttaaccttccttaaacttaccttgttgagcacatcctgtagaaagaacctcatcacaacttcagcaagcaacttgagcatatggccccttaacaacgacagcagcaacaacaacaaaacgagttgaaaaaagcaattgaaaaccag

SEQ ID NO: 215980 - DNA, 562 bp, Homo sapiens
cagcaggcatatgagagacatatgctatagtcagcacctacctggcttcttcccatgggctagataatcacccatttataaggcaatgtatgttaaggaaaaaaaattactcctgttaataagatacgaagattgattaagacatgtatctctggattcttaatagcctaaatttgaaaaaaatttcacattaaatatataccatttaatttggaaattaaaaatattacattaaaaagggcaaaaagaaagtaaatttttwaaaaaatagaatttaagcacaagagattatcccatcttgtctcttaactagtacttcatctaacactggaagtgtgttctcacctgagatgccatctccttttttcatttagaattagtacctagtactttatcacttgagagttatgttcctttaaccttccttaaacttaccttgttgagcacatcctgtagaaagaacctcatcacaacttcagcaagcaacttgagcatatggccccttaacaacgacagcagcaacaacaacaaaacgagttgaaaaaagcaattgaaaaccaga

SEQ ID NO: 215981 - DNA, 585 bp, Homo sapiens
aatgtcatattggtttgtcatgaggaataagaattatgaaggattatgttattgatagaagtcatatatagagaagtggtatacaagrccttacggttgattgattttttttttttttaagtcaatgatatggcttggttctgagttaccacccaaatctcatcttctagctcccataattcccatatgttgtgggagggaccgggtggaaaatgattgaattatggggttgggtcttttccatgctgttcttgtaataatgaatgggtctcatgtgatctgatagttttaaaaaacgggagtttctctgcacaagccctctctttgcctgatgccaccttgtaagcagtgatctttgtttactgtgagatgctctctattgcctcaggcaatgagctgtcctatagaatgcacagtggtctgtgctccctgcttggttccaaagagagaaaacaagctgggtggggttgaactgggtgaaaacaagctgggtggggctggactgggcaagtccatctatacctcccttaatagcaggtgtaagtaaggcatttgaagatccgccaaaaacacaacaaaaaaaga

SEQ ID NO: 215982 - DNA, 585 bp, Homo sapiens
aatgtcatattggtttgtcatgaggaataagaattatgaaggattatgttattgatagaagtcatatatagagaagtggtatacaaggccttacggttgattgattttttttttttttaagtcaatgatatggcttggttctgagttaccacccaaatctcatcttctagctcccataattcccatawgttgtgggagggaccgggtggaaaatgattgaattatggggttgggtcttttccatgctgttcttgtaataatgaatgggtctcatgtgatctgatagttttaaaaaacgggagtttctctgcacaagccctctctttgcctgatgccaccttgtaagcagtgatctttgtttactgtgagatgctctctattgcctcaggcaatgagctgtcctatagaatgcacagtggtctgtgctccctgcttggttccaaagagagaaaacaagctgggtggggttgaactgggtgaaaacaagctgggtggggctggactgggcaagtccatctatacctcccttaatagcaggtgtaagtaaggcatttgaagatccgccaaaaacacaacaaaaaaaga

SEQ ID NO: 215983 - DNA, 585 bp, Homo sapiens
aatgtcatattggtttgtcatgaggaataagaattatgaaggattatgttattgatagaagtcatatatagagaagtggtatacaaggccttacggttgattgattttttttttttttaagtcaatgatatggcttggttctgagttaccacccaaatctcatcttctagctcccataattcccatatgttgtgggagggaccgggtggaaaatgattgaattatggggttgggtcttttccatgctgttcttgtaataatgaatgggtctcatgtgatctgatagttttaaaaaacgggagtttctctgcacaagccctctctttgcctgatgccaccttgtaagcagtgatctttgtttactgtgagatgctctctattgcctcaggcaatgagctgtcctatagaatgcacagtggtctgtgctccctgcttggttccaaagagagaaaacaagctgggtggggttgaactgggtgaaaacaagctgsgtggggctggactgggcaagtccatctatacctcccttaatagcaggtgtaagtaaggcatttgaagatccgccaaaaacacaacaaaaaaaga

SEQ ID NO: 215984 - DNA, 585 bp, Homo sapiens
aatgtcatattggtttgtcatgaggaataagaattatgaaggattatgttattgatagaagtcatatatagagaagtggtatacaaggccttacggttgattgattttttttttttttaagtcaatgatatggcttggttctgagttaccacccaaatctcatcttctagctcccataattcccatatgttgtgggagggaccgggtggaaaatgattgaattatggggttgggtcttttccatgctgttcttgtaataatgaatgggtctcatgtgatctgatagttttaaaaaacgggagtttctctgcacaagccctctctttgcctgatgccaccttgtaagcagtgatctttgtttactgtgagatgctctctattgcctcaggcaatgagctgtcctatagaatgcacagtggtctgtgctccctgcttggttccaaagagagaaaacaagctgggtggggttgaactgggtgaaaacaagctgggtggggctggacwgggcaagtccatctatacctcccttaatagcaggtgtaagtaaggcatttgaagatccgccaaaaacacaacaaaaaaaga

SEQ ID NO: 215985 - DNA, 614 bp, Homo sapiens
gcatagcactgagtctcacccaggacctgctgtaatcactcccttgctactgcctgtgtttgctcaagggcctagggctctacagtcaagcaggtagcgaggcmagccaggcctgtgtctttctctttggagtggtgactttctccagaacccaggcaagtctggaggtgccatccaggagctagattaaaaaccttagaagtctacatggtattctattgtactgcagctgagctggcactctaagcactagatgcagttcttcctactctttccttcccatttcaaaggcagaagagtctccctctatggccaccaccaccacaagcccatggggagtactgccagattactgcccagtgccaagtttctcttaaagcccaggtctcttcagtcactttggggtaaatgctgcctggcctggactcacccttcagagcagtgtgttgtcctctggcccagggcaggtccagaaatgctttcaaagaatcaccttcactagaggaagacaagaatgaaagaaagagggaatagatgattacaaaacaaccagaaaacaaataacataatgtcaagagtaagtccttaattatcagtaataatattgagtagac

SEQ ID NO: 215986 - DNA, 614 bp, Homo sapiens
gcatagcactgagtctcacccaggacctgctgtaatcactcccttgctactgcctgtgtttgctcaagggcctagggctctacagtcaagcaggtagcgaggccagccaggcctgtgtctttctctttggagtggtgactttctccagaacccaggcaagtcyggaggtgccatccaggagctagattaaaaaccttagaagtctacatggtattctattgtactgcagctgagctggcactctaagcactagatgcagttcttcctactctttccttcccatttcaaaggcagaagagtctccctctatggccaccaccaccacaagcccatggggagtactgccagattactgcccagtgccaagtttctcttaaagcccaggtctcttcagtcactttggggtaaatgctgcctggcctggactcacccttcagagcagtgtgttgtcctctggcccagggcaggtccagaaatgctttcaaagaatcaccttcactagaggaagacaagaatgaaagaaagagggaatagatgattacaaaacaaccagaaaacaaataacataatgtcaagagtaagtccttaattatcagtaataatattgagtagac

SEQ ID NO: 215987 - DNA, 614 bp, Homo sapiens
gcatagcactgagtctcacccaggacctgctgtaatcactcccttgctactgcctgtgtttgctcaagggcctagggctctacagtcaagcaggtagcgaggccagccaggcctgtgtctttctctttggagtggtgactttctccagaacccaggcaagtctggaggtgccatccaggagctagattaaaaaccttagaagtctacatggtattctattgtactgcagctgagctggcactctaagcactagatgcagttcttcctactctttccttcccatttcaaaggcagaagagtctcmctctatggccaccaccaccacaagcccatggggagtactgccagattactgcccagtgccaagtttctcttaaagcccaggtctcttcagtcactttggggtaaatgctgcctggcctggactcacccttcagagcagtgtgttgtcctctggcccagggcaggtccagaaatgctttcaaagaatcaccttcactagaggaagacaagaatgaaagaaagagggaatagatgattacaaaacaaccagaaaacaaataacataatgtcaagagtaagtccttaattatcagtaataatattgagtagac

SEQ ID NO: 215988 - DNA, 614 bp, Homo sapiens
gcatagcactgagtctcacccaggacctgctgtaatcactcccttgctactgcctgtgtttgctcaagggcctagggctctacagtcaagcaggtagcgaggccagccaggcctgtgtctttctctttggagtggtgactttctccagaacccaggcaagtctggaggtgccatccaggagctagattaaaaaccttagaagtctacatggtattctattgtactgcagctgagctggcactctaagcactagatgcagttcttcctactctttccttcccatttcaaaggcagaagagtctccctctatggccaccaccaccacaagcccatggggagtactgccagattactgcccagtgccaagtttctcttaaagcccaggtctcttcagtcactttggggtaaatgctgcctggcctggactcacccttcagagcagtgtgttgtcctctggcccagggcaggtccagaaatgctttcaaasaatcaccttcactagaggaagacaagaatgaaagaaagagggaatagatgattacaaaacaaccagaaaacaaataacataatgtcaagagtaagtccttaattatcagtaataatattgagtagac

SEQ ID NO: 215989 - DNA, 560 bp, Homo sapiens
tgattacaaaacaaccagaaaacaaataacataatgtcaagagtaagtccttaattatcagtaataatattgagtagactaaactcaaattaaaagttatagactggctgaatggatgaaaaaacaagacccattgatctgctgcctacaagaaatacatttcacctataaagaatcacacagattgaaaataaatggatgagaaaagatattccatgccaatggcaaccaaaaaacagaattcaatatacttatacaagacaaaatacatttcaagacaaaaactataagaatagrcaaggaaagtcactatataatgctaaagggatcaattcagcaagagaatgtaatcatttaaaatatatgcacacccaacactggaacactgagataaataaaggaaatattattagagctaaagacagaaagaggccctgatacaataatagccagagacttcaacacccaaaattcagaattggacacattttccagacagaaaatcaacagagaaacatcagacttaatttgcactattggccaggtgtggtggctcacac

SEQ ID NO: 215990 - DNA, 383 bp, Homo sapiens
gcatgcagccattcacttgttataattctcttctctttcacttgatactttggttcactgatcagttaccctatccacccttggggttcatagccactgyctgcttctcgtctcatgtcttgctggcttcccttggctttctttccttatcccctggctctccatgctttcaccacccctaccacacacaagcatgcttaatttgatttgccttcttggcccataaaatatactaattttttattatgtttaaacctattgaaatatttatgccataatcagaaaaagaaaaacacatataattgatatttttaaaccagagtttattttcatacttaacaattttaggtatacctaacgatttttagaaaaataggattctt

SEQ ID NO: 215991 - DNA, 461 bp, Homo sapiens
agaaagcattttcaaagcacttttttgtgtctctgaaaactcttccttttaggcaatgttttcctgctrtacttagtttattgctctggatttctgggcatagagcctattttggttttatttttgtttatcttcatcatctttatttctatttttgaagatgatgcttcataaatatattattacacactgtaaaattggataataatactataaaattgattttctgtatttgcactttccttgagaacctcgggtgtgtactgcaattagtctaattattcaacttgaagctgtcacctcctcctttgcctgaagcaaagcagcaggaagtacaaatcacactcaacagcctgacaccaggagaaggaaacaaatacctccgcatggaatttgcacatctgacagtgtgtcagctgaaatggaaaaaagatagattttattttggagaatcctggaac

SEQ ID NO: 215992 - DNA, 601 bp, Homo sapiens
gcaataggagaactttattttctaaaagaagtctgcagattgggcagatacagccttaagtgcaaaaggaaagtgcactctgaggaggagttcaggggtaaaagattagaaaatattataaaggcaaaaactgtaagattggaggcaatgaggtgcagggtctgaattggatgacatttaagcaagacattacatgcttcgcttgtgcctggctggcttcaggtagtctatgggtggttaggtgaggaatttctagctgcagtctatcttggtaccaatgacaggagctgatttggcttgattgcagaaagggaggtcctgtgataccttttcaatattttattagtttgttctcacactactataaagaaataactgacactgggtaacttataaagaaacgagatttaattggctcayggttctgtaggttgtacaggaagcatgaggctggcatctgcttggcttctgaggaggtctcaggatatttacaattatggtggaaggccaagggggagcagatacatcttatatggcaagagcaggaacagtagagcgatgggggaggtgccacacacttttaaacaactggatctcatga

SEQ ID NO: 215993 - DNA, 601 bp, Homo sapiens
gcaataggagaactttattttctaaaagaagtctgcagattgggcagatacagccttaagtgcaaaaggaaagtgcactctgaggaggagttcaggggtaaaagattagaaaatattataaaggcaaaaactgtaagattggaggcaatgaggtgcagggtctgaattggatgacatttaagcaagacattacatgcttcgcttgtgcctggctggcttcaggtagtctatgggtggttaggtgaggaatttctagctgcagtctatcttggtaccaatgacaggagctgatttggcttgattgcagaaagggaggtcctgtgataccttttcaatattttattagtttgttctcacactactataaagaaataactgacactgggtaacttataaagaaacgagatttaattggctcacggttctgtaggttgtacaggaagcatgaggctggcatctgcttggcttctgaggaggtctcaggatatttacaattatggtggaaggcmaagggggagcagatacatcttatatggcaagagcaggaacagtagagcgatgggggaggtgccacacacttttaaacaactggatctcatga

SEQ ID NO: 215994 - DNA, 589 bp, Homo sapiens
gcatggtgggagaacctctttaatacttccattttttataattggtaggattctatctttaaaatgtcattttgtgatttaacatattcttttaagactttgacaggtttaagaacmatttattgtatacttactctgtaacagacactgtcctagaagtggaaacattaaataaaaattatgtcataatgaaggaggaatctaatagtagttaagaacagcagctctggaagcaaacagcctagactgaaatgttgcctgtaactcttccttaaggtttggcttaggaagtcactgcctttttgtttctattgttttctctgtaaactttaaataataactatatctagtattattttgaagttaattaagataaaatttaaggaacttataagagttttggctacagcaaaagtttaaaagatgcttagtgttattatggcttgaactctgaaaagaataaccaaaaggtagtagtggttattaataatttgacttactaagtatatttttagttccttagaaaataaatgaagttatgtagttatgctgatattagaccttcttcatcatttgcaaattagcaaat

SEQ ID NO: 215995 - DNA, 526 bp, Homo sapiens
tgctttgtgatgacagaattcttgtaagggttgactttgtcagaatcatgtatttgattatgcagtacccttaatttatatttttttactatctctactgattatttcacacttattcaaaatcatttgttagcattttccctgcaatctaaataaaaatataggttgagatatatggctaagtctgaaataaaggcatagacctctctaaaactgaaaaaaatacagtaatggttggccaagatgactggttagaagcaactgcagtccgcaggctgctgtctttgctayttcagaggcttcactggtgatacctccaggtacaggagggaccaaggcaactagagtctggagcagacccccagcaaactgcagcagtcctatggaagagtggcctgactgttaaaaacaaacaaaaagcaataataacattgacaaaaaggaccccacaaaaaccccattcaaaggtcagctaccacagagatcaaagatagataagcccacaaaaatgagaaaaagtgaatgc

SEQ ID NO: 215996 - DNA, 419 bp, Homo sapiens
aggctctgaacttttccagagaggaagttcagataccctttaacctaaggttacaaagtcttaaactatgtgtaaaagaaattagcttatgtatggtttgattcccttccactcagaaaaattaagggagcaatgaaaataatcttgtttaagtaagttgcaaatgtttaaaaactacccacaatccagcagttaagataatttttcccatatgaggtgagcaataagcactgttcataataatgcacatttaatgtgagctggctactgctatgagggtctcattttatrtgtaggtgtacttgtgtgtaacgaaagagcaaggaagcaaaaattaaatacactgtgacattaaagatatttctggagtcatatattggtaagaattaaagtacagtaattcttgcaaaaacgagtta

SEQ ID NO: 215997 - DNA, 388 bp, Homo sapiens
gggagaatatattgagcaaggaaatgtaatacaacgttaagtgttcaaaaagaactcttagatttagagagcctctagtcttcattttttctggacaaaagcatgtcaatcaaaacttctttggtgttaaatgaagcaacttttmtcttctctggtcctgtatctaccatggtctccagtgttctaccttttcatgtggattatgagtggacaaaagttaatcaaatggtcttcacttaatttcacagataggttattggaatctgcaattttttcttctcatcaacgttgtaactagatgacattaaacaagaggatattctatcctttcacttaatgtctcagttttcatgagcctatcaacaatgtaaagtgagaactttttgta

SEQ ID NO: 215998 - DNA, 388 bp, Homo sapiens
gggagaatatattgagcaaggaaatgtaatacaacgttaagtgttcaaaaagaactcttagatttagagagcctctagtcttcattttttctggacaaaagcatgtcaatcaaaacttctttggtgttaaatgaagcaacttttctcttctctggtcctgtatctaccatggtctccagtgttctacctttycatgtggattatgagtggacaaaagttaatcaaatggtcttcacttaatttcacagataggttattggaatctgcaattttttcttctcatcaacgttgtaactagatgacattaaacaagaggatattctatcctttcacttaatgtctcagttttcatgagcctatcaacaatgtaaagtgagaactttttgta

SEQ ID NO: 215999 - DNA, 558 bp, Homo sapiens
tggcttgttttgacaaggaagggctacccattargctgtaggtgatgttagatccctcaattgagttaaattctttcatcttgctttggaactgcttcagatgaaaggctgcatatggaatgcaaagaaaaaatgcaactccactgatatattttgataacttaggaggaaattaaaagtccctgaaatgaagacaaatgtggtcattttgaccaaatctacacaggctgagtgacataaagaattgtgacaattctttgcatcatttaagtaaaaatgtttttcttttgtagcttttaaattctattttcaaaggccatttaatgacatgggaaatattgtagtttttgaaatgaaaagaataatgttaaaactctattagtttgattccaattttcagagatatacagaagcacaaataaagatgagaagaaaaatccaccaacatgtcactggttattgttaggggacaaatttaagaatgatttccattttatttttgtaattgcctgtatctttctaaatatcctgtagtataatggctaaaagcttgggcat

SEQ ID NO: 216000 - DNA, 445 bp, Homo sapiens
agtagacatcttcctttaatactttcaaaaaggtagagattgtgtcctgggagaaatayatctatatggctattcaattttttttgtagtctccaagtatgttgaaaatatatcccctatccttttttaaaataatcgtttctatcttctcaaacattttgtggtgaattccaatgaagttagtggcctacgaatgatatatcttgaatatcaaagaatgtcagacagtttctttgagctggagaatcccacatttttgaataaatatatcctactttgtatcttttcattaagggtcacttgagaatatttataaaactatatttgtaaataatgtccattatttccaaatgtaatgtgatttttattctaagccacttggttataatgctctgaacattcccttggaatagattacagtcccacaagattggaatacagggaa

SEQ ID NO: 216001 - DNA, 435 bp, Homo sapiens
tgacctaacattaccctttaacaagctgaaaaaaataagaacaaattaaacccaaaccaagtagaagaaagaaaacagtaaagaatggaaatcaagaaattagaaaattacaaaaccaatatagaaaatttagaaaaaacccaaaggtaattgttggaaaacaaaaatgaaattgataaacttctggctagacttaacaagaaaaaaaaagaggccaggcgcagtggctcacaactrtaatctcagcactttgggagtctgacgtgggaggattacttgagcccaggagttccagacagcctgggcaacatgacaaaaccctgtctctacaaaaaatacaaaaattagctgggcatggtggtgcacgcctgtattcccagctactcagaagactgaagtagaagaatcacttgagcctgagagttaggggcttca

SEQ ID NO: 216002 - DNA, 494 bp, Homo sapiens
aacgtcttttctttttccttagtccacctagtaagagactgtagattaaaaaagaaactgagatgcacagcgcaaagttgctccttttttcttgggctggggtttcagcacagtgccgtgccatcactgtctgactttgtgaggggtcaggagagagcagtgctcattcagcacctggaaccaccagaggcagcactgtactccatagcaaacactatagtattacaggctgcaacaccttgataagaagtgggaagcaagactagagcttcagggtgcatcraggactcagtgtaacaggtcacaagggtgacaacaatcataagatcgtttaatgagtgcctagtatgtggcaagtctttacactaacaacttgacgaaattatctcatttgacactttcccaagctctgttttatagacaaggaaactaagactcagtgagatgaaaaaacttgcaaacttcacccagtggataaaggaaagagccaaaat

SEQ ID NO: 216003 - DNA, 545 bp, Homo sapiens
aaagtttgtgggaagaagagaatactatttttgaagttgcaactgcccttgaaaattaaatccactrcattaagtaggatattgtcttggctactttaccaaagaccaaaacaacactggcctaaatgtgatgaaaaattgatttttattttgtataaacattcaaattgataaagggcaggaaactctactcaaccaagttgcctaggaaactctggtttcttttatcttattgctccagcactcggtagagtcctctatgggggcaagcagatccaccgccaccaagtccatgatccagacagccaggaaggagtaactgggatgaaggaagcagatgctcaatccttggtagagctagtcccaggtgtgacacaagagtcatatatgcatgtcccattggccaaagcttaatcatatggccatgcctagatgaaggaaagttaggaattgtaccctccaaccggatggccattggtatagccagaactctttaactatggagtaaagggacaatgaccatttggaaacaattatagctctag

SEQ ID NO: 216004 - DNA, 526 bp, Homo sapiens
acctttggtctttgaggctgatggcctttggatggggtttttgtggggggaacttttttgttgatattattgttgttgctttctgtttgttagtttttcttctaacagtcagcctcctcttctgtagatttgttgcagtttgctggaggtccactccagaccctgttcacctggttatcaccagtggagactgcagaacagcaaagattgctgcctgctccttcytcaggaggccctgggggtcagggacctgcttgaggaggcagtctgtccctttgcggagctcgtgtgctgtgctgggagcatcccccatgtcaggatcagcttctctcttcagagcaggtaggtaggaaagattaagtctgctgaacttgaaactgcagcggcccctccacacagttgctctttcctagggagatgagagttttatctgtaagccgctgactggggctgctggatttcctgtagatatgccctgcccagtgaggaggaatctagagaagcagtctggacacagctgctttgc

SEQ ID NO: 216005 - DNA, 598 bp, Homo sapiens
tgtccaaaaggggatccgttcagtcagttgggggcttagcattttatttgtagtttacatagtttatatatgaatatttatatataataaatgttatttataatagatgttatttataatatataaatatttttatataacaaataaaaacataatatatattatatataacatgtataatatasttccaccactttggacttttcctaaaacctcaagagaaaacttcattatttgttagatcatggtttttctgaatcacatacattctaaacctgcaattgaaatcattactggatattttctaatttagttcattgttttgaatctaactatcaagtaagaaaattaattttcaagtatcttcacaattttgtctgttataaaggtgtaagtcatttatcacaatttctcagttgtctgtgctggtctgaaaaaaaaggctagattattgatccaatcataatttaaaccaacatttccaaagcctttctaagttgttgttttggtcaagttgttattatataaaatagctggtttagttttgttattggaaaggggtcccaatccaggccccaagagagggttcttggatctc

SEQ ID NO: 216006 - DNA, 460 bp, Homo sapiens
gaataaaagaatggctctccgtagaacagccccaagagctgctggttgtccatttttatagttatttcttgattatatgctaaacaaggggtggattattcatgcytcccctttttagaccatatagggtaacttcctgatgttgccatggcatttgtaaactgtcatggtgctggtgggagtgtagctgtgaggataacgagaggtcactctcttcaccatcttggttttggtgagttgtagccagcttctttactacaacctgttttatcagcaaggtctttatgatctgtatcttgtgccaacctcttgtatcatcctgtgactaagaatgcattaacctgctggaaacccagcccagtaggtctcagccttattttacccgcccctataagatggagttactctggttccaacttctgacagttttactccccgcccccatcaatcagccttacct

SEQ ID NO: 216007 - DNA, 460 bp, Homo sapiens
gaataaaagaatggctctccgtagaacagccccaagagctgctggttgtccatttttatagttatttcttgattatatgctaaacaaggggtggattattcatgcctcccctttttagaccatatagggtaacttcctgatgttgccatggcatttgtaaactgtcatggtgctggtgggagtgtagctgtgaggataacgagaggtcactctcttcaccatcttggttttggtgagttgtagccrgcttctttactacaacctgttttatcagcaaggtctttatgatctgtatcttgtgccaacctcttgtatcatcctgtgactaagaatgcattaacctgctggaaacccagcccagtaggtctcagccttattttacccgcccctataagatggagttactctggttccaacttctgacagttttactccccgcccccatcaatcagccttacct

SEQ ID NO: 216008 - DNA, 528 bp, Homo sapiens
attatttgttacaagaaatctgcatgcgaacttgggagagatacagtcttctgttgactgtggcattcaatcaatccctcaggtggaaagaatgtgttacagctggtttgttttagcagcatggcaaccaggtggtaacatattgtgagcttaatatggggcaattaataagtttgaatggccaattatgaattcatcttgcatcattctggagctgcctcaattgatattcattcagtgcttactggaaacagaataggagatatttatattttggtacttggattagagttatgcaattcttctctcagtttaccttcttttcctggaaagtttttcttgctaagaatggtgtctgacaatgattaaaatrtcacttgactttttgccaaggcagtaactggaagtctgacagctgtgtagttaaacttcttggttcctgctaatatgatattacaaatttccataaaaaactttgaacacctaaaatagatgatattctgggaattgttacctatgggccaatta

SEQ ID NO: 216009 - DNA, 528 bp, Homo sapiens
attatttgttacaagaaatctgcatgcgaacttgggagagatacagtcttctgttgactgtggcattcaatcaatccctcaggtggaaagaatgtgttacagctggtttgttttagcagcatggcaaccaggtggtaacatattgtgagcttaatatggggcaattaataagtttgaatggccaattatgaattcatcttgcatcattctggagctgcctcaattgatattcattcagtgcttactggaaacagaataggagatatttatattttggtacttggattagagttatgcaattcttctctcagtttaccttcttttcctggaaagtttttcttgctaagaatggtgtctgacaatgattaaaatatcacttgactttttgccaaggcagtaactggaagtctgacagmtgtgtagttaaacttcttggttcctgctaatatgatattacaaatttccataaaaaactttgaacacctaaaatagatgatattctgggaattgttacctatgggccaatta

SEQ ID NO: 216010 - DNA, 540 bp, Homo sapiens
ttcctgctaatatgatattacaaatttccataaaaaactttgaacacctaaaatagatgatattctgggaattgttacctatgggccaattaatgacactcaaatcttttgagaagggattccagtagtatcatataaaacagaggttcttaaactttggaaagtatctaaatcacctgtggcattagtttgaacttcagtgtgaaggatttctactagatatttctgacatcgataatttmtctccacttgattgctgttaagtacttaacttgcatatctaaaagaagggaaatatattaattatattttaattccttcactcctctaatcctcattttctatcaattagtcctataaatttcattcattaatgtctttcaaaactatcactctccattccactcacagttactgccttagttaatgctatggatattatagtagtctcccatatggtttccctacatatgatctttcttcctttaaattcatcatcttattcgcacagttattatgtatatattaccgatacataat

SEQ ID NO: 216011 - DNA, 443 bp, Homo sapiens
aatgctaaatgatgagttaatgggtgcagcacaccagcatggcacatgtatacatacgtaactaacctgcacattgtgcacatgtaccctaaaacttaaagtataataataataaaattaaattaaattaaaaaaaagaaagtgaaaagtgtaggatgaaaaaccaataaacttggacatattaaagataaaatattattagccctagagaaaccattacaatttaacaaaattaatagcttaaaaatcacaaatattaaaataaaacaataaaatattcaactgagacaaaagagtcagaaaatgaacaaaaaaaggaaaaaatacagaagaaaaaagtagaaagcmaacatatgaaaaaataatcagaatgtacattcaaaaccaattatagcaataagaacattaaacataaatgaactaaacaatccaagattatgtct

SEQ ID NO: 216012 - DNA, 611 bp, Homo sapiens
taagatgagcctttgatgtgtgctttttactcgggaagtccacaatgtcaattacactcaagcttttgttaactaatcttaatgaataaatgcaagcctcccgacctgatggggcaggcagcagtgacaagcctctcttggtgtgtaggcagtcggacactcagcaaaactggcaaaacagaatatctgtgtgtcagtgtacgttttattcatctgtcgtttgggtcagggtcttgaaattttttgcttctttgatgtaacaggttattacagactaggaaaccatattgtcttaagaaagcaaggaagaaaaaatgtttttcatcagctatggtttggccactagacaaagactcacatccacagcwttatgaataggcattatctccaatacacagtataacaagctctcagaggttaagtaatggtcccaaggtaacggatccaaaaagtggggaactgatatttcactgaagagaaatttgtgaaagaaaggaaaatattactgacctcatagttttgtgcaggtctgactcttccatatgactctgttcaaatttatcctaccataaataattgtataaatgataagaacaaaaggtatgtgcagt

SEQ ID NO: 216013 - DNA, 622 bp, Homo sapiens
ataggaatactttaatagagcagtcatgtcttttagaaacatttatctcttgtctgtcatagttattgagataatttttgtttgacttttaatttatgtatttggcttatagacaatttatgtcttaatacaattaaatctattatcttttcccttctgacctcttatattacttttaagtctggaaactctttccttatgcaaacatttgacagtrtattcatttttattttcttataggctctttataaactgatttttttacatttaactctttaagcactttagatgaagttccccaaattataacttcatttcttctagtactatttattgaaaatctttactatatgttaatatatggttcatgtatattatggaaaaataaatcttccctggatttctaggttttcctgcaaaatgtcggcctcctgagccgtacattgtgaattagaaaatatttggttttactttctccagaaaaaaattccttttcatatgcccaaatattacatcttcagccatttgcctccttaattgtggaactaattgcttccattcaaaagataacaaacctcttatcccctaggagccaaatggttgcattccagaatgggaacct

SEQ ID NO: 216014 - DNA, 622 bp, Homo sapiens
ataggaatactttaatagagcagtcatgtcttttagaaacatttatctcttgtctgtcatagttattgagataatttttgtttgacttttaatttatgtatttggcttatagacaatttatgtcttaatacaattaaatctattatcttttcccttctgacctcttatattacttttaagtctggaaactctttccttatgcaaacatttgacagtatattcatttttattttcttataggctctttataaactgatttttttacatttaactctttaagcactttagatgaagttccccaaattataacttcatttcttctagtactatttattgaaaatctttactatatgttaatatatggttcatgtatattatggaaaaataaatcttccctggatttctaggttttcctgcaaaatgtcggcctcctgagcygtacattgtgaattagaaaatatttggttttactttctccagaaaaaaattccttttcatatgcccaaatattacatcttcagccatttgcctccttaattgtggaactaattgcttccattcaaaagataacaaacctcttatcccctaggagccaaatggttgcattccagaatgggaacct

SEQ ID NO: 216015 - DNA, 588 bp, Homo sapiens
acaataatagtggcacaacttatcaaaacctcagggatacagctgatgcggtgctaagagtaaagttcatagcatcaaatgcctacctcgaaatgtctgaaagtrcacaaatagacaatgtaaagtcacaactcatggaactggagaaacaagaacaatacaacaatctaaatccaaacccagcagaagaaaataacaaggatcaaggcagaactaaatgaaattgaaacaagcaaacaaaaacaatacaaaagataaatgaaacaaaaagctggttatttgaaaaaataaataaaattaataaacaattagtgaatttaaccaaaaaagaaaagaggagatccaaataagctcaattagaaacaaaatgggagatactacaactaataccacagaaatacaaaagattattcaaggctactatgaatacctttacatgcataaactagaaaatctagaggagatggataaattcctggaaatatacaaccttcctagattaaaccaggtagatatagactatgaacagaccaataacaagccacaagattgaaacagtgataaaaacacagccaagaggctgagcat

SEQ ID NO: 216016 - DNA, 559 bp, Homo sapiens
ttcaaattcattgcataaaagcttaccactcaataaaagtgaattgaatctgactttatgttgaatctaagaaatgacatattccaaagggaaataattctggcatctctttgttgcacagcagtatcactgttgtcagccagctgaattatttttctagaagacgttggcagatgcttaacaggtcatggaaaagtaaagttttaggtttaatgcaatgaaaccacaatagccctcaggaccaattattaaacagcctttggtattttcaaaacatcagtgctctataatccaatacctattcgtctatatttaaattttaattagtaattgacatttccaaatgtcctatcttgtaccattgttgttgtaactatatctgaggaaaagtatattcttaaagacgtttaagctgatttgaagaakacaattttacataggcggctagttaacccctctccatctctatggtagccttctgtctatcacatgccccaaaatatgattatcttaacccctctccatctctccatcaaatgtctgagaaggtatttgatgt

SEQ ID NO: 216017 - DNA, 499 bp, Homo sapiens
ccttctccaaaatctaaacagatgagcaaaaaatagcactgtccccacaaaaaagttgcccagtaacaaataaccaaggagaacggagtaatctaatgccatgaagttaaaataagttggcatscaggtaaatataaaattctagagcagagctaagaaataaagcaaagccagtgcctgtacttattgtcctctcaaatcccacacagaatagttgaaaaaaaaattcctagaactttcactaatattctcaaatcaggtgagaagcaaaccactctgtaggtacctgtgttaggccatccttgcattgctataaataactagctgaggctgtgtaatttattttgaaaatagtttaattggctcatggttctacaggttgtataggcagcatgatgctgggatttgctcaacttctagtgaggcctcaggaagcttacaatcatagcagaaggcaaaggggaagcaggcacatcacatggtgagagcgggaacaaca

SEQ ID NO: 216018 - DNA, 499 bp, Homo sapiens
ccttctccaaaatctaaacagatgagcaaaaaatagcactgtccccacaaaaaagttgcccagtaacaaataaccaaggagaacggagtaatctaatgccatgaagttaaaataagttggcatgcaggtaaatataaaattctagagcagagctaagaaataaagcaaagccagtgcctgtacttattgtcctctcaaatcccacacagaatagttgaaaaaaaaattcctagaactttcactaatattctcaaatcaggtgagaagcaaaccactctgtaggtacctgtgttaggccatccttgcattgctataaataactagctgaggctgtgtaatttattttgaaaatagtttaattggctcatggttctacaggttgtataggcagcatgatgctgggatttgctcaacttctagtgaggcctcaggaagcttacaatcatagcasaaggcaaaggggaagcaggcacatcacatggtgagagcgggaacaaca

SEQ ID NO: 216019 - DNA, 500 bp, Homo sapiens
ttggtggtgaggcttctgtcagaggatccttgtgaatatgctataaaatagtaggacatgagaattagaaattacatagctaggctataaaacagtgaggctgaattctacaaaagaagaactctagagagaataaaatatgctgtgctaccactgattgtctcaagtaccgtatgctcagtcaycttccaaataaaactgtgaataaggtagaaagtggtgggactatttaactggcactgggaaaggtatttgaggggaagttagctttgaaaactaatggccctctgtgtgtgtttctttctttccctttctctctctctctgtctctcatatatcctttcttgggtcccggatgagatttagatgtggttggtgaactgttggacagacttggaggagtcattttgctttaggtttttggtcttggttgaaagagggagagagaggtttgtcgaagtcctgggttggagggagggttttggggataaaaagtgtag

SEQ ID NO: 216020 - DNA, 463 bp, Homo sapiens
aacccccttttggatgacttacaaggaagaagacagccagttgatttcactttcagttgcaaatgctgccctaatccatatgggtttctgttctaagattccatgattctcttataagttcatctttcccttttcmtgtactctccctcttactatgcaaattcctcggtatatttcttctgttcaccctttgcagccactgcctcaatgggacagttgctgaaccttttcatggtgttcgtttagcccagaaaaggaacaaatttgtactgtactctgttcacaccttcaaagaagaaatgccccttgctcatctctgttcctccaatgcagtcctgagccaggatcaaagaaagtgtccaggtatttgaacaaacaaatgaataaatgtggttcttattttatttaaaacttttttttttgttctgaaaaagacaaaaaaccttcaatcaaataaataatt

SEQ ID NO: 216021 - DNA, 631 bp, Homo sapiens
aattcaattcagtaaatgagtattgagttcttactacataccaggcactgccctagttatgggctaatggcaggcaaatcagataaaggtcttgcttgagctcctaattaaataagaaagattataggatagtgaagaaaataagattatttggagttagctttgggtttgagtctcaactctaattttgtgagcttgttgtattagtccattttcatgctgctgataaagacataccggagactggggagatttacaaaagaaagaggtttaatggacttaccgttccacatggctggggaagcctgacaatcatggtggaaggcaaggaggagcaagtcatgtcttacatagatagtagcaggcaaagaaagcttgtgcagggaaactctcccttatagaaccatcagatcttatgagacttattcactatcatgagaacagcctgggaaaaacctggccccatgattcagttacctcccactggctccctcctacaacacgtgggaattcaagatgagattttggtggcaacagccagaccaaattaatctgcccctggcccctcycaaatctcacatcctcacataccaaaaccaatcatgccttcccaacagtcccccaaagtctt

SEQ ID NO: 216022 - DNA, 513 bp, Homo sapiens
gtaggctagtgataagccttaaaacctatcccagaaatccacagacaagtccttcaatctttcctgacaagtcttcaataaccactgctggcatgatgattggctaatgaattttgacagctgccatgtatgtaagcagcagagaaattacatttgcaacaccgaagacaggcatcactgaccaaaaagcagtccagcctctaggtgacaggtgaaccacttaataactagacaagaggtaaaggaaggaagaaaggcatcaccttagtccaggcctgaaagctgatgaaattctaggctgtatctgcactccacrgcctcacttttctcaccttttggtgccttctccagctcctattgttggtccactggtgccctcagcagcaggcctggcactggccttgtttacaagccagttctgtcacagtgtgcttagcagcagcagtggcagcaggatctgatggagcttagagtcaagtcaaagtcctaccgtcagatgtggaatgtcagccc

SEQ ID NO: 216023 - DNA, 511 bp, Homo sapiens
tatgttaaaattatttctttcaaaagaaaaggctggtcaaagtgcaacggtgttaaccactaattgatcacaaccagttacagatttttttgttccttctccactccaactgcttcatttgactagcctatggacaaaaaaaaaaagaggaaagaaaaagctaaactatttaatctgggctagtaaatggccagaaagggctttataaaaatgaaatatacaaaatgatactcgtacgtttaactaaaggtatagttatgactcttcaatttgcatatgttataaataatatcaatrtaaaagcttatagcatgggtccattttttttttttttttctttttgagacggagtctcactgtctcccaggctggagtacagtggcgcgatctcggctcactgcaagctccgccccccgggttcatgccattctagcatgggtccatttttaataaatacataaatatttaaactttctagatctaaagcttaaggactatggagtggatctca

SEQ ID NO: 216024 - DNA, 511 bp, Homo sapiens
tatgttaaaattatttctttcaaaagaaaaggctggtcaaagtgcaacggtgttaaccactaattgatcacaaccagttacagatttttttgttccttctccactccaactgcttcatttgactagcctatggacaaaaaaaaaaagaggaaagaaaaagctaaactatttaatctgggctagtaaatggccagaaagggctttataaaaatgaaatatacaaaatgatactcgtacgtttaactaaaggtatagttatgactcttcaatttgcatatgttataaataatatcaatgtaaaagcttatagcatgggtccattttttttttttttttctttttgagacggagtctcactgtctcccaggctggagtrcagtggcgcgatctcggctcactgcaagctccgccccccgggttcatgccattctagcatgggtccatttttaataaatacataaatatttaaactttctagatctaaagcttaaggactatggagtggatctca

SEQ ID NO: 216025 - DNA, 511 bp, Homo sapiens
tatgttaaaattatttctttcaaaagaaaaggctggtcaaagtgcaacggtgttaaccactaattgatcacaaccagttacagatttttttgttccttctccactccaactgcttcatttgactagcctatggacaaaaaaaaaaagaggaaagaaaaagctaaactatttaatctgggctagtaaatggccagaaagggctttataaaaatgaaatatacaaaatgatactcgtacgtttaactaaaggtatagttatgactcttcaatttgcatatgttataaataatatcaatgtaaaagcttatagcatgggtccattttttttttttttttctttttgagacggagtctcactgtctcccaggctggagtacagtggygcgatctcggctcactgcaagctccgccccccgggttcatgccattctagcatgggtccatttttaataaatacataaatatttaaactttctagatctaaagcttaaggactatggagtggatctca

SEQ ID NO: 216026 - DNA, 476 bp, Homo sapiens
tgttaggaacaataatgaaataagggtttgggcacaatggctcatgcctgtaatcccagtactttgggaggctgatactcaggaggctgagacaggagaatcacttgaacccaagaggcagaggttgcagagaccggaaattgcgccactgcacaccaktctaggcggcagagggagactgtctcaaaaaaaatagaaaaccacctgtaaactacaaagacatctactgattcaaagtgtcatctcttgtttcttccagtcacagccataaaggtcaatggagcaaaaaataaggagccggcaaaggaggaagaggtgccttcaacacctctgctggtctgcaccgccagggctgtacgcatctgcttacagtggcacagaaaccaaaccaaacaagccctctctctgagggcagaaaatattccttcaggaaggaaatcaactttaattaatcaactttctggacaaccaaaaag

SEQ ID NO: 216027 - DNA, 476 bp, Homo sapiens
tgttaggaacaataatgaaataagggtttgggcacaatggctcatgcctgtaatcccagtactttgggaggctgatactcaggaggctgagacaggagaatcacttgaacccaagaggcagaggttgcagagaccggaaattgcgccactgcacaccagtctakgcggcagagggagactgtctcaaaaaaaatagaaaaccacctgtaaactacaaagacatctactgattcaaagtgtcatctcttgtttcttccagtcacagccataaaggtcaatggagcaaaaaataaggagccggcaaaggaggaagaggtgccttcaacacctctgctggtctgcaccgccagggctgtacgcatctgcttacagtggcacagaaaccaaaccaaacaagccctctctctgagggcagaaaatattccttcaggaaggaaatcaactttaattaatcaactttctggacaaccaaaaag

SEQ ID NO: 216028 - DNA, 595 bp, Homo sapiens
ccgtgcccatcaatccccctgagcaccagcctcgcatgggaaccccccgagacacaggttctgggccacctcacctccagcccagcctcagatagaggagcgcattctctgggtctggagtgggtgcattaactcattgtccagctgtcacaagactggctgcaaacccaggtcccccactgcagcccaccaggccagggtcccctgtgctacctctgtctccattttagttctgaacagtctaaagcatrtgtatccaggggcctttctttggggtccccgtcccagcacccctcatctcccccatgaggacttcttccaagcccctcaagcctcctgccctcagggacccaagatggacctttcctccctgaccttcattcctatccccagcgaggcgacagctgctcttggccaaccacgccccctccacccccacagccacttccacatctccatcagttcctccttgtgggtccgaggcgctctgccgccggcccctcctcacttcttcctccctggggatggatccaagctattgtcctgcccatggcttcccatctcaggaccctctctggccgctatcatcccagca

SEQ ID NO: 216029 - DNA, 595 bp, Homo sapiens
ccgtgcccatcaatccccctgagcaccagcctcgcatgggaaccccccgagacacaggttctgggccacctcacctccagcccagcctcagatagaggagcgcattctctgggtctggagtgggtgcattaactcattgtccagctgtcacaagactggctgcaaacccaggtcccccactgcagcccaccaggccagggtcccctgtgctacctctgtctccattttagttctgaacagtctaaagcatatgtatccaggggcctttctttggggtccccgtcccagcacccctcatctcccccatgaggacttcttccaagcccctcaagcctcctgccctcagggacccargatggacctttcctccctgaccttcattcctatccccagcgaggcgacagctgctcttggccaaccacgccccctccacccccacagccacttccacatctccatcagttcctccttgtgggtccgaggcgctctgccgccggcccctcctcacttcttcctccctggggatggatccaagctattgtcctgcccatggcttcccatctcaggaccctctctggccgctatcatcccagca

SEQ ID NO: 216030 - DNA, 405 bp, Homo sapiens
ggaattcccatcatttcctcatgagacagtcacatcagggtgtgaccatggccttggkatcccccactatggatggagacacttaggtttagaaaagtcagtaagagacattaagtttcagagggcacagctgaaaccactttctttgtttattgattttgtttttctttatttgatttttatttttatttatttattaatttattttgagacagagtcttgctctgtgggccaggctggaatgcagtggcctgatcttggctcactgcaacctctgcctcccgggtttaagcgattctcctgtctcagcctcccgagtagctgggattacatgcatgagctactgtgcccagccttggtttttcttttgagacagggttttgctctgtcacccaggctggagtg

SEQ ID NO: 216031 - DNA, 405 bp, Homo sapiens
ggaattcccatcatttcctcatgagacagtcacatcagggtgtgaccatggccttggtatcccccactatggatggagacacttaggtttagaaaagtcagtaagagacattaagtttcagagggcacagctgaaaccactttctttgtttattgattttgtttttctttatttgatttttatttttatttayttattaatttattttgagacagagtcttgctctgtgggccaggctggaatgcagtggcctgatcttggctcactgcaacctctgcctcccgggtttaagcgattctcctgtctcagcctcccgagtagctgggattacatgcatgagctactgtgcccagccttggtttttcttttgagacagggttttgctctgtcacccaggctggagtg

SEQ ID NO: 216032 - DNA, 405 bp, Homo sapiens
ggaattcccatcatttcctcatgagacagtcacatcagggtgtgaccatggccttggtatcccccactatggatggagacacttaggtttagaaaagtcagtaagagacattaagtttcagagggcacagctgaaaccactttctttgtttattgattttgtttttctttatttgatttttatttttatttatttattaatttattttgagacagagtcttgctctgtgggccaggctggaatgcagtkgcctgatcttggctcactgcaacctctgcctcccgggtttaagcgattctcctgtctcagcctcccgagtagctgggattacatgcatgagctactgtgcccagccttggtttttcttttgagacagggttttgctctgtcacccaggctggagtg

SEQ ID NO: 216033 - DNA, 506 bp, Homo sapiens
aattctcacatttcaaacatatatgaaatatcaaataaaaatttatttttacaagaatttaggggaactactacatagctataaatgtaatatatatgttaactaagtatcatagataaaawccatgctcccttcagcagcacgtgtaataatagatacaaagattgaaaggtaaaagatttaggatgaaaagaatcctctcttaaaaaggaaaacaaaattatatgtatgtgtatataacagttataatacccatcacacagctttgtagaaacagcatctattcaaaaataccagtatttccaaaatatttaaaataatatttaatgtaaaaataatatttaaataaataaatatatttaataaatatttaaataaataaaataatatttaaataattctatacccatgtttttcaaaataaaccaataaaatagatagtatatattagacgtgttagtatatatatctgagacatgttaaaaatcacaactgaattctcacaa

SEQ ID NO: 216034 - DNA, 506 bp, Homo sapiens
aattctcacatttcaaacatatatgaaatatcaaataaaaatttatttttacaagaatttaggggaactactacatagctataaatgtaatatatatgttaactaagtatcatagataaaatccatgctcccttcagcagcacgtgtaataatagatacaaagattgaaaggtaaaagatttaggatgaaaakaatcctctcttaaaaaggaaaacaaaattatatgtatgtgtatataacagttataatacccatcacacagctttgtagaaacagcatctattcaaaaataccagtatttccaaaatatttaaaataatatttaatgtaaaaataatatttaaataaataaatatatttaataaatatttaaataaataaaataatatttaaataattctatacccatgtttttcaaaataaaccaataaaatagatagtatatattagacgtgttagtatatatatctgagacatgttaaaaatcacaactgaattctcacaa

SEQ ID NO: 216035 - DNA, 506 bp, Homo sapiens
aattctcacatttcaaacatatatgaaatatcaaataaaaatttatttttacaagaatttaggggaactactacatagctataaatgtaatatatatgttaactaagtatcatagataaaatccatgctcccttcagcagcacgtgtaataatagatacaaagattgaaaggtaaaagatttaggatgaaaagaatcctctcttaaaaaggaaaacaaaattatatgtatgtgtatataacagttataatayccatcacacagctttgtagaaacagcatctattcaaaaataccagtatttccaaaatatttaaaataatatttaatgtaaaaataatatttaaataaataaatatatttaataaatatttaaataaataaaataatatttaaataattctatacccatgtttttcaaaataaaccaataaaatagatagtatatattagacgtgttagtatatatatctgagacatgttaaaaatcacaactgaattctcacaa

SEQ ID NO: 216036 - DNA, 506 bp, Homo sapiens
aattctcacatttcaaacatatatgaaatatcaaataaaaatttatttttacaagaatttaggggaactactacatagctataaatgtaatatatatgttaactaagtatcatagataaaatccatgctcccttcagcagcacgtgtaataatagatacaaagattgaaaggtaaaagatttaggatgaaaagaatcctctcttaaaaaggaaaacaaaattatatgtatgtgtatataacagttataatacccatcacacagctttrtagaaacagcatctattcaaaaataccagtatttccaaaatatttaaaataatatttaatgtaaaaataatatttaaataaataaatatatttaataaatatttaaataaataaaataatatttaaataattctatacccatgtttttcaaaataaaccaataaaatagatagtatatattagacgtgttagtatatatatctgagacatgttaaaaatcacaactgaattctcacaa

SEQ ID NO: 216037 - DNA, 483 bp, Homo sapiens
aaacatatatgaaatatcaaataaaaatttatttttacaagaatttaggggaactactacatagctataaatgtaatatatatgttaactaagtatcatagataaaatccatgctcccttcagcagcacgtgtaataatagatacaaagattgaaaggtaaaagatttaggatgaaaagaatcctctcttaaaaaggaaaacaaaattatatgtatgtgtatataacagttataatacccatcacacagctttgtagaaacagcatctattcaaaaataccagtatttccaaaatatttaaaataatatttaatgtaaaaataatatttaaataaataaatatatttaataaatatttmaataaataaaataatatttaaataattctatacccatgtttttcaaaataaaccaataaaatagatagtatatattagacgtgttagtatatatatctgagacatgttaaaaatcacaactgaa

SEQ ID NO: 216038 - DNA, 483 bp, Homo sapiens
aaacatatatgaaatatcaaataaaaatttatttttacaagaatttaggggaactactacatagctataaatgtaatatatatgttaactaagtatcatagataaaatccatgctcccttcagcagcacgtgtaataatagatacaaagattgaaaggtaaaagatttaggatgaaaagaatcctctcttaaaaaggaaaacaaaattatatgtatgtgtatataacagttataatacccatcacacagctttgtagaaacagcatctattcaaaaataccagtatttccaaaatatttaaaataatatttaatgtaaaaataatatttaaataaataaatatatttaataaatatttaartaaataaaataatatttaaataattctatacccatgtttttcaaaataaaccaataaaatagatagtatatattagacgtgttagtatatatatctgagacatgttaaaaatcacaactgaa

SEQ ID NO: 216039 - DNA, 542 bp, Homo sapiens
aaaatattttctaatcattgcatctaattaaaaaaagagaagaycatgacttttaaaggtctttaattattgtggaagaagaaaattaattagcagaaattcccagctgaacatttagagatgtctgtacaaaagcggatgtccaaataagaaggtttggtagccaaaatgatatgtagaatttctgagaatggagaactgtagagaactctgaataatacaagcctgttttctcatcataaaatgttttttgtgcatactaggacttaaaagaagacatattatattctgtgatttggcagggtagactatggggtcttctagtaaatcgagtagacttgtattttttttttaccttgggtatgaaaactagactagttttcaaagaattagctttggaaatcaatctacattcaaagattggaaggtgcttcaagatcttccagtggcctcagggtttttttaaagtatgaacaggaattatttcttccaatgatggaatacaatctgttggtctttgttgttctggttaataacatgat

SEQ ID NO: 216040 - DNA, 542 bp, Homo sapiens
aaaatattttctaatcattgcatctaattaaaaaaagagaagatcatgacttttaaaggtctttwattattgtggaagaagaaaattaattagcagaaattcccagctgaacatttagagatgtctgtacaaaagcggatgtccaaataagaaggtttggtagccaaaatgatatgtagaatttctgagaatggagaactgtagagaactctgaataatacaagcctgttttctcatcataaaatgttttttgtgcatactaggacttaaaagaagacatattatattctgtgatttggcagggtagactatggggtcttctagtaaatcgagtagacttgtattttttttttaccttgggtatgaaaactagactagttttcaaagaattagctttggaaatcaatctacattcaaagattggaaggtgcttcaagatcttccagtggcctcagggtttttttaaagtatgaacaggaattatttcttccaatgatggaatacaatctgttggtctttgttgttctggttaataacatgat

SEQ ID NO: 216041 - DNA, 542 bp, Homo sapiens
aaaatattttctaatcattgcatctaattaaaaaaagagaagatcatgacttttaaaggtctttaattattgtggaagaagaaaattaattagcagaaattcccagctgaacatttagagatgtctgtacaaaagcggatgtccaaataagaaggtttggtagccaaaatgatatgtagaatttctgagaatggagaactgtagagaactctgaataatacaagcctgttttctcatcataaaatgttttttgtgcatactaggacttaaaagaagacatattatattctgtgatttggcagggtagactatggggtcttctagtaaatcgagtagacttgtattttttttttaccttggktatgaaaactagactagttttcaaagaattagctttggaaatcaatctacattcaaagattggaaggtgcttcaagatcttccagtggcctcagggtttttttaaagtatgaacaggaattatttcttccaatgatggaatacaatctgttggtctttgttgttctggttaataacatgat

SEQ ID NO: 216042 - DNA, 542 bp, Homo sapiens
aaaatattttctaatcattgcatctaattaaaaaaagagaagatcatgacttttaaaggtctttaattattgtggaagaagaaaattaattagcagaaattcccagctgaacatttagagatgtctgtacaaaagcggatgtccaaataagaaggtttggtagccaaaatgatatgtagaatttctgagaatggagaactgtagagaactctgaataatacaagcctgttttctcatcataaaatgttttttgtgcatactaggacttaaaagaagacatattatattctgtgatttggcagggtagactatggggtcttctagtaaatcgagtagacttgtattttttttttaccttgggtatgaaaactagactagttttcaaagaattagctttggaaatcaatctacattcaaagattggaaggtgcttcaagatcttccagtggcctcagggtttttttaaaktatgaacaggaattatttcttccaatgatggaatacaatctgttggtctttgttgttctggttaataacatgat

SEQ ID NO: 216043 - DNA, 553 bp, Homo sapiens
gagataccaaactgacactcatgaagaaattagatgagggagtctgggaatttaaatggcacacagaacaatgaaaaccgctaacgaaaatatggcaaacaaaaattcctagcctgttagaaggagaaattatcaatgcaataagcaccaagagaaaatttttctgagagcttaatttagtcaatgtaaaaatagagaagcaatgtattgtcatcagtacttttgcycatgttattttgacatcataaatccttttgttattggtcaatggggaataatcagcatgttcaagaaattgttgccttttatccacatagatttttgtgagaatcaaaaggagcattgacatttacagtatcttagctgacaaaaacaaatcaatggaaacttcagaaagggtgttcatatttataattagaattaatctgtcattcattctgagtcagtaaactggttgcaaattgtgggcaggtaaagagaatgttgtcagaagatgagcatataaatacatatgtaacattgtcagtttaataataaaactgatatgaaatga

SEQ ID NO: 216044 - DNA, 553 bp, Homo sapiens
gagataccaaactgacactcatgaagaaattagatgagggagtctgggaatttaaatggcacacagaacaatgaaaaccgctaacgaaaatatggcaaacaaaaattcctagcctgttagaaggagaaattatcaatgcaataagcaccaagagaaaatttttctgagagcttaatttagtcaatgtaaaaatagagaagcaatgtattgtcatcagtacttttgctcatgttattttgacatcataaatccttttgttattggtcaatggggaataatcagcatgttcaagaaattgttgccttttatccacatagatttttgtgagaatcaaaaggagcattgacatttacagtatcttagctgacaaaaacaaatcaatggaaacttcagaaagggtgttcatatttataattagaattaatctgtcattcattcygagtcagtaaactggttgcaaattgtgggcaggtaaagagaatgttgtcagaagatgagcatataaatacatatgtaacattgtcagtttaataataaaactgatatgaaatga

SEQ ID NO: 216045 - DNA, 632 bp, Homo sapiens
acccattttaaatccaacaagttagcatgggtaattcattgagcaatatcaaaatattttctatttcagacttggatatttggacttaatcatactcacttgtgtggaaagggggacagaaaagtaaacttgctcatttccaattaaacccaggaatgagattaagaccacattcttgaatttttggttcaggtcttacccaagtaagcaaactcatagcttcaactctttgtttggttctcatgaaacgaatgagcaaatacaatgtcaagcagcaaattttacttgctttattttttctacatgtaaaatttcacttgaaaatatgagatgagcagtttagaagtaaagtgcatggaatttggaggcaagmagatttgagcttgtgtaggtgcaatatcaacacttgactctgtcatctggaacaatcacataaactctgtatcccttggattatttacatgttcggtgggaattaaaatactacttaaaaacagaattattatgggagataattgtgatcatacctataagacattaaaacatactccatgacatatagtaagcacccaatgaatataacttgctccattaaaccaccaaaatctttactatttttcagatatacatgg

SEQ ID NO: 216046 - DNA, 548 bp, Homo sapiens
taactctctggtccttaatagaaaaacatgtcctgacccctgatagatgctcttagggttattcatgtctattgtgtctgtctggtagaaatattgtaaaatggcatgtgactgcacatcactttctgaccctacattcaatgacctctccaacctgaaattgccatggggaaaggcaaatgatataggcaaatgttgtgcactattgggcttttattcttttcctatgcctggaagtwtttttttttttttaactcctggaatcatttatctctacatcactgcataccactaacctcatccaaaaggtatggctatgaatgggaaaggagtgtcttcctagagagggaatgaatgctgagtggtggaattagctgcaattagcatctccagccttctagatcagtgcttttaactaaatgaccctacaagttgcagaaaaaaaaatgatactccaggatttttcaggccaaaggaagttaaaagagcatggatagagaagatagaaattgagcaagggagcaggaaaggtgaactctaataatgag

SEQ ID NO: 216047 - DNA, 509 bp, Homo sapiens
tttacaagcaattatgtaatatcacccaaggataatgttgtgctcctatcactcagaccctgaggccrgtagtataataaggctcagagtgaatcccttctttcgatgcaatggcttttacatgctgagggtcatatgcttctttcagagtctgatgaaaattatagaatctttctctagaaaaatacacaatttcctggattcatgtaactcccttgagtatgcttgtagagagcaatgaactcaagttcgtgatggaagtttaagagctgctttcatttgttaaatcttcatgtaagtcaccaaaaaagttatctttacattttatcttctttcatgtttcctttacctacttctttatcagacttgaggtaacatgacaaggaggctgaaaacattgaagacagaaattcctagacttaaatcctgatcctgtccttacttacccagtgacactgggcacatgacttaacttctctggcctgtttttctccagtaaaatggggtaa

SEQ ID NO: 216048 - DNA, 599 bp, Homo sapiens
ctcttcttacatatttcctctctttgactaactcttcagcctcactcttctactctaaggatgcttgtgataattttgggcctgcctgtgtaatccaggatcatatttatattttaaggtcagctgattgattaataaccttaattctatctgtaagcttaattcctttttccatagaaagtaacatatttccagttttggggattaggacatggacatcttaaggggggcattatttttcttaccacatctcccaatgactttattttatcaaacaaattwaaaaaaacctgtttgaagattcactttctctagaaatgacctcaactgatgctagttggaaatgcgcacagaggtcataagatggaattgttaacaagggacatttaacacgggtttagtaatttttcctgcaggtgtgacctcgcaatggcaagcattggatgcctgttgtaaacaaggtttttaagatcacttaaaaggccacagtaattggaaagcatgactttacacctacaggatgaataaaataaactactttcctcaggttacatgaatgagtatttgggataaatgtgccttgggataaaatttccaga

SEQ ID NO: 216049 - DNA, 615 bp, Homo sapiens
ggcagctaggactaacctacacttatattctttggcatgactcctgggaaagaaaatcactggaggaaaaaagtggagtcccgctcttctgatcatgtacattctgggcaatataaatgtgggacaaactgctagaatcggccctgctggtgatgttttttattgagatgacatttatagttcctgtgcatctccttagactgacagtgatgtgagggtagggcttgtgtctatcttattccctagcacccatcctggttcctggtagatagtacacagacattgagtaaatttttaatgaatgaataaatgacagaatggctgtatacmtgattcctcgattagtctgtgaattcttaaattcagaaacaatgtctaatactgagtatacttcctatttagagtttaatttattttctttctcccttttgctctataatgtttttaggtcagcaaggatttctcttctactttttatccttttttgcccccctgaactctcctccaaatacttctggccttatctcttgccttctcatcctctagatggctctcagaaaacacttaaccttctagttacattaccagtttaatgagttaggctgcttctcactc

SEQ ID NO: 216050 - DNA, 498 bp, Homo sapiens
gggtgaaacaggattggtgggatgaagaggaagaactcagttttggatatatttagatttgagacatgtttagatttaaggccatggattatagaagtgaaggtttctgagagatttaagtctgttgaagtctgaaagaacaggaactcttccctcctgttaggaggtcatgtaaggaacagaacctgagagatacttcactcttgaccttgactgtcttgcttccctctggtacatgaggatactgaggtcagttccttgcaagatcacaagcctgccgagacatcagagttgtcttagtcggcttgggctgcmatgaaaaatactacagactaggttgcttaaacaacatttattttcgcccagttgtggaggctggaagttcaagatgcagatgtcagcagtcctggtttctcctgaggccgcttcttgccttgcagatggccaccttcttgctgtgtcctcacatggccttttctctgtgcacccgcattcctg

SEQ ID NO: 216051 - DNA, 498 bp, Homo sapiens
gggtgaaacaggattggtgggatgaagaggaagaactcagttttggatatatttagatttgagacatgtttagatttaaggccatggattatagaagtgaaggtttctgagagatttaagtctgttgaagtctgaaagaacaggaactcttccctcctgttaggaggtcatgtaaggaacagaacctgagagatacttcactcttgaccttgactgtcttgcttccctctggtacatgaggatactgaggtcagttccttgcaagatcacaagcctgccgagacatcagagttgtcttagtcggcttgggctgccwtgaaaaatactacagactaggttgcttaaacaacatttattttcgcccagttgtggaggctggaagttcaagatgcagatgtcagcagtcctggtttctcctgaggccgcttcttgccttgcagatggccaccttcttgctgtgtcctcacatggccttttctctgtgcacccgcattcctg

SEQ ID NO: 216052 - DNA, 569 bp, Homo sapiens
taacctgctggaaataaatgattaaatatttttataaatttagccaaaatagactttggtccataacataaagcttaattcatgtgccagtgaaagatcaggtgcactggttcattcagcacacctaggcaagcccaggttggggtttgggaaagcatgtacatttcacatatttcaacaggagtgaaagaaaagacaagaaagctgatttcacaagactagagaaaatctcctctctcctttaattgccatggtgggtgagctgcagtatataattaatcccctggaggaagttttgtagccacgtcatattgttggaaatgagttaacactgaagcacaaaaacaacactattaaaggaagtggatagttctatagagtgaagaggatgtcacgaggtagaccactttttgaatgtccctttctttaacccwgtagaaggggcaggtgcaggaatgcgcaaggccagatgaccggatctcagtggggaatgggaatatggtttaccctatactgtgggtcttggccccacaggaaagcttttgtgaagcaccagagattgggctttc

SEQ ID NO: 216053 - DNA, 569 bp, Homo sapiens
taacctgctggaaataaatgattaaatatttttataaatttagccaaaatagactttggtccataacataaagcttaattcatgtgccagtgaaagatcaggtgcactggttcattcagcacacctaggcaagcccaggttggggtttgggaaagcatgtacatttcacatatttcaacaggagtgaaagaaaagacaagaaagctgatttcacaagactagagaaaatctcctctctcctttaattgccatggtgggtgagctgcagtatataattaatcccctggaggaagttttgtagccacgtcatattgttggaaatgagttaacactgaagcacaaaaacaacactattaaaggaagtggatagttctatagagtgaagaggatgtcacgaggtagaccactttttgaatgtccctttctttaacccagtagaaggggcaggtgcaggaatgcgcaaggccagatgacyggatctcagtggggaatgggaatatggtttaccctatactgtgggtcttggccccacaggaaagcttttgtgaagcaccagagattgggctttc

SEQ ID NO: 216054 - DNA, 375 bp, Homo sapiens
gaagcagaattgattgctaccaagaaaaccttgccctctttgtctgttcctgttatcaggctggaaagcaatcactggaaacttcattctactcacagaatattcaaagttgcgtctgaagtattgttcatttgaaaccagtgagtatccagtcatactcactagtatttgcttggawctcagtaatatctgtccagcattgccctctagtgcttgtgggcatgtttctaaagatgcctcacatcttctaattagggggtttggaaataaattatttagagaaagatatcctcccataacttcacagcaggctgaatgaaagttaagtcccagacagcataagaagttttatgagtacctcttacttggtcaacc

SEQ ID NO: 216055 - DNA, 600 bp, Homo sapiens
gttagcagtcagacctttagtattgtctagtgtgtttctagtgcaccgatgattttcccatggtccttggcagagccctggtttctcaggcttgcctttgggcatgctgaaagacctggcagcttcaaacagagcagctctgcttcatcctttaggcttccacttgacttcacttatttcttggctgacaaaaagaaaagctgggaaaactgcactgcctcactcacacatctccatccacactaagctcagagacacattctaagcaaagcttaaaccaaatggatgaatcaggctcctcttctgtttctgtggttaagaatacctacttctatgtcatggtamtggtaagtgttttgataaacactgcgattatgtgaaacattgagtaaaataaattctagcttggaagaaaataagaatacctaattcatacaagggtatcattacttataggagttagtaccagtaaagtatgctactaacaaagacctaattcaagagtcagcgcttcgaggttggcaaatggtgaattgaatccttctacccttccataatctgttattcaaatttggtctttattgaattcatgctacctgg

SEQ ID NO: 216056 - DNA, 550 bp, Homo sapiens
ttgtttattttttccacccagcacagtgtgaatgcagaaaatttttctctaggcagatgggactgagacctccttagagagtttcagtgaccaccacagagtctggaagggccagggagcataggagcagagatccccagtactcagagtagtgcaggaatgggggatggtctaccacgtgcccccagatgacagagagaagaaggattggaaaatgtctggcagttagaaacaaggaggaatcacagtagccacatggactaatggccaaagtccatataggaatggcaacttaccagcaaatgccagtgctaagagctaataatgacccaaacaagcttgtgcccactcacgctctaagttaatatgttgtgayattacagacacccactggaatttagatacaaccccagaaagggaggaaatagggaagccctgaattcattgaaattaatttttttttaccacttagaaaaatagaatcttgtcatagacattaagttctaaaacactcaagttctaaaaactaaaattgttaccagttcttaca

SEQ ID NO: 216057 - DNA, 375 bp, Homo sapiens
atgtagctgagtattgtccagaagttctagaaagtaaataagctagaaataaaaacaaatatctgattctcagataaaacaactaaccacccaaagagccaaggatactctgttctctaagaatcaagaacytgtaaatgaggacacttacagatattgcaaacaaaagtgttattggaagacccatgtcacttattggttgagaaacaaaaagacaactgtacaaatctgttgaaagataccgctccaagaaaacgtattggaagctgccaattcctgtcctttcactaaactccagaggggaattgtttacaaatataaatgaacaacaatacacttttcttgttgatcagtgccactctgtacaccatcaat

SEQ ID NO: 216058 - DNA, 555 bp, Homo sapiens
tgactagttaggatttatttcttgagaattttatttgcagaaatgactgtccttttgtagtatctactacttgttcccatcaatgtgactgataggtagcattgctagctggtcaaagctgcctggaaaatcccactgtctgtttgctttcaagcaaagcaaaagccatagctatacttctagcccaattagaaacacaaaagctctgtctcccaaaaaaaaacaactcaggagatcagggaggtcatacacttgcattttggcttttcaggccagaacgcagagggcacttttcctgtcacgtgaacagatgagcacagcagacactgtctgtgacctttggtggccacgctgtgcagggagctacctgcacagttgagaaagaatagagttcaaaatgagacacataagattgttggttgrtttttctttaatctttcattttctttttctttttaattgttttttccaggcagaaagggaaagcgtcagtatataactcagacattgctaaaatttgtaccaagctccccatcccaaactgaacaaccatcc

SEQ ID NO: 216059 - DNA, 600 bp, Homo sapiens
ttccagcatatctgcgctcatctttcaacaatctgtgtttcaaaaaagatcatctctcagcttaaatttaaaattatctgttatttcttcaagaggcaagatgtttgtcacccttcccacctgctcttggatgaccctctgtaggagaaaatgttccctatttcaagaagtaataaaagagaagagttcagcayaactaaatgtatcttcccaaatccttacttgccttgacattattttgggatatattcaagctgtcaaaacccttctgcttcaagacccaagtcagtcattgaccagaggacatggtctttgtgtgaatgtacagagcatgaacacacctagccaaagaccagtgagaattaatccacacaggctggcaggccaagtgggtctggttaagaaaggctgaactgctctaatgtcatgaagcggaagtagattgtctcggcagctgcggaggcacgctgatgcagccctcttcccgttgctgtggtcacaagcttcaggaagtaattttgtgttaacctttccacctcagtacctgaagcgtcattgagacctctaaaaattagtggaggatgatgagaggtagtatat

SEQ ID NO: 216060 - DNA, 600 bp, Homo sapiens
ttccagcatatctgcgctcatctttcaacaatctgtgtttcaaaaaagatcatctctcagcttaaatttaaaattatctgttatttcttcaagaggcaagatgtttgtcacccttcccacctgctcttggatgaccctctgtaggagaaaatgttccctatttcaagaagtaataaaagagaagagttcagcacaactaaatgtatcttcccaaatccttacttgccttgacattattttgggatatattcaagctgtcaaaacccttctgcttcaagacccaagtcagtcattgaccagaggacatggtctttgtgtgaatgtacagagcatgaacacacctagccaaagaccagtgagaattaatccacacaggctggcaggccaagtgggtctggttaagaaaggctgaactgctctaatgtcatgaagcggaagtagattgtctyggcagctgcggaggcacgctgatgcagccctcttcccgttgctgtggtcacaagcttcaggaagtaattttgtgttaacctttccacctcagtacctgaagcgtcattgagacctctaaaaattagtggaggatgatgagaggtagtatat

SEQ ID NO: 216061 - DNA, 600 bp, Homo sapiens
ttccagcatatctgcgctcatctttcaacaatctgtgtttcaaaaaagatcatctctcagcttaaatttaaaattatctgttatttcttcaagaggcaagatgtttgtcacccttcccacctgctcttggatgaccctctgtaggagaaaatgttccctatttcaagaagtaataaaagagaagagttcagcacaactaaatgtatcttcccaaatccttacttgccttgacattattttgggatatattcaagctgtcaaaacccttctgcttcaagacccaagtcagtcattgaccagaggacatggtctttgtgtgaatgtacagagcatgaacacacctagccaaagaccagtgagaattaatccacacaggctggcaggccaagtgggtctggttaagaaaggctgaactgctctaatgtcatgaagcggaagtagattgtctcggcagctgcggaggcacgctgatgcagccctcttcccgttgctgtggtcacaagcttcaggaagtaattttgtgttaacctttccacctcagtacctgaagygtcattgagacctctaaaaattagtggaggatgatgagaggtagtatat

SEQ ID NO: 216062 - DNA, 590 bp, Homo sapiens
cctgctaaattcctgctatgtctagacacttcatgcattctctcgtatttatttgtcataagaacactatgcagtgaattttatttccttctttgttttaattacaaggagagtgagagccatagaggttaagtgattttcattaatttgattcagcaatatggatggaacacctaccatgttccatccttttcctttgttctaggaatgcagccatgagcaacagagaccaggtctctgtcttcttagagckcacattctaagtgtgggtggggagcaggcagtaaacatgaagaaaactcaacaaatgagagccctctgcatttgcatgcttccatggactggggcataattttacaacagatttcccatgtcagttttccacactgccagaaacttctcagactctaaagccagactcattttggaataccagaagagtttaccaaaggaatttagaagagttgattggtggcttgcatcttcacttttcttatattttctggtggcgcttgacattgctttcaatgtcatttcatccacagcacagtgctggaaaaactagatagtagaagtcacgtgtgacttgc

SEQ ID NO: 216063 - DNA, 590 bp, Homo sapiens
cctgctaaattcctgctatgtctagacacttcatgcattctctcgtatttatttgtcataagaacactatgcagtgaattttatttccttctttgttttaattacaaggagagtgagagccatagaggttaagtgattttcattaatttgattcagcaatatggatggaacacctaccatgttccatccttttcctttgttctaggaatgcagccatgagcaacagagaccaggtctctgtcttcttagagcgcacattctaagtgtgggtggggagcaggcagtaaacatgaagaaaactcaacaaatgagagccctctgcatttgcatgcttccatggactggggcataattttacaacagatttcccatgtcagttttccacactgccagaaacttctcagactctaaagccagactcattttggaataccagaagagtttaccaaaggaatttagaagagttgattggtggcttgcatcttcacttttcttatattttctggtggcgcttgacattgctttcaatgtcatttcatccacagcrcagtgctggaaaaactagatagtagaagtcacgtgtgacttgc

SEQ ID NO: 216064 - DNA, 590 bp, Homo sapiens
cctgctaaattcctgctatgtctagacacttcatgcattctctcgtatttatttgtcataagaacactatgcagtgaattttatttccttctttgttttaattacaaggagagtgagagccatagaggttaagtgattttcattaatttgattcagcaatatggatggaacacctaccatgttccatccttttcctttgttctaggaatgcagccatgagcaacagagaccaggtctctgtcttcttagagcgcacattctaagtgtgggtggggagcaggcagtaaacatgaagaaaactcaacaaatgagagccctctgcatttgcatgcttccatggactggggcataattttacaacagatttcccatgtcagttttccacactgccagaaacttctcagactctaaagccagactcattttggaataccagaagagtttaccaaaggaatttagaagagttgattggtggcttgcatcttcacttttcttatattttctggtggcgcttgacattgctttcaatgtcatttcatccacagcacagtgctggraaaactagatagtagaagtcacgtgtgacttgc

SEQ ID NO: 216065 - DNA, 542 bp, Homo sapiens
tattgttgctatcagtgctcacatacactgtccaggaccctgaggagcagyccaccccacccaggcctctgtgcctttacccaggccccgtctaccactaataccaaggagagtcctactgccccaccggcacctgcacatggcatccaggagcataaagacagggctgcctcaccagccactggcaaaggttcctgcacgtgtcttcagttaacctgtggacaagcctgctccacacactgccttaggtacccacctaaatgttcctcatagggggccagagaaatgcccatgcagcctgctttcaccactaccagtgcccatgcatgctaccaagggatccaaggtccggcccccagctgctactgtcatctccagtgccacaagtgtcaccaaggtcctgtggcctggcctgctattgccacctctgatcccagcacacaccacctggaggcccaagggccagcccactcaggtaacccactgccacaaaaactgggaagcatggcctggtgctgccaatcacacatacatccttgtgt

SEQ ID NO: 216066 - DNA, 542 bp, Homo sapiens
tattgttgctatcagtgctcacatacactgtccaggaccctgaggagcagtccaccccacccaggcctctgtgcctttacccaggccccrtctaccactaataccaaggagagtcctactgccccaccggcacctgcacatggcatccaggagcataaagacagggctgcctcaccagccactggcaaaggttcctgcacgtgtcttcagttaacctgtggacaagcctgctccacacactgccttaggtacccacctaaatgttcctcatagggggccagagaaatgcccatgcagcctgctttcaccactaccagtgcccatgcatgctaccaagggatccaaggtccggcccccagctgctactgtcatctccagtgccacaagtgtcaccaaggtcctgtggcctggcctgctattgccacctctgatcccagcacacaccacctggaggcccaagggccagcccactcaggtaacccactgccacaaaaactgggaagcatggcctggtgctgccaatcacacatacatccttgtgt

SEQ ID NO: 216067 - DNA, 542 bp, Homo sapiens
tattgttgctatcagtgctcacatacactgtccaggaccctgaggagcagtccaccccacccaggcctctgtgcctttacccaggccccgtctaccactaataccaaggagagtcctactgccccaccggcacctgcacrtggcatccaggagcataaagacagggctgcctcaccagccactggcaaaggttcctgcacgtgtcttcagttaacctgtggacaagcctgctccacacactgccttaggtacccacctaaatgttcctcatagggggccagagaaatgcccatgcagcctgctttcaccactaccagtgcccatgcatgctaccaagggatccaaggtccggcccccagctgctactgtcatctccagtgccacaagtgtcaccaaggtcctgtggcctggcctgctattgccacctctgatcccagcacacaccacctggaggcccaagggccagcccactcaggtaacccactgccacaaaaactgggaagcatggcctggtgctgccaatcacacatacatccttgtgt

SEQ ID NO: 216068 - DNA, 542 bp, Homo sapiens
tattgttgctatcagtgctcacatacactgtccaggaccctgaggagcagtccaccccacccaggcctctgtgcctttacccaggccccgtctaccactaataccaaggagagtcctactgccccaccggcacctgcacatggcatccaggagcataaagacagggctgcctcaccagccactggcaaaggytcctgcacgtgtcttcagttaacctgtggacaagcctgctccacacactgccttaggtacccacctaaatgttcctcatagggggccagagaaatgcccatgcagcctgctttcaccactaccagtgcccatgcatgctaccaagggatccaaggtccggcccccagctgctactgtcatctccagtgccacaagtgtcaccaaggtcctgtggcctggcctgctattgccacctctgatcccagcacacaccacctggaggcccaagggccagcccactcaggtaacccactgccacaaaaactgggaagcatggcctggtgctgccaatcacacatacatccttgtgt

SEQ ID NO: 216069 - DNA, 420 bp, Homo sapiens
tgaattctagtgttctgttgcattgtagggtgaatatggttaactaatatttttttttttttgagacagagtcttgctctgtcacccaggcttggcgtgcagtggtgcaatctcagctcactgcaatctccgcctccggggttcaagccattctcctgcctcagcctcccaaacagctgggattacaggtgtgtgccactacacctggcttggctagctaatatttaaaaagctagaggrgaggattttgaaagttcacaacacaaagaaatggtaaatgtttgaggtgatggaatatattaattagcctgatttgaccattatacattgtttacacatatcaaaatatcactgtgtataccataaatatgtacaattatacaggtccacaaaaaatcaaaggaagccaggtgtggtgtc

SEQ ID NO: 216070 - DNA, 420 bp, Homo sapiens
tgaattctagtgttctgttgcattgtagggtgaatatggttaactaatatttttttttttttgagacagagtcttgctctgtcacccaggcttggcgtgcagtggtgcaatctcagctcactgcaatctccgcctccggggttcaagccattctcctgcctcagcctcccaaacagctgggattacaggtgtgtgccactacacctggcttggctagctaatatttaaaaagctagaggagaggattttgaaagttcacaacacaaagaaatggtaaatgtttgaggtgatggaatatattaattagcctgatttgaccattatrcattgtttacacatatcaaaatatcactgtgtataccataaatatgtacaattatacaggtccacaaaaaatcaaaggaagccaggtgtggtgtc

SEQ ID NO: 216071 - DNA, 420 bp, Homo sapiens
tgaattctagtgttctgttgcattgtagggtgaatatggttaactaatatttttttttttttgagacagagtcttgctctgtcacccaggcttggcgtgcagtggtgcaatctcagctcactgcaatctccgcctccggggttcaagccattctcctgcctcagcctcccaaacagctgggattacaggtgtgtgccactacacctggcttggctagctaatatttaaaaagctagaggagaggattttgaaagttcacaacacaaagaaatggtaaatgtttgaggtgatggaatatattaattagcctgatttgaccattatacattgtttacacatatcaaaatatcactgtgtataccataaatatgtwcaattatacaggtccacaaaaaatcaaaggaagccaggtgtggtgtc

SEQ ID NO: 216072 - DNA, 557 bp, Homo sapiens
gaggactggccccctcttctcctgtcctcttcagtgccagcggcttccggctccccgaggacccctcccatcctygtgtcctcatcgggcctggcacaggcatcgctcccttcctcagtttctggcagcagcggctccatgactcccagcaaaagggtgtggctggaggcttccccggtgggagggtaccagaggccagcgcctgcctaggagcagaaccgtagccccacaaacggttcctggacctctctggagggaaggcctcccaagtttgtctccctgtgtggggcctatgtgggtgagaacggccgccttcctgtctccggcattggaaccggggctccctctctcgtgagtggaggtaacgggaaagtccctgcttttgacttccgatgggctgagggaatcctgcatctgcactttcagttgtgtgactatgtatgagtgattggaatgccctgggcctcagtttcttcatctgtaaagtggggataatgctgttaactagctaggatacttgtgggagtgaagtgagaattccagttcggctttgagcc

SEQ ID NO: 216073 - DNA, 557 bp, Homo sapiens
gaggactggccccctcttctcctgtcctcttcagtgccagcggcttccggctccccgaggacccctcccatccttgtgtcctcatcgggcctggcacaggcatcgctcccttcctcagtttctggcagcagcggctccatgactcccagcaaaagggtgtggctggaggcttcccmggtgggagggtaccagaggccagcgcctgcctaggagcagaaccgtagccccacaaacggttcctggacctctctggagggaaggcctcccaagtttgtctccctgtgtggggcctatgtgggtgagaacggccgccttcctgtctccggcattggaaccggggctccctctctcgtgagtggaggtaacgggaaagtccctgcttttgacttccgatgggctgagggaatcctgcatctgcactttcagttgtgtgactatgtatgagtgattggaatgccctgggcctcagtttcttcatctgtaaagtggggataatgctgttaactagctaggatacttgtgggagtgaagtgagaattccagttcggctttgagcc

SEQ ID NO: 216074 - DNA, 463 bp, Homo sapiens
agagagtctaagtcctcatttgaaacctgaggccaggaaaatgaaggttctcctatcatttatggctggatttaagtgataattgaaattaatcccatgtctttgtatgtacaaattartgattagaagttggacagacgtgtggtagatggtaaagagaaatctgttttgtgttttcagtttttctataagtaactcacaacatggataattgacttgattgattttcctaaaccacgtcttatttggaggagaatgaatagttcttttaaggaacagttttcttaatttctgcttgcttggttcaactaaagattttctccttcaagttttctgttctgcgttttgaaaaatgggttctttataaattgagtgtcttgactggtactagccagaagttatgatattaattgttctttaaatttgattcataacttacaatttggagagctactattttttg

SEQ ID NO: 216075 - DNA, 463 bp, Homo sapiens
agagagtctaagtcctcatttgaaacctgaggccaggaaaatgaaggttctcctatcatttatggctggatttaagtgataattgaaattaatcccatgtctttgtatgtacaaattagtgatkagaagttggacagacgtgtggtagatggtaaagagaaatctgttttgtgttttcagtttttctataagtaactcacaacatggataattgacttgattgattttcctaaaccacgtcttatttggaggagaatgaatagttcttttaaggaacagttttcttaatttctgcttgcttggttcaactaaagattttctccttcaagttttctgttctgcgttttgaaaaatgggttctttataaattgagtgtcttgactggtactagccagaagttatgatattaattgttctttaaatttgattcataacttacaatttggagagctactattttttg

SEQ ID NO: 216076 - DNA, 463 bp, Homo sapiens
agagagtctaagtcctcatttgaaacctgaggccaggaaaatgaaggttctcctatcatttatggctggatttaagtgataattgaaattaatcccatgtctttgtatgtacaaattagtgattagaagttggacagacgtgtggtagatggtaaagagaaatctgttttgtgttttcagtttttctataartaactcacaacatggataattgacttgattgattttcctaaaccacgtcttatttggaggagaatgaatagttcttttaaggaacagttttcttaatttctgcttgcttggttcaactaaagattttctccttcaagttttctgttctgcgttttgaaaaatgggttctttataaattgagtgtcttgactggtactagccagaagttatgatattaattgttctttaaatttgattcataacttacaatttggagagctactattttttg

SEQ ID NO: 216077 - DNA, 556 bp, Homo sapiens
gaagcccactcctaccttgtaactaattggttttgtgacctcaggcaagctgcagkctctctgagcctgttttgtttcttatgtaaaattaaggactttgactaaatcagtgacattcatacgtttaagtaaatctctttttttttttaagaatggaacttttttaaattgcataaaaccacattatagaaaacagaagtagtgctgcctgactaaaggaaggatcagtgctctgaagctgtgactttcttatcccttaatccttcagcatcctctgtggaaccttagatttctgtgggacatagcttgaaaaggatcatttcttgaattattacttttataaggcctggatggtaatgctgttgtcatgttacctactctataaagcctatctgtaatgtttttgtcacagaaatgttatggaaaggagtctcaaaatattggtaaacctgttagtaaaacaaaaaaattgacttgacacctaaaatttgtaaaggcattagatatcattatctttatcaccacaaactatctcagaccctgttctaggcattta

SEQ ID NO: 216078 - DNA, 556 bp, Homo sapiens
gaagcccactcctaccttgtaactaattggttttgtgacctcaggcaagctgcaggctctctgagcctgttttgtttcttatgtaaaattaaggactttgactaaatcagtgacattcatacgtttaagtaaatctctttttttttttaagaatggaacttttttaaattgcataaaaccacattatagaaaacagaagtagtgctgcctgactaaaggaaggatcagtgctctgaagctgtgactttcttatcccttaatccttcagcatcctctgtggaaccttagatttctgtgggacatagcttgaaaaggatcatttcttgaattattacttttataaggcctggatggtaatgctgttgtcatgttacctactctataaagcctatctrtaatgtttttgtcacagaaatgttatggaaaggagtctcaaaatattggtaaacctgttagtaaaacaaaaaaattgacttgacacctaaaatttgtaaaggcattagatatcattatctttatcaccacaaactatctcagaccctgttctaggcattta

SEQ ID NO: 216079 - DNA, 556 bp, Homo sapiens
gaagcccactcctaccttgtaactaattggttttgtgacctcaggcaagctgcaggctctctgagcctgttttgtttcttatgtaaaattaaggactttgactaaatcagtgacattcatacgtttaagtaaatctctttttttttttaagaatggaacttttttaaattgcataaaaccacattatagaaaacagaagtagtgctgcctgactaaaggaaggatcagtgctctgaagctgtgactttcttatcccttaatccttcagcatcctctgtggaaccttagatttctgtgggacatagcttgaaaaggatcatttcttgaattattacttttataaggcctggatggtaatgctgttgtcatgttacctactctataaagcctatctgtaatgtttttgtcacagaaatgttatggaaaggagtctcaaaatattggtaaacctgttagtaaaacaaaaaaattgacttgacacctaaaatttstaaaggcattagatatcattatctttatcaccacaaactatctcagaccctgttctaggcattta

SEQ ID NO: 216080 - DNA, 624 bp, Homo sapiens
cttaccatgataatgtctcttcttaaacgttataaataatatttgacttatttcagatgcagcagaagtgcattatgacctaactgcagaagtagcaggtatgttaccaaaattatgaattaaatttagattaatatatatctgaaataacctgcaaacgacatcccttccgtttcgggggttagtagatactacattaaatatctttcatatacatctaatgaaagatgtgaaatcctgaacatgtatattgaagagcatacttatgcctcatgaatcatcacgttccatagcttgaaaaaaatagctcaagaagtctggctctactcttcacttctgccatccctatggaattgtcagttcagcacacagaaacggttctcagaaaacagargcatcatcaacttctcagggttatggtagtgatttttaaggccaaaacatcccagtctcatctagtaacctattcaagcagttacagtttatatgtcagtcgcttgagaggtaacactttaaatctccagtcatttacagtgtcattggtttacttttgccttcagaaaaagttccaaattccttaacatgtaatataaacacccacattcatttggttcttgtcaagtt

SEQ ID NO: 216081 - DNA, 426 bp, Homo sapiens
ttcatccttgttaactcccccatgaaagaagcaagagtctttcctatcagctctaatttttgaaaagtttatgaaaggacagcttaggtcactgcgcatacctggactgatcactgtggccaaggggatgaagaaccatctcctgccttgccttaaccacatacccaccagtttggccagatcaaaggaagagtattagtagcaaaaacatggtcattagagatattcttaagtactgaaagatactctaatttgtcatctgttatattgcaagtcataagataattactattattatttttaagagtgatamagtcatccctcagtatctgtgggggattagtgccaggaacacttgcagatatcaaaatccatgaatgctcaagtcccttatagaagatggtgtaatatgtgcatataacatat

SEQ ID NO: 216082 - DNA, 427 bp, Homo sapiens
tcttcctcttccctgagaagaggtttctagaggtgtcaattgcaactgtatgttagctatggataaaggatttgacaaagctcaatgaaagcatatgtgagaatcaattggctgcatggaatttacaatacagagtattatgtagtttactgttatttgcttattgtgggatatacatcatttwtagcagcaaaatgtataataaatgtatacatgtataggcatttttttcagagaactagttgtgaaacaccagcatacctctgcttacagagatataaagataaataagataacacaaatttgaagtggatgagaaagaaaaaggaacgaaaagaagaggaacatattagaataggaaataacagtaatagaaaatttcatctccttgtgtgcagctatatgacatggttggccacagattttg

SEQ ID NO: 216083 - DNA, 427 bp, Homo sapiens
tcttcctcttccctgagaagaggtttctagaggtgtcaattgcaactgtatgttagctatggataaaggatttgacaaagctcaatgaaagcatatgtgagaatcaattggctgcatggaatttacaatacagagtattatgtagtttactgttatttgcttattgtgggatatacatcatttatagcagcaaaatgtrtaataaatgtatacatgtataggcatttttttcagagaactagttgtgaaacaccagcatacctctgcttacagagatataaagataaataagataacacaaatttgaagtggatgagaaagaaaaaggaacgaaaagaagaggaacatattagaataggaaataacagtaatagaaaatttcatctccttgtgtgcagctatatgacatggttggccacagattttg

SEQ ID NO: 216084 - DNA, 514 bp, Homo sapiens
tctctctctaaaatgaaacccagatttatctgtttgtaggaatgtcagcattgtaaaagatgtttttgataattgtagcaagtcttaaaacacaacaagtgtggggtgtcatggtgattcataaattgttcatgttggcatcacactggtcaaactgggttcctggtgaacccaccattatttttctctctccttccccatatcacaaagggcttcagaatctaggctgccatgtcaggctgcctgggtttgaatcctgcctttgccgcacacttagtcatgtgacattgaacaattttctgtgacgccatttgctaacacatgaaattgtggtcagagttgtgtctgtatcagtggattgctatggagattaaatgagtgataggtgtaaatcatgggagacgggggtcctattgtagtggaagtcctcactgaggggctggtcttattctaactccccaccttgacctgyaccctctctgcccacgtccattagaacccagtgatgcccagc

SEQ ID NO: 216085 - DNA, 594 bp, Homo sapiens
taagcttataaaatataaaatcagtacccattccttagtgacatgcctccaaagaacaatgcatgcaaagtaaaaaacagtaactttacagtgaaaaaaagctggaagatatgacattagccagcggaccacggttcataycaccaatgacaaaatgtgtgaatgtgatatgacaagaagaacactcaacttctgtgattgtctttcccaaatcaatagcctcagtctaataatggtaaaatattagatgaatccatactgaaggacattctacaaaatatctgaccaatattcttcaaaagtatcataacaataaaagaccaggaaagacagagtaactgtaacagaccagggaagggtgttaactggactaaatatgtcactccaaaactcatacgctgaaatcctcaatcccaatgtgatggcattaggaggtgaggccttcaggagcaagatggtcatgagagtggttatgacactggtgcatttataaagaagaagagacaggaccagatcctgcgctgtccaccataggaagatacaatgtgagaagacagctatctgcaaaccagaaagtgtcctcaccagatgcca

SEQ ID NO: 216086 - DNA, 594 bp, Homo sapiens
taagcttataaaatataaaatcagtacccattccttagtgacatgcctccaaagaacaatgcatgcaaagtaaaaaacagtaactttacagtgaaaaaaagctggaagatatgacattagccagcggaccacggttcataccaccaatgacaaaatgtgtgaatgtgatatgacaagaagarcactcaacttctgtgattgtctttcccaaatcaatagcctcagtctaataatggtaaaatattagatgaatccatactgaaggacattctacaaaatatctgaccaatattcttcaaaagtatcataacaataaaagaccaggaaagacagagtaactgtaacagaccagggaagggtgttaactggactaaatatgtcactccaaaactcatacgctgaaatcctcaatcccaatgtgatggcattaggaggtgaggccttcaggagcaagatggtcatgagagtggttatgacactggtgcatttataaagaagaagagacaggaccagatcctgcgctgtccaccataggaagatacaatgtgagaagacagctatctgcaaaccagaaagtgtcctcaccagatgcca

SEQ ID NO: 216087 - DNA, 567 bp, Homo sapiens
gtctccatgcctgaaaagtcttctgcgctctgcctattcctccctccctcatccctaactactggaactactgaacttgttattgtctctgtagttttgcatttcccaaagtgtcatatatttggaatcatacagtatgtagccttttcagatggacttctgtcaattagtaatatagatttaagtttcctccatgtattttcattactcaatagctygtttttcactgttgaatactatgttattttctgaatgtaccaccaaggtttaattcattcatctactaaaggacatgttggttgcttctaagttttgacgtttatgggtaaagttgctataaacatccatgtggaggttttgatgtggacataactatttaacttatatgggtaaataccaatgaatatgatggttggaaagtggtataagagtgtgtttagttttgtaagaagcaaccaaatgtcttccaagtagtaacaccattttgccttcccatcagcagtgactgggagttcttgttccacatccttgccagcatttgaagtttctggtgttctgaatactggt

SEQ ID NO: 216088 - DNA, 567 bp, Homo sapiens
gtctccatgcctgaaaagtcttctgcgctctgcctattcctccctccctcatccctaactactggaactactgaacttgttattgtctctgtagttttgcatttcccaaagtgtcatatatttggaatcatacagtatgtagccttttcagatggacttctgtcaattagtaatatagatttaagtttcctccatgtattttcattactcaatagctcgtttttcactgttgaatactatgttattttctgaatgtaccaccaaggtttaattcattcatctactaaaggacatgttggttgcttctaagttttgacgtttatgggtaaagytgctataaacatccatgtggaggttttgatgtggacataactatttaacttatatgggtaaataccaatgaatatgatggttggaaagtggtataagagtgtgtttagttttgtaagaagcaaccaaatgtcttccaagtagtaacaccattttgccttcccatcagcagtgactgggagttcttgttccacatccttgccagcatttgaagtttctggtgttctgaatactggt

SEQ ID NO: 216089 - DNA, 477 bp, Homo sapiens
cagtatgtttagaatacagtataaaatgatatcttgatgggaaagatgaataaatatgggcttgccactggttgatttaggggagttagtaactaattgaaatgcttaaacttaaagttactgatcagttttgtaatagaagagaacttcgtcttcaaccctgccttcttaagcattaaaaaaaatgaactggattaagatgtacaatttatgcttaaaaactatgttcgccatttgaagatatacagaagattccacatttgtcatgatggaatgagaaattcataaaatttcaaagagcaagaayattagagtaaatctatcaagaaaatacaaattgtacaatagatgaacataaaaataagcatacaagaacaaaatgaggaagtgctatggtttatgtatgtgatcccctaaaattcataaaacttaattacaatgtgataatattaagaggtggggtctttaggaggtgat

SEQ ID NO: 216090 - DNA, 477 bp, Homo sapiens
cagtatgtttagaatacagtataaaatgatatcttgatgggaaagatgaataaatatgggcttgccactggttgatttaggggagttagtaactaattgaaatgcttaaacttaaagttactgatcagttttgtaatagaagagaacttcgtcttcaaccctgccttcttaagcattaaaaaaaatgaactggattaagatgtacaatttatgcttaaaaactatgttcgccatttgaagatatacagaagattccacatttgtcatgatggaatgagaaattcataaaatttcaaagagcaagaacattagagtaaatctatcaagaaaatacaaattgtacaatagatgaacataaaaataagcatacaagaacaaaatgaggaagtgctatgktttatgtatgtgatcccctaaaattcataaaacttaattacaatgtgataatattaagaggtggggtctttaggaggtgat

SEQ ID NO: 216091 - DNA, 619 bp, Homo sapiens
tggaaatctactgagcaatttcttttctaaaggagttcatatggtaactaaaaccatttctgatggtaaaatttgtgcacacattgaaaccaaatcaccaaattattatttgttaaaattagtattcacacaaacacattgtaggttataggaatagataattttcctygattttcttctttagccttagcatttgtcagaaataggagccaataagaaaagtccaggtatgaggatttttgtctttacatgcataggtgagtgggcacatttggaatcaaaggcaatgttcttaagttctgaagatgagaccatgatgtttaggtctagagtttactgtactgacctggatcataaaggatgagaggtcatttatttagcttgtcttttatccatatgtaaacaaatctcaataaagatttgtaaaaccatctttgtaaaagctataagaaatacttttgagaaaaaaaaattttttaacagaattattttagaaagttacagaatttaaaataattagagaacggaaagtttcaaagctgaacttattttggataacacgtttattcttctctacattcaagctttgaaagctaatattctgttgcttcgtaggttg

SEQ ID NO: 216092 - DNA, 417 bp, Homo sapiens
tccttgattttcttctttagccttagcatttgtcagaaataggagccaataagaaaagtccaggtatgaggatttttgtctttacatgcataggtgagtgggcacatttggaatcaaaggcaatgttyttaagttctgaagatgagaccatgatgtttaggtctagagtttactgtactgacctggatcataaaggatgagaggtcatttatttagcttgtcttttatccatatgtaaacaaatctcaataaagatttgtaaaaccatctttgtaaaagctataagaaatacttttgagaaaaaaaaattttttaacagaattattttagaaagttacagaatttaaaataattagagaacggaaagtttcaaagctgaacttattttggataacacgtttattcttctctacattc

SEQ ID NO: 216093 - DNA, 497 bp, Homo sapiens
aactgggctgttgtatgaacaaacattcaggcttactagaaagggactacaggataatgtaaaataggaaagattttttatttgaagatcagtcaccctaaatctccttggcaggtaacgttaacagagattcaccatttgctgtayttctcttaacgtcttatttgctgcatattccatggtgccgtccctttccactgtgcataatgacgctcaggctgacagttcaaaactccaaagttttctatcctttaaagtatacataaatctgttcattaacctgtaacaagagtgggcctaatacataaccttgcttatacaagaagttcgctgacaagtcactctaaacacattagtaatagatggctgccaccacttatattaggactattctaatactttttagactatagtaaagtgttttatatttattcctacattgtgtgcaacaaaatgactaggacatcatatatcgatatactatataaattacaagt

SEQ ID NO: 216094 - DNA, 497 bp, Homo sapiens
aactgggctgttgtatgaacaaacattcaggcttactagaaagggactacaggataatgtaaaataggaaagattttttatttgaagatcagtcaccctaaatctccttggcaggtaacgttaacagagattcaccatttgctgtacttctcttaacgtcttatttgctgcatattccatggtgccgtccctttccactgtgcataatgacgctcaggctgacagttcaaaactccaaagttttctatcctttaaagtatacataaatctgttcattaacctgtaacaagagtgggcctaatacataaccttgcttatmcaagaagttcgctgacaagtcactctaaacacattagtaatagatggctgccaccacttatattaggactattctaatactttttagactatagtaaagtgttttatatttattcctacattgtgtgcaacaaaatgactaggacatcatatatcgatatactatataaattacaagt

SEQ ID NO: 216095 - DNA, 579 bp, Homo sapiens
ctatgcggaggcaatcattggatggtgcactgccccagaggacaaaggttctctgagtcagaagcccccaaccagatgatccaamaacaggactgagggtgcctgggcaagcgccagctcatgtcatcaccctcactgagccctgagtacgtttaaccattaagggtcaggaaattgacttcctcctggacactggcatggccttctcagtgctaatctcctgtcgtggatgactgtcctcaaggtccgttaccatccgaggaatcctgggacagcctgtaaccaggtatttctcccacctcctcagttgtaattgggagacctttctcttctcacatgtcttttttgttatgtctgaaagtcccacacccttattagggagggatatgttagccaaagctggagctattatctacatgaatatggggaacaagttacccatttgttgtcccctacttgaggagggaatcaaccctgaagtctgggcattggaaggacaaattggaagggcaaaaaatgcccgcccactccaaatcaggctaaaagaccccaccacttttccttatcaaaggcaatatc

SEQ ID NO: 216096 - DNA, 579 bp, Homo sapiens
ctatgcggaggcaatcattggatggtgcactgccccagaggacaaaggttctctgagtcagaagcccccaaccagatgatccaaaaacaggactgagggtgcctgggcaagcgccagctcatgtcatcaccctcactgagccctgagtacgtttaaccattaagggycaggaaattgacttcctcctggacactggcatggccttctcagtgctaatctcctgtcgtggatgactgtcctcaaggtccgttaccatccgaggaatcctgggacagcctgtaaccaggtatttctcccacctcctcagttgtaattgggagacctttctcttctcacatgtcttttttgttatgtctgaaagtcccacacccttattagggagggatatgttagccaaagctggagctattatctacatgaatatggggaacaagttacccatttgttgtcccctacttgaggagggaatcaaccctgaagtctgggcattggaaggacaaattggaagggcaaaaaatgcccgcccactccaaatcaggctaaaagaccccaccacttttccttatcaaaggcaatatc

SEQ ID NO: 216097 - DNA, 583 bp, Homo sapiens
atattttaaaacccagcatcaaaaatcagtaaggcttatatattttctgacaagcaggaaaaatgtaaccctgaatatagaagcacagttcctgtatggtattactgggatgggcttgggactaacctccttgtcttttccttcttcaggaaacagagctttgagggaaaagtcaaaacttagtactacttggtaataagtaggagaagtagattcatgataaataaataaagttagcacatgatctttacggacatcagaaagtgtgatttattcatcttcattgaacattgaagtcttttgaattgcttagaaattaatgtaaatttatacaatgaaggaatgacactgagctctaatcatcattgtcatatatttgatgggctaattagttaatttcacatattttagcagaaacataccaaagytgtagaacagtggtattacagatcaaatgcctgggataaacaacaatggttatttgaaatataactatttagttacaagcgtatttttcaatactggaaatttgtttgcaagctaactcaaaataacacagttgataatatttaaagttcatgga

SEQ ID NO: 216098 - DNA, 443 bp, Homo sapiens
actagagtatatgaacatttttaatgatctagataaatattgctaaattactttcttcaaagcttgtagcaaattaagctcccatgagcattatacacctgggactttccagacattttagcatttacaaataaagcaaacaacaaattaatkagtgtcactgataacaatatatttttatttttgtattattggatttctacagagaaaaaacatgagtttatatgcatttgattttttttgtaacatatccattaatgtcatttattgccctttctatcagtgtatccaaattctttgaattgtaaaaactcattatatattaataatatttctgccaaactgcctttgcaaatttgtcctgttgtttctgtttatgcttcatattaaaaatcttattttgaatatttaaaaattgcagaaaagctgctagaatagtagaa

SEQ ID NO: 216099 - DNA, 443 bp, Homo sapiens
actagagtatatgaacatttttaatgatctagataaatattgctaaattactttcttcaaagcttgtagcaaattaagctcccatgagcattatacacctgggactttccagacattttagcatttacaaataaagcaaacaacaaattaattagtgtcactgataacaatatatttttatttttgtattattggatttmtacagagaaaaaacatgagtttatatgcatttgattttttttgtaacatatccattaatgtcatttattgccctttctatcagtgtatccaaattctttgaattgtaaaaactcattatatattaataatatttctgccaaactgcctttgcaaatttgtcctgttgtttctgtttatgcttcatattaaaaatcttattttgaatatttaaaaattgcagaaaagctgctagaatagtagaa

SEQ ID NO: 216100 - DNA, 443 bp, Homo sapiens
actagagtatatgaacatttttaatgatctagataaatattgctaaattactttcttcaaagcttgtagcaaattaagctcccatgagcattatacacctgggactttccagacattttagcatttacaaataaagcaaacaacaaattaattagtgtcactgataacaatatatttttatttttgtattattggatttctacagagaaaaaacatgagtttatatgcatttgattttttttgtaacatatccattaatgtcatttattgccctttctatcagtgtatccaaattctttgaattgtaaaaactcattatatattaataatatttctgccaaactgcctttgcaaatttgtcctgttgtttctgtttatgmttcatattaaaaatcttattttgaatatttaaaaattgcagaaaagctgctagaatagtagaa

SEQ ID NO: 216101 - DNA, 608 bp, Homo sapiens
cggtggctcatgcctgtaatcccagcactttgggaggctgaggtggctgtatcacctgagtcaggagtttgagaccagcctggccaacatggtgaaaccccatttctactaaaaatacaaaaatcagccaggtggtgtggcacrcacctgtaattccagctactcgggaggctgagacaggagaatcacttgaacctgggaggtggaggttgcagtgagctgagatcacaccactgccctccagcctgggcagcagagcaagagtctgtctcaaaaaaaaaaaaaaaaaaaagagagaaagaaagaagaaaagttgaaaataccatacttccttatttcaaattatattataaagcaatagtaaccaatgaatatgctactggcataaaaactgacccagagttcaatggaacaatactgagagcctccaacataaacctaagcatatattgtcaacaaaggcaccaagaagacacaatgaggagaagacattgtcctcaacaagtggtattggttaaatgagatccacatgcaaaatatttaaatagtgcactaatcttagataatacacaaaatcataagaactgaaactgtaaaacccctagaag

SEQ ID NO: 216102 - DNA, 608 bp, Homo sapiens
cggtggctcatgcctgtaatcccagcactttgggaggctgaggtggctgtatcacctgagtcaggagtttgagaccagcctggccaacatggtgaaaccccatttctactaaaaatacaaaaatcagccaggtggtgtggcacacacctgtaattccagctactcgggaggctgagacaggagaatcacttgaacctgggaggtggaggttgcagtgagctgagatcacaccactgccctccagcctgggcagcagagcaagagtctgtctcaaaaaaaaaaaaaaaaaaaagagagaaagaaagaagaaaagttgaaaataccatacttccttatttcaaattatattataaagcaatagtaaccaatgaatakgctactggcataaaaactgacccagagttcaatggaacaatactgagagcctccaacataaacctaagcatatattgtcaacaaaggcaccaagaagacacaatgaggagaagacattgtcctcaacaagtggtattggttaaatgagatccacatgcaaaatatttaaatagtgcactaatcttagataatacacaaaatcataagaactgaaactgtaaaacccctagaag

SEQ ID NO: 216103 - DNA, 608 bp, Homo sapiens
cggtggctcatgcctgtaatcccagcactttgggaggctgaggtggctgtatcacctgagtcaggagtttgagaccagcctggccaacatggtgaaaccccatttctactaaaaatacaaaaatcagccaggtggtgtggcacacacctgtaattccagctactcgggaggctgagacaggagaatcacttgaacctgggaggtggaggttgcagtgagctgagatcacaccactgccctccagcctgggcagcagagcaagagtctgtctcaaaaaaaaaaaaaaaaaaaagagagaaagaaagaagaaaagttgaaaataccatacttccttatttcaaattatattataaagcaatagtaaccaatgaatatgctactggcataaaaactgacccagagttcaatggaacaatactgagagcctccaacataaacctaagcatatattgtcaacaaaggcaccaagaagacacaatgaggagaagacattgtcctcaacaartggtattggttaaatgagatccacatgcaaaatatttaaatagtgcactaatcttagataatacacaaaatcataagaactgaaactgtaaaacccctagaag

SEQ ID NO: 216104 - DNA, 649 bp, Homo sapiens
ggtaaaataattgttaccacttgacaaacaaggatgtagagcctgtgtaaactaaatyttcccaggaattcacacaggatgttcatttcttaccaggcctcaaatattgatttattcatatatgacacagaagccctctcaaatattgatttattcatatatgacacagaagccctcagatgtatacactatcttattatttctctaatcagaactactttgaataagaatatatactaccaatagggctagcaaggatgacattagtgcttgccattttataggatctctctaaatattaacatgtattcatacaagtacacacacacatacatgcacatatgtacgtatattatgtaacaggtgactggcctgtgtgttgatgcactatcagtagaggcctgagctaaatgggcctctctgttaccagacatccatgcgtgcccacacaaaggattttcattggaggtgtttgcttatttaaagtttcttgtttttacagtttaaaattgattcagaaaaaaaacattgaaacaagtttttaaaaatttttaaacaaaatataattaaacttatttagatagagatctgaatcttcacattctctcaaagttgaacagttgtagctaaaaaaagaaataggcaaagt

SEQ ID NO: 216105 - DNA, 649 bp, Homo sapiens
ggtaaaataattgttaccacttgacaaacaaggatgtagagcctgtgtaaactaaatcttcccaggaattcacacaggatgttcatttcttaccaggcctcaaatattgatttattcatatatgacacagaagccctctcaaatattgatttattcatatatgacacagaagccctcagatgtatacactatcttattatttctctaatcagaactactttgaataagaatatatactaccaatagggctagcaaggatgacattagtgcttgccattttataggatctctctaaatattaacatgtattcatacaagtacacacacacatacatgcacatatgtacgtatattatgtaacaggtgactggcctgtgtgttgatgcactatcagtagaggcctgagctaaatgggcctctctgttaccagacatccatgcgtgcccacacaaaggattttcattggaggtgtttgcttatttaaagtttcttgtttttacagtttaaaattgattcagaaaaaaaacattgaaacwagtttttaaaaatttttaaacaaaatataattaaacttatttagatagagatctgaatcttcacattctctcaaagttgaacagttgtagctaaaaaaagaaataggcaaagt

SEQ ID NO: 216106 - DNA, 602 bp, Homo sapiens
taattataacagatttttataatgtgatattacaaacctttaaatcatatgaacataaacttccttgcttagaattcatactcaccaagcaaacatatgattacttgtctctctgtgtattgagactgcattggccaggttactacaaagttggtaaccagttaaactttccaatttgtaatttttaaaaattaataaattgacatgcaggtttacataattgtatttaatggaagtctcaagagcataaataatgaattcactaaaattcagggaatacccttatgatactttcatgagacatgtggccagatgatggtactcctggtaactygtctaaatcgccctctctctaatttctccaattgccattgggtgtttttatatttgatggattagttgaaattagtaggccattgcagacaattaaatgaagaactcttacaaggaaattgaactcaaatgtaacttcatgagtacaatgcattaatcaactgaactaaccatggaatatatttcatcaagttctaataaaatcactacaatatcagatgcaacatgaaaaacccagcctatcaacccatcaagctcactaatataat

SEQ ID NO: 216107 - DNA, 566 bp, Homo sapiens
aaaaatatcacctccaacttaaactgtagacaaggcagagaatagaagataagttttcataaaaaccaaatcgatgaaataaaaggtattaggtctataaaaattaaaaggaaaattataaagaaaacataaaatagaagatgatwaaatcgtttcttgtgcacaatgcgtactatctcagtaaagagcagacagatcatgaggaggagaaagaaataagagagataagtgtcctcccaaggcctcatgctccagacctaaaattaacttgcttactaaccactaaattaataaagcccaaactttctgaattttaagtttacttaaacaagtaaatcccatatgcactcagacataaatcaagaaatacatttttaaaaggcagaagagttctatatttcaacagaaaataactgaatcataatgaaataacacatgcagaggtttgtgtagtgtagattattaccaaaatgtttctaagccaagccaagttgctatgagtaagaaaaataagacaaaaactacatatcaatgttcctagaaaaaattcttctcacctactcaca

SEQ ID NO: 216108 - DNA, 546 bp, Homo sapiens
ttttagggtataaccaattggtagaatcaacccaactatcaaagatgatataacaagaagaaaggatgaaatgcaagaaaatttaaaagaactaaaacaacaccagaatatataagcttggctgttattcagaaagcagaacctytcctttgataaggcacagagtctcagttgttatttccaagtaatgtaagagcatataaatgcttttaacacaaaattaaggtaagaaataaatataattgagtgaaaaagtaatattataaaaatttgtgtacaatctgctccaagattataaaaattacacaggtattctccaatgaagaagatatatatgtatatacacagatatatatgaatatatatatgataacatatgatatatatgattacatatacatatctatataaacacaaataatatatttatttgtgtataatatatgtataattacacattggaatacatgtgtataattatacatcagaatatatattttaatactgggtgacaagattaccttaattcttattttctttttttct

SEQ ID NO: 216109 - DNA, 546 bp, Homo sapiens
ttttagggtataaccaattggtagaatcaacccaactatcaaagatgatataacaagaagaaaggatgaaatgcaagaaaatttaaaagaactaaaacaacaccagaatatataagcttggctgttattcagaaagcagaacctctcctttgataaggcacagagtctcagttgttatttccaagtaatgtaagagcatataaatgcttttaacayaaaattaaggtaagaaataaatataattgagtgaaaaagtaatattataaaaatttgtgtacaatctgctccaagattataaaaattacacaggtattctccaatgaagaagatatatatgtatatacacagatatatatgaatatatatatgataacatatgatatatatgattacatatacatatctatataaacacaaataatatatttatttgtgtataatatatgtataattacacattggaatacatgtgtataattatacatcagaatatatattttaatactgggtgacaagattaccttaattcttattttctttttttct

SEQ ID NO: 216110 - DNA, 546 bp, Homo sapiens
ttttagggtataaccaattggtagaatcaacccaactatcaaagatgatataacaagaagaaaggatgaaatgcaagaaaatttaaaagaactaaaacaacaccagaatatataagcttggctgttattcagaaagcagaacctctcctttgataaggcacagagtctcagttgttatttccaagtaatgtaagagcatataaatgcttttaacacaaaattaaggtaagaaataaatataattgagtgaaaaagtaatattataaaaatttgtgtacaatctgctccaagattataaaaattacacaggtattctccaatgaagaagatatatatgtatatacacagatatatatgaatatatatatgataacatatgatatatatgattacatatacatatctatataaacacaaataatatatttatttgtgtataatayatgtataattacacattggaatacatgtgtataattatacatcagaatatatattttaatactgggtgacaagattaccttaattcttattttctttttttct

SEQ ID NO: 216111 - DNA, 616 bp, Homo sapiens
tttttaagttcagtttaccaaacaaggttatctgtaattggcacaaagtaacaacgcaraaacctatatgctccctgagaggatgttaggcatgaagctggccaggtaatttcctagtaattccatgtgacagataatatatgttaagagaaagttaaagaaatattgaattgaaaagtcatgtgagttagccactttgatggcttctagcctgattccataaaatgattaaaaagtgaagagattgacagtatcatttcagtcttgagaagtgtgtatggcttggaaaatctcctgcagaagggagcaatttgcatatatacagtatttattgatgtgagttgtattaacttgcatttgcaaaagtaaaatatgtttttcatcaacaacgtagccactaggtcagaaagctacaaatggtgccagataatacgtggaggatttcagcttaccagttgcaacactttaatttcacaaagaataaaaatattatgcagagttattagaaatatgtaaagtcagtgagatgtcacattgacatacaataaacaattcaggtatacctgcttaggtggaaacactcaatgtgccttcttaattctcttgctgctgccca

SEQ ID NO: 216112 - DNA, 616 bp, Homo sapiens
tttttaagttcagtttaccaaacaaggttatctgtaattggcacaaagtaacaacgcagaaacctatatgctccctgagaggatgttaggcatgaagctggccaggtaatttcctagtaattccatgtgacagataatatatgttaagagaaagttaaagaaatattgaattgaaaagtcatgtgagttagccactttgatggcttctagcctgattccataaaatgattaaaaagtgaagagattgacagtatcatttcagtyttgagaagtgtgtatggcttggaaaatctcctgcagaagggagcaatttgcatatatacagtatttattgatgtgagttgtattaacttgcatttgcaaaagtaaaatatgtttttcatcaacaacgtagccactaggtcagaaagctacaaatggtgccagataatacgtggaggatttcagcttaccagttgcaacactttaatttcacaaagaataaaaatattatgcagagttattagaaatatgtaaagtcagtgagatgtcacattgacatacaataaacaattcaggtatacctgcttaggtggaaacactcaatgtgccttcttaattctcttgctgctgccca

SEQ ID NO: 216113 - DNA, 616 bp, Homo sapiens
tttttaagttcagtttaccaaacaaggttatctgtaattggcacaaagtaacaacgcagaaacctatatgctccctgagaggatgttaggcatgaagctggccaggtaatttcctagtaattccatgtgacagataatatatgttaagagaaagttaaagaaatattgaattgaaaagtcatgtgagttagccactttgatggcttctagcctgattccataaaatgattaaaaagtgaagagattgacagtatcatttcagtcttgagaagtgtgtatggcttggmaaatctcctgcagaagggagcaatttgcatatatacagtatttattgatgtgagttgtattaacttgcatttgcaaaagtaaaatatgtttttcatcaacaacgtagccactaggtcagaaagctacaaatggtgccagataatacgtggaggatttcagcttaccagttgcaacactttaatttcacaaagaataaaaatattatgcagagttattagaaatatgtaaagtcagtgagatgtcacattgacatacaataaacaattcaggtatacctgcttaggtggaaacactcaatgtgccttcttaattctcttgctgctgccca

SEQ ID NO: 216114 - DNA, 616 bp, Homo sapiens
tttttaagttcagtttaccaaacaaggttatctgtaattggcacaaagtaacaacgcagaaacctatatgctccctgagaggatgttaggcatgaagctggccaggtaatttcctagtaattccatgtgacagataatatatgttaagagaaagttaaagaaatattgaattgaaaagtcatgtgagttagccactttgatggcttctagcctgattccataaaatgattaaaaagtgaagagattgacagtatcatttcagtcttgagaagtgtgtatggcttggaaaatctcctgcagaagggagcaatttgcatatatacagtatttattgatgtgagtygtattaacttgcatttgcaaaagtaaaatatgtttttcatcaacaacgtagccactaggtcagaaagctacaaatggtgccagataatacgtggaggatttcagcttaccagttgcaacactttaatttcacaaagaataaaaatattatgcagagttattagaaatatgtaaagtcagtgagatgtcacattgacatacaataaacaattcaggtatacctgcttaggtggaaacactcaatgtgccttcttaattctcttgctgctgccca

SEQ ID NO: 216115 - DNA, 584 bp, Homo sapiens
attttgaacaatggccactttacaatattgaatgcctggaaaaccattcatgtagtatctaatatgtattattctccataagtcatactatttttttcataatttaaaatcagggtcttttttctcagagttggggttacacgttggaactgctcccagctcttcttttcaatttagcactgtaattttgcatagtgttcaaaagtagtttctactataacctcagcaatatgccagatttgaatttactatatatagtttatataagaagatgaggaaaatgcaatcgtaaaaggataggtgtgcatctctttagttaactcttctccagcaatcagcttattccaatgaaatctgcattctttatacaaggcattaaaaaaaactaaaagcaaaaatactaaaaaaattaattaaaatcaaagaatgctgtaagaaacagcaccaaaaacctaattcttgattcactcaactctgtgtccagtgaaacatactaccaagatcaagratacactttagggactaaagcagctcatggtataagtagtattaatagctaattatatacaaaggctaaacatatg

SEQ ID NO: 216116 - DNA, 501 bp, Homo sapiens
ctgataaaaaaaataagtatcaacatagaatggtrgaacagcacaaattatcctgatattatgattgtgaataggccttacttatatagcttaataactaaaaaagggggcattgtacatagtttgtatgttttatatgagtgtatgtatgtgtatgttttatatgagtgcatgtatacacaggggtaagggcatggtttgccctgggcttgggttaaattcatatagttgccattcttattatatatggattctataatactttcttataaagtagtaaaatgtattacacttaatcaggcaattgttctggtataatgtatgaagtaattgagatgcactatatgaacacaaactctacatctagactgcctgggttcaaatgctaactgccactttctggcaacgtgaccttggatgaattactccatctctctgtgattttgtttcctcatctttaaaataggaagtcacttcatagggttattataaggactgaat

SEQ ID NO: 216117 - DNA, 594 bp, Homo sapiens
  misc_feature (1)...(594): n = A,T,C or G
cttcacattatcaagtacttttcatctaaaaaggaaaagctctaattgtgctaactagacaccttgctgagcagttagcctaaggaaattgaggctataatggggaaggaggaaaaagtaatcctgactggaagaagcctaatgatctcctctagacagcctgggggtgaggtgtgaatgctcagggcagctggactacggtatatgaaccccgaagaaatggatggcctttttacaaagatttagcaggacagaactgctttggtgtgctagagtttagcatcaggccagttggcatccaaatcttggttttacttacttgctatttgaactttggcaagttatttcacgtctttatgtcttagtttcctcacttgtcatgtgtctgtctatataaactgactcttgctggctttctcgtgtttctcagttttaaaactcatttcacaagccaccattattccccattgcatactctccccctttaaactccagccnaagcctgtgatstctttcctcttgattccccttaacatgcctagcaaggctcatctttgcaaggaaactctactaaatgttaatggtgagcacaaa

SEQ ID NO: 216118 - DNA, 591 bp, Homo sapiens
atctgtggtgaagggaggtgacctctatcccttgactttactgttctctttcttttgacctcattttcccctcctgcagaaagactggggctactgggaaaatagcctactgcccccgcctccaaatcacagatgctgttactttatgctgctagaggtgaaaggttccccagctgatcacaggaaaatggaatgcaaggccaagagaagatgaaagaaaagaaccggggacctatgtggtcaaatagacataaaaggcaacacaaaattctagatactggtcatctccccctagggagcttcctgccaatcttccatttcttcttcacagagaaaactacaaagacagtgccaataacatctgtaatgaacaaagctactccagctgccactggtcagcttcctwaaaaaaaaaaaaaaaaaaaaaaacacacacacacacacacacacatctgcctagaaatcatcctcttctccgtgtattcccggttcctgttaagtccagctctgcaagctgaaggaagctgatgagctttccctccattcacgagtaagaccagtatttggttctgagggacaacaagagcaggt

SEQ ID NO: 216119 - DNA, 497 bp, Homo sapiens
gaattctcacgagatccagttgtttaacagtgtgtggcacctccctgcacccctctcttgcacctactcttgtcatttgagacacctgctccccctttgccttctgccgtgattggaggcttcctgaggcctcaccagaagccaggcagatgctggtgccatgtttcttgtacaacytgcagaaccacgtgccaattaaacctattttctttatacattacctagcctcaggtatttctttataacaatgcaagaacagcctaacatgtggctagaggaaaatgaggcctaagggtttgaatcatgggggagactgcttataataggccacatctatcttttagttcataaaaggccacaggtcaggaagaagcatgtccaactagagaggatggagggtaatatgatgtttctgggtgataggacttaaatctgatttcatgtctgcaatatggataattagacattttagaaattagattagaaatgagacactt

SEQ ID NO: 216120 - DNA, 559 bp, Homo sapiens
tgaaatggaggattatcctgtaattgatatacccatatacaaataactaaattgatttgtgattctattacatatcatagcagcaatagaatcagaacctgtaaacttgatatcacatctcagtcttagtaatttggagaatgcagagaatgttagaactggaaggatctaacrgcagatctctcattgttcagctctgcattcaggcctgctgaatggaaggccagtgaaagttcacagattaagtttaaagcctggtaggtgaaccttaattttcattcaggaaagattgcatctaaacctgtgcaaatattttcaatagctttaatggggtataaattatatatcaacaaattcactcatttaaaatgaacaattcaatagttttccgtttatttacaaacttgttcagccatcacaatgatctaattttagaatattttctgacccccaaaagaaaccaaatacatgttagcagttattctccatcctcatcccctgcttacacatccaggtctagctaatctactttctgtctctatagatttgcgattctgaa

SEQ ID NO: 216121 - DNA, 601 bp, Homo sapiens
gataaactgtacatttaaatgttgactttttctgttttgtgtatataaatgtgaactttttggaaattttcatagcaagttttgtctgctgcagtgcaacatgttttagattcccagtcatactgtgtgctccatgtaagtaggaaataccatttgcacatgtgttttagttatctaaaacaagaattgtcagtctaggttcatgcatgtctcagaatcaatggatattttaggggaaggtggttatgaattcctggaaattaaattcaaattttttgagcattttctttttcctggcgatactagattttctaatggcctgtgatgattgctctaaagggtaacttcataaaacattcttgaaaattcttagtgggcttgctcmgagagatgctatcatcatggtgaaaaaaatagctaacagaaggcaataatttgagaatgcattaaactttccagatggatggcttttttcttatatgacttgtcttttgtcatatcaggtattgatttatacgtgagaatgggcttacagcatccagcaaagtatttttccccagttatttctgagattcccccaggaagtgtcttgagatatcct

SEQ ID NO: 216122 - DNA, 607 bp, Homo sapiens
tagaatttgagacatttttatcccacaaatctatattcaaaagttccccttatgatgctagatgaatcctcaggaaacaatgcttcctataataatcctcatatttagtaagaattattgtcatcacttagcttttctggtctcaccttttgtcatccctaaaatgggataataataacttttttctctaacttacagggttatttccaggtataaaggaacaaaaacgtttagaaaactcaaaacttacaaatgtacaataatgattcatctttttgttgaatactgatgaaaacaataatctttaaaaccaacttctctggctttccaacccccagtccctctcccagactatagaatattaacacatgcacacaaggtgaaaagtaacaaaggaagggacaatgrgggaagcaaggagagcagctagtaggccatcgcaattatccaggagagagacaatggaggcttggatgtaagtggttgtggtggagttgggaggatatataaataatgtggatctattttggaggtagatctgaatgatttgatgatcggtttcaggtgaggtttaggagggaaaaaaaaaagttaaaagtggcccctg

SEQ ID NO: 216123 - DNA, 588 bp, Homo sapiens
ttactctgcctaaggtgagtgtttatgtttctgtgtttttgcttctccggcaaggttttgttttgttttgtttttttcttccctgttcccttcacccaaggctcagtgtgcaaaagcagctcgctctgcgtggcagaccccattctaatccttctctttccttagattctgagcccggttagaattagcctccgcatcacgggctcctgggaccctccgctctatgctcctcgaggagggagcagctgtgtycatccccctacccgcaaatgcctccggttcttatttggcagacactcccgcggtgctgctgtccaaagacacaccttcccagccagcccagtggtcacgtctcgccccagcgattcgggagaagcagtgggaactctgagctccccgaatcgagcccgctgcgcctggcatctcccttcccttccccttgacaaacgacccaacctcaatcatccctgctccttccgaacgctagttttgtttacggagcaaaccgaggctttgagcaacctgcggttgcacggctctccttcggcttggggagggaggggtagcgttcacagttctccagtgtgc

SEQ ID NO: 216124 - DNA, 497 bp, Homo sapiens
cttttctgcctaactgcagtctaaaatcctgtttttgaaagttctgccgaaaaaggggattgtttaaaaaatctctttgtagtcaatccataaatcatatccaaaccataggtaatgtgtgattgttcatactcagaggataaattattkttttcattagctttatgtaacctacctccaaaatttttatttcttagtattgatgaaaagttatgaaaactttgaatgtttctttaggaaacaacttgtctttccaaacagcttgcatcaggagcagctgcacagtcacttaaacaaactagttgactaagtgcttttcagtttgtatgggaagatatttttcctttgcttaataataataaaagagaaatatgctttactttcttaatgcagggacagttcaggatccctatctatataagctgtgtaatctctggataattttatgtgtctatgggatacacagtaaataatagttgatcatctgaccgctattg

SEQ ID NO: 216125 - DNA, 563 bp, Homo sapiens
aaactgtacaacaggagtgttttgtgggccaagccagcacttctgtctatatttcatagtcaaaccactcatgtagccacatccaactgtgagggatgctgggaaatgtagttcacctgcccaaaaggagaagagttgaacaattaactgtatctttttttttttttcatgaacactttgaagagttttctgttaataatgtggagattccaggaatattgccaagggctgagctcacagatcaactgatactttataaggtttgccaataattgtatatctctgacrtggaacaaggccaccaggggccaggtgttcaaatacaagtatatatgggcctacagttaagtatcaaaaattttaatatgatgttaatgctaagcagctcatataacattttaataaaaattagaaaaagatttacttcctaaagcacttcattgctatgtttgagaaaattttctgagcaaatatacatatctataattaacattatgtgaatggtgccctacaaaattgtgcagtgtacattctgcacaactgtataaggagggcctcccttt

SEQ ID NO: 216126 - DNA, 490 bp, Homo sapiens
ttctttcttaactctaccattccttcagtattgcctgtctctcatggtgttgttcccttgacattctctccttgctcccctgccccctctgttggctcttgtccacactgcatgtcctaactctgagtatcccccaatgctggcctcttttttttttttcttcctcacttacttcagactgtggcttcgtgtcacacaaatctggagaattttgtaggtgtgagattaactcatgtcccttcatttagcctaattttcattcctgcagtgtcttctcctccccatggttactctcactcccttttttgcaagaccttataatttatcacctggacgacttaaattcatctctygatggcttccttgcttcccagtggtttgaatcctcactcttcccttgcaagctgtgcctctccatgtagtcgcggaaacatttttgagtcttgatttatgtactgaggctcatggatgaatggcctgttgccactaa

SEQ ID NO: 216127 - DNA, 591 bp, Homo sapiens
tggccccattttcatggtccagcgtgttccctcactccactcagacaaggactgtcactcttctgtgtctgctctttggtttgcgctggacagaccaccctccctccatgcaacttgtactactgacttctcttttacatttatttgccagacttatttatcacattttatcaaatcagataaacatcagattaatcaacatttatcaattgttcttcccaatatccaagttccaatcattttgcttcccgagcatattaaacagtatctgttgctcctttttttgcttgatacactctttccctgtttcccaccttatatttcatctgggcaaattcttttttatatttaaaatacytttaatgtaacatacatacaatggttaggaaaaagaagcaaagggtgagttatgtaatgttcaaaaaagtttttaaaaattattactgacttctaaaaccccttagtactacatcaaaatctaccttttccccaaagcctacttgactccttttgacctaaatattctgtcctaattttaattcttatgctccattattgccttgtctacttactagtaagtagaattatcca

SEQ ID NO: 216128 - DNA, 621 bp, Homo sapiens
tgttttctttttctcttcgtctctttgtctgttcataaccacaggatatatcccatttctgtgtctcctggtctcttttctaacaattttgatcacttgtaaagggatctcaaggactcccagatacatgaccttagagttcccttccccaccacagactgactgcattttctgtgactctaagttcaaattctcaactgrgagaatttggctaatttttggtttgagagtggcgctttaccttaggccaagtgttcattcttggtccacagcactatgtccaggattggggtcacatattataaaaataaacacttggtcctgttctttcaaggggttttacagtagagccatacatagatccaaaagcttctaccatgaaaagttcagcatgctgtatgtatttgggatgcatcattgagtaatatgaaagaagaataatttaagtttaacaccctagggctgtttctttgctttcttccaatttcagtggcccagttcaccatgatttagaatagaaattgttaacttaatctcaaaatgaacatgtgactgatatgtcatcaatatgaaatgaagaaaaattatgaattatttgttacaattacatatatcatatgt

SEQ ID NO: 216129 - DNA, 621 bp, Homo sapiens
tgttttctttttctcttcgtctctttgtctgttcataaccacaggatatatcccatttctgtgtctcctggtctcttttctaacaattttgatcacttgtaaagggatctcaaggactcccagatacatgaccttagagttcccttccccaccacagactgactgcattttctgtgactctaagttcaaattctcaactgagagaatttggctaatttttggtttgagagtggygctttaccttaggccaagtgttcattcttggtccacagcactatgtccaggattggggtcacatattataaaaataaacacttggtcctgttctttcaaggggttttacagtagagccatacatagatccaaaagcttctaccatgaaaagttcagcatgctgtatgtatttgggatgcatcattgagtaatatgaaagaagaataatttaagtttaacaccctagggctgtttctttgctttcttccaatttcagtggcccagttcaccatgatttagaatagaaattgttaacttaatctcaaaatgaacatgtgactgatatgtcatcaatatgaaatgaagaaaaattatgaattatttgttacaattacatatatcatatgt

SEQ ID NO: 216130 - DNA, 621 bp, Homo sapiens
tgttttctttttctcttcgtctctttgtctgttcataaccacaggatatatcccatttctgtgtctcctggtctcttttctaacaattttgatcacttgtaaagggatctcaaggactcccagatacatgaccttagagttcccttccccaccacagactgactgcattttctgtgactctaagttcaaattctcaactgagagaatttggctaatttttggtttgagagtggcgctttaccttaggccaagtgttcattcttggtccacagcactatgtccaggattggggtcacatattataaaaataaacacttggtcctgttctttcaaggggttttacagtagagccatacatagatccaaaagcttctaccatgaaaagttcagcatgctgtatgtatttgggatgcatcattgagtaatatgaaagaagaataatttaagtttaacaccctagggctgtttctttgctttcttccaatttcagtggcccagttcaccatgatttagaawagaaattgttaacttaatctcaaaatgaacatgtgactgatatgtcatcaatatgaaatgaagaaaaattatgaattatttgttacaattacatatatcatatgt

SEQ ID NO: 216131 - DNA, 436 bp, Homo sapiens
aagctttatttaatgcttctgaagcacatatttgactatttcagaaattacattttagagaatctacacatcatctygaacatttgattattaatctgtgaaagatttaattattgaaaaatctggctaggtgcaaaaagtgggttattattatatttatttgttcatggctttactccttagaaaataaattgatgaactttattttgaattcttaggaaaaagaatttatatatatctccaattggaaatttcaggtatgaggtggatatatgaacctggagatgaggtagaccaggtaaaagatctgggatggggctggagatatacatttgggagatgtaggcataaagatggtatttgaaattatcacaatgggtgagatcaccaaggtggtgtgtgtgtacaggaaagagaagagatctaaggactgatt

SEQ ID NO: 216132 - DNA, 630 bp, Homo sapiens
ggtacatccatggtatcttgaggattctttagaaatctaccaaatccccagaagtaccttgcttgtctggttcttttacgtgaggaggttttgttctgaactgattaaagtagttgttgtgaccacatggctatttgttcacaatcctatgcaaaatggacaacatgctctcatttagcttgagaaggagaaaagcagtgggcagctttgttaacaatagcagtgacacaagatgttgaattgctgttttctgagacaaaaatatgcaaagttaagataactcctgctttgagattgcaacttggcatatttttctttgaattaagaaagaataagctttatttaatgcttctgaagcacatatttgactatttcagaaattacattttagagaatctacacatcatctcgaacatttgattattaatctgtgaaagatttaattattgaaaaatctggctaggtgcaaaaagtgggttattattatatttatttgttcatggctttactccttagaaaataaattgatgaactttatttkgaattcttaggaaaaagaatttatatatatctccaattggaaatttcaggtatgaggtggatatatgaacctggagatgaggtagacca

SEQ ID NO: 216133 - DNA, 601 bp, Homo sapiens
tctaggaacttcttttgcaaatactttgtcatttttctaagtatgcaatcacacagtctgcgaatagagacagatttattttttctgttctaatttgttttctaagagtccctggggaaaagtaatttttattatttcaagtttgaatgtgttggtttcagcattagattaaaagaaactaaaatatcttaacagtatttaatttatcacaagtgtcagatgctaagtagaaaaggttgtacttctaagtacagtatcatcccttggcctgttgtcttggaccctctgtgaaaatctaggtaacacaactctccaggaaataatttcttggacaggctagcagcccatctttgcttgtgtgccttatcatcttgatagctttcactgtttttgatttttaacttgyctacagtcttttatcctcactatatagatgataaccaaccacccagtttgccccagacaattcctattctatccttgacagtgctacgtctttaaaaacaaaacaaaacaaacaaacctcagtcccacacgaaaccgggactttggtcatccttgatatagaataatatgtatcttaagaaaatactgtttctgc

SEQ ID NO: 216134 - DNA, 588 bp, Homo sapiens
caatcaacatcacacaagctacctctaggtctacacctgcaccatccaagacagcagtcaccatccacctgtgactcctggagggtgctagtcccaaatgagatgtgctgcaagaaatacagcccagatctcgaagactcagtacaagaaaaatattaaatatcttaattttcatatgaattacatgttgaaatgatacatattgatagattatattaaataaattaaaattaacttcacatgtttcttttgttttttagatggagtcctgctctgttgcccaggcgggagtgcagtggcctgatcttggctcactgcagccttcacctcctgggttcaagcaagtctcctgcctcagcctcccgagtagctgggtttacaggtgcctgccaccatgcctggctaatttttgtatttttagtagggacgggggggtttcatcatgttagccaggctggtcttgaactcctgggttcaagtgatycacccgcctcggcctcccaaagtgctgggattacaggcgtgagccaccatgcagggtcttctttttgctgttttgaatgggctattagaagactttttaatgac

SEQ ID NO: 216135 - DNA, 504 bp, Homo sapiens
gaatgttgcttttttaaacaaaatgacatttaatctaaggagtctggttcctccaggttttgttcagtttcagartaaagatattcaggtgagaataaacctcaaattgaaagcgaaagcagtcctttgaaaaatgcgtgtttaaaaagtataccctttgtgatcattgatatttaatgcagaaactctatgtagtactgtgtaagcccaatttattcatctcagtacttataatcccactgccagaccggagttccagacaacagaaagtgagtgcatgttttatcattactttttaaaaaacattttattgaggtctcattgacatacaaaaagctatacatatttaatatatacagctctatgagtttggaaattaagtctatacttgtaaaagcatcactatactataattcataacataaacttatccatgaccttcaaaaatttcctcctaccttcttatttattttgtttctatgtgtgtgtgtgtttaacaagaat

SEQ ID NO: 216136 - DNA, 582 bp, Homo sapiens
aacttcatccaaactaagttgaacacttccatttctgtattctgcaactgtatatagataaataaccttaaatgtggaagaactcattaataaaattcatttgttctatgacattttattgaggagaagggtcgtactctaatcattatttgagtttatttactaggttatgatctattcaagttttccatttttttctgtaacactwttggcattttacctataaatttcccaccagtttaaccatttctcttggattttcaaattttataattgtttataatattattttactatcttacaaatactgttgtgcctgtagttagtcatttctttttcattctggattttctctctttctaaattgcttctatttttgttgagtggtcacctgataatggtctaattactaatatttttaaagaaccacttagtcaaattttttcctttccactctttcttgctctatatttaatatactcaaaactataaatctttctctaagccggatttttctgtatcacacaagtttttacatacagagttttcattgtcatgcattgtaatttctaatttgtctta

SEQ ID NO: 216137 - DNA, 573 bp, Homo sapiens
gcttaaaatgctgcatataatctatatcccagcttattcccagccttcttcgtgttcmctcagctccagctgcacttgctccttgctgttctttgattacaccaactgtgctttggcatttctatcccttcacactgaaatactcttcagccagatttcttctagagccacacgttccttgaccatcccatatatcatgacaatcatactatccacttcctatccccacatccctgtttattttatatcctttattaccatctgacatagtacttatgtattttgtttctttccccattacaatgtgaattccatgacagcaaggattttgtctggttagttaaactagtataactagtttattgagtcctcaataagtaaaattgattcctccatcattttcctagtctaacaaactaggaaactactttgttaaactaagaaaaaagattgaggacttaataactacttgttaatgaataaagcagtagaaaattgttgtgccatatatataggtacataggaatcatataattttgaaataattccatatcaacgaaaatagaaaaatgt

SEQ ID NO: 216138 - DNA, 556 bp, Homo sapiens
gcccttcctctctagctgcctttaatattttttctttcatgttgaccttggagaatctgttgactatgtatcttggggatggtcatctggtatagtgtctcacaggggtctctggatttcctgaattttgatatcaatttctccagtgagtttggagatatttttgtggacaatatcctcaaatatgatrgcagcttcaaagattaaactaacatcagcccatcttgacgagaaagaaccagtgcaagaacactggcagctcaaaaagccagtgtcttcttacctacaaatgaccacactaagtatccagcaatggttcttaaccaggctgaaatggttgaaaagatagacatagatagaatagaatatccagaatattctattctggatagaattttgatgatcttcttcaagattcaggaaaaagttgaaacccaaactaaggagtctaaggaatccagtaaaataatacaaaagttggaaaacaaaaaagccactttaagaaagaaccaaactgatatgatagagctgaaaacttactttgagaattttctag

SEQ ID NO: 216139 - DNA, 654 bp, Homo sapiens
atgaattctttatgcatattatcacttcaaattttcaaaacaattttatacaattgattcctattttactgataagaaaccaacacattgtacgtaataaaattatttaccttttctttttcccatataatctttctatctggtaaatgtataaaagcatttcttttaatctttttcctttccaaatcctaattaccctttaggactcagagttcaaatctctgcaatcttgcaaaatcatgttatgctacattaatccttcccttstttgaactcctagagacctataatctataccagatagttcagcactgagtaacaaactattctacattttctaattgctttacatatactgatctagtttttccaacaacataactaacattttacttagttatacctcattcatctcattattgtctctaaattatcttataatttgatggaatgattgtctgcattttaagaacataggtatcaaatggtttcagctaccaagtggagagcggcccacaattcaatccacctttgttacaacaccaatgtttatacatttttaatcttaaattttttttgttgttcattcagatgtgtggtttccctcttgcttttcagaaatcaatttcaagccacatcatttttcttcttgat

SEQ ID NO: 216140 - DNA, 638 bp, Homo sapiens
ctcttattacaaaatttaaattcctgaatcaacagagcatttcaaacagcgaactgttgaactcctccaagaagatcatgttgcagagggcaacggaaggtcaggaacttcttccaattcattcttgtcatctcgggaagtaacacaatctttatggtgtcataaatcccatgccattaaagcacccagtgttctcataatattaaaacaggtggtatcagcccctagtcccagccctagtatgtatgtttaagatttcatgagagatgagttgtcaatattgccaacttttttaaatatgaaaaataggtagaaaaggaatgttktcaatgattataggattaaaaatctttttaaaagagagtattcaaaaattctaagaaagtagtatctggtcttagcaaacaataacagactcaaattaagtgggcaaagacatttcattattgaggacaaattaatgggaaggctaagaaaagcagtaattatggatgcaaaaggagatgctggggaaaatacaagtcaactttttcatttggtattttgtaactaactagctgtagcacataagggtaaaaccaatctgataacgcctaggataaatgcagtgaattttatggagctgtaactttgggatt

SEQ ID NO: 216141 - DNA, 564 bp, Homo sapiens
gacatgttaagaatgggtatattttcttattaaaccagtgtaatcctaatctttgctttgtggtttatactaccttgagccatttctccagcggatacagatctccaggaagatattacttagaaaaattacgtttgctgaaaatgagagtagayataagataaaaaggttaatgttaatgataataatgacaataacatcttttatgtacttattgtgtgctggcagatactgttctaagtgctttataagaacacagttttaggtggagaaactgaggtacagagcagttatgtaacttgcctaattagggcctagatgaaggtaaggcaggtgaagcagttaaatccagtgcaaaaatgtccatgcaacccaaagtgacctgtaagttcagtgcagtcccccaaaaaaccccaatatcatttttcagaaaaaatagagaaagcatttctaacatttccatggagccagaaaagaccctgcatactcaaaaattttttccaaaaagaacaaagctggaggcatcacaccaatttatctcaaagtcaactacaaagctataat

SEQ ID NO: 216142 - DNA, 610 bp, Homo sapiens
ggattaaaaatctttttaaaagagagtattcaaaaattctaagaaagtagtatctggtcttagcaaacaataacagactcaaattaagtgggcaaagacatttcattattgaggacaaattaatgggaaggctaagaaaagcagtaattatggatgcaaaaggagatgctggggaaaatacaagtcaactttttcatttggtattttgtaactaastagctgtagcacataagggtaaaaccaatctgataacgcctaggataaatgcagtgaattttatggagctgtaactttgggattgttccgtattttgaaaaacttcaattacatgtaaaatgctacaagtggtatagtaggtgtcaggtcaggattaaataactaaatgaatattaaacatataatttagggcaatataaaatgtgttggttatttctgtttgtttgttggagtgttttaaatcaataatccaggtcatgtaaaataaagttactgggaaagactccacatgacattctcattttctattcctggattggaaatgttgaagatgagctatgtatttaatcatgtctgcttctctccatgaataagggaatagcataaagaacac

SEQ ID NO: 216143 - DNA, 539 bp, Homo sapiens
gacctgaaagcttccaggtgtccactgaaggagacccttatctactgtagctataagattgaaattgctgaaaatcaaatgaagaatctcatcctgtaactggctgaactacaatggaaactgaactccattttttccctaattgggaaaaaataggatcctgtaaattgggatggtaacatgtgggaaaacactgatgaagctgagaacatcaagcccctaaatcctgagtcttctttgccagtgagaaatgtgtcccctacctgcaggaagartgacctcccattcctagcagaaatgtcctcccaactcccagcagtatcagcctttccatcctttccttgtctgaggaaatgaatcctgcattgcctgaggaatccataatgaccttctctgaggcagttgccatgcaagacattgctgactttcttcaagccaaacccccaccagccctctttcttctagacctgtaactactcacaaatctcagcagatctccaaaggtaaggtacaaagtgtgaccaatgaagaattgtcct

SEQ ID NO: 216144 - DNA, 599 bp, Homo sapiens
tacatgcttaaagttttttgtagagaattttaacttttcagacatttatggaatgaattaggatttctcattaggaatacctctgcttaatgccactcttacacccagctataaccactcctaaaaatatagtgtttctgttcatttgctttattagttgtatgtaatgagaaaaaatgagattacattctgcatattgttgttctgcagtcatttgtttttaacttaacatgattccttggagaycattccatgtaagtacatgttgcagtatctaattccttggaatgctatattacagacataccatcaattcagagacagacatttttattttttaattataaataatgcctcattgaatatcattctatttgtctatccttgtactttaatgtaaatttttttacagtaaatttctaaaagtggaaattttggatcacaggattacatgaacttctgatacttgaacatttaaaattcttgtaattctttagtctttattttattatttaagaaagaaaagcaacaggagcataataggcatgaagtattcccatttggaaagataatgtccttagaaatacaaactaaaaata

SEQ ID NO: 216145 - DNA, 510 bp, Homo sapiens
tttttttttctttttttaaatgtggtctatgattctttcacacctctgtggttttatttgcaccatttcctccttctaaacttaagattcttctggcatgcctcctacaatattcattaatcatttccagacctattcattgctaggttcagataactctatgattttgtccattagactcaaccttttccttccgtggatgctctggcacttttattggcattctttaaatcccatagtgcataaatattctttatcttcctggtctctccctgtacaagatattgcacatgaaaagatacaatgccatctttgtatagttatagcaygtaacacaggctttattgcatgttacaacttgtccctatcaggagtaaaagatgaatgtcatataaactgttaactaagggtctaaaaagtacatttttagacattgtaactcaagggtcagtaaagacaggattatttcctgtacctggggcttaagacctggctgcctttgtgtagaaa

SEQ ID NO: 216146 - DNA, 575 bp, Homo sapiens
  misc_feature (1)...(575): n = A,T,C or G
tgtgtttgtgttgctgttaaggaacacccaagactgggtaatttataaagaaaagaggtttatttggctcatagttctgcgggttgtacaagaagcatggcgccaacatctgcttctggtgagggcttcaggttggttccactcaggatggaaggtaaaggggacccaggtgtgcagagatcacatagcangacagcagaaacaagagaaaaaaggaggaggtgccaggctcttttcacttcagtttttgcaggaactgagtgagaactcactcactcctgtgagaaatggtaccaagccattcatagggatctggcctcaccatccaaacacttttactgaaccccaccacccaccctggggatcaaactcacacaggaaactgggagggcccaacaaagcatgtccaaatcatagcacctgatcttctgctgagttctaagataatccaggccctcatgatggtgacaagataacacatttatgaggaacttcttccaagtggctgtttatcctgtgctaaacacaaatgaccttccscagggttccagccttggttcttgtttttcctctta

SEQ ID NO: 216147 - DNA, 319 bp, Homo sapiens
atcgtgccattgcagcaacagagtaggaccctgtctcttaccaaaaaaaaaaaaaaaaaaaaaagataataaagtaggagtaatcccagggattcaaggacagttcaacacgtgcaaatcaagaaatatatacatcacatccacaaaatgaagaaaaaaaamctaaaatcatctcaataggcaaaaaaagagcatttggtaaaattcaacattcctttatgttaaaaactctcaacaaataaggcgtagtaagaacagctctcaacataataaaggccttatgtgacaaacccacagctaagaatgaagaaaagcagaa

SEQ ID NO: 216148 - DNA, 296 bp, Homo sapiens
gattgcattcaattcattcgatgacgattccattcaattctgttcaatgattccatcagattccatttgatgttgattccattcgattccatttgatgatgattccatgcgattccattagatgatgacccctttcatttccattcaatgaggattccattcggttccatttgatgatgattcctttgaattccatttgatgacaattccattcaataccaattgatgatggttatttttgattccatttsatgatgattacattcgattccatttgatcataattccattcgatt

SEQ ID NO: 216149 - DNA, 514 bp, Homo sapiens
ttattccattcgagtccattcgatgattccattcgattccattcgatgatgattgcattcgagtccatggattattccattccattccattagatgattccattcgggtccattcgatgattctcttcgattccattcgataattccgtttttttccgtttgatgttgattccattcgaktccattcgatgataattccattcgattctatgcgatgattccattccattccatttgaagatgattccattcgagaccattcgatgattgcattcaattcattcgatgacgattccattcaattccgttcaatgattccatttgattccattcgatgttgattccattcgattccattttacgatgattccatgcaattccattagatgatgactcctttcatttccattcgacgatgattccattcgtttccatccgatgatgattccattcgattccgttcaatgattattccattcgagtcctttcgatgattccattcgattccattcga

SEQ ID NO: 216150 - DNA, 514 bp, Homo sapiens
ttattccattcgagtccattcgatgattccattcgattccattcgatgatgattgcattcgagtccatggattattccattccattccattagatgattccattcgggtccattcgatgattctcttcgattccattcgataattccgtttttttccgtttgatgttgattccattcgattccattcgatgataattccattcgattctatgcgatgattccattccattccatttgragatgattccattcgagaccattcgatgattgcattcaattcattcgatgacgattccattcaattccgttcaatgattccatttgattccattcgatgttgattccattcgattccattttacgatgattccatgcaattccattagatgatgactcctttcatttccattcgacgatgattccattcgtttccatccgatgatgattccattcgattccgttcaatgattattccattcgagtcctttcgatgattccattcgattccattcga

SEQ ID NO: 216151 - DNA, 514 bp, Homo sapiens
ttattccattcgagtccattcgatgattccattcgattccattcgatgatgattgcattcgagtccatggattattccattccattccattagatgattccattcgggtccattcgatgattctcttcgattccattcgataattccgtttttttccgtttgatgttgattccattcgattccattcgatgataattccattcgattctatgcgatgattccattccattccatttgaagatgattmcattcgagaccattcgatgattgcattcaattcattcgatgacgattccattcaattccgttcaatgattccatttgattccattcgatgttgattccattcgattccattttacgatgattccatgcaattccattagatgatgactcctttcatttccattcgacgatgattccattcgtttccatccgatgatgattccattcgattccgttcaatgattattccattcgagtcctttcgatgattccattcgattccattcga

SEQ ID NO: 216152 - DNA, 514 bp, Homo sapiens
ttattccattcgagtccattcgatgattccattcgattccattcgatgatgattgcattcgagtccatggattattccattccattccattagatgattccattcgggtccattcgatgattctcttcgattccattcgataattccgtttttttccgtttgatgttgattccattcgattccattcgatgataattccattcgattctatgcgatgattccattccattccatttgaagatgattccattcgagaccattcgatgattgcattcaattcattckatgacgattccattcaattccgttcaatgattccatttgattccattcgatgttgattccattcgattccattttacgatgattccatgcaattccattagatgatgactcctttcatttccattcgacgatgattccattcgtttccatccgatgatgattccattcgattccgttcaatgattattccattcgagtcctttcgatgattccattcgattccattcga

SEQ ID NO: 216153 - DNA, 588 bp, Homo sapiens
aaagcttttttttttgtagagatggggtcttgctatgttgccaggctggtctcaagctcctggcctcagcaatcctctggccttggcctcccaaagtgctggaattacaggcgtgagccactgtgccaggccacgaagcattttactagaatttttatagagagagctattgcgtattgaatgggagaatttctgattcaaaatatgattaaaatgtgcmttttccccaacaatcttgaaacagaagctggcctgaggatgcctctatgtgcaagtcaggcgtctgttttctacgttgaatggactagcgtcatctgcacactgaccacagcaggggcctattgatgaagcagatgtcaaaggtcatgccaactaagaccaactcacatgtttgaagggcccccgtttcattcagcaaacgcatccccatctaccagtcagcttccccacacatcagctccatttgaaaagattaagcatcgcctaagacgtttccagtgaggcccaattccaaatagtctgtttgagttcattcagacatttgctggtaggagaaacctcacatctttctgggtatttttttcccct

SEQ ID NO: 216154 - DNA, 425 bp, Homo sapiens
ccaagatagtgaatgaaaagttgacccttccttggcccctcctgctgaagtttccaccaggaagctggccttgctgtgaaatrtatgagacgtgcatttgtgaggtgtcgctgtgtcttgtgcggccacagtgagaacctgcgtgggaaagcggcatccgtgccacggcccacaacgtcacaaaggcgggaggattgcttccagatgcagggtgcacacatttcaggggcaattcactgtgaccaccagaatctgactccagccaggtgtcagccagctctttcatgaagggccagcttgtaaatcggcttggctttccagaactctgccctcacagggtgaaggcagccagagacactacgtggggaaatgggggagtggctgccttccaatacagctttatttacaaaaccaggcggccagcc

SEQ ID NO: 216155 - DNA, 425 bp, Homo sapiens
ccaagatagtgaatgaaaagttgacccttccttggcccctcctgctgaagtttccaccaggaagctggccttgctgtgaaatgtatgagacgtgcatttgtgaggtgtcgctgtgtcttgtgcggccacagtgagaacctgcgtgggaaagcggcatccgtgccacggcccacaacgtcacaaaggcgggaggattgcttccagatgcagggtgcacacatttcaggggcaattcactgtgaccaccagaatctgactccagccaggtgtcagccagctctttcatgaagggccagcttgtaaatcggcttggctttccagaactctgccctcacagggtgaaggcagccagagacactacgtggggaaaygggggagtggctgccttccaatacagctttatttacaaaaccaggcggccagcc

SEQ ID NO: 216156 - DNA, 503 bp, Homo sapiens
tcactatatcctcttgcacttaaaaaaattttggttatgactcatccagttgattttattatccattaatgggtcatgggtagcaataagaaactctgaattatacaactttctataatgggttggaaaaagagggaagtatgttaatatggctagattaataattttgttctcatcacatataaatgcttgttccattaatttccagtaattagtgggagtttatattatgaatactcatattaaagtaataataaggaaagaaagggtagtaattaggtcagaggggaatgartaaaactctttgaaaataatagattaaaatggattatggatttagtacaatgtaggctgtatagcttttagtatactttgtcttattaaaaatttgtttaattgttttgtggagtaacttgacaacgtaagaatttcacttggaaaggggaagggaacacatggtgtctctctctctctctgtctctctctctacatgtctgtctttc

SEQ ID NO: 216157 - DNA, 476 bp, Homo sapiens
ctttgaataaatgaatactagcttattcaatcaatatattaaagcatgaagagaagcttggtcccttttctcccaatgggcagagcactgttaatttgttcaagtaaaaaaaattatacttaataacccatactcaattatttacttttattaaagcactttttgctcatcattgtaaagtatgcgcttttaaaatacttcaggaaaaattaagactgtgttatatatatatagcatgattctatttctgayatatataaatagattataattatttaaggatacataagggcctgttaactatagttgcttctagggagtagaactggtgattgagaagaaatttctgaaagacttcattttatattttttatgcatttgaattttctactgtgtgcacatatttcttttgaaataaaaattggttttaaaatattttaagaaaatattttataggagaaaaaatagctagtatt

SEQ ID NO: 216158 - DNA, 448 bp, Homo sapiens
attaattgttaggaaaatgtattgtagaaacccaggttatatttaaatttgataagctacacaaagaaaattcatcaacagtccacacaggtagggccatgagtttttgccagcccatcagccaccagataacccacaaggcttggctccctggtctcttagtggtgccagtgacacatgtgagtacacgcatgtatgtgagccaccttgctctcctgtagtgaagcaggatgttctattggaccamgttcacatttggtatttgttcaccatggtggaaatgaatgggaaccggggcctgtcacagaggtgagactgctagccaattcaaggcatatccacaccatttttgaggaaatattaaatcaaatacatatgtgaccatttaagtgcctaatttacagcacttgatttgtctgacacacaatgagggtaagaatagtgttct

SEQ ID NO: 216159 - DNA, 516 bp, Homo sapiens
tgtgaataaattgaggaaattggatggctatatttcacattttttggcgtatcaagtgaactttaattactttttgctcctgggataaatttttctatctctcaaagattcttaaggaaagaaaggcagattcaaaatttgcagtgtttttgggaggccgaggtaggcagatcacttgaggccaggagttgaagaccagcctagccaacatggtgaatccactctactaaaaatacaaaaattagcyaggcacacctgtagtcccagctactcggggtatgagaattgcttgaacccaggaggcagaggttgcagtgagctgagatcccgccactgcacttcagcttgggcaacagagcgagactcagtctcaaaaataaataaataataaataaataaatattttttaaaaattgtacaatgtgataccatttggccaaaacatataaatacataaagaaaaaagagtataagaaaggttaaataggtctagtggtgaaccaaatacttatgatt

SEQ ID NO: 216160 - DNA, 318 bp, Homo sapiens
tttttcacaactgtcacataaaattctgtcttttgtatgcatgtcagagttataaaattatagctaaacatggatataggactgaattcattcaacagcacttgtgtagagaggatgttatttttaaagacagacacatgtacyctgtaagaactctatgctctaaaattactgttttcaagtatctcaaactaccttcaagaagtaacattctcataacttgcatttttggcagggcttttttaagttcgtaaatgattaaacatggaatattttttataatattttgtaaagatggagactgtatttacatttatg

SEQ ID NO: 216161 - DNA, 512 bp, Homo sapiens
atcagtgtacacatttcttgatcagagtaggactctacctagaatttctgatgtgtatgtgcacgtcttcctcgctttttttctctctcaggtaataggacctatacccttcaaaaagtcatagtgtcttagaaagtgctattttagttgtgtagtagagattctttctgctgttcactaggagaagtgaatatttatttttccatttatttatttcttcacwtattttacacttaaaacatttaaccattctggaaggaaatctttctagaataaatatttttcaactttttaaacacactaaaagtggtttgattttttttgatgactcagttcttaatttctgactgcaacttttctgaaatcgatgtcagcagaatagttacctactgcatatttataggtatctttagaaaaacagttttctgtgatcaagtaaattggataaatactaggtaaacaaaattaggcagccttctttttttttcccagattattctgagcctttacca

SEQ ID NO: 216162 - DNA, 512 bp, Homo sapiens
atcagtgtacacatttcttgatcagagtaggactctacctagaatttctgatgtgtatgtgcacgtcttcctcgctttttttctctctcaggtaataggacctatacccttcaaaaagtcatagtgtcttagaaagtgctattttagttgtgtagtagagattctttctgctgttcactaggagaagtgaatatttatttttccatttatttatttcttcacatattttacacttaaaacatttaaccattctggaaggaaatctttctagaataaatatttttcwactttttaaacacactaaaagtggtttgattttttttgatgactcagttcttaatttctgactgcaacttttctgaaatcgatgtcagcagaatagttacctactgcatatttataggtatctttagaaaaacagttttctgtgatcaagtaaattggataaatactaggtaaacaaaattaggcagccttctttttttttcccagattattctgagcctttacca

SEQ ID NO: 216163 - DNA, 497 bp, Homo sapiens
gaattctgagttttagctaagcagattactacataacaaaaaactatatttctcaggctcccttcagtatatgtggctatgttttgtgtaatgagatttcattacaggcagcttctgaaattgtccccaatgacctctctctcctgatactcacctgcttgggcaaatcctcttcttgaatatcagctggacctagtgactcatttctaatgaatagaataggactaaagtgagggatgtcatttccaagattaggttagaaagagattttagcttcrtcttggggtactttctttcgttcttgttatgaggaaagccagctgccatgttgtgatctgctacaaggagaaacctacgtggcaagaaattgatgtatccacacaagagccagtgaggaccggaggcctgccaacagctttgtgagtgatctcagaaaaatatccttcccaggtgagctttcagatgactgtagaccctgtcaacacttcgattgcaac

SEQ ID NO: 216164 - DNA, 627 bp, Homo sapiens
agttttctacatttctctgcaatgaacagctattttgtaataaaaaacaattagcatataaaaaagtaatcatggcagattatgtccagttttctcctccttggctatcacaaaatattggacatcattttattcttccaaaattgtagtgcttctactttttcaacacattttttcttataggctgtgagtagatccaaagtagcattttcccttctctgctttccttgcctttggcagatagaattatcaggaaggcttgtcaagaatgcatttttctggtgatagctgatttaatgccagtgtcgcatttaaagtgatgttttaatttttttcttggagcactgataggattaagggtgcagacatattgaccctccattgatttgccaatatccagaagaaacttttttcctctgctagaaatgaaaagtcracatagaatttactggtgtgttattggttagagtattaactattgtaagttgcttaagcaatgaatacataataatgttaataataataatttattgtagaggaaatttacaactaaaaaacaaaaaaaatactgataatgataaaatggtaatattttaattaccaaacacataatagacaatcaataaa

SEQ ID NO: 216165 - DNA, 453 bp, Homo sapiens
agaggaaggggaccttcttctctgtagtgaaataaagtagtcagctgaactcacctgatytagcacctgggtcttagcagacatagtcactcttattgctcagaaccaaggccttctgcaagttcaaagggactaccacgttgtggtagtagttcctccagccctctacaacctcccacagcaccttagggttccgtgaaaattgctgtggtctaacatgcttaccattcaagataactagatactctcactaatccctattacggaccagttccttaaaatttgggcttgatgaaataagactttcagaaaatctacaacgttgggcaaaacaaaaagggtaataagtaacaatggcttcagagaaccatctcaaccagttcaagtatttaatgataattttcagattgtccaatatctctgtcatcttctaatgagttataaatgggatgt

SEQ ID NO: 216166 - DNA, 245 bp, Homo sapiens
tcagtgtgaattcctatgtagaaaggtatgaacacaaatacagatgtacatatgtatagatgcatatattccctagtttctccactgagagggcctgagaataggaacaagarggccagaggaatgagcacacttcatgcccagctcttggtttctcaatgccatttcagatttgaagcagggaaaacaaacctggacattgtgttattttggaaagcaaaatgtgatcaaagatggggacatga

SEQ ID NO: 216167 - DNA, 497 bp, Homo sapiens
ctggcaaaacgcatcccgtcagatcccaggttaggtttgccacaacctcagatcagaaagaagctttgctgttttttgtttgttgtttttattcattagccattagttgaactgttgaaacaaaatccaartcatcacatctttgcaggttctctatactgaaagaaaatagtttagtatctttattgtcttggtttaacatatattgaaagcctcacattgcacaaagctattcatcaaatgaagtcactgacaggaagagaactggaaaattgtgacttaaagagcctgaggtcaggctgaaccacatatcagtaacaaagcaaatggaggcatattctttaaaatcaatcctttatccaggtatgtattattctatgacacgtttggaggccttaagtctgacacagattagcctagataaatttctgggttatattcataatcattttttcaaatatttttaacaagaagttattgtgttaccaaatatttat

SEQ ID NO: 216168 - DNA, 561 bp, Homo sapiens
acagctgggggccaggtgcagtggctcacacctgtaatcccagcattttgggaggccgaagtgggcagatcatctcaggccagcagttcaagactagcctggccaaaatggcaaaaccccgtttctactaaaaatacaaaaattagtcagccatggtggtgcgcacctgtaatcccaggtactcaaaaggctgagacaggagaattgcttgaacccgggaggtagaggctgcagtgagccaagattgcaccactgcactccagactgggtgacacagcaagacagtattgaaaaaaaaaaaaaaagtcaaaccctatagtactccaatatgtagaaatcaggggcatgagggaaaaaacaccaacagagaccaagagggagtggccagtaaggaggaggaaaagcagsataatgtgatagaccagaggccaactgaataaagtacttccagtaggggactaattatctcaaatgttgcctactagtcaagtaatacgtgattggaaatcggctactgggtttaccaatgtagaggttattggttctcttcataggaaatag

SEQ ID NO: 216169 - DNA, 591 bp, Homo sapiens
  misc_feature (1)...(591): n = A,T,C or G
tcatgaacaagacatttttattcttagtttagtagatatagcttaataaattatattcttatgaacaactattggaggagtgaaaattgctagtcgtcttccatttcaactgaaagccttcctctgaacaagttgttagaacatgttcagagatgcctatcatgagaacatataataggataaattgactgtgggagaagaaggcaaggattagtcactcacaggttggcagcataaagacaaggtaaagggctgcacaccaggctgacaaccataagatgaaccagcatcctgccttggtttgagtgggtgcttatttcttaatgactttatgaattttccagacattgataataatgctacaaaagcaaagaaagaggttaagtatgtaagttataaaagagatttaaagagtttctctatttgtggtatattcctttaggattagtttcccaatagagaaaacaatggttaattggataaaatataaaactatgggcaagtaaatctgaacatktcaagtatcaaatgctaactcaatgagcacactcttgtcttgntatgtaactgcttgaatatctcanaaatacc

SEQ ID NO: 216170 - DNA, 432 bp, Homo sapiens
atttaggtagaaataaatatgagtggaagttccagaactatcttcttacatctaatttgttttcttataaacctcactctacattgaagaccatcaaatgagacaacaatcactagagtacagccaggttagtactgcctatggaattacctccaggaggtgataaaaacaactcttgagcattttccagctcactttgtggataggtgaggcctgtgtgaggagatacttctttaggaagggaaatatctctcagtagcatttccatttccacggggtatccaaactccagtatacagagctgagaattatctagggcagtgtatctgtttyttatgcaattctccagccttttctccaaggaaataagcatttcagaaatgtcagattcatgaactaacgaataaataaatgttgaatgactcaatgatt

SEQ ID NO: 216171 - DNA, 443 bp, Homo sapiens
ctcttctcttgtctgtcaccatgtgagatgtgcctttcaccttatatcatgattgtgaggccttcccagccatgtggaactgtgagtccattaaacctctttcttttgtaaattgcccaggctcgggtgtgtctctatcagcagcatgaaaataaactaatacatatatacgcctgtgaatgtataattttcacatgtgagaaaacttagttgataattcttgtaatagtactattgtgtttatacgaatctgttcaggctatcttaacaaaacactacaaactacatggcttaagcaacagaattccgtttctcacagtactggaggatgggaagtttaggatcaaggtctagcaacgtggagrttctggtaaaggctctcttgctggcttcaggcagccacattctaacatggtagagagagagtgctggtgtctcttccc

SEQ ID NO: 216172 - DNA, 557 bp, Homo sapiens
ggattgtatattatgtttatgcaaagttatggccaatgaaagatttccttgaaaggttgtttgaaacgggggatttaggagatttaggagatataggagatatacagggaatatttataggcagaagcgtaaccttttattttttattttattttatttttttgagacagagtctcagtctgtcgcccagggtggagtgcagtggcatgatctcggctcactgcaacctctgcctttcaggttcaagcaattctcatgcctcagcctcccgagtagctgggattacaggygcccgccaccacgcccagctaatttttgtatttttcgtagagatggggtttcactatgttggtcaggctggtctcgaactcctggcttcaggtgatccgcccatctcggcctcccaaaattctgagattacaggcttgagccactgtgtccggccagatacatcttttacatcttccccagtttcataaacgtaaaatacaaaagggagtatcccttttgagagacagtattttctaatatttgtaaaacagaagcaaaagatatcg

SEQ ID NO: 216173 - DNA, 652 bp, Homo sapiens
tggattcatttcacagggttaaacctttccaattcagtaggttggaaaccctgtctttggagattctgcaaaaggacgttgtgggcccttagaagccagcagtgaaaaacagaatacccacagttaaaaactagaaagaaggtatcagtgaaactgctttttgatattggattcatctcacagagtaaaacatttcttttgatacagcagatttgaaacacgtttggaagaatctgggaagggagacatggaagcccacagaggcttatgttcaaaaaccggatatcttcatacaaatactaggaagaagctatcagtgaaatctctatgtgatatgtggatacatctcacagagttaaaccttagttttgatttagcagcttggaaacactcgttttgtggaaactgaagagagacatttgggatcccatagaaacctaaggtgaaaaacacattatcccaagataaaaacttgaaggaatctgtctgtkaaactgctttgtgatgtgtggatttatctcactgagttaaatgtatcttttgattcgggaggttggaaacactcttttgatacaatctgcaaacggacatttgggagccctttaaggcctacagtgaaaaacaaaatatctccaaataaaaacaggaagga

SEQ ID NO: 216174 - DNA, 587 bp, Homo sapiens
ttcaaacctgctttagcaaaagaaaaatttaactctgtgagacaaatccacacatcacaaagctgatttacagatagctttttcctagtttttatctgaggatattttatttttcaccataggccccygtgggctcccaaatgtccctttgcagatactaacaaatagtgtttccaagctgttaaatgaaaacaaatgtttcccactgtgagatgaatccacacgtcagaaagcagtttcacagatagcttttttctagtgtttatctgggaatatttggttttccaccacaggcctctgtggactcccaaaatatcttcacagattccacaaaaagagtgtacaaaacttgctgattcaatagagtggttaatctctgtgagatgaatccacagattatagggctgtttcacagaaagcttttttctagtttttatctgtgaacatttgtctcaaaaagcttcaaaatttctctttgcagtttctatgaaaacagtgtttccaacatgctgtatcaaaagaaacgttgacctctatgagatgaatccactcatcaaaaagaagttcacagatagcttcttcctagt

SEQ ID NO: 216175 - DNA, 587 bp, Homo sapiens
ttcaaacctgctttagcaaaagaaaaatttaactctgtgagacaaatccacacatcacaaagctgatttacagatagctttttcctagtttttatctgaggatattttatttttcaccataggcccctgtgggctcccaaatrtccctttgcagatactaacaaatagtgtttccaagctgttaaatgaaaacaaatgtttcccactgtgagatgaatccacacgtcagaaagcagtttcacagatagcttttttctagtgtttatctgggaatatttggttttccaccacaggcctctgtggactcccaaaatatcttcacagattccacaaaaagagtgtacaaaacttgctgattcaatagagtggttaatctctgtgagatgaatccacagattatagggctgtttcacagaaagcttttttctagtttttatctgtgaacatttgtctcaaaaagcttcaaaatttctctttgcagtttctatgaaaacagtgtttccaacatgctgtatcaaaagaaacgttgacctctatgagatgaatccactcatcaaaaagaagttcacagatagcttcttcctagt

SEQ ID NO: 216176 - DNA, 587 bp, Homo sapiens
ttcaaacctgctttagcaaaagaaaaatttaactctgtgagacaaatccacacatcacaaagctgatttacagatagctttttcctagtttttatctgaggatattttatttttcaccataggcccctgtgggctcccaaatgtccctttgcagatactaacaaatagtgtttccaagctgttaaatgaaaacaaatgtttcccactgtgagatgaatccacacrtcagaaagcagtttcacagatagcttttttctagtgtttatctgggaatatttggttttccaccacaggcctctgtggactcccaaaatatcttcacagattccacaaaaagagtgtacaaaacttgctgattcaatagagtggttaatctctgtgagatgaatccacagattatagggctgtttcacagaaagcttttttctagtttttatctgtgaacatttgtctcaaaaagcttcaaaatttctctttgcagtttctatgaaaacagtgtttccaacatgctgtatcaaaagaaacgttgacctctatgagatgaatccactcatcaaaaagaagttcacagatagcttcttcctagt

SEQ ID NO: 216177 - DNA, 508 bp, Homo sapiens
tgacatatcacttggcacatcatctacattatgtgaccctcctctcatgcctgggccctgctcactgaggttgttgtaacatatggctggccccagcccctaggttacttttctcttctcttcttcctgagccttacccacagtaggccttttgacatattcytggaaccctcctgaggcgatgtgattcttctgcctgggccctttttcagggtgtgttatgccatatttttgggtccagcaacaaggattacctctactgtttgggctttgccctaaaagagattgcaatgtattgctgggcacaacacctaggtgatgtgactgtcctctcctttctgggctctgcacacattctgtattgcaaaatattcggcacctatgtgtgtgactctccttccatgtttgagctcttgccactagagtgattgggacacatagatcagcccacctattaggttatataacttccctcttcattttgttctttacccacacagagattggg

SEQ ID NO: 216178 - DNA, 476 bp, Homo sapiens
gtgtggagcaaaattaaatatgaataagccatatgtctattaccaatataattatttctgtttcttttcctgtataaatattatccctgtagttttgtgtcacttgtgtgtttgttgtgtaggtttgttgtaacggttttttatttttttttcttttttttttctcctttgagagggagtttcactcatgttacccaggctggagtacaatggcaggatctcagctcactatacaacctctgcctcctgggttcaagcccttctcctgcctcagccttccaagtagctgggattacattcgtgcactacaacgccygcctaatttcattcatactttagtagagacagggtttcactatgttggtcaggctggtcttgaactcctgacctcaggtgatctgcccaccttggcctcccaaagtgctgggatacaggcgtaagccaccgcacgcagcttgtaacagtgtttttaatcc

SEQ ID NO: 216179 - DNA, 628 bp, Homo sapiens
tgcctattgaagcacaggcaattttgtctccataaataacactcttgagtacaacaataaaagccctcttcaaacaaacaaattatttataacacttattttaatgaaaatgtaaccaaaagtatataattggatatatttttgttgttctatgtgtgtgcgaatgtataaattggtacataaggacaaaataatttaagccagaaaaaaagatgttagctaatatttgtaatgaataaaactggawagtagttaattattatttgcacataatgtctttgtttacgtagataacaaaacagcagaaagactattttaaaattttattcaagtgggtaggtaacattctaagataatacgctggattcccagtctgttgcacacctgctgtgtaatactttttccttgagtgtaaaaaaatgtgtaactggtgggaaatcactcaagaaattaggttactcatgtgttgactttgtgtttatcaaaatggagattgtcctgactgtgctaaacttaatcagaggtgcttttaagagaaagacacatcatagaaaaacacccctgcttggcctgaaagtaagtgacttctaggtgggccatgttgcaagctggcttatggtgaccacat

SEQ ID NO: 216180 - DNA, 655 bp, Homo sapiens
aagcaattacaaaccccctccctttccatgcactgataaagtatgattttctgaaggcaattgctgattcctgcatttaaccgctgactaagtaagaagaaaatgaaatatgttttcctttctaggaatttcaatatgtagcccttttctacttctctgtaagtttcgctgcagtcattgaaactagatgaaagactaggatttaaatattttgcaaattcactgagaataaatcatttagaaaaaaatatacgtttcatggttcttttaagatggcactaagattttgttaggcaagtaagtctaattgggaaagacttaattttagaacactcacctttgttaaaacataaaggagtcattgtttaattctgcaagacaatttagcaaaagtgggttttacttaaaacattatgatggtgttgtcaaagacaaaattacaaaaaaaaattagtttaaagatcttatttggcttttatttgcaattctagaatcaggcaacaccaacaccacattttataaagaaaactgagcgtctcaatgagctgtgcagaratgtttagttttatagcgaaaaaggagctgaagaaacagaaacagaagacaaaaagcagatgggccctttcaaagtttctttgttaaggttaaagcagaa

SEQ ID NO: 216181 - DNA, 627 bp, Homo sapiens
tctcatgccaataacatgacttattactattgatgttaatcttgatcaccaagctgaagtagttgtcaggttgctccacaattaaattactctttttccttctttccaaactatactcgtaaaaaggaagtcactatgtgcaatccatacttaagaaacaaggagttaaattccatcttcctgaatgtataatatatgcataagttatttggaattttctgcactggaaattgtccatacttttctactcatttatttatgaaactattttttaggatactgcagcggtggatacttgatactgtaaaattttttaaatctacataaaccttaargcacaaagtgaatattaatatatgcaattgaaaaaaaaaatttagaacatcagtggatcccagaatagaatgaatactatgatgacaaaatctaactgtgttacaaatatatgaaattactttactaaagcaggtgtgggagaagtgttgacttaagtaactttagaaataagtagggactaagactaaagccaaaaggaactgtaaatgagcataatactctagttgttaaagttgtttttcatgtgagtactggcaaacaattctgaaaactctatactaaaattaaaca

SEQ ID NO: 216182 - DNA, 608 bp, Homo sapiens
gatcaattttagatctttcttctttcctattatatgcacttcatgctataaattttcctctaagcactgtttttgctacatctcacaaattttgataagttgcattttcatcttatttgctcaaaatattttaaaaattttcaagacttttaaaataactttattttaggttcatgggtacacatgcaggtttgttacataggtaaactcgtgtcatgggggttcagtgyacaggttatttcatcacctagctactaaatgtagtacctgatagttatttttctgattgtctccctccttctactttgctccctcaagtaggtcccagtatctgttgttcctgtctttgtgcccattgctttttattatttagcttccccttaaaattaagaaaatgcagcatttggttttcctttcctgcattagtttactaaggataatggcctctagctccatctatgttgctgcaaagaacataatcttatttttttttatggctgcatagtatttcagggtgttatatgaagcagaaaaatgcaaaaaataaaaacaaatttcctttctcctttggcataagtaaacttatgagcttatggattcctgttttc

SEQ ID NO: 216183 - DNA, 433 bp, Homo sapiens
aactggatgaagttattaattagaaaccttaacataacaaccctagtagctgtacatgttagagacttcaaagttttttgtgctagttattttttctcccctcttttctttgggtttcgckagatactctctcttaattagagactgtgtattaggcacttaattagagattgtgtattacagctcttgtagctaattcactgtttgtatagtgaagtcttattgatctggttgtaaggtgatggggagggaagcattctgtaatcttatgattaaatcccattcttttagtggttatgagtcattgggctatgacctttgtgagcatttcttagctttttaaaatctcgtcttatgtgagaaaggaagactaggggagtttggagttgtttaactgacattttcctaagtcagaaaggtcctatagtgtagg

SEQ ID NO: 216184 - DNA, 675 bp, Homo sapiens
gcatgtcagacaatgtctctttctcaggagaaattccatagatgttctaatatatagctggataagaagatgagctctgagctcctaatcaggatacccttacaattcactttctttgatatcatgccaataatcacaactttaacaggaattaagatatttcccacaaaggagagaggctttccatgatcacagtatagtaacagaactgcttgtggttyaagtaactacccacactacctcgatcatcattctgaaggccaactaaggtataagccaggtgttttgtagatggtagaggcagaggaataaaatatgaaagtaataagagagaaacacaaaagatgaacttcacttcattcctcatattgcagagagagagaggcaggcctgaatatattcacaatgacatgactacgacaggcaaggttaaactacacttttctaccaccatctacgtagacaccattaattgaattaaacaaagtttcccccaagagggaaagagtaattgtattcatgataagaaatattgaaagattttacgataacaagcatttaaaaacccaagcatttttcttatgggtgtctgaaagaaaatcagagaaaacggcttatcacccaatgtaactttttccttagggccgaagcattatgtcctttaaatggagtaga

SEQ ID NO: 216185 - DNA, 565 bp, Homo sapiens
atttctgggcactctattctatcccactggtcatatgtccttcttcatgctagtacttcatggtttgattattgtagctttgtagcaagttttcaaaatcagggagtgtgtgtctttcaggtttgccctttttcaagattactttgaccattcagtgtcccttgaaattctatataaatgttagggtggatttttttatttctgaaaagtacatcactgggattttgatrgatattgcattgagtttgtagctcactttgggtagtattaacatcttaatactattaatccttccaattcatgaatatagaatgtctttccaattatttatgtcctctttaatttctttaagcaatatttgtagtttttattatacaagtttttaaccttcttgactaattcctaagtattttattctttttgatgctattgtaaatgcaatattttttagtttccttttcagattgttcagttagtctatgaaaatgtaactgatttttgtgtgctacctttatagcctcctgctttgttgaatttattatttccacattttttgtagaattgt

SEQ ID NO: 216186 - DNA, 565 bp, Homo sapiens
atttctgggcactctattctatcccactggtcatatgtccttcttcatgctagtacttcatggtttgattattgtagctttgtagcaagttttcaaaatcagggagtgtgtgtctttcaggtttgccctttttcaagattactttgaccattcagtgtcccttgaaattctatataaatgttagggtggatttttttatttctgaaaagtacatcactgggattttgatagatattgcattgagtttgtagctcactttgggtagtattaacatcttaatactattaatccttccaattcatgaatatagaatgtctttccaattatttatgtcctcyttaatttctttaagcaatatttgtagtttttattatacaagtttttaaccttcttgactaattcctaagtattttattctttttgatgctattgtaaatgcaatattttttagtttccttttcagattgttcagttagtctatgaaaatgtaactgatttttgtgtgctacctttatagcctcctgctttgttgaatttattatttccacattttttgtagaattgt

SEQ ID NO: 216187 - DNA, 613 bp, Homo sapiens
gcaggttgacagtacttaaaggccaaagaagcagtttacaacattaaaacatttaacaaacctagtatttgacctgcataatttagaccacctgtttacattttaagacgtttgtattttacaagaatgtttttatttcttaaatattaaagttacatgaaccaagaggcactacagccttaattttgtcttaattttttttgaagtgcttatttgcacaccaattaattagaggttttttatagacttcacacaaaacacgtatataaccatctaaacaaacagaagaaaattcagtaactataagattttttgtttgccaattttctaattggattattggtctctatttgaggccatttaagaacagggttaggggccaggcatggtggctcacgcctgtaatcccagcactttgtgaggccgaggtgggtggatcacctgcggtcaggagtttgagaccagcctggccaacatggtgaaaacacatctctactaaaaataaaaaaatttagctgggcatggtggcaggtgcctgcaatcrcagctactcactaggctgaggcaggataattgcttgaacccaggaggtggaggttgtagtgagacaaga

SEQ ID NO: 216188 - DNA, 521 bp, Homo sapiens
actctggcctaggtgacagagtgagactctgtcccccataaaaaaaaaaaggacagggctaggaatacagtttccagggcctaacaaataagcatagctagaagaaaaagagattttgagagggacttatttacttttaattctaggagtttcatwaaaaaaagcagagatttcttttaaaatgtaatttgtggtggcttttttgttttcctgaggagtcttaggccaccagaggttattttagggccttctatgcttgcatcaacagtgacaagaaagagtggataaaagtaattcagttaagtgagataaaaccctcttccaggaaaacaagttttataaagataaaaatagaaaggctttttgaatatacttatagcttggatattcacttttcattaagttgagtacattttaaaaatgtttatttaattaattaaaactttacaaagaatataaacagtgattcttcttatttcttttaccagtttacaccactagctgtttacaatcccgtttag

SEQ ID NO: 216189 - DNA, 521 bp, Homo sapiens
actctggcctaggtgacagagtgagactctgtcccccataaaaaaaaaaaggacagggctaggaatacagtttccagggcctaacaaataagcatagctagaagaaaaagagattttgagagggacttatttacttttaattctaggagtttcattaaaaaaagcagagatttcttttaaaatgtaatttgtggtggcttttttgttttcctgaggagtcttaggccaccagaggttattttagggccttctatgcttgcatcaacagtgacaagaaagagtggataaaagtaattcagttaagtgagataaaaccctcttccaggaaaacaagttttataaagataaaaatagaaaggctttttgaatatacttatagcttggatattcacttttcattaagttgagtacaytttaaaaatgtttatttaattaattaaaactttacaaagaatataaacagtgattcttcttatttcttttaccagtttacaccactagctgtttacaatcccgtttag

SEQ ID NO: 216190 - DNA, 392 bp, Homo sapiens
agttgaagtctttatcacattcttcgcatttgtagggtttctctccagtatgaattmtcttatgttccacaaggtttgaggaccggttgaagcctttgtcacattcttcacgtttgtagtgtttctctccagcatgaattttcttatgtgtaataaagattgaggactgtttaaaagctttgccacattcttcacctttgtagattttctctccagtatgaattttctatgtttactagactgagaatcagctgaaggatttaccacattcttcacatttttagggattctctccagtatgaattttcttatgataactaacagttgaggatgacttaaaagctttgccacattcttcacatttgtagggtttctctccagtatgaattctc

SEQ ID NO: 216191 - DNA, 565 bp, Homo sapiens
ttttgaatttgctgagaattgttttwtttctgattgtgtggtcaattttagagtatgtgccatgtggtgatgagaagaatgtatgttatggtattttttagatgaagagttctgtagatgtctattaggactatttatttggtcaggtgttgagttcaggtcctaatattgttgttgattttcttcaatgatctctccattagtgcctgtgagatgtagtccccgattattactgtcagattctaagtctcttcataggtctctaataatttgctttattcatgtgaacccatggtttttttttataacaattttctctcttctgcttttccccccataaacattcttttaagtgcacacagtgtgcaaaattcagatgtccaagagttcaagaacttgtccagagacctggcttttgtaagagaaaatataaatgagaaataagaggctttattctcatatgtgaaaataagggtggataacttgctgatttttaaaaaaaggtttagattatatgtatatatttcttctgctttttgaaatatatgtaaatcatattagaaat

SEQ ID NO: 216192 - DNA, 547 bp, Homo sapiens
ttgggattttgaatttgctgagaatgttttttttctgattgtgtggtcaattttagagtatgtgccatgtggtgatgagaagaatgtatgttatggtattttttagatgaagagttctgtagatgtctattaggactatttatttggtcaggtgttgagttcaggtcctaatattgttgttgattttcttcaatgatctctccawtagtgcctgtgagatgtagtccccgattattactgtcagattctaagtctcttcataggtctctaataattgctttattcatgtgaacccatggtttttttttataacaattttctctcttctgcttttccccccataaacattcttttaagtgcacacagtgtgcaaaattcagatgtccaagagttcaagaactgtccagagacctggctttgtaagagaaaatataaatgagaaataagaggctttattctcatatgtgaaaataagggtggataactgctgatttttaaaaaaaggtttagattatatgtatatatttcttctgcttttgaaatatat

SEQ ID NO: 216193 - DNA, 474 bp, Homo sapiens
tgtagaaatcacccatcttctgcatcgctcacgctgggagctgtggactggaactgttcctattcagccatcttggaacctctatcaactagttgtaagtattcttaacttgcaacaatatagttrtttgcatcaatgaaacaaaaatcctttttctattttttctttcttttgaaacatagtctcgctctgtctgtggctggcatgcagtggcaaaatcttagttcactgcaacctctgcctcccaggttcaagtgactctcccacctcagcctcctgagtagccagtactacaggtgtgcaccaccacggccagctaacttttgtatttttagtagatatggggtttcacaatgttggccaaggtggtcttgatctcttgatctgcccacctcaggctaccaaagtgctgtgattacaggcatgagccaccgtgcccagctgaaaaatccattttcttatgcagtgaaacac

SEQ ID NO: 216194 - DNA, 443 bp, Homo sapiens
tctgcaaaatggccaggtgatactaattagaagcctgggctgataaccccttaactaagcatttcctctcaagctctaaggagcttataaatgacttggtaattttggccccactctatgaaatgtaattctgcaggtatggaaagggtccataaatgggtcacttaaacaagtgcgctgtcaataatgatgttgctcccactgggcttattattagcattarttagagaaatgaggcagaacacagatacttctggtacaaatgaaaacaatcattcttcatcctaaagtattatattatttgctgactctttaaaatttacagagaaaacagaaagcagcaatttctgagtaagtcagcatttggaaaacaacgtgtgcacatgtactaatgcaatgtttattaagcaggtactatgtgctcaataggatgttagagtact

SEQ ID NO: 216195 - DNA, 488 bp, Homo sapiens
aaaacttttaagtttgggggtacatgtgaagatttgttacataggtaaactcatatcacgggrgtttgttgtacagattatttcatcccccaggtattaagcccagtacccaatagttatcttttctgctcctctccctcctccctcccttcaccctcaagtagaccccagtgtctgttgttcccatctttgtgttagttaagttctcatcacttagctcccacttacaattgagaaaatgcagtatttggttttctgttcctgagttaatttgctaaagataatagcctccagctccatccatattcctgcaaaagacatgatctcattattgcttatggctccatagtattccatggtgtatatgtatcacattttctttatccaatctaccattgatgggcatttcgattgattccatgactttgccattgcgaacagtgctgcaatgattatttgcatgcatgtgtctttatggtagaatgatt

SEQ ID NO: 216196 - DNA, 488 bp, Homo sapiens
aaaacttttaagtttgggggtacatgtgaagatttgttacataggtaaactcatatcacgggggtttgttgtacagattatttcatcccccaggtattaagcccagtacccaayagttatcttttctgctcctctccctcctccctcccttcaccctcaagtagaccccagtgtctgttgttcccatctttgtgttagttaagttctcatcacttagctcccacttacaattgagaaaatgcagtatttggttttctgttcctgagttaatttgctaaagataatagcctccagctccatccatattcctgcaaaagacatgatctcattattgcttatggctccatagtattccatggtgtatatgtatcacattttctttatccaatctaccattgatgggcatttcgattgattccatgactttgccattgcgaacagtgctgcaatgattatttgcatgcatgtgtctttatggtagaatgatt

SEQ ID NO: 216197 - DNA, 438 bp, Homo sapiens
tcttcacataaaaactggacagaagcattctcagaaacatctttgtgatgtttgcattcaactcacagagttgatccttccttttaatagggcagttttgcaacactcttttgtagaatgcaccagtgggctttggggcacgtcaagggctatggtgaaaaaggaaatatcttcacataaaaactagacagaagtattstgtaaaactccttgtgatgttgcattcaactcagaaagttgaacttctctttatatagtccagttttcaaacactattttgtagaatctgcaagtggatactgggactgcttgaggctatcgtggaaacaggattatcttcacataaaaactagactgaaggattcttagaaacttcttgtgatgtgtgcattcaactcaccgagtggaacctcacttttgatagagcaggttgaaaga

SEQ ID NO: 216198 - DNA, 438 bp, Homo sapiens
tcttcacataaaaactggacagaagcattctcagaaacatctttgtgatgtttgcattcaactcacagagttgatccttccttttaatagggcagttttgcaacactcttttgtagaatgcaccagtgggctttggggcacgtcaagggctatggtgaaaaaggaaatatcttcacataaaaactagacagaagtattctgtaaaactccttgtgatgttgcattcaactcagaaagttgaacttctctttatatagtccagttttcaaacactattttgtagaatctgcaagtggatactgggactgcttgaggctatcgtggaaacrggattatcttcacataaaaactagactgaaggattcttagaaacttcttgtgatgtgtgcattcaactcaccgagtggaacctcacttttgatagagcaggttgaaaga

SEQ ID NO: 216199 - DNA, 565 bp, Homo sapiens
taaaaccaggaagtttttattagtgattttcaaaaggggaaggtgtgtattaatagggtatgggtcacagagatcacatgcttcacaaagtaataaaatatcacaaggcaactggaggcagggtgagatcacaggactggggcaaaattataattgctaatgaattttcaggcacacattgtcattgataacaacttatgaggagacagygtttcagagcagacaaccggtctgaccaaaatttattaggtgggaatttcctcctcctaataagcctgggagggctacaggagactggggcttatttcttcccttctctacaaccataaaagacagatgttcccagagtggccatttcagagttctacccttaggaatacattctctttctcagggctgttctttgtggagaaaaagaattcagtgatatttctcttatttgcttttgaaagaagataaatatggctctgttctgcccaactctcaggaaaccagacctaatgattatctcccttgtttcctgatcatcactgttgtcctgttcttttttcaaggttcccagatt

SEQ ID NO: 216200 - DNA, 542 bp, Homo sapiens
gaattcttattcattctgcaattctttatcttttaagtggagcatttagaccacttacattyaatgttagtattgagatgtgaggtaccattccattcatcatgttatttgttgcctgtataccttgatgttttttttttaattgtgtttttgttttataggtcttgtgtgatttatgttctaaagaggttctgttttgatgtgtttccaggatttgtttcaagatttagagctccttttaacagttcttgtactgatgggttggtagtggtaaattctctcagcatttgtttgtctgaaaaagactgtatcttttcttcatatatgaagcttaattttgctggatacaaaattcttggctgataattgttttgtttgaggaggctgaagatatggcctcagtcccttctagcttgtaggttttctgctgagaaatctgctgttaatctgatagattttcctttatgtgttacctggtgcttttgtctctcagctgttaagattctttccttcatcttaactttagataacctgatgacaat

SEQ ID NO: 216201 - DNA, 542 bp, Homo sapiens
gaattcttattcattctgcaattctttatcttttaagtggagcatttagaccacttacatttaatgttagtattgagatgtgaggtaccattccattcatcatgttatttgttgcctgtataccttgatgttttttttttaattgtgtttttgttttataggtcttgtgtgatttatgttctaaagaggttctgttttgatgtgtttccaggatttgtktcaagatttagagctccttttaacagttcttgtactgatgggttggtagtggtaaattctctcagcatttgtttgtctgaaaaagactgtatcttttcttcatatatgaagcttaattttgctggatacaaaattcttggctgataattgttttgtttgaggaggctgaagatatggcctcagtcccttctagcttgtaggttttctgctgagaaatctgctgttaatctgatagattttcctttatgtgttacctggtgcttttgtctctcagctgttaagattctttccttcatcttaactttagataacctgatgacaat

SEQ ID NO: 216202 - DNA, 417 bp, Homo sapiens
accgaggggatggtgctaatccattcatgagaatccaccctcatgatccaccacctcccaccagatatgtaatttgcttgactgtaataaccactcactatatatatgtatatcaaacctcatgttgtataccttaaatatatacatttttatgaaaaaaagaaattaaaagtcatactaagttaaataaacaaaccatttaaaaacactttgtgtccccaagggaatagtaattattttttctcagtagaaattaatgatgcatagtaagatcatcagaaccacgagaacccmacagcgtcttgtctgacatggagtgaatatgagaattttagatgcagactgtgggctctgcatgatgtttcttcctttgaatcatgccatattgcctgggccaatttagttcagccaacattt

SEQ ID NO: 216203 - DNA, 469 bp, Homo sapiens
taacatttaatatctgcatggagagggcaagttactttatcttcctaagcttcagattgttgtcttaaggttattatattatgacctacttcactgagttgccttgaggattaaatgagatgctgcatgtaaartataaagtgcttagaatagtaagtactcagtcctactaagtattgttatcactctcattcctcattcttgaggcatgtttctcacaggcctctctttactcattctagaatgaaggtaaattcatgcacgtttagtattttctagggaacatggtggatccagctgatgccaactcagggttgtgtgcatctcttcccaacttgtggttcagtgatgttgatagctgaggtccaccatggtggtagtatttacacatggaaattggcaaatactacagccaaaatagccctccttccctgttttttgtggaaatcagtttaccagcacaccattg

SEQ ID NO: 216204 - DNA, 469 bp, Homo sapiens
taacatttaatatctgcatggagagggcaagttactttatcttcctaagcttcagattgttgtcttaaggttattatattatgacctacttcactgagttgccttgaggattaaatgagatgctgcatgtaaagtataaagtgcttagaatagtaagtactcagtcctactaagtattgttatcactctcattcctcattcttgaggcatgtttctcacaggcctctctttactcattctagaatgaaggtaaattcatgcacgtttagtattttctagggaacatggtggatccagctgatgccaactcagggttgtgtgcatctcttcccaacttgtggttcagtgatgttgatagctgaggtccaccatggtggtagtatttacacatggaaattggcaaatactacarccaaaatagccctccttccctgttttttgtggaaatcagtttaccagcacaccattg

SEQ ID NO: 216205 - DNA, 586 bp, Homo sapiens
gaaagatcttggactcaaaggctcctgttcagattcttctgtcccatgkagtgatttcttgatgtggtgctttctcacttttcctagggatgggctttctgcaagtcagactacagtgattgttattgttcttctgggactagtaaaccagtggagctctacagctccaggctgatattgaggaatgtctacaagtgtcctgtgatgtaatctgtcttcaggtctctcagccatgaataccagcacctgcttcagtggaggtggcagggaagtgaagttgactgtgtgagagaccttggttgtagttttatttagtgcattggttttctcaattgcttgttatgcaagcagtgaatttgtcatgtggacagactcaggacctctggttagccaggatgttacaggtggtggaattagtttttctttttttttttctttggagcagggctgttctgttacgagtcgctgttatggcttgtgtcagttggcctccagccaaaggtggtgctttcaggagaacaccagctgtggtagtagaaagggggtatagacttgccctagttaaccaggatacccgttcaggatt

SEQ ID NO: 216206 - DNA, 497 bp, Homo sapiens
aatctaatttttaacatttcttctctctctcctttttctttttttcccctcttcttgtgcattactaggacccagtaccacctgccaggaagattcatgtgccaaccagggggtctgcatgcaacaatgggagggcttcacctgtgattgttctatgacctcttattctggaaaccagtgcaatgatcgtaagtacaacaacctttcatactggaactttgtsaagatgtttggagatttggagaatcttaaaggacaatatgtaaaaggatggctcttctgaaagattcataagtaattctctcctccagaaacttgggaaataaatgactagtgctcttatgagaagagtgaagagatgtgtcttgcttaacaacactaaatattctcccacttgctcactccctgtgttttttctttagattagaatagcgactgagaaacaataaccacagcagcaaaccatttcaggcaatatttttgttgtaagggcttca

SEQ ID NO: 216207 - DNA, 497 bp, Homo sapiens
aatctaatttttaacatttcttctctctctcctttttctttttttcccctcttcttgtgcattactaggacccagtaccacctgccaggaagattcatgtgccaaccagggggtctgcatgcaacaatgggagggcttcacctgtgattgttctatgacctcttattctggaaaccagtgcaatgatcgtaagtacaacaacctttcatactggaactttgtgaagatgtttggagatttggagaatcttaaaggacaatatgtaaaaggatggctcttctgaaagattcataagtaattctctcctccagaaacttgggaaataaatgactagtgctcttatgagaagagtgaagagatgtgtcttgcttaacarcactaaatattctcccacttgctcactccctgtgttttttctttagattagaatagcgactgagaaacaataaccacagcagcaaaccatttcaggcaatatttttgttgtaagggcttca

SEQ ID NO: 216208 - DNA, 442 bp, Homo sapiens
agtctaaacagtgatgactataatacctaacctttcaatgcccagacactgaagaacatctatttgcatcaacaccatccaggaaaacatgatctcactaaatgaactaaatgaggcactaggtaactatttgggagaaacagagacacgtgacctttcagacgaagaattcaaaattgctgtattgaggaaactcaaagaaatgcaagataactcagagaagaaattctatcagatatagttcacaaagagagtgaaataattaaaaagaataaaaattctggagatgaaaaatgcaatgggcatactgaagaatgcagcagagtcccttgacagcagaactgatcaagcagaagaaagaatcagtgagcttgaagtcaggctacttgaaaatacacaatcagagragacaaaagaaaaaaaataaaaaacaatgaagtat

SEQ ID NO: 216209 - DNA, 645 bp, Homo sapiens
tagaagaagccaggtccaaaaggttacatatggtataagtatacatgtgggacagtctcaaatggaaaaaagtataatggcagagaacaaatcagtggttgctgaggttagggatgaggagagattgtaactacaaaaaggtagcatgagggagttattcagggtgacggaactgttctgtatcctgattttggtgttggttacatsaatcacatgtgttcaaatttatagaactatacaccaattttaaaagttaattttactgtattttaaaaatagaatctaaaaaaaccaactaatagcaaacagaaaactaaagaaaaaaaatgagataccacaacacacctactagaagagctaaaattaaaaagactgaccataccaagtgttgataaggatataggacaactggaaatctcatacactcctggtgggaaggtaaaacggtaccaccacttaggcagtttcttaagaagttaaacatacacctaacaagttgactcagccattccatttctaaatattacatcaagagaaataaaaacataagtccatacaaagacttacacatgaatgttcataatttatttgtaataacccctaactagaaacaacccaaatatctatgaacaggtgaatggataa

SEQ ID NO: 216210 - DNA, 622 bp, Homo sapiens
gtgttttttttgccactgtcacttcctctgacacatcatcagcctttcatcacaatcacttttcctcatttatgtctataagttcaccttcactgatttcctcagtctgcatatctagaatgtctcaaatggcggcagtgtcattgttgccacaatcagcatgttcccacaggcagcttttttttcatttgctccatttatgtttaatgcaagtttcacttctagtattatcactcttctttagtgcactttcattcttttggccaatttyctcttttaatctgtaaaattccatgtgggtttatctcaagggcacagaaatattaataacaaacctccatgctttgcagcctgtgtgtgaactgaataacagatgcacagtgaccaatcacccatagactttgaaagaagtaaaattgcaaattggtcaattttgattcatatgttatttatgtaatgatttgtgaactgaaaagctagtagcaaacttttatgctatttctcacggttaataaactgtggtaactgaaattcatatcagactgtgccaagtgaggattgcttatacgtttaagacaaataaagtatttaaaaattaaaaaaatattttttttttgaggca

SEQ ID NO: 216211 - DNA, 542 bp, Homo sapiens
actcgggttgattccattccattccattccatttcaatccattcccttccattccatttcattccattccattccattccattccattccattcctttcctttccattccatgccattccactcgggttgattccattcctttccattccattctagttgaacccattccattccattccattgcattccattccattccattccattccattgcacacgggttcattccatattccattccattccattccattccattccattccattccattttccgttccattccattctattccttaccattccattccattccattcccttccatgccatttcactcgggtttattccattcctttccattccattcgggttgaatccattccattccattccattccattccattgaactcgggttgattccattccattccatgccattccatttcattccattccattccattccattccawtccattccattccattccgttcccttccattccattacattcggattgattctttttaatt

SEQ ID NO: 216212 - DNA, 436 bp, Homo sapiens
aatggaatggaatgcaatggaattaacccgaatacaatggaatggaatggaatggaacggaatggagtggaatggaatggaatcaacccgagtgcaggggaatggaatggaatggaatgcaatggaatggaatcatccggaatggaatggaatggaatggaatgcaaagcaatggaatcaactcgattgcaatggaatggaatggaatggaaaggaatacattggaatcaacccgagtggaatggaatggaaaggactggaatggagtggaatggaayggaatggaatggaatggaatggaatggaatggaatggaatcaacttgattggaatggaatggaatggaatggaatggaatggaattaacccgaatagaaaggaatggaatggaatggaacggaacggaacggattggaatggaatggaatggaatgga

SEQ ID NO: 216213 - DNA, 436 bp, Homo sapiens
aatggaatggaatgcaatggaattaacccgaatacaatggaatggaatggaatggaacggaatggagtggaatggaatggaatcaacccgagtgcaggggaatggaatggaatggaatgcaatggaatggaatcatccggaatggaatggaatggaatggaatgcaaagcaatggaatcaactcgattgcaatggaatggaatggaatggaaaggaatacattggaatcaacccgagtggaatggaatggaaaggactggaatggagtggaatggaacggaatggaatggaatggaatggaatggaatggaatggaatcaacttgattggaatggaatggaatggaatggaatggaatggaattaacccgaatagaawggaatggaatggaatggaacggaacggaacggattggaatggaatggaatggaatgga

SEQ ID NO: 216214 - DNA, 392 bp, Homo sapiens
agaatggaatggwatggaatcaacgcgagtgcaggggaatggaatggaatggaatgcaatggaatggaatcttctggaatggaatggaatggaatggaatggaatggaatggaatcaacccgagtgcaatggaatggagtggaatggaatggaatggaatggaacaacccgaatggaatggaatgtaatggagagtaagggagttgaatagaatcaatccgaatgtaatggaatggaatggaaaggaatggaattgaatggaatggaatggaatggaatgcaatggaatggaatcaacccgagtgcaatggaatggagaggaatggaatggaatggaatggaaactacccgaatggaatggaatgtaatggagtgtaagggaattgaataga

SEQ ID NO: 216215 - DNA, 392 bp, Homo sapiens
agaatggaatggtayggaatcaacgcgagtgcaggggaatggaatggaatggaatgcaatggaatggaatcttctggaatggaatggaatggaatggaatggaatggaatggaatcaacccgagtgcaatggaatggagtggaatggaatggaatggaatggaacaacccgaatggaatggaatgtaatggagagtaagggagttgaatagaatcaatccgaatgtaatggaatggaatggaaaggaatggaattgaatggaatggaatggaatggaatgcaatggaatggaatcaacccgagtgcaatggaatggagaggaatggaatggaatggaatggaaactacccgaatggaatggaatgtaatggagtgtaagggaattgaataga

SEQ ID NO: 216216 - DNA, 387 bp, Homo sapiens
agaatggaatggaatggaatcgaacgcgagtgcaggggaatggaatggaatggaatgcaatggaatggaatcttccggaatggaatggaatggaatggaatggaatggaatggaatggaatcaacccgagtgcaatggaatggagtggaatggaatggaatggaatggaacaacccgaatggaatggaatgtaatggagagtaagggagttgaatagaatcaatccgaatgtacggaatggaatggaamggaatggaattgaatggaatggaatggaatgcaatggaatggaatcaacccgagtgcaatggaatggagaggaatggaatggaatacaatggaaactacccgaatggaatgtaatggagtgtaagggaattgaataga

SEQ ID NO: 216217 - DNA, 492 bp, Homo sapiens
aaagggaaagtcttaggaaatttgccaaagtttctaaactactgaaacacactgagaatgcataaagcatataatggccagtcattttatttcagaacctcaagaactatgtactgtgttgtatacagtgcttaatatactgtgcatggctaataaatattaaatcaatccttcataacctgtctctgggacaaaaactctttattcacaagaycaaaatatttctcaaccatttctccagagaaagaactctcaaatccttcattttggccttacagcttcatactacaaaaagtcctgagggatgaaggcacccgaatcacccaaaaactacatcagggcatttcttttagagaggtataaatttgccctgcccttgtttcaccttcttacaaagttctgtagtccaggctaaataattcttctcttcttccaatgttaacacccttcaaatatttgggagtgtctctcctggatcttgtagttggaatt

SEQ ID NO: 216218 - DNA, 562 bp, Homo sapiens
gggcacctgtaatcccagctacttgggaggctaaggcaggagaatcgcttgcacccaggaggcagaggttgcagtgagccaagatcatgccactgcactccagcccaggtgacagagtgagactccacctcaaaaaaaagagtattatttgaaaaattatcaaaacaatatatctattttgattaaattgtcttcatttttatatagcatttactttgctgttttctgaataaaatcctggaagattagtttatctgggtataaaatttgaggttggcagttayttgcttttagctccttcgagattattatcccattgtcttctggcctctgttgttcctgaatagtcacctcagtcaaatggtcttgcctttgtgattatttgcctttcactccaattgtttttaagatttttctctttggcattttacagttgtagcaaatacatcttggtatgaattcagttttatttactccactcgggattggtgtttcttcagtcttgtaaataatgctttccatcaaccctggaatttctcggctattatctctgtgtattttg

SEQ ID NO: 216219 - DNA, 568 bp, Homo sapiens
tttctttggataattaactgatatttcattatgttatgcttctgtttaaccctgataactttcattgctctgatgtctgctctactcgaaattaatatagccaatatgcctttcttttgatttttgttagcatggcatatttttctccatccctttacttttaatctatatgtgtctttgtatttaatgtgggtttcttgtagacaacatatagttggatgttgttttttttgatacacactgacaatctctgtcktttatttggcatatttggatttttggtatttcaggtggattatgtaaagagactgaatctatgactgactggtgcacctgaaagagatctcatggatatcatccatgagaacttccccaatctagctagacaggccaacattcaaattcaggaaatccagagaaccccagaaagatgctctatgagaaggtcatctttaagacacataatcttcacattcttcaaggtcaaagtgaatgaaaaaatgttaagggcagccagagagaaagaccaggtcacctacaaggagaagcccaacagactaacagcaga

SEQ ID NO: 216220 - DNA, 576 bp, Homo sapiens
gatcttcttgtggaggatcttagtggtgtactctgtatttcctgaatttgaatattgggctgtcttgctaggttggggaagttcttctggttaatattctgaagtgtgttttcgaacttggttccattctccctgtctctttcaggtactccaatcagttgtaggtgcagtcttttttacatagtcccatatttatcggaggttttcttcattccttttcattctgttttctctaatcttctctgcctgccttatgtcagcaggatagtcttccatctccratattctttcttctgcttgatcaatttgactattgacaattgtgtatgcttcatgatgttcttgtgctgtgtttttcagctccatcagatcatttatgttcctctctaaagtggttattctagttcacagctcctctaaactttaacaaggttcttagcttctttgcattggtttagaacatgctcctttacctcagtgacctttgttattacccaccttctgaagtctacttccatcaatttgtccatctcatcctctgtcctgttctgcacccttgctagagaagtgttgcta

SEQ ID NO: 216221 - DNA, 434 bp, Homo sapiens
ttatattatagggagttatatagaaattttgttcatttgtttgttgttaaatacattatgttagaacgtctaaataccctaaatattattcttaacaatattgtcttaaattataataagtagaaaactcaaacaaaattaattttttaattactgcaaacagcagtaaccacatagatttcaaaggggttaaacattaattaatgaggatatgttcttatatttcaaagacagctatagtttaaaagaacctcaaattctccctttgaaaatatatttgtaataacagatgactaggcaataaaaacaagttccattatgtgtgtttagaagagggcttgaaatatgtggtaccttatagacattatgagggtaaaggaaatcatctgtttttctttcttattcaatakaaacctttcacatatcagtctttt

SEQ ID NO: 216222 - DNA, 265 bp, Homo sapiens
ctgcccaggattcagttcagcasacgtgtggtaagggcctcggcacgtcaggccctggagaatgtgtgttcacagtgctctacagtttacaaagcccttccacatttatcacaggtggggaagctgaattgcatgcatttatttattcagcgaaaatgaatgaatcccccatggtgggctggttgttggttggatgcaggatgcaggggcatgtcagccacagctctgtctgcaggcacgggagccagatgatgcgggagtggac

SEQ ID NO: 216223 - DNA, 418 bp, Homo sapiens
gattaagatgaccacagatttgacactattcccattaagaggttggtctgttcccccgccccttgggtctggtgtggcctgtgactgctttggcggatggagcagaatgtggaaggagcactgtgcctgttatgagcctgcctttataaggactggcagcttccctcttggtttcctggagccctgagctaccacgtgagaagcctgatgcccctgccrgacgcatccacaaggctatgtggagggggagaggaccgggtccagcccagccttcagttgcccccacccatgcaccatcctaagagctgtgtgtcttgcccctccaaccagagagccatcagctgactgccaccaaagggaccccagttgattgcaagaggaacacaagggtcaccaggaagagcctgacagcaaattc

SEQ ID NO: 216224 - DNA, 418 bp, Homo sapiens
gattaagatgaccacagatttgacactattcccattaagaggttggtctgttcccccgccccttgggtctggtgtggcctgtgactgctttggcggatggagcagaatgtggaaggagcactgtgcctgttatgagcctgcctttataaggactggcagcttccctcttggtttcctggagccctgagctaccacgtgagaagcctgatgcccctgccggaygcatccacaaggctatgtggagggggagaggaccgggtccagcccagccttcagttgcccccacccatgcaccatcctaagagctgtgtgtcttgcccctccaaccagagagccatcagctgactgccaccaaagggaccccagttgattgcaagaggaacacaagggtcaccaggaagagcctgacagcaaattc

SEQ ID NO: 216225 - DNA, 418 bp, Homo sapiens
gattaagatgaccacagatttgacactattcccattaagaggttggtctgttcccccgccccttgggtctggtgtggcctgtgactgctttggcggatggagcagaatgtggaaggagcactgtgcctgttatgagcctgcctttataaggactggcagcttccctcttggtttcctggagccctgagctaccacgtgagaagcctgatgcccctgccggacgcatccacraggctatgtggagggggagaggaccgggtccagcccagccttcagttgcccccacccatgcaccatcctaagagctgtgtgtcttgcccctccaaccagagagccatcagctgactgccaccaaagggaccccagttgattgcaagaggaacacaagggtcaccaggaagagcctgacagcaaattc

SEQ ID NO: 216226 - DNA, 513 bp, Homo sapiens
ttttaaaactcacgtggccagaaaacaaatcctatttgggggaataggtgtgatgctcctactatctgctgaatgaatgaatgaatgaaagacactccaaaaccaaagccattcargtcatctgagtttattctaagactgattctccctactaagcagcaggaataaaatatcagatctaatcccacagctgtctaaatgagcagggtgagacgtatctgaagatgcagaattgactgtggacaagagctttacccttcactgtgcccaaggtgaacttctccacaagacggcacacatgtggccactgcccaacacatctaccctgagcagacgctggccagatgatctcaaccctggacacagctgggtcaatgtttccagggccttcagcctgactgcgctgatactatctgccagggtcagagagaggatgcaggcccctcttctcggccttgggtccacacaagcctctgaaattaagttaaagaggaaaactccagcactcctcca

SEQ ID NO: 216227 - DNA, 502 bp, Homo sapiens
agaaaactaaatgcaatttgttctcctagatgaactcctggaacagaatatttttctttttctataaaggatatttgtgagacaattagcaaaatttgraagagatctgtagatgaaagttagtcttctgatttaattgtattaaatttaatttcctgattttgataactgtattgtgattacataagagaatgttcttggtttcaggaaatgcacactgaagtatttagtgggaaaggagcattgtgtgtctaacttactctcaagtgatgcaaaatcatcattgtgtctatccatctgtctatctctatactatacaacaatgataaatcaaatgtaaaatattaactttgggggaatctgggtgaagggtatatgaaaatttttggaactttcctgtatttcaaaataaaaacttaagaaacaaaacctgcagtggaaggatacattgcaaactgttttgtatagcattaggagggctccatgacctgatgcacatttt

SEQ ID NO: 216228 - DNA, 380 bp, Homo sapiens
ttggttaatgcattctggaattcagtcacatctatgcaaatatctcaccagaagaaaaggggagtaaaggcaatcaacttgcttttccattttgcttgtcaaatgctttcaaaatcctcactttgaaaagaaaaggctttgcagaggtgacttctttctcactgtttcaatgacaggtaaggaaaatgtgcccctccaaccacctcacctggtgtggcccccaggtgcttcagcagcctgtaggccacctatcactttctgacccagcctttgtgaagcagcgaacagctyacttcaggctttcctaatattatatttctatactggtatcctgactcttcataaatcacaatccttagcactgtcaggaaccatgtcaa

SEQ ID NO: 216229 - DNA, 547 bp, Homo sapiens
  misc_feature (1)...(547): n = A,T,C or G
actgtgctggttgcagcattaaaagaaatgcagctgacacactgtcaaaggatgttctcagatgagagagatagatatggagtcctgtgcattatttagccattactgatgtacaaaattaccatttcacagagcattttgaaagaarctaaagacttctgtggacatcagttaacaggaagtcagaagaggcccaaagccttcattttgtgcaagggcacaagcagaggttgagatcagaggcctgaagtactgtgggctgtccaaaaaaaaaggagcacacaccagatgcggcagagctaggctccaccctccatcacgcattgcttagtaaggaggtgcaccaatggctggcaggacccctgcagccgaccttcttggtgccctcggcctgcctctgatgttgagctgcagcagtggacagatcactctcaagtgggcagatcttgtaaagacaagatctttacacaggatcttgtctgtaggaggtggcttcctttatcctcatgcaagcataagccccagagagtgggggcannnnnnnnnn

SEQ ID NO: 216230 - DNA, 567 bp, Homo sapiens
actctgtcacaagacagcactaggggaatggygccaaaccattagaaaccacccccatgatccagtcccttcccaccaagccccaccttcaccacgtggggattacacttacacatgagatttgggtggggacatagagccaaaccataacagacactcaagtgtcacaggaatttacttaaggggaaagttaattctgatggggatatctgacactaagacattttaattcatgtaaaatccaatacaagcaccatgtgtacttagttgtgcatgttatttacatgtaactactcttatgagattagcataacatttatggtccagtatctctatcatagtcatctaacatttctatcattatcacatcagataacaaggaaaagcatctaggctgccgattaaacaccaccaccaccaccaccaaaaactcaaaaaatcaatttaaacacacacacatacactcacatgatacctcacaaggacaaaaaaaaaatccttataagaataacaacctaggctgggtgtggtggctcacaccagaaatcccagcactttgggaggctg

SEQ ID NO: 216231 - DNA, 479 bp, Homo sapiens
tgttttatttggatgggggtgggggccatcagcaccctcaccagagcagttgctgctgtgaaagaagcccctgtacaaaccagagcttacctcagaataattttctcattatagtggcaccctgtcctaaatttctgtatatctaattttgtgccccttcctgcccgttctctaatacttgcttgtctctcagtctgggtcttgacacactactactacattcccgatattcttattgttcctaaccttctctgcctgcatttttctggcgggagttcctgactctcaagacaagtgaagcctacatgtttcacacygtcgctggggtaacttactgtgcaggaaggcaggaatgcattggatatcagcactgacacaggacagcagaaccaaaacagggagaagtgagtgcaggtactgaagtagaaagggatggagagtaagtgagccaccaacgcccttagaagaagaaaagcatg

SEQ ID NO: 216232 - DNA, 598 bp, Homo sapiens
atgttgttaggactctcgttggatccagaggaagaatgagccttctgttgccagattggcggctggaaaatacgaggttggggtagctttcttctcttgggtgtgggaatgcaagacactacctctttgttattggtctagtcttaaagtcccaaaccagttcttctttctcttaccacttttcagagttcttcttcagttgtctcttgctctgtttccagggtttatagctgtgcttagcaggaataaggagataaaacaaggcctatgtcatcttgtccaactagagtgacattttttttttgatgatttatcttcattgactttactctctcctactggaatgcttattaaatgggttttggattttgttttcttacttcacttttgaaaacgtttactcttatgttttccatctctgtctttttgctacagaagattttcttatcttctctgtcactactttagtttttatatatgtttattccattyttttgcccagctatttatcacttcaattttcagatttcaaatttttaatcatgttccccccaccaccccatgattgctccttcttctctaatgaagccaagaattc

SEQ ID NO: 216233 - DNA, 606 bp, Homo sapiens
ttctaatgccataaaaataatgatagtgacacctaacacttgttcagctatgtggcaggcattagctacttttcattatctcagtttgcacaacaatcctaccaaataagtttattatttwttactataaatcaaggctcagagatgttggaactgcctgaagttataagcgagtaaatatttgtcttactactagtactccctctacttaaaagagagagactgttttttccaaggggctaggtgaccccagcatagtctccctggaagatgccagtttttcccagctctaagtcacctgcctagtacataaccattggaacatctgtaaaaagcttccctctgcagtaatttttctttgatttacgggttgtgttaaaattgttgttctataatggtcatgtctagagactgttgcacttaaagggaaaattgctctaaataaaaacgaatgatactaaaatcccttctctcccaatgaaatgattctcctgtattttgttctccttgtgtgctcaccaaaaaagcttctctggtctattatttcccaattacctcttctgatgttagctgagagcagagaaggaggatgggatcacgaggctc

SEQ ID NO: 216234 - DNA, 606 bp, Homo sapiens
ttctaatgccataaaaataatgatagtgacacctaacacttgttcagctatgtggcaggcattagctacttttcattatctcagtttgcacaacaatcctaccaaataagtttattattttttactataaatcaaggctcagagatgttggaactgcctgaagttataagcgagtaaatatttgtcttactactagtactccctctacttaaaasagagagactgttttttccaaggggctaggtgaccccagcatagtctccctggaagatgccagtttttcccagctctaagtcacctgcctagtacataaccattggaacatctgtaaaaagcttccctctgcagtaatttttctttgatttacgggttgtgttaaaattgttgttctataatggtcatgtctagagactgttgcacttaaagggaaaattgctctaaataaaaacgaatgatactaaaatcccttctctcccaatgaaatgattctcctgtattttgttctccttgtgtgctcaccaaaaaagcttctctggtctattatttcccaattacctcttctgatgttagctgagagcagagaaggaggatgggatcacgaggctc

SEQ ID NO: 216235 - DNA, 550 bp, Homo sapiens
ctttcacagtggagtatcacttttayagttcttggaagtctgcactataattccagattagatgaagttaattcttctgagtcatataccttgcttctaattgttcttttaaagggaatatgtttaatctggacctttattattatttagaagtatcttagtctctttctttggttaatactacagtaagaatccagtgaaggttctgtttttgcaaggaaggtccttcagcttccaaaaggaggggtaagggaaagcatttaacatcactgaagaacaagaatagtgtgagccatttttcattgcctctttctataatttttaagtggctgaatttcaaaattctaatgcagtaaaggcagtcatttggtgctaacacgggcgagcaggtgtcattatagtcagtggaggtggttcatattaaggagtaactttcttgtatagaaggggcagtctctgaatattcagttacttaatcaagtacccgaacctaaatatattgagttgaaactcttttagcttgttccttaaattaaatgtaaataagctt

SEQ ID NO: 216236 - DNA, 416 bp, Homo sapiens
gctgtggtactctataggaaaagttaaggaaataagagaaagtataaatttgcttaggtgtagcatctctwttagttttctaatgcattgcctggaggcttgttaagaatagaatgtcaggcctttaaacaaatcccagtctctttaaacaaaatctgcagcttaacaagagcctcaggtgattcgtatgcacattaaagtctgaggagtactggtctttagggaccacagctgccaacctgacagccccaattagctccaggccgccactctccaaacatttaggctttacaaagaatgtgtgaaagcagctcaaaatctaaatatgaaatgacaatttctcaaattccagactaaaaagagagaggacttcaaactaaaacataggttcttattcctggctctccttagaattc

SEQ ID NO: 216237 - DNA, 423 bp, Homo sapiens
tccactgtcttggagctgaggaacaatttgatttgatttggtaagtcatatccccgtagctttaacacagtgacttcctattcctcattctgaataggaaagagtttggggtgcagggtagttttacagctaagtggaaaccagaaagaagaaaacagacagtatagagttttctcagagtagaaaggagtcacgagaaaaagtaagggaagaggtatggatattacctcactccaacaaccaatacatactaccacatctctaacaaaaataaacctcaagcytgagggattccttttctctaattcctcattttcagcagaataaggaaagtagatacttcaggcataatatgcctaagtgtatcaacattagctggcctcagaatctggaaagaagctcagtaaatcagttttgatttac

SEQ ID NO: 216238 - DNA, 500 bp, Homo sapiens
ttttaaatgttaatagatgttgccaaaattaagccaattttccagtttgcagttaatgggagaggatgttgttttcttaaggctttccttgtagaaagaaagtgctgagtaatgcggccacagaactagttctgctagcttaagtttcaaagtctacctacccatttgcaactaggatccaagccaggctttacatgttcagctttctctgagcttttgataacgaagctgtttacattagtaatccagctaaactgtggagtggcatagtcccatttacattgagaatcatttttgttttagcttgtgggagtgtaaattactattaaaggarttccatttcaaatccaaagaacattctattgagaagaaaactaataagagagagggaaccacgaaggccaagtctgagctgctgacagcaatgcagatagaaagaaacaaggcaaggcagagaaacaagttcagggaattgaataagaaacggtgtcacagtcaca

SEQ ID NO: 216239 - DNA, 540 bp, Homo sapiens
ctttttcagtttccgtctgatacactctaggattagcagggaatttcatggaatgcagttgacagggagatcaataactgtagaagccagaagttctaggaagataggaaaaaacttaattttgcaggcagtaggaggggagacgtcctgaatactgggtatggtgcttgattctgtgcatatcatctcatttttccatccacaatagccagaagtaggtactattacctttacattttgatgaaatcgtggctcaacttaatgacttgccatgggtcctagtacctacttttttctatagtttatactatgtccataaacataaaggayaagttaggcatagaggagtgagaaagccgagtaggaagtttgaacttgaaggagagggaatgacttgtgtattcttggagaaaaagtgaagttccaagaataggactaggtatattccagtcatcttggctttggagagaaagatgctcagataagctctttgcattaactcaagtcaatttggtttgtccagcagagctgtatatgaat

SEQ ID NO: 216240 - DNA, 606 bp, Homo sapiens
actgtgtccagatggaatagagaacattctcacactgagcaattataccagcaggccattgattgggaagttgatgtttgtctttttccacatgaacaagggcagtcccattgctggaagctagtgctctatcatttttaaataaacagaatgtttgtcattagcattttctaaagtattggagatatctgatctggatttgcttttatttcttcttgatcaaatgaaatctgcaaagcctccatatactcttgtgcaatcttaacacttacttaaatcatagaagctcatagaatcaaaagtatacttttcataagaatttttaaaccccaaaattccaaacaggcagaaataaatattacctagagttcttgcagatttttcaatgaatgccttcctaatcaaaagattataatttaaatattgattaatttatctagaattttagaagatttagagtaatatcaacccagctatgggaaatacaaaaataaatcattaaacaaacattttatgacycttgctatatctcaggaattatactgaagtttgacaaataaacgtctgaccacaaacaatcatagacccctgccctcaaggcttcac

SEQ ID NO: 216241 - DNA, 606 bp, Homo sapiens
actgtgtccagatggaatagagaacattctcacactgagcaattataccagcaggccattgattgggaagttgatgtttgtctttttccacatgaacaagggcagtcccattgctggaagctagtgctctatcatttttaaataaacagaatgtttgtcattagcattttctaaagtattggagatatctgatctggatttgcttttatttcttcttgatcaaatgaaatctgcaaagcctccatatactcttgtgcaatcttaacacttacttaaatcatagaagctcatagaatcaaaagtatacttttcataagaatttttaaaccccaaaattccaaacaggcagaaataaatattacctagagttcttgcagatttttcaatgaatgccttcctaatcaaaagattataatttaaatattgattaatttatctagaattttagaagatttagagtaatatcaacccagctatgggaaatacaaaaataaatcattaaacaaacattttatgactcttgctatatctcaggaattatactgaartttgacaaataaacgtctgaccacaaacaatcatagacccctgccctcaaggcttcac

SEQ ID NO: 216242 - DNA, 513 bp, Homo sapiens
aattatactgaagtttgacaaataaacgtctgaccacaaacaatcatagacccctgccctcarggcttcacagttgggatataccctaagcaatatctatttcagttaagaacacattgggctgcaagtaacagaaaatcctctgtaaacagtagagtaggcaacttgggaattacttttttcacataacaagaagtcagaatgcaacctttggtttgcctactctatgatgccatcagggacctgtgttttttccttcttttcagctcctctatccttagtatgttggcctctgtttccatgattgtctcctcatggtgcaattgaagacagtggctgtcccaaccaagtttttcctctttaccagtaaagcaaagggtttctcagaaatcccactcagactttccttagatcttattaactggagagtcaaagggccacttttatctaaaagactaaatgagaactaatgggacaagatcatcatggctggcttttaagtacaagaatgac

SEQ ID NO: 216243 - DNA, 385 bp, Homo sapiens
tgtagatgtgaaagtgtggttttcataatgctccaaatattttctttttctggataacttattttaaggagcccttcagtaaacagttctgatttgacagcaataaccaaccacaaacacaattagtcagtatattagataagccygagattggttgaagaataatgcaaacctcaaaataacaatgatgtaaatgacatagaaatttatttctctggaatatgaaataatgtaaagataagcagtccaaagctgacatggggtcttcatctatcacaaggaacctaagctgccgtctttctcttctgccgtcctcagcatatggctttcatgccatggacctgtgtggcacatgaggctccagacaatgaagagaaaaagggaa

SEQ ID NO: 216244 - DNA, 425 bp, Homo sapiens
gaattcctagtcatcctttagaactcatttcaaatttacattctgaccatctcttctgaactctcttcacttccagatagcatcatcccttcctcatcgcctatgaagtccttgagcctagcactgtctaattcatctttacatcaccagtgcccagcatgaaatgatctgaagatgtatgtttgttgaagtgaatcatcagattaatgcaaaatcttccagaataagccatttcctttgctggtgccttttgatttgagatagttaaatgcagaagctacaraacatagttgtttaccatagaagtcacagtggattggttgccagaaggaaatagggcatgggtatttttggctatatgttacctagagcacaggctttggagtgaaattgatctgagttaaaacacagattctgtgacttaa

SEQ ID NO: 216245 - DNA, 537 bp, Homo sapiens
catgtttatggatcaaagaattaatatcattaaaatgaccatacttcccaaagcaatttccacattcaatgcaatttctaccaaattaccaatgtcatatttcatagaattagaataatcctaaaattagtatggaatgagaacagagcccaaatagccaaagcaattctgaacataaagaacaaatctggtcctgacttaatcactatgcaatctatgcatgtaacaaaattgaacatggattttatcaatttgtacaaataaaaaaatgtaaaaaaagaacaaagctggagrctatagtagccaaaacagcatggtatttttagacaaatggtatggaatagaaagctcagaaataaagccatatatatatatatatagtgtgtgtgtgtgtatacacacatacatgtatatataatgtgtatatataatgttttctacatgttctaatatttatattccattccattatacatattccatttctgtatataggttatatagaattggaagactatctgccattaaaaagaatga

SEQ ID NO: 216246 - DNA, 617 bp, Homo sapiens
tcgacatcgttagtcatcagagaaatacaaaataaaatggtaatgaratactactagataggcttttacagagactgacaataccaagtattgacaaggatatggagcaactgaaattctcattccttgtggtaagaatgtacaattatataaccacattgaaaaaacaagttttcagtttctttattcacccaaaatatatgtcttttggaaaaaattttttccagtctgtgggttgtcttctcattctcttgatatatgtcttttcaaagaggctgagctttactttagacagtggtcatcaaagtgtgtatatttgtgtttttataatttatatgcatatattcctgtgaaaagatactgtatgcattgttcaacatgtacaaatataagaaagatatagtaaagaaatatatatttctaaatttataaatgtatttattggtgttccacgttgcaaactaaataatctacgttggctaatttaaggaattaaactatagtagaaggttctcatttattgggatgattagaaccagcctttttgcaggctattagcgaatcatagcactagggcttcactgctacctccactgacacctctgacacttgaaact

SEQ ID NO: 216247 - DNA, 577 bp, Homo sapiens
tgtccttgctgaagcttttttaactatagacaattgcagcagattttaaattgatcttactctgtcgactcccttatgtttcaacattttcacccattggaaggtataaaagaagatattcctgtccgtgtcaacataatctcatgtacctctccagatcttagaaacacgtatggcttcaaatcaggcattttgagatctttatgctgtatggtttcagagtggaaaaaatgattgattcaaaaacataatatttaaagagtttttattgtatttacagttcacctgaacctctgttcattgggcaagaaaatgagtactcttaaaatgcaataataaattaaagttactttattattaaattttaaatatatatatatatacttaccttaaatatgtcctcttgttgtcttttagcatcacccatttttgatttgaccattatcttttctgaataatcagtaagatacagrattattattaatgttcaaaagttgcagtattcatgttttctttattctttctaccaattaaaatgtgttaatatataaaatttttagaaattttactataaaaa

SEQ ID NO: 216248 - DNA, 500 bp, Homo sapiens
tatagtgactgaccttatatccccaaggacatatccacctgggagttacacagggttatgaattgaattatgtctccaccccctaatttatatgaatttttaacctgcaatgtgactgtatttggaaacaggacttttacagaggtaattcaggttaaattaatacataagggtggaatcctaatctaatagcactggtgcccttataagaagagagagggacaccaaagacctctctctatatagacagacaggcaggcaggcaggcaggcaggcaggcaggcaggcagrcagacagacagacagacagacagtacagtacacagatagatagatgtctccaggagcacagaggaaaggccatgtgagaatacagcatgaaacccactctctggaagtcaggaagagttctcatcaaaaaacaaatttgctgacaccttgatcataaacttctagcctccagaactgtgaaaaactaaatgtctattgtttaagccact

SEQ ID NO: 216249 - DNA, 571 bp, Homo sapiens
atatgattattatacatactaatactttaatccagcacatatatagtgactgaccttatatccccaaggacatatccacctgggagttacacagggttatgaattgaattatgtctccaccccctaatttatatgaatttttaacctgcaatgtgactgtatttggaaacaggacttttacagaggtaattcaggttaaattaatacataagggtggaatcctaatctaatagcactggtgcccttataagaagagagagggacaccaaagacctctctctatatagacagacaggcaggcaggcaggcaggcaggcaggcaggcaggcagacagacagacagacagacagacagtacagtacacagatagatagatgtctccaggagcacagaggaaaggccatgtgagaatacagcatgaaacccactctctggaagtcaggaagagttctcatcaaaaaacaaatttgctgacaccttgatcayaaacttctagcctccagaactgtgaaaaactaaatgtctattgtttaagccactcagtctgtggtatttagttatgacagccaa

SEQ ID NO: 216250 - DNA, 637 bp, Homo sapiens
ttaggtgctcatctaatttattttagtcactttctaagcactctacctgtctttatctcatccctcttcaatgttcttacattgctatgagagttccttttaaaatacaatgattatagcatgtgcttttgccttgaaatgaaataaaactaattaaacttagtaaaatagctccttatcacctataggtccaaacaccctagtatggcccccrggtcctttgtctctcgtctccttgtccacattcccagtgcacttcagaatcccattactggttcctcacaccaaactcttctatgcctttatgctctcactccccacattccttctgatttctcccaggctggatgtcaaaaagttgtatgctttctttaagaccctgcttaaatgctactgtgttttgaagtctttcctttatactcccaggtaggagtaactgtttctctttggtgcttctaaggcacattgtatagacatctattaagaggggcctttgtttacattactctctcttaccattaaactgaggaactttcacccatactgttttgttttatttttacccaaggtgctactatgatgacaggcacttaggaagtaatcatatatttgtttataaaatatttgtgattgttag

SEQ ID NO: 216251 - DNA, 580 bp, Homo sapiens
aaaatccttgattatatttaaaatatcctataaataagtaattttaccaagtccctataatcaatttaagtacatgcatgttaaaaatatgtgtatattacatacattaacagatattaattcagatgaaatgaaacattctgaatgaaatttaaacacagcacttcttacaactgaggaaaaatcaagtattaactaaattatttgatggctgattatgatgcatgaaatctaaaatgacattataaagcaaacacaaagaaaatgaatgagttcaaaatgacttgtaattaataggtgacttgagagtaattcaaattcctggatatgtaaaaatgattatttccttaagaacaaaaatgtycagatatatacaaaattttacccccatagttataacaatattattaaaatgtttaaaatataactgacattaaaattgtttaatagtcatttatatacatatctatttatataaattcccagatactgcattagtctaaaagagaattttaataaacttttttttaaaagtagatgttaatgcatatcttcattacctgtaccttttgactgtcat

SEQ ID NO: 216252 - DNA, 492 bp, Homo sapiens
taatactggtattcagcaggagctttatagaagagctagcatttgaattgagtcttagtcttttaggatagggaggtttgactatacagagatgggggtaatgtcatttcagatgggagaacaccacagactaaggtaaaacaacaggaaatggaagcacgtatctgtagaacagtaattagttcagttcacaaagtactgagtacttaaaagagaggctggaaagaggctggaaaggtaggttggggttaaactatagagaggtttgaatgccaaataaagaacttgaaaagccagctaagggggaagtactaaaggtttctgaacaagggacttgcatgttcagagctcagatctaagaaaaatcatctgaaagatttatgtacratgggctggccataaatggaaaatcgttgtgggaacacctcctaagagactcttacaatatagatgagggctcaaaccagaataatgacagtggaagttgagagt

SEQ ID NO: 216253 - DNA, 593 bp, Homo sapiens
aggaatatgtttacataccggaattgtatttattaataaagrgtgagtaagaacaagaaataagagctttttcttactgggaggtatcatattctggaagtcagacacaccaagccatgttcctttttttcctggaaggacttctataaaagggatgttcaactcttgtcctgaatcctcctttcacctatgcagtggtattttttgtcaaccacttttagatagattttgtatcttcctagatacatattattggtaaaactttgggtaagttaatttctctaaaatggaaataatgataatattcatcttatagaattgcatgaagattaattaagatgattcaagtaaagtgcttaataatcactatattaatgataatgatcatattacaggttccagacccaaccctattttttttttatttggtctggggactttaaggagttctagctttcttaatttgccttattctgatttggagattcacttctgatgttggggttcaaaactttgatactttacattctactctaatttctaaaacaggcttcattctcctaaactgctgttaacatgaaaaattttaaatt

SEQ ID NO: 216254 - DNA, 404 bp, Homo sapiens
atatagtttctgatttggagcatgatctgtaamtactatcctatttacatgataaacaggcatgctggcttactgacaagagcaatacatggagctaaattgccttttcatgttttattcagtaattatagatactataatttcactgatatgaagtcattctacaggcagttggctcatttctttagacttttttcatacttactgatcaataatttgatattatgacattaaaagaaaactaaaacatgatctaaagtgcttatactgagtgtgccaaacttccactttaaaagttgttggatgtcttttattatcaaaagccctattataattttttaagattcttaagtagaagtcatttctaccttactgcaaagcaacagatatatggaagatctgca

SEQ ID NO: 216255 - DNA, 578 bp, Homo sapiens
tgtgcagttaggaatgcacagtgaagagttactgacaaaattcattacttctggctataaattcaaatgatccagaaactaacaagactagtgactccacacagtaggttttgtttctcataatactttcttgattacaaggtgcagatacttagatcatcatcaagtgggatactatgtagtgaaactcagatygaggtgaaaaccaggccaacagaagtggagtaactgcaaggatgacattggacagtgatcacagatgtgagccctgggatcagatagccatactggaatcctggcttcaccacttattaactctgtgacaatgagcatgtttatttttttctctatgccttagtttcttcaaagtttttcatagtttaaattcctagggaatgattcttattgcctaactcaccttttcatgccaaacagtgtcattggcctcagtccaatgagctgccattgaatcaggtacacattcctcctcaaatttgctgtgactatgctgtagggggtggtcacacaatgtgcatgagctctttcccacctttagagccatgagaacaattttactg

SEQ ID NO: 216256 - DNA, 425 bp, Homo sapiens
cccccccccacacacatacattttcatttcaaatgtaagaagccagagctctgaccccattgctttccatagctggcgaaaagtatgacttttgaaatcgatacattgcaatctccatgttaccatcctagtgcagtactccacagcaccggcgccaggaagaaacatcagtgtttcattctccagattaatgmtctcctttcagagaaatgactttcagctattttagactatatgcccttcatttgagaagcagtttgtattcattcacttacagtcaatattcactaatatcatggattgatggagttaaaaagcttttcattagttctgttagcaaggctaatttttatagcatttgatcattttacttctagttgcccctctttttttcagaactttgtgtcccccaatcattcttttga

SEQ ID NO: 216257 - DNA, 469 bp, Homo sapiens
tgtcagaaatacctagcaaggactaggagtgagaaggaacaggagtgtgtgttttagtgaaaagagatcacataggatgaaaggaaccattaatctattcctaaggagttaaaaataaaaggatgcagagtaggaaaatcattgtttgattctcctttgatagaatyaccagttgatatcattaagacagtctagtttatttgttgcctgaattgacctatgcagatgccaaaggagaccttttgtcttcaggatgggtagggataaagtgagaagagtttaatttctgaccccatgtacaggacattggaggctcagatgctcattactcggggaatactgatgaggatgaaacaagaagtgcatcatctactgagggtctggaagtttactatcgttaatatctacaatgtggagggtggggaaaggatgcaaaggaggaagagacacttgttttgaaggtgaccaa

SEQ ID NO: 216258 - DNA, 469 bp, Homo sapiens
tgtcagaaatacctagcaaggactaggagtgagaaggaacaggagtgtgtgttttagtgaaaagagatcacataggatgaaaggaaccattaatctattcctaaggagttaaaaataaaaggatgcagagtaggaaaatcattgtttgattctcctttgatagaattaccagttgatatcattaagacagtctagtttatttgttgcctgaattgacctatgcagatgccaaaggagaccttttgtcttcaggatgggtagggataaagtgagaagagtttaatttctgaccccatgtacaggacattggaggctcagatgctcattactcggggaatacygatgaggatgaaacaagaagtgcatcatctactgagggtctggaagtttactatcgttaatatctacaatgtggagggtggggaaaggatgcaaaggaggaagagacacttgttttgaaggtgaccaa

SEQ ID NO: 216259 - DNA, 469 bp, Homo sapiens
tgtcagaaatacctagcaaggactaggagtgagaaggaacaggagtgtgtgttttagtgaaaagagatcacataggatgaaaggaaccattaatctattcctaaggagttaaaaataaaaggatgcagagtaggaaaatcattgtttgattctcctttgatagaattaccagttgatatcattaagacagtctagtttatttgttgcctgaattgacctatgcagatgccaaaggagaccttttgtcttcaggatgggtagggataaagtgagaagagtttaatttctgaccccatgtacaggacattggaggctcagatgctcattactcggggaatactgatgaggatgaaacaagaagtgcatcatctactgagggtctggaagtttactatcgttaatayctacaatgtggagggtggggaaaggatgcaaaggaggaagagacacttgttttgaaggtgaccaa

SEQ ID NO: 216260 - DNA, 656 bp, Homo sapiens
  misc_feature (1)...(656): n = A,T,C or G
atgggtgaaccattcagaagagttgcttgcacatagcagtcattcaaaataatgttaatccttttctcttccaagccctctccccttaccatgtttgttagtcatgtgtatcttggctaaatttcccaaactttctttgyacctcaatttgtttattggtaaaatgataatattatatgccattttatgtgatgtcagggtcaaatggcagtggaaaaatatatatacttttctatgtatatagtgtgtacatgaaaatgctctgaaaagtataaataatgcaaatatttgagtcattatcagatgagttttaaagtaattaattcanaatctataattcttgaaagtttatattattttataaagcttgctattcttggaaattaattttaaaacgggtcaactgttttcttcaaatcacatttattaggntcattagtttgcactttataggtaactccatctaantacaacatctttggcgcacttacgtatcttttctgctatattaggcttcatgaccacatagttaatatttatatattgatagatatgtctttctttagttccttccacttagtgaatatgcatactccaatcagatggcctgaaaaagtatgcaacatatgcctgcatcagcacaatctgttttaact

SEQ ID NO: 216261 - DNA, 575 bp, Homo sapiens
aattggagtaaggaggttctcattacttcctacagactgtatgccggagtttcactcaagtgaacaatgaacctgcttatattttttatggcatgtgaaccccttgacctacttgttagagagctgggatcaagaaggacttctgaaagcccaaggggaatacagaaatgttagacaggcttcctttttagttctatcagtcatgctmcatgtgaccggtctcctactctttaagttaactgtttcttgatttgttatcctggcattcacaaccttgaaccagtcctggaagtctaatgtaacttggaatttgtgcttattggaaaatttcttattcaaaaaaaaaaaattcccttcatgtcccatgtttagtttcttttgctatatcttccacctgtaatgatcttctcccgccccaactgtcatctgttaaaaatctatcttattttcatggccccagtaccagtcagttcttttaaaatcctaaccagatttccacaagtgatttgatagttcatatagcagtgtttgtagctctcttgcaacactgttcttctgccttgtttagatatact

SEQ ID NO: 216262 - DNA, 575 bp, Homo sapiens
aattggagtaaggaggttctcattacttcctacagactgtatgccggagtttcactcaagtgaacaatgaacctgcttatattttttatggcatgtgaaccccttgacctacttgttagagagctgggatcaagaaggacttctgaaagcccaaggggaatacagaaatgttagacaggcttcctttttagttctatcagtcatgctccatgtgaccggtctcctactctttaagttaactgtttcttgatttgttatcctggcattcacaaccttgaaccagtcctggaagtctaatgtaacttggaatttgtgcttattggaaaatttcttattcwaaaaaaaaaaattcccttcatgtcccatgtttagtttcttttgctatatcttccacctgtaatgatcttctcccgccccaactgtcatctgttaaaaatctatcttattttcatggccccagtaccagtcagttcttttaaaatcctaaccagatttccacaagtgatttgatagttcatatagcagtgtttgtagctctcttgcaacactgttcttctgccttgtttagatatact

SEQ ID NO: 216263 - DNA, 576 bp, Homo sapiens
atctacaatattatagaaaaccattaagaagttttaagtatactagagagatcttatgatgtatattttaaaatagttaccctggaaccctagtagctgcatggataatgaattttagggacctggggaacaggcaagagatagtggtgacccagactagtacagtagtagccatgaagagatatgaagagaayaggatggtttttgaacaatcagtaaaattttctgatgtgggaaaggggtgaagaagtgagaaaatttgaagatgtctacttttttcccccttaaacagctgggtgttggtgactttattgagagggagaaaacaagaagctggtgtgtagttagctgaatcaggagttgtgttttggtcaaattaagtttgaggaattattagatgataaccaagtcaatatgtcaaataagaagtagaatatatgcttttcaaggtcaggagagaggtcaatataacattgagtggtgtattagatggcattaaaagccatgagtccagagattagttaaggaaagagggcaggaagagaagattcagtgtccctggaatgaatcctaggg

SEQ ID NO: 216264 - DNA, 536 bp, Homo sapiens
catcatactcaatgggaaagactgaatgcttttcctctaagattaggaacaaggcaaagatgcccactcttgctactataattgaacatagtgctgaaagtttcagacagagaaataacaagagaaaaaactaaaaagcatacaaatcagaatagaagaaggaaaagcgcctctgttcacagacggcatgatcttatatgtaccaaacactaagaattcgacacaaaagtcattagaattaataaaggagttcagcagtttcagaatacaagatcagcactcaaaaatcagytgcatttctataattaacgatgactgatctgaaagcaaattaaggaaacattcccatatactatagcattgaaaagataaatacttagaaataaacttaacgaagaaggtgaaagacttgtataatggaaactataaaactttactaaaaaaaattgaagaatatacaaataaatggaaagatatcctgagcttgtgaattggaagacttaatattgttaaaatgtccatactagccaaagtga

SEQ ID NO: 216265 - DNA, 536 bp, Homo sapiens
catcatactcaatgggaaagactgaatgcttttcctctaagattaggaacaaggcaaagatgcccactcttgctactataattgaacatagtgctgaaagtttcagacagagaaataacaagagaaaaaactaaaaagcatacaaatcagaatagaagaaggaaaagcgcctctgttcacagacggcatgatcttatatgtaccaaacactaagaattcgacacaaaagtcattagaattaataaaggagttcagcagtttcagaatacaagatcagcactcaaaaatcagttgcatttctataattaacgatgactgatctgaaagcaaattaaggaaacattcccatatactatagcattgaaaagataaatacttagaaataaacttaacgaagaaggtgaaagacttgtataatggaaactataaaactttactaaaaaaaattgaagaatatacaaataaatggaaagatatcctgwgcttgtgaattggaagacttaatattgttaaaatgtccatactagccaaagtga

SEQ ID NO: 216266 - DNA, 481 bp, Homo sapiens
ttatattttataataattactcctttacatatctatcttactccttagaatgccctcctttcccaaaacctttttacctcaagcctaaattcatgacaaattccctcagaaatgtgaaatgtatttgcttcacaactaagatgaaatgtgctaaaaaaggtttttgaagttcatgtaaaataattgagaaatgtttttatccaaaggtggtcttttaattagtcatatagtaattaagattgcatatgatggcatgatttctatatttttaactatgattatatgctttagaaatgagtaaattagayactatagtgtgcatctttacatatatactaatatatatctgcaaaagtttgggaccgattgtgagaaatgctgggaaaatatcaagatagtttaataagaaatagagagcaacttgaagaacagactagaattttaaactgaaaagttcaagttattcttcttaagcaacaag

SEQ ID NO: 216267 - DNA, 481 bp, Homo sapiens
ttatattttataataattactcctttacatatctatcttactccttagaatgccctcctttcccaaaacctttttacctcaagcctaaattcatgacaaattccctcagaaatgtgaaatgtatttgcttcacaactaagatgaaatgtgctaaaaaaggtttttgaagttcatgtaaaataattgagaaatgtttttatccaaaggtggtcttttaattagtcatatagtaattaagattgcatatgatggcatgatttctatatttttaactatgattatatgctttagaaatgagtaaattagacactatagtgtgcatctttacatatatactaatatatatctgcaaaagtttgggaccrattgtgagaaatgctgggaaaatatcaagatagtttaataagaaatagagagcaacttgaagaacagactagaattttaaactgaaaagttcaagttattcttcttaagcaacaag

SEQ ID NO: 216268 - DNA, 619 bp, Homo sapiens
aacattgggcaagccacttaatctcactgaacttatttctttaaaaaaaaattgaataagaaaatctatccactcacatcacaaagtttttccaagatgaaacaatatagtccatgagcatgcttggcaaaatataaagagcttagcaaaagcatggaattgtatagttatttttattagacaaggaaagtcatcaagtgtggtccytgcaaggtggaagagagaaggatactcgaccttcttttgtcactttaggtcccctctccttccactcacactcctctgtccccagctttctcaactctgtttgtggcaaagaaggctccatccagctgtgtgagaaataagagaaataagaaagacattacaaggagaaacagaagtaggaaagaaaaaaaaaaaggctgtgttctcctctaactctgataatgttcttcttaaaagcttttaggtaataagcttctgagatgtgtgagatcatggtgttttctgtcactcgattgattaagaacaaataacctttattaacagtggttttctctgggggtgggaatactaacagcttcattttttatacaatgctttcctgagttattttaattttggcaaaataaacatg

SEQ ID NO: 216269 - DNA, 565 bp, Homo sapiens
acaagactggtaaatataacgaatttcagccgtgcctttaaaaaacaacatacccyttgaatctgtaaccacttgaaggctttattcagtcctatttgcagcacagatgtcagatgttcatagttatgggacctttaatgagatgtgtcattgcttctataccacctaaagcttcccaatgatcatgttaagtagcatagactggaagtctcaggcactgaaagcaccacttccgagtaaagctgccaaatgtaggtgagaaaaccactcccagccaacattaccatctggtactggatcttcctcaactaatgcacctcactacaaaaataaagctaaactccctgaaatcaagagacataataatctgccaacatccttgtgtcattatccagatcagagcctggctttccacatattccaaaagctgagatggacaattaagaatcgccatactggagatcacctaggtaaatacacctgtgcagattcttttctggaagcaaaaagaaggaggataatgaagtctgttcctggccacaattttaaattctaccacaattaa

SEQ ID NO: 216270 - DNA, 641 bp, Homo sapiens
gcatcctatctgcatatcacagtctgttgctaaggggttactagggtgaattatatacatgattaaaagcccaaatagaatattggtaaagttcttgaagaaagtctagagactgacttatttcaccccagaaatgttgactatctggtactcaaattgactctacatggtatctgaaatattctgattttaacacttactcaaattaaatatattttatcttagggaagcactagaggtaaaaatgtattatcccacagcatttttccagaatctatyttaatattcacaagaacattgagaacaatgattgtcaatcctaggtgcatattaaagccacctgaggattcttttttaaaaagtacaaatgcctgggtcctgccaccaaagattctgattacattggttagaggtaggatccagggaccaggattttttaaagctgcccagttagagttgagaaccactgttccaacgcagtgttgctcattttaattatcacttgagaaccttgttgaaaatgtttcccaggtcccacctcgaacctcctggatcagaattttctgggaggacaggtgggaaatgcatattttaaacaagtactgtcttagtctattcaggctgcaataacaaatcagcag

SEQ ID NO: 216271 - DNA, 564 bp, Homo sapiens
gtgggtaatgaggtccctataataattagcactaattgagatccaggtaggcagcttaagtagaaaggctgacaactaaatcactcatagtrgtgacccaggggactagtctcataggtcctcatttagtcagaaagaaggaggcagaattcagtgacattagtaagttttcaggaaggattacatttgttataaacaattagcaaaatatttatttgagctaaatgctgtgaacgaaacacacacatacacatacacacacatatacacacttctctcaagaagagtctgatctttatctcattatatagagagatcaagagccagcaggattattctttgaataatatataggttctgtctagtagcctggggacaagatcacatgggtcccagttgtgtccctagagtgtctttctgtgactctcacttaacttttctacagtctcttcatcattaaaatggcctaaacctttattattttctgttctttggaagcccttccttacctctggagaactacatttgaaggtgaggctgtatcacagagggctgtgtaattta

SEQ ID NO: 216272 - DNA, 564 bp, Homo sapiens
gtgggtaatgaggtccctataataattagcactaattgagatccaggtaggcagcttaagtagaaaggctgacaactaaatcactcatagtggtgacccaggggactagtctcataggtcctcatttagtcagaaagaaggaggcagaattcartgacattagtaagttttcaggaaggattacatttgttataaacaattagcaaaatatttatttgagctaaatgctgtgaacgaaacacacacatacacatacacacacatatacacacttctctcaagaagagtctgatctttatctcattatatagagagatcaagagccagcaggattattctttgaataatatataggttctgtctagtagcctggggacaagatcacatgggtcccagttgtgtccctagagtgtctttctgtgactctcacttaacttttctacagtctcttcatcattaaaatggcctaaacctttattattttctgttctttggaagcccttccttacctctggagaactacatttgaaggtgaggctgtatcacagagggctgtgtaattta

SEQ ID NO: 216273 - DNA, 564 bp, Homo sapiens
gtgggtaatgaggtccctataataattagcactaattgagatccaggtaggcagcttaagtagaaaggctgacaactaaatcactcatagtggtgacccaggggactagtctcataggtcctcatttagtcagaaagaaggaggcagaattcagtgacattagtaagttttcaggaaggattacatttgttataaacaattagcaaaatatttatttgagctaaatgctgtgaacgaaacacacacatacacatacacacacatatacacacttctctcaagaagagtctgatctttatstcattatatagagagatcaagagccagcaggattattctttgaataatatataggttctgtctagtagcctggggacaagatcacatgggtcccagttgtgtccctagagtgtctttctgtgactctcacttaacttttctacagtctcttcatcattaaaatggcctaaacctttattattttctgttctttggaagcccttccttacctctggagaactacatttgaaggtgaggctgtatcacagagggctgtgtaattta

SEQ ID NO: 216274 - DNA, 576 bp, Homo sapiens
tcctagtttgtaggataaatagaatgggtgtgagaaagaaaatcatgaaaaaaattccttttaratggatcacagattaggaaaaattcagtgaaaaaactggaagaggcctgctttggaaataaggtgtacactgtttagaccttagctttgtcgtacagacctagggaatagaagcccatgaaagtttgcaggattttgacagtttctctccaatctttctgctgaaagtatagaataaggagtgatccagattgcacaggggtgaattttccataatccaggactaaatgtggcagatgccaaatttatgagtgttagtaatcttcaccctgttgttcttgggatttttccatgaggagagaaaagaaagaattatctggattctagttccagccttgccactacctaaaaaaaaaaaaaaagtttctttatatgccaagaagaaggaattgaaccagatgacatttaacttcctgttcagaattacatttctataaactcagctccatgatgtttcaagagcactaaattcaatccaaaacaactttctacaatagaagtgtctcttttttt

SEQ ID NO: 216275 - DNA, 384 bp, Homo sapiens
aattctgtaattaatagtaaaatgataagcaaagcaccccaaatattttgaaggtcacaaaacactcttaatttgcatygcacaaatataggtgtcagaagaactgggttgtaaaggtaatcctgactattccattaacttgcaggagccatgtgtgtatcttatttatccttatatttgtagtatttagaacagtgcctggcatgtggggattatttggcaaatatatagtgaatgaatgaaaagtattttctatgaccagagagtctgtttcatatgctaattgtaaggatagtgagatgatgtatataggtgatagatgttagattattttcacaactttgataaatccagggctaccttatgataatatcacagacctca

SEQ ID NO: 216276 - DNA, 440 bp, Homo sapiens
aactaaacttctccagatcgcaggatagctgaacaggagcatgagaaacagtgtgccacatagagtctgatgggtcattcattccctgccattcgtaatgcccacagtgcaccctagttaatactttcataatataaccagctagttagtaatagtgttcaactgctgaagtagtaaaggactcaaaatatttagcattgttcagaattcctccaaatatctcttgcttagctagatgtatttgttcatttgaaagtcattttttagaatttttttgtgtaccagaaaatgtgcattccatgctgcttaagaaaaggaattcataaattagtaggggacaggcaaagkgtaattattctggagcattaggccttgtagacactaaataaaatgtttctatttatccgaaattatcacagtcattttagagacaaaggatt

SEQ ID NO: 216277 - DNA, 418 bp, Homo sapiens
accaatagtagtaggaaaaagttacaaagaattactttttaaaaagagacattaagatccctaccaaaattccactgacacttttcacagaaatagaaaaagcaatcctaaaattcatatggaaccacaaaacactacaaatagacaaagtaatcttgagcaaaaaacaaagatggaggcatcacactacctgacttcaaaatatactacaaagctatagtatcaaaacagcatggcataaaaacagacacatagacaaatggaccagagtagagtccagaaataaatctgtgcatttacagacaactgatwtttgacaaaggtgccaagaacaggctgatatgtttaggctttgtgtccccacccaaatctcatcttgaattgtaatccccataatccccatgtgtcaagggagaga

SEQ ID NO: 216278 - DNA, 527 bp, Homo sapiens
taccctatcccctatatttacacaggtcttactttttctgaggactgtctatgccagctgtgaggcattattgcatatggtctcactgaaagatctaataagaatataatgaccagtttgttttaaaatacactaaggacagcatgacattctgtaattacctcctcctatcaaaagaaaaacaattcccagaaattaatgaatacagcaagagtgtatttcctatcttaattctatcttaattgcaaaagtggatcaattaaaaaaagactgcactgacaaagcccctttcttaagatttggtctccccattccctagtcatcaactcaatgtatataagcatgccacgaacctatttttaccwtctgagatgagatataccaacttcaccagcagtgcccctgtgaaacagccaaatccattgaacagtgtcagaaaattcatggaggttcctctgacattgcttggaacaaatctgtatgatattacagagactgagagaaaaagagaggtcagaatttagaac

SEQ ID NO: 216279 - DNA, 436 bp, Homo sapiens
cgccagtgatctgtgctgtttggccatccagtgcttaggctgtggcctcayaaagggctgagttgacttcctcttccctgacttcctacatatagaacctcaggccagtaatgtaacctcattatcactttcctcagctccaaggtggagttaataacgcttactttatagggtgcttgtgacatttaaataagacaactgatatctgctggggattggttccaagaccccaaagacaccaaaattcctgctgctcaagtgtattatgtaaaacggctttgtatttatttgcacataacctatgctcctcttcctctattctttaaatcatttctaggttacttataatccctaatacaatgcaaatagtatgtaaacagttgttatactatattgtttagggaataatgacaagaaaaaaagtctgtacatgttc

SEQ ID NO: 216280 - DNA, 436 bp, Homo sapiens
cgccagtgatctgtgctgtttggccatccagtgcttaggctgtggcctcacaaagggctgagttgacttcctcttccctgacttcctacatatagaacctcaggccagtaatgtaacctcattatcactttcctcagctccaaggtggagttaataacgcttactttatagggtgcttgtgacatttaaataagacaactgatatctgctggggattggttccaagaccccaaagacaccaaaattcctgctgctcaagtgtattatrtaaaacggctttgtatttatttgcacataacctatgctcctcttcctctattctttaaatcatttctaggttacttataatccctaatacaatgcaaatagtatgtaaacagttgttatactatattgtttagggaataatgacaagaaaaaaagtctgtacatgttc

SEQ ID NO: 216281 - DNA, 435 bp, Homo sapiens
gaattcttcaaagacttacgttggcacttcagataaagtgtagactccttcgcgtgacctaggatgtcctttgggctctcactgttccctcagcctcctcacctraagctctcactgccccacccctttgctcatcacactccaacccgcctgccattgagctactcaaatggactgctcctttctcaagacctctgcacactttcaagcctcatttctcttcagcctttattaaatgtcatctcctccagatggcctcctttggtggcccaggtcatgttagatctgcctgttaaataaatgctttcaaagaaccttggattttatttttttctcattaaattgtaagtatatagttaatgtttaatttctctttaaaatttctttctccctccccaccccaactggactgtaaattccacaagagcaggatca

SEQ ID NO: 216282 - DNA, 428 bp, Homo sapiens
  misc_feature (1)...(428): n = A,T,C or G
ttgcttttatcattttctggggtctttcttctgctcctttgttttttccactatccactccttcagcaaagataatatggtgcagaaaaaggaaacattggtggatgaattatgaggacaaagaaatcagcaggactcagctgtcatcactctmatggtctaacatttgaactccgttaactatggcggactccggtgagacacaatagactggaagtaggtcatctttaagtctctcaagctgtatgactctaagaactccatggagtaggtaaacaaggacgttatcctcttcaaatgaggacatgccaggattatatcaaatactgtttcatccaaggtttagggctatcccttggtggaacataattntatccttattttggataactgggtatttattgacattntaanaaacaagactgttt

SEQ ID NO: 216283 - DNA, 452 bp, Homo sapiens
tgaattccttcccaaagtgagttcagcttacacccaggaaagaacaaggacagcttaaagkttagaagcaagatggagtcggttaggtctgatttctttcatagtcataatttcctcagttataattttaagagaacctgggacaggttctttaatgtctctgtttcttcctctataaaatgaggacagcagccagctcaccttctgggggtgctgggctgactgagtcctgcgtggaaggtgtttagagtggggcctggcccaggaggcccctcagctctcagcggccctcactgcggagctgtgaggtggatggtaattgattttctggttctgctgatgtgagactctgcacctgcgaggcagaggctgcccagtgctgttcagggagcctgggctctgactggccattccatgattcagcaactttggattctcaccatatccacatg

SEQ ID NO: 216284 - DNA, 451 bp, Homo sapiens
gaattccttcccaaagtgagttcagcttacacccaggaaagaacaaggacagcttaaaggttagaagcaagatggagtcggttaggtctgatttctttcatagtcataatttcctcagttataattttaagagaacctgggacaggttctttaatgtctctgtttcttcctctataaaatgaggacagcagccagctcaccttctgggggtgctgggctgactgagtcctgcgtggaaggtgtttagagtggggcctggcccaggaggcccctcagctctcagcggccctcactrcggagctgtgaggtggatggtaattgattttctggttctgctgatgtgagactctgcacctgcgaggcagaggctgcccagtgctgttcagggagcctgggctctgactggccattccatgattcagcaactttggattctcaccatatccacatg

SEQ ID NO: 216285 - DNA, 456 bp, Homo sapiens
catgcagagggaaaagatttacttatccttcaactctcaaaaaaaggcctattaaargaagaggcatgccaatttccaggtataaatactatttatctcaatttgtattgtccagtgtttatcttaattttgaattatatatgctgatgtccaatttccaaccaaaaattacaagacacagaaaaaagcacaaaagagttcattgtcaagagacaaagcaaccaacaaaattagacaaatatgtcacagatgttggaactataagtcagggaatttaaaataatgatgatactatgttaagggatctaatgaaaaatatgaaaaacatacattaacaggtcaggaattttactgaagagatggcaactgtactgaattaaatgctaatataagagaaaataacatagtgacagcaatgcagatgccttccacagacttgtcagtgaacttgacaca

SEQ ID NO: 216286 - DNA, 575 bp, Homo sapiens
ccatgacaatgacaatggtgggcaagatggtgataatgaggatgatgatgataatggtaatattggggaataacaaggagatcagaataaaatgcttgaactcctccccctttgccttccagacctccatcctcaactccattcccatctatatcctttcatttccccgaggcaacagaaaaacagggcatgcactcggcacccacgtcccatccatgaactcaggcaacctgctcgcaagctagaaccaatgttgtactaaggccttacagggctgtggcaagaggcacaggctctggttaaattagacttgggtgtggatgcaggccccactatcaggagctgagcctagatcccgcctctgtagaatggggataatcatcataccttgccacaggatgaccttaaatacatatcagaagatgcataaaacacactgagtcagcatctggcacacgtgcrcacacacacacacacacacacacacaccagagaaatgatgctcacatggccttccctcccctccgcctgtaattcttccgtcatgaatgtcagtagggaaccactgcagatcc

SEQ ID NO: 216287 - DNA, 575 bp, Homo sapiens
ccatgacaatgacaatggtgggcaagatggtgataatgaggatgatgatgataatggtaatattggggaataacaaggagatcagaataaaatgcttgaactcctccccctttgccttccagacctccatcctcaactccattcccatctatatcctttcatttccccgaggcaacagaaaaacagggcatgcactcggcacccacgtcccatccatgaactcaggcaacctgctcgcaagctagaaccaatgttgtactaaggccttacagggctgtggcaagaggcacaggctctggttaaattagacttgggtgtggatgcaggccccactatcaggagctgagcctagatcccgcctctgtagaatggggataatcatcataccttgccacaggatgaccttaaatacatatcagaagatgcataaaacacactgagtcagcatctggcacacgtgcacrcacacacacacacacacacacacaccagagaaatgatgctcacatggccttccctcccctccgcctgtaattcttccgtcatgaatgtcagtagggaaccactgcagatcc

SEQ ID NO: 216288 - DNA, 579 bp, Homo sapiens
cttaatttccattgtagttttttcattgatagtgtttagcagtgmagctgagattgtgtattgatcttgtattctgcatccttgctgaactcatttattagctctaaccgattttgtgtgtgggtgtgtgtaggttgtttagcgttttctatagataagatcatatcctcagcaaatggagataattttacttcttcctttccaatccagatgccttttatctcatgtccttacctaagtgccatagctggaacttccagtacaatattgaatggaaatggtgagcacagacatccttatcttattcttcatcttatgggaaaatagttccatcttccactctgaagcatgatgttagctataggcttttcatagatgcccttcagctggttgaggaagttcccttcattcctaatttgttgaatactttttttatgaaaaagtgttggatttgtcaaatgcaactatttttttccacatctattgagatatcacatagttttagctctttgctctattaatatactgttatattgatagattttcttatgttgaatcaacatggcattccaggggaaa

SEQ ID NO: 216289 - DNA, 463 bp, Homo sapiens
ggtgccctgtgaggaaactggtttccggtgcagagcaggtacctgggcagrtgcaaagagctgagccggcaagtttgcctcaccaggaggaagctgatgcccctgaggccctgttcttggagaacccggtccctgaagtccgttgtgaacacactccaggatttcagacgtgcagcctggccccagtgacaggctctggaaatactgcaaataacccctgagagcatagaggcctccctctgtggagcaaagcagagtgtgagactcagccagcacccgttcttgacaagtacagacattaagccttcacttaacgagggactctaatgagttcgagtcctgcagagtctctaggcttgaccctctctggagattgagtacgggacctccagagcatcagggcaaagaagacaggcatggaaaaggaccacatgctcgcagactacagctgcaggtctcacca

SEQ ID NO: 216290 - DNA, 563 bp, Homo sapiens
tgaaatcacaactttagcatgccacattcactattgcaggtaactatagctttcaaaaactacttaatcttgacagattttttaacccttcccatctatcatagctactaagcaaaaatgagtaaggatgcagagaatgaataaaaaactagaattactaactcactgcagtatatcatttatgcttcttggagattaagtagaaggaaaaggtcccaagaaagataatgtagaaaaattgagtccagattgtggaacagcagagttttgaagatatttctttggttatgagatctgacaagacaggaaatttaaaagatataaagtatgcagcttccaaatgttttttgaaataactgaattaaaatgtagtgctttcattcaacagaatattttatattgactatttmatttacaatacagtttcaaagaaataacaatcaaataagtgacacactatatatttccatccaaagttctcctttgatgagcatttattgaccacctattccattaagcatgcctttagataaagcaagcctaagcagaaccaaagtttttgt

SEQ ID NO: 216291 - DNA, 425 bp, Homo sapiens
attctgcatttaaaaagttctctgaattgggtaaaaataagtgagcaataaaatgggaaatgtgtcatcactggtcccagattttgaactagcaataattgcatgatgctgagtagaaatgattccctttatgtggacaagctcaacggagtccccattactctcwcttgtctagcatccatccattgtgtgcatatgtgtaagtatttggtacttaaaaaaatttaattttttgacactttgccatatttccacccacttttcaaaacattcctttttcaaaaatagtaagggactcagaaaaaggacaacatcttgattcttctgtttgtattcttctcctagatcacatgtttaggctataggaagaaacactaaactctgtatatttcagattcaatgaaggttattaagttatggacctt

SEQ ID NO: 216292 - DNA, 425 bp, Homo sapiens
attctgcatttaaaaagttctctgaattgggtaaaaataagtgagcaataaaatgggaaatgtgtcatcactggtcccagattttgaactagcaataattgcatgatgctgagtagaaatgattccctttatgtggacaagctcaacggagtccccattactctcacttgtctagcatccatccattgtgtgcatatgtgtaagtatttggtacttaaaaaaatttaattttktgacactttgccatatttccacccacttttcaaaacattcctttttcaaaaatagtaagggactcagaaaaaggacaacatcttgattcttctgtttgtattcttctcctagatcacatgtttaggctataggaagaaacactaaactctgtatatttcagattcaatgaaggttattaagttatggacctt

SEQ ID NO: 216293 - DNA, 588 bp, Homo sapiens
tcctacttaaaaagcatttcttagactcctttgctgataaaggtatccatatartggtatttccagacaataatatataagtgactttattgggaggggtttctgggaaagcaccttatataggaaatggactcatgtaataccagatatatcctttttgcccatggcacatttccttttttcttgccagaaatacagatctatggggtgaagcactccagcaaccatctcaagcagactgtcgggggaaaaacaagaaaatcagcctgacatccctgagacactggactgcttacttcggaatttttggctttgaagaagaaacacaacacctatcttgcttaaaccactgttcctagcattatctgttctcattcaactgaataactttcatgttctgtagcaagtccaaggtcccatggctataaactaatgtactttttctgattccacattctataaagaatgctaagagcagatatcttcaacattaattcagctagccagagtaatatgtaagggctaacttccaggactagaatgatctcataggcccatctgtatcctgagccacaaaaatagcttgtt

SEQ ID NO: 216294 - DNA, 588 bp, Homo sapiens
tcctacttaaaaagcatttcttagactcctttgctgataaaggtatccatataatggtatttccagacaataatatataagtgactttattgggaggggtttctgggaaagcaccttatataggaaatggactcatgtaataccagatatatcctttttgcccatggcacatttccttttttcttgccagaaatacagatctatggggtgaagcactccagcaaccatctcaagcagactgtcgggggaaaaacaagaaaatcagcctgacatccctgagacactggactgcttacttcggaatttttggctttgaagragaaacacaacacctatcttgcttaaaccactgttcctagcattatctgttctcattcaactgaataactttcatgttctgtagcaagtccaaggtcccatggctataaactaatgtactttttctgattccacattctataaagaatgctaagagcagatatcttcaacattaattcagctagccagagtaatatgtaagggctaacttccaggactagaatgatctcataggcccatctgtatcctgagccacaaaaatagcttgtt

SEQ ID NO: 216295 - DNA, 452 bp, Homo sapiens
agatctcagtaggatgttaatttaggatggttataataaataacaatgtaatttctacaagaagagcaaacactctgtctgtgtggaataaccaggtcctgattctgtgcttactgcttccaagmatttgacacgttaatgagatgagtgggtgaagtacagagaaacattgttcagacctcatttcaactttcctctgtctatatcaatcacttcactttttttctttttaaaaatcttactttttcagattttgcttattttgtgcagaggatgaggcttaaggtgaatttaatcttgtcttagtagattctttaagcacagaatacaaattaatgatatgaaatgtatatacatattttagaagcatttctaggtaatatgaagtaaaatggaaataacttcatatgcctaaaacatatttaatgttcaaatatttttcttacaaattg

SEQ ID NO: 216296 - DNA, 546 bp, Homo sapiens
agagttctcctgttagtattagaaacttaccactgtcctataaagatgttatgccccaaaaatgaagtggagggccataccctgagggagggaagggatctccagagttggaagagtgatgccttttgtcctcacttatatgaataggaaagataccatttctgaagctccccatatgctagcttcaggaatagcttttgttagggctgctagtctgaggagggatcctaaaattccagatagtcccctgccccagtggggctttgggcaaaaattatgtctttctgattggtgagcccgggtgcctaaagaaggtaacagagtcctaaagtttatactaaaagtcattcttacagaagaaattagaaaagcaccagacacagggggtggtttttagaaacgggactagcctcagagaagagaggcaagaggaagtttgtctgacaggcattaggacccaggaggcaagggtcaggatagatagggtagatgggygagtcttgcttaggcaacatgactttgagagttctgttcatggctgcaggg

SEQ ID NO: 216297 - DNA, 574 bp, Homo sapiens
tacaaaggtcttatttttttggtgacattgtacattattaactgtaagcaaattatggaaaggtaaagatgtatactataatccctagattagtggcttcaaactttagcatacataggaataatctggaaagcttatgaacacaaagattaccttcctsctaactgtgattccgtgtgtctcaaatgggaccaaagaatctgcatctcttcaaacattccaggtgatgctgatggtgctgctttgggcaccacattttgaagatgttcaccttagaacaactattaaagaataatttaaagtggactatctgaaaagccaacggataaatcaaaatgaaatttcttttcaattagttcaaaagaaaaaaagataattacagaattaaggagaaaacaaaatacaataatgtccttaaatttaactatatgaattatattattccagtagagcaaatactctaattaaagacagaattgtgagaatttgtaaagcaagatgaaattaatgttacctgtaaaagaaacaatctaaatatataaatatacagatagattaaaacaaatgaatttta

SEQ ID NO: 216298 - DNA, 616 bp, Homo sapiens
tgtgttctccatttctataactttgtcacatcaaacatcatataaatggaagcatatagtgctcgcctttagggatggatagttttaattccacataattctctggagattcatccaggttgttgcattgatcaacagtttattcctttttatcagtaagtagtggaagtaacayagtttgtttaaccattcctccactgaagcacatctgggttatttacatgtttggcctattacaaataaagctgctataaacattcatgtgcaggtgctgtgtggacataaggttttaattttttgggacaagtgcccaggaaatgcaattggagggtcatatggtagtgatgtttttgtttgtaaaaatctgagaaactgtttctggagtggctttatcatttcacactcccaccagcactgtatgagtgacctggttcttctgctttctggacagcaattggtatttttcactgtttttttgtttgtttattttagccattgtgatatatgaatagtatttacctattgcaattttagtttgcatttccctaatgactattgatgctgaacaccttttaataagcttctttgccatctgcacatcctctcttggtgaaat

SEQ ID NO: 216299 - DNA, 537 bp, Homo sapiens
gaaccatcaacagagtaaagatacaacttatgaaatgggagaatatatttgcaaaccatatatatgaaagaggttaataccaaaatataaaaggaactaaaacaactcaatagtaaaaaaaaattaatgtccaaatagactgatagacatttctcaaaataagacatacaaatggccaacaggtataggaaaawaatgcatcactaactatcagggacatgcaaattaaaactatattgagatgtcatctcacacttgttagaatggcttttaccaaaaagtcaaagaacaagtattggtgaagatgcagaaaaaagggaaccctcttacactgttaatgagaatgtaaattagtaaagccattatggaaaacagcatggatgttcttcataaaattaaatatgaaacttaccatatgatttagctaacccactactaggtatatactcaaagcaaatgaaattttcaccttgtaaatacatcttcactcccacattcattgcagcattattcacaacagcccatctatggactcac

SEQ ID NO: 216300 - DNA, 537 bp, Homo sapiens
gaaccatcaacagagtaaagatacaacttatgaaatgggagaatatatttgcaaaccatatatatgaaagaggttaataccaaaatataaaaggaactaaaacaactcaatagtaaaaaaaaattaatgtccaaatagactgatagacatttctcaaaataagacatacaaatggccaacaggtataggaaaaaaatgcatcactaactatcagggacatgcaaattaaaactatattgagatgtcatctcacacttgttagaatggcttttaccaaaaagtcaaagaacaagtattggtgaagatgcagaaaaaagggaaccctcttacactgttaatgagaatgtaaattagtaaagccattatggaaaacakcatggatgttcttcataaaattaaatatgaaacttaccatatgatttagctaacccactactaggtatatactcaaagcaaatgaaattttcaccttgtaaatacatcttcactcccacattcattgcagcattattcacaacagcccatctatggactcac

SEQ ID NO: 216301 - DNA, 439 bp, Homo sapiens
gtatacatcaatcatgacttatctgcatactcagtgggtcatactgtactcagaataaacaggcaagagactccttatttattggctctttagtaaattaactatacatacctaggaagaaaacctaaaaaatccaaatgatttgatttggatgcttgtcccaaccaaatttcatattaaatgtgattcccagtgttggaagtaggcctggtaggagatgattggatcatgagggtaattccctcattaatggtttagcactatccccttggtgattagtgaattctcatttagttcrcacaagatctgatatttacaattctgggacctctcctgtctccctttcttgttaccactcttgctatgtggtgtgcctgctccggattgatcttccaccatgattgcaagcttcctgaggcattcaccagagactgagtag

SEQ ID NO: 216302 - DNA, 576 bp, Homo sapiens
taattgcccaatgtgaatggcaaaatgtttgacttatgacacttgaaggaggtcagaaattctaccaattctatttactatttcattcaattcctatctcaacttcgaagtaaaatgtcatccttgtttttattggagagtgttataaatcaggaataggaaaaagaggggttgtagctgatggggttggattggcagggaaaggagagggataactcattaggtggaacataaaaagggaagtccgaagggmaatccaacatgcagtccctggaggaataccaaatggaggaggaagcataggccaacccactaatgagaagtcagtatgaaactggcaatattgtaattatttagactataagtggtgaatttgaaaagcacacagtgttcttttatcaaactagtctaatcagagggcatagaatatatgttttcagatgtataagaaattcctaaattggagactaattgtgatactctttgacctgggattttaagaaccgaagtatgaactgaagtttggactcactctagaggcctgtatcacagagagataaaaagaaagaaaggggc

SEQ ID NO: 216303 - DNA, 428 bp, Homo sapiens
tacacagagctgtttatttgcatcagtttgctagtgacaccacaatctggtttacatgtgagtygctgagagcttttgtagcctaatatggctacatttgctgaagcagggagattaaagcaacatatgtcaatttatgatataggacaacccactgcaaaagactttacctaattatagggcctattttgggagggtaatggtgctttttgtgaagtatattttgggatgcactcacccggcttctaggccagtaatatcttcccagaaagggtgtggtgtgtgcttgtggacataaatattttcttaccaaaagctgtggtgtaatattctctcaactttactacccttcatttttctttttctgatagtcttttcttttgcaagaatgctatgaaaatgtattctggaaagccagagaaatggaa

SEQ ID NO: 216304 - DNA, 437 bp, Homo sapiens
ttgagtattttggtacacagagctgtttatttgcatcagtttgctagtgacaccacaatctggtttacatgtgagtcgctgagagcttttgtagcctaatatggctacatttgctgaagcagggagattaaagcaacataygtcaatttatgatataggacaacccactgcaaaagactttacctaattatagggcctattttgggagggtaatggtgctttttgtgaagtatattttgggatgcactcacccggcttctaggccagtaatatcttcccagaaagggtgtggtgtgtgcttgtggacataaatattttcttaccaaaagctgtggtgtaatattctctcaactttactacccttcatttttctttttctgatagtcttttcttttgcaagaatgctatgaaaatgtattctggaaagccagagaaat

SEQ ID NO: 216305 - DNA, 530 bp, Homo sapiens
gtgtctccaacctcaaaggatttgcattctatttaaggagattttttaaataacttatgaaagaactagtaaaaggacacagaggagacatggacacagtggaacagtgtatagtgtttatgcagtcaggctctggcaccttcggttcaaatcccagttctgtcatctacacttgtcctttgtttggcacattgctttcctctcggtgttccgttttctcatctgtagaacaagactattgctggcatccacctcatgtgcccagtgctttgcatgcctgactcttagcaagcrctcagtgtatgtttagctattgtggtagctgctattatcaagcattaaactgttgtttctagcactggcgctaggtgcattggagagattagtgaaggctggagtaatcacagatggcttcatgaaggaggtgggactggagctgaggaggctgtagctaagcaggtgaagagaaagagagcatttccaaagccaatgtaaaagaaacaagtgtgagcatgctaagtgcaggacac

SEQ ID NO: 216306 - DNA, 615 bp, Homo sapiens
tcaagttcagtgctttgttccacggtggcatacaattggttattgagcccattcartgattttttaaatgtcagatattgtattttttaattctagaatttccattttgttcttttgttaaagtgttgatttccctcctgaagtgccccatgtctttacgtattatgtctatcttttcctataaatccctgaacatttttcaatacttgtcttattgtttaaaatcattgtcctctaactctaataactggatttgcttctagtgactgctttgctcaaatggaaggtcatataatggaaggtcatattttcctgcttcttcacatgtatgtgtatgtatatatatatatatatatatatatatatatatatatatatatatatatatgacctcgtgaaaacctttatcaaatttttggctgaatcccagatgtactatggaaacagttttgctccaaactgcttagtctggttactctattcagaaaaggaatgttaacctggcattatatgattttagctaaatacttcagcttctagtgaaaacaaattatttgttaattaatcccatgatccagaaccatggacagagtccatgccgaaaccattagccta

SEQ ID NO: 216307 - DNA, 615 bp, Homo sapiens
tcaagttcagtgctttgttccacggtggcatacaattggttattgagcccattcaatgattttttaaatgtcagatattgtattttttaattctagaatttccattttgttcttttgttaaagtgttgatttccctcctgaagtgccccatgtctttacgtattatgtctatcttttcctataaatccctgaacatttttcaatacttgtcttattgtttaaaatcattgtcctctaactctaataactggatttgcttctagtgactgctttgctcaaatggaaggtcatataatggaaggtcatattttcctgcttcttcacatgtatgtgtatgtrtatatatatatatatatatatatatatatatatatatatatatatatatgacctcgtgaaaacctttatcaaatttttggctgaatcccagatgtactatggaaacagttttgctccaaactgcttagtctggttactctattcagaaaaggaatgttaacctggcattatatgattttagctaaatacttcagcttctagtgaaaacaaattatttgttaattaatcccatgatccagaaccatggacagagtccatgccgaaaccattagccta

SEQ ID NO: 216308 - DNA, 615 bp, Homo sapiens
tcaagttcagtgctttgttccacggtggcatacaattggttattgagcccattcaatgattttttaaatgtcagatattgtattttttaattctagaatttccattttgttcttttgttaaagtgttgatttccctcctgaagtgccccatgtctttacgtattatgtctatcttttcctataaatccctgaacatttttcaatacttgtcttattgtttaaaatcattgtcctctaactctaataactggatttgcttctagtgactgctttgctcaaatggaaggtcatataatggaaggtcatattttcctgcttcttcacatgtatgtgtatgtatatatatatatatatatatatatatatatatatatatatatatatatatgacctcgtgaaaacctttatcaaatttttggctgaatcccagatgtactatggaaacagttttgctccaaactgcttagtctggttactctattcagaaaaggaatgttaacctggcattatatgattttagctaaatacttcagcttctagtgaaaacaaattatttgttaattaatcccatgatccagaaccatggacagagtccatgcygaaaccattagccta

SEQ ID NO: 216309 - DNA, 525 bp, Homo sapiens
tggcccttatttatatataacatttttaattatctggctgactgataagactttcagccgacaactaaataacgagaaasagctacacgtctccagggcctttcttctggaaaaacttttctggtcccctcttccctgaactggtgcaggcgtgcaaagaaagctccgtgccacgcccggcagcctccattctttggtagaacgcagcgcagcaatagccgccaagtcccctcctgggtacagtacagctccacagcgcccctgctggtggcttgggaagggcgcgcaagcagagaaagcaagtgtcagagccgggactggcctcccagggcatcgcctacagcttgtgctctgagagtcggggtcatcatagctgcgctcttcgatggacactaaatgcgggacatctgttttacactcaccctccctccccgcgtggcaggagacctacactctcccgctatgcgcgctccgcggcagctgccgctgcaccattcattctctcctgcagaagttcaatattgc

SEQ ID NO: 216310 - DNA, 535 bp, Homo sapiens
gcaaatgggctgtgaactgcagatgtccctgggagagaaaatagaaaattactagcaaattcytaagagaacctggcctctttaaagaagagaagacacattgagctgggagttggaggagaaatgagaaattgagccacagactctgaaagatatcatctgccaagagggagatgaggctttaaaaagaactttaaggatttgtacatctagtcatgatgcagtaactggtactggactagttttttagctttaaacaactagaaagccaggagaaaatatttgaggctggcagtggacaacagacagccagagatggttatttctgagagagaaaaacttacaaggtgaacccccaaatcatccagctctctgctggaagagatttttctaactgtagcacagagagctgaggtccaagcagggctcaagagttgggccgaacagagagagaacagagtttagcaaagctgaaatagttgaatctgcagggtggagcatcaacaaggaggtagctttatagagaatactaccc

SEQ ID NO: 216311 - DNA, 524 bp, Homo sapiens
atggctaacgctgtggccattctcagaaagtaccatcagccatgtatgtacatacagasaaagaaagggaaaataacacaaatgtgataaaatattaaaagtaacaaccacaaaatatggctaaagattatacaagggtgttttacattttctcataacttttctgtgggcctgaaagtatttcaaaatacaaagctaaaaaataagcaataaaaatgtaattatcaaattgaactaataatgttaaactgtgaatttcaaatagaattgattaaaaataaaatcatcattaaaagtagcatgtttaaaaatgtttaaaatgcggttacattatcccagactaaactcagtatttttgcattcagttcttaattgtaaaagagtcctactgcccatgactagcctatgtaggccccatgaccatcaccgcaccacacatgttctcagcatccagacggcaacgtacactgctcagcaagactggcccaacaaccacacacgtggaggtcacagcaatgtaaatt

SEQ ID NO: 216312 - DNA, 524 bp, Homo sapiens
atggctaacgctgtggccattctcagaaagtaccatcagccatgtatgtacatacagagaaagaaagggaaaataacacaaatgtgataaaatattaaaagtaacaaccacaaaatatggctaaagaktatacaagggtgttttacattttctcataacttttctgtgggcctgaaagtatttcaaaatacaaagctaaaaaataagcaataaaaatgtaattatcaaattgaactaataatgttaaactgtgaatttcaaatagaattgattaaaaataaaatcatcattaaaagtagcatgtttaaaaatgtttaaaatgcggttacattatcccagactaaactcagtatttttgcattcagttcttaattgtaaaagagtcctactgcccatgactagcctatgtaggccccatgaccatcaccgcaccacacatgttctcagcatccagacggcaacgtacactgctcagcaagactggcccaacaaccacacacgtggaggtcacagcaatgtaaatt

SEQ ID NO: 216313 - DNA, 524 bp, Homo sapiens
atggctaacgctgtggccattctcagaaagtaccatcagccatgtatgtacatacagagaaagaaagggaaaataacacaaatgtgataaaatattaaaagtaacaaccacaaaatatggctaaagattatacaagggtgttttacattttctcataacttttctgtgggcctgaaagtatttcaaaatacaaagctaaaaaataagcaataaaaatgtaattatcaaattgaactaataatgttaaactgtgaatttcaaatagaattgattaaaaataaaatcatcattaaaagtagcatgttkaaaaatgtttaaaatgcggttacattatcccagactaaactcagtatttttgcattcagttcttaattgtaaaagagtcctactgcccatgactagcctatgtaggccccatgaccatcaccgcaccacacatgttctcagcatccagacggcaacgtacactgctcagcaagactggcccaacaaccacacacgtggaggtcacagcaatgtaaatt

SEQ ID NO: 216314 - DNA, 462 bp, Homo sapiens
ttttacctctgctgatgtccagtctaagcctgcatggtctgaaagtgcaacrgccaaagggagagaggagtaagaggagtggccttgcagttgataaacaggatgatgatgatgatatcaatgatgatggcgatgatagtgatggttgtgatggttgtgatgatgatgatgatgatgatagtgatggtgagaaaagtctttgatagaaggtcacaaatgtttgggtgacagtaagaatccttcttgtgttaaaagatggagtaaaaaatgaaatggaagacttgaaaggtagctgaagcccttgtttactaatccaaagtgatagagtttattatgtaaatgtgaagatccaatctgaggatttttgactgaagtagcatgactggaactctagagcagaagactagcttagtggtattgtgtgttgaatgcattaaggtgaagactttagtaggcaacatc

SEQ ID NO: 216315 - DNA, 462 bp, Homo sapiens
ttttacctctgctgatgtccagtctaagcctgcatggtctgaaagtgcaacagccaaagggagagaggagtaagaggagtggccttgcagttgataaacaggatgatgatgatgatatcaatgatgatggcgatgatagtgatggttgtgatggttgtgatgatgatgatgatgatgatagtgatggtgagaaaagtctttgatagaaggtcacaaatgtttgggtgacagtaagaatccttcttgtgttaaaagatggagtaaaaaatgaaatggaagacttgaaaggtagctgaagcccttgtttactaatccaaagtgawagagtttattatgtaaatgtgaagatccaatctgaggatttttgactgaagtagcatgactggaactctagagcagaagactagcttagtggtattgtgtgttgaatgcattaaggtgaagactttagtaggcaacatc

SEQ ID NO: 216316 - DNA, 462 bp, Homo sapiens
ttttacctctgctgatgtccagtctaagcctgcatggtctgaaagtgcaacagccaaagggagagaggagtaagaggagtggccttgcagttgataaacaggatgatgatgatgatatcaatgatgatggcgatgatagtgatggttgtgatggttgtgatgatgatgatgatgatgatagtgatggtgagaaaagtctttgatagaaggtcacaaatgtttgggtgacagtaagaatccttcttgtgttaaaagatggagtaaaaaatgaaatggaagacttgaaaggtagctgaagcccttgtttactaatccaaagtgatrgagtttattatgtaaatgtgaagatccaatctgaggatttttgactgaagtagcatgactggaactctagagcagaagactagcttagtggtattgtgtgttgaatgcattaaggtgaagactttagtaggcaacatc

SEQ ID NO: 216317 - DNA, 555 bp, Homo sapiens
tatgtgtacaaaccacattgctagaacaaaatttcattcttttccaatctagcttgtgacagagaagcattcaccattcagtttgtttttttttttttaagcaaagaggagtcttccatcttatgcatagaagtgatgttactgaaaagtgtagaaaataagactgataaaaacataatgtgaagcatgttttcacatctgtggagagctgaagtacctacgatttcccaatctgtctcttccacaatcgctgtgaggctttgccatttcgtcaaaatggcattggggccttttttcctttgaaaaatactcttttttggccgggggcggtggctcacgtctgtaattccagcactttgggaagccgaggtgggcagatcactaggtcaggagttcaagaccagcctggccaacatggtaaaaccccrtctctactaaaaaatacaaaaattagctgggtgtggtgctggcgcctgtaatcccagctacttgggaggctgaggcaggagaatcacttgaacccaggaggctgaggctgcagtgagcagagattgc

SEQ ID NO: 216318 - DNA, 562 bp, Homo sapiens
atggcaaacgggaaaaaaaaaaaagaaagctgtttaggtggcatttgaaaagttaaaaaagaaagaaaactcagagcagcccaaaagacagatgatacctaagaaggcacaaccagcaagacatgttgactgttagtattatttcagcatcctccttgagcagcttggctttgctctgggacaatgcaccagcctgggatgctcagagatgcaggcacggaggttgtgcagcctctccgcacactgcgcatgcgcggctgccggttcaagtcgcggtccaggaccgcarggaggcgggcaagcgaaactgagaaaaacccacccacggtccagggactgggggctcgggcgaacccacccagggacctcctgaccaaggccatttgtctgcaacctgatggctagaagtgataccaccctgagcatcttcaatcccctttccccactctacagccccttgtactgtccctccttcctcattcacacccctgatccaaactcaagcactgaatttgtccccagacgagggcctcggctctgcgcggccgctggctgagtagct

SEQ ID NO: 216319 - DNA, 562 bp, Homo sapiens
atggcaaacgggaaaaaaaaaaaagaaagctgtttaggtggcatttgaaaagttaaaaaagaaagaaaactcagagcagcccaaaagacagatgatacctaagaaggcacaaccagcaagacatgttgactgttagtattatttcagcatcctccttgagcagcttggctttgctctgggacaatgcaccagcctgggatgctcagagatgcaggcacggaggttgtgcagcctctccgcacactgcgcatgcgcggctgccggttcaagtcgcggtccaggaccgcaaggaggcgggcaagcgaaactgagaaaaacccacccacggtccagggactgggggctcgggcgaacccacccagggacctcctgaccaaggccatttgtctgcaacctgatggctagaastgataccaccctgagcatcttcaatcccctttccccactctacagccccttgtactgtccctccttcctcattcacacccctgatccaaactcaagcactgaatttgtccccagacgagggcctcggctctgcgcggccgctggctgagtagct

SEQ ID NO: 216320 - DNA, 447 bp, Homo sapiens
cctcaacaaatggcatccatcaaataacaacatggctgtgacaaccactacaagagacttaaaaacctaatgtttctttcaggaaaccaaccatataagactactataaaacaaagatgtgtccttaagcacacaggaggtgaaaaatcccagagctcatatagtgtgaaaaacttgagtagaggaaaggattatattgggtaaaatgtgggttttaaaatttgttccgccaatgagactattaagataataatacagtgaaacattacgcatttatctcacgtggagtccagttctacrtaacgtttgaaggagtagaggtcaggtgcttaggagtaaagggcagtattttctgagatggagggagtccacatgaccacatgtgggtaatattctcagcatggaatattagaagatattctcaagaaaattttaaaattagaattc

SEQ ID NO: 216321 - DNA, 572 bp, Homo sapiens
taaaacccaggatagccaacacaatattaaaaatgaagaacaaagttgcacgagtgaccctactcatgttcaagacttactataaatccacagtcatcaagatagtgtggtttgatgaaagaaaaggcaaatagatcaatggaacagaatagagaccycagaaatagatccatataaatacagtcagctgatctttgacaaaggaaaaaagacaacataatggaacaaaaatagtgttttcaacaaatagtgctgaaacaactggacatccacatgcaataaaaaaagattaatctagacacagatcatacacttttcacaaaaatttagtcaaaatgaatcatagacctaagtgtaaaacacaaaactataaaactcctgcaagataacataagagaaaatttagataacctagggtttagcaatgacttttagatatgataccgaaggcgcaatccatgaaaaagaatggataaatttgtcttcattataattaaaattttctgctgtcccatagattgggagaaaatatgtgcaaatgattaaaggctcattatccaaactatacaaag

SEQ ID NO: 216322 - DNA, 587 bp, Homo sapiens
attgaatattcattgccaccaattgtaaaatacactatcatgttataacaagaaaataggaaacaacagattaaaaaaatgataaaggaataacatattttactagggaggaaaagagaagagtgccaattaaccaagatgcattattaattgtaaagatttgagagattttaaaatgtggaaaaatttgtttattagcatcaaagagaaatgatactaactaaaagtaattaaattaacagctttctataaataaacgactatacctgaaggaaaattatctatgcttgcaatgaagattaactcaatcaccagacagaaatacaccatgrtgcaatgtcaatttcagcagcacataaaataccatactgaccttgaaagtgatcttggaaagcatccttactcagacgcttattttgtaccatccccaattttgccatcccctaagagacaattactcccacaaaaatctgtacttgcatttgtttttcctttcactttggaaaccacagttgtgctttataagttttaagggcaaaaaatatcttattgacttctgaatcctagctcagtgcttgtttaatgaa

SEQ ID NO: 216323 - DNA, 588 bp, Homo sapiens
cagttagactcacattctgttggaaatcactgggaagcccaaccatctcacagttgaagaaatgtcagtaattatgttttaatttctaaaatttaaattaacttttttactaacactaaatattttaacattaatttttattgattttacttattttcctctaaaaaacagaaatacactcataaaaagtcaaaagaatatagaacaatgattaaaatcaatctacagtatataatatacacatatttaataggttgtarcattttatatataccctctctccaacttctttcccctttcctcccaattggtaactgtacttatggcttagcatgttgtattccatatcttaggaggaaaaaagaattttttagtcatgatagcatctgaaattttggaagagaagaaaatttgttttagtaccaacaaatcttttgaataaaaattgtatagggcttttaaggactataataaggcccaaaagacaagatctttctttgaacttactagcactgtaggcaggaaatgggctgcaatgtattttagtccctgccaattatgtcagtgagatcagaggtatatatacaa

SEQ ID NO: 216324 - DNA, 508 bp, Homo sapiens
tgtcagtgagatcagaggtatatatacaatatatttttagtggttaccagcacttaagctgtggcaatcctcatcctacactcttgtggcttagcttggcagatctgagatgggacataagccacaaagtgctatgggtcttaggacataatgaagtcatacattacggtaaagggtggggagggggaagaaaccccaacattttccaatagccaaggtctttgcacatagatgctgcacatacattttattatttctgtatttatagctacttaaactatgtaaagattgccttaatttctttacctataaacttayaggactaagtgacttgcctttatttatgccacagggctattcaatgccatctagaatacccttcaaagcaagtatccctggctcctctccatacacagtaggtgttaaatgatagaactctgttcgtgggtatcttgttaggtgctattggggctcggaaacagatacttcaaactatggtgcattgaca

SEQ ID NO: 216325 - DNA, 366 bp, Homo sapiens
ctgtataaccttgttaagtaacttaacctctctgtgcctcattttcttgatgaagkgggaataaagtaatcacttactgtaagaattaagtaagctgacattcacaaaatacaaaaaacagtacccaacatgaaaaagtgctcaagaactattagaaatcgtcaaaaattaaccaaaattgaattacctggcatcaaagagaataacagacataggtatgattagagttttttttgttttttttttttttgataaaagtctgcatagctattgagaattgtttggttggagacattgtatatataaaattgagaaaaatgtgattctgattgcaatttttgcccattttcctccagactttcatct

SEQ ID NO: 216326 - DNA, 612 bp, Homo sapiens
gcttcttttctgagtgcattgttatatatgtgggttgtgaatctatgataaagctttttgcgtcagtctgtctcatygtataaactgttcaaactaaaaggaactttttattatgtctcattttagtgtccattcaggaaagcccaggaaatatgtcctttgattcacttgaatacatctcatgtcagagttaacaagccatccctgtaatgcccttgccacaacatatatggtaaatctcacttaaaagatcaaaggatgcttagtagggagacaacattacatagcagttattctgaaattttcggcaaggggtcaccgtagttgcagtacaatctcattctttatgcatatatgaaattcagtattcataaatgcatcttcccaatgtttttagatactttttacctaaatttaaatatattcttctgtgtcttctttaataatggacttaatttctattgagtcccctaaattttccacctcttttgcacctctcagctttgaagacactcagcttatgtttgaatgatccttggtttctccagtttttctttccttcctatagagtatattgttagatattgttgctgagttgttattctactaaat

SEQ ID NO: 216327 - DNA, 586 bp, Homo sapiens
gggtttgttcaggaaaagaacaccctgaaggaagcatgacaacgaggagcttgcaagtgtgtgtctatgcctctgtctgggttgcaaattatgtggcatgggttggggggacraaggagatgggaggacatggggaaaaaaaaagggcatagtaaagatatgaaggtgggaaacagcatgatatgaacagttttagtatgactaaagcacaaatcatgggggcaaaactagcaagagaacatcacaaatggataaggctgatggtgaagcatcttcatggcatgttaagacacttggactttttcccataggcaatggagggctaacaagaggttttaaacagggaagtgaggtggtcctaattgtgcttgccacataactggctcagatagtacaactcttgcacaagtcattattgcaccaggtcaatgagtaacctaatctgagaaaggtgagaacagcatgtaacttacaaggtgcagcaatgtgagtgttctgggtaataagtagaatcctgattaagtccatggggttcgggtatgaaagagccgtgattaagatatgggttactgaaagatgtgtgaag

SEQ ID NO: 216328 - DNA, 421 bp, Homo sapiens
ccctggttggagagggcaaacctggagggggtgggaggagggggtaaatgaggacactgggttgtcagggcggccaggggggccaggttcctgctggagcggagagtgtctgcctgtgcgtgggggagcgagcacatgtgtgccgtctgtgactgcgtgcttgtgcaggccgggcgtgtgtggctcccagggtcacgctttgggatgtgtgtgtctgtgtgtgtgtgkggggggggcgggggggacacaggctcgttgcattgtctccgcatttgtgtccctgaatgtccccaagtgggacttcactcaacacattcgtgagtccctactgcgatagggcagtgaacaaaatagaaatctctgccctcaggaaactggcattctagcgtctgtgtcctccggggtgctgtgaactcgcgtg

SEQ ID NO: 216329 - DNA, 402 bp, Homo sapiens
gaattccaccatgaacacagtctcctgtgcgctctcagtgatcgctttcctttcagggcacggattttctttcttcccctcacatcaagaaagaaggggttaagtttgggagcccagagagaggcaaacagctgttttgccgcagccactttagctgctgcrtccaattctacctccagatgagcttgaggccgacggggagaggaagtggcctttatttctttgttttttgagctgggcacgttggggagggggatcaggagatcagcttgctgcctgttggcctttagccttgaaaaacgaacgtgtgttggaagctgcttccgtgtggccacttttctgctcctgaaactgggggagggcatggggacgggggactcaacaggacgctgcttatggtgg

SEQ ID NO: 216330 - DNA, 599 bp, Homo sapiens
tggctcccgagtgactaataggtagggagcatagacactgtggttacattttacaaagggatgattcaggccctgggcgagatggagcaggacagcaccaagtttcatcatgctagtcaggacaactcacaacttaaagtttataaattatgtctcaagttttctatttaatattttaatttattaattaaaatactaaaattttatcaattaaaattattaaataacaaatattaaaaattattaatctagctttattaatacccatgggttgaccatgggtaactraaactgtagaaagtgaaagcttggataagggaaaaaggactactgtatttcttcattttgtttttccctatttagtatggagtagtaattattaaagtgccaaatagttatatatttgtgtctttgcctggaaattgttgtggctacagagatatagttaagacatctaaggtgacgtttatatttgtgtggaattttgttctaccatgtaagaatgtcaagcattttcctcgttaaaattatcagggacttatttcagtgaacataatgtcctctgccgtcatccattttgtcgcagtgatctcacttat

SEQ ID NO: 216331 - DNA, 599 bp, Homo sapiens
tggctcccgagtgactaataggtagggagcatagacactgtggttacattttacaaagggatgattcaggccctgggcgagatggagcaggacagcaccaagtttcatcatgctagtcaggacaactcacaacttaaagtttataaattatgtctcaagttttctatttaatattttaatttattaattaaaatactaaaattttatcaattaaaattattaaataacaaatattaaaaattattaatctagctttattaatacccatgggttgaccatgggtaactgaaactgtagaaagtgaaagcttggataagggaaaaaggactactgtatttcttcattttgtttttccctatttagtatggagtagtaattattaaagtgccaaatagttatatakttgtgtctttgcctggaaattgttgtggctacagagatatagttaagacatctaaggtgacgtttatatttgtgtggaattttgttctaccatgtaagaatgtcaagcattttcctcgttaaaattatcagggacttatttcagtgaacataatgtcctctgccgtcatccattttgtcgcagtgatctcacttat

SEQ ID NO: 216332 - DNA, 582 bp, Homo sapiens
agcccctattcgagatgaagtctctctggtttaaatgcctctgacagcaggaaaagaagagaggagacttcttttcttattattttgcatattattcctcctagcaatgacccttcattctggtagcagcagttggttccaatcttcagcttctattggaacttttggaagggacctcatcacaccccttcagagggtcatgtctacacctcagagcccaaagctctagctcctcagagactgtggtttcagctgtgagtcccagtagcccaagatattctttttgtttccctattatttttatgtcatctcagtctttcctttttgcttttcagcactctgatacctrtaacctatgtcctaaatgaaatgatctctgttgaaacaactagtgtggtttctgttttcctgacttgaccttgaatgatgtaatcttatataattctattacatgggctcatctcagagcctaatgaaggacctcacacattgtgtatattttataggtgttggttgaattaaataatgaattgttggatgactaaagtgtatttttatcaggaaggatcatggtatacaaga

SEQ ID NO: 216333 - DNA, 528 bp, Homo sapiens
tactcaacttgactgcttagaggctttcttcaaaatcaaacaaatatttccaaggataccaggagtgatgtccaataacctttatacttttggacgtcttaaggtgatataaatttgcttttttagaacttagtttttttgcatgaaagtaagacgttctgagattttgtgtktgagacaagatataagaatttatgcgcctataattgaaatgatgaaacaaaatgaataattattttaatacaagaactgacttagtagaatggactccctcttatccaagtgaataaaatatttgcataatactatataagctttgatttttattggtacaaattgacaagagttaaatgagttctcgaagagtttgcatattgttccctgaaggcaattgaaaataaaattacaaggagagtcagataaaaaataaatgatggcaaaaaatttaaatagaatatgatttccatgtgatgttaatatttacacaaattttaaacatttcagatagaaaacctaagggggaatttg

SEQ ID NO: 216334 - DNA, 459 bp, Homo sapiens
tatagtcttggcagttcctaaaagrcgcatttccttgttgttttgcttaagcttgtctgggcttcatttagtagtctgcttatgttaaatttaagcaatcatgggtatggaaaatgaataaagtgttgactatccatttggatcaattttattcattcaaaaatgtacattttaataaagtaatgttaggcactatggatagaaatatcaaagaggctcagtttcttcttccaaagtgttcctaaagaaggaaatagacatagaaggaaagcaagttataatccagtttcataagtacagtaatggaagattgcataagacagtatgctggcaagcgcaagaatgatcaaacctggttgtggagagtgtcatgaaagtcattataaccaaatctgaaaatgcagttccccagacgcttaaagaagaaaaatgtattctgaaaagaagaaacagtgaatt

SEQ ID NO: 216335 - DNA, 511 bp, Homo sapiens
tgtttagccctaatgagtgtttttcattcaatacatcatgttactataggaggcaatgtgagttcatgaatgaatttctgtttgatatatccttgatatttctttttgaaaacacacatgcacgtgtgtacacacacacctacacactccattaaaccacagggraagtgatgggaattactttaaattaatcctaccatggcagattcaggcagctcagagacaaaacaaagagtatattgttatttttgaatgtgactgaaatacagattttcttgttttctgggtaaaaaaagagattagctgtgtgttaatataaaagaactaccatgcatgtgactattacaaataaaagcaagtataagagttggaaatgaaagacaaaaatctatttttttctgaaaatttctaaaataattgaaacactgcctaagaataacaaatgacttcaaaaaagacgaaaaattttcaagtgcagtgatatagatgaaatacactttatttggaatct

SEQ ID NO: 216336 - DNA, 453 bp, Homo sapiens
tattgtgataaggccttgactaataggaaatcagctcacttattaacccaatttttttctgcacttttctttttatatgaatgagaaagtacrtggaggtgggtgattcagaatttaatttaaaaccaacttccaggctaaacaggcaatcagtatgcatttcttatgtgtttgcctccccaaagatataatgataggtgtgagcattgatacaaagaattatagcacatagtctttattgtcatgatggttgcaatctgaggatataaaactacacatgtgaaaaggtagctaacagtgtgacaatataaatgacaaagaccataatgaataatatggattaaatgcaataggaatttagaagagatgaataacactgagttggagtgttctaagataacttcttggacaatatagttggcaagcaaatccttaggttgggtagatctggga

SEQ ID NO: 216337 - DNA, 444 bp, Homo sapiens
taggaaatcagctcacttattaacccaatttttttctgcacttttctttttatatgaatgagaaagtacgtggaggtgggtgattcagaatttaatttaaaaccaacttccrggctaaacaggcaatcagtatgcatttcttatgtgtttgcctccccaaagatataatgataggtgtgagcattgatacaaagaattatagcacatagtctttattgtcatgatggttgcaatctgaggatataaaactacacatgtgaaaaggtagctaacagtgtgacaatataaatgacaaagaccataatgaataatatggattaaatgcaataggaatttagaagagatgaataacactgagttggagtgttctaagataacttcttggacaatatagttggcaagcaaatccttaggttgggtagatctgggaaaacgaagagagaa

SEQ ID NO: 216338 - DNA, 444 bp, Homo sapiens
taggaaatcagctcacttattaacccaatttttttctgcacttttctttttatatgaatgagaaagtacgtggaggtgggtgattcagaatttaatttaaaaccaacttccaggctaaacaggcaatcagtawgcatttcttatgtgtttgcctccccaaagatataatgataggtgtgagcattgatacaaagaattatagcacatagtctttattgtcatgatggttgcaatctgaggatataaaactacacatgtgaaaaggtagctaacagtgtgacaatataaatgacaaagaccataatgaataatatggattaaatgcaataggaatttagaagagatgaataacactgagttggagtgttctaagataacttcttggacaatatagttggcaagcaaatccttaggttgggtagatctgggaaaacgaagagagaa

SEQ ID NO: 216339 - DNA, 472 bp, Homo sapiens
attgtgataaggccttgactaataggaaatcagctcacttattaacccaatttttttctgcacttttctttttatatgaatgagaaagtacgtggaggtgggtgattcagaatttaatttaaaaccaacttccaggctaaacaggcaatcagtatgcatttcttatgtgtttgcctccccaaagatataatgataggtgtgagcattgatacaaagaattatagcacatagtctttattgtcatgatggttgcaatctgaggatataaaactacacatrtgaaaaggtagctaacagtgtgacaatataaatgacaaagaccataatgaataatatggattaaatgcaataggaatttagaagagatgaataacactgagttggagtgttctaagataacttcttggacaatatagttggcaagcaaatccttaggttgggtagatctgggaaaacgaagagagaaaggcat

SEQ ID NO: 216340 - DNA, 574 bp, Homo sapiens
ccagagcaatctgaaactcagtgaacatattcacctacagagttattgattttctcaatttccaattaaggtttaaggtgctgcacagtggtgtacaggtgcaggctttgaggtcaggctgccaggtttgaatcctagctccatcactcactagcatgtgtgactttggcaaagattcttaaattttgttgccttagtttactaaactgtsgatagtgtcagtagttcttacttttcagtaggttactgtaatgatggaatgggtggatccatgcaaggcatttgaaatagtaacttggctcccactgaacttgcaatagctattttgttgttattgtcattgcagttccacatacttcagatcaaggagagggagaaactgtttttgttatgccccctccttctacttattgtcacttccagatctttttttttttttttttttttaatcctcctcttgtaaaacttgctattctgacctccaaactacccctttggagtagtttgtactcagttcttggtcattcctcttgattcacaaatgagttctgctttggacccactcttccttacc

SEQ ID NO: 216341 - DNA, 574 bp, Homo sapiens
ccagagcaatctgaaactcagtgaacatattcacctacagagttattgattttctcaatttccaattaaggtttaaggtgctgcacagtggtgtacaggtgcaggctttgaggtcaggctgccaggtttgaatcctagctccatcactcactagcatgtgtgactttggcaaagattcttaaattttgttgccttagtttactaaactgtcgatagtgtcagtagttcttacttttcagtaggttactgtaatgatggaatgggtggatccatgcaaggcatttgaaatagtaacttggctcccactgaacttgcaatagctattttgttgttattgtcattgcrgttccacatacttcagatcaaggagagggagaaactgtttttgttatgccccctccttctacttattgtcacttccagatctttttttttttttttttttttaatcctcctcttgtaaaacttgctattctgacctccaaactacccctttggagtagtttgtactcagttcttggtcattcctcttgattcacaaatgagttctgctttggacccactcttccttacc

SEQ ID NO: 216342 - DNA, 548 bp, Homo sapiens
agggaattcctgggcaagatggccgaataggaacagctstggtctgcagctcccagcaaggcccatgcagaaggtgggtgatttctgcatttccaacagaggtacccggttcttctcattgggactggttagacagtgggtgcaacccatggagggcgagcagaagcagggtggggtgtcgcctcacctgggaagcacaaggggtcagaaaaatccctccttttgccaagggaatccctgagggaccctgccatgagggacggtgctatgcagcctagatactatgcttttcccagggtctttgcaacccacagaccaagagattccctcgggtgcctacaccaccagggccctgggtttctagcacaaaattgggcagccatttgggcagacactgagctagctgtgggagtttttttccgtaccccagtggtgcctggaatgccagcaagacagacccgtttactcccctggaaagggagctgaagccagggagccaagtagtcttcctcagcggatcccacccccatggagcccagcaagctcag

SEQ ID NO: 216343 - DNA, 538 bp, Homo sapiens
tgaatttccagcaccattatmataattttattggttatggatgttccttgagttaagcaaaagaaatcagtaacatttctgacacaaattcatccaatcctataaatagttcttagaagattacagtatgttcagctctatgaacataatagctctatgaacatagcatagcatagctatgctaatagctaggtattatggaggagtacaaaagaaatagaagtcatggtttctatgttcatggagctaatcatcttaggaaaacgacacacaacaatcttaaccaaatgtattataattgtcacattggatgatgcttacaatagttgtcaaagaggcagctgaagtagaaaggaagagtgtgcaggcatatgttgattatcccccgatggaaaacttcaactagtattactatgaatagcaagatccactactgcttcttagaaatgattttttaaattgtcacacaaaacttctaggagaaacctgacagactaacagttaaaatagaatagataaggtaccttgctttgtacat

SEQ ID NO: 216344 - DNA, 556 bp, Homo sapiens
cctgtacataattcagaagtttttaatatctcactaaattcaagagcttattgcagttaatcatackacatattataaccccccaaaaaagataatgctaaatctaacagctattttataagcaatgctttccaaacaactttttttttccttttcactgtggcatagcaagagaaaacaaggttagttagtggctggcagaatttaggtatcaggatgcctggcaccaaaatacggatggaaagagcctgggatttgcttgagtctcacaattctagatttgagatcaaaccctcataattttagccatgtggtctcaggcaagttattttgccttcttgaatctcacatgtctcatctctgaaagtgacctagtattaattttcaaatctgttgatgtcattatatgagataaagcattttaaatatccatcccaagtccataatatagtattggttaaataagcttttctcctctgttttcaattataacattaatagaatatttcatataacatttgtgtatgtgtgtatgcttgtgtgtatatgtgtctga

SEQ ID NO: 216345 - DNA, 556 bp, Homo sapiens
cctgtacataattcagaagtttttaatatctcactaaattcaagagcttattgcagttaatcatactacatattataaccccccaaaaaagataatgctaaatctaacagctattttataagcaatgctttccaaacaactttttttttccttttcactgtggcatagcaagagaaaacaaggttagttagtggctggcagaatttaggtatcaggatgcctggcaccaaaatayggatggaaagagcctgggatttgcttgagtctcacaattctagatttgagatcaaaccctcataattttagccatgtggtctcaggcaagttattttgccttcttgaatctcacatgtctcatctctgaaagtgacctagtattaattttcaaatctgttgatgtcattatatgagataaagcattttaaatatccatcccaagtccataatatagtattggttaaataagcttttctcctctgttttcaattataacattaatagaatatttcatataacatttgtgtatgtgtgtatgcttgtgtgtatatgtgtctga

SEQ ID NO: 216346 - DNA, 560 bp, Homo sapiens
tttttctttcaatattttaaacatatcaccccactgtctgctgaggtttctgctgagaaatactctaatagtctaattgaggctcctttctatgtgatgtcacttttctcttgtgctttcaaagttctctctttgtctttcacttttggcaattttattacaatgtgtttcagtgtaaataaacctttttagattaaacctatttaggactatttgggtctcatgaatctggatgtccatttctcaccccaaatttggagaatttctttaaatagactttctgcactttctgcaactttctctctctctctttctctctctctctctcccctcttatttccataatatatagttttgcttgatggtatgccttaagtcttgcagattttcttcrctcacttctttttgttattctttctttttgctattcttcctggataatttcaaacaacctgtcttcaagttcactgactctttattccacttgagtgtgctatcatgggtctctattcaaaatttcagtttagtcattgtgttcttcagctcttaatttttttctc

SEQ ID NO: 216347 - DNA, 450 bp, Homo sapiens
tgcaatgcatattataaaattgtatacttcaggtttctactcatttttaacacagacattttatgtttctttcttcatgttaaagcagcttccctgagttagaatctatactggtgatcaaataagttgattatatcattctgttgcagtagaatagcagacagagttcaatgaggctttttatcttaaattatattttcaacttgacctcattaaattttttttctcctgtttgtcattgttaggcttactgtttttcatatttcctctcagcgcctttaccattttaaaagtgtcttaggaaataactcttgcctggacagttcattatttctaatagtgacaacatatcgaatgscatagtgaactgatttcattgtgcctcatgacccactcttagacaagctcaggtagatttcctagttgctgatgagtttttagaaaatcatt

SEQ ID NO: 216348 - DNA, 540 bp, Homo sapiens
gctgatattgattacatttcccaatgaatcacatctcttctaaaaagacagaatgttaaaaattctgctattatggctgctcttcataatataaaataatggccttcatcttatatgtaaaagacaagtgggcactccctgtaatttaagaaaacaacttttgtaaacttctggtggggattagagaaagaaaataaattctgagaataagcatcaagtacaactaatgtcagaagccaagtaaaaagcaagagatttcagaattaaatgaacttatagatcattaggtaaaataagactgtggaagtggatggtaatttgagtttgtaaattacacataaagtattatccacactcaacaaaatattctgcaaaagaaagaacrcaaatgtttaaatgtatagaatctggcagttctgaacaacatcctctatgttggcttgttgctgatggacctgacagagaagtgaagtaagatctacatctcataatgaccagtgcatttctggatcctcaggcttgtctcctaggaaaagacaa

SEQ ID NO: 216349 - DNA, 497 bp, Homo sapiens
aaaacagtttcttcctatgactgtttcctagcatcattagctctgccaatgcttggcaatgcttttcccctgcccattattttgcaatgaagtactgaactggcctaataatggcacaaatagcctgtactctgaaaaagcaaaaaataagagtgtcggaaatatttcataaaaaagttaataggacactaacatgttcttaacagaacatctctaagcaataaactttttttcctaagctgaaatatatacatacatatatagatagatggatagatagacagatagatattttttagggaaagctatgttttaaaattaatgggaattacctattttgttttagcatgttaactacattctaatgaaacttcatctatttaattcaaaacgattttaagtgatcctcaactttatcaaaatgtcatgrtctcctccaataaatctattttgctcttattttctaaacacttttttattccataaaaaaagtacct

SEQ ID NO: 216350 - DNA, 618 bp, Homo sapiens
tattaggcatacacattttaaaatcaaagatatatcaatgaatatgtaactttggaatacacactaaatgttttgaatcctcctgtaatgaargatgataatgaagaaaatccagaaatttgaaattcctaaatcacattcctttttgtgagtcttgaatcttcaaatcccagaacccaaagaactaaatttctttatattctagtgtttttagtaggattgtagtatttaatagttttggtatgaaatgagtcatattgatttttaaaatactacagagttttcaaatagaataattttaagggaaactggccaaaaaggggcggggggcagtataaatgttgctaaaattatatttctgccttgcttttcattattgcttttacctttgaggttcacagtgatgatgtattatctccaacaagtatccacaaggcagcaattcaggcacttctaggttatgggatctaattaagtctcctatacagtagctagcaatgcagtcagagctcagaccaaggctagtggatgtatcaattcggaatacatattcctacaatggtacacacaaaaaataaaatcaaaacagaggttcaactcatctacaacaaatacata

SEQ ID NO: 216351 - DNA, 618 bp, Homo sapiens
tattaggcatacacattttaaaatcaaagatatatcaatgaatatgtaactttggaatacacactaaatgttttgaatcctcctgtaatgaaggatgataatgaagaaaatccagaaatttgaaattcctaaatcacattcctttttgtgagtcttgaatcttcaaatcccagaacccaaagaactaaatttctttatattctagtgtttttagtaggattgtagtatttaatagttttggtatgaaatgagtcatattgatttttaaaatactacagagttttcaaatagaataattttaagggaaactggccaaaaaggggcggggggcagtataaatgttgctaaaattatatttctgccttgcttttcattatygcttttacctttgaggttcacagtgatgatgtattatctccaacaagtatccacaaggcagcaattcaggcacttctaggttatgggatctaattaagtctcctatacagtagctagcaatgcagtcagagctcagaccaaggctagtggatgtatcaattcggaatacatattcctacaatggtacacacaaaaaataaaatcaaaacagaggttcaactcatctacaacaaatacata

SEQ ID NO: 216352 - DNA, 618 bp, Homo sapiens
tattaggcatacacattttaaaatcaaagatatatcaatgaatatgtaactttggaatacacactaaatgttttgaatcctcctgtaatgaaggatgataatgaagaaaatccagaaatttgaaattcctaaatcacattcctttttgtgagtcttgaatcttcaaatcccagaacccaaagaactaaatttctttatattctagtgtttttagtaggattgtagtatttaatagttttggtatgaaatgagtcatattgatttttaaaatactacagagttttcaaatagaataattttaagggaaactggccaaaaaggggcggggggcagtataaatgttgctaaaattatatttctgccttgcttttcattattgcttttacctttgaggttcacagtgatgatgtattatctccaacaagtatccacaaggcagcaattcaggcacttctaggttatgggatctaattaagtctcctatacagtagctagcaatgcagtcagagctcagaccaaggctagtggatgtatcaattcggaatacatattcctacaatggtacacacaaaaaataaartcaaaacagaggttcaactcatctacaacaaatacata

SEQ ID NO: 216353 - DNA, 440 bp, Homo sapiens
cggcatgagccaccgcgcttggccttagatttcaaaacaaacacaaaaaccataagtttgccaaaggtaacacctctgcagatcaggttaggcttgtgatttccaaccactttgcagacatccggagacaaatgggwtagatctagctaatattttcaaattttattttataggtatagtccaaagaaatttggcaacttgcctgatgtcacgcgataatttcttgattgaaccaggcaaaaatgcaaatcaactaaatctctattgagagttattaagaaggcatgaaaaataataagttgctttttcatgtgatagtttaaaaagcattttcataggtattttctcattgccaattaaatcctaaggcctgatcatggcggactggggaaagaatgactcctcatgttttatgatttttctcttaagtagttccccaa

SEQ ID NO: 216354 - DNA, 440 bp, Homo sapiens
cggcatgagccaccgcgcttggccttagatttcaaaacaaacacaaaaaccataagtttgccaaaggtaacacctctgcagatcaggttaggcttgtgatttccaaccactttgcagacatccggagacaaatgggttagatctagctaatattttcaaattttattttataggtatagtccaaagaaatttggcaacttgcctgatgtcacgcrataatttcttgattgaaccaggcaaaaatgcaaatcaactaaatctctattgagagttattaagaaggcatgaaaaataataagttgctttttcatgtgatagtttaaaaagcattttcataggtattttctcattgccaattaaatcctaaggcctgatcatggcggactggggaaagaatgactcctcatgttttatgatttttctcttaagtagttccccaa

SEQ ID NO: 216355 - DNA, 440 bp, Homo sapiens
cggcatgagccaccgcgcttggccttagatttcaaaacaaacacaaaaaccataagtttgccaaaggtaacacctctgcagatcaggttaggcttgtgatttccaaccactttgcagacatccggagacaaatgggttagatctagctaatattttcaaattttattttataggtatagtccaaagaaatttggcaacttgcctgatgtcacgcgataatttcttgattgaaccaggcaaaaatgcaaatcaactaaatctctaytgagagttattaagaaggcatgaaaaataataagttgctttttcatgtgatagtttaaaaagcattttcataggtattttctcattgccaattaaatcctaaggcctgatcatggcggactggggaaagaatgactcctcatgttttatgatttttctcttaagtagttccccaa

SEQ ID NO: 216356 - DNA, 507 bp, Homo sapiens
ttaaaagtccttctattcaattctgtgctgggaggaccctgaacgatatatgggatggaggggtgaaggtggaagtggggggaagcaggtgccaggcggacaagcccattctcaaacctgctgcctcgcctggattgactgccagacagctctcaatatgcctggtttgtgaggaagggtgagggaaggaagggtacaygggtagaactggtcagccctctgcatagatagccagggttttggattgagtatcctctcttctacaccatgttcagctcagaagccggaagtgctcctcaactagaggccagatactctcttctgcaactcacagccaacatgacacacacaaacagacactcatcttcaagccttgatggtgaatgtctcaacccaacttcctcacatctacacctccaaccactgccttcggtggctttgctccctttacctgactaaatgattccatttcctctgtcctaaccctcttcccttttctcaggaatt

SEQ ID NO: 216357 - DNA, 543 bp, Homo sapiens
tgtacatttggcttctgacatggcaatgacttcccagacaccaattagattttttgtaatgtaatcaaatataacctaatttcctttctgttttttggaagggaataggaaatgtaatcagaattcacagtaagctgtattttaccaaaaaacttttgggagtatagacatttgaggactagaatcagattacagtgatttgatggaaactcaaaacttaaccctcccataccctcacacttttatattaatagttaagaaatcaatctatttaaaaaattrcttcatttgtgattgtcattaatgaattttaagcaactcactgtcactagtgaagttcaagatgaccaaagagagttgcatattcatgtttgtccagataaccagagtactatttaatgcctgttggtttttattccaagtgtgcacaagtgaagctaactgtggaatttgcataatcgcaaaggtaataggttggcaaatagaaaatgaaagaagaattaaacatatctttattattgtctctattctccaattaactaa

SEQ ID NO: 216358 - DNA, 288 bp, Homo sapiens
ctaggtatctttaaaataatcttgtaaaatgcttttgattacctctattttctaagaaataaaactgatttttagagcattaatgtcaagtctgcatagtcattctgaacttaaacccgagtatactagaaatataaattattatatacaaatggrtgtcttttacagcaatagactccagcctaaattgatggtaggggttttatactgttttgtgctaagcctctatctccattcattattatgcccaaacattcacatttatacaaactaggatgtaattctaga

SEQ ID NO: 216359 - DNA, 490 bp, Homo sapiens
tgtgttctgtcaatgctatttctatcatcaggtcttgctacttctcagttcttggagatacagatgacaaaggatgaggcccaggctgtggctgtttcatktacctcagtttatttcagtcaaaattgggatttttctgtacagaagcaggaggtaattataagaccattgcgtgagttctgtttaattcctagtatggagagaacaaagcagagctgaatgacttggcaggaagttttagaagtttcaagtccaagccagggagcaaatgttggctaagtgccccctaaaatgtttgtccatgccacctggctgggggtttgtgtgaaaaggaggggagaggagagacctctattagtttagcacctgctgggccaggatatcacgtgcatgctcacttaagcctcccagcaagtcctggaggaatctgtgtccctgttgagtagaccaggaggcagagacacagagataaatcacatgcagctatgtt

SEQ ID NO: 216360 - DNA, 582 bp, Homo sapiens
ggttcacagcaaagttgggtggaaagtacagagttctcaaatatcccctgtcccactgcacacaggcacagactccttcattattagcatccatcaccagagtggtacattygttacaatcaacctacatggacacatcatcacccagaatccatagcttgctttagagttcactcttggtgttgtacactccatgggttttgataaatatataatgacatatatccactattgtagtatcacacagaataggttcacagccctaaaaatcttctgtgttctgcctattcatccttttctccctactaacccatgataacccctaatacttttactgtgtccatagctttgcctttaacagaatgtcatatagttagaataatacagtatgtagacttttcagattggcttctttcactgagtaacatgcatttaaatttcctccttgtcttttcatggcttgatagctcattactttttagtgctgaataatatttcactggatgtaccacagtttctttatccattcatctactgaaggacaccttggttgcttccaggttttgacaattatgaataaag

SEQ ID NO: 216361 - DNA, 581 bp, Homo sapiens
ttcaagtatgcccatgctcctttcttaagtatgtaatttcactttgcaataaacctccgtatcatcacaattttatgactcatccttgaattccttctgtgatggtgtcaagagcctggataccagctggagtcaatgtcccactggcattttgggacttcctccattatcaaaagtataaaatttctaggtaagaacatagaaaataaaatccttatgaacttgagctagcccaagatttcttagacaagacaccagaagcaaaattcataaaataaaaaaaatgacggctgggtgcagtggctcatgcctgtaatcccagcactttgggaggcgaaggcggatcctcaggatcacctgaggtcaggagtttgagaccagcctgtccaatatggtgaaaacctatctctactaataatacaaaaattagctcagcatggtagtacatgcctataatcccagctactcgggaggctgaggcaggagaatcgctggaacctggaggcagaggttgcagtgagccragatcacgccattgtactccagccttggtgactgagtgagactctacttcaaaaata

SEQ ID NO: 216362 - DNA, 601 bp, Homo sapiens
ctaaatattaatatatctataattttttcatatataaatatataatataattaatacatatattttaatatattatacattatatattacataaaaatatttatatatttataaatatactgtattttttatatatgtgtgtataaatatatgtatatatayacattttaacagtatttccagcctactgcatttttggtcagaataggctcacagggtgtttgacctctggaggctctaggggaggacaatttgtggctccatcactccagtcttcaaggccggcatctttaactctctctgctccatgttgacattgccttctcctgtccatgtgtgtccaaacctctctttatctccctttcataaggattcttgtgattacattgggcacacccagataacgcagggtgatcacccatctcaagatcctttctacatcttatctgcacagtgccgttccccatgcagtcacatacctctaggttctggggattccgatcagatgacatgtttgaagatgtctttatttagcctaactacacccaagatgattgttctctcttgctgaaccaagtaataacccaacttgttcaactac

SEQ ID NO: 216363 - DNA, 448 bp, Homo sapiens
accataacatttacatactttctatgtgtacaaagacactccatattttctgctgctgggacagatttgtaggaaatattctgttttctgggggatgttgctaataaagtttaaatataaaaataaatatactttaaactccataaaaaatacattcatccacaaatagagttctactaaagatttatatgaacgaaatgcatccagaaactattaatatatgaacaattaatatcttcattgaagtgcatacattgatggttctttccaaatgaaccaatgcaaagtaataccattacaccacacaatttgctgtttctaartaattacgttattccatcgttcatggatatggcttggctctgtgtccccacccaaatctcacctcgaattgtaatccccacgtgttaagggagggaggtgattggatcatggggccagtttcctc

SEQ ID NO: 216364 - DNA, 518 bp, Homo sapiens
ggtgcttttgatcattcatcatgcaagttaaacaacaaagatgacactcctttgaaccctrtatcttagaattaattctgccatccccgaatcccgagtgtctcaagtgcgttgaatgtgtctctctgctgggaacacactttccctacatctcccacgtctgggtccttttccccacctcaactgttagggagtcaccttctctgaccttgttggctaaaattggccctccctcccctgccagctcatcaccctctacctgtcatcatcctgttttatcttcttcctagacattatcactggttgatatttagggttcattttctgtcttcctccccagaaggtgggattcatgacagtagggttatcctggtcagttgtgtccacatctttcacccctgcacctagcacaatggctggcacagttaatgtttgttgaatgaatgaatggatctgtgctttagtccaagcttccagggtcatttagtttttgaagattagactgacggagatcattc

SEQ ID NO: 216365 - DNA, 529 bp, Homo sapiens
atcattcatcatgcaagttaaacaacaaagatgacactcctttgaaccctgtatcttagaattaattctgccatccccgaatcccgagtgtctcaagtgcgttgaatgtgtctctctgctgggaacacactttccctacatctsccacgtctgggtccttttccccacctcaactgttagggagtcaccttctctgaccttgttggctaaaattggccctccctcccctgccagctcatcaccctctacctgtcatcatcctgttttatcttcttcctagacattatcactggttgatatttagggttcattttctgtcttcctccccagaaggtgggattcatgacagtagggttatcctggtcagttgtgtccacatctttcacccctgcacctagcacaatggctggcacagttaatgtttgttgaatgaatgaatggatctgtgctttagtccaagcttccagggtcatttagtttttgaagattagactgacggagatcattcctatcatcattggcccacatt

SEQ ID NO: 216366 - DNA, 543 bp, Homo sapiens
atcattcatcatgcaagttaaacaacaaagatgacactcctttgaaccctgtatcttagaattaattctgccatccccgaatcccgagtgtctcaagtgcgttgaatgtgtctctctgctgggaacacactttccctacatctcccacgtctgggtccttttccccacctcaactgttagggagtcaccttctctgaccttgttggctaaaattggccctccctcccctgccagctcatcaccctctacctgtcatcatcctgttttatcttcttcctagacattatcactggttgatatttagggttcattttctgtcttcctccccagaaggtgggattcatgacagtagggttatcctggtcagttgtgtccacatctttcacccctgcacctagcacaatggctggcacagttaatgtttgttgaatgaatgaatggatctgtgctttagtccaagcttccagggtcatttagtttttgaagattagactgacggagatcattcctatcatcattgrcccacattgtggtttgaaggca

SEQ ID NO: 216367 - DNA, 498 bp, Homo sapiens
catgtgttttgggagtgactgaatcaaaggtagttactttaattttagagaaygctggttgtcatttgtgatactccttggaaaagttgtcttcatcttttacctgttactgaatctgttgtaatggcacctgcctgcaaaacattagcactggtgattccttgtctaataatggtggaggaactgctacaatgctaatattcacaccgatgacaactataaactcaggagaaaatgcaaaaaacagctatttaaaggttacagagagtaaccaaaagcagcagacacttgcaagcagggaatggcattggatgagtttctcattttatgacttagacactgatggaagtacccatgcagggaagctgaattgcagaaagctcagtcttaccggcttgaagaaccagaggcagtgtttggggcaaccacaaccactggaaaatgaggggagaatgctggaaaaaaaaagatctagagaaagagaggcctcacattctg

SEQ ID NO: 216368 - DNA, 636 bp, Homo sapiens
gcccctccggtgattgtaatgtacagccagggctgagggccagtggtctaggacaatcaaggcgtcccaatggcctttgcaggaaactctttttcccagcctcttctgcatctgggagtaatcatgtgatgcaattctgaccaatgtgatgcaaggatgtctcctgggggctgctggaaagtcttctgctacctgacaatgaggtagacgtggaaggtgctctttctagcatcgacctcttgccccttcatcctgtcttgagcatggttgagcacagggacttgcctttggagctgcagcaactgtcttgggatgagcctaagaatgaaaagccaacacactgaggatgacagagcagaaagacarggaagtcctgggtgcttgatgaagatgttcactgctgctttcctctcagaatcacctacctcctggcctctttccatgtgagaaaatgaagtaactttatgccatagcaactttcagtcagttaatttacttgctcgccttgattgataaagtcagacaattctttgctcccatagaaagcatattccaaagagaggagcaatgtttgaatgcaggaaagtgctgacacctcctactctgcctgaaattttctgccaaaaatgcccatac

SEQ ID NO: 216369 - DNA, 518 bp, Homo sapiens
caggctggagttataacattgggagtctgattattagatgtctcccaactttatatccctacctaaagccatgtgcaccatgagattcctcaagagagtgtgtcactggggaggaaagacatccaaggacatgcctcaaggygctccaaggttaggggctcttagataaggaggaacagcaaaagagactgagaaaccaatgtggtgcttaggaagccaaataaacaaaatgtttcaaggagaaaggagtgatcaagtacgtcaaatgcagccaacaggtcaagaatgatgaggactgagcaatgcctattagccgcttagaggtcactgttgaccttggcagggagagttcggtggcttttggggccaaaatccaactagactgggtccaggagagacgggaaggagaagaataggaaacacagatacagacaactctttccggtaatttctacactaaaacagcagggagatgaagcagtggctggtagctatgggaaattggaccaagagaattc

SEQ ID NO: 216370 - DNA, 633 bp, Homo sapiens
tcccacttctggaaatgtatcttataaaaatgcttgcttcctttgagctacagctgcaaggtaaaagagaaaaaaataataaaataaaaattaaaaaacagctgggcttgggtggctcatgcctgtaatcccasctgtttggggggccgaggtgggtggatcacttgaggtttgagaccagcctggccaacagagtaaacccctctctctaccaaaaaaaaaaaaaggcacaaaaaattagctgggcaaggtggcaagagcctgtagtcccagctactctggaggctgaggcaggagaatggcctgaacctgggaggtggaggttgcactccgacatggtgccactgcactccagcctgggtgacagaatgagactttgtctaaataaataaataaataaataaataaacaaacaaacaaacaaaaatctgtcacggaggccagtcactagaaaaagatatctatgtctgctcatatttgcttaagaaaactctggaaggttacacaagaaaccaataaaagtggatgcttgtttgggaggatatcgtggcagaagaggcccatggttgggaagaggggttctcactgcatacctcttagcgctgttttgatttttgagaagcatatgtatgt

SEQ ID NO: 216371 - DNA, 633 bp, Homo sapiens
tcccacttctggaaatgtatcttataaaaatgcttgcttcctttgagctacagctgcaaggtaaaagagaaaaaaataataaaataaaaattaaaaaacagctgggcttgggtggctcatgcctgtaatcccacctgtttggggggccgaggtgggtggatcacttgaggtttgagaccagcctggccaacagagtaaacccctctctctaccaaaaaaaaaaaaaggcacaaaaaattagctgggcaaggtggcaagagcctgtagtcccagctactctggaggctgaggcaggagaatggcctgaacctgggaggtggaggttgcactccgacatggtgccactgcactccagcctgggtgacagaatgagactttgtctaaataaataaataaataaataaataaayaaacaaacaaacaaaaatctgtcacggaggccagtcactagaaaaagatatctatgtctgctcatatttgcttaagaaaactctggaaggttacacaagaaaccaataaaagtggatgcttgtttgggaggatatcgtggcagaagaggcccatggttgggaagaggggttctcactgcatacctcttagcgctgttttgatttttgagaagcatatgtatgt

SEQ ID NO: 216372 - DNA, 590 bp, Homo sapiens
gagaagctacgtgaagagagaccctgaagtgtcagcggccattgcagaccttccagccctagcaaaactcccagctcacggggcagagacaatgccatccctgcagagctctgtccaaatgcagaaacgtgagccgagaaattgctgtttcaaagttctaagtttgaggatggcttgttatgtggccacaggtaacaaaaacaaggtttggtttggttttgtttgtcttgtcttttctgagttggggtgcttctcatatcttctggacatgagcccttggtgtattccaatgactctgtaccagccctgccatctccttgttcctatgctgccatgagcgtaccgtaatggtgctgccgccttctgcctgcagatctttttcactaagaatggcaaagcccttcaggcttcaaggactgagtaacatccggtcagagcaagctagratgccttctcaggaaagctgcagagacacctggtaaccagccagaagaggcagactctagatttccaaatgccacaaagttccagctcagagcacccaactaagtgaagcaatctgctcatctgaaactctgcacttgcagtcc

SEQ ID NO: 216373 - DNA, 590 bp, Homo sapiens
gagaagctacgtgaagagagaccctgaagtgtcagcggccattgcagaccttccagccctagcaaaactcccagctcacggggcagagacaatgccatccctgcagagctctgtccaaatgcagaaacgtgagccgagaaattgctgtttcaaagttctaagtttgaggatggcttgttatgtggccacaggtaacaaaaacaaggtttggtttggttttgtttgtcttgtcttttctgagttggggtgcttctcatatcttctggacatgagcccttggtgtattccaatgactctgtaccagccctgccatctccttgttcctatgctgccatgagcgtaccgtaatggtgctgccgccttctgcctgcagatctttttcactaagaatggcaaagcccttcaggcttcaaggactgagtaacatccggtcagagcaagctagaatgccttctcaggaaagctgcagagasacctggtaaccagccagaagaggcagactctagatttccaaatgccacaaagttccagctcagagcacccaactaagtgaagcaatctgctcatctgaaactctgcacttgcagtcc

SEQ ID NO: 216374 - DNA, 590 bp, Homo sapiens
gagaagctacgtgaagagagaccctgaagtgtcagcggccattgcagaccttccagccctagcaaaactcccagctcacggggcagagacaatgccatccctgcagagctctgtccaaatgcagaaacgtgagccgagaaattgctgtttcaaagttctaagtttgaggatggcttgttatgtggccacaggtaacaaaaacaaggtttggtttggttttgtttgtcttgtcttttctgagttggggtgcttctcatatcttctggacatgagcccttggtgtattccaatgactctgtaccagccctgccatctccttgttcctatgctgccatgagcgtaccgtaatggtgctgccgccttctgcctgcagatctttttcactaagaatggcaaagcccttcaggcttcaaggactgagtaacatccggtcagagcaagctagaatgccttctcaggaaagctgcagagacacctggtaaccagccagaagaggcagactctagatttccaaatgccacaaagttccagctcagagyacccaactaagtgaagcaatctgctcatctgaaactctgcacttgcagtcc

SEQ ID NO: 216375 - DNA, 540 bp, Homo sapiens
taagtgaagcaatctgctcatctgaaactctgcacttgcagtccccttgcctggaatgttctccccagagactccccatcgctcccaccttctcccttcctcccacattgccatgagcatctggctgactccttcaggtctcaatctagtgccacctgctcagagaagtcctctccgtccaccctggctaaagtagcctctgagtcagtttaacatcttggtcattttcttcttagccggcatcatgacacatgacttgtttatgttcctattgcctgtctcccctgccagcttgtaagttccatgwgggcgggacaatgaaccagaacatgacaggttcccaataaatgtttattgaatgaataaatggaagaaggagtgaacaaagtaatgaacaaaacagaccccagatcagaggaagagatggctttcttgttaattctggagcagattcaagcagcaaatatttactgaacacttgctatgtgctggaaattgttctaggaactggagttacagcagtaaaaaaaataacatttg

SEQ ID NO: 216376 - DNA, 531 bp, Homo sapiens
ctgaacacttgctatgtgctggaaattgttctaggaactggagttacagcagtaaaaaaaataacatttgtattttcataaatttatattctagagggagaagaagataataagaaaataagttatacagtgtcctaactattaaggagaaawtatagcagagtaagggggtggagagtaatgagggtgacattttagacaggaggtcagggaagcctctcagggaaggtgacacctgagcagggacttgaataaagtgagtcggggaaccagacatatacttgggagagagtgttctaggcagagggaacagcacatgcgaaggccctgaggcagagtatgtagctggagaggggagggaagagcagtagaaaatcagagaggtcaactctgtggaatccccagcccaggaatttggggctttgaagctctcttatgttcagaaaggcaaatcatctccaggtccaaagttgattaacattctttatttcacagtatttttgatcagaagtcttagaaatcatgattcat

SEQ ID NO: 216377 - DNA, 531 bp, Homo sapiens
ctgaacacttgctatgtgctggaaattgttctaggaactggagttacagcagtaaaaaaaataacatttgtattttcataaatttatattctagagggagaagaagataataagaaaataagttatacagtgtcctaactattaaggagaaattatagcagagtaagggggtggagagtaatgagggtgrcattttagacaggaggtcagggaagcctctcagggaaggtgacacctgagcagggacttgaataaagtgagtcggggaaccagacatatacttgggagagagtgttctaggcagagggaacagcacatgcgaaggccctgaggcagagtatgtagctggagaggggagggaagagcagtagaaaatcagagaggtcaactctgtggaatccccagcccaggaatttggggctttgaagctctcttatgttcagaaaggcaaatcatctccaggtccaaagttgattaacattctttatttcacagtatttttgatcagaagtcttagaaatcatgattcat

SEQ ID NO: 216378 - DNA, 599 bp, Homo sapiens
cagaatgtgatgcagatttcctggcccagggggtgatacatggatgttcttctgcctggaggcccacagtggtgtgctgcagccagcttatgctggcttgggaaatgtgcttgtcaaatttttaggaattctaatagccagttattaaatacagaccttaatacacacacacacacacgcacacgcgcacacacacacacacacaagtttttcagagagccaattgttcaacatttaccaacacacatctgttgtttgagggatatttggcagaaagagcctgggaaggtgatttgggtttgagaagcactgtagtttttttttgtttggtttttaagagaccaggtttcactgtgttgcccaggctggacttgaactcctggcctcaagcaatcatcttccctaagcctcccaagtacctgggactataggcacctgactaagaactgtttattggttggcatggccagatttacttgttaaaaatttaggctrtgtcttagtcattttccttgtaccagcttccagcccagggcataaaatgtggtcaggaataaagtttgctaaatggatggatgaatgaatgatagcttggatca

SEQ ID NO: 216379 - DNA, 522 bp, Homo sapiens
ctgctgggcaaaagtccaaggaaaaccctattcacatcccactggagaaagggccagactacctgatcataagcacatcttttcaatatcctgttgggcagcaagccatactgcccagacccctcctccccatacctataagtaccccagcctgtaatcagcagagggctctggcattaagctggtcccctacttctgcaggtttttgcaatatacctatgttgctgttgagccaccctctgtgtgtgtgcgtgtctttctttaaccctcgccttcccttcaaracctaacaggaagctctgagagcagggaccctgttggcatcatctttgaagtgcctacgatgcccagctgagctacaagaattctctaactctgagattcttctccaactgcctactggcatttggacccagatggcaaacccaacatggccaacctgaattcttcctcctcccagaccacttccatccccctcctacacctaaccccctgggtcatcccagatctcctgccccctcc

SEQ ID NO: 216380 - DNA, 592 bp, Homo sapiens
gaattcttcctcctcccagaccacttccatccccctcctacacctaaccccctgggtcatcccagatctcctgccccctccacccctcacatcgaatcagttacttccttctccatgaccattgcgtgctgggccattgyctcagtctcctctttggtctgcttgcctccagcctctcccactctcctccctttccccacacactgcccacaacatccaagggcacctgtcaggtagtcattgtgtgcatgagcttcagggtaaaactagacctgaagtgaatacttaccccaccactctctaacagtgtggtcacaggcaagttatttattagagtgacaacttgtccctgtttgcccaggactgccccacttctagcattgaaagacccaagtcttgggaaaattctatttctatttctatttataaattattggatgtatatttatatttaacgtaagcttagtttacatatttgtgaaataggatctatagtattacttaacatgtagcattgttctgaggattaactgttataagaggtagaaactgcttgcttgtagcaagcctaaaatgcatttcattctattct

SEQ ID NO: 216381 - DNA, 583 bp, Homo sapiens
tgagggtagatctcttagaaaaggttttcctacattcattacattcatttggtttcctttcagtctgtctccccttttgtgtaatgagaattgccctcttgaagaaggttttcccacatttattatagtcaaacggttgtttcaaaatctgaatgttctggtgcagaataagattttcgttttgattgctggctttcctcattggattgtatctgtattttttcattcccaaatgacttttctcatgcttcccaaatccactgtatccatcaggaatctttctgttttctttgcttttctttgcaacaattacttctgaattagttttcaaactgtttcctcctggattacatttatagggcatttttcttgagggaacactattcatgcccagattaagtgttttcccaaatacattctctctttctgtaatcagtgttttgttgctgaagaatayagtttgtgtcaaatgtttatcttggatttccttgttcttctctaaggcatcatcaatgtctagaaaaaggaacacaattaacggtaattggtgagcctttatatgtttgctatgaaatgagaattc

SEQ ID NO: 216382 - DNA, 636 bp, Homo sapiens
agcttttctctatgaaaggcattattctattaagcatattgactgagggcttactctatgcaaaacattatgttcatgttggcatccatgagaaataagactaaaaatacaggtaacaagagaatgtagagaatgtaacaaagaatatgttactacaaaatacaggtatacgtaaaagagcaaaatttacactgatgagggaatcaggagaaaargcatctttggggaggctgcattgaactaggctttgaaggatgagaagcattgtaaattgtggaataatggatggaaggacacccctgaccaaggacacacctgactgagaacaaggcacaactgctgcaaactttttgtgaattcactcgggtagttcttttaattcagatcgggaatctgaattaaaagaactcaacaaaagaaaattctcctatgaagttatacataaaagaaaaaccatgtacttctaataccattcctttgatcttccatgaaaagccactatataaacgcaggatattacttctattaaagtcagtatttttaaatggcaattatttttagaacacttgaaagtgaatttttttctccaagattgaaaattttctaagaaattaaatgtattccacatggcgagtc

SEQ ID NO: 216383 - DNA, 585 bp, Homo sapiens
ctcatagtttatgccagcgtttaggactgactcatgctttctccagtaccagactcaacaatcctagggaagaaagctcattggcctatcttgggacagatatcaacatggaccaataagttttggcaggaggtaggaccacattgtacaaagttgtcattggtgaccccttttctatgtattagtaaaagaaaaatcactgtgggctggagaagcttcaaacacacgagatgttttccttccctacatggacacatcacctcagtcttcccaagtatgrctactggcctcttctggatgtcttctttttccccattacctctagcctgagtgccatttcttttaatgatttggtaaagaacttggggcaagacatattgtagacaggaggagaatttctgggttggtgatttagagcagatctcttctgatcctttcccctgagcccagtacccctcatttactttttggcatgcgggaggaagtggcaactcaggagaaggcagatggaaaggttaaatggtgaagctcacaatctgcttggccaaggaaataatgcccttttcttaaaggctaaatgttttt

SEQ ID NO: 216384 - DNA, 585 bp, Homo sapiens
ctcatagtttatgccagcgtttaggactgactcatgctttctccagtaccagactcaacaatcctagggaagaaagctcattggcctatcttgggacagatatcaacatggaccaataagttttggcaggaggtaggaccacattgtacaaagttgtcattggtgaccccttttctatgtattagtaaaagaaaaatcactgtgggctggagaagcttcaaacacacgagatgttttccttccctacatggacacatcacctcagtcttcccaagtatgactactggcctcttctggatgtcttctttttccccattacctctagcctgagtgccatttcttttaatgatttggtaaagaacttggggcaagacatattgtagacaggaggagaatttctgggttggtgatttagagcagatctcttctgatcctttcccctgagcccagtacccctcatttactttttggcatgcrggaggaagtggcaactcaggagaaggcagatggaaaggttaaatggtgaagctcacaatctgcttggccaaggaaataatgcccttttcttaaaggctaaatgttttt

SEQ ID NO: 216385 - DNA, 607 bp, Homo sapiens
ggacacatagtctcctgacacttttttccagggttccatttaatagttgtgcacatcaataacaatctcacctggcacatgttaacatggttactttatttttgcaatcagtaatgatcatattccctgagagctgtttctctgggcctgttgactgatatggccataaatatatccccaaaggctaaaactgtacctgtttcagcacagatgaaataaaaataaatgtcccactgttttagtattacaaattataatctcactacagcatgaactttaaggtggtgatagttcaatttctgctctttgtttttgacatgatggtagaataaatacaattttaaaacattttattcaattaattttcagtgaccattttgtgtgcctggttcattctgtgctctctaaatcatgaaatacatttctttctttcttttctttgctyttttttttttttttttaagacagaacctcactctgttgcccaggctggagtgcagtggcacaatttcggctcatttcaacctccaccttccaggttcaagcgattcttctgcctcagcctcctgagtagctgggattacaagcgtgtgccaccatgcctggc

SEQ ID NO: 216386 - DNA, 631 bp, Homo sapiens
gatctttacagcttttctctatgaaaggcattattctattaagcatattgactgagggcttactctatgcaaaacattatgttcatgttggcatccatgagaaataagactaaaaatacaggtaacaagagaatgtagagaatgtaacaaagaatatgttactacaaaatacaggtatacgtaaaagagcaaaatttacactgatgagggaatcaggagaaaaggcatctttggggaggctgcattgaactaggctttgaaggatgagaagcattgtaaattgtggaataatggatggaaggacacccctgaccaaggacacacctgactgagaamaaggcacaactgctgcaaactttttgtgaattcactcgggtagttcttttaattcagatcgggaatctgaattaaaagaactcaacaaaagaaaattctcctatgaagttatacataaaagaaaaaccatgtacttctaataccattcctttgatcttccatgaaaagccactatataaacgcaggatattacttctattaaagtcagtatttttaaatggcaattatttttagaacacttgaaagtgaatttttttctccaagattgaaaattttctaagaaattaaatgtatt

SEQ ID NO: 216387 - DNA, 636 bp, Homo sapiens
agcttttctctatgaaaggcattattctattaagcatattgactgagggcttactctatgcaaaacattatgttcatgttggcatccatgagaaataagactaaaaatacaggtaacaagagaatgtagagaatgtaacaaagaatatgttactacaaaatacaggtatacgtaaaagagcaaaatttacactgatgagggaatcaggagaaaaggcatctttggggaggctgcattgaactaggctttgaaggatgagaagcattgtaaattgtggaataatggatggaaggacacccctgaccaaggacacacctgactgagaacaaggcacaactgctgcaaactttttgtgaattcactcrggtagttcttttaattcagatcgggaatctgaattaaaagaactcaacaaaagaaaattctcctatgaagttatacataaaagaaaaaccatgtacttctaataccattcctttgatcttccatgaaaagccactatataaacgcaggatattacttctattaaagtcagtatttttaaatggcaattatttttagaacacttgaaagtgaatttttttctccaagattgaaaattttctaagaaattaaatgtattccacatggcgagtc

SEQ ID NO: 216388 - DNA, 579 bp, Homo sapiens
ggcaatagcctggcatggctgttagagcctgagtgggtgagattgtcaacgcggggaggcgcagagggttggcggcagaaatgggagattgattatatgcagggatgctgatcaaataagttaaatagattaagggtaatgaaagccatatttctcactgtgggagaaaagggctacaaatatggaaaggtataaaaataggatttaccctgtggtgttgcactggaattggaggcagcagtatgaattcatgatctccaatatacaccaatggacataaaaatcaacagaggtaaatatgtgtaaacatacacacatacatacacatatagctccctaactctgtccactgagaaagcctgggagcagtgamgcccaagtaacaataagcacaaatcttagtgtctaaataccattttctactaaaaagaaccagggctcctaattgaaatggatcatcccaagcctggggcaagggaagtactagatgactgtggaaaatgttttgtgtgagaaatcgagaaagtgttcataaaatgatggaaacatatcaaaagaacacagaagccaccttgaaag

SEQ ID NO: 216389 - DNA, 598 bp, Homo sapiens
acatttccttctaatacaccttctattcttccagaaagcttctgccagcaacacctcttcctcttattgaaagggaggtatgtcacaggcagggagaactcagggtcatgtccagctcatcacatacccttgagtggcccctaagtgtaccactgtgaaacagggatcaaatatttgcccttctagaagcaaatcaaataatgtatatggaaggcattttatagatcatgaggggccctatagatgtgaaacataattatacaatcttagctccttttgtggaatttgacctcaaagmaaagatcacacagctccagtaacaaaataagtttaaagaaaaaaaaaacccacaagcatatgaagatccacaatagtccatgccatcccttaaggtgcgtttctttagggcaagaagttttctccattatcgggggggaaaaaagggagttggaataagaaaaagctcaaaggtagtagtttcatgacctttctaaaacagaccaaaaaatcagtgacattaaacaagtggttcccccactcaactatgaaatgtttgaggtaagagccgagtcttacttacctttaaaattcaagacca

SEQ ID NO: 216390 - DNA, 556 bp, Homo sapiens
tttgcaaatatcctctcccattctttgttgtcttttactttcttgatggagtcctttgatctacaaaagtttttaattttgatagagcccacacattattttttataaacagattttgttcccttataaaaatcacaaccgacacaggactaaaaaaaatgcatacaatgcacagtaaaataacttgtctactttatagtagacaaggctgtattttccacctctcttttccatgagaaaaacaggatgggcaggactgtttattcatatcaccgactgtttacattcctgcagtaaatcatgaagcaccactcactctattagtattttctaggaactgaaaaatgaaaaatgagtggcatgcattcacaattaacctaacagctactgaaatacaaacactgctcaggggatgtatcttttcctcayagattctcagtagttgatggagctttaatccacaaacctcacaaatgtgacgctggacatgttcagatgatatgaagtctttcctgggactttgatgcttttccacagaatctgcagtgcctttgta

SEQ ID NO: 216391 - DNA, 232 bp, Homo sapiens
attaaaagaaagtacctacctcttccatttttctcctttctcttgtctgaaacatgatggtgagtcatcttggattatacagagaagggcaacaccctagagatggcagagcaacatgaaaaagcaatctaggccaactgaagacctcttagaacagatccactttgacagattatgtccaaagatggccccmaaaattcttcccatcttgcaagtccttttgcaatgtaac

SEQ ID NO: 216392 - DNA, 559 bp, Homo sapiens
atatatcttttacatcaaatacaatgtccctacatatatttatctttttaaaagattttttatttatttttattctatatttattgtagcaaatgttacaatagcatctccaagatgtatcatctaccttaaaacagaagtattaagttgttggccaggtgcggtggctcatgcctgtaataccagtactttgggaggctgaggcaggaggatcacttgagcccaggagtttgagtccagcctgtgcaacatggcaaaaccttatygctactacaaaaaaaaaaaaaaaattagctggacatggtggcatgtgcctctagttccagctacttaggaggctgaggcaggaggactggctgagcccaggaggaccaggctgtagttagccctgacagtaccactgccaaaagaggccttatctcaaaaaaataaataaataaataaaaaggagtattcctatttgagataaggaatatgcttatttaacattctttcattttacatcataaataaccagtaatctaatgaacattttatgagaacaactccagataagcaa

SEQ ID NO: 216393 - DNA, 588 bp, Homo sapiens
tgtatatacacgtgtatttataaaaatggaaaatgaattatagtgcttatttagtcatctctcttacagatatactcttatcttcactagaaggaggtgatgttccacgactttagactggaaatgctagctttagagaaacgaaatatcaattagaaagtagtgttagtacatcaatgaggatcagggaacagtagatgagaacagattgaaacttttagacttagggttcaggggaaatggcttccaaaaatcaagtacctatgatagttcagagttgtactgaatgtattccaragcactaattttaaggttctagttgtttgttttgtagttcatagttctattagtcagatgatgatatttagtaacttattattacttatactggcaaattatgatatactcttgagaataagggggtctgattggaggggccacaacaatgattcctccatggtagacaatccctgggtgaggatatactgaaaagctgggctttttggaagtctcaaactggtattttcaaagaccacatttagtcagcagaagtgttttccttgatagtgacagtagacaaaatgtttt

SEQ ID NO: 216394 - DNA, 569 bp, Homo sapiens
tttgaaccacactctgcattctacataaacagtctgtcttataatcttagtgccttaatattaactctcattttggtggaggagtcttactatttaatcaaaacaaatggatgaaaaaaaaatgacttcccagaaaactaagaacaaataacagtacatataaaacatttctaacaattcatttcgtcaacttttcttaaacaaaatgattacagtgaccttgaaagacactttatgtctaatatctgattcattccagtgtccaatttatttaatcaaacatatgcattaaatccaaatagttttgaatatgacattttaagaaaagtaaggcatcaaatttaaaacatatattcttaaatacctccttaatctttgatcaattatcaatatcaaatattaaatatttctatgcagattcacacaagaaagagttaaatattaagaaaacttaacatatgtaacaagaaacctcatacgtttacctcaaaatattagttaagttctaattttgaaaacttgactgtkatttaaaacttctgaaagaaactagcgtttaaataatgata

SEQ ID NO: 216395 - DNA, 532 bp, Homo sapiens
attttttcctgcatcaccatggtactatcaaaatctggaaactgaaaatgatacattattcacacgatctaatgctcagcctcctttcaagtttagtcacttgtcctaataatgtcctctctagcraagggatccagttcagaatcacacattgtatttagttttcatgtctctttagtcagctccagtctcgaacagttccttcagtctttctttgattttcatgaccttgacacattagaagatcacaggccagttattttgtagatgtcccttaattttggttgtctgtgtttcctcatgattagtttcaggttatgcatctttgccaggcataatacaaaggtgatgctcgtttttctcattatattctatcaagtgggacatgatttcagggtatctcttataatgttcactttgatcacttgattaaagtgatatctgccaggcttctccactgcagttactttttttctcttttgtaattagtaaacattttgttgggagttattttgaaactatataagtatcc

SEQ ID NO: 216396 - DNA, 594 bp, Homo sapiens
gccaacatggtgaaaccctgtctctccaaaaacacaaaaatttgccaggtgtggtggagcatgcctgtagtcccagatacttgggaggctgaggcaggagaatcacttgaacctgggaggcacaggtcgcaatgagctgagatcgtgccactgcactccagcctgggcaaaagggcaagactctgtctcaaaaaaaagagaacataaatctyttatcttataaattacccagtctcagatatttctttatagtaatgcaagaatggcctaatacatttgtttttttcatctattgaaaaatataaatatcagtcttagcccacagtgtcaatatatagtcaagttggatttggcctctgggccaatagtatcctgttttaagttactgagttttgtggtcttcccttaagttttcttcagtattacaagatggagattctatagctcattacagtaatattcctaaaaatcctttttagagtcctgtcttttgccaaagtttcatttcttatggtagctattcaaacttcatctttctttctttctctcaatctgccagatcctagaccttttattcctatcaatgtacctgta

SEQ ID NO: 216397 - DNA, 420 bp, Homo sapiens
taaaaacaaatgcaataaaaacaaagataaatagttgggacttaattaaactaatgagcttttgcacagccaaaggaacagtcagcagagtaaacagacaacccacagagtgggagaaaatcttcataatctatacgtctgacaaaagactaatatgcagcatctacaatgaactcaaatgaattagtaagaataaaactaacaatcccatcaaaaagtgggctaaagacatgaatagacaattctcaaaaacagatatacaactgaccaacaaatatatgaaaaaatgttcaacatcactaatgatcagggaaatgcaaatcaaaaccacaatgygataccaccttactcctgcaagaatggacataataaaaaaaaatcaaaaaacagtagatgttggcgtggatgtggtgaacaggg

SEQ ID NO: 216398 - DNA, 577 bp, Homo sapiens
tgctctactagctagtgtgttcaatatattttttatatgcttacttgttacacatattccatgtttagtggaaagtctattcatgtcttttgcccattttttatttttctgttgtactactgctgagttttgagttatattctagatgtaaattatttgtcagatatgtggcttgcaaatattttctcccaatcttcagccttwccattttttacacgttaacttttttttggcagagttcaatttatctactttttttcttttatagattaggaaaagtcttcatcttgcccgaggtcccaagtcccaagccccaagccccaggcactttctcttatatttttttctaaaagtttttatagttttacatttaaatctataatctatttgagttagtttttcataaattgtgagttttaagttaagttgagggcttcatttgttttgtttgttttttgcttatggatgtccagttacaccatcactctccatggaaaatattacccttcctttaataaatggctttgcaataattaggaggcttttgctatcaaatgtaaatatagacatttataat

SEQ ID NO: 216399 - DNA, 506 bp, Homo sapiens
gaataaataaatctgtaagagaaaatcctggagtgtgcacttctttgcagaggtccttatggtatatasataggtaagtagctagacaaaccagtggaaagatagagaatattactggcaacactgctaattcccctattgtttgccatcaggatctttgatattcagtgagtagaatttttaatctttactttgggaagaaaaaacacgaggcagatttctctgaattaacagagtactatgacaagatcatattttaaaaagtcttatgtatttaacacctttaaatacctactttgtgttttaattacatactttgtgttttaaacaattttttctgttatttagatgagatttagaaatgtcaaaaatcaagaaaataggaaagagaaaattattcataacattagcaacaaaaccattttaaaagaatatgtctaattttctttttggtacatggtgattgagaagtttttaaaaatgttgcctctcctgaaggaaaagat

SEQ ID NO: 216400 - DNA, 506 bp, Homo sapiens
gaataaataaatctgtaagagaaaatcctggagtgtgcacttctttgcagaggtccttatggtatatacataggtaagtagctagacaaaccagtggaaagatagagaatattactggcaacactgctaattcccctattgtttgccatcaggatctttgatattcagtgagtagaatttttaatctttactttgggaagaaaaaacaygaggcagatttctctgaattaacagagtactatgacaagatcatattttaaaaagtcttatgtatttaacacctttaaatacctactttgtgttttaattacatactttgtgttttaaacaattttttctgttatttagatgagatttagaaatgtcaaaaatcaagaaaataggaaagagaaaattattcataacattagcaacaaaaccattttaaaagaatatgtctaattttctttttggtacatggtgattgagaagtttttaaaaatgttgcctctcctgaaggaaaagat

SEQ ID NO: 216401 - DNA, 277 bp, Homo sapiens
agctctgctaagcatcattaaagaaaagcaattcaaccaaaagataggtaagaccaacatgaagttaattcctactgcttcyattgataagaccagaaagcaaaagaagcatttttttttcttttttaaaaaaattgtatgtaggtttactaacattttcagttactggaggttagtactagcaatgattaaattattctcaaactgtcaacgtgattggggatcatttgagatgcaggagaccagatagtcaaatataaggtaaaaccagtggtaa

SEQ ID NO: 216402 - DNA, 496 bp, Homo sapiens
tagccattaacacaggagtaaaatggtgtctcattgtggttttaatttgtatttccctgattattaatgatgtagagcatttttcatatgtttcttggccatttatacatcttctattgagaactgtctattcatgtatttggccactgtttgatgagattgttttattcttgctgatttgttcgaggtccttttagattctggatattagccttttgtcaratgcatagtttgtgaaaattttctccaactctgtgggttgtctgtgtactctgcggtttcttttgctgtgcagaagctttttagtttaattaaatcccatctatttattttgtttttgttgcatttgcttttgggttcttggttatgaagtctttgtctaaggcaatgtctagaagagattttttgatattatgtcttagagttattatggtttcaggtcttagatttcagtctttgattcatcttgaattgatttttgtataaggtgagagaa

SEQ ID NO: 216403 - DNA, 544 bp, Homo sapiens
ttagtgaggaaggcatggctaaagttgagacaggctgcaagggaagcctcttgcaccaaacagttacccagcttgtaaatgcacagtgagagtccttaaaggaattcaaaacagctagtttagagaacacacgaatgataagaaagtcaaacaaacttattgctgatttggagcaagtttttgtggggctgtagagagccccaacagtcccccaagccaaagcctaatccagagcaagcccctaactctcttcaactctataaaggctgagacagataaagaagctgtagaagaaatgattgaagccagaagaggttggttcatgaggtttaagaaaagaagctgtctccgtaatataaaagtgcaaggtgaagcaacaagtgctgatgtagaagcagtagcaagttatccagaagatctagccaagataattgatraagatggctatactaaacaacaaattttcaatgtagatgaagtagccttatattggaagaagattccatctaagacttttatagctttagagaaaatgtcaatgttt

SEQ ID NO: 216404 - DNA, 577 bp, Homo sapiens
tcattaacattttgattgggattgcattgaatctgtaagttgctgtgggtagtatagacgttcattagtaattattctaatccatgagcaagagatacttttttattttcttgtgcctcctttaatttctttgccagtgttttacagttagttttctttgtagagatctttcacttctttgttaaatttattcttatttttttktgtgtgtggctattgtatatgaaattgctttcttgatttctattttagattgtccattgttgatatataaaaatgctactgattattgtatgttaatttcatatcctgaaactttgttcaattttcttattgttctcagagtttcttggaatctttagatttttcaaaatttgagatcatgtcatctacaaataaggataatttgacttcttcctttccaatttggatgccctttatttctttttcttgcctaattgctctaactagaatttctagtactatatggtctaaaagtaatgaaagtggatatctttggtttgcttcagatcttagttttcaatttttattttccattcagtatattaactgtggg

SEQ ID NO: 216405 - DNA, 621 bp, Homo sapiens
ataaagcacagtctcatttatttgggtgttgtaataaaaatrtaggtagtttggagtaggcttctttttttctctattccttattaattgtagagtggagtaaatacaatatgaactccacaaggaccaatttccataggacctaatgttcattagaccccattatttcaggagcaatacaaaaggatgctattcgatctcactgtgtgctttgggatgatcaaaagttcaccacagcaagtatctagtgtgacaccttaaagggattagtttaacaccttttgctactggagttggactgagagttcgcagctactcagttccttgtacagactgcattgatgtggccacatttagctatgtggagcttttctatcgcttttgtttagaatcccttttatctttacctatgggaaattatttgttccttgtgatatttatatatattatgcgttctttgtgaaatccttaggtggccaaccacgagaccacggctgcttctatgttcctcatttcttcatattaagcttacaggggacccctgaattcccattgcattgtcatcacagggttttgaagcaacttgtacttcttttaccatatttatataacataaatatc

SEQ ID NO: 216406 - DNA, 621 bp, Homo sapiens
ataaagcacagtctcatttatttgggtgttgtaataaaaatatakgtagtttggagtaggcttctttttttctctattccttattaattgtagagtggagtaaatacaatatgaactccacaaggaccaatttccataggacctaatgttcattagaccccattatttcaggagcaatacaaaaggatgctattcgatctcactgtgtgctttgggatgatcaaaagttcaccacagcaagtatctagtgtgacaccttaaagggattagtttaacaccttttgctactggagttggactgagagttcgcagctactcagttccttgtacagactgcattgatgtggccacatttagctatgtggagcttttctatcgcttttgtttagaatcccttttatctttacctatgggaaattatttgttccttgtgatatttatatatattatgcgttctttgtgaaatccttaggtggccaaccacgagaccacggctgcttctatgttcctcatttcttcatattaagcttacaggggacccctgaattcccattgcattgtcatcacagggttttgaagcaacttgtacttcttttaccatatttatataacataaatatc

SEQ ID NO: 216407 - DNA, 621 bp, Homo sapiens
ataaagcacagtctcatttatttgggtgttgtaataaaaatataggtagtttggagtaggcttctttttttctctattccttattaattgtagagtggagtaaatacaatatgaactccacaaggaccaatttccataggacctaatgttcattagaccccattatttcaggagcaatacaaaaggatgctattcgatctcactgtgtgctttggratgatcaaaagttcaccacagcaagtatctagtgtgacaccttaaagggattagtttaacaccttttgctactggagttggactgagagttcgcagctactcagttccttgtacagactgcattgatgtggccacatttagctatgtggagcttttctatcgcttttgtttagaatcccttttatctttacctatgggaaattatttgttccttgtgatatttatatatattatgcgttctttgtgaaatccttaggtggccaaccacgagaccacggctgcttctatgttcctcatttcttcatattaagcttacaggggacccctgaattcccattgcattgtcatcacagggttttgaagcaacttgtacttcttttaccatatttatataacataaatatc

SEQ ID NO: 216408 - DNA, 621 bp, Homo sapiens
ataaagcacagtctcatttatttgggtgttgtaataaaaatataggtagtttggagtaggcttctttttttctctattccttattaattgtagagtggagtaaatacaatatgaactccacaaggaccaatttccataggacctaatgttcattagaccccattatttcaggagcaatacaaaaggatgctattcgatctcactgtgtgctttgggatgatcaaaagttcaccacagcaagtatctagtgtgacaccttaaagggattagtttaacaccttttgctactggagttggactgagakttcgcagctactcagttccttgtacagactgcattgatgtggccacatttagctatgtggagcttttctatcgcttttgtttagaatcccttttatctttacctatgggaaattatttgttccttgtgatatttatatatattatgcgttctttgtgaaatccttaggtggccaaccacgagaccacggctgcttctatgttcctcatttcttcatattaagcttacaggggacccctgaattcccattgcattgtcatcacagggttttgaagcaacttgtacttcttttaccatatttatataacataaatatc

SEQ ID NO: 216409 - DNA, 564 bp, Homo sapiens
tagaaagatgctacatggaacaaggacaacaactgcctygcttctagacatggttgtatgtagagtgtatataaaatagtattttcttgagagagtcattaaaagcagtgtagtggcggggggaaacaaactttcaaagatgggactaaagatgttacaggatcgtttgatcatgagttacaaactggagtatttgggggttcataagaggttagtgattgagtcacatgatccgctgtaaagagccagagataaacagtctgaaagataaaatagaagggaggaggattcttcctgggaagattggagtgatcagaaatgttcgtgatggcattcattagaccagaatgcttccgtgggggagtgaagaattaatggtaaatgtagcttactttagggacacatctctttgtcagtttacagcaatggtgctgacaatgttggggataggagttgcgtttgctttttctacatttttgctcatcttctttccaaatggcaagaggctatctgaccccatctttggctgaaatggggaaggaggagagttacaaaatagtacat

SEQ ID NO: 216410 - DNA, 576 bp, Homo sapiens
accctgtcttcctaggatttacagtttttaagagtgcaaacttaacactaataggacaagatagtaattcacaggtgcactttgggtctcagttcaatgttactgaatggtcttccctgaatctctcaacttacaggttgcattatagtggcctgtattcttctggagtccttttcaatcaggtgtaagttttgtgagctctgtcaacgtgtagacattatcagcatcactcatcacctaccactgtaactctgatactaacaggaatcaacmaatgtcctatgtatggcttttgaactaataacagttttcactttttcaaagggtggtagaaaaattagaggaagaagaagtaggaggaggaagaaaagggtgaggacaccatggaaagcaaaatgtgtgtggtccacaaagtctaaaatatttactgtctgtccatttacagaaaatttgctcaccctcttagcacatagtaaaatcccaagtaatatgtgttaaataaatgcataaatgacatttcagagcattgggcactcaaaagtacagtgacacagatagtaccagatactcacatcc

SEQ ID NO: 216411 - DNA, 576 bp, Homo sapiens
accctgtcttcctaggatttacagtttttaagagtgcaaacttaacactaataggacaagatagtaattcacaggtgcactttgggtctcagttcaatgttactgaatggtcttccctgaatctctcaacttacaggttgcattatagtggcctgtattcttctggagtccttttcaatcaggtgtaagttttgtgagctctgtcaacgtgtagacattatcagcatcactcatcacctaccactgtaactctgatactaacaggaatcaacaaatgtcctatgtatggcttttgaactaayaacagttttcactttttcaaagggtggtagaaaaattagaggaagaagaagtaggaggaggaagaaaagggtgaggacaccatggaaagcaaaatgtgtgtggtccacaaagtctaaaatatttactgtctgtccatttacagaaaatttgctcaccctcttagcacatagtaaaatcccaagtaatatgtgttaaataaatgcataaatgacatttcagagcattgggcactcaaaagtacagtgacacagatagtaccagatactcacatcc

SEQ ID NO: 216412 - DNA, 614 bp, Homo sapiens
tttacttttataattacaaatatatttggaaacattctagaactcaaagcagagacatagtgtagttatctaatgactttggagaaaatctgcttcgttttgattcttggcttacctcatattctgagtgatcctgggtgactttcttaattattcagtgtctcagatttctcatctgtaagaatactagtattggtaccccccaaaatcatcatcagaattaagagattaatatatgtaagctgcttagtatcttcaaaaacctttattatttgaaataagcaattgagaattttttaattgttaaaacagatgtaatctatttttcatttcccttgacaaaaccatagtctgagtaactcatygtcttctcaagtgagccaattaactattcctcaccatctgtttggccagtgatctagtcccttgctcccagtcatatgcaacggactttaagagtatagaggtctaagaatgctggaagggcaccagattgaagagtatttggctatgagaaatcaccagagggggaaaaaatatatacatacgtgtgtgtgtggtgtgtgtgtgtgtgtataaatatttagatggaataaaatatgccactttaaaaa

SEQ ID NO: 216413 - DNA, 432 bp, Homo sapiens
aggttctcaacaacctccattttccacctagtttttacaaaatgatagaaaataaagaaaattaaaatcagctataatttgtatgaatagcttaccgaagagtcctttcacatgtaatcccaagaaaatcatgcaatagtcttttaaagaatattcagacaccatcccaatatttgttcaacctgaaaactgccatcaaaccctatgtaataagcaaactatttttcattaatgtataytcctcttgtatgagaaatatacttgcaatatttatacataaaatttccctctcatacaactttcccattatgacttatgaggagcctgttgaatatacattgtttagcttagaggttcaaaatattttaaaaatactaaggataaattacattttgaacaaaaactcgatcatgtgacttgtttcagaactaa

SEQ ID NO: 216414 - DNA, 545 bp, Homo sapiens
attactgaaactggagaaataattaaggaaattactcagaatatatattagacaatgaaatggaaaacagagtaggaagttaaaagatttggtagatacaataagaatgtcaaatatatatttaatcagaatcccataaagggagaataaaaacaacaggcaaaaaaataataatttatggttgtaaattttccaccaactacagaacaaaaattcatcaaggaaacctaacgaatttcaaggtggattaaaaaaatcacaaaaagtagataaattgtaaggaaactgaaatactaagtagagacaatcttaaagcaactagaargaatacatcaaaacagaccaacaattagcctggcagcgtctctcccaaaaataatggtagcaagaacacaaggacagtatttttaaagtgctaaaatcaacagcaaaaactacacccccctcaacaaagctatcaaactagaatgtttacaacactcccccctccacacaccaacattatttttcaagattagaaataaaatactgcctccttcaaataa

SEQ ID NO: 216415 - DNA, 545 bp, Homo sapiens
attactgaaactggagaaataattaaggaaattactcagaatatatattagacaatgaaatggaaaacagagtaggaagttaaaagatttggtagatacaataagaatgtcaaatatatatttaatcagaatcccataaagggagaataaaaacaacaggcaaaaaaataataatttatggttgtaaattttccaccaactacagaacaaaaattcatcaaggaaacctaacgaatttcaaggtggattaaaaaaatcacaaaaagtagataaattgtaaggaaactgaaatactaagtagagacaatcttaaagcaactagaaggaatacatcaaaacagaccaacaattagcctggcagcgtctctcccaaaaataatggtagcaagaacacaaggacagtatttttaaagtgmtaaaatcaacagcaaaaactacacccccctcaacaaagctatcaaactagaatgtttacaacactcccccctccacacaccaacattatttttcaagattagaaataaaatactgcctccttcaaataa

SEQ ID NO: 216416 - DNA, 514 bp, Homo sapiens
ggcaatacagcgagactcggtcgaaaaaaaaaaaaaaaaggaaaggaaagggaagggaaagggaagggagagagagagagaaacaaacaaacaaacattccagaataaaggagaccaagaagacatgacaacaaaatgcaacatgtgttcccggattgaatcctggatcagaaaaagcgtatcagaggaacaagaacaaaacatgaataagatktgtagcttacataaccgagttaatcaatgttaaccacctgacagggactccgcccaggtaccatacaaagcaatctggctgaaagtctttatgtgtcactctagagaccatgttttcctgtttgttgtaaagaatcatcatcagcactgaaaaccaggccctgctgcttttttagcatctagagctctctcagacctgggctgcagacttccacatgtatttttctgatatagaccttatatacagatttttcccttaaaaagatgtcaacttggaaaatgatggattttaaaatgggtt

SEQ ID NO: 216417 - DNA, 609 bp, Homo sapiens
taagcctgaagttaggagaaggaaggaaacaatatagagcagaaatgaatgaaatagtgggaaaatggtagaatagatctacgaaactaagagtgagtttttttgaagggctaaaaaaattggaaaatcttttgctagaccctgaatagtcaaaaccgtgttgaggaaaaagaacaaagctggagggaatcacattacctgacttcaraatatactacaaagatacagtaaccaaaacaacatagtactggtatataaatacacatagacaaatggaacgttatagaatgcccataaatcccatgtttatagccaacggatttagacaaaatttcctagaacacacaatagagaatgcacaatctcttcaataaatgttgttgggataactgaatatccacacacagaagaatggaattagacccttatctcacaccatatacaaaaaccactccaaatggattagggatttaaatgtaagattagaatctatgaaactactagaagatacataggagaaaatccttatgacattgatctgggcaatgacttattagtatgactccaagagtaatggctacgaaagcaaaaatagacaaattggtgtca

SEQ ID NO: 216418 - DNA, 490 bp, Homo sapiens
tcacaaccacaatgagatatcacctcatgcctattagaatggctgttatgaaaaggacaaagataagtgttgacaagaatatggagaaaagggaacccatacattcccttgttagtgggaatgtgaattaccacagccattatagaaagcagtatggagattcctaacaaattaaaaatagaactaatgtatcatctaccaaccccactactagctacatatacaaaggaaatgaaatcattatttcaaagagacatctgtactcttatgttcattgcagcatttttcacaatagctaggatatggaatcaacctaagtgtccacaaatggatagataaagaaaatgtgatacaaacacaattaaatactctttggccrtgaaaaagaaggaaatcctggcatttgcaacaacgtggctgaatctggaggacattatattaagtgaagtaagccaggcacagaaagacaaatactgaatgatgttgctca

SEQ ID NO: 216419 - DNA, 591 bp, Homo sapiens
tctagtgtaggccctcagtgactgctgagtgaccagtatgtaatgtgcaaatatgaacaaacacttataagctgtataaggacatcatagatttgagtagtagtactttttcatttaatgtactactctattggtttctgtttatactatagatagtgtattcctgaaagtgtgtaaaacatgaacagaatagtggttaaattatttatgtttttataggttcaagttatagmggtaaaagttaataaattacaaattgtaggctagtatcattcataaacatgagtacaaactgatttatcccagggattcagagatagtttattattaaaaattcaactgtaataatttaccatatattcaaattaaaagctagtgacatcatctctatagttggagaggagatgtgattaattcagcacaatcatgataactcttagcaaattataatgtcttggtaaagttatacaccaaaaatctaaatctaacatcaaacttaatgtgttaggaacattacctttaaattgaagagcaagaaaagaatggccataatcaccatttctattcaacctggtactgggtgctttaact

SEQ ID NO: 216420 - DNA, 298 bp, Homo sapiens
cctgctaaaaacacaccagtcctcacattttcttcaaatatatatccaattccttaggtagaccaagtagggtcttcatgtcaggaccctggcttagcctgcaatttcatctcatccctctctttgtcatgggtcctactcttcatcccaacracactccttagatattccctaaaaggcagagttgtttgtgcctccatgccaatatctatattgtgtcctcagctttgaatcacctttccttgagcctcttctctctcttactcattcttcaagatttattttaagcatctctagc

SEQ ID NO: 216421 - DNA, 560 bp, Homo sapiens
tccattggctgggtttatgatgctctgcctcactccctctgccccgaagtaaagctgaattataaagtagggctsgtcttatcttgggcagccatgcaacaatggtttctggaggtgagtgttgaaatatgtcttggggctttgggaaatgttttcaattcagcattctgtgatccttgtccaaagatccttgatagcatcctttaggcatcactgaaacaatcagcacacacacaaaaaaaaacaaaacaaaatctttgcattcatatgccttaaactaacaagtaaagaagcaaatatctagaaaacattttgtagactaagtaaaaatatgactataattacatatatataaaaataataataatgtagtcatgtacattcatagatagtcatatatattagggttcagagtctttgagaagaatattgcctaggtgtcagaagatctgggttttagtccaagttcatcattaaccaggaaacctaaaacaaatggcttggctttctttacattccctatttatataataaaagcattgactatataaactaattgt

SEQ ID NO: 216422 - DNA, 560 bp, Homo sapiens
tccattggctgggtttatgatgctctgcctcactccctctgccccgaagtaaagctgaattataaagtagggctcgtcttatcttgggcagccatgcaacaatggtttctggaggtgagtgttgaaatatgtcttggggctttgggaaatgttttcaattcagcattctgtgatccttgtccaaagatccttgatagcatcctttaggcatcactgaaacaatcagcacacacacamaaaaaaacaaaacaaaatctttgcattcatatgccttaaactaacaagtaaagaagcaaatatctagaaaacattttgtagactaagtaaaaatatgactataattacatatatataaaaataataataatgtagtcatgtacattcatagatagtcatatatattagggttcagagtctttgagaagaatattgcctaggtgtcagaagatctgggttttagtccaagttcatcattaaccaggaaacctaaaacaaatggcttggctttctttacattccctatttatataataaaagcattgactatataaactaattgt

SEQ ID NO: 216423 - DNA, 600 bp, Homo sapiens
ttcagacaaatttcaactcttcatgtaatacagttactcatgcatcatcagtggatgatgagatcattgggagaaaggttattgtcaaacaatattcatacagtgccaaatataattttaaaaaaacatacatgtgttaaaagaattaaatcaaacatgacaaaatataaacaactggtgaattaagctgaagacaaataggcatgtatttaattattctttctgctggtttgataacttttaaaattaaaagttgaggcaaaaagccctttctcttataccagctaaattaattataaattttaaatstttgatttcttttagataaaatatttgcatgatctgtgatccttcatggactaaaggttattcatgtggtggctacaattttttattataataaatttgccataaggtattgtcattttgactagaaagtataaatattttcattaggtagaagttttttgtttgcttgattttttaaaggaaatattaatcacaatgaagaattggttcattgctttatactgcacattccttctcattgtttctcttcaggaagcttatgtattattaaattctggtattctgagtgac

SEQ ID NO: 216424 - DNA, 600 bp, Homo sapiens
ttcagacaaatttcaactcttcatgtaatacagttactcatgcatcatcagtggatgatgagatcattgggagaaaggttattgtcaaacaatattcatacagtgccaaatataattttaaaaaaacatacatgtgttaaaagaattaaatcaaacatgacaaaatataaacaactggtgaattaagctgaagacaaataggcatgtatttaattattctttctgctggtttgataacttttaaaattaaaagttgaggcaaaaagccctttctcttataccagctaaattaattataaattttaaatctttgatttcttttagataaaatatttgcatgatctgtgatccttcatggactaaaggttattcatgtggtggctacaattttttattataataaatttgccataaggtattgtcattttgactagaaagtataaatattttcattaggtagaagttttttgtttgcttgattttttaaaggaaatattaatcacaatgaagaattggttcattgctttatactgcacattccttctcattgtktctcttcaggaagcttatgtattattaaattctggtattctgagtgac

SEQ ID NO: 216425 - DNA, 443 bp, Homo sapiens
aggcatgttgcctgggttggtctcaaactcctgagctcaagtaggggcctgtctaggccgcccaaattgctgggattacaggcatgagccaccacgcctggccctgacacccattttaaacacctgtttgctgtgaggcaactcatccaactccccctcttttcctcaaactattactaaaaacctgcatgctattattccagttacatgactcagatattgcaaatagacagccatgaagtattatcctggtggaaggataatgccctggcaggaatgtcctggggaagtgtatagccagtgggatgttcctaaagaggcacacattttcactgtgaatagaagaaagtgggctctcttaggatgactacaagaaaagaaatcaaagtcaggaactggggtrttccctagagggaaaccaaaagatggggtttgagcttctt

SEQ ID NO: 216426 - DNA, 662 bp, Homo sapiens
tggtattattgaaatcatcattgttagtattaacattttcccaatgaaaacagatgctccagaaagatataccacagtgggcatcatctaattcctaatatagtggtttgctttgtaaatattttgtttttatttttaatttattccatcaggcaattgatggtaatttttttaatgtgataactcacattcacatgtaatttacataaactcattaaaccccaattctgttttctattattctagraaatttcaatccaagcctaaaattgtgaactgcagaggtaatctgaaggttaaaattactcttctagtttttaatgctgatttttttaagtgatttaagatagaaaatacattagaaaatatttaagcagaatttggtagtctctcagtgatttaagagtaacatgatctaaaataaatgagtaaaatgtgaatcaatacaactcaattcttataatatagggaatgtgcttcctccaaggctcaaacaatatgaaatagagaaaagccatgatctcacctgatcattctcaagtggtacatcattcaagcaatggggcttccctcatttccaagattattgctctatgctaaggataaaagcctgttggaacatttgccagatcctattttcccaggctcatttgttcactcta

SEQ ID NO: 216427 - DNA, 662 bp, Homo sapiens
tggtattattgaaatcatcattgttagtattaacattttcccaatgaaaacagatgctccagaaagatataccacagtgggcatcatctaattcctaatatagtggtttgctttgtaaatattttgtttttatttttaatttattccatcaggcaattgatggtaatttttttaatgtgataactcacattcacatgtaatttacataaactcattaaaccccaattctgttttctattattctagaaaatttcaatccaagcctaaaattgtgaactgcagaggtaatctgaaggttaaaattactcttctagtttttaatgctgatttttttaagtgatttaagatagaaaatacattagaaaatatttaagcagaatttggtagtctctcagtgatttaagagtaacatgatctaaaataaatgagtaaaatgtgaatcaatacaactcaattcttataatatagggaatgtgcttcctccaaggctcaaacaatatgaaatagagaaaagccatkatctcacctgatcattctcaagtggtacatcattcaagcaatggggcttccctcatttccaagattattgctctatgctaaggataaaagcctgttggaacatttgccagatcctattttcccaggctcatttgttcactcta

SEQ ID NO: 216428 - DNA, 428 bp, Homo sapiens
aatttttactttggaacatattggggaacaaattttgattatagatgaataaatcatctgatttatttgaaaaaatacattatgcttaaattagaggaaaaaacattgtaaacgatccttttatccttattatatttttaaactgatagaacatttcaatgatactttaaactatgtgtttcagacttacagctcaattcaatgaaagaytattgaggcctatggaggagacagtgataaaggtacggatccctcagcaaagatcttagattctttcctctatttgctccttttccttcctccctctcttcctttaattttttttcctttcttctgatattttacagtgtctgagataacattttcattagaatttccaaaagaataatcagagcacttataggaaccaaatagagatcaaaatttta

SEQ ID NO: 216429 - DNA, 534 bp, Homo sapiens
tagaaagaaaatcttggctttatttagcctatattttagcaaaagagaccaataatagatggtctaagtaaattatgtactgtgtcatatggtgttgaagactaaggagataaagaaagcagggaaaggagataggaagtagtgggatgggctgaagttccaggtagaatgcatcatctactgaagagaagakcatcaagagacgggtaagtaagagaggtgatagagagtgagacaggtcatacaatgagttttagatcctagcaataatttttactttaagtccaaataagatggaaagccataggagagttttcaacagagtagtgaaatgatatgaccttggtttaactgcattcttttggttctgggttgaggatagataaaagaataagtagcaccgactcaggtaaaagatgagagtggtggaaagtggtaagttctggatcttctttgaaggtagagtgggaaagattggctgactggattagtgtggggtgtaaaagaaacatagaagtcaagaatgacatcaat

SEQ ID NO: 216430 - DNA, 534 bp, Homo sapiens
tagaaagaaaatcttggctttatttagcctatattttagcaaaagagaccaataatagatggtctaagtaaattatgtactgtgtcatatggtgttgaagactaaggagataaagaaagcagggaaaggagataggaagtagtgggatgggctgaagttccaggtagaatgcatcatctactgaagagaagagcatcaagagacgggtaagtaagagaggtgatagagagtgagacaggtcatacaatgagttttagatcctagcaataatttttactttaagtccaaataagatggaaagccataggagagttttcawcagagtagtgaaatgatatgaccttggtttaactgcattcttttggttctgggttgaggatagataaaagaataagtagcaccgactcaggtaaaagatgagagtggtggaaagtggtaagttctggatcttctttgaaggtagagtgggaaagattggctgactggattagtgtggggtgtaaaagaaacatagaagtcaagaatgacatcaat

SEQ ID NO: 216431 - DNA, 608 bp, Homo sapiens
ctgctgttctcactttctcttcctttacttcttctccagcttcttcacctagctaacttctatttgatgattcaaatataactttctctaggaaggctttcctggtcactgttaacatcttccccccaccttacctccygtttgattctctttcccattatttttgtgatagttgaaagctgtactttcccacatacaccacactacattataatttctcctcatcttcaacttctttatattgaaaatcactcaaaaccatacagttatatggaaattacattacctgctcctgaatgacttctgggtaaataatgaaattaagacagatatcaagaaatgttttgaaactaatgagaacaaatatgccacatactagattctctaggacaaaccaacagcagtgttagaatgaaagttgacagtactcaatgcccacgttaaaaaattagaaagatctcaaattaacaacctaacatcacatttagtggagctagaaaaacaagagaaaatcaaccccaagggtagcagaatacaataaataaccaaaataagagctttactgaaggaaattgagatgtgaaaaattatgcaaaagatcaatgaat

SEQ ID NO: 216432 - DNA, 608 bp, Homo sapiens
ctgctgttctcactttctcttcctttacttcttctccagcttcttcacctagctaacttctatttgatgattcaaatataactttctctaggaaggctttcctggtcactgttaacatcttccccccaccttacctcctrtttgattctctttcccattatttttgtgatagttgaaagctgtactttcccacatacaccacactacattataatttctcctcatcttcaacttctttatattgaaaatcactcaaaaccatacagttatatggaaattacattacctgctcctgaatgacttctgggtaaataatgaaattaagacagatatcaagaaatgttttgaaactaatgagaacaaatatgccacatactagattctctaggacaaaccaacagcagtgttagaatgaaagttgacagtactcaatgcccacgttaaaaaattagaaagatctcaaattaacaacctaacatcacatttagtggagctagaaaaacaagagaaaatcaaccccaagggtagcagaatacaataaataaccaaaataagagctttactgaaggaaattgagatgtgaaaaattatgcaaaagatcaatgaat

SEQ ID NO: 216433 - DNA, 438 bp, Homo sapiens
ttgcacaggctgttagcaaactcctgggctaaaacaatccttctgcctctgcctaccaaagtgttgggatttcaagtgctagtcactgcacccaggatttattttttttaaataaacacatttagaatcactgtttttcccactaaataaacattctgatattttgaaatttaactatcttgcatgaagaacttaatactctcaagatttcaccttcaacccattggttagatgaaagtatgattttaaattttccaaacttgaaaatggtttttrttatctatttgacactgattttcaggttaattggattgttgtcagaaaaaaaagtttgtgcattaaaatgtattgagatttcctgtatgaattatttcactattttacatgcttttgagagaaatacagagtcttaatgaatagcacaagaactgtaaaatg

SEQ ID NO: 216434 - DNA, 535 bp, Homo sapiens
actcaatcaaattagtttacttacttgctttctttcaagcatgctttgtgctttccttctccattaatttcttcatgagagttttgagcagggaaaacctttattcctttttacctacatcttagtcatgtctcacttccctccatttctctcccttctcagaaacttttccacagcattctaactctaactcattgtgacatcattcttatttcagttcccaaaatttcttatggccattctaaagctcatcactggcataacatgcataacatgctctcataccttatggtggggagcctgtggtctgagtgattatgctgggggggcaagtgttgtggtaagaggcagatagacaagaaaagcttgaaggagtaccctttgattaaaaaatgcaaagtcaaatcagtagtcaatcaattggagaagactgaggcataagatattgagacaaaatcgcagatgacaaaaataaagtagaaawgatagaatagtggtgtgagtagggaaagatagggtaactcagattaattta

SEQ ID NO: 216435 - DNA, 498 bp, Homo sapiens
aattcttctgaaattcctccaaaatattgaagcaggaacacctcctaacttattctgggtccagtatcagcctgattcaaaaaacaaacaaataaaaccactgtaacataaaaaagctacagactcatatgctgtataaatatggatgtaaaattctcaacaaaatactaccaaactaatttcaacaatatattaaaattaaaatacactcaaaatcaaggggaattrtttattggatgcaaggatgtttcaatatatgcaaatcaattaatattatacacattaacagaatgaagaaaaaatactatgtgaacaactgaatagatgcagaaaaaaatttacaaaattaaatgttcttacatgaataaaaattcaaaaagctaggaatagaaaaatatatttccacataataaaggccatatatgaaacatccatagctaatataattaatgactgaaagcctttcctctaagatcaagaacaagacaaggatgcctg

SEQ ID NO: 216436 - DNA, 447 bp, Homo sapiens
gcagtaattgaaataaaaacttccccagaggagctcaacacagattagacttagcagaagaacaaataactaaatatgaagatagatcagttgagattgtccatgtgaggaacagaaagaaaaacaagcaaataaacataaacagagctagacatctgtagtacgcccccaatcacacaaacatatgcatcatgagagtttcagaagrgaaaaaagaaagaggtagagagaatatttgaaaataactgatgtccctaatttttccaaacattaatcttcacagccaagaagctcaacaaactctaagttggataagttcaaagagagactcttcaaagcagcaagggaaagcaattgataagataccattaataatattaatagacattctcagaaaccatagaggcaagaatagagtagaatgacatgttcaaagagctaaacaaa

SEQ ID NO: 216437 - DNA, 583 bp, Homo sapiens
atgtattacagaatccataaactcttgtgacatgtgaacaaaattgagctccacttgctaagagggctgcgctcatcctcctgggtcccaaagtcacccagagcagaaacaccatgtattaaatatactgtcactttttctctcctcatgagggctggatgttagctggccctgaccagcccttctctcaagtcctttcaggaactcaatcagctgtctgttgccatatcctggactccttcctccctttctgtaccgtttttctgggggtaatgcattttattatttatttccaaaatggtgtgcccagtggttttatgtacatttaaaattcttttttcaaataatataagattaatccattctttttacttgtattagatcatttgttcactggcacaataaatgtaaaagacagatgagattagattaactttattagtcagattgttacgaagtctsaaggtctttagggagaaaacagattactgttttttacaactggaaattttttcaggtggctcagatgctctagaaaacaggtagaaattattttacttttaatgtatacctgttcaagctt

SEQ ID NO: 216438 - DNA, 595 bp, Homo sapiens
ctgtgaacaaaagttctggcgttaacatctgtctcactagatcctgatgttatacccgtctcattagattataaagtatgccctttgcttacctagttctcatgtttaactctagctctgtaagaaaagaatccatccaattaggtgaaagtattattcctgaagcccagcatagtttttggcatgtcttaatcattcagtaagtgcttgatggaatttaaaaacaatcacattatttcttattcatttttttctttgtttgctacagttgcatctatcaaaatcctatctgggaagctgtgtctaacatatccaaataatttatagtgcaaacctcaacagaagcttctacagttttgccaagttccccttggccatctctcagttttctaccaaaaatgttttctgttatctcagaaatattttctagagttaggaagagtccagactgrctcatttgaattaagtcctccctttgtcctggttggcttctatgactttgagaaacttacttaacatttttgagccttgctctctttatttgcaaaacaggaatgactatggtaacctccagaattatgctaacagccaaaga

SEQ ID NO: 216439 - DNA, 581 bp, Homo sapiens
tacaagctcagccacagtggggtaatgcaacaaatgggctcctagggtttccaactccagattttgacttttgtacagcattactggacctggctgggtgagaggggagcccacttccctaaagggtgagttccagggctggcagcattcactacaatctgacggaagagccattaagccttaagtgaacgtcagcgatagcctggcaatactctgcatgggcctgtggtggtggtggccatgggatgagccccctctgcctgtggaaagataaaggaatagtgaaaagagctgtgtctcatggtttcagtgcagctcagttgcagtagaatagaacaccaggtaggtttctaaagttcttaactctagtctctggctgccagatgaaatctctggatctcactcagtgcctgggggaacttgtcagcccaaagggaaagacagaaccctggctggctttgtcacctgctgactatagagccctagggccatgagtgaayattggcaatagcgaggtagtggtaacagtgggctttgggcaagacccagttctgtgctggcctctggtctgacccagcaca

SEQ ID NO: 216440 - DNA, 539 bp, Homo sapiens
ctataacaagcaggatttaatcagaaatcaaaaacttcccaacaaagaaaagccctggactagatggcttcactggtgaattctcacaaatatttgaagaagaactaaaaaatgtgttatcaaatttatcttgccagtttttaaaatatatattttttattttagattcagggtatacgtgcaggttcattacataggtatattgcatgatgctgaggtttgggtttatattgattccgtcacccatatrgagaacatagtactaataggtagtttttcaacccttgccccttgtccctctttctcttactttttggggtctctagtgtctatttttcccatttttatgtgtatgtgtgcctaatgtttagccctcacttataagtgagaatatgcagtattttgtattcagtttctgcattaattcacttaggataatggccaccagatgcatccatgttactgcaaagcaaataatttcattcttttttatgcctgcataatattccatggtgtctgtactacatttcttttatccc

SEQ ID NO: 216441 - DNA, 562 bp, Homo sapiens
atataaaaacaaggtttatttttttcattttggttggtaacttcaggttttatttcttacagcatttttaaggctaatgaataaatattattataaatctatattaattgagtacataataactaatgatgtaatttgtgacatcaataacctcaaatagggggggctgtaagggtggggagtttttgtatgtaactaaatttaacttggtatcaccttagattgttataacttcctaatgttataagtaatctccatggtaacaaaaaataaaatctgtagaatatttgtaaaaggaaatgaaaagggaatcaaaacagtccactaaaaaattaattaactacaatagaagatgattaagaagaagacaatggattcttataaaccattcaagacaaggagaaaacaaaaaacaaaatggaagagtaactccttccctataaatgtcattttagttttacatagattaacttctctgatcaaaaaacatagtttsagaaaatgtataataaaacatgatccaactatagaataactttacatggaaggacatacaaaattt

SEQ ID NO: 216442 - DNA, 549 bp, Homo sapiens
taatagtaactaaaataagataaaagtttactttagctgtgcacaaaaatctggattggcacttgaggactgtatggtgccctataacatggactttacatatatatayatatatatatatatatgtatcttattgccttttatggatagtggcatccaaattccaggcagcagtttaaagcaacagagaaagaagagcaaagagcatatatctctatctcatcaaaaagatttcaagaagctgctacataaacacttctgcttaccatccaggtgacctgcatttagtcatatggctatacctagctgcaaagggaaagtgggagctgtagtttccattctgggaagccatgtgccccaaattggaggcttgatcaccattgaaatatgggagaatggatattgcaggataagttgtgcattcccaaatatccatgaacacactactcacttctgttcacacaagaacaacatcagccccttcttaaggaaagcaactgccaaatgccataaaattactcatctactcaaagtccttgacctttgggt

SEQ ID NO: 216443 - DNA, 549 bp, Homo sapiens
taatagtaactaaaataagataaaagtttactttagctgtgcacaaaaatctggattggcacttgaggactgtatggtgccctataacatggactttacatatatatacatatatatatatatatgtatcttattgccttttatggatagtggcatccaaattccaggcagcagtttaaagcaacagagaaagaagagcaaagagcatatatctctatctcatcaaaaagatttcaagaagctgctacataaacacttctgcttaccatccaggtgacctgcatttagtcatatggctatacctagctgcaaagggaaagtgggagctgtagtttccattctgggaagccatgtgccccaaattggaggcttgatcaccattgaaatakgggagaatggatattgcaggataagttgtgcattcccaaatatccatgaacacactactcacttctgttcacacaagaacaacatcagccccttcttaaggaaagcaactgccaaatgccataaaattactcatctactcaaagtccttgacctttgggt

SEQ ID NO: 216444 - DNA, 590 bp, Homo sapiens
tgccataaaattactcatctactcaaagtccttgacctttgggtatgctggtcgctctccatcggggccagatgtagcattttgtggtttggtggcctacaaactaaaagatgttctatcggccccgtaagtgctaaaaatataatggtacaggaggagtagaataacttctgggaaacaagaaatgcataggagtcactatccatagcaattatcaaaatctgcaggacaggaattctgaaaattatggactttcttctcgggcattagaaaaggtcctggatttagtttatttggtagctcctggctttgctttctgataattccctagtcccgtgttcgctgtgatgcctgactrtatcctttgggatttagtcatttttactctcctctcctccacagctgtatcaaagtacataccccctgaggatagtccatgtcctactggtatagactaggtggcccagggattgctttttgggccgaggggagtagttgaagaatgcacaggggtgaatttccctagaaaaaaaatgtaaaagtgagagaaggagccaatgatgctacgcctgagaacatcaacatttaag

SEQ ID NO: 216445 - DNA, 398 bp, Homo sapiens
tgtttatttcttactaccataaaaggttgaactggtatttatataataaaagaggaaatatgagtacatttttggggaaaaaaaaaaccagcyttgtatctgcaaattatttttaaggcattgtgtgcttgggtacacaccaaggtaggaggtgctgttgtatactctaaagttaaagaggacacaaggtagggtttggtgcatcctgtctggtgggtgactcagctcacgggtaaaattttattctgcataagatttactactgacacatgttttgtttctagaaatgtgattagactggagatttataaattttttggctttaaactgtcaacatggaaatttagagaaaatgaaacttaaaaaaagatttgtatgtaaatcacaaagaaagtttt

SEQ ID NO: 216446 - DNA, 482 bp, Homo sapiens
ttaatatgtaatctctgtaatgattagtgatgttgagcatcttttcatatacttyatatttcatatactttatatcttcttttgtgaagtgttcacaacttttgcccacttctaaaattgggtttttgtcttctcattgagttgtgagagttctttagatattctgaatcaaagttttttgctgtacatatgtgtggcaaaatattttgcccaggggtttgccttttcattttcttaatgatgtgtttcaaagagcaaaatttttaattttgatgaagcccaatttataaaattttaaattatttgtggtctttgagttctgagaaatttttgcttgctctaaaatctcagaggtattgaaataatatgtatgttttcattgttgatttccaacttaattctattgcaatctgagagcatactctgtagaattttgatttttaaaaatttattgaaacctgttttatggttctatgctctat

SEQ ID NO: 216447 - DNA, 608 bp, Homo sapiens
caaagaacagatggatgtactctgggtctgagcagtaacccggatacctggtctacaggtgtttttcatcatcattgctatatacatgtacagtgtcctagtattcaggtagatgacatggaggcatgaggatgttttccccattwaatacgttgaaataggtaatgatatttttaaaaaccattaaaaattatattccatggatagctacttcaccagggcagatattcttgtgtaattgtatattctgctggtgggtctggaggtcctaatcccaccaaaggctatcagagttggatatgatgcagctcttttgttcacctctcttaaatcttgttatgataataagattagtgatattcccagtatattgaacacatataaattgaaccatgtagtcagaaagtaacttctttgaaatttcattgttatttaacatttattcagtgaagctggttcttctcttgtcctgaaaatgtgtgcagtcaaatgaattttctagacaatcttaagtaattcaaagagttgatatccaaaaagaaaagcagtccatcctgcataagagccatcaatcttcattaaaagataaaagttgatttaaaatggaa

SEQ ID NO: 216448 - DNA, 608 bp, Homo sapiens
caaagaacagatggatgtactctgggtctgagcagtaacccggatacctggtctacaggtgtttttcatcatcattgctatatacatgtacagtgtcctagtattcaggtagatgacatggaggcatgaggatgttttccccatttaatacgttgaaataggtaatgatatttttaaaaaccattaaaaattatattccatggatagctacttcaccagggcagatattcttgtgtaattgtatattctgctggtgggtctggaggtcctaatcccaccaaaggctatcagagttggatatgatgcagctcttttgttcacctctcttaaatcttgytatgataataagattagtgatattcccagtatattgaacacatataaattgaaccatgtagtcagaaagtaacttctttgaaatttcattgttatttaacatttattcagtgaagctggttcttctcttgtcctgaaaatgtgtgcagtcaaatgaattttctagacaatcttaagtaattcaaagagttgatatccaaaaagaaaagcagtccatcctgcataagagccatcaatcttcattaaaagataaaagttgatttaaaatggaa

SEQ ID NO: 216449 - DNA, 645 bp, Homo sapiens
tctagtcaacttttattttagattcaggtggtaaatgtgcaggtttgttacctgggtatattgcatgatgctgaggtttggggtacaattaacaccacccagrtactggagcatagtacccaatagtttttcactccttgtccccctccctccttcccccttctagtagtctccacttttgattgtggccatttttatgtccatatgtacccaatgtttagctcccatatataagtgagaacatgtggtatttggttttctgtttctgcattaatttgcttaggataatggcctccagctgcatctatgttgctgcaaaggacaagatttcattcttttttatggctgcatagtattccatggtgtagccagtttattgttgatcagcacctaggttgattccatgtctttgcgattgtgaatggtgctgcaatgaacatatgaatgcatgtgtctttctggtagaatcatttatttacttttggatacatacacagtaatgggattgctgggtcaataggtcattctgttttaagttctttgagaaatctccaaaccgctttccacagtggctgaactaaattgcattcccaccaacagtgtacaagtgttccctttctccacatcctcgccaacatctgtttt

SEQ ID NO: 216450 - DNA, 531 bp, Homo sapiens
acatttaagcattaatttctgagaaacctacttattttcttctaggtcattaactcagtgaactgagatgtgattctagtgcagcttstacagatactgtagaaagatgtgtaagagttctcaatgttatcagggtttctaccagccacaaagggaaaaatctgactttgtttttttctagtctaggattacaatcctttttcaaagatattcttgattttaatgaagctttagagctatctgcagtgcagctactgctttgcagagtatcctgtgaagctttaagagcaacagtgataaagtagattaactatttttgtgaggcttttgaaaggccactgtcctagagagggtaaggcaaattaacctgtgctgagcattctttcaatattatgtgtgtgctgcctagtttctgcactgaaagctgaagaaaaaagattgttttatttatttatttatttatttatttatttatttatttatttattttgcatttgcaatcagctatactctgcctgtgggggaaaagca

SEQ ID NO: 216451 - DNA, 515 bp, Homo sapiens
aatttctgtataagcattgtcctaattactggttcaaacacagcaggttacacctttccagaaaccartgtgcccttagtttcaaactcagactagggaaatttgtctgtgagtaggaggtagaggaagtctgttgtttttggagaaatgaggctcattacctctaatcccaagactggtgtaaatatgttctgatgtactcacgcgtaagtatgggaatatttaaaaattgaggagcactgatccatagaaaaaattcagtcaaatttattacataaacaaaaagcaagtcacatatgtgtttcagtattgttgtgattatttttctaacactaagcctttgaacagaaagcagtttctatctgatactatgatttagagctaattggagaaggaatcaattgtgggtagaggccagctattgatcagaaaaaggaatggggaactggaatgtttctcaaatagagaaaaattcagaattagaagccagagtcagggaaattgctgtttggaaa

SEQ ID NO: 216452 - DNA, 515 bp, Homo sapiens
aatttctgtataagcattgtcctaattactggttcaaacacagcaggttacacctttccagaaaccaatgtgcccttagtttcaaactcagactagggaaatttgtctgtgagtaggaggtagaggaagtctgttgtttttggagaaatgaggctcattacctctaatcccaagactggtgtaaatatgttctgatgtactcacgcgtaagtatgggaatatttaaaaattgaggagcactgatccatagaaaaaattcagtcaaatttattacataaacaaaaagcaagtcacatatgtgtttcagtattgttgtgattatttttctaacactaagcctttgaacagaaagcagtttctatctgatactatgatttagagctaattggagaaggaatcrattgtgggtagaggccagctattgatcagaaaaaggaatggggaactggaatgtttctcaaatagagaaaaattcagaattagaagccagagtcagggaaattgctgtttggaaa

SEQ ID NO: 216453 - DNA, 585 bp, Homo sapiens
tgtttccatcctggtggcatatctctcatgaatggtatagtgctgtcgccttggtagtgatttctcatgagatctggttgtttaaaaatgkgtggcacattttccttccctctctctcttgctcctgctcttaccatgtgagatgcctgttccccttttgcaatccaccatgactgtaagcttcctggggccttcaccagaagtctatgccagcactatgcctccggtacagtctgcagaacagtgagccaattaaacttcttctttataaattaccctgcctcaggtatttctttattgtaacacaagaatggcttaatacatacacaatgcaagataaggatctaactttcttcttctgcatgcagagatccagatttttccaacatcagttattgacaagactattctttccctattgtatgttcttggcacctggccttcatgatttctaatgacaaatacacagtcattctaattgttgttctccataaacaatgcattatttttctttggctgctttgaaatattttttccttgtctttagttttcagtggtttatgatgtgtctagacattgatttct

SEQ ID NO: 216454 - DNA, 585 bp, Homo sapiens
tgtttccatcctggtggcatatctctcatgaatggtatagtgctgtcgccttggtagtgatttctcatgagatctggttgtttaaaaatgtgtggcacattttccttccctctctctcttgctcctgctcttaccatgtgagatgcctgttccccttttgcaatccaccatgactgtaagcttcctggggccttcaccagaagtctatgccagcactatgcctccggtacagtctgcagaacagtgagccaattaaacttcttctttataaattaccctgcctcaggtatttctttattgtaacacaagaatggcttaatacatacacaatgcaagataakgatctaactttcttcttctgcatgcagagatccagatttttccaacatcagttattgacaagactattctttccctattgtatgttcttggcacctggccttcatgatttctaatgacaaatacacagtcattctaattgttgttctccataaacaatgcattatttttctttggctgctttgaaatattttttccttgtctttagttttcagtggtttatgatgtgtctagacattgatttct

SEQ ID NO: 216455 - DNA, 625 bp, Homo sapiens
gagttcaggctgcaagttctaactcatttcctgtgggctatggttttgagtttcttcagttttttaagcctttttcaatgatattcagatccatcctgcatatgcaccacccggtggtcagtctgggacctgggcagcaggctatctgttacttcacttcccagagaattctacgtgctgattgggaccggatccatgcatgcacagttcaggggtaagccctggagttcataaataattttataggggtcacttccaaagctccttcctcttcataatcttttaagtagtttctggtactgggaactcctgggaaaataattcccagtaccttcagtcctctggccaaaaagctaaggcttcagttacttcaatctagcatagcaacaggagtttgcrctgtcaggcaaattctcttaggaccacagttctatagatcaaaggaaagctcacctctctgaaaattttggctttcatacccatgccattaccacagaattgcttaagataagactgcaagagaaaggagaaaatattttaaaaagaaaagaaaaagaaaaatgagtgatattcctcaccctctctgagtgttaggagttccctctgctgcttctcagtccagaag

SEQ ID NO: 216456 - DNA, 586 bp, Homo sapiens
ttactaattgtgtttgggtcacagtaagatttattatacttcattgtcaggcctcttaattctctcaagggtgaaacttaataaccactaaaagagtaactgaatgtgattttagagactctgacctggcttgtggtaataagaagacacctctgcagcatataatttatgtctaattctgactcctggaatatttctttgtcagtagtttctaatctaaaaccttggggaaacatactcagtgtaatgacaccaaaccaactagaatcaatgcaaataagacattctatacatgcagtatactatcagctggaaagaaaaggtggctaagtcttcgaattgaaggttctgagttaggttatatattccatartacaaatgcacattattcacatgtatgttaccatttatttcatattctaaacagtgaagcttattacagagcttcactatttttaaaataataccacttatttcaaaataattatactttagaagaatggaaacattggattgcatctctgtgcagcagaagtggatggtggtgatggtggtggtaatgatcatcatgaaaaggatatttctc

SEQ ID NO: 216457 - DNA, 583 bp, Homo sapiens
ctgggactttaagaggcttgataaatctattttgactacattgcttatatatatatatattttttaaatggttatcatagtgtaaatatcacttttttcacttaatgtgacaacttttttaatgttcccacaaacattatttttaatgaatgcgtagcttttctaccaaatggatgcgacatattttgctgagacatttccttgtagttggtgatttcaataacaatactagaactctagtaaataatacracattgaactgtttttttccctattcagtattatctcctggagatataatcctagagttggcaaacctgaatcaaatggtagaaatatgtaacacttcttgatacgtattaccaaattggttttgcataagttttgtaccaattgacagctccacttgccataaataatcgtctctttggtcatacgcttagcctatacaatggggcattgtacacatatatgtatacacgtgggtcatatatatgataataatcaatgatgctctattttgattcataatttgcaattctttactagtgaaggtgattttcagttgttgcattcttttatt

SEQ ID NO: 216458 - DNA, 506 bp, Homo sapiens
accatttgacccagccatcccattactgggtatgtacccaaagggtaataaatcatgctgctataaagacacacgcacacatatgtttattgcggcactattcacaatagcaaagacttggaaccaaccccaatgtccatcagtgatagactggattaagaactcgttaatttttaagaagcaagcaccaaatacaaattagtttagtttaaaaagtgggaggtgtttggagggggtcatttaaatgaattttcctagtgtccagctgcttagatgatgttatcaattcagtgtatttaaactttgttattggaagtatgagttccagtcttgcctcttctgggttttatgtgcagtaatgctctccctccaaattttgacaataacccagagcaagcctaggctyaccttttcacagtttaacaacgatagcaaaaacaagcactctttccccggtcattctgataaattcccaggaccatctcattcggacagcttatctcact

SEQ ID NO: 216459 - DNA, 506 bp, Homo sapiens
accatttgacccagccatcccattactgggtatgtacccaaagggtaataaatcatgctgctataaagacacacgcacacatatgtttattgcggcactattcacaatagcaaagacttggaaccaaccccaatgtccatcagtgatagactggattaagaactcgttaatttttaagaagcaagcaccaaatacaaattagtttagtttaaaaagtgggaggtgtttggagggggtcatttaaatgaattttcctagtgtccagctgcttagatgatgttatcaattcagtgtatttaaactttgttattggaagtatgagttccagtcttgcctcttctgggttttatgtgcagtaatgctctccctccaaattttgacaataacccagagcaagcctaggcttaccttttcacagtttaacaacgatagcaaaaacaarcactctttccccggtcattctgataaattcccaggaccatctcattcggacagcttatctcact

SEQ ID NO: 216460 - DNA, 595 bp, Homo sapiens
aatagacttagaggttacacctaaagacttaaaattatattgtgagagataacaattattagtaacagtaattagacgtttaaaaaatgtacgtgcatctctttattaagctgaacaatgtgattccctaaagaaataaatggaaccatgttctgtccagaaatctcagaaccacaccaggtgcctagttctcctttatttcatccagtactaacttctgttattgcttgctgttaaatctcccctttcttatcatgcctactgttttagttcattccctattttgttcagcctccattccagttattaaccactgattccatcatactcctgtccagtcaatcctttgactttctraagtttaagtctagtcttcctaccctctaaaagagccatttactgcctcttctgttatgtacaaggctaaagctcctccatcgcaagcatgatctctgtctccttattccctctctgacctctctcaactctccccagtccactacctcatacccctttgccctagcagtaatgaaaaaattgaaattccatgaacaaatctttctgtttcccattcacacaagccattctcatctgg

SEQ ID NO: 216461 - DNA, 584 bp, Homo sapiens
tgagcaactaggggtcaaaacactatggataaagttggcaagttcccatgttagacagcaacagcacaggttttcttgtggtttagrctaagaacttactgaagtaaatgtaattataaagtcactgctggatttttcccccttccttatatgtgttatttgctagcagagaaataagggttttattaaccttctgccctgaaattgtctaattttttaaccatatgttctacttgtaaggagctgaaacttggaaaacagaaatccaggaatttcaactaattaaaaaaagaacaacaagttgactgtttactacttcagtggaatcatatcagtggagtacaggaatataacagaacgttatttgatgtagccttcttaagccacaggggcttttttgctgagaacttaagaggtcaagatatcccgtcatcctatcctaacccctgcccccattttaaaagattttctctcataataggagtaatacacattgtgaatgtatttaatgccactaaacagtaaacttaaaaatgattaagatggtaaattcttaaataaataaaaatgcagaaaattttaag

SEQ ID NO: 216462 - DNA, 589 bp, Homo sapiens
aggtttcactatgttgtttaggctggtctcaaacttatgacctcaagtgatcacacctcggtctcccaaagtgctgggattacaggcgtgagccaccctgcctgaccagtgtaggaaactattatagcaaaatagagggatccagtaagcatctccataacaactgcattagcaaatgtagaggactgtgggaccatgtrtgtcacacaggcctgttatcattcatattgattgagcaaccatgacaaacatagtgtggtactaaggagtgatacaaaaattgatcattgttctaggactagctttctgatataggcttacacaaagcaaaggatcaaaaataagtgaaacataaactagacatatttattattggttgtatgtagataacaaatggaagcagcaattaagttccttaaaagtaaagaccatgtattatttacttttgtatctcccatagtgcatattttggtgctttgcataaagtagctcctcagtggaaagtttattgaattaatatgcagaatgaattttattaatttccattaatgtcagtattttatgtaccatgttatagtatacaagtatc

SEQ ID NO: 216463 - DNA, 604 bp, Homo sapiens
gttgaatattttatctctttctaacaaagatggtaatttatagaaaattaagagacaaaattattacagtggaggctatactgaaataaaatatgtctttttctatagtgctaataattgagaaattattaagtstgggtatcaataatctctgagttttgaattgctaaaagctgtaaaaagtcctttatggttacaaattgaacattgtaatcctaatatggtattttcaaggttaaaaaagtcattttaataatttggaatagtatgatatgtattcaataagtgttaagactattcaggtttccttaactgctcagatgtgtttattatatgcataacctgtgagaaagtagaaaccgtagtaatatttttgtgaaaagctcagttcatatgaatttcctaactggcataacagtggctatatattcctttaagcctttttactagttattattatttaaagttaattatgagtttattggtattttctttagactcagggtttaggaactgccctgaagatattattctctgaaaaagaaatccaaaagcttccagagaatagtccatctaaaggcttccaactcacccgacaggaaat

SEQ ID NO: 216464 - DNA, 604 bp, Homo sapiens
gttgaatattttatctctttctaacaaagatggtaatttatagaaaattaagagacaaaattattacagtggaggctatactgaaataaaatatgtctttttctatagtgctaataattgagaaattattaagtctgggtatcaataatctctgagttttgaattgctaaaagctgtaaaaagtcctttatggttacaaattgaacattgtaatcctaatatggtattttcaaggttaaaaaagtcattttaataatttggaatagtatgatatgtattcaataagtgttaagactattcaggtttccttaactgctcagatgtgtttattatatgcataacctgtgagaaagtagaaacygtagtaatatttttgtgaaaagctcagttcatatgaatttcctaactggcataacagtggctatatattcctttaagcctttttactagttattattatttaaagttaattatgagtttattggtattttctttagactcagggtttaggaactgccctgaagatattattctctgaaaaagaaatccaaaagcttccagagaatagtccatctaaaggcttccaactcacccgacaggaaat

SEQ ID NO: 216465 - DNA, 604 bp, Homo sapiens
gttgaatattttatctctttctaacaaagatggtaatttatagaaaattaagagacaaaattattacagtggaggctatactgaaataaaatatgtctttttctatagtgctaataattgagaaattattaagtctgggtatcaataatctctgagttttgaattgctaaaagctgtaaaaagtcctttatggttacaaattgaacattgtaatcctaatatggtattttcaaggttaaaaaagtcattttaataatttggaatagtatgatatgtattcaataagtgttaagactattcaggtttccttaactgctcagatgtgtttattatatgcataacctgtgagaaagtagaaaccgtagtaatatttttgtgaaaagctcagttcatatgaatttcctaactggcataacagtggctatatattcctttaagcctttttactagttattattatttaaagttaattatgagtttattgstattttctttagactcagggtttaggaactgccctgaagatattattctctgaaaaagaaatccaaaagcttccagagaatagtccatctaaaggcttccaactcacccgacaggaaat

SEQ ID NO: 216466 - DNA, 458 bp, Homo sapiens
ctctattaatgggcagctgggttgtttccagaccttgtacatatgtcatttcacatttatataaatattgtacctgtagaataaattcccaaagataagaattttgggggcaaagactgtgtgcatttataattttgaaagatattggcatattgtccttcataggggtagtcatcaattcacataccatctaaaatttatgatagtacttgctaacctgcaacattaccaatgtagatgttattaaaatgttggattctggccattctggtagatgaaartttatatcaatgtgtacattcttttattttccttaaaaaagagacggggtcccacgttatcacccaggctggagtgcagtggtatgatcatagttcaccgtagcctcaaactcgtgggctcaagtgatcctccagccttaacctcccgaatagcctggcttataggtgcacgccaca

SEQ ID NO: 216467 - DNA, 458 bp, Homo sapiens
ctctattaatgggcagctgggttgtttccagaccttgtacatatgtcatttcacatttatataaatattgtacctgtagaataaattcccaaagataagaattttgggggcaaagactgtgtgcatttataattttgaaagatattggcatattgtccttcataggggtagtcatcaattcacataccatctaaaatttatgatagtacttgctaacctgcaacattaccaatgtagatgttattaaaatgttggattctggccattctggtagatgaaagtttatatcaatgtgtacattcttttattttccttaaaaaagagacrgggtcccacgttatcacccaggctggagtgcagtggtatgatcatagttcaccgtagcctcaaactcgtgggctcaagtgatcctccagccttaacctcccgaatagcctggcttataggtgcacgccaca

SEQ ID NO: 216468 - DNA, 593 bp, Homo sapiens
ccaataactgtatttctataatctcccatccaatgtggtattcactggttacaacaatgccacttttatcatggtgtatcaytcgtttcacagcctagttaacatttaacaaaatctatgatcaagatttctaacttgaagaactgataagtaacaactacattccttgaaatcaactttgatctacattaacttgaacctatattcaggccttctctgtattgaatactcatgatggtaggatctatcagagaggcatcattttgctaccctctttattcataacacaaaaggaaaaaacaaggtacaaaaaactgtataaatcaggtatataaaggtaaaaatcaggtaattcctaaatgtggtactgtcataatcaagaatttgttttgtatttgagaagccactacaaagaagtgtataagcttggctgtactacatcaactttatcaatacatttttccagttcaacttactgtggaatttttttccctatgggagtatataataaaaattaacaaaaatattgtatcacagttgacccaactgaaatacgtgatgccataaacaataatgcctaattacagctaaaa

SEQ ID NO: 216469 - DNA, 591 bp, Homo sapiens
atctcccatccaatgtggtattcactggttacaacaatgccacttttatcatggtgtatcactcgtttcacagcctagttaacatttaacaaaatctatgatcaagatttctaacttgaagaactgataagtaacaactacattccttgaaatcaactttgatctacattaacttgaacctatattcaggccttctctgtattgaatactcatgatggtagkatctatcagagaggcatcattttgctaccctctttattcataacacaaaaggaaaaaacaaggtacaaaaaactgtataaatcaggtatataaaggtaaaaatcaggtaattcctaaatgtggtactgtcataatcaagaatttgttttgtatttgagaagccactacaaagaagtgtataagcttggctgtactacatcaactttatcaatacatttttccagttcaacttactgtggaatttttttccctatgggagtatataataaaaattaacaaaaatattgtatcacagttgacccaactgaaatacgtgatgccataaacaataatgcctaattacagctaaaatgacgttaactaaacttg

SEQ ID NO: 216470 - DNA, 545 bp, Homo sapiens
tattgccttgagagaggtggtatagaagccattcccttgggatatgactagagatattgggatgttagatgtgtgctttggtttcttctttccttgcagagaagctgaaagccagagtttatctcccactgattctgctctgcaccaaagagagcrtctgaggcagatgcctgtattcttgatctaactggtgactttttaacttggaagagatagctgctgaatatttatttgcaagtttaaaagtcacctgtttgttctctgtggtctaggagactcaggagtgtagggcttcatcaactcccagagctaggtgatttagcagcctatccctccagtgaaggctataaaagttggggttctcgatgtgttcaaaaattattttcatggagagtttgaagacctggaattattgccagagcctgtaggggaaaaggtgcaggaagcccactctactttttgggccagcaggtctcatgctcccctagcagggggagacttctgatctgaagctattactgaagcatgccaggagaaaggcacag

SEQ ID NO: 216471 - DNA, 545 bp, Homo sapiens
tattgccttgagagaggtggtatagaagccattcccttgggatatgactagagatattgggatgttagatgtgtgctttggtttcttctttccttgcagagaagctgaaagccagagtttatctcccactgattctgctctgcaccaaagagagcgtctgaggcagatgcctgtattcttgatctaactggtgactttttaacttggaagagatagctgctgaatatttatttgcaagtttaaaagtcacctgtttgttctctgtggtctaggagactcaggagtgtagggcttcatcaamtcccagagctaggtgatttagcagcctatccctccagtgaaggctataaaagttggggttctcgatgtgttcaaaaattattttcatggagagtttgaagacctggaattattgccagagcctgtaggggaaaaggtgcaggaagcccactctactttttgggccagcaggtctcatgctcccctagcagggggagacttctgatctgaagctattactgaagcatgccaggagaaaggcacag

SEQ ID NO: 216472 - DNA, 545 bp, Homo sapiens
tattgccttgagagaggtggtatagaagccattcccttgggatatgactagagatattgggatgttagatgtgtgctttggtttcttctttccttgcagagaagctgaaagccagagtttatctcccactgattctgctctgcaccaaagagagcgtctgaggcagatgcctgtattcttgatctaactggtgactttttaacttggaagagatagctgctgaatatttatttgcaagtttaaaagtcacctgtttgttctctgtggtctaggagactcaggagtgtagggcttcatcaactcccagagctaggtgatttagcagcctatccctccagtgaaggctataaaagttggggttctygatgtgttcaaaaattattttcatggagagtttgaagacctggaattattgccagagcctgtaggggaaaaggtgcaggaagcccactctactttttgggccagcaggtctcatgctcccctagcagggggagacttctgatctgaagctattactgaagcatgccaggagaaaggcacag

SEQ ID NO: 216473 - DNA, 546 bp, Homo sapiens
agaaggcatgagaagtgctgtcccttccattcgtggtggcagagatttcagagttgggattgtgtctggagcaagccagggaaggaggtgcagagtgtgcttactctcccgttcaagcaagaagtctcacatgcaccttgcaggrgtaaccttttggtctggagttccctgaagcaagccagggaagaagacacagggactatccccttctctttcttgtcatggagaggtccccttgcctccttctaatgagaggttgcagaaacttatctcaggagcaagccagggaagaaagcgcagagggtgctgttcctcctgttcttgctggcagaggcctccaacctttttccaaggagacagtggatggctgggattagcgcctgaagtaagccaggggaagaaggcacatagagtgctgtcccttctgtttaggctcaaggaggtttattctttatttgctacatgggttcccagatactggcttgttagaggccagagcctcagggagttgctggaaaagctgccaagatttttggcttgaggaac

SEQ ID NO: 216474 - DNA, 546 bp, Homo sapiens
agaaggcatgagaagtgctgtcccttccattcgtggtggcagagatttcagagttgggattgtgtctggagcaagccagggaaggaggtgcagagtgtgcttactctcccgttcaagcaagaagtctcacatgcaccttgcaggggtaaccttttggtctggagttccctgaagcaagccagggaagaagacacagggactatccccttctctttcttgtcatggagaggtccccttgcctccttctaatgagaggttgcagaaacttatctcaggagcaagycagggaagaaagcgcagagggtgctgttcctcctgttcttgctggcagaggcctccaacctttttccaaggagacagtggatggctgggattagcgcctgaagtaagccaggggaagaaggcacatagagtgctgtcccttctgtttaggctcaaggaggtttattctttatttgctacatgggttcccagatactggcttgttagaggccagagcctcagggagttgctggaaaagctgccaagatttttggcttgaggaac

SEQ ID NO: 216475 - DNA, 546 bp, Homo sapiens
agaaggcatgagaagtgctgtcccttccattcgtggtggcagagatttcagagttgggattgtgtctggagcaagccagggaaggaggtgcagagtgtgcttactctcccgttcaagcaagaagtctcacatgcaccttgcaggggtaaccttttggtctggagttccctgaagcaagccagggaagaagacacagggactatccccttctctttcttgtcatggagaggtccccttgcctccttctaatgagaggttgcagaaacttatctcaggagcaagccagggaagaaagcgcagagggtgctgttcctcctgttcttgctggcagaggcctccaacctttttccaaggagasagtggatggctgggattagcgcctgaagtaagccaggggaagaaggcacatagagtgctgtcccttctgtttaggctcaaggaggtttattctttatttgctacatgggttcccagatactggcttgttagaggccagagcctcagggagttgctggaaaagctgccaagatttttggcttgaggaac

SEQ ID NO: 216476 - DNA, 519 bp, Homo sapiens
ctaacactaattattggccttgtgaaaaagaatgttccagctacatgcasttctcccattggtaaaccctagattagattggtaaactctaggttaatcgtgtgggccaaaaaaagctttctagtaatccaaaattgcctacactttgttagagcagaagttaaaattgcacataatacattgcaaataattttgaactttcaaaactttcttttctatggtaacaaagtttgtggaaggaagtgattgtcagtgttttcaacctaaattatataaactgtaaaaaatactgcaatagttattagagctgcttttggctttcttactttgtgtatgtcattcagttttctatactttgatttataagtctgtatattgggataacacttttactttatgagatagtgtgaaaacacaatttgagtgagtgtatatttgcccctcatagagtaaaatgcttgatgaaatagagcaatgcattgacaattcgtgaagaaattctaaaaaaaataaagatca

SEQ ID NO: 216477 - DNA, 519 bp, Homo sapiens
ctaacactaattattggccttgtgaaaaagaatgttccagctacatgcagttctcccattggtaaaccctagattagattggtaaactctaggttaatcgtgtgggccaaaaaaagctttctagtaatccaaaattgcctacactttgttagagcagaagttaaaattgcacataatacattgcaaataattttgaactttcaaaactttcttttctatggtaacaaagtttgtggaaggaagtgattgtcagtgttttcaacctaaattatataaactrtaaaaaatactgcaatagttattagagctgcttttggctttcttactttgtgtatgtcattcagttttctatactttgatttataagtctgtatattgggataacacttttactttatgagatagtgtgaaaacacaatttgagtgagtgtatatttgcccctcatagagtaaaatgcttgatgaaatagagcaatgcattgacaattcgtgaagaaattctaaaaaaaataaagatca

SEQ ID NO: 216478 - DNA, 467 bp, Homo sapiens
acacaaatgcaattgctttgcaaactgtaaacattctgtaaacctaaataagttttgcattatacatgtcattattattattattactgtccccttcaattctaaatttgtgattttggatacaagagaaacaaaagaatcactgaatcacacgggaaatgattatttcctccaagattagagtccccttttatattaaaaaaagaaagcaaaaactattgarccaaatattaaatgacttaaaacaaaaaagccaaaaatcttagcgacatctctcactacagttctcaaggagtaatctataccctcatcttcatgggcaggttaggtcactactgatcacctagtgaaaagtgtccacttaataaccccatcacatttcactttttatacttactgaatcagtctaaatatctttcctctcctcctttaacatcaatgcttagcaaatacatataatagccctt

SEQ ID NO: 216479 - DNA, 467 bp, Homo sapiens
acacaaatgcaattgctttgcaaactgtaaacattctgtaaacctaaataagttttgcattatacatgtcattattattattattactgtccccttcaattctaaatttgtgattttggatacaagagaaacaaaagaatcactgaatcacacgggaaatgattatttcctccaagattagagtccccttttatattaaaaaaagaaagcaaaaactattgagccaamtattaaatgacttaaaacaaaaaagccaaaaatcttagcgacatctctcactacagttctcaaggagtaatctataccctcatcttcatgggcaggttaggtcactactgatcacctagtgaaaagtgtccacttaataaccccatcacatttcactttttatacttactgaatcagtctaaatatctttcctctcctcctttaacatcaatgcttagcaaatacatataatagccctt

SEQ ID NO: 216480 - DNA, 559 bp, Homo sapiens
gcattaattgagccatttcagtrtatggagtggttcaggattatatacaggatctttaaacatcttcttttctttttttttttttttttttagaatttcagttttattaaaacaagcataatgtataaaacatcgtggtgttgtataaatgtctgcctgacaaatgcaaatctatttcctctatgtaactcaatagctcagcttacctgaatggctgtaccttcacgcattcgggcagcagggactgcctcactcaaacagggcagcgaggcttcacgccagtgtggcttcatctcatgcatagagctccatctaactgcccagatctgtgccacccacacaatacctggggacacagcagcagacaccgacgctgtctctaagtttgtcataggaacagcttaaaatcagttagagcaatagggaactgctgatcaaaacccaaatgcatggacattccagaaagaagagcaagccgttaccctctctgggaagtccatgggcttgcagtggtagtttgaggtcccatctttgctggaacagcatggttaaaaaacca

SEQ ID NO: 216481 - DNA, 559 bp, Homo sapiens
gcattaattgagccatttcagtgtatggagtggttcaggattatatacaggatctttaaacatcttcttttctttytttttttttttttttagaatttcagttttattaaaacaagcataatgtataaaacatcgtggtgttgtataaatgtctgcctgacaaatgcaaatctatttcctctatgtaactcaatagctcagcttacctgaatggctgtaccttcacgcattcgggcagcagggactgcctcactcaaacagggcagcgaggcttcacgccagtgtggcttcatctcatgcatagagctccatctaactgcccagatctgtgccacccacacaatacctggggacacagcagcagacaccgacgctgtctctaagtttgtcataggaacagcttaaaatcagttagagcaatagggaactgctgatcaaaacccaaatgcatggacattccagaaagaagagcaagccgttaccctctctgggaagtccatgggcttgcagtggtagtttgaggtcccatctttgctggaacagcatggttaaaaaacca

SEQ ID NO: 216482 - DNA, 599 bp, Homo sapiens
tttctttctcatgcttgttcttcctcctttactcctttttccctttccccagagcaacctattaatgccaatattaaaggtttacctatttggggaattcgacttatgtaaagttaaattaaattcctactgacccaaattttgtactttaactctgtcaatacatatgtatagaaatatttttctacaagttttagaatttgttctcattctttttttaaaaaattctttttttatgtgccaaatgtccttttaccctttttcaacatgaatagccaaaatcatcatttatttgcaatgaaaactgccctaaataaattgctttctgtgagtttcttatgaaacaactatgagaaataactattgtatataaagctcttgttttgtaaagatagataaatataaaataccccactgatcccaaagaaaagttgcattttttcttttttcttttttgctttttttttygagacagagtcttgctgttgttgacccaggctggaaggcaatggtgcaatctcagctcactgcaacctccacctccaaggtggagcaagcctcctgcctcagcctccaaagtaactgagattacaggcacc

SEQ ID NO: 216483 - DNA, 675 bp, Homo sapiens
ctctggtagccaccattctattcactaccttcatgagatcaattttttatttcccacatgagtgagagtatgcaacacttgtctttctgtgcctgacttatttcacttaaagtaatgtcctctagttccatccatgttgttgcaaatgacaggatttcattcatttgtatggcagaatagcattccattgtgtatatgtaccacattttcttttcatttatctgttgatggactcttaggttgattccatatcttaactattgtgaatagtgctgtgataaacatgggtgtgcagatacctttttggcatgctgatttcctattttttttctttcctttggagatatatccagcagtggaatggaygaatcatatggtggttctactgttactttgagaaatcgccacacagttttccatagtggctgttttaatttacagccaccaacagtatatgagcatttccctttctctgcatctataccagcatttattttctgtctttttaataatagccatttaactggggtgaggtgatatatcattgtgctttatatttgcatttccctgatgatgatgttagaatgttttcatatacatgtttgccatttgcatatcttcttcttaaaaatatctattcagatcttttgcccattctttaattgaattattgtt

SEQ ID NO: 216484 - DNA, 675 bp, Homo sapiens
ctctggtagccaccattctattcactaccttcatgagatcaattttttatttcccacatgagtgagagtatgcaacacttgtctttctgtgcctgacttatttcacttaaagtaatgtcctctagttccatccatgttgttgcaaatgacaggatttcattcatttgtatggcagaatagcattccattgtgtatatgtaccacattttcttttcatttatctgttgatggactcttaggttgattccatatcttaactattgtgaatagtgctgtgataaacatgggtgtgcagatacctttttggcatgctgatttcctattttttttctttcctttggagatatatccagcagtggaatggatgaatcatatggtggttctactgttastttgagaaatcgccacacagttttccatagtggctgttttaatttacagccaccaacagtatatgagcatttccctttctctgcatctataccagcatttattttctgtctttttaataatagccatttaactggggtgaggtgatatatcattgtgctttatatttgcatttccctgatgatgatgttagaatgttttcatatacatgtttgccatttgcatatcttcttcttaaaaatatctattcagatcttttgcccattctttaattgaattattgtt

SEQ ID NO: 216485 - DNA, 524 bp, Homo sapiens
agaacgaaaaaaggttttagtagtctcatggcttccctgaggaccattagcgtgatgaaatcttttacctataaatgtacaaatttttatttttaactgaagtgaatattgtgcatattcatgtgaagactrtgcatgtcactaaaggtcaagctgttattctttaaagtcacatagacattctgctagaaatggatcacctctttccacccaagtcttctatacagggtcacacagccaatattttaatgttaggatataaattcaaaggtgctatatgtggatgtgattttccccacattaacccatatgcttagggcatagttttcatcacaagttcttatggtaaaaagacgatgaaatatgtgtatcttttgctcctcagagcagtagaaaaactatagatcacaattgccagggtaacctgacacagcaatatattatccttctattccagtgcctgtttgaggtcgacagacaagatgcctttcaattctagctaatacaatagatgcagacattta

SEQ ID NO: 216486 - DNA, 524 bp, Homo sapiens
agaacgaaaaaaggttttagtagtctcatggcttccctgaggaccattagcgtgatgaaatcttttacctataaatgtacaaatttttatttttaactgaagtgaatattgtgcatattcatgtgaagactgtgcatgtcactaaaggtcaagctgttattctttaaagtcacatagacattctgctagaaatggatcacctctttccacccaagtcttctatacagggtcacacagccaatattttaatgttaggatataaattcaaaggtgctatatgtggatgtgattttccccacattaacccatatgcttagggcatagttttcatcacaagttctyatggtaaaaagacgatgaaatatgtgtatcttttgctcctcagagcagtagaaaaactatagatcacaattgccagggtaacctgacacagcaatatattatccttctattccagtgcctgtttgaggtcgacagacaagatgcctttcaattctagctaatacaatagatgcagacattta

SEQ ID NO: 216487 - DNA, 369 bp, Homo sapiens
atcttgaaaagcatttacagttgaaacaaatgaattggaggagttacgattagaaggaggaaggccaagctggtaagtaagcatgctgacttgctcaactgaggaaggagcagtgtggacttaggaagggagatgaaatacagagatatttctggagtaaaatagaagaatttgtcaactaacaatctcattgatgaagaaggctcagaagtcaaatgcytcttagatttctagtttaagcaactcgtgttcttactcactggataggtagtataaggaataagaagggggcaggttcggagtgcattggaaaaggttgtatttggctattccgatattctacttttatcgttttcttatctattttac

SEQ ID NO: 216488 - DNA, 615 bp, Homo sapiens
cagtccaatataaccagctaatactttatctttaccttttgttggctttgtaatcctaggcaaattgaagactcttagacttaatttgccctttttaaaaacggaggtaataataccttttctgtaatacagttacaaatctaatattgcctgagacagagagaaggtacacaattgaaaactctcttcctgttaaagaaaatattttaaaatcagggccaggtgtggtgttaggcattcttttttatgtttgtctccataaattggtatggctcaattttgcaccagattgtaaaatttccattggcagaaactggttctcactcatattttgtcccaattgcccaacccaatatgtgatagatgctcaataagtaggatatgtattaaatggagccaaaagtgaggccagatcaagccaaggatgcagacttcactatcagacagcctgggtgatctcatttcactttcacccmcaaagcagcctctgctacaaggaaagcatctgctggtgagaaattctttgcagcatttccctgtaaattggagagtagaagaaaagactgctcaaccagctgtcgtcaacaacttagaaaacttgaatgtttaggcaag

SEQ ID NO: 216489 - DNA, 571 bp, Homo sapiens
ctattaaacattgggtggcacctttaaagaaaaggtactgatttcccacagccacttattatatgctatggagagcaatkcttccaaaataccaagcacactttttggatggttaaagcccgttccagccttctgatggtgtcaattaattcttgtgaggaatcattttaaattctctccagtgagagagtttgctattatattttagttttatttaaaccccctttcaagaactgtgtctaatagaccttcaaagcatctctgggtagctctaacttacataacctcatttttcaaaaccactcattactttcttcccctcttaacatactctcactccagcttgggccctcccttggggcaccttgctgcctgctttggtaatatagtcatgcctacctttgagactttttctcatttctaaatagagtatgcagaatatgaaaggggtgggggaaatgctcttttgttgattggcaatggaatcagaatctgccagtgaaaataacctacaatcatatctagccaggatattatccacggcacatgtgggagaaataaaaggaaataa

SEQ ID NO: 216490 - DNA, 374 bp, Homo sapiens
attcgtataaataaaagctacagaaaaaaattgaataatctaaattatgaaaattacatatcctggccagacaaggtggctcatgcctgtaatcccagcactctgggaggctgaggggagaactgcttgagcccaagaattcaggaccagygtgggcaccatagtgagccccatctcttaaaaaattatgtatctaatcactacttggaattacattatatacttatatatttactttgtttgttgtctgttttttatcactagaatgtaaactctgagagggcaagaatttttgtctgcctaattcatcagtttaacttcagcatttggaaccgtgtctcaaacataatactgtctactaagtagaaacgcaa

SEQ ID NO: 216491 - DNA, 586 bp, Homo sapiens
gaggtaaagcaaattcctctctaccttcattatttcaagactaaaaaagcaggcttcataagcgtgcaacctgtgcagtcacaagggaccccatgcttagaagagtcctgtgcttgatttaaagtcctcctgtcccaggcttaaaattcttaatttttgaacaagggtcccagccttttcattttacactgggctctataaattacrtagccagtcctgccagagtgtctgaattgtctaactctattctcatgtggcagtcatcttctcttcactgtctgtggcactgggaataagacatgaattaatgttggaagtcaaaaggatgagccaagctgagggccacttagagcagctgtggaaagcctggtcatatgacaggtatacaggcagcaagaaatgtccattgaaactgagtcctctgaaacctttgtgaggtcttctgtagtcccgttatttttactttgctcaaaactcatcagggtttctagatgcatcaagatatgtgtgttatctgtacataaaaaatgtatcacttctgtctgcaaaatttcagtattatatactcagagaggatggcaaaata

SEQ ID NO: 216492 - DNA, 586 bp, Homo sapiens
gaggtaaagcaaattcctctctaccttcattatttcaagactaaaaaagcaggcttcataagcgtgcaacctgtgcagtcacaagggaccccatgcttagaagagtcctgtgcttgatttaaagtcctcctgtcccaggcttaaaattcttaatttttgaacaagggtcccagccttttcattttacactgggctctataaattacgtagccagtcctgccagagtgtctgaattgtctaactctattctcatgtggcagtcatcttctcttcactgtctgtggcactgggaataagacatgaattaatgttggaagtcaaaaggatgagccaagctgagggcmacttagagcagctgtggaaagcctggtcatatgacaggtatacaggcagcaagaaatgtccattgaaactgagtcctctgaaacctttgtgaggtcttctgtagtcccgttatttttactttgctcaaaactcatcagggtttctagatgcatcaagatatgtgtgttatctgtacataaaaaatgtatcacttctgtctgcaaaatttcagtattatatactcagagaggatggcaaaata

SEQ ID NO: 216493 - DNA, 606 bp, Homo sapiens
tggcttcttctcctgaatgtggtgggactgtttctagtmtcctttctataatttctactgtacaacttgggtggtgcacagaactgtgacacctacaagcctaaaggtttgagaagcctttggtgagaagtgtattaaaggaatgcctagtgttggtaagttttctgctggggatgccacataaatagatacctttaccccaaacttctcccaccacctccacaggcagcagacttgccaaaaagtcttcactgcttctggaataatactgagcagattaatattttttttcacctggttcacttttaacctttagagttcatccgtatggtgttacaggagctcattctcactataaactaaaaataaaatcctactctaactgaacagaccccctcttggccaaggggacccaagaaaaaccttaaaaactgaattcctggccataaatggaaggaaagtcgaatagcctcctcattattcaccctccgttttggagttcatacacagctgagcagcattaatgttcaaatagagatcataagactcacgaaacagactctttgtggcaataatataccaaattataaacaagacctaacacca

SEQ ID NO: 216494 - DNA, 543 bp, Homo sapiens
gggcttcttttcaccctacccacacttctatagcttgccctttattgaattatgttcagttaaactcttttgagagttctctattttctcccagaacgaactgatttgttccctcagcctgggaaacttcccccacttgtcagcctagagcgttcctgcttgtcacacagttcmcatgaagacttccttaacaccttcctctgtgcactggtagcattttggacatacattgtggtgaaacatttgtgaactgtttgcttctctgtactgtgttgtgagtttctcaaggataggatatggtttgtgccccttggtgtttatagagcctatagcagtgcttggtgcactaagtatttgataaatgctgactgcatgaataaatgattagagtaaattggcataagtaagagatttattaagaagcatagtaagagatgattgtttaattcattctttttcttttttttttttttgagacagagtcttgctgtgtcacttaggctggagtgcagtggtgcatctcggctcactgcagcctccact

SEQ ID NO: 216495 - DNA, 543 bp, Homo sapiens
gggcttcttttcaccctacccacacttctatagcttgccctttattgaattatgttcagttaaactcttttgagagttctctattttctcccagaacgaactgatttgttccctcagcctgggaaacttcccccacttgtcagcctagagcgttcctgcttgtcacacagttcacatgaagacttccttaacaccttcytctgtgcactggtagcattttggacatacattgtggtgaaacatttgtgaactgtttgcttctctgtactgtgttgtgagtttctcaaggataggatatggtttgtgccccttggtgtttatagagcctatagcagtgcttggtgcactaagtatttgataaatgctgactgcatgaataaatgattagagtaaattggcataagtaagagatttattaagaagcatagtaagagatgattgtttaattcattctttttcttttttttttttttgagacagagtcttgctgtgtcacttaggctggagtgcagtggtgcatctcggctcactgcagcctccact

SEQ ID NO: 216496 - DNA, 543 bp, Homo sapiens
gggcttcttttcaccctacccacacttctatagcttgccctttattgaattatgttcagttaaactcttttgagagttctctattttctcccagaacgaactgatttgttccctcagcctgggaaacttcccccacttgtcagcctagagcgttcctgcttgtcacacagttcacatgaagacttccttaacaccttcctctgtgcactggtagcattttggacatacattgtggtgaaacatttgtgaactgtttgctyctctgtactgtgttgtgagtttctcaaggataggatatggtttgtgccccttggtgtttatagagcctatagcagtgcttggtgcactaagtatttgataaatgctgactgcatgaataaatgattagagtaaattggcataagtaagagatttattaagaagcatagtaagagatgattgtttaattcattctttttcttttttttttttttgagacagagtcttgctgtgtcacttaggctggagtgcagtggtgcatctcggctcactgcagcctccact

SEQ ID NO: 216497 - DNA, 543 bp, Homo sapiens
gggcttcttttcaccctacccacacttctatagcttgccctttattgaattatgttcagttaaactcttttgagagttctctattttctcccagaacgaactgatttgttccctcagcctgggaaacttcccccacttgtcagcctagagcgttcctgcttgtcacacagttcacatgaagacttccttaacaccttcctctgtgcactggtagcattttggacatacattgtggtgaaacatttgtgaactgtttgcttctctgtactgtgttgtgagtttctcaaggataggatatgrtttgtgccccttggtgtttatagagcctatagcagtgcttggtgcactaagtatttgataaatgctgactgcatgaataaatgattagagtaaattggcataagtaagagatttattaagaagcatagtaagagatgattgtttaattcattctttttcttttttttttttttgagacagagtcttgctgtgtcacttaggctggagtgcagtggtgcatctcggctcactgcagcctccact

SEQ ID NO: 216498 - DNA, 594 bp, Homo sapiens
actgcacccaacaacaagagatttcatataattagttccatgattgacatgaaaagtttatgaaaattcaccaaaagctaagtcatcaggttagccagtttgaaatcaccatgtcaaataactgatatcacrcagaaaatataatttaactccaatgcactttagttaggaacaataataaaaagataactagtgaaatcaaatatttaaacatttagaatacatttctgaattacccatcaatcaaaaaattaaaatagaagttataaaatacttagaaaatactaagaaaaataatgtctaaatataaaaataccaggatgattacacatcatatatcaaaaccgtggtccacagttaaagagttcttaaaggttctgttgtaaatgcttacctcaggaaaaaaaaaatgttcaacttaataatcatccaaccataaggagttaggggaaaagaacagcaaaataaattcaagaaaatggaaaaaataatacaaataagagcaaaagttaatgaaaatggcaggaaatatatattgaagacaattgaagacaattcaatatatattgaagacaattggtttaaatgtttttc

SEQ ID NO: 216499 - DNA, 581 bp, Homo sapiens
tttcctactctgagaaatggaatataaagtaattcggcatgacsacttccccacaaatcaataaaacatcgaaatcagaaaatgaagggtctaacctcctcaaaaacattttgccatacatacaaaaacctgtcacatggatttgtcttgaactcagcaagacctaaatatcctgttctatgacctagttatcctgtcttgggagactttaagcagcaggtgccctagtggcttttaactgcccgacccctgcatgcagatgacggctttgacaaagaaagagaagaaaaaataaatcccaaagtttgggcttacctcttggctggctctccaaaatgttaccagagttgtgcaggttcttgggtgttgagcaaagaattgaacaaaatgagcaaacaaggtaacaaaaaaaatgaagcaacgaaaaacaaagcaacagaagaaagaagtaatgaaagcacagatgtattgaagacaacgcacaaaacaagagtaagctcgagcaagcggctcaaaatcttcttccgttaggattttttattaagctgaaggaacccagcaacacccctcggtgcccttta

SEQ ID NO: 216500 - DNA, 548 bp, Homo sapiens
atattcaaataaaagaaggttgcagaacacctaaggaagattaaactcarataagactacctcttctcagcaaactatcgcaaggacaaaaaaccaaacaccgcatgttctcactcataggtgggaattgaacaatgagaacacatggacacaggaaggggaacataacacaccgggtcctgttgtgggctggggggagcggggagggatagcattaggagatatacctaatgttaaatgccgagttaatgggtgcagcacaccaacatggcacatgtatacatatgtaagaaacctgcacgttgtgcacatgtaccctaaaacttaaagtataattaaaaaaacagaaaattacaaggaaataaaaaagactacctcaagacatttaataatcaaactcccagaggtcaaggataaggaaaggatcttaaaagcatcaagagtaaagaaacaaacaatataaaaagcagctctaatatctctggcagcagacttctcagtggaaaccttacaagccaggacagagtggcatgacatatttaatgtgc

SEQ ID NO: 216501 - DNA, 645 bp, Homo sapiens
aatttccttgggcttcagcttttacagctataaaattagactaattttatttttaccgtcaagaattagagatgtttgtaaagttcttagcacattattgctcggtcataaaaacaagaaaaactgatacggtatttactaagtgtcaggcccttacttaattctccaaaaaccctatgaagtaggtactattattagcctcaattttatagatatgtaaatatgcacagataagtcatttacccaaggtcacactgctaaagtaaggggcagaattggcatttgaacccaaagaatctggcttcagagtcaagcctcttaatgttgctgtgttatgcctcttaataaaactgggtccaaagaccataatatcagcacatccctcttgggaaggttcttaaaataagaaaaaatatgtggttagactttcttcttgtgtactacctgataatgcaagggtcttggttaataagccagagtcaacagaaggcttaatatcatcatacaaacgtggggggaagccacttgtatgtggcaggctgtacgttatgatggttgacagatacaacaggaaagactgaaatgtacttggatttctgcactaagcaggtwgtcaaaattatataatttttaagtacttgaatt

SEQ ID NO: 216502 - DNA, 483 bp, Homo sapiens
ggaacaacaatgagacctcatctccacaaaaaatacaaaaattaggtgagtgtcgtggcatgtgcttatattcccagttgctcaggaggctgaggtgggaagattgcttgaacccaggaggttgaggctacagtgaactgtgtttgcatcgctgcactccagcccggctgtctgagagagaccttttctcaaaaataaaataaaataaaatagatacgaagaaataaataaaatgattttaaacatcaaataagatgatagacttgaaagtatttcaaaaattgtaaaatgtgatacatttcctcttctttttttatatgttatttttatctgaggaactcatataatcgttcttactacctctctccagcctagaaaaaaagagcaaccccatctcatttcaaatgttaattctggcacagcctatatatttyactcatttgtaaatctcttcatgcaatagtgacttctccttttttgact

SEQ ID NO: 216503 - DNA, 483 bp, Homo sapiens
ggaacaacaatgagacctcatctccacaaaaaatacaaaaattaggtgagtgtcgtggcatgtgcttatattcccagttgctcaggaggctgaggtgggaagattgcttgaacccaggaggttgaggctacagtgaactgtgtttgcatcgctgcactccagcccggctgtctgagagagaccttttctcaaaaataaaataaaataaaatagatacgaagaaataaataaaatgattttaaacatcaaataagatgatagacttgaaagtatttcaaaaattgtaaaatgtgatacatttcctcttctttttttatatgttatttttatctgaggaactcatataatcgttcttactacctctctccagcctagaaaaaaagagcaaccccatctcatttcaaatgttaattctggcacagcctatatatttcactcatttgtaaatctcttcatrcaatagtgacttctccttttttgact

SEQ ID NO: 216504 - DNA, 606 bp, Homo sapiens
attaaattaactagcatttaattggcagagaaggactcagaatttagatactcagtagatctcagagagggcagataacaagtcggaaactcagtagttgctctgtctgaggactcatgaggaaagtcagattggatgacaggcagtttgttctaaatctcccatttggtctgtgtcatatattcaaggagggagaacaagaagccaggccagttctgacacaacactcttctggtaggttgggagaggttcacaggatgtgagacaatgcatggtataatggacacagaactgttctagaaatcagacactatagcttctagtctcacccccatctcctactagctgtgtatgatttggggctgatttctttacttccatgagcttcggtttcttcatctgaaatggamattttaaatacctaccctgattttatagggatcagtgtaaaaattaacaaatatgaagtcattttataaactacaaactattgtacaaatatacagatttttatgattacttccacttgtatagataattgtgacctctatttgccagtaaaatcagagaagtaaattttgcattgcctcttactgaaaagaattc

SEQ ID NO: 216505 - DNA, 590 bp, Homo sapiens
cccagacttaggctcacaaagacctgggagtgaccctggtctcctgtgtcccagccctggcccctgggcgcagacccccagtcccgagatgcccgccagcaacgctttgcccacttcacggagctggccatcatctcagtccaggagatcgtggacttcgctaagcaagtgcctggtttcctgcagctgggccgggaggaccagatcgccctcctgaaggcatccactatcgaggtaatggtccatctgcccacaaggaaccccagagatagctccaggacagatgctgggagcagagttaaggaagaccagtgcttgtgccgttgtaggatgacattccacggcgaatagagtcttctatgagccaaggagagaaaggaaaaagggtctgaggctgagaaaattgaggatcaggcyagaggcgctattgcagagaaaagttgccaaaaaggcttttcagaggagttagcatttgaatcaaagtagggataacatataagtattgagcacgtgctgtatgccaggctctattccaagtgttggcatatggggcaaagaacaaagcagatcaaaccccgtgccccaaacct

SEQ ID NO: 216506 - DNA, 562 bp, Homo sapiens
atttgcgtcttgccatttttcctgatcttagtttttcttcaattgcatttctaattgagataggaagcttcaccatcaagagttctataatgcaggaagtaaggtcaatcagataatgctggagttttttttaaggtttaaggaaatctttctcttgtatagctagaaaatagatattattgttccatagagcaagtaaccatatttgaaaatatggagcaaaaggactattaataaacagcaaacatgtttttaaaaawatgctaatgatattttattaaaaagtcatatttacctatgcatattggttatctattgcagggtacaaattaccttacaattttgtagtttaaacaacaaacatttattatctcccaatttatgtaggtcagaaatatgggggtgagttagccgagtggtgctgatttagggtctctcatgaatccagccaatatgtcagccaggactgtagtcatgtgaaggcttgaataggggtagaggcttgctttcaagggacctcactcagatggctcttagcagaagacctcagttctttgctaga

SEQ ID NO: 216507 - DNA, 235 bp, Homo sapiens
tttgattactattaaattgggaataagcaaaatttgcctttctctttagagtggtcattttgccattgaagctgagcttcagtagacattttgtaatttgrcggaaagatagtccataaatatgatgtgtaaaagaaagtgcttaatggaattgagattcaaaaagcctaggaacactgaggagatgggggaagcagaaagtcagggcagataaagacgtttgggtggatgaatt

SEQ ID NO: 216508 - DNA, 572 bp, Homo sapiens
ggcagaattggacaatgggaggaagttacatttagtttgattagttggttaaatttaaactgttgaattcctaaagttgtgttttcaccacccctagagatggtcaagtcatgtttcaatgtccaccaagtaataatgttataagaaggattcctgcaccaagtggcaggtggatttggatgccctcctcagtgccttctaaactgtgggtctcagactcagttgcatcactctcttatttgggattgtgattcctagatgctattgtgccacatatcataatccaaggattccatctagcaagctgggtttcacattcgaccygttacacaaacaccatcccagagtttctcaaatgactacatacacccatggtccctgaccaatgaagagaaatgtaaggggatcaaagaatctaagaatcagtctcaccaggacagattttctcacaacctctaacatatcctcctttacaagtctaatgaggttatagaatctgaaccatttgtatcaggatgatgctggtctcatagaatgagttaggaaaaagtccctcctcctcaattttttgg

SEQ ID NO: 216509 - DNA, 424 bp, Homo sapiens
gcagagacagctccagcctagtggagtctaggagatttttgcacgtcgtgcagctgcagcaaaatgctaccataggtgcccrttctccaaggctctcatcttcctctgagtacctctaaccccagctggctgctggaccaggagagaacagggcttcctgtgtgcttgtggcatttctgttctgcataacccttatctgctagctccttccaagtcaactgcctggctgctgccacaagggcatgtacacagcacagccttcactgtccagcataagtgctttgctggcagccccacctgaatgctttcccgggggcctggaagcactttggctcccctaacacagccagcagccaaccttgagaggtcagaggacaaagcgatgagccaggtcccaataccccaaaaggaacagcacacaatt

SEQ ID NO: 216510 - DNA, 587 bp, Homo sapiens
aaatactaacggaatttgtaatcactagacaagccttacaagaggtgcttaagggagtactcaacatggaaacaaaaggatacctgctaccacaaaaacacacttaagcacaaaggccacagacactataaagcaattacttcaagcccacaaaacaacaagctaacaacacaatgaaaggaccaagatctcacatattaatattaaccttcaacataaatggtctaaataacccacttgtaaggtatagaatgataagttagatttaaaaataagactcaattgtctgctgtcttcaagagaccgatctcacatggaaagacacccacagcctcaaggtaaagatacrgggaaagataaatcatggaaagaaaaaccaaaaaagagcatgggtcattattcctatatcatataaaatagactttaaaccaacaacaatcaagaagaatggagaacagacttacataataataaagggttcaattcaacaagaagactgagctatcctgaatatatatatatacctgacatagcagcacccagactcttaaaacaagttcttcttggcctattaaatgacagtgaca

SEQ ID NO: 216511 - DNA, 251 bp, Homo sapiens
tctcccttttgattaactcagagtgaacggattaggggcttagttacatctgcaaaatcccttcaacttttccataggtatagattagaarccagccgcgggtcctgcctacactccaggggagaggagattacacctggcatttacccagggcaagaacctaaggggtcatctcagaattctgccttccaaatagatcctcggtggagctcacatgcctgggcgagcaccagcctttgtttaaaggcaac

SEQ ID NO: 216512 - DNA, 251 bp, Homo sapiens
tctcccttttgattaactcagagtgaacggattaggggcttagttacatctgcaaaatcccttcaacttttccataggtatagattagaaaccagccrcgggtcctgcctacactccaggggagaggagattacacctggcatttacccagggcaagaacctaaggggtcatctcagaattctgccttccaaatagatcctcggtggagctcacatgcctgggcgagcaccagcctttgtttaaaggcaac

SEQ ID NO: 216513 - DNA, 251 bp, Homo sapiens
tctcccttttgattaactcagagtgaacggattaggggcttagttacatctgcaaaatcccttcaacttttccataggtatagattagaaaccagccgcgggtcctgcctacactccagggsagaggagattacacctggcatttacccagggcaagaacctaaggggtcatctcagaattctgccttccaaatagatcctcggtggagctcacatgcctgggcgagcaccagcctttgtttaaaggcaac

SEQ ID NO: 216514 - DNA, 251 bp, Homo sapiens
tctcccttttgattaactcagagtgaacggattaggggcttagttacatctgcaaaatcccttcaacttttccataggtatagattagaaaccagccgcgggtcctgcctacactccaggggagaggagattacacctggcatttacccagggcaagaacctaaggggtcatctcagaattctgccttccaaatagatcctcggtggagctcacrtgcctgggcgagcaccagcctttgtttaaaggcaac

SEQ ID NO: 216515 - DNA, 580 bp, Homo sapiens
ttttaatagctagatggagatcatctagttgcctttatttataatgaatatgactgtagagctagtttggcctgacactaccagtaacctacccagaaattcagaaatactttcttctccaacccgccccaaccaacctattttttgtttgtttgtttttgggttctccctctttgcctaggctagagtacaartgttacagtcagagctcactgtaacctcaaaatcctgggctcaaatgatcttgcccttcagcctcctatgtagctaagactacagacatgtgccaccatgcctggctaatttttttattctttgcagagagagggtctcactatattgcccaagttggtttcaaactcctggcctcaagcagtcctcctgcctcacccttccaaagtgctaggattataggcatgagccaccacacccagcctcttcttctttttaaatagaaaccttattttattctgacagtgggttgctttcttttttctttttttaagaaaaagttggcccagccctagggaataaattttgactgctctaaacagggttggccaactatagaccaagggcc

SEQ ID NO: 216516 - DNA, 580 bp, Homo sapiens
ttttaatagctagatggagatcatctagttgcctttatttataatgaatatgactgtagagctagtttggcctgacactaccagtaacctacccagaaattcagaaatactttcttctccaacccgccccaaccaacctattttttgtttgtttgtttttgggttctccctctttgcctaggctagagtacaagtgttacagtcagagctcactgtaacctcaaaatcctgggctcaaatgatcttscccttcagcctcctatgtagctaagactacagacatgtgccaccatgcctggctaatttttttattctttgcagagagagggtctcactatattgcccaagttggtttcaaactcctggcctcaagcagtcctcctgcctcacccttccaaagtgctaggattataggcatgagccaccacacccagcctcttcttctttttaaatagaaaccttattttattctgacagtgggttgctttcttttttctttttttaagaaaaagttggcccagccctagggaataaattttgactgctctaaacagggttggccaactatagaccaagggcc

SEQ ID NO: 216517 - DNA, 580 bp, Homo sapiens
ttttaatagctagatggagatcatctagttgcctttatttataatgaatatgactgtagagctagtttggcctgacactaccagtaacctacccagaaattcagaaatactttcttctccaacccgccccaaccaacctattttttgtttgtttgtttttgggttctccctctttgcctaggctagagtacaagtgttacagtcagagctcactgtaacctcaaaatcctgggctcaaatgatcttgcccttcagcctcctatgtagctaagactacagacatgtgccaccatgcctggctaatttttttattctttgcagagagagggtctcactatattgcccaagttggtttcaaactcctggcctcaagcagtcctcctgcctcacccttccaaagtgctaggattataggcatgagccaccacacccagcctcytcttctttttaaatagaaaccttattttattctgacagtgggttgctttcttttttctttttttaagaaaaagttggcccagccctagggaataaattttgactgctctaaacagggttggccaactatagaccaagggcc

SEQ ID NO: 216518 - DNA, 580 bp, Homo sapiens
ttttaatagctagatggagatcatctagttgcctttatttataatgaatatgactgtagagctagtttggcctgacactaccagtaacctacccagaaattcagaaatactttcttctccaacccgccccaaccaacctattttttgtttgtttgtttttgggttctccctctttgcctaggctagagtacaagtgttacagtcagagctcactgtaacctcaaaatcctgggctcaaatgatcttgcccttcagcctcctatgtagctaagactacagacatgtgccaccatgcctggctaatttttttattctttgcagagagagggtctcactatattgcccaagttggtttcaaactcctggcctcaagcagtcctcctgcctcacccttccaaagtgctaggattataggcatgagccaccacacccagcctcttcttctttttaaatagaaaccttattttattctgacagtgggttgctttcttttttctttttttaagaaaaagttggcccagcccyagggaataaattttgactgctctaaacagggttggccaactatagaccaagggcc

SEQ ID NO: 216519 - DNA, 408 bp, Homo sapiens
aacgtgcatgtaagccagatttatgtttctctccacccaaacatctcagtggagtaaagaatatcaaggcagtattgctgtaaacatgtctcrcctcccaccatagggcggtttttctcccatctcagaattgaacaaatgtacaatcgtgttttataccgagacattcagttcccaggggcaggcaggagacagtggccttcctctatctcaaatgcaagagtctttcctctttgactaatccacctcagcacagaccttttatgggtgtcgggctaggggaccgtcaggcctttctcatcccacgaggccatatttcagactatcacatggggggaaactttgaataatacccagctttcaagggcagaggtccctgcggctttccacagtgcattgtgcccctgg

SEQ ID NO: 216520 - DNA, 326 bp, Homo sapiens
gaattcaatttcttgcaattgttgaacgaaggccctcagctcctagagctgccacctccaaagacagttcacagcatggccatttgtgtctccttggaggctaagggttgaatctctgaaacttcayctttaaaagactcacctgattaggtctggcccacctaagatcatcctcctttggatgaactcaaagtcagctgagcaaatgtgcttaacaaagcaagtgtgaccataatcacatttgcaaaattccttccccttggccaaatcacaagctctgcacacactcaagaagagatgatacagggagcagatataagggagtg

SEQ ID NO: 216521 - DNA, 326 bp, Homo sapiens
gaattcaatttcttgcaattgttgaacgaaggccctcagctcctagagctgccacctccaaagacagttcacagcatggccatttgtgtctccttggaggctaagggttgaatctctgaaacttcatctttaaaagactcacctgattaggtctggcccacctaagatcatcctsctttggatgaactcaaagtcagctgagcaaatgtgcttaacaaagcaagtgtgaccataatcacatttgcaaaattccttccccttggccaaatcacaagctctgcacacactcaagaagagatgatacagggagcagatataagggagtg

SEQ ID NO: 216522 - DNA, 594 bp, Homo sapiens
gaaataaacctcataatattaagtgaacagcattccttgctatgcacaaagatggctagagacatgaacagacacttctgatcacacaaaatgagattttaaaaacaagaagtagcaaattgaatgctgggtaaatttatcagaagaaaaagaaatggaagtgaaactgaaggaactggtcaactcagataaatgtagtttttcctcactaaaaatcagtttctagaacrtctaagaaatcaaagatgatgaaaaatattaagaagttttatatatatgtaaaagtctttacagttgattgatcatctcatgaaaaatctgtacagtcactgcaaataaatcattgcaaaatctttactccttttgctttttgccagcactttgcagtttctggacgtcattctgcccttgcattccttttgctgttttcatgaggtcatcttctcatgccagctgtgtcttgcaagtctatgagttcatttttgtttgcataattcaaagaaccagatagcatgccaaagcccattgtttaaccaccaccaacatgggttctgagtccaactattaatatgaagatgacatccattgtggtct

SEQ ID NO: 216523 - DNA, 590 bp, Homo sapiens
taaaatacaggacgtccaattaaacctgagtttctcattaaccctttttttttttggtgcaaatatatcccatgcaatatttgggacctgcttaccctaaaaaatgatttgttgtttatctgaaattcaagtttaactggcatcctgtcttttcacttgctacatatgagagttccgtgtgggggttatcagtgtgcatttgtgagttcccatgwgaaggactgtctccaagtgtctgtaggtgccaggatggagatggacagagaagatcctcttgggctgctttagtggtacctagaggctgtggggttggacacttcagccccaggggctgggcagcactgtccagcacctgcctgctcctgtcttcttcacgggggctgacttccctgccatctccctccaaatacggtagcaagagctatcccatctgcccccatctggagcttagctgcccagccagacaggatggcaaacagtgtgcagaggactgcaaagtcttccccagctccttctgcaaggggcctgcagatgaaatggaagccctcatcctcaccgcctcccccttccagaaaacccaggcaacagca

SEQ ID NO: 216524 - DNA, 620 bp, Homo sapiens
cttaaatactgacaacaattaaagcctcatctttggccaggcatggtagctcacgcctgtaatcccagcactttgggaggctgaggcaggtggatcacgaggtcaggagatcaagaccatcctggctaacctggtgaaaccccatctctactaaaaatacaaaaaattagccrggcttagtggcaggcacctgtagtcccagctacttgggaggctgaggcaggagaatggtttgaacccggcaggtggagcttgcagtgagcagagattatgccactgcactccagcctgggtgacagagcaagactccatctcaaaaaaaaaaaaaaaaaaaagcctcatcttcaggcccagtagaagatgccaatcaaaataaactgcattcctgagacacagaaattaaagctattcagctcctcagggcccagggactatcacaaaagaggtggacatgtgagattgtaagggccaattttgagagagaaaataagttgagtttctctataatcattaatctcaaagtcacactgatgcaagaccagcatatgggcccctgtgtcagattaacaaggttttcttgaagcattaactgactccttaataaaggttataaaggttac

SEQ ID NO: 216525 - DNA, 620 bp, Homo sapiens
cttaaatactgacaacaattaaagcctcatctttggccaggcatggtagctcacgcctgtaatcccagcactttgggaggctgaggcaggtggatcacgaggtcaggagatcaagaccatcctggctaacctggtgaaaccccatctctactaaaaatacaaaaaattagccgggcttagtggcaggcacctgtagtcccagctacttgggaggctgaggcaggagaatggyttgaacccggcaggtggagcttgcagtgagcagagattatgccactgcactccagcctgggtgacagagcaagactccatctcaaaaaaaaaaaaaaaaaaaagcctcatcttcaggcccagtagaagatgccaatcaaaataaactgcattcctgagacacagaaattaaagctattcagctcctcagggcccagggactatcacaaaagaggtggacatgtgagattgtaagggccaattttgagagagaaaataagttgagtttctctataatcattaatctcaaagtcacactgatgcaagaccagcatatgggcccctgtgtcagattaacaaggttttcttgaagcattaactgactccttaataaaggttataaaggttac

SEQ ID NO: 216526 - DNA, 620 bp, Homo sapiens
cttaaatactgacaacaattaaagcctcatctttggccaggcatggtagctcacgcctgtaatcccagcactttgggaggctgaggcaggtggatcacgaggtcaggagatcaagaccatcctggctaacctggtgaaaccccatctctactaaaaatacaaaaaattagccgggcttagtggcaggcacctgtagtcccagctacttgggaggctgaggcaggagaatggtttgaacccggcaggtggagcttgcagtgagcagagattatgccactgcactccagcctgggtgacagagcaagactccatctcaaaaaaaaaaaaaaaaaaaagcctcatcttcaggcccagtagaagatgccaatcaaaataaactgcattcctgagacacagaaattaaagctattcagctcctcagggcccagggactatcacaaaagaggtggacatgwgagattgtaagggccaattttgagagagaaaataagttgagtttctctataatcattaatctcaaagtcacactgatgcaagaccagcatatgggcccctgtgtcagattaacaaggttttcttgaagcattaactgactccttaataaaggttataaaggttac

SEQ ID NO: 216527 - DNA, 609 bp, Homo sapiens
tatgggccacacttggcctgtcacctgtttttctacagctggcaaactaagaatggttggtacattttaaatggtcaaacaacacaaaagaaggataatattttgaggtctgtaaarattacataaaattcaaatttagtgggtcttacattaattggaacatagttaaggtcatttgcttatgtattgtctatggctgctattgagttacacagtggcagagttgtgtagttgcaatagagaccactgacctccaaaaccttagcttttgttatcaggtcctttacataaaaagatttttaaccccttttctagatgatgcaaattctcagaaatgtattaaggtatgctggttaatttttacaaatatttcttatgggtgtgttgagtatgtgtattctctaattgctatatgccacatatgtattatatatatgatatatacatatatcgatagatataggtctctatatatgtaatctatatatatatttgagagatagagatagatatatagagatatcaatatcttaactgtggtttcatgggtcttgtaatacatacactacgatactgagtttttcaatttcctcttgtagcttttatcat

SEQ ID NO: 216528 - DNA, 609 bp, Homo sapiens
tatgggccacacttggcctgtcacctgtttttctacagctggcaaactaagaatggttggtacattttaaatggtcaaacaacacaaaagaaggataatattttgaggtctgtaaagattacataaaattcaaatttagtgggtcttacattaattggaacatagttaaggtcatttgcttatgtattgtctatggctgctattgagttacacagtggcagagttgtgtarttgcaatagagaccactgacctccaaaaccttagcttttgttatcaggtcctttacataaaaagatttttaaccccttttctagatgatgcaaattctcagaaatgtattaaggtatgctggttaatttttacaaatatttcttatgggtgtgttgagtatgtgtattctctaattgctatatgccacatatgtattatatatatgatatatacatatatcgatagatataggtctctatatatgtaatctatatatatatttgagagatagagatagatatatagagatatcaatatcttaactgtggtttcatgggtcttgtaatacatacactacgatactgagtttttcaatttcctcttgtagcttttatcat

SEQ ID NO: 216529 - DNA, 535 bp, Homo sapiens
ttgactaagtttcaacaaattaatttgggagacacattcaggttctagcagtacctggtgacattggtcaggtaagaatgtcacagagctgctttgtggagagaaagagatctcaggagatgaacaggtgatcctgcttccagtgacccacgcccttcatccttcagggacatctttccaatagactgacaatctgactccatatttgcaaaggactaagtcatacagctgtgagaggaaaataaacaaatgatgtaccttytgatagagatgaggataaccaaccttgaaagagctccttgggggttagtgtgacggcatgcaatccattctcaaacacatattttcacattaaaatgcatatcatagtcagtagttcaaagtatcttggcattaattgaattagggaatgtagaatatttgggggaaaatgtataaatcaagtgctgatgaagaaaaatgtagcctaacagtgtttctttccattgcaaactgtagaacagagggagcagccatgaatgattaagaaccactg

SEQ ID NO: 216530 - DNA, 518 bp, Homo sapiens
cccattttaaagtcagctgattagcaaacctaattctagtataaccttaatccccctttgccatgcaacttaacatatttgcaggatcctgggagtagggtaygagtatcttttttggtggggggccggccagcggggagcacattattctgcctactataccaggtatttccagtcactattggtgtgagtgtacagtatattcttacaacctatctggcagtttggcattaaaatgtccatgtaggttactttgcatcgtgagactaaaattaaatattaattagatttgcaagttcctttttatagcatagttttaaaccatatctcaaagacgttcaaaaatagttacattggctctctttcctgaaatgtagtggtgatgacctactattcatggtgtcctcaagcaaattccaggccatgcagagatgaaagtaattttctaaaaacattttttagaattgggcttactcttactgatagataagggaatcaggaaaccttttagtagcgaa

SEQ ID NO: 216531 - DNA, 540 bp, Homo sapiens
  misc_feature (1)...(540): n = A,T,C or G
atttaaagatacatttgccactaagcttgaaacctttagtgattctctatctggatatacaatacacactaatgttattaatattgagtagcttgcagttgagaatacatagttgttatttttctaaattaataatctatgactgagctcaagatttatgagctcttaaaagttgtacttcgttaggcatagttttttcacccatcataatrtaagtttttactcctaatgtgaaagtctgtgattgcaattttccatctctccattctcaaggaagcacctctgggtgggagtcaccagattcatccctgtcggcagtagcanaatgaatccagattctatcataatatttttacctcttttccttcttctagggattaggaaagacaacatgngggtctgccatggtcagaatctctttctggtgactttgcattcaaaaatttcctagcttgcttcataatacacggaagaacaatcataccccctgattttgctactctttgcagctgtctctaggagatatgccaatggcacgca

SEQ ID NO: 216532 - DNA, 590 bp, Homo sapiens
ttgttctattttaaaaatgatactacatggcaggttttatttttctcattttgcaattggagacactgtggctcacagaaggcacctgccttacccactgtaatacagctataaatagaagagtaaaagccaaacctaggtstgtccagtcccatgagtgtttttgcatgatggcaagtaattcagcttgtcctggctctaaatgaccttacattactgtcttggtctaaccattgtttcgtttgtgtctctcattaaaccacagctgggtgtggtggcatgcacctgtagttccagctactcgggaggctgaggatggagaatcacttgaacctgggaggcagaggttgtagtgagccgagatcgcaccgctgcactccagcctgggtaacagagggagactccatctcaaaacaagcaaccaaccaaaaaaataaaaaaaaaaaagaaaaggaaagaaaaaaagaaaaagaagctgccaaattgtgtagagatgtttgcccacagttgtgtagagataaagtcttcagattgctcttctggtttagtccttgtcacttctctttactctaactatctttgatttccaa

SEQ ID NO: 216533 - DNA, 617 bp, Homo sapiens
cttgtggtattacaagatgaaaagtaagtacttaattaccttagtttgacttaaatatccttgcaaatgaaaacattttgctgtcatatcatctttattatagttcttgtaacataattatgatctcttgttttaggttagaactcgagaacagattagcagatttggagaaatgaaagtggaacatgatgtctggaggcatctgaaaaggatcagtatgaagagaaattgcgggcttcacagatggcagaagagatcaccaggaaggagcttcagagtgttaggttatatatacatrtatatttaaagtttttcatgttgaaataaggtcagagttaacaaaatgatgtacaactagtacaaagaattcccatgtgctcttcaccctgatctcccaaatacaaatacctatgtaaccatattataataatcaagattaagaaattaacatgaatataatcaggaaatcaggcattactattataaaatctattaactgtacttaaattttaccagttgtcccactgatgtctttcttctggtctaaaacccaattcaggatcacatgttgcatttagttacttttaatctggaacttatgaacactttgacaaata

SEQ ID NO: 216534 - DNA, 398 bp, Homo sapiens
gtaagggaaggatttatggacatctttcaaaatgtcaaacaggaggaaggaattaattttgaaaaataatctactttcaaatgtcatctagatgactatggaaggaatgaaaataagctttaaaaatacatatggctataagacaaatataaaaaagctagccaatgatgatttaagccaatgwtgggtcaatcacccaagtgtaatgacttttaaagcaaatgtggatggtggtccataatttgatacattatagtgtgccagagaaggtctaagcaaaacaaacaaacaaacaaaaaaaaacacaaaacactgtatttggcaacaaaactgaattactttgatactatactactcttgagttctgaaaccaaaatgcattttgtaagaaattaaag

SEQ ID NO: 216535 - DNA, 578 bp, Homo sapiens
aaactgggtaaggaggcagataagaatatttgcagaagtgaatgatttaactctccctgaccttgtaattgtctcctcttgtaagtcacyccaatatacacagcttcatgtcctgcttccaaaccaaagctaagaggatggtatctactctttcttactcccattactaagtccaaatgcttatgtaacagcaattgtgagcatctactaacatatggaattctttatctttatcttcaattacttcatcagcggtctgcaatacttttgtgtgctctgactttaagagctttaataaacacgttgatacttctcataaagacattctggactcgcaattccccttttcctgactttcttcctctctccctccctctccttccctttcatctatggttccttccctccttctcatccttctttccttcacttatttttctatgcatttcctaccatgcatctttaaattttattcacaaatatttattgagcatataatatctgataggagtcctggggatttaaaactaacaaaagggcatccctgccctcaagaaccttagagcctgttcaggaca

SEQ ID NO: 216536 - DNA, 513 bp, Homo sapiens
ctttccacatcccacagtgtagggagaaacaacaatttatcatggaacatgtcctcctatcagaatctgaagttctgagagtgttgatagctcacactcagaaaaacaaggtttttactagtttcaaagatttagcctgtctcttttctttctggacctcagtttcctcattctaagaaagtgaatgtcattttcccaaagaactgtaaatcaatttttgctcctttttcatctttgataagtaagaatataaaatwttatgtgtttatgaaaatttgggccaatatgctatgatgttggaagtgcatattgcataatgtttgactgtttcgctttttctccttctctgggacctggaggtcaaaacatttgaatggtgggaaaagttgcagaaattaaatatgagacacaaacagcagaattaagaaggtgtcttggccaggcacggtggctcacacccgtaatcacagcactttgggaggctgaggcaggcagatcacaaggtcaggaatt

SEQ ID NO: 216537 - DNA, 494 bp, Homo sapiens
gcatgtatgtcttcttttaagaagtgtctgttcatattctttgcccatttttaatggctttatttgttttttctcttgccgatttgtttaagttccttatagatgctgggtgttagacctttgtcaggtgactagctcgtgaatatgttcgcctattcttaaggttgtctgtttactctgtcaatagcttcctttgttgtgcaaaagctctttcccactattgggtatacatccaaaggagaataaattgttctaccaaaaaggcacatgcactcgtatgttcattgcrgtgctatttacaagagtaaagccatggaatcaaccaatatgcctattaacagtggagtggataaagaaaatgtggtacatatggcactgcagaatactaggcagccataaaaatgaatcaaatcatgtcctttgcagcaacatggatgtggctggaggccattagcctgagtgaactaacacaggaagagaaaactaaatatcac

SEQ ID NO: 216538 - DNA, 470 bp, Homo sapiens
ctctatacgcttttgtagttatggatttatatgrgtaggttaggtttttgtaattaaagaaataaagacttcaaaaatgaaaaaggaaaacaattacaaaaataatatatactaatttaaatacagtaataatcacttcaaatgtgaattgtctaaatacaccaaaaatgggagacattaatagccaaggaccatgaagtggacttaaatagaaacctaactatacattttgtacaagatacccacttttataaagactcagataggttaaatacagtggaatggagaaaaacatttggtgcttgctaataaaaacaaagttggagtagctatattaatttcaaagtagactctagaataaaggctattattagagacaaggagggagattacataatgttaaaaggccagtgcttaaggaaggcataatactgcttaatatgtatgccaataaaaacagtatcaaaata

SEQ ID NO: 216539 - DNA, 470 bp, Homo sapiens
ctctatacgcttttgtagttatggatttatatgggtaggttaggtttttgtaattaaagaaataaagacttcaaaaatgaaaaaggaaaacaattacaaaaataatatatactaatttaaatacagtaataatcacttcaaatgtgaattgtctaaatacaccaaaaatgggagacattaatagccaaggaccatgaagtggacttaaatagaaacctaactatacattttgtacaagatacccacttttataaagactcagataggttaaatacagtggaatggagaaaaacatttggtgcttgctaataaaaacaaagttggagtagctatattaatttcaaagtagactctagaataaaggctattattagagacaaggagggagattacataatgttaaaaggccagtgcttaaggaaggcataatactgcttaatrtgtatgccaataaaaacagtatcaaaata

SEQ ID NO: 216540 - DNA, 664 bp, Homo sapiens
ccaccccacccctatccagaaaagaccttctcttccttcagatctaggttcatctcagaaaaaatgcttcttccttgttttgatttagaaaatttaccttcatattatctgaagtctctcctgcaggataatcatcacggaggtaattattttcttgactttctctctggtgaaatgtccattagagctgggatgagtatttatgttgttcagtgtatcatgccagcataggcacagtaccagatacacctcaatcatttaatgaatattttctgaataaacaaagacagcaatggagaaaggatgagctagaaatgccagtgatgtacctatttcttaggtgttatgtaattctttttgttactttgttttcctttaattgtgatatagttgcactggtaattattttcttgttctcataaaacaaaacaaaataattaaaaagccattcaaaatacatcctagtaaaattacaactgaaatgtwattgagtaaaaataaaatttacttatgtaagtcgtagagttttagtttttattctcaaggtcaatttcttaatctctctggaaatttattaatttcattaaaagatataaagaaaatgacacctgcaaagaccaatttaactacttttaactcttgttgtctttttagttcagccata

SEQ ID NO: 216541 - DNA, 447 bp, Homo sapiens
agaaataaagttttccttgatccaasagttttcaaataaagtcaaattaactcatttagcaattgaaaatgtactgcttaaaaggccaaaatataaaacaaagaataaaaataataggacatcattaatattgaaaatagaaaatcttctccaacttcataaaacaattttgggagactgtgatgtgcgtaatagtatcattatttaatatatgctgtgtattattttatttgaacattttctgttctccctaattagcatgcaaattccatgaggcagtgaacttgccaatctcttagtgattaccaaatgcctactgaatggcataatttacatatctatattctaaattgctttattttcagtgcaaattatttgtaaagttgtattatgagattttttaacggttttgtgagactacctctccttaaccttcaaatttgtaca

SEQ ID NO: 216542 - DNA, 436 bp, Homo sapiens
aagctagaaataaagttttccttgatccaacagttttcaaataaagtcaaattaactcatttagcaattgaaaatgtactgcttaaaaggccaaaatataaaacaaagaataaaaataataggacatcattaatattgaaaatagaaaatcttctccaacttcataaaacaattttgggagactgtgatgtgcgtaatagtatcattatttaatatatgctgtgtattattttatttgaacattttctgttctccctaattagcatgcaaattccatgaggcagtgaacttgccaatctcttagtgattascaaatgcctactgaatggcataatttacatatctatattctaaattgctttattttcagtgcaaattatttgtaaagttgtattatgagattttttaacggttttgtgagactacctctccttaa

SEQ ID NO: 216543 - DNA, 555 bp, Homo sapiens
tccccactctctctcttactctagtttctaccatgtgagatgccttgatacccctttgccttccaccatgattgtaagtttcctgaggccaacccagaagccaaacagatgccagcatcatgcctcccgtacaccctgcagagccrtgagccaattaaacctctttcctttgtaaattaccaagtctcaggtatttcctcatagcaatgggagaaagaaataatacaccttggtatattatcttaaatttaagcacatgactcaaaaagcatacatttcatataactcaccatgagggaatcagctacattaagtctaaagtagaacgttaaaaaattaatggcttagaaatgaaaagttaaaaggagaaaagcaagcagttcttggaaacaatactagacctacatgtggtaaagaaggaaggaactcaagtagaatgtacgactgtttcaaaaatctactgaaccttgctgaaagtatatggaaatgccagagaaaaattaaatactaaaggtatatcttagaatatactatttaatctctgtgtccctcact

SEQ ID NO: 216544 - DNA, 555 bp, Homo sapiens
tccccactctctctcttactctagtttctaccatgtgagatgccttgatacccctttgccttccaccatgattgtaagtttcctgaggccaacccagaagccaaacagatgccagcatcatgcctcccgtacaccctgcagagccatgagccaattaaacctctttcctttgtaaattaccaagtctcaggtatttcctcatagcaatgggagaaagaaataatacaccttggtatattatcttaaatttaagcacatgactcaaaaagcatacatttcatataactcaccatgagggaatcagctacattaagtctaaagtagaaygttaaaaaattaatggcttagaaatgaaaagttaaaaggagaaaagcaagcagttcttggaaacaatactagacctacatgtggtaaagaaggaaggaactcaagtagaatgtacgactgtttcaaaaatctactgaaccttgctgaaagtatatggaaatgccagagaaaaattaaatactaaaggtatatcttagaatatactatttaatctctgtgtccctcact

SEQ ID NO: 216545 - DNA, 555 bp, Homo sapiens
tccccactctctctcttactctagtttctaccatgtgagatgccttgatacccctttgccttccaccatgattgtaagtttcctgaggccaacccagaagccaaacagatgccagcatcatgcctcccgtacaccctgcagagccatgagccaattaaacctctttcctttgtaaattaccaagtctcaggtatttcctcatagcaatgggagaaagaaataatacaccttggtatattatcttaaatttaagcacatgactcaaaaagcatacatttcatataactcaccatgagggaatcagctacattaagtctaaagtagaacgttaaaaaattaatggcttagaaatgaaaagttaaaaggagaaaagcaagcagttcttggaaacaatactagacctacatgtggtaaagaaggaaggaactcaagtagaatgtacgactgtttcaaaaatctactgaaccttgctgaargtatatggaaatgccagagaaaaattaaatactaaaggtatatcttagaatatactatttaatctctgtgtccctcact

SEQ ID NO: 216546 - DNA, 555 bp, Homo sapiens
tccccactctctctcttactctagtttctaccatgtgagatgccttgatacccctttgccttccaccatgattgtaagtttcctgaggccaacccagaagccaaacagatgccagcatcatgcctcccgtacaccctgcagagccatgagccaattaaacctctttcctttgtaaattaccaagtctcaggtatttcctcatagcaatgggagaaagaaataatacaccttggtatattatcttaaatttaagcacatgactcaaaaagcatacatttcatataactcaccatgagggaatcagctacattaagtctaaagtagaacgttaaaaaattaatggcttagaaatgaaaagttaaaaggagaaaagcaagcagttcttggaaacaatactagacctacatgtggtaaagaaggaaggaactcaagtagaatgtacgactgtttcaaaaatctactgaaccttgctgaaagtatayggaaatgccagagaaaaattaaatactaaaggtatatcttagaatatactatttaatctctgtgtccctcact

SEQ ID NO: 216547 - DNA, 629 bp, Homo sapiens
ctagttttaatagcatgcaatgcatcaagatgcaaaaatcatcacatcacatagatatgtctctatgaagccaaaactacaaataagaaagtgagtaaatttcatgaaagagtcaatggaattgaaatgtttggcatttgtttgtccttttgaagaagctcaaatttgcaagtggagaaaaagtttttaaaaatttaaaatattttacgcaatcatttcttagtgccacagaccccaaaatgtatcagacttcaagccaaataaaattaaaagttacttttgaccattacactgtgtaaaccccatgtttttttttaatcagaaagatgacgtattcagttataaaaatgccagccttctatggatagtttctgctaatatcttgaacacaattttttttctgttggttttctamctgtgtccatttgattttgcccttttggcaattacaaatttcttgaaagaggctgtataagaatgatgccagccactgaccttatcatcagatagatgactctcacttctgttcttccacaaattgggcaaggcgagttattatttcctttgcaagagagacttaaccttgtatattacacgggctgctttcatcaggagaaggctcagcccta

SEQ ID NO: 216548 - DNA, 564 bp, Homo sapiens
tgtgtccatttgattttgcccttttggcaattacaaatttcttgaaagaggctgtataagaatgatgccagccactgaccttatcatcagatagatgactctcacttctgttcttccacaaattgggcaaggcgagttattatttcctttgcaagagagacttaaccttgtatattacacrggctgctttcatcaggagaaggctcagccctagttgatctgtggaatgctaatgattcatttcatctttcatggagaacacctcttgcaatcacagctcagatgtttcttgctattttcttgaaattgctgactgttaagcattctggtagggcttattgacctagcacctgtgtattttgggaagtgaaaagcagcaggtgaaaggcaaatgcaatggaggcatattttagatggtgacacttggttcccaaatcttctgatttataggccaatatctaatgagtgataaagtgggtgatcaggtgggactgttctgtgtttagaagactgaaatgatgagattatttcacaatgggtatggctaaatggatatttggtaag

SEQ ID NO: 216549 - DNA, 565 bp, Homo sapiens
cttagtgactggcaagcatgattrctttttttgttctgttcttctggtgaactaggcttagctagcactttgacataataggaatataatggatttctttgaattaaacttaataaagcagttttgcgtgagtactcattacatctgctggcactcagtaacctgtccatcattgtttaagccaggcacacacaggttggaagttggaaatgtgataataaattttatatcaactgacctagtattcaatatacatgagacatcatcatcatctcctttaggaacttgttctgtaatctaacaaaattagtttacatgacaaagtctcatagagccatttttaagggtgaattatgttattttaattatgttattttactgttggcttctctacacctctacttgaaagtcagaaagtcagatggcctttgcaaacttagcagaaactaaagtaactcccggttttctctgttaaacctgcttctcctggagtttccccgttttttgctagtgacaactccattcttataggtactaacaccaaaatatttacattcactttgaa

SEQ ID NO: 216550 - DNA, 534 bp, Homo sapiens
taaagacagaggagcaagacattaaatatgtagaaaatataaatattttagaatcggcaattcataaagaaatatacaagtcaattgtcttcctatgttttctamctacaaccaattagaagacataatgaatattcctaataatagtgataaaatgtaaaatacattcaataatattattcctattttaaaaatcatatatctaaaaatctcctgactagcaaaataataatattttgttataattgctaacatttcatggctgtctacaaaatgttaaatgcatgaccaagaaatatttataataatttgtaaaattaatattcttttttacttatttttttttaagagacatggttttgctctcactgtgttgcccagcccggtctcaaatttttgagcttaagcaatcctcctgcctcagcctcctaactgtctttaaaatcataagatattggtactattatttgccttatttgatggatgaagaagctgagattaaacagatgaaaacagagctgacaaatttcagag

SEQ ID NO: 216551 - DNA, 577 bp, Homo sapiens
cttctaaacattggtctaggcaaagaactcaggacaaagaccttaaaattggaagcaacaaaaacaacagtagacaaatgaaacataattaaactaaaaaacttctatatcatttatcaaagagaccatcctttcttcatattgtcttcatggtatctttggcagaatctaattggccgtaagtggatagattgatttctgcattctttatcctatttttttggtcaatgtgtctatttttatgcaagtatcacgctgttttgattatacaatggctttatactatgttttacaattacagtggtttttttggtgacgtttttagggtttttaaatttaaaatcatgtcattaacaaatagaagccattaaacttcctcccattctattagaatatatttcatttctttttcttgcctaattttactagrtaggacttccagtattatgttaaaagaaatgatgagagtgagcatccttgtcttactcttgatttcagttaacaatctttcaccttctcaccactgaatgtaatactatctggggcttgttgtcattagatttttgatagggattgt

SEQ ID NO: 216552 - DNA, 534 bp, Homo sapiens
taaagacagaggagcaagacattaaatatgtagaaaatataaatattttagaatcggcaattcataaagaaatatacaagtcaattgtcttcctatgttttctacctacaaccaattagaagacataatgaatattcctaataatagtgataaaatgtaaaatacattcaataatattattcctattttaaaaatcatatatctaaaaatctcctgactagcaaaataataatattttgttataattgctaacatttcatggctgtctacaaaatgttaaatgcatgaccaagaaatatttataataatttgtaaaattaatattcttttttacttatttttttttaagagacatggttttgctctcactrtgttgcccagcccggtctcaaatttttgagcttaagcaatcctcctgcctcagcctcctaactgtctttaaaatcataagatattggtactattatttgccttatttgatggatgaagaagctgagattaaacagatgaaaacagagctgacaaatttcagag

SEQ ID NO: 216553 - DNA, 534 bp, Homo sapiens
taaagacagaggagcaagacattaaatatgtagaaaatataaatattttagaatcggcaattcataaagaaatatacaagtcaattgtcttcctatgttttctacctacaaccaattagaagacataatgaatattcctaataatagtgataaaatgtaaaatacattcaataatattattcctattttaaaaatcatatatctaaaaatctcctgactagcaaaataataatattttgttataattgctaacatttcatggctgtctacaaaatgttaaatgcatgaccaagaaatatttataataatttgtaaaattaatattcttttttacttatttttttttaagagacatggttttgctctcactgtgttgcccagcccrgtctcaaatttttgagcttaagcaatcctcctgcctcagcctcctaactgtctttaaaatcataagatattggtactattatttgccttatttgatggatgaagaagctgagattaaacagatgaaaacagagctgacaaatttcagag

SEQ ID NO: 216554 - DNA, 548 bp, Homo sapiens
atgagatttggaaacagatgcttaggcctctggacaaggagaacttattgctatggagtatgagactccatagcaatggaggagccmtgggggagccagggcttacagctttgaattaatcaagctctgttctctagatatttgactcattctattttataatacttctccaaaatggctccagtccccctcactttttcacagctcaagttggaaggaagtcataaagaatagagaatagaaatatgggggatattcccaagctgagctagtacaaaacagttcccctaggtcagtaacacttgcgtttccaaggagacagacactttgaggaaagtcttaccaaatcataaatatgtaatttttttcttctcagaaatcctatcaagcaaatttagttaacttggccatagctcataaaacctaaatattgtgaggttgttgaatgtttaaacctaacatcaatgtacagttctacagaccctgaaatgttttctgaattcaaatcctcaatgcagaagaatagaagctaaacataagttggaagt

SEQ ID NO: 216555 - DNA, 568 bp, Homo sapiens
ttagtgtatattctctccttgaactctattttcaacctccattaatcctaatgtgagttatgtcttctatgtgggctttaaatatatcaaccactgtaaaaattacatgcaatgaaaatcagcatttgatgatgaaaatattttgtataatacaagagataagcaatgggaacggactcctgaagttattattatatgccaaaatctagttttttctttcttgttttgagcaacactttcctttaaaccccttgttagaagattaacataaagattttttttgtgatggctctaaaaagctgaagttataattgaattattttctttaaaatggttgacatgacgttaataatttatccttctctctcattcatctccaatataccacacaggtaaatrgctttgaacaggtttgggacttaacagacactgtagtccagtttaacttatcagaaagatgtaattaaatttttttttactaaaattatctgatatgcttttcttgtcatagacagattcttagtgacaggatgtggaaatgcctgcttgcgccaatttattttctccc

SEQ ID NO: 216556 - DNA, 567 bp, Homo sapiens
tggaggtggaaggaagccataatatccaaggacatggtgagatcttgcaaactctacacagacagtagccctggccagagatctctatctcaaagacgcatctgcactcccatgttcattgcakcatgattcataagcaacaagatatgaaaacaatctgtgtccatgaatggataaataaagaaaatgtgtgtatatacatatatatatatatatatatatatatatatattctgtcctaaaaagaagaaaaccctgccataaagaatctgtctttatggttgtgaggtatagtggaaatctctctagattaggatggaccacagttggctctgggtcccagctctgtcactatctaatttttgataagtgtcatatgtttcctgagctttatttcctctctgcaaaaaggagaacaaagacatctccctcatctatgtattttatcattttactgtgtatacctaatgagacaatgaaagcattacatgataagtaacatttcaaatatagtcttaacgttgtatagcacagtgtgaaagataactcttttcaagctccccaaag

SEQ ID NO: 216557 - DNA, 603 bp, Homo sapiens
aatttcattttttctattaatatataatgttgtaattaatattattgagcataaatcttttttctcagctaagatcaatatcttagcagagcttctcataagtgaagtactaatttaaaactgttaatactttcagagtagttgttgcyttcatttaaactgaggttaaatagaaaactattttattaaagcctcagagtgatattatgagtgattgtggttggttaatgatataaaagcctcttaactgctttgttttaaatgctccaactgataagattttcataaacccacttcattaatgccggtttcctcttatagctaccaaacttatgtccatggaactgctctgtctctgtacacactggtaattacagtttctcaagaaactatttatttagaatacttacagcctgtttggctcaaggaaaagaaaaacaaatatctctaaaatattatatggaaattaaatcacctaatctgttgacaatgttgaaaactttgcttggcctaccactcctaaaagctcatatatgtatgcttatatatgcccaaatcttaaattgtactgaatttagctagggttccgtagcagattgaatt

SEQ ID NO: 216558 - DNA, 559 bp, Homo sapiens
ttttttaagtcaatcgagccaaaagagagcatgtcacaatgtgaggaacatgggatttgatatgggaagtcatgggtctgagttctgcttcttattaattgtatgactttgagcaaatgattgtctttctgagcctcagtttatctccaagttggagattatatcacccggacctcaggtgaatgtcaaacttggggattgccagcttagttggactagtggggttgctccagtatatcaaaggagtgacaaaggagaagggcctggccatattcttcacaatcaatgagccaaaagatttgtatttagttgtccctggaaacaaagtaaattactctgtgaaaatacgctgctatttggatgatcagtgaccacataaatcctaggcagaaagagcagatcgatggaatccatacctattttttatagctttacttcctttttttcttgagtttttgacctatattccatgcattcagttgtacactgccacaatccaaaccaaatggaaatacagaagaattaatatttattwataaaattaaatgaaattttcaaa

SEQ ID NO: 216559 - DNA, 604 bp, Homo sapiens
aaccacaaacctctatagtcttgtaacccaacttgcaaacccatgcaatcaatcacctaaatgattaaccaataaatatttggtgagtacctaacaggcaataaaaaataagaacatgaggatgagcacaacagaactacttgaagaagtgaataataaggaaattattttacaaytgtataactgaaaatgataataatagtttgaaagaaatatttgtgatgcattgagacaataatgggagttacaaatttagatgggtttatgagatcaatcatgaggaaatatatgtaatggcatacgactgaaagcaaatcttgaacaattaattgatagttagctcaaatgacattgctacttgcaaatcaaaagaagttaaattcagagccatgactgatttaacttaagaggttacttgcattgaggctttggaatagcataaatcttctcttttgagatagctgggcttccttcccaagtgacacttaccactatctaggcatagcttgtggtttacatttctttgccttgcacagtcttgaaagttatgtgactgtgactataaacatgaaagatttggggaactccaatttactgttgttct

SEQ ID NO: 216560 - DNA, 604 bp, Homo sapiens
aaccacaaacctctatagtcttgtaacccaacttgcaaacccatgcaatcaatcacctaaatgattaaccaataaatatttggtgagtacctaacaggcaataaaaaataagaacatgaggatgagcacaacagaactacttgaagaagtgaataataaggaaattattttacaactgtataactgaaaatgataataatagtttgaaagaaatatttgtgatgcattgagacaataatgggagttacaaatttagatgggtttatgagatcaatcatgaggaaatatatgtaatggcatacgactgaaagcaaatcttgaacaattaattgatarttagctcaaatgacattgctacttgcaaatcaaaagaagttaaattcagagccatgactgatttaacttaagaggttacttgcattgaggctttggaatagcataaatcttctcttttgagatagctgggcttccttcccaagtgacacttaccactatctaggcatagcttgtggtttacatttctttgccttgcacagtcttgaaagttatgtgactgtgactataaacatgaaagatttggggaactccaatttactgttgttct

SEQ ID NO: 216561 - DNA, 608 bp, Homo sapiens
ctactcttcctgtagaacttcaagaggcaacactctctctctttacagggaatttgtcttatattgagaggagacctaagcagctgccaccatcttactccctgcccaaagataaaccccacagctggaggagaggaaaggtatgagaactgcaggcctgttgagctgatgttgctcatttaatcaatcctgaagcccacctcacctttggacttccagtttaagtaagccaataatttgcattgtgttttagctagtttggattggccttctgtctttggagctaaaggttcacgatatayctatgaatttagaggtattaccatacgctatggtgtgaatatggcttgttttgtcctgccaagtctcatgctgaaatttgatttccaatgttggaggtggggccttgtgggaggtgtttggatccttgggtaggggatccatcaatggcttggtgccattttcacaggagtgagttctcactcttagttcccgaaacaactgactggtgaagagactgacccttactcatctctctcactttctctcttaccatgtgatctctgtacacactgactttccttgccctatcctgtgagtagaagctt

SEQ ID NO: 216562 - DNA, 615 bp, Homo sapiens
tattatgtgctatgcaaatattatctcagttttattctatcccaaacaccagaattaaggtatcccattttaatgatgagaaagctgaggtgcaaagaggctaactaatttkccccaagttaacagcagaaggagccacaatgtgaacctggaaagtctaactgcatagtcaatgctcccaaccatctcagcatgctttttccttcctcaattaatgagaacacatttcattatattaatttgataatatttagagggatataatttctgaactgctttgttccatctctaaaaggcttagtttattataatgcctttggctggcattcttctgtaagtgtggtggtttaccaggccttctgtcctaggtaagaatgacataaaatgtctactgcagttaggttagtgtctccctcctgacagggctccacttttccttggagccacatatttaatgtaaggtgctcagtcatcaagcacatacatcagcggctctacagactggctattatcaacccaattcctggaggctgagcccagcaaatcagaattctacatttaaaataggtgttttcaaagcaaccttcttatcttaaaatgtggttaagtttcctt

SEQ ID NO: 216563 - DNA, 489 bp, Homo sapiens
agaataagaatgtgtagacctacatatgtttgtaatttttatgttaatccattcactcagcaaatatatattcagtatctactaagtaccaggtaccatagccaaaatgactgcacatttcactggtacatgttattcctgcacagttaccaacattaccaagactaaccctgtgcttacttcacttctagtaagttccctttactcaccatctcaatyacttacatgaaaggatttgttttgtcagttactttattttaaaataattagttctaatcaatgtgctgtgctcaccaccaattgctttttaaactctgttttaattccaattgtaggagtgcatgtttgtcttaaggtccttggaagaatttttttctttctaagcagacccctgaattccccctttaccactctttaagttttaagtcagtcctgcagagaaattttgtcctaccaggtgcagggaggaagatggtcaggaatgcctaa

SEQ ID NO: 216564 - DNA, 313 bp, Homo sapiens
gagatttaccaagttccaggattgaagctacgyacttttgattatggagcaaataagacaaacatggttgctacccttagagtgtgtacagtttgtaggaagacagatagccaagaggcaataacaaaatgcatgccgtggtaggtatgttgataggacaaaccattaaggaatcccagaataagagaattttacctagttcatgctatttctctaggcacatgagaacataatcttactgaatttcttgaaagagtctgagtatgacaggaacaattagattttaatggattccatactgataatttgacaa

SEQ ID NO: 216565 - DNA, 188 bp, Homo sapiens
tgaatgtgtgattaaaagtaaatctaagtgtactagtctcactaaaaaaaagaaaaggaaaaaaaacgcgaaagcattagatggtatacttctgtcgataaagatttcccataggagtgacatttaatttgagacccaaagggtgagtaaggttyatctgggtcaaaggggagcttaacaaattccat

SEQ ID NO: 216566 - DNA, 475 bp, Homo sapiens
agtgggacagttgtcctgttgagaccctcctctgacgtctcttgggagagcactgctcctgacctcaggctaactaaattgacagtttctacacagcactgatccactccaagcctcactgtcctcacatgtaaaaacaaggtaggattttgtgaggatttttttgacaattaaatgagataattatgtaaggaaaccaactaggtgcttggcatgtagcaatcattgaattctgtaattgcattacctgttttttgaggaataaaccttttgaggtttttttgaggtccttcattttataaattggactggaraacacaaaggtatcagggtggaagtggaaagacttgtgaatgtagaatcaatttctttatattgtcatggatttctgtttcttctttttaggactcaagatactggtacctttgtttttgtgttagctagatctccttaagtttcaagtgacagaaatgca

SEQ ID NO: 216567 - DNA, 567 bp, Homo sapiens
ttaaagcctggtgtatgttcagacacgctataatacaggtcagatcccattacagaaagtagctctttataaccaaatgatttcccacccacagcctctgcctggcttttttcaagcaatatatctgagataataaaattccagtttggaaggaaggaaggtaaagaagggagggaggaaggaattgacttacagtaagttcataaatcccttagagcttattaaaaggtgatttgacttactaccttgaaaagatcacartctatattttgaaagtcatgtctgtgggataaaaatggatacaaagggactttggggaaagaaacagatgagaatgttgtttggaccaaaagaaaaaaaaaatcaacgtcctcgtgttaattcagtagtttttcaatttaagtattaactgagaaaccatgaggtttgtcatctcttttagatttttccactatatgcaggacactgtgctggtcacagtgagagattcaaagatgaattggtcagttccttcactagagcaactccaagctgcaggcaaggcacaaacacatgtaaatccaaccc

SEQ ID NO: 216568 - DNA, 573 bp, Homo sapiens
ggtccagtggagagacaggtaagtcaagggttaggttgaaaactacacgataagtggtaggacttaggtgcaatggaaataattgagaatgttgatggtggcagaaaaggctagattactggtatctcytcctaacctgtccttccctgattcctggcagggtcaccaaattagtttttatatcatcacggcctggcatagtaccttgcagacaatacagactcagtaactgttgaattcagtggaaaccaacctaccccaagtattttcatcaatttgtactccagttaaaaaaagcattcagtgcctccccattaccagctacatcaggacacatcctgctgcctggcttttgaagtcattcaccatctggtcctccctggttatccaatctcattgcctgctgtacttcaacccagtgatttctgcctttatctggagcatctccgcaaaggccaccaacttggcccagtgctcatgccttctcatgatctcccttgctgtcttcaaccaaagggaaggggctcagttaaagttcaacttctaagaagcttttccccactccatcaagcc

SEQ ID NO: 216569 - DNA, 566 bp, Homo sapiens
aagcttctctgaagtagcatgtaagatatttctgaggcttaaacaagggatcttacagtcccattctgaattcatattttcccagagcctatttattaatttgggacactttcctggctaagatgactattctgagaccttatctatccttccaattaggcttgaaggcttaagaattcattcttggccgggcatggtggctcacacctgtaatcccagcactctgggaggctgagacgggcagatcacctaaggtcaggagttcaagaccagcctggccatggtgaaaccctgtctctactaaaaaaaatacaaaaaattagccaggcattrtggtgtgcgcctgtaatcccagctactcgggaggctgtggcaggagaatcgcttgaacccgggaggtggagattacagtgacccaagatggtgcctttgcactccagcctgggcaacaggaatgaaactccatctcgaaaaaaaagaaaaaaaggaattcattcttgagtttgtctcattcctcccattttgttatagggaacagaaagaagttagtcagcaccctcaatgct

SEQ ID NO: 216570 - DNA, 630 bp, Homo sapiens
ttttttttaaagcacaaagtaacaggagaacaaaatatacaaaactttcaaatatatcagaaataacattccttctttgattattrttatggtgctaagaattattgttttgaaaaggagccattttatcacacagttgagacatatttcataagaaacaaaaacataaaatcaaataaaagttgttagagtattacttgtacacatgcatttccagtctgattaaaacatcttttacattaatttgttattaaatttattaattatgcataggtgtttacctacaataattatatagtcaaagaagtgtcataccattagaacacaaaatgatctcagaatatctgactcttactcaagagtttggcaattctttctcaacaaagtgttttcacaccttttgacttttacagacacaagagcaaagcactctttaggaattttttacatcttcactgaataagacaaagtccagagacagaaattttcaccagtgtttttgtatgccatgtatcacatttcctactaattgttggaacagagaaattaaagacatataattagcatgaatgtatccagaaataagcaaagtaattactagtttctcatcatgattattcagtacgactt

SEQ ID NO: 216571 - DNA, 630 bp, Homo sapiens
ttttttttaaagcacaaagtaacaggagaacaaaatatacaaaactttcaaatatatcagaaataacattccttctttgattattgttatggtgctaagaattattgttttgaaaaggagccattttatcacacagttgagacatatttcataagaaacaaaaacataaaatcaaataaaagttgttagagtattayttgtacacatgcatttccagtctgattaaaacatcttttacattaatttgttattaaatttattaattatgcataggtgtttacctacaataattatatagtcaaagaagtgtcataccattagaacacaaaatgatctcagaatatctgactcttactcaagagtttggcaattctttctcaacaaagtgttttcacaccttttgacttttacagacacaagagcaaagcactctttaggaattttttacatcttcactgaataagacaaagtccagagacagaaattttcaccagtgtttttgtatgccatgtatcacatttcctactaattgttggaacagagaaattaaagacatataattagcatgaatgtatccagaaataagcaaagtaattactagtttctcatcatgattattcagtacgactt

SEQ ID NO: 216572 - DNA, 630 bp, Homo sapiens
ttttttttaaagcacaaagtaacaggagaacaaaatatacaaaactttcaaatatatcagaaataacattccttctttgattattgttatggtgctaagaattattgttttgaaaaggagccattttatcacacagttgagacatatttcataagaaacaaaaacataaaatcaaataaaagttgttagagtattacttgtacacatgcatttccagtctgattaaaacatcttttacattaatttgttattaaatttattaattatgcataggtgtttacctacaataattatatagtcaaagaagtgtcataccattagaacacaaaatgatctcagaatatctgactcttactcaagagtttggcaattctttctcaacaaagtgttttcacaccttttgacttttacagacacaagagcaaagcactctttaggaattttttacatcttcactgaataagacaaagtccagagacagaaattttcaccrgtgtttttgtatgccatgtatcacatttcctactaattgttggaacagagaaattaaagacatataattagcatgaatgtatccagaaataagcaaagtaattactagtttctcatcatgattattcagtacgactt

SEQ ID NO: 216573 - DNA, 517 bp, Homo sapiens
aacaaaaacataaaatcaaataaaagttgttagagtattacttgtacacatgcatttccagtctgattaaaacatcttttacattaatttgttattaaatttattaattatgcataggtgtttacctacaataattatatagtcaaagaagtgtcataccattagaacacaaaatgatctcagaatatctgactcttactcaagagtttggcaattctttctcaacaaagtgttttcacaccttttgacttttacagacacaagagcaaagcactctttaggaattttttacatcttcactgaataagacaaagtccagagacagaaattttcaccagtgtttttgtatgccatgtatcacatttcctactaattgttggaacagagaaattaaagacatataattagcatgaatgtatccagaaataagcaaagtaattactagtttctcatcatgattattcagtaygacttaaatgtttttggtgggaaacttgatattgaaataattaatatt

SEQ ID NO: 216574 - DNA, 594 bp, Homo sapiens
agacaaagaaaaaggattctaggagaatgttcttatgaatttgaactttgaaaattagcaactctggttctgtttacgttaatggaaatttacttttcctcaaatttgtcttaattatctgggcaataataccagccctccatttattaggatcttgggcacttgtttggaggttccagcaggtaagcagggttactaaatacccttgacagaggacagatctcctctttctgtggagattggcccctctttggacttaaagcattagtaaatatgcacagtgacaactgagagcaagagacctgcacgtcaccaactgaatcagcagaattaatccagttgatcaatttgtgaagacacactcgccagatcactttcacttcctgycatttcacccagtttcctttgatgcaggctagatgtgttgcattttgtagcagtacagactttacattttgtagccaacataacctatagacatgaagtaattgataccaaaggctagtgataagtatctagtgctcaggagttttgtcttctgaattttcaggcttactcttctaactttgtcaggtacccttatgccaccttata

SEQ ID NO: 216575 - DNA, 441 bp, Homo sapiens
gaattctgcaggtcaacttatgtatgtacattaatttattactcaatcttgttttaatttataatttttgttgttataagcaatgcttttatgaacaatcttgtaataaaacattgttccgagattctttccttttttttttttttgtgagatggagtcttgctctttcgcccaggctggagtgcagtagcrcaatcttggctcactgcaacctctgccagccgggttcaaacaattctcctgcctcagcctcctaagtagctgtgatttcagttgcacatcaccatgcccagctattgttttctgtttctagtagagattgggtttcacatgttggccaggctagtctcagactcctgacctcaagtgatctgcctgcctctgcctcccaaagtgctgggatcacaggcatgagccaccacgcctggccaagattcttct

SEQ ID NO: 216576 - DNA, 626 bp, Homo sapiens
aagaaaatatcatacaagtgttcaaacaacgtataccaggactttcactgtagtattttatataatatgaaacaactgaaaaccacctaaataaccctccacaggcaactggctaactcatcacagataaacatgacaaagtttatttagccattacaataattacatagttctatctattgtcatggattgacgtgttgggtgaaatagaggctccagaacaatatcctataaaaccacttatatgaaactgtgtgtagaaaagtgttgtccaatatcttaatgatgactgtatctgkattatgtgatataagattacttttactttctttacactttctaaaagtttcattattaatattattttcaattacgtaacctctgtacactatgaaaaaataataactcttttcattttgaaaaaaaaaaacaaaaccttttccccaatcgatgacaattccatagtacaaatagctgccagatgggaccaacggaagctttaaaaaataagccccaaagtcatcaatcctatgtatccactgcctttttacagagcagattgtggggcaactactgggccaaattcccttctcatcaagtgctgtggggaagagagcataggaaag

SEQ ID NO: 216577 - DNA, 626 bp, Homo sapiens
aagaaaatatcatacaagtgttcaaacaacgtataccaggactttcactgtagtattttatataatatgaaacaactgaaaaccacctaaataaccctccacaggcaactggctaactcatcacagataaacatgacaaagtttatttagccattacaataattacatagttctatctattgtcatggattgacgtgttgggtgaaatagaggctccagaacaatatcctataaaaccacttatatgaaactgtgtgtagaaaagtgttgtccaatatcttaatgatgactgtatctggattatgtgatataagattacttttactttctttacactttctaaaagtttcattattaatattattttcaattacgtaacctctgtacactatgaaaaaataataactcttttcattttgaaaaaaaaaaamaaaaccttttccccaatcgatgacaattccatagtacaaatagctgccagatgggaccaacggaagctttaaaaaataagccccaaagtcatcaatcctatgtatccactgcctttttacagagcagattgtggggcaactactgggccaaattcccttctcatcaagtgctgtggggaagagagcataggaaag

SEQ ID NO: 216578 - DNA, 610 bp, Homo sapiens
gtataaaatataggtgaaattgtgtcaaattattgtatccgtgctggatactgacaaaataatatataaatatataatataaatatgtaaatatataaatataagtatttatatgagagagggagagagagaaggaacatttagatcacagggtgagactaagaaataatattagcagtaatttgaaatgcaaaatcccaaaatgtgaaaatgtaaaattgtaaaatcctgaacctacttaagataaagagcagtaatttgatgaaaagcaacgaccaaactttgaaagcactctctgagaacagtcatgtttgtttgagagaactgtgggttttttaaaagtctggattaaatattggacataaaatatacgaasactgtgaccagcttttctccccccttttccccattccacaccaaacaatgtattttgaattgttgaaactcttggtattggaatacagtttcaggttaaaataaagtggttctatgaaggtagtatttcaggacatttttcaagactccctttctttctggtgccctggtattgctaagagctcataacaggaaaatatttcatagttttggtggctttcttgcaaaagcagga

SEQ ID NO: 216579 - DNA, 604 bp, Homo sapiens
gattctacccctggatgggaaggacaaagtcaccatacaaaagaaggatgcatagttggaccacaggattttgtggccataatttaaaatctgtcctctggtcactactgtttgttttctttctgcatggaaagtacattcatccattctcaaggtatcaaaagtctcctccagcctttggtttggcatcaagctctaagtcctgtgttgcatcgtttgcatcttgtccagatagagatgaggttcctcaggtgaaatttctctcaatccatagacccgttaactaaaaagagaagttacctgctccccacttcttcaacatgcagtgatgaggcaggagtggggtcacttcaatagatgcttctgtccaaggagtgagagaattgarcagagggagcaattgtggtccagccattctgaaatccagtgagccacacgtggccagttcgttttgtccaggggcaaggcatgttccttgctatcttggtaagagatggctcaagattgcaactgatagttttcttagccttcttcctagacacacaaagttgtggttccagtctcctgttcatttggagtggtgctgtcccttcagtgaaagctg

SEQ ID NO: 216580 - DNA, 651 bp, Homo sapiens
actggcaggtccagggcggctcactcatgtatcaggcagctgttgctggctgccatctgaggtacctcagttctcctccaagtgactttttttcttttcttttcttttcttttagctgtatttttactcattgaaacactaggtgaaatcagggtaaagtcaactaaaggaaaaatggttatttcattcatttgtacttaaaccagtcaaaraagtacaaatgtcattatgatgcagcaaatacaagacctctttctacaaatattagcacaaccaacaaattaggggatatagtaaaacagagccgaaaagggtgaggaaatcaatgaagtatgttacagcttaactctttacctcaatagagtttttaaaaataagtaaagcctcccaatccccaaaaataggaatataccttcatcacaccaatttgtacttttatttcttattcttgaggtttagaatctatcctccaagtgacttcttattcacgaggatcttagaccagtttccttgtgtagaggtctcagagcagagttgaattccaatatagccaaagtggaatctcaagtcctcttaaggcccagcctcagatgtcacttaaaatcacttctgtcatattattgatcaatgtagatctcaatgccagcccag

SEQ ID NO: 216581 - DNA, 651 bp, Homo sapiens
actggcaggtccagggcggctcactcatgtatcaggcagctgttgctggctgccatctgaggtacctcagttctcctccaagtgactttttttcttttcttttcttttcttttagctgtatttttactcattgaaacactaggtgaaatcagggtaaagtcaactaaaggaaaaatggttatttcattcatttgtacttaaaccagtcaaaawagtacaaatgtcattatgatgcagcaaatacaagacctctttctacaaatattagcacaaccaacaaattaggggatatagtaaaacagagccgaaaagggtgaggaaatcaatgaagtatgttacagcttaactctttacctcaatagagtttttaaaaataagtaaagcctcccaatccccaaaaataggaatataccttcatcacaccaatttgtacttttatttcttattcttgaggtttagaatctatcctccaagtgacttcttattcacgaggatcttagaccagtttccttgtgtagaggtctcagagcagagttgaattccaatatagccaaagtggaatctcaagtcctcttaaggcccagcctcagatgtcacttaaaatcacttctgtcatattattgatcaatgtagatctcaatgccagcccag

SEQ ID NO: 216582 - DNA, 651 bp, Homo sapiens
actggcaggtccagggcggctcactcatgtatcaggcagctgttgctggctgccatctgaggtacctcagttctcctccaagtgactttttttcttttcttttcttttcttttagctgtatttttactcattgaaacactaggtgaaatcagggtaaagtcaactaaaggaaaaatggttatttcattcatttgtacttaaaccagtcaaaaaagtacaaatgtcattatgatgcagcaaatacaagacctctttctacaaatattagcacaaccaacaaattaggggatatagtaaaacagagccraaaagggtgaggaaatcaatgaagtatgttacagcttaactctttacctcaatagagtttttaaaaataagtaaagcctcccaatccccaaaaataggaatataccttcatcacaccaatttgtacttttatttcttattcttgaggtttagaatctatcctccaagtgacttcttattcacgaggatcttagaccagtttccttgtgtagaggtctcagagcagagttgaattccaatatagccaaagtggaatctcaagtcctcttaaggcccagcctcagatgtcacttaaaatcacttctgtcatattattgatcaatgtagatctcaatgccagcccag

SEQ ID NO: 216583 - DNA, 651 bp, Homo sapiens
actggcaggtccagggcggctcactcatgtatcaggcagctgttgctggctgccatctgaggtacctcagttctcctccaagtgactttttttcttttcttttcttttcttttagctgtatttttactcattgaaacactaggtgaaatcagggtaaagtcaactaaaggaaaaatggttatttcattcatttgtacttaaaccagtcaaaaaagtacaaatgtcattatgatgcagcaaatacaagacctctttctacaaatattagcacaaccaacaaattaggggatatagtaaaacagagccgaaaagggtgaggaaatcaatgaagtatgttacagcttaactctttacctcaatagagtttttaaaaataagtaaagcctcccaatccccaaaaataggaatataccttcatcacaccaatttgtacttttatttcttattcttgaggtttagaatctatcctccaagtgacttcttattcacgaggatcttagaccagtttccttgtgtagaggtctcagagcagagttgaattccaatayagccaaagtggaatctcaagtcctcttaaggcccagcctcagatgtcacttaaaatcacttctgtcatattattgatcaatgtagatctcaatgccagcccag

SEQ ID NO: 216584 - DNA, 661 bp, Homo sapiens
cagagtccaaaattgaaagtccattttttctttatcacttgtatcttggcaataatgacacaatcattattacttggataactgagtttttaaaagaggatttttacctcttcaaaattaatttccattcattttgtacagggagccctcaaatagcttttgtaagagttgtttgttgaaaaacataaactggtaataattttgcatcagtcgtttaagtaattggattccmaggtagcagatgcttctggcaccccatgtctcatctcagctacatcagtggtagacattcccatatactctgacagcttctttcttcaagcactcgtagtatctgtctggctttctgcctcaggcgcttttcttaaaggcacaagttgcacagagcagctttgaagtgttggggagttagtagtaccaagggaccctcaaccaatggatatgggagtctatgaataaatgctccaccctaaaattacagggtaattctgagacaggtgattctgaggcatattttacacatgtcttatagagttcccctagagtcatcagtgggactgagttccagttgccaatagcagtaaccctcaatagcacatcctttgttagcttttcctccttccccatctcgctctccacacatcctcattcttgccacctg

SEQ ID NO: 216585 - DNA, 661 bp, Homo sapiens
cagagtccaaaattgaaagtccattttttctttatcacttgtatcttggcaataatgacacaatcattattacttggataactgagtttttaaaagaggatttttacctcttcaaaattaatttccattcattttgtacagggagccctcaaatagcttttgtaagagttgtttgttgaaaaacataaactggtaataattttgcatcagtcgtttaagtaattggattcccaggtagcagatgcttctggcaccccatgtctcatctcagctayatcagtggtagacattcccatatactctgacagcttctttcttcaagcactcgtagtatctgtctggctttctgcctcaggcgcttttcttaaaggcacaagttgcacagagcagctttgaagtgttggggagttagtagtaccaagggaccctcaaccaatggatatgggagtctatgaataaatgctccaccctaaaattacagggtaattctgagacaggtgattctgaggcatattttacacatgtcttatagagttcccctagagtcatcagtgggactgagttccagttgccaatagcagtaaccctcaatagcacatcctttgttagcttttcctccttccccatctcgctctccacacatcctcattcttgccacctg

SEQ ID NO: 216586 - DNA, 615 bp, Homo sapiens
gtgcccctgtgtcacttggaaaatacctgtgtctttttggggtagcctgcatcccctagtagttaattatttagttacttacctstgacagatctaacaaggtaggccttagaagttaatctggtggcaaaaggagtaggtttagaaaggaaaacacaccaaattgcataggatttgtcatcaagaaatttgagtataatgtactcttggaaactgagtgattggaagaaaaacctaacactgtctaaatacatgggagtgttgtaaactgcatagtaggactcaaaaaccaagactgtgctatgtgctagtatttctgctgtaaatgcctagtaattccttattcccaatctgtagttggaccttgaacactggctcacgcaaagcaagttctattgattttatttatatcctatagatacagaatgtgaatgcataccaataactgcaaaagcaagcagctaacgcagattagagttaacattagcaaagaaagatgggttggtacttatttttttgaaaaacacagcaggaacaatttaatagctgactgaattgctacccagaagacatgcacaggcacgtttgctgattagccgaggtccacttttgttc

SEQ ID NO: 216587 - DNA, 601 bp, Homo sapiens
ctataaatcacttctgaagttaacatggtggcagtcttaacttgccattcagtggaatcactgttgtgtcttttggtggaaacactcctccctttggaactaaaacctttggaccctcagaacctaatgtcatgagaggaggaggcaaaagttgtgatagtgggttacttcagataatggcaacatcactctcatttccacgtcttaattccttgactcaggaattctagctattggagaggcagcatcatatattggacactgattcagagcataygctatcttctaaacaatcttaacccagccctacaagggattgtcacctagctgacactgtaacattgcttagtcaaaccagctgctttaggatggcgggtaatatggtaagaccactgaattccatgagcataggcccattgctgcattttgttagttattcagtgagtttcatgatgaaaaacaattctgaggagaataccatgatggtggataaggcatcctggaggtaaacaaatggtattgttgaaagaactattgcatgtattgagacaaataaatatccaaagtagttgtcagattgctgccccttccatgatgaaag

SEQ ID NO: 216588 - DNA, 601 bp, Homo sapiens
ctataaatcacttctgaagttaacatggtggcagtcttaacttgccattcagtggaatcactgttgtgtcttttggtggaaacactcctccctttggaactaaaacctttggaccctcagaacctaatgtcatgagaggaggaggcaaaagttgtgatagtgggttacttcagataatggcaacatcactctcatttccacgtcttaattccttgactcaggaattctagctattggagaggcagcatcatatattggacactgattcagagcatatgctatcttctaaacaatcttaacccagccctacaagggattgtcacctagctgacactgtaacattgcttagtcaaaccagctgctttaggatggygggtaatatggtaagaccactgaattccatgagcataggcccattgctgcattttgttagttattcagtgagtttcatgatgaaaaacaattctgaggagaataccatgatggtggataaggcatcctggaggtaaacaaatggtattgttgaaagaactattgcatgtattgagacaaataaatatccaaagtagttgtcagattgctgccccttccatgatgaaag

SEQ ID NO: 216589 - DNA, 577 bp, Homo sapiens
gcttgctacatggaatggcatagtttttaattttgattttttaaaaatttcagttcaacatagatataatatttagttctggtcttaaaataactcaagcccactatttttattccagtatgtttccattatattataaacaaaaaagagctcatctgtcctttcaggtagtacctcagaaaccatagaaaccgcctgtttatatcaccttgtctttccttcctcttcataaacctttccaacagagtgaaggtacattttagttttattaggccataaaacttggtgcaatacatttcatccttttaygaattgtcttgagaacattttaattgtgtttcattgtgccttggtgtcagatatgttcttttatgacctactcttcaaacctcactcattactcttctcagtttctctgctaatgagcaacattgtctttcataagatcttttgtcagttctaaagctgtaaacttctccgtgtgagtatttgtgcttatgtgtcttcgtgttttaactgcatatttttaatcttgctcttctaattttcttcactcagttacaaacatccataaaat

SEQ ID NO: 216590 - DNA, 566 bp, Homo sapiens
gcattgttattattgctttaaacattcttttaaatagaacatgagaaagcaaaagtcttcactattaacccatatatttcccatttttagaggtgcttatgtccgtttgtagatccaattttccctatgacatatattgttctacagcagggacttccattaacatttcctccactattggtatggtgggaaataattaagctaattacatttaaaatgtctttgatgcaccttattttttttaaaaagtactatagttggatataggaatttaggttgatgggagtatttcagtgctttaaacatgccattccaatgtccatcagatcccattattttggataagaaattagttgtagctctratcattattctataatcttttttctcagattgctatttttttctctttatcaatcagtgtttttcagaaatttaattataaagtgcctttgtataatttcatacttcccctgccccagctccatggtttgttaagctttttggatttgcagcctgttatatttcatcaattctggaaatctacagacactttttttttttca

SEQ ID NO: 216591 - DNA, 556 bp, Homo sapiens
gttgccactcaggctggagttcagtggcgtggatcttggcttactgcaacctccatctcctgagttcaagcgattcttctgcctcagcctcctaagtacctggggttactggcatgagtgccaccatgcctggctaattttcttgtatttttagtagagacagggtttcaccatgttagccaggctggtctcagattcccgaacttaggtgatctgcccgcttcagcctcccagattgctgggattacaggcatgagccaccccacccagtctagaaaagcattctcatttaaaaattaccttctgtgytttctatgtaacctttacattaaattttacttttaaaactttgatactgttcaaaattatatgatataaaaagcaaaaatgcatttatctgtttatttcaaaattaaataaccagtttccccaacctaattttttgaaaaatcttttttttgccctctgatcttgtattacaccccaacataacacatttcatacatagctcttttacattaattccagaggtgttgaactgtatatagggtaggtt

SEQ ID NO: 216592 - DNA, 472 bp, Homo sapiens
atgagtacactgtccattcagattttcaggaaaggtaaatttacaacagaatggagcccaygaggaaacagcaaaccatgttctttaattgccaaggtattttttccttttaaatgaagacagagaaagccatggtctagagaccacctaggccttgagaaagacagagacagatagagatagttattttctcacatttaaatttctcttaaggtgtttctcttattcctgtatctcatttttatgcgatttctcattatctttttacttactttggtctgttttaactttttttcctaattaatgttgcctatttttcaaatgcatttctagcactgtgcttcgtttgaacaaaataaatattatatgaagtgaccttcagattttattaaaaagatatgcttcaaataacacttacttccatacactttgtcatatctaattcaattttcttttgttgctttacacttag

SEQ ID NO: 216593 - DNA, 505 bp, Homo sapiens
ataataacagtagcaagcaagctcataatgttaaatggtactagtatctatcaacagtgagaaaactacctcacttacaagaaagggacatgacattattcttaatccaggaacttgtcttcttttattccccmtgaaatgtgcctttattcttttttaccattttaataggctgaaattataaatgcagagtgaaatatgtaagtccaagcatatcattaattttgtgaaataatatattcaactataagacatatatcttccttgatcagtaggcttatgactgtttaacaatatgaagttgatcacattcaacattcactcactttctttagtgagagagctttaaaaggtcaaattctaattacattggaaaaaacagctggcccaacacctcacagcattgtgtctattttactttcaaaaatactcatttgaggctacaacctttcccccttgagtgtaaaaaaaaaatctggtgacaaaaaattgtctcacattttgt

SEQ ID NO: 216594 - DNA, 290 bp, Homo sapiens
ttgtgaatgaagtagaaagagttgatttyctgcactctggctattctgctccagatgaggaagtatctatttctcatgctcagagggaaggtctgtctcttttgaagttaaagcacaagttagcactgtgttaacagctgcacagcaagaagacctaagtgaagcttggtgaccactgccccattgccaggaccgggacagagcagtttcagggagacagaggagtctcccacaagagagaaattcttatgcatgcccatttattttctctttcatttgtattttgcctc

SEQ ID NO: 216595 - DNA, 487 bp, Homo sapiens
cttactgtaatatgatttaatatcttgagaaagtcaatgtcttaatgaatctaatgtatcaagtaatgcttctcacatttatgtaatggattaacccccttaaaaactcaaaataaccaaaataggaaataataccccaaaaacaattaatgggtatccagcatcattataattatattgtcaaatatatttaaatctaggttttctataaatcaattatgactatagttcgtattttgaaaaaccaggtgaaaaacaaaacaaaataaaacaaacatgttaaaagttggtttttaaaggatakacaaacaatgctatatttggtccatccaagatgacacagactcatttttccatgctcctcatttctaagtacacctataatccatagaaataattcaagagataaccaaaggagaattctgaaaagtgaagagaggacagaaaattgatgagagactcaaatactggagggacaaaatcaaag

SEQ ID NO: 216596 - DNA, 581 bp, Homo sapiens
gaagttcttcaaacagaaaaaaaaaatggtttaaagaaggaagtcttacattatcagaagggatgacaaacaatagaatgagaaaaaatgagagtgtacacaatagactattatcttccttatgcattttytaaatcatatataatgatttaaatctaaattataacatcatctgatacccaaggtaattgtacttaaaagtttggaaggtgaaaggacataaatggaagtcaggttttcacgtttcatttgaaatggcaaatcctgatacaagtagactgtaataagcccaattcgtatgttgtaataccagagaattactaaaggaactctacgaagagattaactcaaaaattttataaggaaataaaaaaggaatcttaaaaaatgttcaagcaacccacagaaaagcaagaaaagagaaatgagaaacagagaaaaacagaaagcaaatgataaaataatatacttaattcttaatgttgtgatgattaccataagtataaatggtataaatgccacacaaaaagaaaaaattagcagaaaggagttttaaaaattggctttagtatatatggtgt

SEQ ID NO: 216597 - DNA, 436 bp, Homo sapiens
tacttgtatgcttaaatgagaaaatgtctttccttaaagtcaaccaaccaacaaaaactcttttatttatggagaacacagcgtgatgaaagagcaaggctagatgactagggcattttgaaattagtagcatttttctgacrtttgcagaagataagcaaaaccatgaccacatgcagttgcatgcccaggtacaaaaactgccgtgtgtgtgtgtgtgtgtgtgtgtgtgtgtgtgtgtgtgtctgtatatatattatataatggcaaatacatgtatatatatatgtatttgccttacatacctaggaagcaaatcaatttgggatagaaagtgacatccctaaataaagaaggtaagtgaatggaagtttataataaatatacagtcctcttcatcaaggacagagaaaatacctatgcaaaaagtagacac

SEQ ID NO: 216598 - DNA, 476 bp, Homo sapiens
gaattctactgaacattgaaccagttgctttatatcattttagctttgtaataatcaagcaagggatatttgtgcccccattacatagatgaggaaaatagagatcaaagagctcaagtgattgtggtcacrtgtggtccttatacatgtggtcttaagtagcaatgctggggtttaagaccagctctgtggctccacaggtcttttcctttctgctctgccacatcacttctccatagccccagttggctccttaccagtgaggcccttgtgccatctcctttagctctgatgaaatgtgccttttgctactgatgaaccagagaaagccagaccttaccatgctcttcttgtcagccttctgaatggtatagcctgtgatagcagcatttccatcatcctttggtggagtccatgtgagagcgacattttctccccagacatcctcaatcttcacaatttggggtggacctgga

SEQ ID NO: 216599 - DNA, 476 bp, Homo sapiens
gaattctactgaacattgaaccagttgctttatatcattttagctttgtaataatcaagcaagggatatttgtgcccccattacatagatgaggaaaatagagatcaaagagctcaagtgattgtggtcacgtgtggtccttatacatgtggtcttaagtagcaatgctggggtttaagaccagctctgtggctccacaggtcttttcctttctgctctgccacatcacttctccatagccccagttggctccttaccagtgaggcccttgtgccatctcctttasctctgatgaaatgtgccttttgctactgatgaaccagagaaagccagaccttaccatgctcttcttgtcagccttctgaatggtatagcctgtgatagcagcatttccatcatcctttggtggagtccatgtgagagcgacattttctccccagacatcctcaatcttcacaatttggggtggacctgga

SEQ ID NO: 216600 - DNA, 473 bp, Homo sapiens
atgctttgaatttgctcatggaatataaaatgggaaatttctttaraaaattagacaggtcatttgcaaccctgttacatgtcagaatctccagggcaacttttactaaacacccatgttgaagcttcactgccttgcccaagcccatattctgatttaattggcatggagtggggcggggctctggcacaactatttttaaattaatattctcctaaaggggagaaaacgtgcagcccagagttgcaaccacagctctcaacagtcagacttttttaaaaaataaattttattctaaatatttaaggtaaacaacatgacgtcatgagatacatatagacaataaaatggttactatagggagcaaattaccatacccatcatctcacataattaccccctttggtgtgtgtggcaagagcagctaacatctgctcatttagcaaaaatcctaaatacagtattactaactc

SEQ ID NO: 216601 - DNA, 395 bp, Homo sapiens
gaaggctgcaaggccaattttccattttctttttctagtaaaaacataaaagaatgcacatctaattcccaaagtaaagacagagcgaggttgagcctcctattatattttctttcttttattttcttcttcttttttttcactttttttcttctttcttaaacctgaaatttaaagcaggattacatttttctgattcccaggttgtatcttctataagacaatcaatagccaatrtacaaagaggaaaaacagagaaggtcaaagtaatttagaaactggttatttgccactaaatactaggtaaactctctactcttttgtgtctgtatcaggactcataagtcttcaataacctgagattgtgatcacagtaagaatacctgaaataattc

SEQ ID NO: 216602 - DNA, 335 bp, Homo sapiens
gacaagcagttggggagaaacccagtgcttttatactgcctctgaacatcaatcatgatggcacctccctttcttcagcacaaggatgcaggaacttgacagctatggggacctttctcacatctgttgtctgcactctgctctctcgcctactggaaggaatctcctgcccatctcatgtggctgatgagaacacctctaactttctaaattcagctgcagcctcrtgctccgtcttgctcttctctctctgacagatgcatgtgctgactcaggagtgcaaaaagtttgctggatgattaaaaaaacaaattaaaaatcataatatgccaatc

SEQ ID NO: 216603 - DNA, 620 bp, Homo sapiens
aagcttttaatatgtaaaaacaatgcactggtattcctaatattttaaatgtatgttgcttgtcttttgctagtggcaaagaggaccagcattaagatgtctgttcatcaatttcttgatgtctgcccatcagtttctctctcgatcaggtgctccaccagactcaatttaatggaggaaatctcatttgggtcctggaaagattaaagcaccttaccctttacttccaaattgagttcctctgggaatcaacttgagatccagaagtcttgaatgaaaccaaatgctttgggagatagtttgcattgccttaaagtttgctctctggaggactgtagacaccgcaaacggccttctgtactgtgttcggctactgtagtcaatgtactgagaaactcttaatattcctaggscttcctaaatggcctagaaataaagctaacagaagagggcaatatatttcacataactaacttaacagcatacccaaagttatttcttttcaaatagctcatgaaaggacctggtcagaattttggtggcaatagaaatacctgaacatgaatccatcagctgccctttaaatctccagactttgagtctattaagaatgaaacacc

SEQ ID NO: 216604 - DNA, 414 bp, Homo sapiens
tagcatgtatctcccagagatcctggacttaagagtttgatgccgtgactgatgggacatttgggttgtctttcttggaggaaggatgggtatattttgtctgctggagggagaatgaatcacatttttggtgatgagaagggtaaactctggtagtcatgcattcactatttctggctttctcctttctgagcaaatagaaggatggtacttcctggttgggtggggtcatgtgacaagttctggctgatgaattgttgygggaagcatttaattgccagtgcaagaccttccagggcctctgtcagaatgatctaggtagtggctgttccttcagccccaatacagaataaggacaaagtggcgcctgccaaccctaggtgcccatgttcgtgagcaatttgttgtttaaag

SEQ ID NO: 216605 - DNA, 575 bp, Homo sapiens
tgaaatcttcaagacttgggttccttctcccactgccatgccctggtgcaggcsattaccccagcctgacaggttgtcatgtgtgcttcggctgacaggagtcagacagtaacagagagaagtggacatctagggcagtgggaaatgaagccaaggaggtcagggagaaccctgcagagctgctcgctgccaacctccttccctgccctgtcatattgattcagcttcaggtgccaagagctgagcaagatgcagaggagacagagagtttacatttgagtggtgggaaacacacacacacacacacacacacacacacacacacatttccacacaaaaccacctaacatgcatccatgcaagtgtgtggaggctgagtcagtacctcaagagttctgaggaggaaggcaagaaagatcgctgtgggctgaggttgggataaaggtcttcatagacagaggccttgactgagattcaggaaagtgtggctcaggtgacattccaggacaggcaatagtggaagcaaaggcaaggagatgggaatgaggagctgtgttccgatgagggaaaagctt

SEQ ID NO: 216606 - DNA, 515 bp, Homo sapiens
aatcaaaaccttctggacaacatgattatgatgcttcagtgataccaagtgtactgtgtagaaattagcatctggagtatacagagaagagagggatcaaattctagatttgtgtatccttcttagctctacccaccctcacactatctttccaaggccttaatctaaacagtagctatggtttctgttccctctcttttgttagtatggctattataaaaatcctgctatatatcttaagtaaaattatatttgttgattcagtaatatctaccaaaaygcaaatacacattccctttcacccagcaatacccattctagaatttgactctctgataaacttcacacctatggagaggctatgtacagggatatccattacagcattatttgtaatggccaaatataaacaatgtttgggttccatcaaaaaggaactggttaaacaaattttgacagcagtggaatactagatagccataaaaaatgaggaaatctaattttgtagtgatatg

SEQ ID NO: 216607 - DNA, 614 bp, Homo sapiens
cacctagatgaccagatgcccaggctgtgtcccatagtggggcaagtatccgaggtcctgtctgcgatgggccaggagggaactggaaggaacatggggmcccagtgatgtcaaaaaggttgccccaagggagaagcactgcatcccaaatagggtttttaggtcagcatcaactctaacctacacttgaaacaaaacctgagttatcagtcctacactactaaagaaaattctggtttaaagaaagagcaccctaaggattagaaccattaggtagaagttacaggggtatagatttcagtccaacataaaggaacaacattttaaaaacagaacaatcaaaaactaaatggactcccctgggaggttgtgcacgcactgcctctgaaagggtttcaacggtagctgtgtggtcacgcagcagggatgccacagaggagagtcaggtgtcttgaggctgatgcagccgcatacataacctttagagttcctccgtgtgtatatggagagtgatcagatgggtgctaagtttccccccttctctttcactgaggagcaagtcaaactagacaatagcattctcacagaacccatcccgtatcacttgataagaa

SEQ ID NO: 216608 - DNA, 614 bp, Homo sapiens
cacctagatgaccagatgcccaggctgtgtcccatagtggggcaagtatccgaggtcctgtctgcgatgggccaggagggaactggaaggaacatggggccccagtgatgtcaaaaaggttgccccaagggagaagcactgcatcccaaatagggtttttaggtcagcatcaactctaacctacacttgaaacaaaacctgagttatcagtcctacactactaaagaaaattctggtttaaagaaagagcaccctaaggattagaaccattaggtagaagttacaggggtatagatttcagtccaacataaaggaacaacattttaaaaacagaacaatcaaaaactaaatggactcccctgggaggttgtgcacgcactgcctctgaaagrgtttcaacggtagctgtgtggtcacgcagcagggatgccacagaggagagtcaggtgtcttgaggctgatgcagccgcatacataacctttagagttcctccgtgtgtatatggagagtgatcagatgggtgctaagtttccccccttctctttcactgaggagcaagtcaaactagacaatagcattctcacagaacccatcccgtatcacttgataagaa

SEQ ID NO: 216609 - DNA, 610 bp, Homo sapiens
ccatataattaaaaccattttatgacttgtcgcaaagaacaaaaaagatgactcagtcctcaagactctttggtggggaggctttccactcaagtgagaaatagaaagtatyggtggtcaatgggacatttacagttttttattttccccttagagttaggaaggtcttgccccagagcttgaggaagatattttaaaggaaaagcagaaccagagatgaggagaatgtgagaggcttagattgccttcaggactgggaaacttagcatcaatactgaagccaggttttacaatgccaatgcccttgcctttggcaggaaaaaatgatgggggagtaggatccctcagaactggcttcagacagatagttgcattttatttcttgctgaaatcaataagtattaaaactataaaaagggacttttcatctgctaatataaaagtaacaatggtcttactaggactaagtccaatagtagtaagaggttactctcagtaggtacttccctggctgacatgagtgccatgtcaagaacttcccaggtatcatcccatctgatccttacgactctaagagacagatagtcttgcctccattttgcagatttta

SEQ ID NO: 216610 - DNA, 610 bp, Homo sapiens
ccatataattaaaaccattttatgacttgtcgcaaagaacaaaaaagatgactcagtcctcaagactctttggtggggaggctttccactcaagtgagaaatagaaagtatcggtggtcaatgggacatttacagttttttattttccccttagagttaggaaggtcttgccccagagcttgaggaagatattttaaaggaaaagcagaaccagagatgaggagaatgtgagaggcttagattgccttcaggactgggaaacttagcatcaatactgaagccaggttttacaatgccaatgcccttgcctttggcaggaaaaaatgatgggggagtaggatccctcagaactggcttcagacagatagttgcattttatttcttgctgaaatcaataagtattaaaactataaaaagggacttttcatctgctaatataaaagtaacaatggtcttastaggactaagtccaatagtagtaagaggttactctcagtaggtacttccctggctgacatgagtgccatgtcaagaacttcccaggtatcatcccatctgatccttacgactctaagagacagatagtcttgcctccattttgcagatttta

SEQ ID NO: 216611 - DNA, 610 bp, Homo sapiens
ccatataattaaaaccattttatgacttgtcgcaaagaacaaaaaagatgactcagtcctcaagactctttggtggggaggctttccactcaagtgagaaatagaaagtatcggtggtcaatgggacatttacagttttttattttccccttagagttaggaaggtcttgccccagagcttgaggaagatattttaaaggaaaagcagaaccagagatgaggagaatgtgagaggcttagattgccttcaggactgggaaacttagcatcaatactgaagccaggttttacaatgccaatgcccttgcctttggcaggaaaaaatgatgggggagtaggatccctcagaactggcttcagacagatagttgcattttatttcttgctgaaatcaataagtattaaaactataaaaagggacttttcatctgctaatataaaagtaacaatggtcttactaggwctaagtccaatagtagtaagaggttactctcagtaggtacttccctggctgacatgagtgccatgtcaagaacttcccaggtatcatcccatctgatccttacgactctaagagacagatagtcttgcctccattttgcagatttta

SEQ ID NO: 216612 - DNA, 599 bp, Homo sapiens
gatgcagtctcactctgttgcctaggctggccttgaactcctaggctcaagtgatccacctgccttggcctcccaaagtgctggggttacaggcatgatggaatattattctgacacttgttacaacatggaataactttgagaacattatgctaagtgaagtaaagccagtcacaaaaggacattgactgtatgattccacttatatgaagtagggagagtagttaaatttatataaagaaagtagaatggtggttgccagggtttggaaaagggaggaatggagcgctagtatttaatgagtacagagtttcagtttgggaagacgaaaaagttctggagatggatggtggtgatgattgcgcaaagcaaatgtacttaatgccactgaactgtacatttaaaaatggtcaaagtggtatgatatggtttggctctgtgcccccacccacatctcaccttgaatggtaatcyccataatccccacgtgtaaagggtgggaccaggtggaagtaattgaatcatggaggcggtttcccccatgctgttcttgtgataatgagtgagtctcaagagatctgatggttttataagcgtct

SEQ ID NO: 216613 - DNA, 512 bp, Homo sapiens
aaacatataatggaatattattcaactatgaaaagaaagaaagtacagacacgtggtataacatagatgagcctcagaaaccttatgttaagtgaaagaagccagacacaaaaggccacatagtgtatcaatgcttttatatgaaacattccagaatagacaaatttatagagagaaagcagattagtggttkctaggggatgcaaggggtagaagacagtaagatggggaattgctattttatgggcaagggattttcctctggagtgatgaaaaagttttgaaattagagatggtattgtgaatgcactaaatgccacttaattatactctgaaacagttaactgttacgtgaattttacctcaacttttaataactacatatgagtttgctattttgtagttgtggaggtcaagtccaaaatcagtttcactgggctaaagccaagttgtcagaggagctgattccttctggaggctctgagaggaaaatcatttctttgcctttttca

SEQ ID NO: 216614 - DNA, 585 bp, Homo sapiens
aaattgagccatctggatttgggtcctggccctgacacatggaaactataaagtcttgggtaattatgaaatctctcaaagcctcagtgttgtctatgaaatacagttgaggcagttcacttttcttcttattcttccccttgttatctcttcctttcttttcctgaataattcacttgaaaaaccctaaatagaactgaacaaggcccatggtaggctgaataacaactcccacaaagatgttcacactctaatcctcacaccagtgaatatgttaccttactccatgtacaatagactgtgcagatgtgatcaagctaaggaacatgaaatggagagactatggtggattatttgggtgggcccggtgtaatcacaaaggtctttataaaagggaggcagaagaatcagatacatagacagaagatatgaggacagaagtagtggtcagaaaagagagaaagtgccacactaccagctctgaaaatggagaaagraaccatgaaccaaggaatgggtacagcctctaaaagctagaaaagcaaataaatgggttctcacctagaacctacaggactgcaaccc

SEQ ID NO: 216615 - DNA, 560 bp, Homo sapiens
gaagggatggtggcatgagaaagggtagggcaggaagacatgtgtgtgtgtgtatgtgtgtgtgtgtatgtgtgtgtgtgcgtacatgggtgcctgtgtcctggaggaaaggttagmggagagggctagaattaaagttgccacagaggcctgaagtcagtatctcccctcttgatcttaaactggggactggcacttgagtgaatgatgaatttgccttgagcctctcaggtcagaggagcctcttgaggccccatctgtgcagcgtgcctgtgggaagggggagcagaatagctggagcagggaggggcttgggacccttcttccaggtctggcctcctactgcaggtttttcttgtgaggctgtggaagatgtcaaacacagctcctctcccctgtggaaatgagctgcttggcagtaacaggtttgctattcatcttatctcctattaggtaacccttcccgtcatcccagggctcattctctctctctctctctctctctgtctttcatacacactccttaaatcccctatattaaattactgttgaaatgtttc

SEQ ID NO: 216616 - DNA, 456 bp, Homo sapiens
gactttaaaattcatacgaaaaggcaaaagatctagaataaacaatttttttttwaaaaaaggatcaagactactcaattttaagacttataaagaaacaattattagtatattatagtattggcaaagataaacagctagatcaaaggaacagaataatgagctcagaaatagattcacacataaatggccaactgatcgtgacatagttacaattgcaatttagtggagaaggggtagtcttgatgtgtaatgttgaaatttgcatatgtatattccaaaaaagaatttcctccactcttcacaatgtatgttaaaattaactcaaaatatgtcattgaccaaaatataaaaccttaaagtagaaaacttttagaaaaaacaactgggccaatttatctccaagtatttatattttctgacctcgtgttaggcaacaacatctaaatataacac

SEQ ID NO: 216617 - DNA, 456 bp, Homo sapiens
gactttaaaattcatacgaaaaggcaaaagatctagaataaacaattttttttttaaaaaaggatcaagactactcaattttaagacttataaagaaacaattattagtatattatagtattggcaaagataaacagctagatcaaaggaacagaataatkagctcagaaatagattcacacataaatggccaactgatcgtgacatagttacaattgcaatttagtggagaaggggtagtcttgatgtgtaatgttgaaatttgcatatgtatattccaaaaaagaatttcctccactcttcacaatgtatgttaaaattaactcaaaatatgtcattgaccaaaatataaaaccttaaagtagaaaacttttagaaaaaacaactgggccaatttatctccaagtatttatattttctgacctcgtgttaggcaacaacatctaaatataacac

SEQ ID NO: 216618 - DNA, 612 bp, Homo sapiens
gactcaatattgtaaaatgtaagttctccaccagttaatccatgggttaaatgtaatcctggtcaaaatcacagcatgtggatatttgtagaaactgacaatttgactttaaaattcatacgaaaaggcaaaagatctagaataaacaattttttttttaaaaaaggatcaagactactcaattttaagacttataaagaaacaattattagtatattatagtattggcaaagataaacagctagatcaaaggaacagaataatgagctcagaaatagattcacacataaatggccaactgatcgtgacatagttacaattgcaatttagtggagaaggggtagtcttgatgtgtaatgttgaaatttgcatatgtatattccaaaaaagaatttcctccactcttcacaatgtatgttaaaattaactcaaaatatgtcattgascaaaatataaaaccttaaagtagaaaacttttagaaaaaacaactgggccaatttatctccaagtatttatattttctgacctcgtgttaggcaacaacatctaaatataacaccagaaaaaacagccacaaaataaagtaaaagtaaaagaaggtaaatttgact

SEQ ID NO: 216619 - DNA, 451 bp, Homo sapiens
gtgtaattttagaaagttatttgtttcttttatcttcaatgtttcaccttaaaatcagtcaaatactcacaatatatggttataatgaaagtttctgtgagttaatgggtataaagtaactggcacagctgtcaggatgtggcaactgctcaatgttgtgagtacctctctwttcttggtcctcctgcaggctgatttggctgacaacagcttgagaatgaatctctgaagaacaactagacaatgccctggttcttgggaaaacatatgtagaactttgtctcagaacaaaggaaaggctgcccacataatgtcttctagttaatttgaatgcacagcgtattttctctgtagggaaagagcccccacaggggttagggtcctttgatttagagattgaacttcttgttctttgtcataactaaccatgatttcttactcaaaatctctc

SEQ ID NO: 216620 - DNA, 451 bp, Homo sapiens
gtgtaattttagaaagttatttgtttcttttatcttcaatgtttcaccttaaaatcagtcaaatactcacaatatatggttataatgaaagtttctgtgagttaatgggtataaagtaactggcacagctgtcaggatgtggcaactgctcaatgttgtgagtacctctcttttcttggtcctcctgcaggctgatttgkctgacaacagcttgagaatgaatctctgaagaacaactagacaatgccctggttcttgggaaaacatatgtagaactttgtctcagaacaaaggaaaggctgcccacataatgtcttctagttaatttgaatgcacagcgtattttctctgtagggaaagagcccccacaggggttagggtcctttgatttagagattgaacttcttgttctttgtcataactaaccatgatttcttactcaaaatctctc

SEQ ID NO: 216621 - DNA, 451 bp, Homo sapiens
gtgtaattttagaaagttatttgtttcttttatcttcaatgtttcaccttaaaatcagtcaaatactcacaatatatggttataatgaaagtttctgtgagttaatgggtataaagtaactggcacagctgtcaggatgtggcaactgctcaatgttgtgagtacctctcttttcttggtcctcctgcaggctgatttggstgacaacagcttgagaatgaatctctgaagaacaactagacaatgccctggttcttgggaaaacatatgtagaactttgtctcagaacaaaggaaaggctgcccacataatgtcttctagttaatttgaatgcacagcgtattttctctgtagggaaagagcccccacaggggttagggtcctttgatttagagattgaacttcttgttctttgtcataactaaccatgatttcttactcaaaatctctc

SEQ ID NO: 216622 - DNA, 599 bp, Homo sapiens
gaacaatccataatacaacattatagccctcataaagagcagaaaagtggaagaacatgggatataaaagagtcccatttggtttgtgcttatacttactcttaaatttttagcttgtatacttagagaaggctaagactaaagttattatcgtttcctacttccaatcatcctttctaatatcacatgcttttattttcaagaattttagttcaaatttgtttttgttccttcttctaatttgttatttccctacgaagttgatgttcatttaaatttctttatgtgctgaccaatttattactcccattctttcttgcatttgagttcttctttggggttcaatattctccttttgaagcgtatctttttgaggtacctttagtgagtatctgttggtgaaaactaatctgyctgtttgccggaaaatgatgtgatttactcttttatctttaataatttttttgaacataagatccctgctttcaaaatagtacaatctcctaaaaaaatcaaagtatgtatgtagacatatacatatagtaacacattttacatttggttacttttcagaactcacatgttcaatattatgtttg

SEQ ID NO: 216623 - DNA, 438 bp, Homo sapiens
aaaaactagtagagaaagacaggaaatatagcaagagaaagaaaagggragaaagagagagggagagagaggaaggaaggaatgaaaaaaggagatgtaggggaagaaaatgacaaaaaagagtgggagagaagggaggaggaggggaagactggaagaagggaggagagaaggacaggagatttaaaatcaatagaaaatatacaatttaaaagcagaatggactaaagagaagattccacaccctatcagagtttatctctgtcttgttcatgtttcctcctcagctacccacgtaaactacaaagattagatatatctagtgtaaagctggtagagaaaacaaaataaaggaattatattagcctgtttttgcactgctgataaagaaatacctgagactgggcaatttataaaagaaagaggtttatttagtct

SEQ ID NO: 216624 - DNA, 438 bp, Homo sapiens
ttattagcatgtaattttctgaatacagtagaaaaatctctgcctcttaatgaattctatttcaaatgttctcattataagactttcaaatctcattaactaaaccaagcattaaaaatacaataataataaaatgaaacagraaactgttgatatgattagatttgggtaactttcctcttttagtgaggaagaaaatgtggtttgagtaaatgataactcaagcataggaagcgtactttacaaagcacaaggaatacatttctttacatgttctagtagaatcaacaattttcctagtcaattgtagctgagctagagttataaatataagtaggaaaatggtgtatcttaacaagggcatgttggcattagcatttttatgatgtgtattttcaacagtgatgcagaataaaaacacgcaccacataaagatac

SEQ ID NO: 216625 - DNA, 608 bp, Homo sapiens
ttggtctgttgaggaattctatcacttcctgcttcaatctcaaaatgttatatatttccaggaatttatctatttcttctaggtttctagcttgtgwacatagaagtgttcataatagtctctgagggtttttatatttctgtggggtcagagataagatcccttttatcattttggattgtttttatttagatattctctcttctttttttattagtctagttgatggtctatctatcttattaattctttcaaaaaaaaaaaaacaggtcctggattctatgatcttttgtatgttttttgtgtctcagtttccttcagttcagctcagattttggttatttcttgtcttctgctagccttggggtcagttttctcttgtttctgtagtctctctaattgtgatgttaggtttttaatttgagatgtttgtaactttttgatgtggcatttagtgctataaacttcccttttaacactccttcgctttgtcccagagattatcatatgttgtatattttttcacaattgtgtcaaatactttcttgatttctgccttattttcattatttactcaaaagttattcaggagcaggttaatttccatg

SEQ ID NO: 216626 - DNA, 481 bp, Homo sapiens
actccttcgctttgtcccagagattatcatatgttgtatattttttcacaattgtgtcaaatactttcttgatttctgccttattttcattatttactcaaaagttattcaggagcaggttaatttccatgtaattgtatggttttgagtgattttcttaacattgattactatttttattgcattrtggtatgaaagcatgattgatatgatttgttttctttaatttgctgagaatgattttatgccttatcgtgtgtttgattttagagtatatgccatgtgcagataagaagaatgtgtattctgttgtttttgggtggaaaattatatagatgtcttttaggtccatttagtcaagtgttgagtttaggtcacaaatatctttggtagttttctgccttgatggtctgtctaaaatattagtggggtattaaagtctgcctccattattatatggttatctaggtcttcatgtagg

SEQ ID NO: 216627 - DNA, 631 bp, Homo sapiens
atccttaaaactggacagcttctgaagttgggtttagctgacaaatctaaactttcttcttgagtgaccaaaattagaaaaggctgtctatgaggatgaggtaagtctcaaagataagagacactgttcctcagagacactgttcctcccagctgaaaggcatcttaggcgactaaggtctcacaggagtgtggcagcttattgctagtgatgtgaaactgtactaacagggagtctctcaagaacattcagggaagcttgcttaatctggtaaggacacataatgcttgatcaccgagtgcctaaagcacccaaatctcttgggactgaggagacatgtaaaacaggtagaatcagctcaatggtgacaccttgaggagctatcccacaagtaacacactggatccaatacatctccccaagtcttgttggtcattcaaaaaaaagtctaaattgtgggaaattgtactctcaagtcttcctccttaagaacacatccatcactagaaattcttgctggattcatgattaatatttattgtgccttwttatgcagccatttagaaaaatagtgtcatatactttgtgaggaccccaaattacagtggccaaaatggcgtacctttgaaat

SEQ ID NO: 216628 - DNA, 514 bp, Homo sapiens
ggaagcataaaggatttatttaatcaaagtttacatgacatggaggccttcagaaatgaagactcaaagactcagggaaaactgtctatttttatgcttagcttcartaaggaattggcagccatgtggaaatataattggacaaaagggtatgatctaatagtgaaagactaaaggggaaaacctgggaaggcctatttgttcagattcttactgcctctttgtgtagcatgtcttctttctggatatgagactggacccatttggaatgagggtcttcaagggagaagggagaaaggagggagggacatttatagattttacgggttgctttaggggagaggggttctagtttctatgacctgccttggggaagaggaattctgctttctatgacttgcttcaggagaatgaggagtaggagaaagaggagagaaaaaggtcagaaagaccttgcctcttaaacctttccagtttccttcagttgaaagtattcagtgtgtcatgggtccat

SEQ ID NO: 216629 - DNA, 514 bp, Homo sapiens
ggaagcataaaggatttatttaatcaaagtttacatgacatggaggccttcagaaatgaagactcaaagactcagggaaaactgtctatttttatgcttagcttcaataaggaattggcagccatgtggaaatataattggacaaaagggtatgatctaatagtgaaagactaaaggggaaaacctgggaaggcctatttgttcagattcttactgcctctttgtgtagcatgtcttctttctggatatgagactggacccatttggaatgagggtcttcaagggagaagggagaaaggagggagggacatttatagattttacrggttgctttaggggagaggggttctagtttctatgacctgccttggggaagaggaattctgctttctatgacttgcttcaggagaatgaggagtaggagaaagaggagagaaaaaggtcagaaagaccttgcctcttaaacctttccagtttccttcagttgaaagtattcagtgtgtcatgggtccat

SEQ ID NO: 216630 - DNA, 635 bp, Homo sapiens
ccataggtgacattaccttgaggaatttctgtataaccaaaaaaccagtgtttcatcataattaattcacacacagttaattaatacaaaagaattttttttatttttagcagggaagtgagtttctggcttcatcttagccagctttttctctccagggcttaatacatgttagtrcacatatacatttgatggatgaatgaatgaaagagaaatattaatatatgaaaatgtaatcctgacagagggaaggaaacaatatctgttttgtatttaattggttgaaaatagtattgggaccatatttctcccaggaccttctgcttcatccccctcttcatgcatccttttctttcacagtgctctgtttgtctttttgtctgcctgtctctgccactggactctgggatccttgagatgttagatacgtttagcggttttatctcctgtcactaatatttgggttgggggaacacttatttccccactacttgtttccagccagataggagcaggaatttctattctcctcctcaaaagagaaaagcatgagtggagcttgtgatgtctctctaggtgctgcctcactcctctccaagtggcttacttcattggaaaatgtgggagaagaaacc

SEQ ID NO: 216631 - DNA, 539 bp, Homo sapiens
tgcttaatggtaaagataagaggatccccagggatgcccaggtgtgaccttcagtgagtcaagtgcagacagtctcctgagaatgtagatggatattgtatggcctaaatatccagcctatagctagtgtggtcagtgttctaactctcctctgcactatgtgcctttcacagtcatcctggaggaatttccagtcctttgaaactggggattacaatgtatttatttctgaatccccaatgattggcataatatcagatacctggaagtcacacatttaacaaatatttgttaaatgaaaaatcaaataagtgatagtaggcagttaccttcagcaaatacactcaccatacatatgtacatacataaaggatggggttcttttttatatttctcaatctgaactgggaggtgaagtctctctttgcttgattctacctgtgaggggaatcgttctgaagtgctgataccttaagagcacaactggcagaaytgtggaaagcaccataatctacaggtttaaatcttaggtctgtctc

SEQ ID NO: 216632 - DNA, 552 bp, Homo sapiens
ctgaagaaatggatgttttaataacttcaccagcccttggcaaaggaagaattaaacattacctctatctcccctttctccatcctgaaatctggctgagttaatgactatttatctaggtttgacaccgataaatttggatatttatccataatatgattctagaaataagctttctataatggtagtatattcagaaaaaaaaaatcatctgtatcaaacactaaaaagactaccgagaagactctgatggaaatacacattttatcacatttataaatktataaatatatattttattctaccataaatttttattcattcaattacatcatcattttttctgtatcaagtttagcttaaatgctatttgaagttctttcttagaatacttccaaaattactaagaagagaatttaaatcaaaaaatattgcaaacctatctcccatagaaaaactgagacaaaactcacaatgtcctttcgtttacttttttactattaatacactacattttatagacttcacatttttcaatgccttttcataaca

SEQ ID NO: 216633 - DNA, 620 bp, Homo sapiens
atctgtaaaccaaaaaagttaaacaagtaatttgagatgrctgggagagagccaattaattaattccatctccaggaatattgcaaagccaatctatgatccaggttaaaaagcaaaatcacacactggcaacaaagggatggcttaggaaggcagaaatgcctataatcttcatcagccccataacccaaatcaactctaaataaacatctaactcaagtaaaaacatgattactatgtaaacacagcttcaagctactgccaaataaatacactttccacataaagcagtgtgcctttccccaaaatcagctttggagtagtactctacccacccccaattcccgacgtagcatcatagccccaagcccttcataaattggaaattctggaggtgccaaagctctccagaattcaaggatagttttatctcttttgaataaagtaaaagaaagaaacaagctggtacattgaagcaacagtgggatgccaagaacttgaaaaaaaaaaattaacaaaattactcctatagtttgaatgtgtcccccaaaagcgtgtgttggaaacttaatccccaattcaacagtgctgggagatggggcctaacgggagttggttag

SEQ ID NO: 216634 - DNA, 558 bp, Homo sapiens
agcaatgtaattcaaacacaatgacaccctccgtgaggatagactcagctttctgctggttggtctctgcctctcataccaaaaggtctccaggcccacaggctactccttactacatctacaagatatgccacaagcttaaatagatgttttatatgtaggtacatgacaaatacaatcatgcaaaaagcgtgtatatcaggagacaaaaacagacaaacaatacagaaatgaaaatacttatattaacgaggcaatcttatgggaaagcatttatttaaaaatctatgctggaatcactgtctttacagattttaaaagtaataaaataatttaattcatttaatgtattaaatgtggcatcctggattaaagaataatcaaagattctcctctaaaatgtatgttgatttcatttccccttttgtccaccctctatggcctaagaatrtgtgaaatggccaaaaggaaggaattgaggaacaaagggcctgggtagtgacaaccaaagaaacagctgggggttagataccataaaagcaaactgaaggaaggaat

SEQ ID NO: 216635 - DNA, 417 bp, Homo sapiens
gctcgttagccaatttgatttcctctcttgagcrtttggtatagggactcaaaattgagtcagtctctgcagatatatggactctgcagatatatggactcaaggtgtgtggtatggtgacatttttggccacaaggcctgaggagcatagaaagcaagtcttcagatgaaagaatgaagaaatacacaaaagtgagcaatagattcctattgtcctttgatacctggtttcaatcgcttcctgagatctggctgcattttagcccttggtctgtgataaagtccggagtccttcagataaaaatctccatctttgttttagctctttatggttgatttctattacttgaaatcataatcctaatgtatagaacctactatatattaatgcttgttacatataacatttgttatacg

SEQ ID NO: 216636 - DNA, 504 bp, Homo sapiens
gaattctgctaaggtgtagacataaaggattaccagccattattccagaagctgtaagatttgcaacttccctaattactcctgcagataatatcactattgtagcacttaagattggccttttgagatgtcttttcaggattttgcatttctgatgaccaatggctccacccagaccgccaacaaatcctgtggccacacccagaggctggctcagtgcacatgaggaccattttccacacccctatgattacattgccaaccaatcagacgcagacattcccttacccgccaaattattcttgaaacctctagcctctgatttttgtgggartctgatttgagtaataataaggtctcttgtttagcctgctgtgcgtgaattaacctctttctctgttgcaattttcctgtcttgataaataacctctatctgggcagtgggcaaaataaacccatcgtgcagttacaccttatctacttaacttctcatatttctccaat

SEQ ID NO: 216637 - DNA, 504 bp, Homo sapiens
gaattctgctaaggtgtagacataaaggattaccagccattattccagaagctgtaagatttgcaacttccctaattactcctgcagataatatcactattgtagcacttaagattggccttttgagatgtcttttcaggattttgcatttctgatgaccaatggctccacccagaccgccaacaaatcctgtggccacacccagaggctggctcagtgcacatgaggaccattttccacacccctatgattacattgccaaccaatcagacgcagacattcccttacccgccaaattattcttgaaacctctagcctctgatttttgtgggaatctgatttgagtaataataaggtctcttgttyagcctgctgtgcgtgaattaacctctttctctgttgcaattttcctgtcttgataaataacctctatctgggcagtgggcaaaataaacccatcgtgcagttacaccttatctacttaacttctcatatttctccaat

SEQ ID NO: 216638 - DNA, 544 bp, Homo sapiens
acagcttgcacctgcctaagaacttgagagtctaccctttatatcagcgtggcctggatgtgagatgtggagtcaaaggagattttgcagctttaagatttaatgtctggcctgcctggttttgtacttccatggagcctgtagcccctttgttttggccaatttctcccttttggaatgggagcatttatttaatgcctgtttccccaagttagttacctctaagtatctaagttgtttttgactttatagcctcataggcagagggacttgccttgtctcagatgagcctttggacttggacttttgagttaatgctagaatgagttaagactttgggggactgttgggaaggcatgattggttttgaaatgtgaggaggacatgagattttcgaggggcccaggctagaatgatatggtttggatttgagtccccacccaaatctcatgtcaaattgtgatccccacatatcaggggaggggactggtaggaagygattgaaccatggggacagatttcccccttattctcacgacagatg

SEQ ID NO: 216639 - DNA, 544 bp, Homo sapiens
acagcttgcacctgcctaagaacttgagagtctaccctttatatcagcgtggcctggatgtgagatgtggagtcaaaggagattttgcagctttaagatttaatgtctggcctgcctggttttgtacttccatggagcctgtagcccctttgttttggccaatttctcccttttggaatgggagcatttatttaatgcctgtttccccaagttagttacctctaagtatctaagttgtttttgactttatagcctcataggcagagggacttgccttgtctcagatgagcctttggacttggacttttgagttaatgctagaatgagttaagactttgggggactgttgggaaggcatgattggttttgaaatgtgaggaggacatgagattttcgaggggcccaggctagaatgatatggtttggatttgagtccccacccaaatctcatgtcaaattgtgatccccacatatcaggggaggggactggtaggaagtgattgaaccatggggrcagatttcccccttattctcacgacagatg

SEQ ID NO: 216640 - DNA, 550 bp, Homo sapiens
aaaaaaaaaaaaagaaagaaacacacacacaccacacacacacacacacaatggtatatttcagtttctaaaaaaatcgatataaaattattgctgaagaaataattcttttaggagctatctaattaaaggctttcggaaaacctgaaaattgcatggttccttatttctctttctttattatcatrtcataaaaatggtatgtatgtcactctatagtgaaagtttggaataaggaggatgttgcacttgaaatgagaatagaactcagcaataatatttctaatatgtgtccaatgtacagttactttaaaggagggcaaaacattcttctagttcaagatattgtttctaaaattcatattttataacaaactataaaatgaaagacttttgctttatcttacttttcaaatatcttttaaaaacttactcgtgaacactccttatttttcaggtataacgctacagttaattttgttttctgttttggcaaaaaaatcagattttgactatttccccttttttggtaatttcttttagcaattaa

SEQ ID NO: 216641 - DNA, 353 bp, Homo sapiens
attgaaagttttaaaaatccttttagtattctaaaacacaattgtttctaattcgtttctagaaatgtttgcttatttccctactaaaatttgtatctgatcaaagcacataagaatataaataatagcaaactactattaaacaacagaacaacttgtaaaacaaattgtgtttgctttaagaaaaatstttattgcactcatgtcataggttaattggaggttattttatttttggttgtcatggtgattgaaagagataatgtaaatgccttataaaatcttcattatgaaatattatcagttgctttataaactcactctttttatggatccttcatggaaacatgttt

SEQ ID NO: 216642 - DNA, 602 bp, Homo sapiens
gtttgatttcatgtgtctacaacagggccacatattaaattacttctgaatggtgaattcatcttacaaaatgttccaagttttggacaaggaaaaacattacattggatattgaattcatggagcctttacagaagcatcacatttaaaccaatgtgaattcaaaaaagagaaggaaactttttaaattcaatttagagtacataaaaaaagaaatccgcgacagcattgaggggaacaagatgagtctaatccgcagcacttcgatcactgtgagagaactcaaagtgggttgcaatcattcctaacacaggctgaaactaaacaatcttgctccyagagtttatgttggatactcaattcttaaccaaaatcttggtctccacaaactctaccatcccttttctcttcactctatagacagtggcatgccattgatgctgtacagaattgcaggtgaaagggagaattttagacttaatttttaactctattgcacttaaagattttagttaggttaccactgtcattttcattttctatgttaaagaatacctttcagtgctgtgctccagtatctaaaaattttatcaccaggggaa

SEQ ID NO: 216643 - DNA, 571 bp, Homo sapiens
taataaacctaattttggttgactatgggtgggtttctggtagtccctgggcactgttctttatcagtgtagagcaatgcttcatgtgacagcacacatggataattagaatatggtttataaggcatgctgggcaaagtagaatgctgcttggacaccacttgtcagaaggtggtgtcacttgtcttccaaagatkgaaggatatcaacttctcagcacgactaacacaatatttagttggagaggttctagtaagggatttagggtgcatgatgacaaagtggaaaaagaaaagtatttttggcaagaaaccaatatacaactgggtaggtgttccgtcctattctactcaccaatcctgtccatgtggaagttgaaactgcataggtgagaggtggagtggaaagaaacgcacttaaaaataatatcatctccctcttatgactctttataggaagttctgattgcaggtcattagtatttctatcaagggggtggggggtagaggagagtattacaaagaaaaataaactctgagtataatgcaatatgtatgattttagaagaaaa

SEQ ID NO: 216644 - DNA, 571 bp, Homo sapiens
taataaacctaattttggttgactatgggtgggtttctggtagtccctgggcactgttctttatcagtgtagagcaatgcttcatgtgacagcacacatggataattagaatatggtttataaggcatgctgggcaaagtagaatgctgcttggacaccacttgtcagaaggtggtgtcacttgtcttccaaagattgaaggatatcaacttctcagcacgactaacacaatatttagttggagaggttctagtaagggatttagggtgcatgatgacaaagtggaaaaagaaaagtatttttggcaagaaaccaatatacaactgggtaggtgttccgtcctattctactcaccaatcctgtccatgtggaagttgaaactgcataggtgagaggtggagtggaaagaaacgcacttaaaaataatatcatctccctcttatgactctttataggaagttctgattgcaggtcattagtatttctatcaagggggtggggggtagaggagagtattayaaagaaaaataaactctgagtataatgcaatatgtatgattttagaagaaaa

SEQ ID NO: 216645 - DNA, 586 bp, Homo sapiens
ggagctaaaccttgggtacacatggacgtcaagctgggaacaatagacacagggaactctaaaagggggaagagaggtaagcaaggattgaaaaactacctgctgagtactacgcacacattttgggtgatgggttcaatacaagcccaaatctcaccattatgcaatatacccatgtaacaaacttgcacatgtacccctgaatctaaaattaaaaaaaaaatcacaaagaatgtaagggttttttggcatatctgttttaaatttaccttagccrgaaaacacaaatagtacctcctttttaaaagactaacatttcattaaagaatgaagcagaaaaatgcagtaaatgatctgttgtaaatttgtattaatgtagtttttatgtgttggtagcaaagccaaaaaataatctctttgcattctctaataatttgtaagacagagtattatataaagactattgagtatgcaattttttgacttgaaaatataaagtgaaaggaaagtaatgattatgggaaaagatggagaattaatccattgttttagttttcggactaattctgggtagtggagccttttt

SEQ ID NO: 216646 - DNA, 586 bp, Homo sapiens
ggagctaaaccttgggtacacatggacgtcaagctgggaacaatagacacagggaactctaaaagggggaagagaggtaagcaaggattgaaaaactacctgctgagtactacgcacacattttgggtgatgggttcaatacaagcccaaatctcaccattatgcaatatacccatgtaacaaacttgcacatgtacccctgaatctaaaattaaaaaaaaaatcacaaagaatgtaagggttttttggcatatctgttttaaatttaccttagccggaaaacacaaatagtacctcctttttaaaagactaacatttcattaaagaatgaagcagaaaaatgcagtaaatgatctgttgtaaatttgtattaatgtagtttttatgtgttggtagcaaagccaaaaaataatctctttgcattctctaataatttgtaagacagagtattatataaagactattgagtrtgcaattttttgacttgaaaatataaagtgaaaggaaagtaatgattatgggaaaagatggagaattaatccattgttttagttttcggactaattctgggtagtggagccttttt

SEQ ID NO: 216647 - DNA, 610 bp, Homo sapiens
ctcataacagaatccccagcctggcagttgtccatgggctactctctgagaaatacagatacctcggtgcccactggagccaagcctagcatggagtcacagggtggctgcctgtgctccgagggagctggggacatggcagctatgtaggctgctggcaccctgctggcaccccagycagttgaatgactcattactctggttccccagcccccgcctttgtttctccagctcttccctcccagaataccttctgccctctctgtgtgactaattctcacttcgtctttttttttttttttgagacagagtctcactctgtcgctcaggctggagtgcagtggctcaatctcggctcaccacaacctccacctcccaggttcaagcaattcttgtgcctcagcctcctgagtaggtgggactacaggcataaaccaccggacccggctaatttttgtgtttttagtagagatggggtttcaccatattggccaggctagtcttaaactcccggcctcaagtgatcctcccactttggcctcccaaagtgttgggattgcaggcgtgagccacggtgcccggcctccactttgtcttttgaggtccccct

SEQ ID NO: 216648 - DNA, 610 bp, Homo sapiens
ctcataacagaatccccagcctggcagttgtccatgggctactctctgagaaatacagatacctcggtgcccactggagccaagcctagcatggagtcacagggtggctgcctgtgctccgagggagctggggacatggcagctatgtaggctgctggcaccctgctggcaccccagtcagttgaatgactcattactctggttccccagcccccgcctttgtttctccagctcttccctcccagaataccttctgccctctctgtgtgactaattctcacttcgtctttttttttttttttgagacagagtctcactctgtcgctcaggctggagtgcagtggctcaatctcggctcaccacaacctccacctcccaggttcaagcaattcttgtgcctcagcctcctgagtaggtgggactacaggcataaaccaccggayccggctaatttttgtgtttttagtagagatggggtttcaccatattggccaggctagtcttaaactcccggcctcaagtgatcctcccactttggcctcccaaagtgttgggattgcaggcgtgagccacggtgcccggcctccactttgtcttttgaggtccccct

SEQ ID NO: 216649 - DNA, 608 bp, Homo sapiens
atcagttgactggcaatttccgacaccagttttgctaaactttataaattttgcttcctccagaggtaggagggggaaggagatgggcaatacagaaacagattttacagccagaatatgacagggccccttaaactacaaatagatgtagaattttaaatgtagctctgtagytcaatttataccacagaaattgcgagatgctatcttcctgttgttataacgtatcaggtcaagggatataaattgtaccaggtaattcattttgctgttcagagagtcattaagttcctcccagaatatatgtgattgatatccctggaggtgaaaggctaaaggaaccatatggcaacatgttgcattccgtatgctatctgcccatccgtgcttaagctgtcattagcaacatctgtaccttacggaaatccagctgcgccgacgacggctgacggaattgtacttggggggaaaatctagcttagcgccattaacttgagacttagagtctatctaccaggacggatggaagctttcacaattagacgagacgacacgaatgctttattaaagtttaattttgaactcccaattagcgaaagtgcattaca

SEQ ID NO: 216650 - DNA, 534 bp, Homo sapiens
tgagcgtggctcacaaatttgtaaatagtttagcctttattttagaattttatcaaagtagtacatgcatatgttatgccctaaatgtttgtgtcctctaaatttatatggtgaaatcctaccctacaaggtgataatattasggagtggaggctttggaagggattgggtcatgagagtggaggtctcatggatgatattagtctccttataaaagaggcccttgggagctcattgccccttccacctatgaggatacaactggtggtgctggtctgtgaaccagaaaacaggccctcgccagacactgaatctgctgtggccttgatcttggacttctcagcctccaaaactatgagaaatacatttctgtcatttataagccatccagtttatggtactctattatagcagcccgaataaactaagagacgatacaattttaaaaaacaaatccaaacacagaagtcctccattctacctctcctagtagttcttagttcattttcccagagataaacactttccattctt

SEQ ID NO: 216651 - DNA, 526 bp, Homo sapiens
tgagcgtggctcacaaatttgtaaatagtttagcctttattttagaattttatcaaagtagtacatgcatatgttatgccctaaatgtttgtgtcctctaaatttatatggtgaaatcctaccctacaaggtgataatattacggagtggaggctttggaagggattgggtcatgagagtggaggtctcatggatgatattagtctccttataaaagaggcccttgggagctcattgccccttccacctatgaggatacaactggtggtgctggtctgtgaaccagaaaacaggccctcgccagacactgaatctgctgtggccttgatcttggacttctcagcctccaaaactatgagaaatacatttctgtcatttataagccatccagtttatggtactctattatagcagcccgaataaactaagagasgatacaattttaaaaaacaaatccaaacacagaagtcctccattctacctctcctagtagttcttagttcattttcccagagataaacacttt

SEQ ID NO: 216652 - DNA, 596 bp, Homo sapiens
ttttttggttcaaatatatcaaaccttcaagaaatagatattgtccatggtatttgaattgttctagtcacagaaaaaaagaggtrttactgaatcattttaagaagtcagtataactagaggaacaaaattggaaaaggacagtgcaaagaaataatttatagattgctatgggttgaattctgtccttccaaattcatatgttgaagccctgactcccagtgactcagaatgtggctgtctgaaggtaaaacctttaaaaaggcaattaagctagaatgaggccgattagggtggcccctaatttgatctgactggtgctatgggaaaaggaaatttggacacagagagagagagacactgggggatatacacagaggaaagactatgcgaggacacagtgagaagacagccatttggaagccaaatggtgaggcctgggaagaaaccaaacctgctgacacctagatcttggattttcaacctccagaactttgagaaaataaatgtctctagtgtaggctgcctatgtattagttttctggagtggccataacaaaatactacagtattttgaaatcagtaagtgtgagttc

SEQ ID NO: 216653 - DNA, 596 bp, Homo sapiens
ttttttggttcaaatatatcaaaccttcaagaaatagatattgtccatggtatttgaattgttctagtcacagaaaaaaagaggtattactgaatcattttaagaagtcagtataactagaggaacaaaattggaaaaggacagtgcaaagaaataatttatagattgctatgggttgaattctgtccttccaaattcatatgttgaagccctgactcccagtgactcagaatgtggctgtctgaaggtaaaacctttaaaaaggcaattaagctagaatgaggccgattagggtggcccctaatttgatctgactggtgctatgggaaaaggaaatttggacacagagagagagagacactgggggatrtacacagaggaaagactatgcgaggacacagtgagaagacagccatttggaagccaaatggtgaggcctgggaagaaaccaaacctgctgacacctagatcttggattttcaacctccagaactttgagaaaataaatgtctctagtgtaggctgcctatgtattagttttctggagtggccataacaaaatactacagtattttgaaatcagtaagtgtgagttc

SEQ ID NO: 216654 - DNA, 559 bp, Homo sapiens
agatgtgacaccaaagcacaaaaaaaagagacaaattggactccatcaacattttaaaactttcatgctgttaaggacaatcaggaaagtaaaaagaggtggtaaccaggaaaatggcagacaggagacaggactaacatgcagctcccacttggatggacagaacagtgtatgaaggttcacatcatgaatttttcctctaagaaccaccacaggaacatattaggaaaaccaaaataattcacggaccctttgaaataartggcttgccactggaaactctgagacagccaaaaaactgtgagtccccgaagtgtgagaggggaaacagtctgcagaacacatccccactggggaacctgaaaatccagatcacaggagaaggacttaaccttacctagaggtgaaatggatttagggagccaagcaaaatacaaaagtagaaaagccagcagaaagagcccataggcactcccaagtccccagcttgagcccagggaagcaatcccaggcaatatctcacaggggtccttggagaaggcagccagaagaactgggg

SEQ ID NO: 216655 - DNA, 661 bp, Homo sapiens
gtcaggttggccattcaaaatcatgtggggcacaggataattatctattttgtgggagggactatacaatgtattacaggacgtttagcctacctaagccctgccctccaaacaccagtgggccccttctgtcattcatcatcataataaaaaaccatctccccaaattttcaaaatgcctcatygggtaaattattgccctagagagtatccaggactgggaagtagcttattggtggagtgaaagccacagagtggcaagattgcccaggaagttcagaaagagtaataaaagaccagggacaaggtcaagtgaaatacaaacatttaataaataggaaatggtaagaaacagcctgaaaagactggaaacagacagaaggagaacagtttcaaggccaaaggagaagaggaacagaaaaggggaaataatgttttctctagaagagatgagtcaatagtatcaaatgaaatagataaattaggtgaaatgaggaactgatgtaagtctactgaatttcacaattaagaagtaatttctgaattgtcccaaggctgtcagtgctgcctttgtggattgagaatgtattgcagcaaattggaaattggacatcaaaactggagacactacattgtcaaatctttctgaaagggggagaga

SEQ ID NO: 216656 - DNA, 661 bp, Homo sapiens
gtcaggttggccattcaaaatcatgtggggcacaggataattatctattttgtgggagggactatacaatgtattacaggacgtttagcctacctaagccctgccctccaaacaccagtgggccccttctgtcattcatcatcataataaaaaaccatctccccaaattttcaaaatgcctcattgggtaaattattgccctrgagagtatccaggactgggaagtagcttattggtggagtgaaagccacagagtggcaagattgcccaggaagttcagaaagagtaataaaagaccagggacaaggtcaagtgaaatacaaacatttaataaataggaaatggtaagaaacagcctgaaaagactggaaacagacagaaggagaacagtttcaaggccaaaggagaagaggaacagaaaaggggaaataatgttttctctagaagagatgagtcaatagtatcaaatgaaatagataaattaggtgaaatgaggaactgatgtaagtctactgaatttcacaattaagaagtaatttctgaattgtcccaaggctgtcagtgctgcctttgtggattgagaatgtattgcagcaaattggaaattggacatcaaaactggagacactacattgtcaaatctttctgaaagggggagaga

SEQ ID NO: 216657 - DNA, 661 bp, Homo sapiens
gtcaggttggccattcaaaatcatgtggggcacaggataattatctattttgtgggagggactatacaatgtattacaggacgtttagcctacctaagccctgccctccaaacaccagtgggccccttctgtcattcatcatcataataaaaaaccatctccccaaattttcaaaatgcctcattgggtaaattattgccctagagagtatccaggactgggargtagcttattggtggagtgaaagccacagagtggcaagattgcccaggaagttcagaaagagtaataaaagaccagggacaaggtcaagtgaaatacaaacatttaataaataggaaatggtaagaaacagcctgaaaagactggaaacagacagaaggagaacagtttcaaggccaaaggagaagaggaacagaaaaggggaaataatgttttctctagaagagatgagtcaatagtatcaaatgaaatagataaattaggtgaaatgaggaactgatgtaagtctactgaatttcacaattaagaagtaatttctgaattgtcccaaggctgtcagtgctgcctttgtggattgagaatgtattgcagcaaattggaaattggacatcaaaactggagacactacattgtcaaatctttctgaaagggggagaga

SEQ ID NO: 216658 - DNA, 337 bp, Homo sapiens
ggcatatgaatgcaaagattttgttttgtttttttktgtgtgtgtgctgattgtttcagtgatgcctaaaggatgctatcaaggatctttggacaaggatcacagaatgctgaattgaaaacatttcccaaagccccaagacatatttcaacactcacctccagaaaccattgttgcatggctgcccaagataagacgagccctactttataattcagctttacttcggggcagagggagtgaggcagagcatcataaacccagccaatggaatgtgttataaaagcccttgttctttcaccctaaggacaagctgtggagaaatgatatgggaaat

SEQ ID NO: 216659 - DNA, 563 bp, Homo sapiens
agatttctgagcatcagtaatggaggtgttgtagaatcgctttgtgaattcttgtgctatggagacagtccttgttcccgatttgttatttaaacattgtaattttgtttgattgtttactgaagtcatgtctgaaaactcccatctgtaactaatctctgactcaatgaacttccatgataatgttttaagagagaaaaagaaaaaaaaaaccatattcttaatacctactaaaagctagataatgtattaaattgacttgtattgcttatctcattttagtcycacaacaaccctctgaggaaaataggattctcactgcccagaaggtaagcagctgtcttgggtttctggcctgagtaaccacaggcttagtgatgctaatgacagacaaaggaggactcacaggctctgagcagatcctggggggttacttgctgatatacccagagggagctgtcccgcaggtaggcagaactcagatctgcacctggaaggggtcttagctgagcctggacacttgtgggtcattcatgaggaggaaaatgagactgagtgtgtaa

SEQ ID NO: 216660 - DNA, 563 bp, Homo sapiens
agatttctgagcatcagtaatggaggtgttgtagaatcgctttgtgaattcttgtgctatggagacagtccttgttcccgatttgttatttaaacattgtaattttgtttgattgtttactgaagtcatgtctgaaaactcccatctgtaactaatctctgactcaatgaacttccatgataatgttttaagagagaaaaagaaaaaaaaaaccatattcttaatacctactaaaagctagataatgtattaaattgacttgtattgcttatctcattttagtcccacaacaaccctctgaggaaaataggattctcactgcccagaaggtaagcagctgtcttgggtttctggcctgagtaaccacaggcttagtgatgctaatgacagacaaaggaggactcacrggctctgagcagatcctggggggttacttgctgatatacccagagggagctgtcccgcaggtaggcagaactcagatctgcacctggaaggggtcttagctgagcctggacacttgtgggtcattcatgaggaggaaaatgagactgagtgtgtaa

SEQ ID NO: 216661 - DNA, 599 bp, Homo sapiens
tggctgggctgcagggtgctcagatagtagatcatatgttattctgggagttttatttctttaggtgagattaacatgtaaatggataaatttgagtaaaatagatacattccacagtgtggacattcaatcagtttatggcctgaatagaatagaatacccagcttccatgagcaagcaataattctccagcagacagccttcagacttcatctgcatcattagctctcctgggtctccacctgctagctctcagagagaaattgcacaatttttcttctaagtcttgaggccgcactgcagattttgatttgctagtctccttaattctgtgatccaattccttataagagtctgtctatctatctatctatctatctatctatctatctatctatccacatcctattgtttgtttctctgaaaaactctgactwatatactcccagtaggtgttaggtgagagtttagttctcacatttgtggtgggcagacttatctcctcttttgaaaataattgcatttaatactctccaaagcctttaaggccagaatctgtagctcattcatttctcctcttgagaaagtggtaggagcaa

SEQ ID NO: 216662 - DNA, 412 bp, Homo sapiens
acacacaaacacaaacattattctcctcacactattagaatcttaatgctcaaaaacaatacctgttattcatcaagtgcctctcaaggtacatattaggtttgtacacaagtaattacggtttttgcgattttaatgacaaaaatcacaattacttttgyaccgacctaatatctcttaatgaaagaaactcaacaaactcttatagaattgaagagagtctgtgacagaatgtgcttgacaggattgaatgccttcctaactctacaatgagtgtccatctaaacaccaaaagacattgtacgtgtatgagacctttttttctaaaggccacaaatcacttttcccttaaaaaatatctctagcgacaaataaggcaaacgtgaaacacagggttgaaatgaatgtgttg

SEQ ID NO: 216663 - DNA, 570 bp, Homo sapiens
ttctagagaaaagagatgtctgactcaatgttatgtgacaaatttactagcagataatagaaaaatcaggtcctttcacttcaattttatatagtttccatagcatcatgatttgtttagagacatagagaaaaatattgaagtagtcgaagtagtaataatatgcttctgacgctaccactactatatgtattaaattgtagtcactccttgaataccaagactaaatatgtcacaagaaacaaaagatgttatgtcctttgtgaatttaaaagaacttgattttaaattgaatttggactgtctagactattttgcaaatattttactaaatttgaagtacaaagctggtaagtatgtacacagaaaaagtgatataagattttctcacttggctaatgtgtatgtgtgtatttgtccctractctaagcatgcagactaccaagccccaacaacaactggatttcaacctggtgactctcacatagcatgttctatagctgggttgaaagcactgaccttgaaacttctattctgctacattaatttgaaaacagatgcttgttggg

SEQ ID NO: 216664 - DNA, 395 bp, Homo sapiens
ctaccgtcttagcacccaagctcttgtttcaatcaccatgttacagaggtgagcaggcagagagaattcctaattaatccatcaattcttaaggacaaaggattttaaggaaagtggcacttgtcatcccaaagacgtaaaagatgatcatatgcctttcctttttcctttgatctgagcctcgcygagggacagtgatttaatgttctctctgaagccctgatggattgctgctgtgctgctttactcacctctttcctcctgtctttgtctttctgtaacagccacttgatagatgcctgcggagacttgggggcacactccagaaaagtggtgttattttttactccatactggacaatttcagctgcatttctgtatgctagcaggcaaaa

SEQ ID NO: 216665 - DNA, 573 bp, Homo sapiens
tcttaggcaataacaatataagagacatagttaagtgaagctatagactgaaatatatgttcctgtttttactaaaatgatggagtatacatcctcaaaagcagatctacaaagattactttactaaatcaggataccactatgacgtctgcccaaragcagttatgttagaaggaatacaactaatttgcattgttccctcacatgctgaacaccgtatatgtacaagaccgtgctctacaaaggttctctttttgcagttattaatagccctcaggagtagataacaattgctcattaacagaccagttaatggcagtccctacaatactgccaagtaaattacaaaaaaaaaaaaaagaaagaaaataaaatataccaccttctccagaatctgcaataatgtcctctatttccattttattcattctcgttttgcacttgcaaacagtataaactagagtaaaacctgccaactataatcctttctgtttctttataaaatctgaatatagtatttgccctacacacctgacaaggttgttcaagatcaaagaaaagagcctacgtgaa

SEQ ID NO: 216666 - DNA, 629 bp, Homo sapiens
gctctgtggtacaggtgtaacttcacagcatgatatttattggtgacattctctcttgcttcatattcatttattctttccctttcagttctgcttcattccctttctgtttcctgcatttactcctgttctcctactcttttttgcgattactctttttaaaaacatctctcggccgagcatggtggctcacgcctgtaatcccagcacttcgggaggccgagacrggtaaatcacgaggtcaggagtttgagaccagcctgggcaacatggtgaaacctcatctctactaaaaatacaaaaaattagctgggtgtggtggcatgcctgtaatcccagctactcgggaggctgagacaagagaacctcttgaacccgggaggcggaggtggcagtgagctgagatctggccactgcactccagcctgggcaacagtatgagactccatctcaaaaaaaaaaaaaaaaaagtatgttcagttgattaaaggattacttacaactagctcaggaagagaaaacaacacctctaaaatgcagatgtaactgatgtggcttgaatgagacaggaatttgaatgtcccattttacaccaaggtgagctaatccagacatgtaatttaagcttt

SEQ ID NO: 216667 - DNA, 629 bp, Homo sapiens
gctctgtggtacaggtgtaacttcacagcatgatatttattggtgacattctctcttgcttcatattcatttattctttccctttcagttctgcttcattccctttctgtttcctgcatttactcctgttctcctactcttttttgcgattactctttttaaaaacatctctcggccgagcatggtggctcacgcctgtaatcccagcacttcgggaggccgagacaggtaaatcacgaggtcaggagtttgagaccagcctgggcaacatggtgaaacctcatctctactaaaaatacaaaaaattagctgggtgtggtggcatgcctgtaatcccagctactcgggaggctgagacaagagaacctcttgaacccgggaggcggaggtggcagtgagmtgagatctggccactgcactccagcctgggcaacagtatgagactccatctcaaaaaaaaaaaaaaaaaagtatgttcagttgattaaaggattacttacaactagctcaggaagagaaaacaacacctctaaaatgcagatgtaactgatgtggcttgaatgagacaggaatttgaatgtcccattttacaccaaggtgagctaatccagacatgtaatttaagcttt

SEQ ID NO: 216668 - DNA, 514 bp, Homo sapiens
agtgatatgtaaataagtcatgaaaggataatagctcatataaaactatagtaacaatatcaaacaatatggaagtcaactacattcaaaaataaaaataagcaaaatcatttttctaataacaaaagtttttattttcacaaatattttaaaatgcagctacctttgagccacaaaaggaaaaagcagtattccttttatgtatttgatacaaatattaaacataactcagttttagttcattagctcagctcagtgaaaatagctcaggaaaaaaaaagtcataggtaatgctattggtatatgcaggaaaccagaagcgacgacattgagttcaaaatccatttagaattgtagacaggccacaaggggcaggtgaagagagcagccacagagtcactaatacattggacttcaaacagaaaaactgaaatgtcagttggtacacacctaaaacaaaytccaactagaaagataattatgtagctcagacattgataacaggttaagaaat

SEQ ID NO: 216669 - DNA, 575 bp, Homo sapiens
cataaattgcttttaattagcatattaaaaattgcgtacaaatattatgactcaaaggcacactagtccggggktatatatatagcttttcttgagatataatttatatgccattcaattcacccatgtagatgtacataaattgtgcaactaccaccataatctagtatatttttatcacctcaaaaagaaatcctgtactgtgtagcagtcagttttaatcctcttccccttcttccactctaggcagccactagcttatgttctatctctatgggttttctcattctagacatttcagatatatggaattacacaatatatagtcacctgtgactagtttctttcacttagcatgatgttttcaatgttcatatatgtagcacataggagtatttcatttttttgattgcctaattttctattgtatggatgtatcaccttaagtttatccacttatcagtttatggatatttgagttgtttctactttttagttttatggataatttgtgtacatatatgaggttgaactttacaatgatcaaatagtattttattttcattatttatgat

SEQ ID NO: 216670 - DNA, 603 bp, Homo sapiens
cttacaagaagatactacgatactacagatcatatcaaaataaccattttcaagagactcactgaattttttctgatggcttgaccaataggttgacctgcagccgttttgcaaattgtaaagtgaatccagttatctaaaaagagaacaactaaataattaccaacttttaaaaacattattttatactattcaaaacttatttttcttacagcagaagagaaggtagtaacttaaggttaaacaggactaattgaaacttttaaaactgcatatatagttatakttatatacacatgcatccatatagatacacacaatttatttgcccaatcgaatgtcaaggttttagttagttagatttgtgagttacttgaaatggtttttaaaaaatcaaaaatcagcaacaaaatataagatctcagataattcctggtcaaatatatattcagttagaatccatgtgtcattgtttaaactaaaacataactactaaaatcctagaatttcatttactttttgaaaaggaaaatacaaaaataaagatgattaaaactgttgcgctacaacaattttatagattttgacaataagtatagtcaa

SEQ ID NO: 216671 - DNA, 608 bp, Homo sapiens
ttacagcatagaatcatcaaggctgatcaagaatggttaatttgcattcaatatctgctgataaataagagtaaggtttaaagatttctaccaaaactataaaaatttttgattctcagagaaaaaatcatcaatatataaagaaacccactatgctaaaaagctcaccccttaacaatgtgcatatccttatatttcttttctcatatacacaaattcaaccctgatttttgttaattaaactgttacatggatagcgccacctattccattcaatgtaaaataactcgctataaccacacaagagagggaagacttatacagaagcaatataagattatgtttcctaaactgttattaagagaaactcatttaaggactccaaaaatgctattgtcataatcagatccactggctcccygctcagaattcagttccactttgcttagtcttggtatcctgacttctggggagaaacaggtcagctagctacctagaaacaattggcttcccaaatgcaggttttgtgggagctgtggtcaccaccccaagtaacccttggatggcctgcaaatggtgctgataaagtctgatagtttaccactaat

SEQ ID NO: 216672 - DNA, 496 bp, Homo sapiens
agtctcggggttcaagcgattctcctgcctcagcctcctgagtagctgggattacaggcaccggccactartttttgtatttatactaatttttgtatttatactagagacagggtttcaccatgtttgccaggctggtctcgaacttctgacctcaggtgatccacctgcttcattcagcctcccaaagtgctgggattacaggtgtgagtcactgcccctggccacatatttcttgtctatatgtcctcttagcacctagaatgtgagattgtgtgtagatctgaactgggcaaatgtctgtgctaatcaggctatgagaggtaaacatcacaacaccaagatccatccacccaatgaccatgtccacatccccttataagtattttttttcctgacaataggctgtaatgattgggccagaagatagcacacattcactgaaaacctgctaataaaatgactagtcgcatatggcatggtcccacccaaaaac

SEQ ID NO: 216673 - DNA, 496 bp, Homo sapiens
agtctcggggttcaagcgattctcctgcctcagcctcctgagtagctgggattacaggcaccggccactagtttttgtatttatactaatttttgtatttatactagagacagggtttcaccatgtttgccaggctggtctcgaacttctgacctcaggtgatccacctgcttcattcagcctcccaaagtgctgggattacaggtgtgagtcactgcccctggccacatatttcttgtctatatgtcctcttagcacctagaatgtgagattgtgtgtagatctgaactgggcaaatgtctgtgctaatcaggctatgagaggtaaacatcacaacaccaagatccatccacccaatgaccatgtccacatccccttataagtattttttttcctgacaataggctgtaatgattgggccagaagatagcrcacattcactgaaaacctgctaataaaatgactagtcgcatatggcatggtcccacccaaaaac

SEQ ID NO: 216674 - DNA, 283 bp, Homo sapiens
atgattctcttaaaggaatgcagaccccactcctcacatgacatgctgcccccattttaaattagaagtattttcaatctactggagtgattaggagttgggaggcctaaatttaggaaacactggtcctaatcctgtcttcgtgagtcattggttctcactctgctcctcagcttcctcatctgtgaagtaatggggctggactcagtgacctttaaggtcctcactatgcaacascatcacaagccctttatctggtaattctaaatgtttggaaacaagg

SEQ ID NO: 216675 - DNA, 561 bp, Homo sapiens
atgagaaggaaccagaaaaacaattctggtaatatgacaaaacaagcttctttaacaccacccaaaatcgtaccacctcactagcaatggatccgaacaatgacaaaatytctgaattgccaaaaaaaaaagcattcagaaggctgactattaagctaatcaaggaggcaccagagaaaggtgaagtccaacttaaagaaatcagaaacataatataggatacgaaaggaaacttcttcagtgaaatagatagcacaaatgaaaaatgatcacaacttctggaaatcaaggacacacttagacaaatgcaaaatgcactggaaagtctcagcaatatagtcaaacaagcagaagaaagaacttcagagctcaaagacaaggctttcagattaaaaagaattttttaaaacaaacgagtcctccaagaaatttgggactatcttaaatgtgcaaacctaagaataattcctgaggaagaagataaatctaaaaatttagaaaacagctttgagggaataattgaggaaaccttccctggctttgttagagatctagacatcc

SEQ ID NO: 216676 - DNA, 609 bp, Homo sapiens
ttcacaaaactccccttaatctttaaaattcaaggttttcaagccctgggatttggaaactaggttaaatgcagaatatcaagcctcctgattatttgatcacctcttcccacatgcaggcctagtctctaaatcctggcatggtgtatgcctaggaacccatctgttattctctcatacctacctgactgtgatggagcacttcagctacagctgagcacctgtttttgagagtaaaatgtgagtctgactctgatctggacaggaccaacacatgccccacagttacgttatcacaacaaatttaatggaaggtgaggaggttgatgaggatcttgaacaaagctatcatcaaagcctacattttagcacttcttgcaggtgtgtttggttgctttgtgcccataatcaggaactacaaacatggctaccagtttgytttcattctttgtttggctgtgtctaaagatgtcgaaacaacctgtcagtttaacacgaagatattagctggttcattagacatattcacttatcttttgacaatgcagagatggaaatactgggagctagcctgccctctcccttctctggcctcctttcagcccacct

SEQ ID NO: 216677 - DNA, 520 bp, Homo sapiens
caaatagccaacagatatatcaaaaaaatgctcaacattagtaatcaccagagaaatgtgaatcaaaactacaacaagatatcatctcatcctagttacagtggcttgtatcaaaaagaaaggcaataatggccactggtgaggatacagagaaaggggaaacctcatacactgctgaaaagaatataaattagtacrgccaaaatggaaaacagtatggagatttctcaaaaacctaaaaatagaactgtatgacccagcaattccactactgagtatgtatacaaaagaaaggaaatcaatatatcaaaaagacatctgcactcccatgtttatttcagcactatgctgaacagccaaaatatggaatcaacctaagtgctcattaacagattaatggataaagaaaatgtggtatatatacacaatggaatatcattcagccatgaaaaaagaataaaatcctgtcatatgcagcaacatgggtgaaactggaagtcattatgttacacaaaataaa

SEQ ID NO: 216678 - DNA, 520 bp, Homo sapiens
caaatagccaacagatatatcaaaaaaatgctcaacattagtaatcaccagagaaatgtgaatcaaaactacaacaagatatcatctcatcctagttacagtggcttgtatcaaaaagaaaggcaataatggccactggtgaggatacagagaaaggggaaacctcatacactgctgaaaagaatataaattagtacagccaaaatggaaaacagtatggagatttctcaaaaacctaaaaatagaactgtatgacccagcaattccactactgagtatgtatacaaaagaaaggaaatcaatatatcaaaaagacatctgcactcccatgtttatttcagcactatgctgaacagccaaaatatggaatcaacctaagtgctcatyaacagattaatggataaagaaaatgtggtatatatacacaatggaatatcattcagccatgaaaaaagaataaaatcctgtcatatgcagcaacatgggtgaaactggaagtcattatgttacacaaaataaa

SEQ ID NO: 216679 - DNA, 353 bp, Homo sapiens
agctgggattacaggcacccgccaccacacccgactaatgkttttttttctctgtatttttagtagagacagggtttcaccatgttggccaggctggtctcgaactcctgacctcaggtgatctacctgcctcagcctcccaaagtgctgggattacaggtgtgagccactgcacccagcctgtatatattttcattagtgtatgctatgtatggattttcaggtctacaaaataatctgaaagggaacacaacaaaccttttaaagtggcagaggctggaagagaataaaatgagtgggaaccttctgtattgttgttttttcaacaaacatacacgttttgtattttcaaa

SEQ ID NO: 216680 - DNA, 353 bp, Homo sapiens
agctgggattacaggcacccgccaccacacccgactaatgtttttttttctctgtatttttagtagagacagggtttcrccatgttggccaggctggtctcgaactcctgacctcaggtgatctacctgcctcagcctcccaaagtgctgggattacaggtgtgagccactgcacccagcctgtatatattttcattagtgtatgctatgtatggattttcaggtctacaaaataatctgaaagggaacacaacaaaccttttaaagtggcagaggctggaagagaataaaatgagtgggaaccttctgtattgttgttttttcaacaaacatacacgttttgtattttcaaa

SEQ ID NO: 216681 - DNA, 645 bp, Homo sapiens
gagtgggaaccttctgtattgttgttttttcaacaaacatacackttttgtattttcaaaaaagcataacttaaaactttcaatgaaatcatttccagtgagcctgaatcaatgtggaaacacaaacttcatttggcctcattaattgcttcccttggcccaggttagtcatgtggtgtctagtatgacggtctacattgcatacacgattaccaggctggccctccaaaaacacctgtttcttatctcatacaggacgactgagcacccttaaaaattagctctatgctaacaactttatgaaaattcagtacaggagataagacattgttccagcccccaggcttaatactcaacctgaaagctaaaaacattctgtaccgggtagtgtagtaagtctaaatttgtggaccaactttaaatactcttcttcctgtctcattcattgagcaatatttatcattattttccttcatttcctgtcccttctggttatactagccttcatgctattctacaaatacctcagcttttgcttctactatctcgctcacctggagtttctatctccctcatcatggcatgttctcatccatccaacaagtttcatcctcatcttttccatgaatttgttgctaaccctca

SEQ ID NO: 216682 - DNA, 569 bp, Homo sapiens
attgctctgactcccctcacaacaggggcagaggctccggatccaagaagtgctctggggacagccagtctcagctctgcggggcaaatgagcacaccacagtcactcaaatctggaaccaatcatgtgatccaaacctgcattgtactgcccatcctcgcttcataacaaactcctaaagcaaggaaaggaacagaatatagaacccaccagaagactcgggcactagccaagttttatttgcccgacctgggacacacatcctcaccatctctgggtctctattccctcctctgtaaaatgagagtcagacagaatgatgacttaacatcctttctaactccatagytctattttttttaatcatttgatatatttccttctttctgaaagctaacatgaagttgcctgcagtaaatttctatgctcccctgctggggtatattatttcatattgtttcctttgttgtgaaaattacaacagcacagagtacaaaatgcctgtcctctaagtcaaggccatgacaatctaaacagaggctaggagttcacctagggccctaataact

SEQ ID NO: 216683 - DNA, 520 bp, Homo sapiens
agtgtcacctctcctggatacaggtagttacccttctctgcaaagccaggtgacggatctgatctcatgtaccagacccatttcccctgaagaaacttcttccccaacccagtggactgccttgtaaagggtgtcccttgtctccactgggtgggcgtctttgtgctacgggatgtggtgattgtcagcctttccagggacttcctcaggtyttcaggcaggaggcactaggcaggctaggacaagcttgtgcttgcctgaatttgccctggcaacactcagggctcggctttgctccattgtcatgcataaatagcagataatcctttcagaagtaggcaggatttaagtcttatagtcacctacccagagggagccattggcagtgctcagccctctctgtgctgtcttgcttaggatgtgagggtgttggttagataggctcagtgttgtaaccagcagtccatggactcagtgattctgaagggcagctgcctgtcaacctttaaaaacatggtca

SEQ ID NO: 216684 - DNA, 584 bp, Homo sapiens
atggtgagcatgggagaaatgaaactggtatttgtattacagtgtctttgtytaaaacttaacttgacaatgtagttttatttttcaaataagtgtgttttaatctcttccccttggctttgtggctcccttcagcccttctcctctggtcagcctgtctttcaagatagggagcctgtgttgctcctctctttcttgctttcgtgtctgggtttgagttgcagtcagtcccaggctctgccttctcaggtaggtgcaggcactacttacttagtcacactgctgcagtacctcacagagcttcataactaaccttaaagagttcttttacaaattcttagattaagtgtaggtagtgaagatacaatagtatagcaatgttgctttgtgaatcggaatgctgtttgaaagtgttcatttgatatagattgggctctctcttcttttcagaccctcctcatcttttccctgccttccatcctcctgtaccaattgatgccagacatcatgagggccgttaccattacgatccatctccgattcctccattgcatatgtaagtattaacactttcttcattaatg

SEQ ID NO: 216685 - DNA, 610 bp, Homo sapiens
ttgcctcggttttgagcaaaatgaatgtgcctcattcatttcttaattgctacaaagttgccaaccagcacactcttgaaatactgctggtcttccagagacttccaaatatttctggaagtgattctttatgattgatggcagcattctctcttgtgcaactgtgaagacaagggtaaacctcttgatatgctgagcctgagccccgacaatctctggcaggcttgcatttgtgctgcctgagagctcctcagggttgccgcctccaaagcaggattgacakttcatgaaggtacctgggtttccctgccctggagagttcatgtttgaagtgccaagtcctgtgtgctctggtattggaatagaaagagcaccaaacttgcatcataaggccatagttttatgcaacactgggtagatcatttagcttttttgagtggataataaaattttcccttcttagttctcaggattgtcttgataatagaacttaagaagaaacaagacttaggagaataataataacgttttgggaatgcttattttatgtcaagaggattccttaagaagatatatactattatgaaatatactatcttattttgctttc

SEQ ID NO: 216686 - DNA, 440 bp, Homo sapiens
ctgctgcttcacatatgattagactggtcctgtagccattcacacacgtgcatgtgtaacatgagtgttttactcaccttctgatgaacacttttctgttctgtgtgtctgagcacatttatacasatgcgtctgttagaggagggcttcccaaactctagtgtgtctatgaatcacctggggagcctgataaaaggcgattctgcatcaggtgggatcaggtggggcctgagattctgtgctcctcaaaagccgatgatgtcagtgctgttggtgcctggaccacactctgagtggcaaggtcttagaaaacatcatggtccagggctgttgcctgtgctttctattcttgaccatgccacatgaaaatccaaagaagtatgtactgggaaaggaaatgagcttagactttcttatacttgttgctcattttaggctct

SEQ ID NO: 216687 - DNA, 455 bp, Homo sapiens
aatccctgctggtaactagggttctgttctgctgcttcacatatgattagactggtcctgtagccattcacacacgtgcatgtgtaacatgagtgttttactcaccttctgatgaacacttttctgttctgtgtgtctgagcacatttatacagatgcgtctgttagaggagggcttcccaaactctagtgtgtctatgaatcacctggggagcctgataaaasgcgattctgcatcaggtgggatcaggtggggcctgagattctgtgctcctcaaaagccgatgatgtcagtgctgttggtgcctggaccacactctgagtggcaaggtcttagaaaacatcatggtccagggctgttgcctgtgctttctattcttgaccatgccacatgaaaatccaaagaagtatgtactgggaaaggaaatgagcttagactttcttatacttgttgct

SEQ ID NO: 216688 - DNA, 455 bp, Homo sapiens
aatccctgctggtaactagggttctgttctgctgcttcacatatgattagactggtcctgtagccattcacacacgtgcatgtgtaacatgagtgttttactcaccttctgatgaacacttttctgttctgtgtgtctgagcacatttatacagatgcgtctgttagaggagggcttcccaaactctagtgtgtctatgaatcacctggggagcctgataaaaggygattctgcatcaggtgggatcaggtggggcctgagattctgtgctcctcaaaagccgatgatgtcagtgctgttggtgcctggaccacactctgagtggcaaggtcttagaaaacatcatggtccagggctgttgcctgtgctttctattcttgaccatgccacatgaaaatccaaagaagtatgtactgggaaaggaaatgagcttagactttcttatacttgttgct

SEQ ID NO: 216689 - DNA, 455 bp, Homo sapiens
aatccctgctggtaactagggttctgttctgctgcttcacatatgattagactggtcctgtagccattcacacacgtgcatgtgtaacatgagtgttttactcaccttctgatgaacacttttctgttctgtgtgtctgagcacatttatacagatgcgtctgttagaggagggcttcccaaactctagtgtgtctatgaatcacctggggagcctgataaaaggcgattctgcatcaggtgggatcaggtggggcctgagattctgtgctcctcaaaagccgatgatgtcagtgctgttggtgcctggaccacactctgagtggcaaggtcttagaaaacatcatggtccagggctgttgcctgtgctttctattcttgaccatgccacatgaaaatccraagaagtatgtactgggaaaggaaatgagcttagactttcttatacttgttgct

SEQ ID NO: 216690 - DNA, 609 bp, Homo sapiens
aaaatattagcattcatatcggtaaaatcaattggcaagtccattatcgacatttatttcaaatgcgtatgtctgaagtatgtgttactcatcccttaaattaacatcttccactttgatgggacaattggacagaccaggccaacacttttttcaccagtaattagtaactctattttcacatttctggagagagaattacactcaaccaacatttctacatcctgaatctgctaatctcagcaataagaccttcctttaaaagacatgcagtgtcttgaccaaagagtaatgatagaaaactaattcacaaacttggtggtttttctagcaaatgagagcagtttcatatttagtaaagtctatatttttgttgacagtacacaccaaaatacatacgcattaaaatgcatacaagggtgtatatatttctatttcctaaaaggaaattcagagatacaaaaacgtaattatacaaattatccttacttcttgttgttaattcagtttaggcacaacrcttgagaaataaataaaaattctccatagcataaaataactggtattccatctttacttattggggaaagtactaaattgatgtcatca

SEQ ID NO: 216691 - DNA, 513 bp, Homo sapiens
ggtctaacagtcaactatgtagaattttgggaagaaagaaaagagaaaacacagcagataaaattattaaagatagaatagaaatcatccatagagttaacgaatgaatcttcagattcaaatggtccatgaagggatgggcagaattaatgaaaataaaaattaaattaaaacacatctaggtacatactttcaaaccactaaggataaaaagatcccaaaagtttccaggaaggaaaaamataagccatctacaaaggaatacaaatcaaagagacatcagacttctcatctacaactttggatggtaatagaaaatgtagtgatgccttaaaagatcttgtagggaagccttttaagttagaattctaactacaccatcaggaaagagcaagggcagaataaagagaatttcacagacacaaagactcagaaattctgcctccactgttgttgggaagttacttgatgtattccaataaaataaaggaataaattaggaatggcaaagtt

SEQ ID NO: 216692 - DNA, 553 bp, Homo sapiens
gccttttaagttagaattctaactacaccatcaggaaagagcaagggcagaataaagagaatttcacagacacaaagactcagaaattctgcctccactgttgttgggaagttacttgatgtattccaataaaataaaggaataaattaggaatggcaaagttgaagtcgtaagacctaggaaacagtggttccaatccagaagatcacaaagggatgtctagagattcctcgttcagacttctcaggagaatgaattggccaggaaagaagggagctttcccttaagtgcaaaagatatggttgggaggttggggagtggggggatgtaagactattgtaaagacaaataatagggaaaaaactaaatcaactaccaaaaagcaacatgataggtaggaaagcaattaaagagtaagtgtagataaagcacttgttcgtaatgctrgacacatcgccattgggtgatttaagaatttagaaactggactaacacagaaggttaggtatgatcttaacattctactggttcaacacagagaatttccacaacc

SEQ ID NO: 216693 - DNA, 582 bp, Homo sapiens
gttctgttgtttggctttttagcatagagagcttacatttcagattcatcataaccacatttcaattagcgattgttgaaaaaaaagttgtgttattatgcaaatcagttatttaaaatctgcaaataaagaattaaaataagagagaatccttggaaggtcagcccgcattactttccctatttgatgagaatgtgtttagtcaggcagtggcggtttttatctaaataaaggatgaagctacccttttactttgtaaaaactaattaaaggaattttaatttgcctgagtatatggtaaattgattgtcattaagtaggaatttagatgtcctatcattcatcacataaaaataaacctcttttttctttgtcagaatttcttattagaatagrgaaacaaaataattaacagaaagccagatcggagatatctgtgttagaacaataagaattctctggcttatatttaagaaggaagtggtatgatcagtgaagaactgggctacttctcttttggctgttctgaaaatgcttaccttgtattttagcagctcccttcaacagagtatcccaaatcac

SEQ ID NO: 216694 - DNA, 495 bp, Homo sapiens
ggactggaggcgactttactgcaattgtgcaattattacatggcatgactaaagtcatagcatccaagtagcagaaatgtggcacacagtgatagtcasaaagataacacacaaaatcacttcatgaacattcacttctcttgtttctctttactttttctttcctcttgctctctgcccaggtctcttgactttttacagcatctaaaggacatagattagaatatggtatagaaatggtcatgatgctatctttatttattcctaccccagcctccttagtccttacggtctcctggtctcctcatcttcacccaggtaagctagtgacagtacttaacagactgtcaatctgctgacttgaaatcatcattgcccatttcgtctccaaggagctataccacaactctttatatcattagagatggaagaagagattcacttaaagaccagtcaggtccttggaggctgtgacagttgggtgcctgggcccat

SEQ ID NO: 216695 - DNA, 477 bp, Homo sapiens
acctaattgtactataatgcaatcttacatcacagttaattgttcaagttcatagattgtggtgtaaygtaatatggtaaataaataagaaacatcaatgaaatcaaatgaccataagattttatgcagttatgttccatcaattgtgcaaaattccttggtaattaaaatatattttattgttctgattttgtttcaaaagctattttagaaatgtttagactgggcaacatagggagaccccatctctacaaaaaataaaaaaattagttgggcatggtggctcacacctgtagtctcagctggagtggggggctgagatgagaggatcactacatcccagggaggtcaaggctacagtgagccatgatggtgccaccacactctagcctgggtgacagagcaagaccttttctttaaaaaaaaaaaaagaagaaatgttctacaccagatagaacatgttttagtttatacaat

SEQ ID NO: 216696 - DNA, 477 bp, Homo sapiens
acctaattgtactataatgcaatcttacatcacagttaattgttcaagttcatagattgtggtgtaatgtaatatggtaaataaataagaaacatcaatgaaatcaaatgaccataagattttatgcagttatgttccatcaattgtgcaaaattccttggtaattaaaatatattttattgttctgattttgtttcaaaagctattttagaaatgtttagactgggcaacatagggagaccccatctctacaaaaaataaaaaaattagttgggcatggtggctcacacctgtagtctcagctggagtggggggctgagatgrgaggatcactacatcccagggaggtcaaggctacagtgagccatgatggtgccaccacactctagcctgggtgacagagcaagaccttttctttaaaaaaaaaaaaagaagaaatgttctacaccagatagaacatgttttagtttatacaat

SEQ ID NO: 216697 - DNA, 487 bp, Homo sapiens
gaattcaagacaacccaaatggatcaaatctcatatttcatttattttcccacaaatgagaggcgtgctatgtgccccaaagaagggaactgacattttttacacctacttataaagatatttatgaatctttttccaatctagttctgcaattatgaaatgccacaatcacaatgcctgtttatgctattttaataaacatgcaatagagaaagtaggcttatgcacatcaaaactaagtaaacctagttctccaaattcttatttgcagtattctgtattgaaaggtgaagggtatatgtagataactttctgttgtttttgctatcttgatgatgagaaaggatgggagaagtaccaaatctaaagtaaaaaaaaaacctagaaggagcacagagccaaagggtatgaggaatctttaatatatttttattttttctatgcarctctaacacacacacacacacacacacacacacatcccaca

SEQ ID NO: 216698 - DNA, 487 bp, Homo sapiens
tggatataaatttgtggggaaagaaaaaagtcaaaaaataacttaaagttgcaaaagtttatcaatgatggacagaatgctttattaaaggacatcagttgcactattaaaaataatctagagccagcgtggtgctcaagcctgtaattccagcactttgggaggccacggtgggcagatcacttgaggtcaggagttcaaaccagctgatcaacatggtgaaaccytatctctactagaaatacaaaaattagccaggcatggtggcacacatctgtaatcccagctactcaggaagctgaggcagaagaattgcttgaacctgggaggtggaggttgcggtgacgtgtgatcatgccattgcactccagtctaggcaacagagcgagactctgtctctaataataataataataataataataataataataataataatttagtataatgaagatttctttgctgtcagacagatttaggtttg

SEQ ID NO: 216699 - DNA, 487 bp, Homo sapiens
tggatataaatttgtggggaaagaaaaaagtcaaaaaataacttaaagttgcaaaagtttatcaatgatggacagaatgctttattaaaggacatcagttgcactattaaaaataatctagagccagcgtggtgctcaagcctgtaattccagcactttgggaggccacggtgggcagatcacttgaggtcaggagttcaaaccagctgatcaacatggtgaaaccttrtctctactagaaatacaaaaattagccaggcatggtggcacacatctgtaatcccagctactcaggaagctgaggcagaagaattgcttgaacctgggaggtggaggttgcggtgacgtgtgatcatgccattgcactccagtctaggcaacagagcgagactctgtctctaataataataataataataataataataataataataataatttagtataatgaagatttctttgctgtcagacagatttaggtttg

SEQ ID NO: 216700 - DNA, 487 bp, Homo sapiens
tggatataaatttgtggggaaagaaaaaagtcaaaaaataacttaaagttgcaaaagtttatcaatgatggacagaatgctttattaaaggacatcagttgcactattaaaaataatctagagccagcgtggtgctcaagcctgtaattccagcactttgggaggccacggtgggcagatcacttgaggtcaggagttcaaaccagctgatcaacatggtgaaaccttatctctactagaaatacaaaaattagccaggcatggtggcacacatctgtaatcccagctactcaggaagctgaggcagaagaattgcttgaacctgggaggtggaggttgcrgtgacgtgtgatcatgccattgcactccagtctaggcaacagagcgagactctgtctctaataataataataataataataataataataataataataatttagtataatgaagatttctttgctgtcagacagatttaggtttg

SEQ ID NO: 216701 - DNA, 487 bp, Homo sapiens
tggatataaatttgtggggaaagaaaaaagtcaaaaaataacttaaagttgcaaaagtttatcaatgatggacagaatgctttattaaaggacatcagttgcactattaaaaataatctagagccagcgtggtgctcaagcctgtaattccagcactttgggaggccacggtgggcagatcacttgaggtcaggagttcaaaccagctgatcaacatggtgaaaccttatctctactagaaatacaaaaattagccaggcatggtggcacacatctgtaatcccagctactcaggaagctgaggcagaagaattgcttgaacctgggaggtggaggttgcggtgacstgtgatcatgccattgcactccagtctaggcaacagagcgagactctgtctctaataataataataataataataataataataataataataatttagtataatgaagatttctttgctgtcagacagatttaggtttg

SEQ ID NO: 216702 - DNA, 579 bp, Homo sapiens
agaaaaacgtgaaaaaattaaagagatttcaccacatattacagaggaaaagggctatggaatactgaaacaaaagatgttttaaaatatgcttttcatataaattaatgaaggagaygatttcaggataacataagagaaacaattttgcgtgtgtgtgtgtgtgtatacactatttgagaattttctagtaccgaataaatccatgatgcaggacgcacagtatctgttcattagcactaacagaaataccttagtaactagataaacaatagtatcactagagagcaatttatgaagcaagatctgttgaattatcttcaaaaatgataacaaggctgacaagcaatttctcaacaatgaaaaaagaagccaaaagtcaattagagaatgtcttccagatgctgaaagaaaatgttcatccagtagaactgtgtacttatggcaggacaaataaacaatttcaaggattcattaaaatatgttctatttgatagaaaatgatttagtgattatagaaaaaaaaatcatggcttgtctggggttaccatgaaagtttgttttatcagtttcagcaag

SEQ ID NO: 216703 - DNA, 474 bp, Homo sapiens
ctgtgcaggtcttcttagtggtctggtctctgagtatgagaggctcttccatcttggccatcttggtcttccaatagatgatcgttgactgtgatcttgatattttggctattgagtcaggagattctgattactgtttatttaactcttgtttgtgaaaaatcatttttcttaggcttattatacaggtcctagcctattttggggagctgtgtttccaacagcaaccttagtttcagatgcagtgtaatactattttgatgtgcttgtgttatcktatgcttttgggctcctgttggtctcctagctcttgctggtgctgctcaggaagacagatatcacctccccaggcctgaaagcctgttgtgtctacattgaggaacagagtctccagaatgcagagagaaaaaaaggctgaaggccaggcacttgtggtgaggatgacacccagccttgggtcccctagactgggga

SEQ ID NO: 216704 - DNA, 632 bp, Homo sapiens
cagggaggaatgagcatacatggactactttctgttgacagtctttaatataaaatattagaccagcaaatgtaagatacccctccttcatgtttggggtccctaactattctgcctttttctttccaatgtttggagttttcctttgcttctcttttgcattggttccaggatttgtcattttatgtagtggagacagagagagatgaatatatgccatctttcccagactgaaagacctctcccttgtattttaaaggctcattctgatgactatgttgagaatacacaaggggcaaaggaagaagtagaaatacttattcagagaatactgtaatttttcagaagaaaaataatggtggatggtactagttgtagaartaggtagattttggatgtattttcagattaggccaatagtatctcttaatagatttcagatggaaagtttgaagtagaagaaatagagaactcatttattggttcatgacctgagaaatagaaaaggcagatacattgaagaagaaaaagggcggtattgtaatctagagtttgactttgatcttgttgattttgagaggtgtttgagacaaaaaagagaagatatcagttagacaatcaattttcatgtc

SEQ ID NO: 216705 - DNA, 538 bp, Homo sapiens
caaaactattaagtataatataatgacagtaacttttgaagggataggcagcaaaaaaatgtaaattgtgacaccataaattcaaaagtttgggaggggtctggactggggttaaaatctaatggcttttattttttgcaatcaaaattaagctattatccacttaaaattacatgttataagattttttttaagatggcggtaaccacaaagcaaaaacttgtaatagatacactgaaaacaaaaggcaataaatcaaaacaaaccactgaagaaagccacttaattccaaaggaagagagtaagggaagaagaaagaaagaraaagaagaaagaatccacaaaaccacaagaaaacaacaaaatgacagttgtaatttatccagagagaaaatctacaaagaaacattgaatgcatactgcactctagattaaatggacttaacaaacatttacagaacatttcatccaatagcagcagaatacacgtttctctgaagtgcacatggaacaatttcttaaggaaaagtcaaattac

SEQ ID NO: 216706 - DNA, 581 bp, Homo sapiens
gaatgatatcaatcagaattaagtaattctacttgacattttattttaaatcaccaaatttgcaaagtttgaaaagcaatcatgttaattagtgcaaaagcatgagacagttggcactcatgcactacttgtggaaatgtaaattgttttggattacctggattgcarttcagaaaattttattttaaattataaagcattagtaaccttaatatctgtaatcgattgtcatttagttctcccttcctagaaaatcttttatataaacagtaagaaaattacttcatcaccactaaaattgtagcaaggcctcatttacacaacaaaaatatttgaggatattctggtggatgcaaagtagatgaagtaatatttaaaaatattatgttttcgcacactttttataaaatgtcagacaaaagaagagtcatggtgtaaaaaaattatctgaagtcactgaagagcatcacagttttctctggcttcagtgtattgtaatatattacatatatcgatgtcccttctgataatcagcataagcatcatcgctaccattgttttattcgttattgctgttataa

SEQ ID NO: 216707 - DNA, 443 bp, Homo sapiens
tttaaaaatattatgttttcgcacactttttataaaatgtcagacaaaagaagagtcatggtgtaaaaaaattatctgaagtcactgaagagcatcacagttttctctggcttcartgtattgtaatatattacatatatcgatgtcccttctgataatcagcataagcatcatcgctaccattgttttattcgttattgctgttataacaaattagcacaaattgagtgcattaaaccagtaaacacatcttctgtataacagaagtgtaaaatgggtctcaagttaaaatcattcctggaaactttagagaattcatttccttgcctttttcagcttctagagctcaccagtattccttggctcccggcccttccctccatcttctaagccagcaaagtcgaattccccgattatttcttccttagtcatctctcactctc

SEQ ID NO: 216708 - DNA, 565 bp, Homo sapiens
gaattcctacccctgggcttgaaagaacaagggtgagatgaggtgagaacaagttgcaaacatgagagaccatgtttccccattctgcttgccagcaggatgtcacaaaatcctttgccagcagaatttcagaaagcccccgcctcagtgactaagcacagcccttcagaagaatgccatggagacaataagcagctcagagcacaggtgcccatgtcttttgcctgaatcactatattttttagaaaagattagttcaatgagccccggtcttttcctgtaaacaaaataacatctgacaggattaatgactatgcctgtgtgatttagaactaggaagacacgcagctcctcctgggtgagmctttgttagagctccccctaaagtttgtaagtatagtttcaggtatagcgtccgggggctccaaactgtcaggggagaaagggtctgggaaggcaaatgaaatagatgtagtttattctatatacgcagggagttttctctaccatgctttcacatgcttttctctttttttggaagttcttcccactcctccatacaccc

SEQ ID NO: 216709 - DNA, 594 bp, Homo sapiens
ggaaggcaaatgaaatagatgtagtttattctatatacgcagggagttttctctaccatgctttcacatgcttttctctttttttggaagttcttcccactcctccatacacccctcaactgattacttacctcatttagaattcaaaggataaatgctcgaggggatggataccccatttcccataatgcttatttcacatcacatgcctgtaacaaaacatctcatgcaccccataaacatatacacctactatgtacccacacaaattttaaaaattaaaaaaaaaactaaaaaagaactttgagaacattgtgttaatatttatttgattatccaacacaaaataatagcaccccctccccattatttttgtgtcttttaaattctcccattgtttcacattttatattagattgcagaaacagrttaacatttgtggtcatttttgccttttagctttttttttttaatgtttctggagttggtatagtgaataaaaattactttgatatcctatcaaaatgcttattgttgttggacctaattataaatgaaaatagtaaaaggttcttttaagattaatgtaaacat

SEQ ID NO: 216710 - DNA, 547 bp, Homo sapiens
atgcagggatttttttttctttgttgcttactatagcatgcctagaatctagaacagtacctagtatcaagtactcaaataatatttgttgaaatagtgttgaatagagttggtttacagtatgattttttgtttgtttaaaacatgcttatttgaactttatctggcaaaattttaactaatctgttttaggatttattcctacagagaaagttttaatgcattctctgaataggattgtgggcaatatgggacattttaaacaaaagttatcatattgacattcttygcatgtgtcacatagtgtgaacactgacctcaaactcatatggatgccaactaccgtttaagaattcccaaagaaaaccttcttgtcagtcactcagaaactagtggcaagtgtcactttctttcctttcgtatataagttgtttcctttgttttttgtttcacctggtagaccgtctttcattgagggttttgttggcatagactttctattttttgataatttggccttatgccaatctcttcctaccagcacaac

SEQ ID NO: 216711 - DNA, 596 bp, Homo sapiens
atgtttatcagaaaactgcttttgtttcagtgcttattgttgaaacctttaaaaaacatattagccctatccttcgtctcttttaactttatgcctaataatttagtacaaacaatacattatctgggtgagagttctttcaagatataaagtaagacattaaacatatttttcatattgatattgcattcctttcctgctccaaaaactttaygaagcaaataaatcttgatattatctgaaagcctgttaagacattaacttattttagtatcagaagcacaggctctctggcttctggctgtataataatcagcaatactgttcaaaaggttaaatcatttaaatacttatctttaatagctaaataaccctggttggctcattggattggcattttctttaaaattgaatatataggaactatatccatatttctgctgtaagtttacttcaagctcaaataatttttttagtgtttacattgaggagtttcagagctttatcaatcactcttctaaggtacagttccagcattgctttctgtaaaaagcctacctctctctaataaccacatatacttttaattttccact

SEQ ID NO: 216712 - DNA, 596 bp, Homo sapiens
atgtttatcagaaaactgcttttgtttcagtgcttattgttgaaacctttaaaaaacatattagccctatccttcgtctcttttaactttatgcctaataatttagtacaaacaatacattatctgggtgagagttctttcaagatataaagtaagacattaaacatatttttcatattgatattgcattcctttcctgctccaaaaactttacgaagcaaataaatcttgatattatctgaaagcctgttaagacattaacttattttagtatcagaagcacaggctctctggcttctggctgtataataatcagcaatactgttcaaaaggttaaatcatttaaatacttatctttaatagctaaataaccctggttggctcattggattggcattttctttaaaattgaatatataggaactatatccatatttctgctgtaagtttacttcaagctcaaataattkttttagtgtttacattgaggagtttcagagctttatcaatcactcttctaaggtacagttccagcattgctttctgtaaaaagcctacctctctctaataaccacatatacttttaattttccact

SEQ ID NO: 216713 - DNA, 534 bp, Homo sapiens
acattattaccatttactgctggtttttttctgacccagtcagatgtaagaggcctctaactggatccaagcctgttaattaagggatcaaatcccatcctggacccagtcccatttctgttaaaacgtccaaacccagtttggaagagaaatttgctcaaagaaactcagagagctcaaaacacaaatycttggagctctgaacttgggagagagaacttaccacaaccctcagccgctctgaggaatcaaggacacaagtgggtccttgcagggtccttgcagctaccttgcttgttcactcagcattcctggggtcattagaagctctactttggaccccgcttctgacaccatctgttaaaaggaaaactttaaccgaatttaaaggagtgtgattgagcaataaatgatttgtgaattgggcagcccccagaatcacagtaaatttagggagactccagggatgccttttggtcagaataaatttatagacaaaaacagggaaatgacacacaggaattgaaagtgaga

SEQ ID NO: 216714 - DNA, 630 bp, Homo sapiens
cacaagtgggtccttgcagggtccttgcagctaccttgcttgttcactcagcattcctggggtcattagaagctctactttggaccccgcttctgacaccatctgttaaaaggaaaactttaaccgaatttaaaggagtgtgattgagcaataaatgatttgtgaattgggcagcccccagaatcacagtaaatttagggagactccagggatgccttttggtcagaataaatttatagacaaaaacagggaaatgacacacaggaattgaaagtgagatacagaaacaactggattggttatagcttggcatttgccttatttgaacacagtttgaacactcagcagcgtatgagtstttgaagtatggctgctgggattggccaagactcagctattgttacaggtacatactactaagttaggttttcaatcttgtctgcctattaagttaggttgcagtttgtccacaacaatggtaatactagatatcttggggtgttggggagtagatggggaaacatgtgaatgttctaaaaagctgaagatttgattgcttcttagtgtgttcctttctagtgagatctaatgtacagtttaaatttgaccttacataagggtaatttacct

SEQ ID NO: 216715 - DNA, 630 bp, Homo sapiens
cacaagtgggtccttgcagggtccttgcagctaccttgcttgttcactcagcattcctggggtcattagaagctctactttggaccccgcttctgacaccatctgttaaaaggaaaactttaaccgaatttaaaggagtgtgattgagcaataaatgatttgtgaattgggcagcccccagaatcacagtaaatttagggagactccagggatgccttttggtcagaataaatttatagacaaaaacagggaaatgacacacaggaattgaaagtgagatacagaaacaactggattggttatagcttggcatttgccttatttgaacacagtttgaacactcagcagcgtatgagtckttgaagtatggctgctgggattggccaagactcagctattgttacaggtacatactactaagttaggttttcaatcttgtctgcctattaagttaggttgcagtttgtccacaacaatggtaatactagatatcttggggtgttggggagtagatggggaaacatgtgaatgttctaaaaagctgaagatttgattgcttcttagtgtgttcctttctagtgagatctaatgtacagtttaaatttgaccttacataagggtaatttacct

SEQ ID NO: 216716 - DNA, 527 bp, Homo sapiens
cagcaatttctgtcactgttgtgaccaaattgctaaagagaatttttaaagttgagatgaaaggatgctaaacagaaacacaagagtgtaggaaagtatgaaacttgttggtaaaggtaaatacatagatcaaaagaaagtrgtatattactataatagtgatgagtaaatcacttttaattctactataaaagttaaaaagtattaaagacaatggtaactaaattatgctaatatatacataacaaatatatgtaaaatttgacagcaatagcatatattgtgaggggaggagaggtaaattgtagctggaggtcattatccttagcaaactaatgcaggaacagaaaaccaaattctgtttgtcctcacatataagtgggagctaagtgatgagaactcatgaacacaaagaagggaacaacagacactggggcctacttgagggtggaggtggggaggagggagaggagcagaaaaaataatcactgggtactagacttagtgcctgggtgacaaaaaataat

SEQ ID NO: 216717 - DNA, 527 bp, Homo sapiens
cagcaatttctgtcactgttgtgaccaaattgctaaagagaatttttaaagttgagatgaaaggatgctaaacagaaacacaagagtgtaggaaagtatgaaacttgttggtaaaggtaaatacatagatcaaaagaaagtagtatattactataatagtgatgagtaaatcacttttaattctactataaaagttaaaaagtattaaagacaatggtaactaaattatgctaatrtatacataacaaatatatgtaaaatttgacagcaatagcatatattgtgaggggaggagaggtaaattgtagctggaggtcattatccttagcaaactaatgcaggaacagaaaaccaaattctgtttgtcctcacatataagtgggagctaagtgatgagaactcatgaacacaaagaagggaacaacagacactggggcctacttgagggtggaggtggggaggagggagaggagcagaaaaaataatcactgggtactagacttagtgcctgggtgacaaaaaataat

SEQ ID NO: 216718 - DNA, 646 bp, Homo sapiens
aagtttcatatctatttagtggcaggactaattaagtagaatgcagataacatgagtacaaccaagttaagtgttctttaagtatatcatattgagtctgatggatattgctgctcactagaattgattttttaaacaacatactcaaatgtttaagtatttgactgtcttgataaaaacttttsaacagcatagaaagttgtattattttaaatgaaaaatatatgaacctaaattcactcagaactaccactgtggaaaatattccaggttatgaatatgcacagaaaaataaaagacaaaaattaaaataacttttgtgacagggaggtcaaatgataggatatattaatttttttgtgaaatgtattttattgctgctgtattatttgaaaactttttagtgttgagatttatttatttatttctgctctattgaggtatacctatacataataaatattattcatttaaatgtacaatttgatgaattttggtagatgtatgtagtcaggcaatcagaattacagtaatgttttggagcactttaatcattcctaaaaagtttcttcatgttcctttgcagttaatctctattcccacttctggccctaggaactgtttctgctgctatgattttatcttt

SEQ ID NO: 216719 - DNA, 601 bp, Homo sapiens
atttctggggaattgcatagattattgccaccatcagagacttggaagactcaggagtagagatagttatcacatctctatgtaatttgcctatgtgagctgtgcagaagccagattaattttgggaggtgactgtgggtcattatagacttaatcagatggtggtgatagagactgcagctgctttctcagatacagcatttttactggtgcaaaacaacatagtctggtatattgatggcattatgcygattagatttgaatagctgtaagtaggaagaatcttgcaaaccggataatggaagattaaccccatgaaatttcaggggcctcttactgcagtgaagtttctggggtccagtggcctggataatgtcaaaatatcccctccaaggtgaaagacaagttgccattccttccaccatctaccatgaaaaagagttacaactcttggtaggtctttctgggttttagagataatatatattgcatttgggtgtgttactttggcctttctactgagatactgataagtgtgcagttttgagtgggaaccagaagaagacaaagctctatagtacgttcaggctgcattgcaagc

SEQ ID NO: 216720 - DNA, 502 bp, Homo sapiens
aggttaccttagccttggaaatatttaaattggctgacttaagtgctctgtctttttaggacaatgtctggattttctcaaaaacaggctttattgactgcctttctcctgtgtatagaacatcctttcttagttttttgcatgcctcttaattttccgttgaacactgaatattttcaataccatgatgtggcatctctggaaattatattaatctcccttaggatttgttgtggttgtytgtttagtaactttcttgaataatttttaaaatctgtgtttttttgctgtttgtggcaattgagatctcttatctgtcagctagtgactagacaaatatttccctaagttgcttaaacaaaaaatttcctagtcttggtagacgggctccatgtgtataagggtatattttgagcacctcagccaggtatttccaaacctaccttggctatcagtatctgcttgtgcagatcctgaaagtgtgctagacataagacctccc

SEQ ID NO: 216721 - DNA, 478 bp, Homo sapiens
ggaaggtatctttgtaatctgaggtagtcaaaatttcttaaataatacaccaaaagaacctaacgtgaagtcaaagatcaataaactgggacttcattaaacctccaattttgtaatgttaaagattgataaatttgacttctgttcataaagacaccattaagacagtgaaaaggcaatctacaaatttggaaatgataattgccattcatayatatgacacaagatttgcatatagaatgatacaatatacattgtatttatatatattatatacacacatacttatagcatatatcaataagaatatgtatcaataataaaaatagaaacaagacatttgcaaaatactttatcactttctgaaaaaaattcatatgaaaggatgttcaaccataataatcataggaagatgcaaactaaaaccaccatggaatatgattatatagccaaaggctaagatgaaaatgtctaataa

SEQ ID NO: 216722 - DNA, 485 bp, Homo sapiens
atccagggaggttttaggaggtaaagtccgctaaagtgtcaggtataagaatgagaccacaggagcttttccctttcatgctagtccacgctcagcctccagcaattctttaaaattaccattaaagtgcttctaccagtttatatcgtctgctgcaagtaaagtagatctttgctttgtttccctttattttcctttttctccagatttaggagtgrtagtttatcctgaaaattcagttcaccaatgggtccaaagaaagtcattgactttcagtttgtttacctttttttattattattataagggcagattccaagttcttttcatgtcagaactgaaaacaggtatctgtgcatttattattcagttttcattttgtctgtgcctctgtttggataatttctgtcgttttaacttcaagcccactgagctttccttcttcagtatctcagaggatgttaatttaaaaacacaatattgtg

SEQ ID NO: 216723 - DNA, 485 bp, Homo sapiens
atccagggaggttttaggaggtaaagtccgctaaagtgtcaggtataagaatgagaccacaggagcttttccctttcatgctagtccacgctcagcctccagcaattctttaaaattaccattaaagtgcttctaccagtttatatcgtctgctgcaagtaaagtagatctttgctttgtttccctttattttcctttttctccagatttaggagtgatagtttatcctgaaaattcagttcaccaatgggtccaaagaaagtcattgactttcagtttgtttacctttttttattattattataagggcagattcyaagttcttttcatgtcagaactgaaaacaggtatctgtgcatttattattcagttttcattttgtctgtgcctctgtttggataatttctgtcgttttaacttcaagcccactgagctttccttcttcagtatctcagaggatgttaatttaaaaacacaatattgtg

SEQ ID NO: 216724 - DNA, 572 bp, Homo sapiens
ctggtccctggtgcgaaaaargttggggacattgggttacaatattgtgtgctgctctttttcgtatccattgaagaagtttctttggtgaggcagttaagttatttgttgattatctgttttattccttttatttcttaagatccttctttttaagctttggtagaacaggtttagaataacctttatgctaaggctagttaagtctgaatattaatgggtgactctctgctgtctctgctgactgcctcaatgctcaacaaaatctagttgctctgtgtgagttgggagattctgcttatagatctcctgctattttttttgttttattttgttctgcctcacctgatgaaatatttccgttgaaagtaatgattagtatttagctgaaggctaagcaaacctatgcaagttattggagccctttttctctataactccttcccaaccaatgctctgtcccacagatcacaactgatttagcttccccaaactccaactagtgtctcctcaacttggcaatatctccatttactgcttgagttcttaaccacggcatgatcctgatattg

SEQ ID NO: 216725 - DNA, 572 bp, Homo sapiens
ctggtccctggtgcgaaaaaagttggggacattgggttacaatattgtgtgctgctctttttcrtatccattgaagaagtttctttggtgaggcagttaagttatttgttgattatctgttttattccttttatttcttaagatccttctttttaagctttggtagaacaggtttagaataacctttatgctaaggctagttaagtctgaatattaatgggtgactctctgctgtctctgctgactgcctcaatgctcaacaaaatctagttgctctgtgtgagttgggagattctgcttatagatctcctgctattttttttgttttattttgttctgcctcacctgatgaaatatttccgttgaaagtaatgattagtatttagctgaaggctaagcaaacctatgcaagttattggagccctttttctctataactccttcccaaccaatgctctgtcccacagatcacaactgatttagcttccccaaactccaactagtgtctcctcaacttggcaatatctccatttactgcttgagttcttaaccacggcatgatcctgatattg

SEQ ID NO: 216726 - DNA, 572 bp, Homo sapiens
ctggtccctggtgcgaaaaaagttggggacattgggttacaatattgtgtgctgctctttttcgtatccattgaagaagtttctttggtgaggcagttaagttatttgttgattatctgttttattccttttatttcttaagatccttctttttaagctttggtagaacaggtttagaataacctttatgctaaggctagttaagtctgaatattaatgggtgactctctgctgtctctgctgactgcctcaatgctcaacaaaatctagttgctctgtgtgagttgggagattctgcttatagatctcctgctattttttttgttttattttgttctgcctcacctgatgaaatatttccgttgaaagtaatgattagtatttagctgaaggctaagcaaacctatgcargttattggagccctttttctctataactccttcccaaccaatgctctgtcccacagatcacaactgatttagcttccccaaactccaactagtgtctcctcaacttggcaatatctccatttactgcttgagttcttaaccacggcatgatcctgatattg

SEQ ID NO: 216727 - DNA, 442 bp, Homo sapiens
cagtcagttgttgatcaaaatcttatgtgacacatgactgtagttgaatttgaatgaaagcaagtattaggatataagactggaagcatagtttgaaacattatcttccaggctcttgaatgacaggyctggaagtatgatcttcattttacagggcagttaaaaacctttgttgagttttgagcactcagtaaaaacatgtattataatcttatggaaccattattgtatatgcagtccatcattgactgaaacatcattttgcagtgcctgactgtactttttgaattgtgaataataattaccgtcataatttactgggcagcagttatatattatactacattccattctaagtcatttcaatttagaattatcacatggttaactcaaggacagtagtcctggtatgtgtatcactgaagagacacacacatttctc

SEQ ID NO: 216728 - DNA, 668 bp, Homo sapiens
ttgggggcagggtcatttgcccaaggccaccgagccatccttgtgtccttcttggctccaaggggaaggggaagagaaacaaaagaaagctttgattggcccggcaatcacgcctgtaatcccagcactttgggaggccgaggmgggcggatcacgaggtcaggagatcaagaccatcctggctaacatggtgaaaccccatctctactaaaaatacaaaaaattagccgggcgtggtggcgggcgcctgtagtcccagttacttaggaggctgaggcaggagaatggcgtgaacccaggaggcggagcttgcaatgaggcgagatcgcaccactgcactccagcctgggtgacagagcgagactccatctcaaaaaaaaagagttttgagatgctgggcagaaaggaaggtgagaacagccttccctgtaataaatgtaattgcttctacctgaaaaactggctgagtcaggaggtggccagggtgataagcttagggtgtagaggccagaaataggagaggcttggacaggaaaaggggatgatcctggtgctgtcccccaccccaccctcacatgcctagggcaccagagacatccccaccttctattctacatcaatacacctgagcagacatgtgaggatggctttcacattcattcattcat

SEQ ID NO: 216729 - DNA, 606 bp, Homo sapiens
tttttctgaacctaaatacaggatttaacatttataactattaaatttcatcttgttagctttggccagcattccagcctgtcaagattgttttgaattaagattcagctactcgatgtattagtcattgctccaagctttatgtcatctgcaaatttgataagtaagccttctatgtcattatacatatcattaaaatgttgagtaggacaagaccaatggctgagatattctacattttatttgttttgaaggaaagactattcatggrttagggggagaagctgagattgtttgacaaactaccaatctatttaactgaatattatccagtctacatttctccatttatccctctatagattccataaaatagtcctgtgacattggttaaatcaaaacacattatgcctatggaattttatctttccatctaaaactcaaaataaaaagtgaaacaagattagttttgcataaggtatcctcggtgaacctaagctatctcctagtaatcaccattttcttttctaagcattcaatcacaatttgttaacaacctattttgtaatttcaacaaacaagatttcatgttatagtcattagtag

SEQ ID NO: 216730 - DNA, 613 bp, Homo sapiens
tgaaaacctgtgagccaagattcgcaaaagtcacgggcaatgtactcagcttcatggatggctcatcaaccacaaaatgtagaaagtagctacagtcccactttttctatggggaaggttactcttgaacaaagagcatgacttgcctctagcacaagcgtaagacacagtcaacataaataatgatttttagtgaataagtcattgaaatgaacaattcaccttgaaattcatggggcaaagcacgctacccctccataaaacaaataaatgagatttaacctgtcctagagtatggctaaaaatgacaatatctctttgattttagctgtgtccctccataaagaaaggaaacctaatttggtcccctgttccttgaatgatacgcacttgtatttccaacatggattcacatcatctcataatccttagcagtcttgacctggagacttcaagcagcctgtcaggatgtttttaaaggaaatctctgytcgcttagcacgtttcagagatcctctctgccttaattctcaccgctacctatcagctaatattgttaagaggcaggcacatatgcaaagaaaattatattcttctggacaccttattcccc

SEQ ID NO: 216731 - DNA, 548 bp, Homo sapiens
  misc_feature (1)...(548): n = A,T,C or G
gatgatcatatcattaactctctcttggagctgggaggtgtgggatggggacacatcttttgattgaggtgggttttgcttcttgtttaccatcaagtttgtacttgagaatgggtctactcctggtgtaatctctcctcattcaatgctcgcttatgcctagaaccttcctggcccaagtgtactctgttaaaaacttgctagagtcacatcatattcccaggaaaacaatctttacataacgtggattatacatggaagatttttgcatggccacacattgcagatcccagtggttccaaatatgagcctgtgttcaaagggaattgagtgaaggactgtatygccgtaaactgtgtggtcttagttggtagactcacttgaccaactctgtctttgagcagggaagaacagaggcttaagctgaaacctggagactctagaagcattgactgagctatatagtcagtgtnttaggttgtagtaatttatcttaagagttgggtgtgtcattnnnnnnnnnnnnnnnnnnnnnnnnnnnnnnnnnn

SEQ ID NO: 216732 - DNA, 548 bp, Homo sapiens
  misc_feature (1)...(548): n = A,T,C or G
gatgatcatatcattaactctctcttggagctgggaggtgtgggatggggacacatcttttgattgaggtgggttttgcttcttgtttaccatcaagtttgtacttgagaatgggtctactcctggtgtaatctctcctcattcaatgctcgcttatgcctagaaccttcctggcccaagtgtactctgttaaaaacttgctagagtcacatcatattcccaggaaaacaatctttacataacgtggattatacatggaagatttttgcatggccacacattgcagatcccagtggttccaaatatgagcctgtgttcaaagggaattgagtgaaggactgtatcgcygtaaactgtgtggtcttagttggtagactcacttgaccaactctgtctttgagcagggaagaacagaggcttaagctgaaacctggagactctagaagcattgactgagctatatagtcagtgtnttaggttgtagtaatttatcttaagagttgggtgtgtcattnnnnnnnnnnnnnnnnnnnnnnnnnnnnnnnnnn

SEQ ID NO: 216733 - DNA, 599 bp, Homo sapiens
ttaaacaggaggtagagagaaagatagagatagaaagtttattcaaagggataggccaggtgtggtggctcacgcctgtaaacctagcactttgggagaccaaggtgggtggatctcttgaggtcaggagtttaagaccagcctggccaacatagtgaaaccctgtctctactaaaaataaaaaaattagcagggcatggtggcatgtacctgtaatcccagcaacttgggaggctgaggcaggagaatcctttgaacctgggaggtggaggttgcagtgagccaagattgtgccactgcactccagcctgggtaacagttgagcaagactccgtctcaaaaaaataaaaataaaaataaataaataaataaaatatataaataaaatgaaacataaagcataaaacaaagggataataacagaggactttctaaacctagagaaatcaatattcaagtacaagcagtttatagaacaccaagcagatttaacccaaagaagactaccccaaggcatttaataatcaaagttccaaaggtcaaartaaagtaaggatcctaaaagcagcaagagaaaagaaacaaataatataaaatgg

SEQ ID NO: 216734 - DNA, 316 bp, Homo sapiens
agcgagggagaattgctctctccgtcctaccgtcttcaagctaagacatcatattctcctgcccctgggcttaggcacagactaaaacttacatcaccagctctcccgagtctccagcttgctcactatagatcctaggacttgttagccactataactatacgagcaaattacttataataaatctagataaatagatagagagygacagagatagaatagatttaagtatatatgtaaatctgtatctactgtactggagataagagtctccttcagggtgcacataagttttcagattatttatgcagtgctt

SEQ ID NO: 216735 - DNA, 242 bp, Homo sapiens
agggaactgagcatgctagctcatatcgctctgcctttttttttttttttataaagccaccagtctcattcctgtgagagctcattaatctattaacctattaattcattaatccattaatggactaatgcactcatgagggcaaagccctcrtgacccaattccctcttaaaagccccctgtcagcactgccacattggggattaaatttccacatgaattttggaaaggacaaatattca

SEQ ID NO: 216736 - DNA, 525 bp, Homo sapiens
actcatggtggaaggtgaagcaggagcaagcacatcacatggccagagcaggaggaaggagagaggtgctacacacctttaaacaaccagatctcttgagtacacactattgggaggacagcaccaacctatgagggacctgcccctatgatccaatcacgttccacaggccccacccccaacactggagattacaattcaacatgagattttgaggggacagtattcaaactatatcattccaccytgacccttcaaatctcatggtcttctggcactgcaaaatatattcatctgttgccaatagtccaccaaagtcttaactcattccagcatgaactcaattaaaagtcccaagtccaaaagctcatctggagatgagttccttccacctataagcctgtaaaatcaaaggaagttattttctttcaagatacagtggggctataggcattgggtaaacactcccatttgtaaagggagaaaccagccgtaagaatggggctacaggacccacacaatgaa

SEQ ID NO: 216737 - DNA, 617 bp, Homo sapiens
cactctggtcatcagatccagctaagtcaagttttccagtcatccctgccaaagtatcagacatccaaggaaagctgttttggaccctccagaccaatctggatatcactgaagatgcttagttgacagaagaatctcccagctgagccctgctttaattcctgacccccaaaattatgagatataatgaaatggttgttgttttaagccactacattttggggtaatttgttacacagcactggataacagaaacatgcatttatttattttaaaagaaactcctgtgcgaaaaactcttctaggtagtggggaatgatgcatctatgaacaactttagcatgatcactgatctcatgaaggttactgtcttagccagggttctccagagaaatagaaccaacaagataagtatatacaggcatgtatatataaaaggagrtttattataggaattggttcacatagttatggaggtcaagaagtccaacaatctgctgtttgcaagctgagaaacaaagaaagccagtggtggaatttagtcagaggccaaagacctgagaattggggtatgtgtgagggaatgagcagatagtgtaaatcccagtctgagtcag

SEQ ID NO: 216738 - DNA, 511 bp, Homo sapiens
taacttaatgcctatttgtctgatgtaagtatggctactcctgcatacttttggtttccatttacatgggatatatatatgtatccatcacatcccttcactttcacttcatgtgtgtctttataggtgaagtgagtttcttgtaggcagcattctgttgggtcttgtgttttatctattcagccagtctaaatcttctaattgtggagtttaaaccagttacattcaggttgttattggtagtgaagacttattcctctcatatacctcaaaataataagaaccatgtatgacaagcccacagccaacatcatactgaatgggcaaaagctggaagtattccccttaaaaactgccagaagaccaggatgcccactgtcatcactcttattcaacatagtattggaagtcctggccaggacagtcaggtaagagaaagraataaagggacctaaataggaagagaagaagtcaaactattcctatttgcagacagcatgatcctagatct

SEQ ID NO: 216739 - DNA, 511 bp, Homo sapiens
taacttaatgcctatttgtctgatgtaagtatggctactcctgcatacttttggtttccatttacatgggatatatatatgtatccatcacatcccttcactttcacttcatgtgtgtctttataggtgaagtgagtttcttgtaggcagcattctgttgggtcttgtgttttatctattcagccagtctaaatcttctaattgtggagtttaaaccagttacattcaggttgttattggtagtgaagacttattcctctcatatacctcaaaataataagaaccatgtatgacaagcccacagccaacatcatactgaatgggcaaaagctggaagtattccccttaaaaactgccagaagaccaggatgcccactgtcatcactcttattcaacatagtattggaagtcctggccaggacagtcaggtaagagaaagaaataaaggsacctaaataggaagagaagaagtcaaactattcctatttgcagacagcatgatcctagatct

SEQ ID NO: 216740 - DNA, 551 bp, Homo sapiens
tcattcctctgcgacccctgtgcctgccctgtgaacaagtttttcatgacccttcatcgcctaatgacagagagcaagaaggagaaaaacacaacttatyccttcaatgtcccctttcagcagaaagtagccagacagactcgacgtccattttcactgtgctgtttttcctttcttgagaccctaataggcagcagatagacatgagcatgggggaacacaaaaggtcaaagacttgaccaagatatttattggggggaaatgaggacagcaaagatcgcctggtgaccatcaagcacaaaactccttatctgaggaattcggaaatagacttccctattatctaaagcaggcatctggtacgaggcttaagaaaactgtaagtaactagaatttctatacatctctggaatgtatgcatgtcaaaacttgttgtacagccctcactgacatcaaggcaccaaaatgtctacaaatgtaatcatctatcatgacctatgtggctaatatggtccaaattacccttaagcttccactttaagttccataga

SEQ ID NO: 216741 - DNA, 479 bp, Homo sapiens
caaccctgtttcatgacttgctatattcactaaacagtatgtgtatgaaacactcccctttggcatttsggtctattgcaaatttcttcactcctgcttgtcttaatttctccacatatagaatggggataacatttatctcttttgcaagatggtgataagaattagagatgtatatgaaaagactatagcatagtgcctcctgtaactggagtgctcaataacttttatctcctataaaatgatgctataataataatgatataatatcaacaataataataatggtagcagcaaatggtagaagtcatgtattttctctcaggtgccaaaacatctttgacactacaaacagcaagtgttttgtgtttattataataccaaatgataggagtcagtgactgcagtttgattgcttggatttgtgtcccagctgtgctcctggcttgcaccctggccaagttactgaacctctgtaa

SEQ ID NO: 216742 - DNA, 325 bp, Homo sapiens
ctatcctggtctctttctcccatactgccctgcctctcacctgggatcccactgttcagcaggccacaagagctttttcgacccctctgctagagccagccccctctcccctcctcccagtgactgcttgagcaccgtctgcaggggccagggtagatgtcccttgctcatgtagccagcacaggtgagttgctggcctktgctcagtgattcagtactgggcttgtgtctgctatccacagggtcagtggagcttcttggggcaatggcgtactgtgctcctaagcagctgtcatcctgtctacccaacattgtgcccaagctt

SEQ ID NO: 216743 - DNA, 337 bp, Homo sapiens
gattctcacagttgactacatatgtgagtcacctggggagtgtttaaaactcaawttaggagagcctgatttcattggtgtagggtgtggcctaagcatagggactattttaaattacccacgtgattctaatgtgcaggagagttcatgaaccactgcattagtatatgtagatgcttgaaagagtgtctgacacagtgtaaccatgatttaagtatttgaagttattatatttttagtgtctttaaaatgcataatatatttaaaatccacaattgagagtctactatgtgccactaaatgccactgcaggacggaatatttcttaaatgaattc

SEQ ID NO: 216744 - DNA, 337 bp, Homo sapiens
gattctcacagttgactacatatgtgagtcacctggggagtgtttaaaactcaatttaggrgagcctgatttcattggtgtagggtgtggcctaagcatagggactattttaaattacccacgtgattctaatgtgcaggagagttcatgaaccactgcattagtatatgtagatgcttgaaagagtgtctgacacagtgtaaccatgatttaagtatttgaagttattatatttttagtgtctttaaaatgcataatatatttaaaatccacaattgagagtctactatgtgccactaaatgccactgcaggacggaatatttcttaaatgaattc

SEQ ID NO: 216745 - DNA, 337 bp, Homo sapiens
gattctcacagttgactacatatgtgagtcacctggggagtgtttaaaactcaatttaggagagcctgatttcattggtgtagggtgtggcctaagcatagggactattttaaattacccacgtgattctaatgtgcaggagagttcatgaaccactgyattagtatatgtagatgcttgaaagagtgtctgacacagtgtaaccatgatttaagtatttgaagttattatatttttagtgtctttaaaatgcataatatatttaaaatccacaattgagagtctactatgtgccactaaatgccactgcaggacggaatatttcttaaatgaattc

SEQ ID NO: 216746 - DNA, 560 bp, Homo sapiens
ttacacaataaaaagccctctgaataattaacagtgaagctcatttaagttggttctgcctgcctctcccccgagtaatcaaattaggggatatttaaaatccagccagaagaaggagcaatccttcagtcctataaacaatatttaaactagcagtgcttttgaagtctgatttaagrttcacccactggaagctttagtgttttttttttttcactttggagcatttctttcaagaccacagggcttttcgcatttccctttgctaacgcagcccctgctgagcctccagccttcttctcgaagttcaaaagcaaccccctttccccttttaaaattaaatctggtcccagcaaagctttcaaaatcttaactattcaggtccaatcgggaagatggaagttttccactaatgctgacttccaagatgacctgaaatctattgcgacttcaagcagcaggctaaatgagttcaaaatgcagcaagattcccacagaccttaaaaagctcggagcccttgctcttgcaaacccattgataaagaaaaggcctggttagc

SEQ ID NO: 216747 - DNA, 409 bp, Homo sapiens
gaattccttggcctcatctctgttctccaggcattgtaggatctaagaaagggaagcagaacgggggtttttatgtacattatctcattctgtccttattcagacacaaaaatccctgtaggaaggcacagtcccatcccaagaggagaaactaaggctcagagaggtgaaatgaccagcccaaggtcacccagctgacaggagtctggytgagtctctctgtctgcatagctcatgttctttgttgccacccatgaatattttcagatactttcaagacagctagcataaaaaagacagtgacttccttttattggtctagtcatatattcctcatccatattgttctcaaaaatcccaacagtagtgtggaatagatcttgttatctctctctcccataacatagat

SEQ ID NO: 216748 - DNA, 517 bp, Homo sapiens
aggaattcatattgttctagataaaatggaaagaggcaacttctacatgtttcatccctgagctctgatatcatctctccccagaatgacaaagagtagaggggccttctgtcagttttgcaagctcttgaccagttgcagtgtcaggacaacaggatcattgtaccaagctcctaatttatcaaaggagaggacatgcctgctttgggtgcttggcatttcttgatsagtcattttgtaacttgcatggcctcttgaagatctggttaaatccagttcaaattccatttctccagtctatcatattctgaagcattctgtcgtttgtatagaatttcactgaagatttgagagagatgaggcaggcacagggagagatcatatgttaaggcccacagcctctccctcctcttccccaaccttctccctctcctgtgcaaccaagaaatccctcccctcttctagtgcaagaaggttccacccatagtcagtgccctacaaggtagccattcaaaat

SEQ ID NO: 216749 - DNA, 510 bp, Homo sapiens
ataaaatggaaagaggcaacttctacatgtttcatccctgagctctgatatcatctctccccagaatgacaaagagtagaggggccttctgtcagttttgcaagctcttgaccagttgcagtgtcaggacaacaggatcattgtaccaagctcctaatttatcaaaggagaggacatgcctgctttgggtgcttggcatttcttgatcagtcattttgtaacttgcatggcctcttgaagatctggttaaatccagttcaaattccatttctccagtctatcatattctgaagcattctgtcgtttgtayagaatttcactgaagatttgagagagatgaggcaggcacagggagagatcatatgttaaggcccacagcctctccctcctcttccccaaccttctccctctcctgtgcaaccaagaaatccctcccctcttctagtgcaagaaggttccacccatagtcagtgccctacaaggtagccattcaaaatattgcttctgatc

SEQ ID NO: 216750 - DNA, 547 bp, Homo sapiens
gacagaaaatattattctggacacttagtgaactttcgatattgggagacatactggtctttttttttttttttttccttctgttcctctaaatacccttgttgccaccacagggcctttgcatatgctctttccgccatctggaataccatccttctgatctttatgtggttggctcctttttgatattcaggcctcagctcccatgttgcctgctcagctaagcctcctgttagcacatgagctaatgtggccactaagtcactatcacatcatctccctcccaggcacttaatattgtttgaaataatcttttccaactattatcctcctcmtcatcaacaatcatcatcatcatcatcatcaccatcatcatcatcatcatcatcactgctattatttacccagcatccgtcttcctcactaatatgtaagcctcacaaagcagaaaccttcctttactattgtatcccaggaattagaacagtgcctggcatgtagtaaacacccacttaatatcaagcaaatgaatgagagaatgaataaa

SEQ ID NO: 216751 - DNA, 619 bp, Homo sapiens
acacaacacacaaatggtcttgggaagcactgggcttcacgcttcccttccaggtatggcttttgacgcctgagcttgagccaactgcaggtacccactaaggaatgaggtgtctgcactggtattgtcatcgttcatcgatatccaaatctaactcatagtcccaaatccttccttctatttcctccctagttgttcacttttacgtttagcaactattgactgagaccccatgtgctaagcatgctgccaggtgctatcaataaaaagacaaataaaatgtggcccctgacatcaaggaactcacagcctgaggagaagacctgcaagtgaacagaaactggctatcacatgaaatcaatgctgtgatgggggtcagaaggacagtgtgckgcaggagtccacaggtgggcaccctaccaggtgcaatggacggagatgggaagatagcattcttccagaaccccagaggagggaggaaaatgtgatagatctatcaaaagtgcatgaaaccaacatcggccacactgctctctgttctgagatggtgcaagccaccaatatttcccacaaaggcagaaaataaaaatccaaaattattttatccagtggagacagc

SEQ ID NO: 216752 - DNA, 632 bp, Homo sapiens
cttccttggtatctatgacaaatgaccctctaattcccttccccacaatgtgacttggctatttggtagaaggaatggagagatgataagaatatcattgtacattcctctctggcagtcagtgccttttgctgtgtagggcctttcatgttagggagatgagatgggccagggcagggctcaggggacttggtactccaactctgagtcctgaagcctggctctggggaagactttcatgaaggaggacctagggtcttgaactttctttggtgcccagccttgctccctggcatagggacatctttagggatccaggaaaaagatgaagaacagaatgcamctgcaactggagggacatttttagggatccaggaaaaagatgaagaacagaatgcacctgcaactggagggccatttttctaagatgttcacttatgtccaaatacaaatttgtacttgtggtatcagtttgcctaataggctaaaattcatacccaaaggcacagccaatcaaatttcaccttgtgaagtctccggtaacaacctccaacctcttccctctctggtccaatggtacatgtttgatcaagagaaggggaattaggaatgaccatcaagcatgaaggcga

SEQ ID NO: 216753 - DNA, 654 bp, Homo sapiens
ttacttttcttaccctttccagggtttttcagcttttagattctatgtctcctgctcagcccattgccttgccttctacccattgtggaggtggacattgatgtaratgttacacttcattcctttggggagaagaatgatcaaaggtgggccatttggctaagctataaaggatggcccctggggaagaaacagccattttgctattttctgtatcctccttctcagccttctcctcttttaacaactcagtacttagatcgtatattagtcattggccatgagctacttctgaggagaagacgtaactttcagccatttccagagtgaagttgccttggccaaaagaaattcttctcagtggacaggaacatctgggagccattagcagccaatactcacatcgcattggaatgaaccaatggctccatgaagggtatctagaataggcaacccaaacatttatattactagcctaatatatggtattctttatcccaagaatgaacacaaaaaataactctcaatattcctaaatgtcacttgttggaagaaatataactcaatggttaggcaacaggatcttctccatggaaagagggatgacccagggacctgggtatgggcagaattgtgctacattaaaaagtggat

SEQ ID NO: 216754 - DNA, 654 bp, Homo sapiens
ttacttttcttaccctttccagggtttttcagcttttagattctatgtctcctgctcagcccattgccttgccttctacccattgtggaggtggacattgatgtaaatgttacacttcattcctttggggagaagaatgatcaaaggtgggccatttggctaagctataaaggatggcccctggggaagaaacagccattttgctattttctgtatcctccttctcagccttctcctcttttaacaactcagtacttagatcgtatattagtcattggccatgagctacttctgaggagaagacgtaactttcagccatttccagagtgaagttgccttggccaaaagaaattcttctcagtggacaggaacatctgggagccattagcagccaatactcacatcgcattggaatgaaccaatggctccatgaagggtatctagaataggcaacccaaacatttatattactagcctaatatatggtattctttatcccaagaatgaacayaaaaaataactctcaatattcctaaatgtcacttgttggaagaaatataactcaatggttaggcaacaggatcttctccatggaaagagggatgacccagggacctgggtatgggcagaattgtgctacattaaaaagtggat

SEQ ID NO: 216755 - DNA, 532 bp, Homo sapiens
caaaccaaacccaaaattagtagaaaaaaagaaataataaagttcacagcaaaaataaatgaaatggtagactacaaaaaatacagaagttcagtaaaacaaaaatttggggttttttttgaagataaaattgacaaggttttatctagactaactgaaaaaaagagggaagactcgaataaaaccagaaacaaaaacgagatataacaactgagaacacagaaacacaatgaatcattcgagactattatgagaaactatacttctacaaattggaaatcctagaagaaataaagtcctggacacatacaacttaccaagattgaaccatgaagaaatagaaaacctcaaaaaaccaatagcaagcaacaagatcaaagcagtaataaaaagtctctcatcaaagcaaagcccgagacctgatggcttcactgctaaattctaccaaacatttaaagacctaatacmaattctactcaaactgttcagaaaaacttgaagagaagggaatacttcccaattcattctgcca

SEQ ID NO: 216756 - DNA, 596 bp, Homo sapiens
atggcaaactaaaagagcaccctgtaacacacaccccctggggcttcaggggtaaacattcacccctagacactgccatggggttggagccacacagcctgcccatctatagccttccctagaggtctgagcaagccacaccccattgcatgtccttcaagggggacaagggaacttttcccatttctcaaacacatggaaattaaacaataagctcctgagtgaccagtaggtcaatgaagaaattaagaaggaaattgaaaaatttcttamagcaaatgataatggaaacacaacataccaaacctatgggatatagcaaaagcagtactcaaaggaaagtgtatagctataagtactcacattaaaaaagtagaaagacttcaaataaacaacctaataatgcatcttaaaaaactagaaaagcaagaacaatacaaactcaaaattagtggaagaaaatacataataaagaacagagcagaaataaaattgaaatgaagcagacaataatataaataaataaaataaaaaattaagtgttttgaaaagatagacaaaattgacaaaccttcagcaagactgagaacaaaagg

SEQ ID NO: 216757 - DNA, 495 bp, Homo sapiens
atgcaaaaatcctcaacaaaatactagcaaactgaattcaaaagatcattcattatgaccaagtagggtttatccctgggatgcaaggatggttcaacatgtgcaaatcaatctatgtcatacatcatatcaatggaatgaaggacaaaaacatatgatcatttcaattcatgctgaaaaagcatctaataaaattcaacatacctttatgataaaaatcctcaaaaacrtgggtatagaagaaacatacctcaaccctataaaatctggagaacaaggatgcccacttttaccactgttatgcaataggatagtggaagtcctagttaaaggaaacagacaagagacagaagtaaagggcatccaagttggaaaagaaataaatcaaattatccttgtttgcagatgatatgactttatatttgaaaaaatctgaagactctcccaaaaatctatcagaacttataaacagagtcagtaaaggttacaaaatca

SEQ ID NO: 216758 - DNA, 495 bp, Homo sapiens
atgcaaaaatcctcaacaaaatactagcaaactgaattcaaaagatcattcattatgaccaagtagggtttatccctgggatgcaaggatggttcaacatgtgcaaatcaatctatgtcatacatcatatcaatggaatgaaggacaaaaacatatgatcatttcaattcatgctgaaaaagcatctaataaaattcaacatacctttatgataaaaatcctcaaaaacgtgggtatagaagaaacatacctcaaccctataaaatctggagaacaaggatgccmacttttaccactgttatgcaataggatagtggaagtcctagttaaaggaaacagacaagagacagaagtaaagggcatccaagttggaaaagaaataaatcaaattatccttgtttgcagatgatatgactttatatttgaaaaaatctgaagactctcccaaaaatctatcagaacttataaacagagtcagtaaaggttacaaaatca

SEQ ID NO: 216759 - DNA, 532 bp, Homo sapiens
tttatttgctcattttatacctaagatgaggtgtgccwtcatatcacctggtccaaattcccactaccctctacatgaaacaattctttcctgataaatctagcctagcaatccatttatgaatatcaacatctagggaggtcaacactcgctcttaccttgaaaatatgtatgttcaattttcttagcaaatagaagtaaaagtgaaactaactgacataatattttttattgataaaattaacaaagattcaggtgggcaaaaaatttgctgaatctactatttacatgcaaagaaaaacatggacaccctacctcacactgtaaagaaacactcaaaatggatcaaagacctaaacataagtgctaaaactttgaaactcttggaagaaacagcacaggcaacagaaaaaacaacagataaattagacatcatcaaaatttaaaacttgtgcttcaaaggacaccatcaagaaagtgaaaagacaacctaaagaataagagaaattttgtaaatcacgtatcagatgtg

SEQ ID NO: 216760 - DNA, 501 bp, Homo sapiens
atggctagccaccaaagaaggaaaaatacttttgcctgcagctagccaatggaaattacttaaaatccttcaccaaacctttcacttaggcattgatagcacccatcagatggccaaattattatttactggaccaggccttttcaaaactatcaagcaratagtcagggcctgtaaagtgtgccaaagaagtaatcccctgcactgcaggccatacatttcaatccctgtatctttaatctccttattaagtttgtttcttccagaatcgaagctgtaaaactacaaatcgttcttcaaatggagccccagatgcagtccatgactaagatctactgcagacccctggactggcctgctagcccatgctttgatgttaatgacatcgaaggcacccctcccgaggaaatctcaactgcacaacacctactacaccccaattcagcaggaagcagttagagtggtcatcggccaacctccccaacagcacttgggttttcc

SEQ ID NO: 216761 - DNA, 594 bp, Homo sapiens
cctcttctcttccccctcccaacttcgtcctcaggatcagtggactcattgtgggtttcttatgaaattaccataaaaatagtttacatataatgtctaacatgtgatttcagattaacaaaactcccaaaatttagatgccctgactcaaaaaaaatttttgtttagaagtaacatatggtatgtagtttgggatataaggtgtgatcagaaataaataagttttcagactatatattagtcaaaaactggcaattaccaaaatggccttcaatagttgagtgaawaaattgcagtatggtcatgcgatggagtaccatacagcaacaagaatgatcagtctatgactacacacaaaaataatgaatgaatctcacaaatgaaatgttaagagaataaagccatgtgcaagagagtatattgtatgagttcatttgtacaaaatataaaaacaggctaaattgatctatgctattagaaatcataacagtggttaccctacaggcagtggtcctcaactggggatgactttttttccaggaaatattgggcctatctctttatctggagagagatttttgttgtaccattgat

SEQ ID NO: 216762 - DNA, 483 bp, Homo sapiens
aaggaaggtctttagggcagtctgtgtgcccttcagcctgaagggcaacaatgaaataatacgagatggaaacttagwtttgcataaaggagcaaagactgccagaaatgataaatacatggttaaacagaaaagcttttctcattcataacagaacaagaataataacagtgtggtgtgggatatatagcttatataaaaataaagtgggtaacaaaaataacacaaagacctggaagacggtaaatgaaaacattttgttgtaagattcttctatcagatgtaaagaattataatattaaagcaaggtgtactatgagtagttacagatatgcaagcacagccataagaaaggcaaagtctctatagtaatattgaagtacacttcaggaagagagggactttcagttcataaaaatgcataacaattctaaatcatacattatacaaaacctgagagaactaaaaaaactagatgaattc

SEQ ID NO: 216763 - DNA, 483 bp, Homo sapiens
aaggaaggtctttagggcagtctgtgtgcccttcagcctgaagggcaacaatgaaataatacgagatggaaacttagatttgcataaaggagcaaagactgccagaaatgataaatacatggttaaacagaaaagcttttctcattcataacagamcaagaataataacagtgtggtgtgggatatatagcttatataaaaataaagtgggtaacaaaaataacacaaagacctggaagacggtaaatgaaaacattttgttgtaagattcttctatcagatgtaaagaattataatattaaagcaaggtgtactatgagtagttacagatatgcaagcacagccataagaaaggcaaagtctctatagtaatattgaagtacacttcaggaagagagggactttcagttcataaaaatgcataacaattctaaatcatacattatacaaaacctgagagaactaaaaaaactagatgaattc

SEQ ID NO: 216764 - DNA, 470 bp, Homo sapiens
gaattcattgcccacagacctgccctaaaggaaggtctttagggcagtctgtgtgcccttcagcctgaagggcaacaatgaaataatacgagatggaaacttagatttgcataaaggagcaaagactgccagaaatgataaatacatggttaaacagaaaagcttttctcattcataacagaacaagaataataacartgtggtgtgggatatatagcttatataaaaataaagtgggtaacaaaaataacacaaagacctggaagacggtaaatgaaaacattttgttgtaagattcttctatcagatgtaaagaattataatattaaagcaaggtgtactatgagtagttacagatatgcaagcacagccataagaaaggcaaagtctctatagtaatattgaagtacacttcaggaagagagggactttcagttcataaaaatgcataacaattctaaatcatacat

SEQ ID NO: 216765 - DNA, 483 bp, Homo sapiens
aaggaaggtctttagggcagtctgtgtgcccttcagcctgaagggcaacaatgaaataatacgagatggaaacttagatttgcataaaggagcaaagactgccagaaatgataaatacatggttaaacagaaaagcttttctcattcataacagaacaagaataataacagtgtggtgtgggatatatagcttatataaaaataaagtgggtaacaaaaataacacaaagacctggaagacggtaaatgaaaacattttgttgtaagattcttctatcagatgtaaagaattataatattaaagcaaggtgtactatgagtagttacagatatgcaagcacagccataagaaaggcaaagtctctatagtaatattgaagtacacttcaggaagagagggactttcagttcataaaaatgcataacaattytaaatcatacattatacaaaacctgagagaactaaaaaaactagatgaattc

SEQ ID NO: 216766 - DNA, 237 bp, Homo sapiens
ggcagagttgtcttggcattcccgcatgcaaccgaagacgtcaatggacagaggcccatggaggtacggggtggggtcatcgtgaaggggctgattttcactggtttggggagatgtgtttaatgccacagcctaacctcaaaataaatatttcttattataagagagggttgtggggaacacaagtagggaygtgggttttccatataggatctttgggccataatgggcagaatt

SEQ ID NO: 216767 - DNA, 564 bp, Homo sapiens
tgtgtagaactatatacacgcacatactagtgggtgcatatgtaactgttgaaatctgaataagctctgtggcttttaccaatgttaattgctttgttttgatattatattatggttatgcaagatgttaacattagaggaggcttggtgaaagtttgcatgggaccttcctgtacattttcgtgtaacttcctgtgaatctttaagtatttcataatttaaaaacgtttttaaaggtgaattaaaaatgaatacatttctccacttgaaattggaagaggtacatccagcrccataataatatggtatattgtacatcttataatactgtattcaagtctatagtttgaaacttctttatagtgagcaaggttttcaactaatatttgtgaaagaagataattctcaccctggcctcatatcaactacacatgcagaaagcatgtcatgcacaaaaatatccaggaatattgtgacaactataatatagtaaagactagatatgagatctgtaaaaatttttgtcctcaaggtacagaaaagttccagagtgcagagtacaca

SEQ ID NO: 216768 - DNA, 391 bp, Homo sapiens
atagtgtttctataaacagagtaaacagacaacctacagaatggagaaaatatttgcaaactgcacaactgactaaggtttaatatccagaatctatagggaactaaagaaaattaacaaacagaaaggaaataaccctatttaaaagtgggcaaagtacatgaagagatacttttcawaaaaagacacacacatggccaacaaacatataaaggctcaggcagggcatggtggctcatgcctgtaatcccagcactttgggaggccgaggcaggcggatcacttgaggtcaaaagtttaagaccaacctggccaacatgacgaaaccccatctctactaaaagtacaaaaagtagccaggcatggtggtaagtgcctgtaatcccagcta

SEQ ID NO: 216769 - DNA, 519 bp, Homo sapiens
ttaattgctctgaatgagcctaggcctttctgtttcttaaaaagctctcctggttattttaatatgcagtcagggarcaaaccactggtctataagcagggtagagcacacattctgggcagtctaatactaggcacttgggaatgagacctgggcactggggctggtctcagcctttgaagaacacacagccctatggagggcttcacagctgtgtgctcatgtccaaattataacactttggggtttacagctctagagatgggaaaaatttagggagatttaagaaaaaaatgtatgaaaagatttgaagagtttaaaatataaaatatatgaggcaaaagtcaaaagttagatttatttaacctgaagatgtagagttaagtaattttctgaccgtttataagtgtatgcacatctcccacattaagaaaaacctggcacacaaaaatccaaatgtgtgtaatagagacacaaaagacaatatttacacctgcactacacaaacacaaatacata

SEQ ID NO: 216770 - DNA, 575 bp, Homo sapiens
ttggcctgtacagttcctcaaacaaaatgaactccttgcagccacagccttcgcttcaactattccctctacctagaaatgtgacccattggaacttctcctgaccagcttcttcccgatattggaacctcaaattaaaaggcacctcctcaaaaaggccttccctgactattctcatcataaggaackatttattcactccattccatccactctgggtagttcttttcactctctggttttttaaattgtctgtgtgttgtctgtctccccctcagcagaatgcaggctccctgaagggaagactttgactgtatccttgactgtatccccagtgcctagaagaacgttttgcatgtaggagggcctcagtaataatgctcaataaatgaatgctcaacaaatctgaatgaatacaatgggttatctaattagcaatcagatattttactcattaatgtcattaattatcagatttgtgtaaaatgtaagctacttttagtttttaaagaagaaaaaatagatccatagtattataaaaaacaaacggttcctaatcatttggagccagcgat

SEQ ID NO: 216771 - DNA, 575 bp, Homo sapiens
ttggcctgtacagttcctcaaacaaaatgaactccttgcagccacagccttcgcttcaactattccctctacctagaaatgtgacccattggaacttctcctgaccagcttcttcccgatattggaacctcaaattaaaaggcacctcctcaaaaaggccttccctgactattctcatcataaggaacgatttattcactccattccatccactctgggtagttcttttcactctctggttttttaaattgtctgtgtgttgtctgtctccccctcagcagaatgcaggctccctgaagggaagactttgactgtatccttgactgyatccccagtgcctagaagaacgttttgcatgtaggagggcctcagtaataatgctcaataaatgaatgctcaacaaatctgaatgaatacaatgggttatctaattagcaatcagatattttactcattaatgtcattaattatcagatttgtgtaaaatgtaagctacttttagtttttaaagaagaaaaaatagatccatagtattataaaaaacaaacggttcctaatcatttggagccagcgat

SEQ ID NO: 216772 - DNA, 575 bp, Homo sapiens
ttggcctgtacagttcctcaaacaaaatgaactccttgcagccacagccttcgcttcaactattccctctacctagaaatgtgacccattggaacttctcctgaccagcttcttcccgatattggaacctcaaattaaaaggcacctcctcaaaaaggccttccctgactattctcatcataaggaacgatttattcactccattccatccactctgggtagttcttttcactctctggttttttaaattgtctgtgtgttgtctgtctccccctcagcagaatgcaggctccctgaagggaagactttgactgtatccttgactgtatccccagtgcctagaagaaygttttgcatgtaggagggcctcagtaataatgctcaataaatgaatgctcaacaaatctgaatgaatacaatgggttatctaattagcaatcagatattttactcattaatgtcattaattatcagatttgtgtaaaatgtaagctacttttagtttttaaagaagaaaaaatagatccatagtattataaaaaacaaacggttcctaatcatttggagccagcgat

SEQ ID NO: 216773 - DNA, 575 bp, Homo sapiens
ttggcctgtacagttcctcaaacaaaatgaactccttgcagccacagccttcgcttcaactattccctctacctagaaatgtgacccattggaacttctcctgaccagcttcttcccgatattggaacctcaaattaaaaggcacctcctcaaaaaggccttccctgactattctcatcataaggaacgatttattcactccattccatccactctgggtagttcttttcactctctggttttttaaattgtctgtgtgttgtctgtctccccctcagcagaatgcaggctccctgaagggaagactttgactgtatccttgactgtatccccagtgcctagaagaacgttttgcatgtaggagggcctcagtaataatgctcaataaatgaatgctcaacaaatctgaatgaatacaatgggttatctaattagcaatcagatattttactcattaatgtcattaattatcagatttgtgtaaaatgtaagctacttttagtttttaaagaagaaaaaatagatccatagtattataaaamacaaacggttcctaatcatttggagccagcgat

SEQ ID NO: 216774 - DNA, 603 bp, Homo sapiens
ccaaacagaccttcaaaatgcattacatagatttggtaaaacagattgtcagtctgccaaaagtagtcactttggtttgatttgcattgaatgaaatttttaaaatgtaaagctaaactcttcaggatcactgcactggtttctatgggacaacactgaacagggctgccactgaaacaccttggatgagagcctcaaactccctgaacacagcttccagcacactactgggagaatgattgggamtcaaaaatgcgtgcaatgaatttacttatgagcttcttggagaggaagtaaagaggttgtatgtaattacctcaaattagcactactacagataaagtaataatattgataaagtaattgataaatagtagtgctaaagtcatactaatcaagtagtactaatagccctatactagtagtaataacaaagtggtattgctattgattctattggtctgtctacctacctatctctctagatgggagggcataggatttggctgatgagattgggcttagcagtggagagcaaagagctcatgcatgctttgaacaggtatgcactcaaacctggtatcgtgtgactgttctgaattc

SEQ ID NO: 216775 - DNA, 409 bp, Homo sapiens
gatccgcccaattcttgcacctacagcaaggccttgggagaaatggtggtgcagcaggagagcagaaayctaaccatcgccatcataaggccctccactgtgggagcgacgtggcacgaccctttcccagtaagcccactcacctggattctgtgttttgcttccaaattaaagttcttctaggccaattaatatctgatgtaggtctccccctcctcctccttctcttccttcttcttctttcttcctcttcgtcttcttcctcttccccttccccttctcctcctcctcctcctctcctcctcctcaggatgtatagctaagtgcagccaatcaagtatgaacccattgtactagggcaaaattccactttgggatcaggatttacccagcatgcagcttctctggc

SEQ ID NO: 216776 - DNA, 409 bp, Homo sapiens
gatccgcccaattcttgcacctacagcaaggccttgggagaaatggtggtgcagcaggagagcagaaacstaaccatcgccatcataaggccctccactgtgggagcgacgtggcacgaccctttcccagtaagcccactcacctggattctgtgttttgcttccaaattaaagttcttctaggccaattaatatctgatgtaggtctccccctcctcctccttctcttccttcttcttctttcttcctcttcgtcttcttcctcttccccttccccttctcctcctcctcctcctctcctcctcctcaggatgtatagctaagtgcagccaatcaagtatgaacccattgtactagggcaaaattccactttgggatcaggatttacccagcatgcagcttctctggc

SEQ ID NO: 216777 - DNA, 409 bp, Homo sapiens
gatccgcccaattcttgcacctacagcaaggccttgggagaaatggtggtgcagcaggagagcagaaacctaaccatcgccatcataaggccctccactgtgggagcgacgtggcacgaccctttcccagtaagcccactcacctgrattctgtgttttgcttccaaattaaagttcttctaggccaattaatatctgatgtaggtctccccctcctcctccttctcttccttcttcttctttcttcctcttcgtcttcttcctcttccccttccccttctcctcctcctcctcctctcctcctcctcaggatgtatagctaagtgcagccaatcaagtatgaacccattgtactagggcaaaattccactttgggatcaggatttacccagcatgcagcttctctggc

SEQ ID NO: 216778 - DNA, 387 bp, Homo sapiens
ggggaatccagcctgccgtcttcaagactatcaccaagctggacttgtgggacaagcaaaaatgccacacagctttcatatcatttttaagtttcctttgtgttgatccagcattcttttagttgccgtacacctttgattattttcccggttctcacaaagttggttctgacagtgtctggttgtttattcaacattcctatggaaggatgggagcttagagctgccttccctgccattttgctgacaccactgcaatggagcattcttgactcccctgccctaagagtttgacttactctgcattcaaatgtcctctacctaacatgaccaaaacacaactcrtggtatttccttctaacctgcttctctcttgtgggccgcctg

SEQ ID NO: 216779 - DNA, 606 bp, Homo sapiens
ttaatctgttttgttgcagactgatgttttactctatgtctatgcatatgcacatatgcatgtacgtatacatgcgtgcacttgatggcaaagatcccatcttgtatgttccttgtcatatcaccagctcctacggcagtaactgtcacatagtaaatattcagcaaatattcttttgagagaaygaatgaagatgcaatactattaaatacattcacaatttctcaccttgttcttttcactcaacacaatcactttgggttgttttttggtgtgtgtgacaagtattcttctaaaagaaattatgatttctttaaggaatctagtctaaatacacatgaaaggaaagggactactgaactaaattatttcagcaagacatttagagagtattagtgattttataataaataatgctattgtgatttaagtgttcaaagaaaaaagatgatgattttcccatttgtagttcaaaaaaaagatttcattaatcacattatgagtcaaacccaaggatgattatcgatgactagaactattagaaaaagcattcgacaggtaggcagtaaagaagggtgggaagttcagagtaatcacataaacaaa

SEQ ID NO: 216780 - DNA, 567 bp, Homo sapiens
gaagatgcaatactattaaatacattcacaatttctcaccttgttcttttcactcaacacaatcactttgggttgttttttggtgtgtgtgacaagtattcttctaaaagaaattatgatttctttaaggaatctagtctaaatacacatgaaaggaaagggactactgaactaaattatttcagcaagacatttagagagtattagtgattttataataaataatgctattgtgatttaagtgttcaaagaaaaaagatgatgmttttcccatttgtagttcaaaaaaaagatttcattaatcacattatgagtcaaacccaaggatgattatcgatgactagaactattagaaaaagcattcgacaggtaggcagtaaagaagggtgggaagttcagagtaatcacataaacaaagaaaggaactatctagaaggcagacccatcaggggagggaaatttcaagggaagaagactggaccctgttacctaggaaataagtaaggccacagcacggggagaaaaaaagacttgatacttttcagagtacaaaaaatctgtctttgt

SEQ ID NO: 216781 - DNA, 567 bp, Homo sapiens
gaagatgcaatactattaaatacattcacaatttctcaccttgttcttttcactcaacacaatcactttgggttgttttttggtgtgtgtgacaagtattcttctaaaagaaattatgatttctttaaggaatctagtctaaatacacatgaaaggaaagggactactgaactaaattatttcagcaagacatttagagagtattagtgattttataataaataatgctattgtgatttaagtgttcaaagaaaaaagatgatgattttccyatttgtagttcaaaaaaaagatttcattaatcacattatgagtcaaacccaaggatgattatcgatgactagaactattagaaaaagcattcgacaggtaggcagtaaagaagggtgggaagttcagagtaatcacataaacaaagaaaggaactatctagaaggcagacccatcaggggagggaaatttcaagggaagaagactggaccctgttacctaggaaataagtaaggccacagcacggggagaaaaaaagacttgatacttttcagagtacaaaaaatctgtctttgt

SEQ ID NO: 216782 - DNA, 567 bp, Homo sapiens
gaagatgcaatactattaaatacattcacaatttctcaccttgttcttttcactcaacacaatcactttgggttgttttttggtgtgtgtgacaagtattcttctaaaagaaattatgatttctttaaggaatctagtctaaatacacatgaaaggaaagggactactgaactaaattatttcagcaagacatttagagagtattagtgattttataataaataatgctattgtgatttaagtgttcaaagaaaaaagatgatgattttcccatttgtagttcaaaaaaaagatttcatyaatcacattatgagtcaaacccaaggatgattatcgatgactagaactattagaaaaagcattcgacaggtaggcagtaaagaagggtgggaagttcagagtaatcacataaacaaagaaaggaactatctagaaggcagacccatcaggggagggaaatttcaagggaagaagactggaccctgttacctaggaaataagtaaggccacagcacggggagaaaaaaagacttgatacttttcagagtacaaaaaatctgtctttgt

SEQ ID NO: 216783 - DNA, 622 bp, Homo sapiens
ggtgacgaaaactgggcatcatatctcacaacaatcattggagatcagggtattggtatggaccactggatgtctcaggggtagagccagagcagtgttatttttataatgcaaaagaaaaacacatagytagaaagattagcagatttgttagtattctgccaactagtctattccaagaattccagataaggacaggaaaagaatggtgatggattgtgtgaggaaaaatacagactcaggctgcctgctgttgctacctggagttctttgggtttcaggatctaccttcaactctgaaccccttactctttccaagcagagacaaaacatgcattcacttatctgacacacagactgtgcattactcaggacttgtttttattccaacaggcaacaaacaagaattccttcttgagagaggagcctggccctagttttaggacagccttgtgatttccttaatgttggtgagtcacatttactttctcatttatcctcaatgattctttacccattgattttctcactggttccgtgcctctcatgcttgcttccctgcttgccctcagttgtagtgtgttcagaacctacatgactggctgcagacttctatttacct

SEQ ID NO: 216784 - DNA, 385 bp, Homo sapiens
atgattcccaaataaactttcaaacgacaacgatgcccatgcatgctggtccttgacatttccagtctgtcttgactactctgtttctgatatgttcacaccctagtgacactaacttcacattctcaatatgtgcatgaactctcatatctcaactttattcatgtgattctttcaacttggaatgctctttttctcgatcttttccaattgaaatkccctttttccaagaccagactcatgtgacatgttctctataacattcaccagtatctatatctggagttgatatgttgatgtttgctgtccccatagttctttggtaatatgtcagctatatgacttcttatatacagctttctattagagcccagttgattcaatt

SEQ ID NO: 216785 - DNA, 469 bp, Homo sapiens
ttttatcctaattggattatcagtttcataagccagtcagtgtgttcattagagtgctggtaattcatacccagtctaaacgatatgatcctaaagacatcagaaacttcgcattcaagagtgcttgtcagggtcctttccatccttttcatgaatctccttgaaggcatgatactctaggattttacttgcttataaacttaacatagcaaataatcctgtttctctgtcttttggatgctgcrggggccctctgtagcatcccaaagttagtttgaggtaacaacaaaaaaagacaatttgaaatttgattttgggaaggctgtcaaatatgtcaaaggcttaaaataatcaaaataggatcacaaggcattgtaagataatattcatttagccaaagtgataaaaggggttagaaagcaaaaacctttcttctttgatagaggggagactcagttttccaatcaac

SEQ ID NO: 216786 - DNA, 592 bp, Homo sapiens
ctcccagagagggttcatgctttctgtgcgaggcagatcaaggaggcgatggttgcctttccctcgctgtggtctaagctgacttgaggctgggccgtcagctgggctctgtgtgcctctcccctcctggggtctcagccaaaggccgtggggatcagcaggctcctcttctcggcaggtgctaatctccaagccttgatttttctagaacttgctaaacattcgctactgtggcttggggctttctttttggcttggtgcctttccaccccttgcagcctcataaggcagcgtatgtgtgaaggaaaatgctgacacccgccaggactggtttatccctccccttctcagggggaacctggtccctygagtctctcattttagttctccatccacatgagcctgccgaagcctgggtggggtctctgcctctcagtcgtggcctcaggaccggccctttgtgcagaccgcagtctcgctctatatcaggcttgatgggagaagctgcaggacgtggccccctctctggggagcttacccttctccgtggtttggccgtttcaagtcctgtggtctctgtggtgcttcaatg

SEQ ID NO: 216787 - DNA, 592 bp, Homo sapiens
ctcccagagagggttcatgctttctgtgcgaggcagatcaaggaggcgatggttgcctttccctcgctgtggtctaagctgacttgaggctgggccgtcagctgggctctgtgtgcctctcccctcctggggtctcagccaaaggccgtggggatcagcaggctcctcttctcggcaggtgctaatctccaagccttgatttttctagaacttgctaaacattcgctactgtggcttggggctttctttttggcttggtgcctttccaccccttgcagcctcataaggcagcgtatgtgtgaaggaaaatgctgacacccgccaggactggtttatccctccccttctcagggggaacctggtccctcgagtctctcattttagttctccatccacrtgagcctgccgaagcctgggtggggtctctgcctctcagtcgtggcctcaggaccggccctttgtgcagaccgcagtctcgctctatatcaggcttgatgggagaagctgcaggacgtggccccctctctggggagcttacccttctccgtggtttggccgtttcaagtcctgtggtctctgtggtgcttcaatg

SEQ ID NO: 216788 - DNA, 596 bp, Homo sapiens
tgttgtctgctcccagagagggttcatgctttctgtgcgaggcagatcaaggaggcgatggttgcctttccctcgctgtggtctaagctgacttgaggctgggccgtcagctgggctctgtgtgcctctcccctcctggggtctcagccaaaggccgtggggatcagcaggctcctcttctcggcaggtgctaatctccaagccttgatttttctagaacttgctaaacattcgctactgtggcttggggctttctttttggcttggtgcctttccaccccttgcagcctcataaggcagcgtatgtgtgaaggaaaatgctgacacccgccaggactggtttatccctccccttctcagggggaacctggtccctcgagtctctcattttagttctccatccacatgagcctgccgaagcctgggyggggtctctgcctctcagtcgtggcctcaggaccggccctttgtgcagaccgcagtctcgctctatatcaggcttgatgggagaagctgcaggacgtggccccctctctggggagcttacccttctccgtggtttggccgtttcaagtcctgtggtctctgtggtgctt

SEQ ID NO: 216789 - DNA, 594 bp, Homo sapiens
ttcatgctttctgtgcgaggcagatcaaggaggcgatggttgcctttccctcgctgtggtctaagctgacttgaggctgggccgtcagctgggctctgtgtgcctctcccctcctggggtctcagccaaaggccgtggggatcagcaggctcctcttctcggcaggtgctaatctccaagccttgatttttctagaacttgctaaacattcgctactgtggcttggggctttctttttggcttggtgcctttccaccccttgcagcctcataaggcagcgtatgtgtgaaggaaaatgctgacacccgccaggactggtttatccctccccttctcagggggaacctggtccctcgagtctctcattttagttctccatccacatgagcctgccgaagcctgggtggggtctctgcctctcagtcgtggcctcaggaccggccctttgtgcagaccgcagtctcgctctatatcagrcttgatgggagaagctgcaggacgtggccccctctctggggagcttacccttctccgtggtttggccgtttcaagtcctgtggtctctgtggtgcttcaatgctttcaaacagatct

SEQ ID NO: 216790 - DNA, 585 bp, Homo sapiens
aatgaactaatccaggtgaaggacctgcggcttggcgccatctggtgcctgcacagagaaagaacgttccatcgaggctgcagtgctgagtccctttgttagtccaagtggggaacactttttaaaaacacaaccgttgtctttcatcacagtaaatcctaaagtgctactaacaacaaactcaatctgaaaataaacttgaaaattatttatagtttttccaacaatgatcttattttgagagagaatacattaagttctgctaataccaaccctgggctcttacaacatagtgacttctactaactctttctatgtgcatatgtttttttaaatgataaaagcattttccacagggggatgccagtgaactttctttatcattgaartgtacagcacaaatgagaactttttcaaacactgttcctaaggcaacaagatgctacttcctaaaagatatatttaaggggctaaatctaaagttgatttgaaaattggaaaaaaaaaatgaaaatgttgattatccaaaataattagggaaataaaactgcaaagatctcagagtagaatatttttacttctcaa

SEQ ID NO: 216791 - DNA, 550 bp, Homo sapiens
ctaagtccatgatcatcttcttgtattgtttgtgatttataaattggtatacaaagaattttcacagtatatgctaaaatgtcttaaaatgttaacaataacatgaacaataagatgaagagaaaaaaggtccttgcatatagtaattccactgctagaaatctatgctgagaaaaaattgcaaaaaaaggaaagtaacacatggatataattactcatagcaacattctgtatactggaaaaatacatgaataaactaagttctgacaatagaaagccaccagtaaaaagttatttaagaactcaaaaaacatttgtgaattcaaaaattttgcggattctaaatgtcagatattgaaaataaagaaatatttaatgaaatatcactgccctcagtgagttttcaagctactgaaaaaaaaaaaaccataaaatgcacacctgcaacactgttaagtgaaaacaggaasatgtcatataatctataattgcaagtatgggaaaaggaacaaataggtgggaaatacaataacaacgcttaagtggtgag

SEQ ID NO: 216792 - DNA, 451 bp, Homo sapiens
aaagaatgtctacgttttatgtgactactggtagatttgatctatctacataccatgttttttatcgttttggttttgtctttttttttttttacccctgaaggacagattcagtaaatattatcatcaatgctaatacacagctctgtcaagagaagtatggcttttatgagtgttctctctgaagttctgattctgccactttmtagtggtgtgaccttgcacaagctatctaacctttctcaaagctttagttttcttacctgtaaaatgaggattataacaggatctgaactactagccctgttataagcattaaatgagataatgcacatgaatcacagtgactggtaaaccatacacaatgaataaatagtggctgtgttaaacatttgttgctttttagcttccagcatttatttctccttcctaatgacaatttgaattccat

SEQ ID NO: 216793 - DNA, 590 bp, Homo sapiens
cttctgaatacaattgttatttatcaagcaatctgtcttttattgatataagtacttaatattctctttttcactacacatagtactcagtcatcattattcacagtgttcacygtgtgccctcatatacttcatagaaatatagtttattttgggggcagggagtatattgtataatagatattttatatgagtgtagaaaacaaaatattctgcatgaaattcccctttttggccacgcgtagtgctcatgcctgtaatcccagtgctttgggaggccgaggcgggcagaccacctgaggttgggagtttgagaccagcctgaccgacaaggagaaacaccgtctctactaaaaatacaaaattagccaggcttggtggtgcatgcttgtaatccagctatttgggaggctgaggcaggagaatcgcttgaacccaggaggcggaggttgcagtgagctgagattgcaccattgcactccagcctgggcaacaagagtgaaactccgtctctcacaaaaaaaaaaaaaaaaaaaaaaaaagaaagaaaaatatcttttcatctagggaatgtgtgtttcttgcatatg

SEQ ID NO: 216794 - DNA, 597 bp, Homo sapiens
tggattttggccattctgacaggtatgtaatagtatctcgttttaattcacatttccctgatatgggaaatgtgatgtgaaacatcttttcatatgcttattgccatctctgtatcttctttggtgagctgctaaagtcttttacccatttttytttaagtcaggcctttttttgttgttgagttttaagagttttctgcatgctttggaaaatagtcctttatctgatacatcaatcttacgtattttatcccagtctgtggcttgtcttttcattctcctgacactatctttcatggtgcagatgtttttaattttaatgaagttcagcttatcccatttttgtgtgtgtgtgcgaattgtgcctttggtgttatatttaaaagtcattgctgtacttaagatcatctagattgctttcatatattatcttctagcagttttatagttttttgtgttttatgtttaggtcttattttgaattaattttcatgaaagttatatggtctgtgtctagatatagttttttgcgtgtggatgttcagatgttctagcaccaattttttaaaaagactatcttttctccattttattcct

SEQ ID NO: 216795 - DNA, 508 bp, Homo sapiens
accatcatgtaataccacattttggaccccattttcccactgtcttgagtgctcttgccctctctccccctcttttatcatgtaatgtattctaccatgttatgatgcagtaagaaagctcttaccagatgtggccccagtaagaaagctcttaccagatgtggcccttggtctacgacttctcaggctccagaaccatgaggcaaaccatgaatcaattttctatataaattacccagtctgtgatatgttacagcagcagaaaatggactaagatatctatttagtaatacctatgaatggagacattatggttactagaaaattacatttctgattatacaggcttgtttcattttgggggttgcttgttacagacactaaaatgtcactcattttcctagtattttggttaaaaaaactgcatccaatacaaggaktatagttcattacccccaaatcactctacccatactactgaatattagtttttcttagtaagaatgga

SEQ ID NO: 216796 - DNA, 503 bp, Homo sapiens
caacgcctggcttcaaagcttcaaaggactgtctgactgtctagcagggggctaatgcagctggtgactcyaagttgaagccagtgctcatttaccatgctgcaaattctagggtccttcagagtgatgctaaatctactctgcctgtgctgtagaaatggaacaaagaagcctgaaggcagcacatctgtttacagcatggtttactgaacacttcaagcctcctattgagaactactgctcagaaaagaagattcccttaaaaatactattgcccactgacaatgcacttggtaacccaagagctctgatgaagatgtacaaagagttgaatgtcgttttcatgcctgctaacacatccattttgcagcccgtggatctcggagtaatttcaactttcaagtcttactatttaaggaatacatatcataaggctatagctgccacagataatgattccttgaatagatctgggcaaagaaaatgaaagcacctttctggaa

SEQ ID NO: 216797 - DNA, 503 bp, Homo sapiens
caacgcctggcttcaaagcttcaaaggactgtctgactgtctagcagggggctaatgcagctggtgactccaagttgaagccagtgctcatttaccatgctgcaaattctagggtccttcagagtgatgctaaatctactctgcctgtgctgtagaaatggaacaaagaagcctgaaggcagcacatctgtttacagcatggtttactgaacacttcaagcctcctattgagaactactgctcagaaaagaagattcccttaaaaatactattgcccactgacaatgcacttggtaacccaagagctctgaygaagatgtacaaagagttgaatgtcgttttcatgcctgctaacacatccattttgcagcccgtggatctcggagtaatttcaactttcaagtcttactatttaaggaatacatatcataaggctatagctgccacagataatgattccttgaatagatctgggcaaagaaaatgaaagcacctttctggaa

SEQ ID NO: 216798 - DNA, 503 bp, Homo sapiens
caacgcctggcttcaaagcttcaaaggactgtctgactgtctagcagggggctaatgcagctggtgactccaagttgaagccagtgctcatttaccatgctgcaaattctagggtccttcagagtgatgctaaatctactctgcctgtgctgtagaaatggaacaaagaagcctgaaggcagcacatctgtttacagcatggtttactgaacacttcaagcctcctattgagaactactgctcagaaaagaagattcccttaaaaatactattgcccactgacaatgcacttggtaacccaagagctctgatgaagatgtacaaagagttgaatgtcgttttcatgcctgctaacacatccattttgcagcccrtggatctcggagtaatttcaactttcaagtcttactatttaaggaatacatatcataaggctatagctgccacagataatgattccttgaatagatctgggcaaagaaaatgaaagcacctttctggaa

SEQ ID NO: 216799 - DNA, 600 bp, Homo sapiens
tgggttgttgtcttggctggttctttatgagctgtggcctcggacatgtttctgaaccttggctttccttcatatgtaaaatgagaataaatcagagttgctagaaggcgttgggggcccattaaaacagatgactgagcttggcagtttctcaaaaagtgacacagaatttctatgtggtccagcaattccgctcctagggctatgccctggagaactgaaaatacgaactcaaacaaacacatgtgcccaaacattcatagcagcactagtcacgatagccaggaagtggaaactacccaaatgtccatccactgaggaatgaataagaaaaatgtggcctatccctacaatgcagcaccattcaccataaaaagaaatgaaattctgatccatggaacracatggacgaaccctgaggacattatgctaagtggaatcagccagacacaaaaggacacacactatatgatatagtttggatctgtgtccccactcaaatctcatattgaattgtaatttccagttttggagatggggcctggtggaaggtgagtggatcatggaagcagacctttctcatggaggatttagcccttg

SEQ ID NO: 216800 - DNA, 613 bp, Homo sapiens
gaggacattatgctaagtggaatcagccagacacaaaaggacacacactatatgatatagtttggatctgtgtccccactcaaatctcatattgaattgtaatttccagttttggagatggggcctggtggaaggtgagtggatcatggaagcagacctttctcatggaggatttagcccttggtactgtccttgcaacagtgagtgaattctcatgagatctggttgtttaaaagtttgtatcacccccctcactctcctgctcctgcttttcactgtgtgagawgcctgctcccccactcccccaccttccaccatcattgcaagctccccgaggccttcccagaagcagatactgccatgctttctgtacagcctgaagaactgtgagccaattacacctcttttcttattgattacccagtctcaggtatttctttatagcaatgcaaaaaccaactaatgcactatataattccacttatgtaaggtacctagaataggcaaattcatagagatagtaagtagagtagaggttaccaggggacagggggaggggaggatgaggagttattgtctgttgggtacagtgtttctggttgggatggtgaaa

SEQ ID NO: 216801 - DNA, 578 bp, Homo sapiens
ttttacctatctatctgctttaggcagatccttctcacaatacgcagcatctatctgtattatatacacagcaataatcacatattttcaaacttttatagccaaattattattcacacgtaattaaaattttatatgattgtaatgcctaaatagtgacttccaccattaatttactaccaatattcaggtgagagaaacatgtcattaccttttggaaataaatacaacagagatctctacattaattttggctgtaataaagtgtaatttattactaagttggatttacaaaggaacaaaattatttttgttattcctatgagaaagctgtttatatgatatattggaaatgtgttcaattgttcctgctcttatacattcccaaaataggtaaatacggaccctaggacttaagtgtgaataaarttcgatgttgggacatgcttgcatgtatttatcattttggattttggtgtatcacataaattatcttttgaaatgcctttcatttcaaaatggttctcacaagcctatagttaaccaggttcatctattcactatagaaagaaaaaaaa

SEQ ID NO: 216802 - DNA, 438 bp, Homo sapiens
tgatttgtgtggctacaagaaagaaggwggtaaactctggattaagattgtaatttttttctaattctctgagataatttttacatatttctaatttcttttagtagttttacacaattaaaatattagcacatgggcttctaacctagtaattcgttttaatgtgagaatatttataaccttttgattaaaaattctgagtccaaaacttgttcagcaattgactacttacaataccttcagtgagcattaatttttaaaaaaatctttatatatttaatagtgtggaagactttgtaactctacaattttcatttatatggaagggtattgaagtttggctaccatattttcacttacacaagttaaatttctctttaacctctgaagaaagcaggtgagacaaagtatcatcatctcctcttttgtttcaggtag

SEQ ID NO: 216803 - DNA, 472 bp, Homo sapiens
ctgcagcatgatttgtgtggctacaagaaagaaggaggtaaactctggattaagattgtaatttttttctaattctctgagataatttttacatatttctaatttcttttagtagttttacacaattaaaatattagcacatgggcttctaacctagtaattcrttttaatgtgagaatatttataaccttttgattaaaaattctgagtccaaaacttgttcagcaattgactacttacaataccttcagtgagcattaatttttaaaaaaatctttatatatttaatagtgtggaagactttgtaactctacaattttcatttatatggaagggtattgaagtttggctaccatattttcacttacacaagttaaatttctctttaacctctgaagaaagcaggtgagacaaagtatcatcatctcctcttttgtttcaggtaggtcataaacattttataccttcttgg

SEQ ID NO: 216804 - DNA, 429 bp, Homo sapiens
ttctgataatattcatctcacattcttttacctgtrtgcataattcagtttcattaataatattagtatattcattttaacattatattgtgtttttttttgcacaaccagtcaatgctattttgtccttctttactgtcttctttggaagtaattatttttcatttcagatatatggaaatatatatacatatatatttcaaatgtatacgtgtgttcatcatatatatttatttctacatatagatttttatatatttaatatgtttatagttttctatatgttatgtagatatatatagttataaacatttccatgtctttgaaatagatatttcttcttcttcccttagtcctctcattctttcctccctttcttcttaccttcctgtttttaaattctcacttcctttcctccatgccttgtat

SEQ ID NO: 216805 - DNA, 612 bp, Homo sapiens
agaagacacaagactcttgtatcagagacaaaagactttcttactgattgtatgcaaacattatgagcttcaggtgtgtactgcttctccttgtcccaaagtcctatggaagcagcaagaagcaatccarttggatattatatatgcagagggtttgtgtcacagccaaagaacgccattttaggagacttgtatcttttataatggatgcaagcaagcctgcccaaacattaccttagagagaagcactatccttatcatattggacagacttgttctgcagggaaggatacattatttccatcttccatgactgttgaatatgtaaacatccttgtacagtcctaaacaaaacttgtttgtataaacagtgtttctgctcatagaatatgagaaatgaatgaagcccatggagaattatcttccagcatgcgttgttctcatcaatcctgccattactgcccaagttctgtgctcactatcttttctgcactatcaccaaatacttagtgcgtacttctcacatgtgtaacttaccatcagagtgtgcttaatataatgcctaacacatattgagcatgcaatacatttcagctgtcagcattacattcc

SEQ ID NO: 216806 - DNA, 551 bp, Homo sapiens
tcatacaatgaaaaacaaccatgttacagagctattgagagaatttaaaaaagacatagaatgtatataaaaacttaaaaaaaaaacataaaagtaggaatacagggcattgtcctctatgtaatccactatagctggaagataaatggcattaaagacatgattccacaatcatttattgattcctcattaagtgccaggcactctgccagtcctgaacaaaagcaaatggcaaggaaaatagacatacttcctgccttcacagagcttaaaatgtaatggctgacattattcaaataattatacaaatatgagatctcatatgattaatgcttcaaaggaaaagtccaaagcaaggccatgaggaagtatttaatataggggaatgatttggtttgggggctgttgcagcaggatgtgatttgagaagtgttatggaagaccgtcctgtggaagtgtttaaattgatatccaaagygtgaataagtgttaaccaggaaaagaggggagaaagagagcttgctagatgcaagtcctgggatgggagaaag

SEQ ID NO: 216807 - DNA, 534 bp, Homo sapiens
cataggtgggcaagcagcctgggaagggagattggctcctgcacattaggaagggcccagagagacttgccaaagagtttggattttattctgtagatggtgaaatttatttcaaggaaggggttatcactgtcaggtatacacattagacgtgattggggcagtagtgatagagccagaagggaatcatcgtggagctgaggtgacagacctgctaagacagagacctgcaattgaaaatggagacaatgatgagaaccaaggaaaggtccttttgataggctaggaattgagcaaattgtggagtcttcatacaaggcmttgaacacagaatgaggaggaacgggttttggggaaattagtttgattttctattagataatttgaggtgcttggaggactttggtaagaaatgtcagttggcagtacagagtgcaagggattagcaggagtgaacagatttggacagtggaggaaagctcctgagacgtgggtatgagtgtttcaagcccagatgtctgagaagcagcatcc

SEQ ID NO: 216808 - DNA, 560 bp, Homo sapiens
ccatgaggacagtggggtggggggcgggaggcaggaagggagcaagagtggaaacatagaatccctttagaaagctttttgtagttgtcactaaaaaattccccagctctgtggagccagaatctcccagtcttctggttattcataaatgaagaatcttttagcagatttatatgacttcggtcagagttgtctgaaagtaggcatctgatagtaatggcatgaatccaaaaaatctacggccgaagatgactragaaaactcatacgtcttattttaaggtattggtacagtcagtttgttaattgctatgagacattagcccactgctaagctttgggtcacaaaataattgctttaaatgtatgtttgctcttgatgaaatgttaatatactccaatgctaaattttgtccccaaactccaaaaagaaacactcatactttctgaaaatggagactagaagggagggggaaacaaggaggaagactagtttctgaaattgccttcaagattctcatgttcttctccctgaactgctccttcaggtaaagaggaaaa

SEQ ID NO: 216809 - DNA, 560 bp, Homo sapiens
ccatgaggacagtggggtggggggcgggaggcaggaagggagcaagagtggaaacatagaatccctttagaaagctttttgtagttgtcactaaaaaattccccagctctgtggagccagaatctcccagtcttctggttattcataaatgaagaatcttttagcagatttatatgacttcggtcagagttgtctgaaagtaggcatctgatagtaatggcatgaatccaaaaaatctacggccgaagatgactgagaaaactcatacgtcttattttaaggtattggtacagtcartttgttaattgctatgagacattagcccactgctaagctttgggtcacaaaataattgctttaaatgtatgtttgctcttgatgaaatgttaatatactccaatgctaaattttgtccccaaactccaaaaagaaacactcatactttctgaaaatggagactagaagggagggggaaacaaggaggaagactagtttctgaaattgccttcaagattctcatgttcttctccctgaactgctccttcaggtaaagaggaaaa

SEQ ID NO: 216810 - DNA, 546 bp, Homo sapiens
cccaaaaggaaagaaacggtacacttaaattatagtaaaccaagaatgagttatttacaaagacactctgtgtgagtaaaggagaaccaaaaggaatagtgcagtaatctgacatgagtagctgtgaggctgctgtaactctttagaactaaagagacaaagagagaaaggaaacattaccagaactagaagaaaagaggtatacacagaaaatcactttggaaggaacaataatattagttggaggatcacaactgaatccaagaaaatcctgtagggaaagagctagcaaaataaatacccagaataccctgacatgaatcccctttcttctttctaagcccccattaaccaaacctaaccagagatcagagaatgtgggaaaccactgtttgggtggayaccaggttaatctctctgggaaaggagcaaagcaaggtagagaaaggtggagagtggcagctatctggagcaaaaagacctggaatttctgtttgctatcatatctttacctcctttacctccttctgcatgtttaattattat

SEQ ID NO: 216811 - DNA, 515 bp, Homo sapiens
ttttatatactttcaaatgaaaagtagagttttaattaatccacaaaaaatggtataagaattatattcaacaaaaccaaatgagttggagtctcagcatgtcatgtcttccattttgtagggcataaattttaaaaccaaagcgaatccccattggtcttatgcttttcaagttccaaggtgccatttcaactactaaaaaattatgtgaacttttctacatgtccacattaaaaacagtaaagctagctttactattagctcaaaacaaaaggtggactgaataaaatgcataaatcaaacatcaaagggacraatacatcaatgagataagcaaaataaagcaggatgatggcaatttgttgaaaatctgttatgctgtttaatgtgcagacaatttgggtcttattgttttaactgtttatacacttgaattgctaaatattaagaacaaatccaaaggatagcaccaaagtttagcctatttatgttaacctaatcacacacaaattcta

SEQ ID NO: 216812 - DNA, 515 bp, Homo sapiens
ttttatatactttcaaatgaaaagtagagttttaattaatccacaaaaaatggtataagaattatattcaacaaaaccaaatgagttggagtctcagcatgtcatgtcttccattttgtagggcataaattttaaaaccaaagcgaatccccattggtcttatgcttttcaagttccaaggtgccatttcaactactaaaaaattatgtgaacttttctacatgtccacattaaaaacagtaaagctagctttactattagctcaaaacaaaaggtggactgaataaaatgcataaatcaaacatcaaagggacgaatacatcaatgagataagcaaaataaagcaggatgatggcaatttgttgaaaatctgttatgctgtttaatgtgcagacaatttgggtcttattgttttaactgtttatacacwtgaattgctaaatattaagaacaaatccaaaggatagcaccaaagtttagcctatttatgttaacctaatcacacacaaattcta

SEQ ID NO: 216813 - DNA, 524 bp, Homo sapiens
tctttatggactccagcttcacttccagttctgagtggcctctgtttcttatggtttcctgcacctctcaaggggctccttacaaatgctgtttgtcattgtgattaccctttatgcacattcccatctcccccagaagattgtaagcctcccccgcccttagaaaggaaacatgtacygtacctcaccatacagtagtggagcataatggtatgtccagccaaagcagatcttcagtaaatgtctgtgacaaggaacaatggcatttgttaatccctagcttcatcaaagagaaatagcaaggaagctactgtactctaccaagttacctaaaataattttagtattcgcagagaggcaaatctgttggaaacaatatcacttcagagtttcaagtattcatgtgaggatctgtaaaagaacagattataacaaattggttctcaatttttagaagcaataaataattttgtaatgtagagagactgtcttactccagtgtagaatgtctgctcagagagtaa

SEQ ID NO: 216814 - DNA, 550 bp, Homo sapiens
gtttgtgtttgttatgaaaatttgtggacatctgagaaaagagagtctcattttgattcttcatttcatacaatcagagtagacaagaaaataagatatttatctaaaactagtgaacttcytattaaatacaatgtcaagtccccaggaatcatgttcctgatctcctctgaaagaataactttgtatttaaaaatatcccactacatatagctcctttcaccttctccatacctgttaaataaacttgtcatttttatggtcatttcaggaaaagagttcctcactcctctccttggagacctagacataaccagtttgtctctggggtcgacccccgtctcctctgaaaggccagctgcatgatttgatagtcacagctgtcattatcatccagcttggcacatgcccctagggttttcctgttgagcaagggactgaaccgtgctgcccatgcttcctcataccaattataacttctgtgcagttatctaaaagggagaaaaatttatcaacatcctttctagccttgtaatgaggaagcaatttt

SEQ ID NO: 216815 - DNA, 410 bp, Homo sapiens
ccttcatctccaccagtaagtaataaagtcctactccctttggtgtcagtggaaaaaatgtgggaagcttggattttcactctcacctggcagtcatgaggtgcttctctccatctgtccggggagctatccaaaaaggccgagcggagaagaggaacttttgccattccgcagtggtaatgaggccaccaccactgtagtgttggtagagatcatatgggtagccagaacttccaccctggtccagtgataacagagactatatgtgaggtttcagtggaggtcagacgccaagtagaaaacctggacttctatctctacctggtyagtaaggcagcatcacctgcctcctccgcttacatcccccgacaactttccttgccgtggtggtgtcagagaaagccagctaa

SEQ ID NO: 216816 - DNA, 425 bp, Homo sapiens
aagctgggaccttcatctccaccagtaagtaataaagtcctactccctttggtgtcagtggaaaaaatgtgggaagcttggattttcactctcacctggcagtcatgaggtgcttctctccatctgtccggggagctatccaaaaaggccgagcggagaagaggaacttttgccattccgcagtggtaatgaggccaccaccactgtagtgttggtagagatcatatgggtagccagaacttccaccctggtccagtgataacagagactatatgtgaggtttcagtggaggtcagacgccaagtagaaaacctggacttctatctctacctggttagtaaggcagcatcacctgcctcctccgcttacatcccccgacaactttccttgccgtggtggtgwcagagaaagccagctaaaataga

SEQ ID NO: 216817 - DNA, 567 bp, Homo sapiens
tgggcattcaacaagtacatcctaaataaataattaattaatatgttcatttcaacatttccttgtgcctttcacagcagatgtcttcattatttatctttggtaaaaataattaagcagtcattttgtaaatagtcatgaatatttactatactttaaatatgttctaggtagcatgacattttcaaggaagtatacacgagggtttattactttaytgagaataaagtctatggggcagacaatttacaatacagtgtgatagaaatctaaagagatgccaaagagttggtcaggtaatgttgtgctatgccaatgttaagagttctaatgttagtattcacataactaattttcatagtctcgaaatcttctgacattttcttccctttgaaatatttattttcaggatggtaaactttttattcacataataactatttttagggataagaaggtcagaagcactaactttcttcattcctttcctaccacatgtttagaattcacaaaccagcttaacggcttaataaaagattgaattctctttcttctccttcctcgaaa

SEQ ID NO: 216818 - DNA, 446 bp, Homo sapiens
caaatgcaggtttattacataggtaaacttctgccatgggttatcttgaattttgttgagcttcctcaaaacagttatttttaattctctgtctgaaaggtcacatatctttttcacactgggattgtactctggtgtttcatattgtttattcgatgatgaggtcatgttttcttggatgttcttgatgcttttggatgttcatcaagatctgggcactgaagagttttgtatttgtttgaaactttacattgctggtcctgcctggagtgatagactataagcttgccttccaggtattcartgggaattgaatgttgagattggagtctctggttactatagccatatctgtgctagggggcaccacaagcccagtaacactgcaactcttgcagactcataaaagtaccaccttggtgtgctttggtaagatctgggagaat

SEQ ID NO: 216819 - DNA, 482 bp, Homo sapiens
gagttttgttgtatctattttctttttattgtatgcttttatgttttaatatttaatgtagttcattcagttattcagtgaataayagtcaaggttgtccttttattcataacttcaacataatacatttgcatttcaagtattatactttattatttgtaaaaatccatgacttgcttgtcaattagtatatttgtgtgctaggaaatatacatatcttttaaattgtgtacattaattatacatattcaaacacattgatatttaaagagaaatctagctattcttatatcagacaaaacaaactttaaagccacagcagtttaaaaagacaaagagggacactatataattatcaaaggtcttgtccaacaggaaaatatcataatactataaatatatatgcatctaacactggagttcccaaatttataaaacaattactactagaccttagaaatgagatagacaacaacacgata

SEQ ID NO: 216820 - DNA, 618 bp, Homo sapiens
taaataattgagaaggacacattcacacttgatggtagcactgcatggttggatcattttctctgtgagcctggtcaacattatctgttatgatcaccaaatgatgagcatacttggttatattgcaatgcgatgcagtcattcaagcgtttaatttgtcaacatatttttttctcaaaatatagacaccaaacaaccaaatcatttatatcttttgaaaagggtctatgctgtgattattttttaaaaaggtgtttgttaaacattttgaacattgcatatccagtttgacgtttccgataatgagcctaggaaattccccatgcttttagcattcatgagaaggaatccggggaaactaaaatggtactcacaaatttcaggcatatttaagatagattgtcttcagttttgaaatccaataaaaatacatgatctttatttggccaacccaatttttgtcttttgtctaggacttttcaggttgtcagccatcartgcagatactccacagtcaggtttcaggtatcagacatggagtgattgagcattttctacaagtggagtggggggtgtctcacatggaaaatgaataaatagtaacctatcactaacaca

SEQ ID NO: 216821 - DNA, 589 bp, Homo sapiens
tctggaagtttaaagttcttttcccctaaggaataaagcaataaatatggagaaatgatgacattttaccctctcacccaccccaccctgcttcagaggaaattacacgaatttcctttttttttttttcactgtctgtytctttttcatataaaactaattttaacctaaagtaatttagaaaataaaaagcaggaatccaaaagggaaatcttattagatttgtctgcaaatgatgattttaattaattatttgggacttaaacacagcaaaggtctagattttgaccagaacttagctttgtttcaagcaggtaaattctgagggcaccttcagcctttccaggactgcttgtctctgcccttatggattgctacatttttccttctgaagagctttctagtttaatggtgacttgaggtgtttggagctagaagtctgaacttctgaaaagattgaaagtgcctggaaaccatctgagaggcaatccagtcaaggtggcctcccttctctatgtgctcaggacaaatgcttttctcttggccctgaatcttcccgggaatctcaatttcaaatcaaacagcacaa

SEQ ID NO: 216822 - DNA, 620 bp, Homo sapiens
tattgctcatctcaagaaaagaattatgtatctttttttctgaatttgacagtttacttcaggtttcttggtaaatagaatgagttaccagaccttgcaagaccattgtattaataatctttgatttacgtcaagacagtttatgatggggccatcatcaaatgccccagccacagatggcagagcaaaaasagtatgattgcttgtcttaggcacttaactgcatggccaggaggagaaaactagatttaggccttttactaatcttgttggtgtccatagagaaaagatagttttggtaattcattcttcttcgtcttcttcacattcatctgccaccccaagaaaatgtgagcttactcaaataatcagggatattttctaagtatgttgaaatgttgagcttacccatcatataatttttattctctgcaatattacagggaaagtgaggagcatgtatggaggaatgcataaaattaacttcaaaggtggctccttagagcaaaggccaatgaaggcaggtttgtagttgatttaatcatcagaagtgcagttgagagataaatgtcagcaatttcttttcaatcacctagtgacctctagtatgaagctggata

SEQ ID NO: 216823 - DNA, 578 bp, Homo sapiens
gtaaaaatgtcattacttaattttaatttgatatgaaattaactttattatcaatttaaaattttttatagatttttctacttaagagccaaaattgtctggtaattgaataatgaagcaattagaactaaactgcaaaactttcttttttaaattaaaattcactgtttatattcagaaacccttgcgtggatggcttctcttattagactttcttattttctagttgaacagtgctaacccaataataatctatattatatatctttaattttaatcatctaaaacttcatttcctcatgctctaagatcactagtttccatggctgttaacgtattttaagtgagatctaaaatgaattcattgttgaaataagttttggaaatgtgaacagaatttcccagarcatttagtgcattttcaatttctaaaaaggaaacatgctttacaaaatgaaaacttattgacaaagtaatggtttaatttcatctttggaaaaagtcctcactatgctattcctgtcccttcattattactttattcatttaattatggaaaatagaatatgtgtggatgg

SEQ ID NO: 216824 - DNA, 616 bp, Homo sapiens
actttcttttttaaattaaaattcactgtttatattcagaaacccttgcgtggatggcttctcttattagactttcttattttctagttgaacagtgctaacccaataataatctatattatatatctttaattttaatcatctaaaacttcatttcctcatgctctaagatcactagtttccatggctgttaacgtattttaagtgagatctaaaatgaattcattgttgaaataagttttggaaatgtgaacagaatttcccagaacatttagtgcattttcaatttctaaaaaggaaacatgctttacaaaatgaaaacttattgacaaagtaatggtttaatttcatctttggaaaaagtcctcactatgctattcctgtcccttcattattactttattcatttrattatggaaaatagaatatgtgtggatggttgattgaaattcactttgaatttagtgttaaacattaatttttcaacaaatacttattgagcactgtgttagtcagagttctttagagaaacagaaccaatagggtatacagagatacacagtataagaggaggatttattatgggaattggctcacataattatgaaggctgaca

SEQ ID NO: 216825 - DNA, 353 bp, Homo sapiens
ttcaatgattagatgatgcctgcccacattggtgaaggtggatcttctttattcagtctactgagtcaaatgctaatcttccagaaacacccacacagtcacacccagaaataatgttttaccaactaccagagcatcccttagcccagtcaacacagaaaattaaccctcacaagcatctattatgggtggttaggccctgsggatacagcagcaaacaaaatcgaaaaatctctgctctttgaaacttatatggggtcttcaaagtaatgtgctccacatacccattggagaactcaaaggcattccaagaagctgatgaagggtcttaagggaatgtttccagattcaca

SEQ ID NO: 216826 - DNA, 363 bp, Homo sapiens
ggtcaattcacttttcattaaactttcatcctggcaagattatcggggaacatgccccgatagtcatgttggttcttttctattttccctaagcattggccggtttgagaartaaagggacagagtacaaaagagagaaattttaaaactgggtgtccggggagacatcacatgtcggtaggttccatgatgccccacaagccgtaaaaccagcaagtttttattagggagtttcaaaaggggagggagtatacaaatagggtgtgggtcacagacatcaagtacttcacaaggtaatagaatatcacaagtcaaatggaggcagggcaagatcacagtaccacaggaccacggtgaaattaa

SEQ ID NO: 216827 - DNA, 363 bp, Homo sapiens
ggtcaattcacttttcattaaactttcatcctggcaagattatcggggaacatgccccgatagtcatgttggttcttttctattttccctaagcattggccggtttgagaagtaaagggacagagtacaaaagagagaaattttaaaactgggtgtccggggagacatcacatgtyggtaggttccatgatgccccacaagccgtaaaaccagcaagtttttattagggagtttcaaaaggggagggagtatacaaatagggtgtgggtcacagacatcaagtacttcacaaggtaatagaatatcacaagtcaaatggaggcagggcaagatcacagtaccacaggaccacggtgaaattaa

SEQ ID NO: 216828 - DNA, 415 bp, Homo sapiens
aatgttttaagagctaccactgaagaaaagtaattttcttgtcttcttccactaatattaatgaagcatcatttttttcctttcatcttcattcatataagcaattgcaaatatattgagatttattgaattacatttaacccctatgaaatttaacacctgttcattaattcrctcaagaaaagttagattctcactaaactaggtagagttgagtgtcatcttgatcattatttcatttggagcagatattatatactggtcaacaaaaggcacttttctaagtcgaattgtatttggagaaacaatttattttatatttgtaaagtaaatgtggaattcatttcatcaactgtgaaacaaaggaaaatatgaaatcagaaacactttatactatactatataagattcatta

SEQ ID NO: 216829 - DNA, 353 bp, Homo sapiens
ccatatttttaaaactccgcagatatcaatactagtcattttctagttaacccatcctgtttcatgtgccatgacacatagaacagcgtggggaatgatagaaatgacactttattttgactgcatcacaaagagattgtgcagtacaggggtgtctttttgattttattgcaggcaaactataggtgcctttaaccctaaggggtcagaaaatagaggaggaataaaatttctcctcaacactttttgagcaagaaagtctcaagtattcgtaaagcatttgtcagcattaytctctgatgaggagagttcttattagagttatatgtctctatatttttaaatcaaatttt

SEQ ID NO: 216830 - DNA, 580 bp, Homo sapiens
acacttctctgtatgttttattagaatttcctctttatgcaacttatactaccgaactttacacatgcatgaatggtaacacagaagaattattatttttaagagttttataatctcttatgtttagtacataacaactatcagattttgattgttgataaattttttattaatttttaattttgcataagccatttttgccaaaattaaagtattaattttgtcatatacatcggtgctattttattattccttccatattacagataaacgcaaactatatttaccctagggctttgttgttgttgttttgggttttttgaattaaaatttaattcaatctgacaggtatttttggtgcataatrtagagttagtccttaaattttcattttccctcaaatggctaaccaattatacagagaagatttgttttttaaaatcttatttttccatttatatctttcttctttaatccactgcttttagttttcagtttgcagtaaaattcactgtcatttttgtaaaattccataaattttaacatatatttaaatttgtgtaatcaccaataaaatcag

SEQ ID NO: 216831 - DNA, 559 bp, Homo sapiens
ggttaatgggcacaaacatacagttagaagaaataagttctaatgtttgatagcagagtagggtaactacagttagcaaaaatgtattgtgtacttcaaaatagctggaaaagagggtttggaatgtttccatcaccaagaaatgataaatgctcaaggtgatggatattctcaatatcccracttgatcattatacattctatgcatttatcagaatatcacacgtatcccaaaaatgtacaaatatctgaaactgataaaaataaacaaacaggaggtataaacggtcagcacattcatcttctgcacccttctcttttcgatgtgtggaggtttctttctaggagaaatcctatcccattcagcagcactagacaggacaactttgcagagtcccaccttgctggaggcccagctgtcacctggctttgctcattggaaggcctgtactgttccccaggctctgcagacgccagggagcaaaggttctgcctgggggaattaagtggacaatgggtcaataagaggtgtccaccttggccacggatgggaaagtgg

SEQ ID NO: 216832 - DNA, 551 bp, Homo sapiens
gattgttatgagaattatacttgcatattacttagaggctggcacaaagtaactgctatgtaagtgctcaaaaaggcttagaaacagacacgcaatgtacaggtacacccacacaggcacattcagtggaaggcgctagtggagagtgaaacaagagagaacacagcttgctaggtgggrggtagggagaaaagtggatgagtttacaggtgagaggcacctttcctcttcccaagtcactcccagctcctctagaatcacccgttctgtaagaagtgccaatcatgtagcatcactgtgggtgggacccctcacttagtgcccattcattcattcattcactgactcattcatttgttcattcactgaggtctatctctcagtcaggtattattctaggccctgaagagacaaagatgggtaagacaccagcccttctgtcttgagaaggccgctggtccagaaagccttggggttctcttgttgtgttctttcctactgttctcccacatcttaggcagtcatccaattgtttggagaacagaggctgc

SEQ ID NO: 216833 - DNA, 551 bp, Homo sapiens
gattgttatgagaattatacttgcatattacttagaggctggcacaaagtaactgctatgtaagtgctcaaaaaggcttagaaacagacacgcaatgtacaggtacacccacacaggcacattcagtggaaggcgctagtggagagtgaaacaagagagaacacagcttgctaggtgggaggtagggagaaaagtggatgagtttacaggtgagaggcacctttcctcttcccaagtcactcccagctcctctagaatcacccgttctgtaagaagtgccaatcatgtagcatcacygtgggtgggacccctcacttagtgcccattcattcattcattcactgactcattcatttgttcattcactgaggtctatctctcagtcaggtattattctaggccctgaagagacaaagatgggtaagacaccagcccttctgtcttgagaaggccgctggtccagaaagccttggggttctcttgttgtgttctttcctactgttctcccacatcttaggcagtcatccaattgtttggagaacagaggctgc

SEQ ID NO: 216834 - DNA, 472 bp, Homo sapiens
atgtttttgacgaagctactggcttcagcaactgacaagagaaagaagatcccagctccttgagacttggtctcatcctaaacttgaaagatcattgaaacctttcagaatctgatttgcttccacccattccttttgggaatgtacagctagaaataacgttaggagaaytaaaaaaaaaaatactaaggcattgaccatgtgccttggttaacagttaactggtttagctcatatatgctatttgccccatatggtttactcattctgtcacctctgggaataactgagatggataaaagtgccctttgcaaaactggctctagacaaaaggaagtctaggaataggtaaagaaaaataaggagccaatttctctgggggacctgaatgaagaatagaatcctttaagtgtgcttaagtgcgacaggtccagccctgttcagcaacaaagatgaccttgcactctgggtt

SEQ ID NO: 216835 - DNA, 592 bp, Homo sapiens
aagcttttcagttggatataatctgttcatttttgcttttgttgcctgtgcttttgaggtcttattcataaaatcttgccccagaccaatgtcctggaacttttctcctatgtttttctctaggagttttatagttttaggtattacatttaggtctttaatccacttgaagttgatttttatgtagagtgagagatggaggtctagtttcattcttctgcatgtggctatttagttttcccagcaccatttattgaaaagattgttctttcccccaattaaygttcttggcatctttgtcaaaaatgggttgcctgtagataaatggattaatttctgggttctctattctgttctactgatctgtgtgttattttttaatgtatactttagaatttgtttgtctcattctcccccgacccctacccttctccaatttttggccttgttactgtagttataattaattgctaaattagcttagggagaacaactttatgaggttgagtcttcctatctaactaacttggtatgtcttcccctttgtacaagtctttgtgtcttcaggaatgccttaaaattttattagtaa

SEQ ID NO: 216836 - DNA, 592 bp, Homo sapiens
aagcttttcagttggatataatctgttcatttttgcttttgttgcctgtgcttttgaggtcttattcataaaatcttgccccagaccaatgtcctggaacttttctcctatgtttttctctaggagttttatagttttaggtattacatttaggtctttaatccacttgaagttgatttttatgtagagtgagagatggaggtctagtttcattcttctgcatgtggctatttagttttcccagcaccatttattgaaaagattgttctttcccccaattaacgttcttggcatctttgtcaaaaatgggttgcctgtagataaatggattaatttctgggttctctattctgttctactgatctgtgtgttattttttaatgtatactttagaatttgtttgtctcattctcccccsacccctacccttctccaatttttggccttgttactgtagttataattaattgctaaattagcttagggagaacaactttatgaggttgagtcttcctatctaactaacttggtatgtcttcccctttgtacaagtctttgtgtcttcaggaatgccttaaaattttattagtaa

SEQ ID NO: 216837 - DNA, 425 bp, Homo sapiens
aagcttacaatcatggcggaaggcaaaggggcaasaggcacatggcaagaggaggagagagagggaggtgccacacacttaagtgaccagatcttgtgagaactcactcactgtcaagaggacaacatcaaggggatagtgctaaaccattcatgagaagctgcccccatgatccagtcatctcccaccaggctccacctcgaacactggggattacatttcaacatgagatttgagcagggacaaatatccaaccatatcaccgtgtctctacaaagaaatttaaaaatcagccaggcatggtgctgcatacctgtagtcctagctactcaggaggctgagatgggaggatcgcttgagcccaggagttggagcttccagtgagttatgattgccactggcactccagcttgggtgacatagtg

SEQ ID NO: 216838 - DNA, 583 bp, Homo sapiens
acagcctgagttactacaaaatgatcagaaatcactagtttgcaagtttaccygattgaatgaagaaatttgtattttatgaatttggagggcttatattttattaatttgcccacctctatgatttcatgacttaaggtttatttttaaataatcccaaatacagttgcctgtataaatgttgcatgaccaaacaaagggtgaatgaaaaagcctgtcttaggtggagaaaatagtgaagggacatttccataatgcagtggtattttaaatagagtggtcatggggtgaagatgggttgaatgaatggctatggatatttagcttcttgaagaaggaacattgcaaaatgaaacatggctggggtgatatcattctcaaaaggttaggaatcactagtagttttagtctattttcatactgctataaagaactacttgagactggataatttataaagaagagatttaattgactcacagttccacatagctgaggaggcctcaaaaaagttacaatcatggtagaaggtggaggggaagcaaggcatgtcttacatggtggtgagagtgagagcaagagg

SEQ ID NO: 216839 - DNA, 584 bp, Homo sapiens
ttactacaaaatgatcagaaatcactagtttgcaagtttacctgattgaatgaagaaatttgtattttatgaatttggagggcttatattttattaatttgcccacctctatgatttcatgacttaaggtttatttttaaataatcccaaatacrgttgcctgtataaatgttgcatgaccaaacaaagggtgaatgaaaaagcctgtcttaggtggagaaaatagtgaagggacatttccataatgcagtggtattttaaatagagtggtcatggggtgaagatgggttgaatgaatggctatggatatttagcttcttgaagaaggaacattgcaaaatgaaacatggctggggtgatatcattctcaaaaggttaggaatcactagtagttttagtctattttcatactgctataaagaactacttgagactggataatttataaagaagagatttaattgactcacagttccacatagctgaggaggcctcaaaaaagttacaatcatggtagaaggtggaggggaagcaaggcatgtcttacatggtggtgagagtgagagcaagagggaatgtgccac

SEQ ID NO: 216840 - DNA, 613 bp, Homo sapiens
gagtttgagattagcctggacaacatgcctcttctctaccaaaaaaagaaaaaagaacttaaaaaaaatgaagtttccgttgcaagactctttgttggcataaaaatatccagagataaacactataaggattaagtgctaattcagtttctacacyattaaagtttaattctaaaattttctggtaaaatcacgacttatttcaaattaggaattagaaatataatgcataattttaaataagctttttcatattataaaaggaatgcataaatacagatagatataaagcaaaattctaccagttggagacaatcaccatccaatttcaatggatttgcttccatttcccaccatcagtctatagctgtgctttcttatattgtagtcactagccacatgcaactgtttatgtttaaattaattaaaattaaatacaacgaaaaatttcggtcacatttcaagggcttaatagccacctgtggctagtggcaatggtattagcccaaatataaaacattttttattattacagaaagctctattggtagagctatttagaggtatacttatacctagactatatccatatgaaacataattctatgtacat

SEQ ID NO: 216841 - DNA, 613 bp, Homo sapiens
gagtttgagattagcctggacaacatgcctcttctctaccaaaaaaagaaaaaagaacttaaaaaaaatgaagtttccgttgcaagactctttgttggcataaaaatatccagagataaacactataaggattaagtgctaattcagtttctacaccattaaagtttaattctaaaattttctggtaaaatcacgacttatttcaaattaggaattagaaatataatgcataattttaaataagctttttcatattataaaaggaatgcataaatacagatagatataaagcaaaattctaccagttggagacaatcaccatccaatttcaatggatttgcttccatttcccaccatcagtctatagctgtgctttcttatattgtagtcactagccacatgcaactgtttatgtttaaattaattaaaattaaatacaacraaaaatttcggtcacatttcaagggcttaatagccacctgtggctagtggcaatggtattagcccaaatataaaacattttttattattacagaaagctctattggtagagctatttagaggtatacttatacctagactatatccatatgaaacataattctatgtacat

SEQ ID NO: 216842 - DNA, 575 bp, Homo sapiens
agatggtcaaggaaggacaaggatttccatgtggctggagcagagtcagcaagagagagagtagaaggagatggggccaaagacataaggggaggccagattgtgcatggcctggtaggccattgtaatgattttggcttttactgagagtaaaatagattgcactgagaaggttttgagctggggtgtggcatgatctggtttctgttttaacagcatcacatgtgtgctgtgttgaatagacggaagaagggcagaggcagaggcaaggggtttagttagaaggctgtgacagtaatgatggtgatggggtcagtgctgccaccttagaggtaatcagaaatggttagagtcarcataactttgtattataaaaatattaacataaaagaatagggaatagtctaatgaatccccatgtacccactttagaacatgagttgtcaactcatgttcaatcttgtttcatctatacctccatctatcttccctcccgttctcctcccaactcttccccctaccccactggattacttttaagcaaatcctggacatttgaagatagagacaacagg

SEQ ID NO: 216843 - DNA, 578 bp, Homo sapiens
ttggaaaatgagaaggaaagcaaaacagaagatctgtttgggaaatccaacttttctggagctccagaaaagagaagagtaaaaatgaaggtagataattagcaaaacataacatttattgagcacatactatttgccaggcactttatggaactttctaaatattaactcatttaattcccacrtgaactctatgcaatataatagtgtagtaatactattaatattcttatttttcagataagaaaatgtagggaggcaaaattattttttaacattttagtgtttttggctgggcttgagaattaaattgacacaaagatcaacaggagaaaagcatacaaatttatttaatacaagttttacatagcaggggagccttcataaggaaatgaagaccctaagacacagaaagaacacatatactaaattggacaaagagtagtacattgtaaaaatgggacaaggcaaaggagtttgggctagggtaattgggtagagaaatgactaggaagataagggtgagtttaacaaggtttacttgtctagatttcccctcacctcaaattcctgtgctt

SEQ ID NO: 216844 - DNA, 433 bp, Homo sapiens
acatcaccttgtcccgctgccccatgctccctgcctcagaggtatstgatgcctcccgattcccaggcactcctggaatgctgtggcattaattggcttaatttttaccccattcccttcccccatagcacttaacttccagttttctgcagtttacttgagtctattgctacttatccatctgttttccagcttccaaatttgttaaaatcttcactcttatttagttcttttcttccttaaggacgtaagccctcttaaatttctgtagtgtgattgtactggggcttggggaaagaatgggggaaatgcacattgaatttgccatgtttaactggaaatcacagcaactttgtcaccatcaacacttcttttataatattggttcagtattaaacttagtattatgtgaacctgaacccattaaatttaa

SEQ ID NO: 216845 - DNA, 289 bp, Homo sapiens
atacaatttctaccctgtggccacagccactggccaaactatagattcaacatagaatttctcatactctttctagtcgtgaaaagttaacaaattatagttatgttttccctaaaatgtattggtatctgtgtaaaaagcatatctaacaatttttytttttttccttaatgagacaagatctctctttcgcccaggctgaagcacagtggtgcagtcatggctcactgcagccttgaacttttgggctcaagcgatcctcccacctcagccttccaaacagctggga

SEQ ID NO: 216846 - DNA, 479 bp, Homo sapiens
aatatctgtataattatatggacggatacatgtaattatatggacagataataaaagatacattttaaaaaggacactctcttggcgtgtatttgtttggatacgtgtattgtaataaacataataaaatcccaggaaarttatttgcagtgccgaataaaagaataaaactaattttctaatgctcttattttataataaaacattcagtacttgtaattgaaaaggaaaagtctttaatttggtggaattcatatattcccttattaaacagtattacttgaaatttggaagatcaaaatatgaatcctaccaagatattattttcaaggatcttagagactgatgggagataatataatacagaagactacatcagaagaaagaaagtgctgagaagaggtataattaaaatgctaaggtgctggttacatattctctcatgggtcaaatctaccctcctatactttgttttgtgc

SEQ ID NO: 216847 - DNA, 479 bp, Homo sapiens
tccaaactttttgcagagtaggtgcccatatggacaatgcactccttacttaaaaaggaaagataaaaggaatagactagttttgaaaatcagtaggggtttcaaataaagcacacattgtacatacattacaatagtctctgttttttaaagctcataggtttagacataatttgtaccacagtaagacaatgttacatattagraaaaaacaaaattttggaatataatcacccattcaaatttgtattaaaatagtattttaagtatttaaccagctgaacaagctacttgacttctcaggaattcatttttaactacatttttcttatctgtaaagtgcaaatgtgacagagaaaatcattctaaaatattttaatttcttctcttttttttgtgtgtatctcttaaggggaaagttgttagtcctaattggaaaatcgacacgcagtaagaggataaccaaagaagacaaaaac

SEQ ID NO: 216848 - DNA, 598 bp, Homo sapiens
gaaaaggaaggtaagattgtgttttttccttaaatggtttaaaattaacaaacagtttaaagtattggaagaaaatacaataaatacttttaaaattgttttattaatacaaaataataaaaacattaaattaaataataaatgtatttaattttcttgaaaataaaatatatttgaatgtcaaatgtgttgttttcaaaaaggttagacaggggattgtatgttataagaacaayttgcacccagccacataatggtatgtaaaattagacagaagtgagcaggtcaggccttatgaccctactcttctctaatagtacttttttcttatttatgtgttgcactgactctgagtccagaattcttaccactgtacagctattcatagcttattctaatatctctctgggtttagcaaggcccatagagtaaccatcaaagctggagagtgtgtcagctaaaacaggtccatgggcaagagatcatattaaaagacccctgaaacttagcattttcaatgacatgataaaatctgatttgagcaaacacaaatacacagggtttcttttttgtcattgttattttattacaaacatgc

SEQ ID NO: 216849 - DNA, 584 bp, Homo sapiens
catccagaattccctaaatcaactttgttagcacttaatggatcctaattcagcttttcagagaaaccttgttacacaactagattatgaactaatamttttatctattgggtgagtatctgataaggccttgccatcattccctttactaaagatgcagaccaagaagttggtaccatcctagaatgattattttccctaacagtttcattccctctcttttctgttatgaatagactacattacataagatacacaatacaattatactttttaaacaactccaatctattttcacagatacggctcttggggtccacagccattagatgccttgtccaaggtcacagaaatactttgcctaaggtcacagaaaagcatggcagaacagctcttctcatgtgcctttcagtgcttttcactccatcttctaatttaataccagtatttggcaaacagtcatgtgaaaacatcattatcattgtctgttctgtagctacctattcctaatatgtagagttctagttaaaatctaagaaaatctattaatatcattggaactcaaattgaatatggaaaatgag

SEQ ID NO: 216850 - DNA, 584 bp, Homo sapiens
catccagaattccctaaatcaactttgttagcacttaatggatcctaattcagcttttcagagaaaccttgttacacaactagattatgaactaatacttttatctattgggtgagtatctgataaggccttgccatcattccctttactaaagatgcagaccragaagttggtaccatcctagaatgattattttccctaacagtttcattccctctcttttctgttatgaatagactacattacataagatacacaatacaattatactttttaaacaactccaatctattttcacagatacggctcttggggtccacagccattagatgccttgtccaaggtcacagaaatactttgcctaaggtcacagaaaagcatggcagaacagctcttctcatgtgcctttcagtgcttttcactccatcttctaatttaataccagtatttggcaaacagtcatgtgaaaacatcattatcattgtctgttctgtagctacctattcctaatatgtagagttctagttaaaatctaagaaaatctattaatatcattggaactcaaattgaatatggaaaatgag

SEQ ID NO: 216851 - DNA, 486 bp, Homo sapiens
acgtggttttaagaaatgttccttcaacccttaatttcctctaaatcgttgtgagatactgtgcttgagcaattcagataatttttttatgtctcactacaccacaccctttgtttatttttaacatgaagattaattgttcaggtattgtcagcactattaatccatcatcaagatttctacccactttctacctaatagttttggcagtcactcatactcattatctgcatccattattgcattgggggaataaaatggttatattcgaattccttattacttctgcmtttactcattgaatttttaaaacttcaaaatatttagggaatttctaattatctttttgttattgaaatctaatatcaataatgaattttttaaaataataagtatttgttctcataatgattaccctgtgaaaagttaacatagaaagaaaataaatgcttgattctttctatttacttactagtttctcaaatt

SEQ ID NO: 216852 - DNA, 423 bp, Homo sapiens
catattatacaaggatagaaaagtatctgaaaatattatgtttagctgcatgtgaataatttttgttgagaaaaaaatgagataagcaggagaaaatataaaactttcttagtaatgcaaataactgtgggagaatagctaaaataacatgttatttgtcatcagctcccaattgaattttacttccagatgaagatcactgagtttcaaatttggcacatattgtcctctgggtcttatgatctggatctcatagcatgagaaatgkgtatgttctacctgttggcacctctgctcaagctccacggatttataatcatgggcatctacatctccttcagcacaaattaactcatcagaatagtttatcctaaaccgtatttcaaagcctaattaatttcaacattgatgttttgtagtatc

SEQ ID NO: 216853 - DNA, 521 bp, Homo sapiens
catgggagccatctatgggttttaaatgtgagtgttccagtgtcacgtttgtcttttaattaaagtccaggggctgggtttaaaacggatttgtgggagacacatctggagtccagaggcccttkggacactgtcagtaatgctgaaaatatttgctgggggtttaaattaagggaatagtacaggccataaatgaaaagagaagacagatgtttttaaatgcttagtacaattactgagggttagccattggtagatgtggagactgaggaaggcagaatcagaaacattccctaagcttctagtgtgagtaaattggtaggctaaaatgctccaatgaaaagagagaatgagaatattgcagtagcaataatagctatctttaatttagcacctttacactaagcattcttctacgtgattttcactttttttaaactttaccctcacaataacccaagaaagctaaattccattattttcattttagaagaaaaaattggggtatatgaatgttgaat

SEQ ID NO: 216854 - DNA, 521 bp, Homo sapiens
catgggagccatctatgggttttaaatgtgagtgttccagtgtcacgtttgtcttttaattaaagtccaggggctgggtttaaaacggatttgtgggagacacatctggagtccagaggccctttggacactgtcagtaatgckgaaaatatttgctgggggtttaaattaagggaatagtacaggccataaatgaaaagagaagacagatgtttttaaatgcttagtacaattactgagggttagccattggtagatgtggagactgaggaaggcagaatcagaaacattccctaagcttctagtgtgagtaaattggtaggctaaaatgctccaatgaaaagagagaatgagaatattgcagtagcaataatagctatctttaatttagcacctttacactaagcattcttctacgtgattttcactttttttaaactttaccctcacaataacccaagaaagctaaattccattattttcattttagaagaaaaaattggggtatatgaatgttgaat

SEQ ID NO: 216855 - DNA, 583 bp, Homo sapiens
aattctgtctttttctccattataaactggacttattaccacacatggcacaataggcattccataaatgtttactgaataaatgaagaaataaaattttataaataagcaaagcattttttttccacactagtgtcctttcttcctcgctttctattctgagctgaatrggagcagaatatttctatttttacatttttgatagttatgagaaaacatcaaaaaaataaagcactgaaaatacatagatggcaaaaattattatagataagattacatgcataatttctttgcagaaaagctctggtattaaacaaaactgaagaacatttccctgacaaacattttttcaatgactttaatcattcaatactacagcataataacaacttccttgattgatggatagtgtgccccaatactgcttgtgataaatataatataatataattaatgtaatatcatattctgttttgatatcacttggtgcatttctgactgtatttaagcttagagaaaatttgctagtggtaaggaggaaaaagaagagtctcttgtactttgattgtaaactggacaacat

SEQ ID NO: 216856 - DNA, 598 bp, Homo sapiens
aagctgaaaaagcaagtatctagtccttagatcttcagattaggaagtggactcttagctgggcctgtcaatggagttttatggtcagtaattatcaagcataagaagggggttcagcatgaagggttgtccaatttaaagcctttgacaaaattcaacaactcttcatgctaaaaactctcaataaattaggtattgatgggacgtatttcaaaataataagagctatctatgacaaacccacagccaatatcatactgaatgggcaaaaactggaagcattccctttgaaaactggcacaagacagggatgccctctctcaccactcctattcaacatagtgttgcaagttctggccagggcaattaggcaggagaaggaaaaaaagggtattcaattaggaaaagaggaagtcaaattgtcmctgtttgcagacgacgtgattgtatatctagaaaaccccattgtctcaggccaaaatctccttaagctgataagcaacttcagcaaagtctcaggatacaaaatcaatgtacaaaaatcacaagcattcttatacaccagcaatagacaaacagagagccaaatcatgagtga

SEQ ID NO: 216857 - DNA, 533 bp, Homo sapiens
ctccctccttgcctcttggagcatctgatatccccagatgttccctggctgtgtcaaagtaacactgatctctgcctccatctttgtgggatcttctcctgtggctttgtgacttcacatgggcaccagtcatattgaattggggctcaccctactcctgtatgaccttatctgaacctaactaattacatctgcaacaattctgagataccataagttaggactttaccatatttgggggcatacagtttaacccataatattagagaaatgactaaattatctcttaaatctgtccacagagaaaatgttactaaagtgttgttgtatgaagaggtgaccaagagtatgcagtcaaaaatatcggggaaaagaaaaaagaaacgggtgtttcgagtacttcattaargaagcaatgtttttaaaaactgttatgtgatgtttgtgttatttaaagtcgttatgtttgaaatttcttctgatttcttattctaaaaatgcacttttattaatttttgttaataaatccatat

SEQ ID NO: 216858 - DNA, 456 bp, Homo sapiens
tttgcctggtcttctaggttaggaggggtccccatttctgctactgatttgagtcagcttgttgagggagacaaggtaggggaggtgatatgcccagacatgtgaggctcactggcatcctaattacaatgtctcttgtctgccaggaccgagtctcctccctaaactgtcttacttcccttttaagtattaattgaaaattgtagattaaaacaaaaatgaatctcccaaggagatgatttgcaaataatgtaaataaatatctgatatggtttggctgtatccctacccaaatcacacattgaattstaataatccccacaaatcaagggtagggtcaggtggacataattgaatcatgggggcagtttcctccatactgttcttgtggtagtgaataagtcttacaagagctgatggttttataaatgggagatcccctgcacaagccctcct

SEQ ID NO: 216859 - DNA, 327 bp, Homo sapiens
aaaaggaatgctggcgtcacccctctcctaaccacaggctgcacagctcacagctccaaaagataccatttccttctgcytgaggagaggagagggaagagtggggaggactttgccttgcatcttggataccagctcagccaacagcagaatagagcactggtcagagtcgtgaggccccctttcgaagccctagctcccagatgacatttctacacaccccttggaccagaagggaaaccactgccttgaagggaagaacccaattctggcagcattcatcacctactaactgaagagtcgttgggcccgaataaccagcagtga

SEQ ID NO: 216860 - DNA, 585 bp, Homo sapiens
tgtgaagtttttgaacataattagaaaaaagactctttgttgatcgagtayaaaatgtgcttcatgaagcgtttgattagttaaaatatgaaaaattttagttgaagagcttttaatagggcttatctttagtcagtcattttatacataataaaatgcctctcacaattctgaaaggacctagcgaatttaagaagctgggtgatgtaatataaagagccctggatttaggaggtcagtcttagtttattccctttttgtagctagtaagttatttaatttgtaattcacaatggtggtgagggcataaagataaatgcatcacagctcttgtgatgacataagtgcttgctttctggatttcagttttctcatgtgcaaaataaggattatagagccaaatgagacccaaggttgtcttaagcactaacattatgtgatactttgaatattacacagtggaaaacattaaacaagtgtgtgctaaatcggagttgttcaccatttctctctcatttttcttttttttaacttttaaaactgacacgtaataattgtgtatatttattgagtacataatgatgt

SEQ ID NO: 216861 - DNA, 585 bp, Homo sapiens
tgtgaagtttttgaacataattagaaaaaagactctttgttgatcgagtataaaatgtgcttcatgaagcgtttgattagttaaaatatgaaaaattttagttgaagagcttttaatagggcttatctttagtcagtcattttatacataataaaatgcctctcacaattctgaaaggacctagcgaatttaagaagctgggtgatgtaatataaagagccctggatttaggaggtcagtcttagtttattccctttttgtagctagtaagttatttaatttgtaattcacaatggtggtgagggcataaagataaatgcatcacagctcttgtgatgacataagtgcttgctttctggatttcagttttctcatgtgcaaaataaggattatagagccaaatgagacccaaggttgtcttaagcactaacattatgtgatactttgaatattrcacagtggaaaacattaaacaagtgtgtgctaaatcggagttgttcaccatttctctctcatttttcttttttttaacttttaaaactgacacgtaataattgtgtatatttattgagtacataatgatgt

SEQ ID NO: 216862 - DNA, 501 bp, Homo sapiens
gggaaagagtactgcacatcaggaaggggaaaggagttacagagatacaaagatagagacttgcatttatttctggtaaagtaggttaacattacctatttagccatttaaaatkagccatttaaaatatgtaatagtaacttagagctgtgcacaaggtcatggcagatttggaatcagagatgaggtcctgaaagaaccagtgctgggcttagctgtcagttttgcaggttaagctagactgttagcgtatccgtacaaaatagttatgaagattaatgttgccttctgtagaatgattttgcctggtcagctggaagtttttctttttttcctttgcagatttttccagctgttgttttgccctctgaagtactgggtctataatgatcttaaagtcttcagagaaatatacatgaatattattcttcatcagcagtagaatgaagtaatttctctttcaatattaatttacactgaaaaaagaagtgctcaccagta

SEQ ID NO: 216863 - DNA, 477 bp, Homo sapiens
ctggtgtcatgcttgtacagcctgcggaactgtgagccaaataaaccactttcctttatagattacgcagccttgggtatttctttatagcaatgcaaaatgggctaacacattccttctagctatttgaaactttatattaactataattttcctacagtgttatagaacactagtcttatttctcctatctttaattttgtatcctctaatgtctcccccatccttctcttctccctgcccttcctagactctaatatcctctgttttactttttactttcatgaaatcaactttttttrgtttccatataggattgagaacataaggtgtttacttttctgttcctgactcattttacttaatatcctccagttccatctgtgttgttgccaatgacaggagttcattctttttcatggcagaataatgttccatggtgtttttacagcatatcttcatctattcatctgttgt

SEQ ID NO: 216864 - DNA, 572 bp, Homo sapiens
ttactttcaaggcataccatacccaggtctcactgaaatctggtcaatgttatttgtaagaaagttatatttgttttattatatgcatgtgcctaaggatacactaacagagttttaacacaacttaagttgcataactaaattgacaatgcagatcagaatctggagagatgggttaggaagaaggcttattagtctacatttttaaggaggctcacagttgatgctaacagcatttgtgagactatggtgagcatgccataaaagtagaattgcctaagtgcttggtagccatctaattgtttatctggtgtcttttgaggctgaaggggatcaggatatgccacaccaaaatttgccactttggtataagaattattttgaattgaaggcaactgaaaatcaacagatgcaggaggacttctctgctcttcccttatctgcctaaaagcagcacatarattttctcttgtgctgtttccctttcctgtaccaggaagaggagagtagctcatcactggagatggagaattaacactaagatgagtttgcatcaacagactttactaaaa

SEQ ID NO: 216865 - DNA, 591 bp, Homo sapiens
attctttcaagagttaaaaacaacagttcttgtcttactaattgagtctttacaaaaacagaaatgcagctctagaggtaatgcaaagcccacctatgtttcttaccaatctcaaaattcatctcaaaatgcttgtagataatgtagtagaaggtcaggacattgcaaaagggactgtcctatactaaaaaaagaaacttaaatactaattactctaggttctgataataggcaaatatgctcctgaactcctccttagagctttagaaagctaacatcatttctctgtcattctgtggtcagaatgagttgggacagagcaagtaatcagaatgagtcagggaggagcaggtaatcggaatgagtcagggtggagcaggtaacygaaaaatgttgctttatgaggaaataaagtttaaaagtagaaggcaaagaattgaacatactgacatattgattctttgaagagaaatttagaactcatatctaacattccctcctcttgcatcttccttacagttctttctcttcaaacttctttaacatgtcttggcttagttgttctgcttgattttccaaaagaagaagctt

SEQ ID NO: 216866 - DNA, 592 bp, Homo sapiens
tcaaataatgccaaaaaaaaaaaatcctttggaacttctcttttgttataaatcagcctctgattcagtcattgcgctactttataaaagtggattcactactttcatttctcatgtcatatttgactgcaaatgactttagattgttgatatatgtcaaattctatctcaaggtatgaagatgttcattactgagtagacttaggaaattacattgagatgaaactcrtttagatgcaaatttttgacatatttatttaaaaatcactcacattgcctgacatatacttatttatgcgtagaaaaaattttgactatgaggcatctgagaaaataaagaaaacaccaaacaaataaaaccaggtatccacagaggttatctatccatgaatacctcacatattcccttctaaatttttagatgtgtcaaatcagcagtgttatttatttatatattaatttatattccctgtattccaaaaaggattttaagcaaggtatagttaactcatttcaaatcatggagattctgtaaatcccaacagagagtgaaattatttatctaatgcttttgtatagagatgaaacatat

SEQ ID NO: 216867 - DNA, 573 bp, Homo sapiens
gtaacaagtcaaacaaaacaaaggatgcagtgacagtttaggaacacaggacaatgagagttcatagcaataatgggtctaaatgtcaaaaggatgctgtgaaagtgactttgcagamtgagagcaacttagcaagtgctagaataaagtgaaagtttctattcacttcaagatagtcttggatttgtccactccttctctaaccactcagtaataatgaaaactaaattgtaataccatctctaagattctttcacacattttttccattttgaagtaagccgtgcttcctatatggagtgaagttcatgaagaggggcaggcagggttgaagctggcagaacctgtgctaatcagtcacagtgacagcttcagtgggcatcacacccagagtcaaagcctttaaaatcagggaggttgtgtgaagggtcagcaatgtcaggtttgaggataccagggaaggagaagagcttggagctgaagctagctaggacaacagaagtggtacaattattattaaaggtgagttcaagagtttattactgagagatgtcgtgaactacaagtgaggag

SEQ ID NO: 216868 - DNA, 573 bp, Homo sapiens
gtaacaagtcaaacaaaacaaaggatgcagtgacagtttaggaacacaggacaatgagagttcatagcaataatgggtctaaatgtcaaaaggatgctgtgaaagtgactttgcagactgagagcaacttagcaagtgctagaataaagtgaaagtttctattcacttcaagatagtcttggatttgtccactccttctctaaccactcagtaataatgaaaactaaattgtaataccatctctaagattctttcacacattttttccattttgaagtaagccgtgcttcctatatggagtgaagttcatgaagrggggcaggcagggttgaagctggcagaacctgtgctaatcagtcacagtgacagcttcagtgggcatcacacccagagtcaaagcctttaaaatcagggaggttgtgtgaagggtcagcaatgtcaggtttgaggataccagggaaggagaagagcttggagctgaagctagctaggacaacagaagtggtacaattattattaaaggtgagttcaagagtttattactgagagatgtcgtgaactacaagtgaggag

SEQ ID NO: 216869 - DNA, 571 bp, Homo sapiens
acccaaaggaatataaaccattctattataaagacacatgcacatgtacgttcattgcagcactattcacaatagcaaagacatggaatcaacytaaatgtccatcaatagtagactggataaagaaaatgtggtgcatacacaccatggaatactatgcagctgtaaaaaagaatgagattatgtcctttgcagggacatggatggagctggaggccatgatccttagcatactaacacaggaacagaaaactgaataccgcatattagtgggagctgaatgatgagaacacatggacacagaggggaacagcacacactgaggcctactgaaggatggagggtgggagaggatcaggaaaaacaacttatgggtactaggcttaatacctgggtgatgaaataatctgtacaacaaacctccatgacacaagtttacctatgtaacaaacctacacttgtaagcttgaacttaaaattaaagttgaaaaaaagaaagataatcctttgtcataagccttgcagttccaaaatggtatatttacacagacttaccagaaacttaaaataa

SEQ ID NO: 216870 - DNA, 542 bp, Homo sapiens
cattgcagtgccagcttctggacagatgctcacctcaccctgctcgttggaagctccacctaagccttgttgccaggaaatgccacaaggcctgtggggctgctttgtaggctcaatagataggttttaagtaaatggttggccaaaaaatattcattggaaagagataaaaaatcttttattcaccctctccctcattctctgcacttcactagctgaataatcctgtggaaaattagttgactatctctgaaatttagctcctcacccatgaaactgggataataataactacttctcactctctgtgaactccagtattagttaggttgcctttggctgcaagtaaaagaaagcctgactaaaagtagctaaacaacaaggacattcatgatcttaaataacaagatgtctaaaagtagatggttcagaagcctgttgatgtctgggccccaagacagcctctctgtagttctcctggctcctgtcatggtmgtacgatgacagtcatcacatcccctcatgatagcatgacttttaac

SEQ ID NO: 216871 - DNA, 430 bp, Homo sapiens
gccattttggcacttgtgatagtagaagttgaccttccttttccttatacaaaggaaataaattggcatagattataatttaatttatacttgacatactgaaacaaaataatttatgtatttactgacagaactgcagaggtaaatggtggtgcaattgaacatttgtaattaaagcaagaaattagggaggaaggccattaaaacttaaagtargaagttccctgccaaaacataagtgtaagcattaagtcagagtttgcactcatttagagggaagtcattttaagattttattgactgactgattaattgattgagacagggtctctgctctgttgcccaggctggagtgtagtggtgccatcagggctcactgcagcctcaacttcctggacttaagtgatcctccagcctcagtaaccctccc

SEQ ID NO: 216872 - DNA, 628 bp, Homo sapiens
gtgggggatgacagtgttaatgatgagcacgtgaggggttgccagagtgggggttagctgaagagaatggaatgatgaatgttttgattatcttttaatatgaaagtgagatcacctatatgcagaacattgtcgtggagatagccattttggcacttgtgatagtagaagttgaccttccttttccttatacaaaggaaataaattggcatagattataatttaatttatacttgacatactgaaacaaaataatttatgtatttactgacagaactgcagaggtaaatggtggtgcaattgaacatttgtaattaaagcaagaaattagggaggaaggccattaaaacttaaagtaggaagttccctgccaaaacataagtgtaagcattaagtcagagtttgcactcatttakagggaagtcattttaagattttattgactgactgattaattgattgagacagggtctctgctctgttgcccaggctggagtgtagtggtgccatcagggctcactgcagcctcaacttcctggacttaagtgatcctccagcctcagtaaccctccctccccctgtccactcccagtagctgggactataggcacatgccaacatgcatggc

SEQ ID NO: 216873 - DNA, 596 bp, Homo sapiens
aagctttctctgtatactgacattgcttttaattgtttttttagcgggttatactaatgaactttcccacaagcaatgcaggagaatacagatgtcacctctgtccttcttgtaagcactctttttggtgaagataagggcttgatggtgttagtgctttccaragatagcccctaccctggaaatattcatgcctaacaattggttcaaggaagttaggctttcttttagggagttgaagatgagtgggtggggatctggtagattcagcatacatgagtgtttgtaggaaagttgatttctgtggatggcttctctcctgatgtttccgttatcagtggcctggcccatggatacagcagcctcagtgagacctgactgctgacagctgtcatcacagcctgctgatctgctaacgcggacttatgctaagtagaatagaacaaactctgcttatgtgagaactgcttcagtttgcttcttctggcttctcaattcagcaaaaacagtttataaatcctgaaaagttatcctggaagatattgacagcaaatatgggcacttatttgcattagttctgttgttgctttagctgg

SEQ ID NO: 216874 - DNA, 466 bp, Homo sapiens
tggtgagaagattgctagtcggttattctcaaaatttttccacacttggcaaagaaacactgaaacctcatttcaggcccaaagatacatcaagaagaaccaaggctggtgggttaaagtttcatttcattcttattaaattaaatgttatttcattccattcttactttccacagccaaacttcactcgggcaatgctcaatgattttaagccttgtactcaattagacwtttgtcagcacacagcaagttaaggattgacatggcaaaatactgataataatttgtccaaattttgacatggaaggaaaacagaggaaaaaaaagaatataaaagaatttgaagttatctcagaaggaaacctttcaaataatcaatatacttaatcttaacatgtaccatcatagacttgaatttatctgagagcaaaaaatattgtttctttgacaggaaccccctacctaa

SEQ ID NO: 216875 - DNA, 569 bp, Homo sapiens
tttatttagatgtatacctagtagtaggattgttggattaaatggtggttctatttttagtttttggaggaaactccatactgttttccataatagctgtaccaatgtacattcccacyaacaatgtgtaatagtttccttttcctgacatcatcaccaacactttcaccttttttccagtagccatcctaacaggtgtgaggtgatatttcattgcggtataatttgcatttccctgatcattagcatagttgagtactttttaatacacttactggtcatttgtctgtcttcttttgagaaatgtcaattcagctcctttgcccatttttaaatcaggttatttgtttttttgcagttgagttatttgagttccttatgtatttttggatactaactccttgtcagatttacaaatgttttctctctttgcaaatattttctccattgattgtttcctttactgtgcaaaaaccttttagtttaatgtaatcccatttatttttgcttttgttgcctgtgcttttggggtcatatccaaaaagtcattacccagaccaaagtcaaca

SEQ ID NO: 216876 - DNA, 405 bp, Homo sapiens
tgaattcttgtggttaaagagtttggagaaaaggaatatgacatttaaaaattgccaagtttagcatcagaaatttctgggatagtatagaacaagtcctgaaggcactaagtgcccattactgacatttccatccaagaactcagtaagatcttcaatcccatcccacgtgaactargccaagttgtccaagaacctcagaataagcaaagaccaccaagattatctgacccaattgtctccacttaacagatcagcaaatatagatccagagaggtaaagtaacctggtttggctcacacagctccttagcagctgtcttaaaactcagtccagtgctttcttctctacatgaagtccatcatgtacttttttttcccattaggactttaagaccaggacata

SEQ ID NO: 216877 - DNA, 405 bp, Homo sapiens
tgaattcttgtggttaaagagtttggagaaaaggaatatgacatttaaaaattgccaagtttagcatcagaaatttctgggatagtatagaacaagtcctgaaggcactaagtgcccattactgacatttccatccaagaactcagtaagatcttcaatcccatcccacgtgaactaggccaagttgtccaagaacctcagaataagcaaagaccaccaagattatctgacccaatygtctccacttaacagatcagcaaatatagatccagagaggtaaagtaacctggtttggctcacacagctccttagcagctgtcttaaaactcagtccagtgctttcttctctacatgaagtccatcatgtacttttttttcccattaggactttaagaccaggacata

SEQ ID NO: 216878 - DNA, 586 bp, Homo sapiens
aatgataacatgagatttcaggatgtgaagtaacatattagcaagtgtgttagaaaatataaaatattttacagtatgataacatatcatcagcttgttattcttaatgtgtttccttgtagggcctgactaccatttctgaattttggaatttggtattttttagtaaacgtttgaaaagatgaaatgcttataccaatagcctgtcagtgaaggaaaatttatgtaaaagctaaagaaatgcagttaaatataaaataaatatcttaatgccrtaaaacagtagcatttgcagtcataattcccacagtcagtaacaatatatttattttcaagatgtgtgatgttaatgcaataaaaacattgttgccctatttgaatgaagatttatttgcactgagtataaccctgcagaaatgagtcagagaattggtaaaatttgcaaatccaaacattcaactttgagtgttcatgttttgtgcataatagatctaagcgcatatcaaagaagtgattttgctaaatttattactctttaatcatgttagattaaaattatctttagaattacaatctttaaactatg

SEQ ID NO: 216879 - DNA, 586 bp, Homo sapiens
aatgataacatgagatttcaggatgtgaagtaacatattagcaagtgtgttagaaaatataaaatattttacagtatgataacatatcatcagcttgttattcttaatgtgtttccttgtagggcctgactaccatttctgaattttggaatttggtattttttagtaaacgtttgaaaagatgaaatgcttataccaatagcctgtcagtgaaggaaaatttatgtaaaagctaaagaaatgcagttaaatataaaataaatatcttaatgccgtaaaacagtagcatttgcagtcataattcccacagtcagtaacaatatatttattttcaagatgtgtgatgttaatgcaataaaaacattgttgccctatttgaatgaagatttatttgcactgagtataaccctgcagaaatgagtcagagaattggtaaaatttgcaaatccaaacattcaactttgagtgttcatgttttgtgcataatagatctaarcgcatatcaaagaagtgattttgctaaatttattactctttaatcatgttagattaaaattatctttagaattacaatctttaaactatg

SEQ ID NO: 216880 - DNA, 538 bp, Homo sapiens
cacacaggcagtctaacatcagggcctacacaatacccatcatgccatcctccctgcaaacagtgagccaagagatttttcaatccygttttgtaaacaagctgttaactttagccaacttatccttggtagatgaaacagtgcttatttcatatgagagaaattaacagacactttctcaaaagaaaaaaaaatacaatgaaaaggaatagtgctaaagaggacatgctaatgaagattaaccgaaaggatgtgtctctttgacacatctttccacattcttccatttgtttgactccattgggatttgcccagtccccagtgtaacttttgcttctttggcttactcagcagccttcaaaatgggaaacatgaaaagaagcacaagtgtccgggcagccagctggcagagggaaattccagtcatattgtgcatccccttgtgaactttttgtttcagttgttctttggcacacacaagtcaaaatctcagctggctatctgcttcttgggggatgacaactacacaatatttgaa

SEQ ID NO: 216881 - DNA, 611 bp, Homo sapiens
aggcagataccacagtcctctggatagggaaggggttatccccagcatcattcattcaagaaaggggakgccttgagtaagagaaagagggagaatttgaacaccaggctagatgaaaggagaggtcttggactgagtgtttggacggtggatgtgctaagataacagggactcccaacaccccactatctccacctcctgaggaaggataaggaatttaaaagagatctatagtggacagaaagttggggaaaagttatgtctcggtaaactaaaaaattgagtttcatggtatgtcttacatctgtttcatatttaaatgttcatgctgtgtcaaagacatgctcaaagataccaaaggaagagtcatatttggatcaagcattaaaggaaaatcaggatttccccttccttcttgctctttgggccaaagagaagattttgccaagtggaggggtgaatctagcaggaaaaggtcatatcacctcatgccattgaggaggtccagctttcattgccaaattcagaaaatcagttttgctttctttctttttttttttttttaaaggaaggaaacattctcctctcagcatttcaaaagtatttcccct

SEQ ID NO: 216882 - DNA, 515 bp, Homo sapiens
gttttaaatggctgcaccaaactcagttctataagtgattctgttttttttctcctctataacacctagagacatatgatgttcacaagccaatgagttctgatgcacacattgataataaaggctatggtttatgcaaattttcctccttggggatttgccattgctctgtccctttccttcatactcataaaatgcattataatatgagtaagagtaacattacagagataaccttgactctaccctaatttattaaataatgttcaaagtttggtacctttactatgagtagtaacaaatttcttgtgacacacctcacaattgactttggtattatgtgacatctcagatgactaacactaaattcaactaaatgcagttgtcatgaagcaataaatgtccctgctatcaaatattctgtaaytgtttccttttgataactaaaagtagagctactgaattgaaagacattaattcttaatatagattgctaaacttgctttctagaaaag

SEQ ID NO: 216883 - DNA, 392 bp, Homo sapiens
gagggggacagtcgtggggaaggacattcttattcaagaggacattgcgtcccacagacattaargagcatggtgtgtttagtagcctggtgaccactgaacacagaccatgaggtgggcagtgggtggacctgaggctagaaggtggattgagccagatcgtgacgtgcttccaatgagggatgtgggttttgttctatagatagtttagaaccaacagtttcacttcccacatctaactaaatgccaaggtccgagtggactcaacaaactaatgctcaaatctaatctattttctccaactccattgaccttgccttatttctggctttatttttggaggctcctagttaaatttcccttaatagaatgaggacatctctatctcatcc

SEQ ID NO: 216884 - DNA, 543 bp, Homo sapiens
tgtagaactttattttgctatattgtgttatgggttgcaactttattgcactctgatcagaaaacatattccatataatagctattgtgtagaattttttaagatattttatattaatagcttgatacataaacagtttttatttaataatcctcatttatgcaaaaagcacccttgttccatatttagatgtgaagtttatgtgtgtgtatgtgtatatatatatatatttttttttttttatggttttttgttttttttttgagatggagtctcactctgtctcccaggctggagagcagtggtgccgtctcagttcactgcaacctctgcctcctgggttcaagtgattctcctacttcrgcctcccaagtagctgggattacaagtatgcgccaccacacccagctaatttttgtatttttagtagagacgtggtttcgccatgttggccaggctgttctcaaactcctgacctcaggtgatctgcccaccttggcctgccaaagtgctaggattacaggcatgagccaccatgcccag

SEQ ID NO: 216885 - DNA, 494 bp, Homo sapiens
ctcagaggaataatattaataagcctatcttctttgaccctaatcgtgatgagtaacagtgtaagtaaaaatacaagatggtgtggagaggctgagttattaggaacagatggcaattcatattagaaaggtagctagagcacctcctgggaaggatcgcttattgttggctgtgataaatactatgagaaatggcagatcctctcctggatgtacccttcaagatgatgagttctgggggaggtcacagcctgacaatacactagtagttacatgctgaaatacaactctctcactgcacccgcagagcatcagagaggctgccacacagcacagacacaggtttccaaataatcacctgggggtgggggaggtgggagcrtgtaaataaaacttccccagaacttcattaaaatattcagtggatatgaaaatcaaacaacaatgactacgtagctgcacttgtaaaaacatttttaaccaaatctggagtc

SEQ ID NO: 216886 - DNA, 511 bp, Homo sapiens
ctcatggattaggagaattaacgttgttaaaatgaccacactccccagagcagtctactgattsagtacaatccctgtctaaatatcaatgtcatttttcacagaaatagaaaaaagatcctaaaatgtgtaagaaaccaagtacggctcaaataccaaagtgattctgtgcaaaaagaacaaagttggaggcatcacattacctgacttcaaaatgtatcacaaggctttagtaaccagaacagcaagatattggtataaaaacagaaacacagaccaataaaacagaatggaggacccagaaacaaattcacacctttatggccaactgatttttgacaaagacaccaagaacatacattggggaaagggcaccctcttcaataaatcatgctgggaaaattgcttatctatttgcaggagaatgaaactggacccttatccctcactatatataaaaatcaactcaatatggattaaagactgaaatgtaagccccacatctgcaaaa

SEQ ID NO: 216887 - DNA, 547 bp, Homo sapiens
agttttctgccaatgacgatgtggccctgggcttctctaggtcccactctctggctgccttgcctgcctggggactcaggatgaaggaaccctggagtttacactcaccacacagagctggcaggcacccttggccttccaggcagcaggctggcatggggacttcatccatgtggacatatttgagggccacctgtggtccatggttgagaagggccagggtactgtattgctcctcaacagtgtgcctgtgactgacgcacagccccacaaggtcagcatccacatcaacattcaccagctagaaatctccatggaccagtacaccacatgtactttgaaccgaggagtcctcagctacctggagccacgtgacagtctccttcttggggagctggtgcagaggcctctcrtcacctccaggaacaccgctcaggcctgacaccaggggctgccaatgcctccctgctgggctggctgcatggaagacctcagtgtcaatggctagaggcgggggctgtgggaagccttgctgacgcacaacatg

SEQ ID NO: 216888 - DNA, 543 bp, Homo sapiens
gatctacatcttccagggagaggcagctgagatcagaagggaccagctggaggtgaggagctggaggtggtgagcggggtgtggaccaggtagagggccttcctcccagcctccatgccgggaacacatgtgacttgggctgtacctgtggtggtcccagcttgcgtgtgtgcacgtgcctcagatatgctcccatatatgttgtgttcccaagagtttctggggagcttgctgtacacccatcctcctgggagtggtgtgtgcctctagagctggtgcccactcatgtccatggcatggctgagcatgcagattcctggacgccacccagccctacagaatctctgaagtggagcccgagaatctgcattgcagtcagttccctgggagggcatcacgggtcctgaacttttgggattgctggccgtggagacaggcgctgcctctcagacccctgtgtaccccgctctcttctcagagcccagaccaggaccaggagggtctgtcaagggcttctgctyacccaggaacctcacagagcag

SEQ ID NO: 216889 - DNA, 594 bp, Homo sapiens
tcttcacaatgtaagactcacgcacactagcagttctataataaaacaccaagtagatcagaatgtccaaccttactagagaagaaaagtggaatcattggccatattttcaaattgcattcaacaggaaatttaagttttgaatttttttcacctttatacttccaaagtaatagaattaaaccagaatacgccattctttcaaagcctctagccaggcaaagttttactgtattatttmttgctttcaatggatataaagcagattcctggtaggcacattctgtatacctgcaaagatgcagaactaaacagttccatctgttcaatattaaaccaaaagtcctgtagacctcggatggtgagtgtaatacttcagcactagcccaaaacctcaaatatgaaaagataccaagaacaccactagcaaacaaaactaaactctcggtcaggagcagtagctgacacctgtaatcccagcactttggcaagccgaggtgggaggattacttgaagtcaggagttcaagactagcctgggcagcatagagaattcatatctccacaaaaatttttaaacattagctgggtgtgg

SEQ ID NO: 216890 - DNA, 594 bp, Homo sapiens
tcttcacaatgtaagactcacgcacactagcagttctataataaaacaccaagtagatcagaatgtccaaccttactagagaagaaaagtggaatcattggccatattttcaaattgcattcaacaggaaatttaagttttgaatttttttcacctttatacttccaaagtaatagaattaaaccagaatacgccattctttcaaagcctctagccaggcaaagttttactgtattatttcttgctttcaatggatataaagcagattcctggtaggcacattctgtatacctgcaaagatgcagaactaaacagttccatctgttcaatattaaaccaaaagtcctgtagacctcggatggtgagtgtaatacttcagcactagcccaaaacctcaaatatgaaaagataccaagaacaccactagcaaacaaaactaaactctcggtcaggagcagtagctgacacctgtaatcccagcactttggcaagccgaggtgggaggattacttgaartcaggagttcaagactagcctgggcagcatagagaattcatatctccacaaaaatttttaaacattagctgggtgtgg

SEQ ID NO: 216891 - DNA, 534 bp, Homo sapiens
ggctcatcagagtccacaaaccatatcggtgaagaagatgaataggattcctgtttaacccagagacacctatgttaaatgtttacatacagactaacccaaatatgcaattaaaccacaccactaaatggcaagatgaccatggatttaaacaaaatgtatgggggaaaaggcaacacrtttaaacccatgtgaggagctggacttctgagacagccattctccttgcatagcactgtctgctgctacagctcatagaagtcaacaattttcttcaacactggtaggcagcctctaaatggccctgatcaccctcacctcctgccattcacacccttgtaaaattccacccctggacctagtgactcacttctaacaaagagaatacagcaaaagtaacatcgcttctgaggtgaggctacaaggagactacgatgcctgccttggtcacccttctcctgctctttccattgctccctctgatggaagccagttgccatgtgatgaggtgccctatggagaggcccacgtgac

SEQ ID NO: 216892 - DNA, 534 bp, Homo sapiens
ggctcatcagagtccacaaaccatatcggtgaagaagatgaataggattcctgtttaacccagagacacctatgttaaatgtttacatacagactaacccaaatatgcaattaaaccacaccactaaatggcaagatgaccatggatttaaacaaaatgtatgggggaaaaggcaacacgtttaaacccatgtgaggagctggacttctgaracagccattctccttgcatagcactgtctgctgctacagctcatagaagtcaacaattttcttcaacactggtaggcagcctctaaatggccctgatcaccctcacctcctgccattcacacccttgtaaaattccacccctggacctagtgactcacttctaacaaagagaatacagcaaaagtaacatcgcttctgaggtgaggctacaaggagactacgatgcctgccttggtcacccttctcctgctctttccattgctccctctgatggaagccagttgccatgtgatgaggtgccctatggagaggcccacgtgac

SEQ ID NO: 216893 - DNA, 542 bp, Homo sapiens
ttctctgttactcagagtagttattcagattctacttttaactctgattactgcttctgcctttaccctgggcttccctaggatgcatactgggaatcatgccaagacttttttttttttggtctattctaatctgtattaagctcatttacaactcatccaggtatttttattgaatatggttgtttacttgcaaggtagccattgtacagctgctaatacctgcttgcctgcttggctacaggctctttcattttatgagcatgcacagtctgtctcctacatgsactgaaggaacttgtttaaaagtaaaacagcctctaatctgttttctcaaatttatcagaaaaattagcttcagaaacactagtcactttatgaatagcagcacaaatataatgatattgtgagagggctgttgaatttcacataattaatcgatcaattgaattaagaataagctttaaattgagcaatgagaaatctaaagtattaactgccaaatcacatacagatactgacaaaatgaacagcccacactt

SEQ ID NO: 216894 - DNA, 541 bp, Homo sapiens
ttggtaatgtttatactcaagctctttctccttattattatttttacttttctgtatagatactgataaaatctaaattaaaaaattagaatattttaactgtaataaatggatttcctacaattttttcatttttcctttcaataggcaaaaatagtttgtctttcagctacyagtgtgtcagcacttaaccgtttatagaaattacaaaacacacactttcttcctctttcttagacagagaaaattatatcatccaagcatcgcagtcagggtagctttacttttagtagaatcttcatataggatattcaccaatccttggttaacagccactatcggaagaaaaattggaaggtaagttctggaactatagcccgtgttacccctagggggttgaatttaacacacatagagatggttagtcacaacagcaagaagcaaatgaaacagaatataaaatttcaaattaggtatcttacctttggacttggttgcttgtgatttatgttgtttcattactgtactgtggcatgtatat

SEQ ID NO: 216895 - DNA, 521 bp, Homo sapiens
tttttagttcaacagactaaaactagtacatgacagttactactgggacgtaaaacaaaagaaccagaagtcctcagtgtattttatgaaccgacctagttacaatgtgttgaaactagcagaagcagggggctgtggcatatgactgagaagagtgggagggtctcttactgaggggagtgagagagtctcaatgaagaagtgatttctcatagaagataattaacacttaaacaatagctaaaggtgataaacggtccaaatcaattctgggatgaaagaataatactgttagttacaaagtcataaaagtgcacttatgggctgggagctgtggctcatgcctgtaatcccagcactttgggaggccaaggcaggtgtatcatctcargataggagttcaagaccagcctggccaacatgttgaaaccccatctctactaaaaatataaaattagccaagcatgatgtcacacagctgtaatcccagctattcaagaggctgaggaaggagaatcact

SEQ ID NO: 216896 - DNA, 494 bp, Homo sapiens
tcaacactttgggaggctgaggcaggaaggtcatgaggtcaggagttcaagatcagcccagccaagatggtaaaaactccatctctactaaaaatgcaaaagttagatgggcatgatggcaggctactcaggaggttgaggcagggaattgcttgaacttggtaggccaaacagcaatgagctgagatcacgccaatgcactccagcyttggtgacagagcaagactgtctcaaaataaacaacaacaaaaaaaggcattacgttttagcaagcaagttaatgaaagcataacaaatttgagtaaatactctccttcctgaattccaaaaaacaaagtacagaaatagagaataacaatttcaccttcaaatgattgcaactcagctgggcatgctgattcactcttataatcctagccatttgtgagaccaaaacaggccgatcacctgaggtcaaattttgaggccagcctcgccaatatggtgaaaccaca

SEQ ID NO: 216897 - DNA, 494 bp, Homo sapiens
tcaacactttgggaggctgaggcaggaaggtcatgaggtcaggagttcaagatcagcccagccaagatggtaaaaactccatctctactaaaaatgcaaaagttagatgggcatgatggcaggctactcaggaggttgaggcagggaattgcttgaacttggtaggccaaacagcaatgagctgagatcacgccaatgcactccagccttggtgacagagcaagactgtctcaaaataaacaacaacaaaaaaaggcattacgttttagcaagcaagttaatgaaagcataacaaatttgagtaaatactctccttcytgaattccaaaaaacaaagtacagaaatagagaataacaatttcaccttcaaatgattgcaactcagctgggcatgctgattcactcttataatcctagccatttgtgagaccaaaacaggccgatcacctgaggtcaaattttgaggccagcctcgccaatatggtgaaaccaca

SEQ ID NO: 216898 - DNA, 597 bp, Homo sapiens
aactgacatctttgttagcactaataaagaaggttaggttgagaagtgttctgtccttaccacaattgagccacaattgccaagcctatgtatgctatgagtttgttacctctccagagtactagaaaagataaacgttttagttctgccaaatagctattatcccacaattaggttaatcagaaactaagakaaattataacaagacacaaaccctggaaataacaaatttaacatttaaatagacctgacttcatggtttgctcttgtaatattgagagtaccacaggcagtttgatggtaatgaaaacagacaagttgcaaattatttctttcagctgtactacagtgcagatctcagcccctagcctttgtgatctcaggagagctctgcggcaatttgctctacctggggctaaagactctgggagactttgagggaacactaatccagcaatttgtctgctttaagaacacctacacacactacaacactttcactcctggatgtaatgtgagatttttttcttccaaactttttagcatctgcagtgctattctgaaaggctctgacactaaagtttgtgaatggaaggc

SEQ ID NO: 216899 - DNA, 597 bp, Homo sapiens
aactgacatctttgttagcactaataaagaaggttaggttgagaagtgttctgtccttaccacaattgagccacaattgccaagcctatgtatgctatgagtttgttacctctccagagtactagaaaagataaacgttttagttctgccaaatagctattatcccacaattaggttaatcagaaactaagagaaattataacaagacacaaaccctggaaataacaaatttaacatttaaatagacctgacttcatggtttgctcttgtaatattgagagtaccacaggcagtttgatggtaatgaaaacagacaagttgcaaattatttctttcagctgtactacagtgcmgatctcagcccctagcctttgtgatctcaggagagctctgcggcaatttgctctacctggggctaaagactctgggagactttgagggaacactaatccagcaatttgtctgctttaagaacacctacacacactacaacactttcactcctggatgtaatgtgagatttttttcttccaaactttttagcatctgcagtgctattctgaaaggctctgacactaaagtttgtgaatggaaggc

SEQ ID NO: 216900 - DNA, 611 bp, Homo sapiens
  misc_feature (1)...(611): n = A,T,C or G
taccataatttacagtaaaataatttttggggggaaatataaggtattctgtgatggtgaataagatactcagtaagtccttagatgctcttgttggcaaaagcanagcaggcagagaatgtaaatccaagtccaaatcattatgaaatcagaaaaacagatatctagaagtcaaatgtaattagtcatgccaaatggttggctgataccctgaaatatgttctcatatcaagttaacagagtatgtcattaaggctggcaagttggtcagtggtcaacagtaatagccattttttttctcagttagagcatatcctaatttttgagcccatgtataaactcatttctgctatcatggccattgtgtctatraacccattggctaagctgctctgctgaggaagaagacttacaatcacactggaccatttcggttacttgactgttgagagctgcccctatattaggaaaaatattgttgaacattcacatgggagaaagcattatcatttgctgggtcctttatgagagatgcatctacataaatttctatacaattctgtcagcactctagcaaaccagttcctttcaaaacaataaacatattgcca

SEQ ID NO: 216901 - DNA, 657 bp, Homo sapiens
ctgaggcaaaaacttatgaacaaaacgtgttcaatgcttttctccatctgattagaatgcttattttttccacaagtaacatagctcacaataatttatctcttatggaatctagataattataacatttactataagcctcctttgagattttttttttgttaaaaaaatattttaaagacaaggtctcactatgttgcccaggctggtctccaactccaggctcaagctgtccttccacctcagcctctcaaatagcagggaataatacaggcttgcaccaccatgcccagtgggatttgcttacttaagtttctttgaaagtttagaacatyattactagaaatgttaggaataaaagaacgcattgataataatcccacttaagctttaatgtccaaaaagctaaattaattcagagaaaggaattgtgagttgcacatactatactatcacagcaaaaaaaaaaaaaaaaaaaaatcgtcaaattacccacaacttagtaatgtgatactcaccgactctctgggtaagggatttggacagaacatagaagagaagactgtctttgcatcataatgtctcaggcctcatctgaaagacccaaagggtggggactggaatcatctgaaggctcattcattcacttatctggaa

SEQ ID NO: 216902 - DNA, 627 bp, Homo sapiens
gattcacatcaattcaaggtgaagaggcggaagaagatattctacagaaatggaaaccaaaagtgagcagaagtagctgttttatatcaaataaaacagactttaaagcaacaacagttaaaataaaaagacaaagaaggacattatataatgataaaagaatcaatccaccaagaagataytatcatcctaaatgtatattcacctaacactttaggtcccagattcataaaacaattactactagaataagaaatgagatagacagcaacacattactagtagggcacttcaatactccattgacagcactagacagatcatcaagacaaaaaatcaacaaagaaacaaaggattaatctacattctagaacaaatgaacttaacaggtatttacaaaatattctacccaaaactgcagagtatacattcttctaatcaacatgtgtaacattctccaacacatactgtgtgaaaggccacaaaataagtctcaataaatttaagaatatagaaatcatatcaaataccttctcagatcacagtggaatcaatctagaaatcaactccaaaggaatacccaaaactatacaaatacatagaaattaaacaatctgctccagaatg

SEQ ID NO: 216903 - DNA, 627 bp, Homo sapiens
gattcacatcaattcaaggtgaagaggcggaagaagatattctacagaaatggaaaccaaaagtgagcagaagtagctgttttatatcaaataaaacagactttaaagcaacaacagttaaaataaaaagacaaagaaggacattatataatgataaaagaatcaatccaccaagaagatattatcatcctaaatgtatattcacctaacactttaggtcccagattcataaaacaattactactagaataagaaatgagatagacagcaacacattamtagtagggcacttcaatactccattgacagcactagacagatcatcaagacaaaaaatcaacaaagaaacaaaggattaatctacattctagaacaaatgaacttaacaggtatttacaaaatattctacccaaaactgcagagtatacattcttctaatcaacatgtgtaacattctccaacacatactgtgtgaaaggccacaaaataagtctcaataaatttaagaatatagaaatcatatcaaataccttctcagatcacagtggaatcaatctagaaatcaactccaaaggaatacccaaaactatacaaatacatagaaattaaacaatctgctccagaatg

SEQ ID NO: 216904 - DNA, 627 bp, Homo sapiens
gattcacatcaattcaaggtgaagaggcggaagaagatattctacagaaatggaaaccaaaagtgagcagaagtagctgttttatatcaaataaaacagactttaaagcaacaacagttaaaataaaaagacaaagaaggacattatataatgataaaagaatcaatccaccaagaagatattatcatcctaaatgtatattcacctaacactttaggtcccagattcataaaacaattactactagaataagaaatgagatagacagcaacacattactagtagggcacttcaatactccattgacagcactagacagatcatcaagacaaaaaatcaacaaagaaacaaaggattaatctacattctagaacaaatgaacttaacaggtatttacaaaatattctacccaaaactgcagagtatacattcttctaatcaacatrtgtaacattctccaacacatactgtgtgaaaggccacaaaataagtctcaataaatttaagaatatagaaatcatatcaaataccttctcagatcacagtggaatcaatctagaaatcaactccaaaggaatacccaaaactatacaaatacatagaaattaaacaatctgctccagaatg

SEQ ID NO: 216905 - DNA, 627 bp, Homo sapiens
gattcacatcaattcaaggtgaagaggcggaagaagatattctacagaaatggaaaccaaaagtgagcagaagtagctgttttatatcaaataaaacagactttaaagcaacaacagttaaaataaaaagacaaagaaggacattatataatgataaaagaatcaatccaccaagaagatattatcatcctaaatgtatattcacctaacactttaggtcccagattcataaaacaattactactagaataagaaatgagatagacagcaacacattactagtagggcacttcaatactccattgacagcactagacagatcatcaagacaaaaaatcaacaaagaaacaaaggattaatctacattctagaacaaatgaacttaacaggtatttacaaaatattctacccaaaactgcagagtatacattcttctaatcaacatgtgtaacattctccaacacatactgtgtgaaaggccacaaaataagtctcaataaatttaagaatatrgaaatcatatcaaataccttctcagatcacagtggaatcaatctagaaatcaactccaaaggaatacccaaaactatacaaatacatagaaattaaacaatctgctccagaatg

SEQ ID NO: 216906 - DNA, 537 bp, Homo sapiens
tcaacttattccagaacattagtttattgatcttcttaaaatttttccaccattactatgactcagttatcctttgttctcttctttgtgattttctctccaatcccaccctgctaccagataacacatttggttacaccataattcccagagcctagtctctcactcagttcaatagtacctgcaatgagatgtcacttgataggaacataacctccctagtcatgaaactgcctctggcaatatccttgaccatggactataactgaagctgtctttgttagaaggaggaatagacaaataaatatttcaatataaacacrcagatgtatatatggatatagatgtctattggttatcatttttataaatttacataattttcaaaatgtctgaaggagtatataccaaagtaagaaaacttttgaagagaactctagaattaaagattttagtcatttattaattgcaaaattaaaaaaatcaaaagagcaattcctctgccctctgtcatgaagaattagaggaaatttctat

SEQ ID NO: 216907 - DNA, 406 bp, Homo sapiens
tagtatccacttctactgagctagagattgcgtgatctcagataaatgaaattcctgctctttggaactttatartaatgaatagatgtcattgataaggatgtacagtggactttaaatttcccatgtatagattatctgttcagaagattatttttggcaatttttaattctttgacttttctccattattagcacaatcccagctgtttccctctgccacttagctggtgtgtgcttagagaatacaaactaactttaatactattataagcaaaatatggttaggaaggcagctctgtggctaaaccttgagtaattcagaggggaccataatttacccgcttctccttttaccatccagggaacagtcactgaggataagaacaatgcctcccatgttgtg

SEQ ID NO: 216908 - DNA, 547 bp, Homo sapiens
acggtactcttttaggtctgccatccacagacagcttaagtgttaaccagctcagtgactccttggtacctgggcccttgtccagtgtcccagaagaatagggtcacacacgacttgaaggatgaatgcaggggttttattgagtggtggaggtggctcttagcaggatggatagggagttggaaggggggattgagtgggaagatgatcttcccctggagtttggccgtccagtggctgaactcctctctgactgccccaagtcgaattcctctcggtgttcagacattccttctcttctctctttttctgctgtgctgttctgctgtttgtctgcttgtctcctcatctgctgcttctggagcctggrgtttgaggtttatatggggacaggatagacggcatggcaggccaaaaggcaaccttttgggcacaaaaaccggcatgcatgtcctcacttaggaccacgggtatccaggcctgaggggaggcctttgctgcagaaccaccctcttctacctagtatttccctgtctcctgtccatat

SEQ ID NO: 216909 - DNA, 547 bp, Homo sapiens
acggtactcttttaggtctgccatccacagacagcttaagtgttaaccagctcagtgactccttggtacctgggcccttgtccagtgtcccagaagaatagggtcacacacgacttgaaggatgaatgcaggggttttattgagtggtggaggtggctcttagcaggatggatagggagttggaaggggggattgagtgggaagatgatcttcccctggagtttggccgtccagtggctgaactcctctctgactgccccaagtcgaattcctctcggtgttcagacattccttctcttctctctttttctgctgtgctgttctgctgtttgtctgcttgtctcctcatctgctgcttctggagcctggagtttgaggtttatatggggacaggatagacggcatggcaggccaaaaggcaaccttttgggcacaaaaaccggcatgcatgtcctcacttaggaccacgggtatccaggcctgaggggaggcctttgctgcrgaaccaccctcttctacctagtatttccctgtctcctgtccatat

SEQ ID NO: 216910 - DNA, 416 bp, Homo sapiens
ctagaaccataggagaatatatttctgttgtgtaagccacccagttggtggtacttagttacagtagctctaggaaactaaaacaccatccaagcaataaccctgctgttagtwcatttgttgaattagtcagcaaccacttattaggtgtccactgctggctccctaggctaagtgctaggaatacagagatgaatgacgtggtttctgcttttgaggaactcacaatcccaggaaagcggggtcgggggcagggggcagacacaccagcagccaggactatccagagaaatgcatggtaaaagacagaagtaggtaccagacactataaaagtaaacacatgaacttaatgcctaaggcaattgagaaagtcttgatggaggtgacacttaatctaaggaacaagtaagaattc

SEQ ID NO: 216911 - DNA, 607 bp, Homo sapiens
tgggttaaaatttacttggcatttaaaaaaatacgattttgtaataaaaatgtgcatactaagtatattatgtcttgcattttcaaaggaagatgtgctgmagtataagtgaggatttttatttttaataaaagcaaaacactgataaattcacagttatatccgtgtactggttcattaatgctttgcttctattttgcaatatatccatacaagtggaagaaaatatagaatatgctttctaattaaaatactttatctcattgtatagtttgctatgggtaaataacaattgtttatctgaaatataattatcttagctatatacaaataagattgttattgacccaaagaaataccttgtattaagctttagactttgaaaacattttaaaactatgtcattctatgatgttattatttagacaattctattatttcacaaaagcacctaacttgccaatttaagatcccataagaatcataatttacaattgctcatcaaaataaatatttcactctctacacaggactttataaatgataatgagttatataaaattattgaaataagtgaaattatgcttgtattcattatcaatttatg

SEQ ID NO: 216912 - DNA, 607 bp, Homo sapiens
tgggttaaaatttacttggcatttaaaaaaatacgattttgtaataaaaatgtgcatactaagtatattatgtcttgcattttcaaaggaagatgtgctgaagtataagtgaggatttttatttttaataaaagcaaaacactgataaattcacagttatatccgtgtactggttcattaatgctttgcttctattttgcaatatatccatacaagtggaagaaaatatagaatatgctttctaattaaaatactttatctcattgtatagtttgctatgggtaaataacaattgtttatctgaaatataattatcttagctatatacaaataagattgttattgacccaaagaaataccttgtattaagctttagactttgaaaacattttaaaactatgtcattctatgatgttattatttagacaattctattatttcacaaaagcacctaacttgccaatttaagatcccataagaatcataatttacaattgctcatcaaaataaatatttcactctctacacaggaytttataaatgataatgagttatataaaattattgaaataagtgaaattatgcttgtattcattatcaatttatg

SEQ ID NO: 216913 - DNA, 608 bp, Homo sapiens
ttgctttctaatacaacacagagcaactattaaatgttttaaaaattgaacttctgaagttctgaaataattatgaaactaggttcaaaataaataaaatgatgtatttcataacaaattcatatgaaaaatacatcttctaaatgttagacttctctgataaagcatcatgttattaacaattagttttaactgaagtggatgggttactgacaagctttggagtttagactccataaaagaatcatatttgaacatggctttttatcacatggagttctatataacatggctataatcagagtttcagtcttctggaaataattatgtattgtagatgtctgatgtaatacagttgctagttcatttcccaaatatcaccattaaatgggtgattccataaaacctctccgcgtggcaacatgattgagaatactttatttccytttgaggtaaggcgttttttctctggtttatattaataccaactatatgctcaactttgaaaaggatccaaaaaagattttatgtcagacttcgtttaattcaattctatgaataacctgggctaaatatactatatgcttacattttaaaatatcaagtca

SEQ ID NO: 216914 - DNA, 602 bp, Homo sapiens
atgatgtgtgcaattggagccatccataggaaagtgggactgttggagagctataagcaggtcaatggccttacaccttaggttttaatgttattgttattacttataaaatgagtgaatgaataaatgagtattgggtgtttggaatgaatataaacaggcacacaggtccactcaccactccccaacctagcacacacccctttaaaaacccttgcagttaactccattttgcaatgattacacaaagaaccttcagtttagatggacaaatacagtcctacacrcatgtgagtttgatttaatcacagattaagtatgaagaaacattttaaaaacatagctactatttagtgggtccaactatgtgtcaggagtattaaacatgttatttcatttaatcctcaggaagatgctttagagaggctattaatgcctactgtacataggagaatatagaagaatggaaagattcagcaatttattggagtctcaaaatcagaaaagtagttaagatttcttcttgaagcctgggttcccattagacgacatcctctcctctcaattgcccccaaaaaaactgcttctgagtttctggagtc

SEQ ID NO: 216915 - DNA, 532 bp, Homo sapiens
tttctacttgaattctcatttacttgttcaatgcaaaaattatctttgtaaaagagaaaaacacatcttcaagtgtcagctatattaaattaaagaactgtttacccttcgtaagaaaagcgtatgtatctaaataggcatcttttaccgtttgcatagtagattggawattagcatttttgttcattttcccatgtatgcacagtgcctggaagagtaatactccatgcgtatcagatcagccagcctacaatttttgtgcaatatattatttggcaatctaaaatttgtaatttgcatgaaattgcttaattaaaatacagtcactcagggtattaatttctctgtctggcagttcaatgtactaaaggcggactacagaaaatgtgaaatcctgtcagatgtaacagtaaaatattaacaaaaatattccacttctggcaacaaagtgacagagcgataatgcttttgccctgattccaggttcaaatatgagcttaggttgacattgaaactgactaggaaatttaca

SEQ ID NO: 216916 - DNA, 519 bp, Homo sapiens
atcgtactatagttttgaggatgttatcaatggaaaatttggtaaagggtatacaggatctctctatccttacaactaaatatgtatctacaattacctctaaataaaatgtttaattttaaaaagcttatgccttacagtagcatacaaaatgtcattctgagcatttatakttatatgtttataatattgtactaatatattttgcgtatagtctttttttaagaatgcaatttcaaaataatctactaaaaagaaatatgagaaatacaagaaatgtaagggaaaaattcaactgaatacattatggtggggccaattctgaattctctaatctattacatacatccctttggcaatatcacagagtcttgattactgttgctatacagtaagtctttaaatgaaatgttatgagtctttcaactttattcttccagttattcaccatatttttggcttcgttctttttccttttaaataaatttgaggatcagcttgcctatatctattgttaaa

SEQ ID NO: 216917 - DNA, 579 bp, Homo sapiens
tgagtttggccaatttttcccttccacattctgctatgtgaagatacagcattcctcccctctgaaccatacagccatcaagatatcatcttggaagcagagagcagacctcatcaaacaccaaacctgtccgtgccttgattgtggactttccagcctccagaactctaagaaaattaatttcttttcttgatatattattcattcttgaatattttgttatagcagcataaatggactaagacagcgtacttaaaatagaaattatttggaagtttgcatgtctraaaatgtctttattttacatctttagaatgtgaattgttgactttgtggggagttctctgcttttcttaatcttaagatcagtcctgtaaaggtttggccagctcctgtcctatcgccatgttttgattcattggctcttactttttactatcaaaccctaaagagtcagttttaaggaaaacaaatttggaagatcagatctgccttcatattttaaattaagatagtgatgtgttcttttccctcaacaaaaaaaaacctttataaaaattttcaccagagttttatacc

SEQ ID NO: 216918 - DNA, 645 bp, Homo sapiens
gttcctggcacaatttgtctacctaactttttccctaagagtgttttctttttcctctctcaccctcttaataagaatgttaagatcctgaagttttataaaagacaacgtgtcttagtattggcatccttgtatggtggaatatctctaggctggagaaatgtattctattcaaattccagccctcttttattttggcatcaaaaggcatttgtgttttctgcagcaaaaatgaaaaatgataggaccacctttttactgttttctcctactaggcagagggttcactcttgagggcacacatatttttttttttccttccaataatgccattttattttttaataaacacgaagtgaatgttttctgagaggagaaagacatggcctcagagaattctaatactractaggttgtttatcttctaaccgaaaatgtatttattgtttgctgcaccttcactcaacttgcagtctaagtttgagagggggagagagacagagagagagagaattgattaaggaagaagataggaaactacaggaaggaaagtgttttaggtcatcggttcttaacagccatcttttctgccatatagaaatcataaaggaaataatttaaaattggcaaacaatgtcaatcttt

SEQ ID NO: 216919 - DNA, 586 bp, Homo sapiens
ttattgtttgctgcaccttcactcaacttgcagtctaagtttgagagggggagagagacagagagagagagaattgattaaggaagaagataggaaactacaggaaggaaagtgttttaggtcatcggttcttaacagccatcttttctgccatatagaaatcataaaggaaataatttaaaattggcaaacartgtcaatctttctaaaagcttattatgttataaagaaagtcaacctatatatgaataaatggagttaaagaagaaaactcaaccttagttttcttcctctgtctttatcctctttatcatctcctaacattggactactttaaactttcttgaaaattccttctctttgattctctgacctaagtaaagttacctggggatgacctctgtttatcctgccttcttggaaatgtagccatctcctaaagttttgtccttaaaactcttctcttctctttctgcactcttctattcaaaaaacacaatcatccctgttggctcaattatcacacttaaggaaatttactcctagatctgtctcttcgttcctgattacaattccctagttgcaa

SEQ ID NO: 216920 - DNA, 598 bp, Homo sapiens
tcaaattaggataatcaaagaatttcctctacacctagggagggaaccttcataatgactgtcatagtgattttgtaattgctatggaccagcaactattgtgtgtctcttgtcctttccaaatggggtattaattatgattttttaatccctgctccacaattctatattggatgggtaggggagaggaaaagtagaaaacttgttgcccatgaaaaacatctagacttgatgaacagaactgtccattagctagagatcctggttggatttagagttgaggaggggatgtgtgatccatatttgaaaggaattatttaacggatgtgataagaagatagactctggcaagagtagcctatgtgctcactaaataattttccttttccttctcatcacacagtttaactgcattttctaacatcattcacagttagtcatggacatatcacagctttggctattgaaatttggtagacatgggtatatatttccagcatctaatatagttttcaagatagtagatgctcaayagaaaataatgaacactttcctctcctctcacacttcttttcaatttagtcattgtataaatact

SEQ ID NO: 216921 - DNA, 614 bp, Homo sapiens
tttttagacatgaccagttgcttaaacacactattgatcattataatgaaagcccgagtcttttactaacacacaaagtataatcattctggcttacgaattgtctgtgacaaggcccttccctctcttttttttatggtctttaaacatcaccttcctacacttttctgtatatagactaattaagaaaataacattacatttgattttcctatttttatccraagtgattatctttaacaaattctttaaattattctgctttttctatcagtgattaatgtattgtgcctggttcctcttgcctgctaattgttttatacaagtggatgctaatataagcaataaggttttattaatgtcccaatcaaatatattgaagcatatatgtgttaaatacacgagagctaaataggtgatctttcttaaaagaacattaggttttgaacattgatccatatgtattaattaatgtctctttcatagcctttctgtaagatgattaaaattgtttatattttattatgtaaaacagtacatttattaacatacagatttattcacaaagtatgagaaaccacactacctgaagacacaagcttgaatatagttag

SEQ ID NO: 216922 - DNA, 614 bp, Homo sapiens
tttttagacatgaccagttgcttaaacacactattgatcattataatgaaagcccgagtcttttactaacacacaaagtataatcattctggcttacgaattgtctgtgacaaggcccttccctctcttttttttatggtctttaaacatcaccttcctacacttttctgtatatagactaattaagaaaataacattacatttgattttcctatttttatccgaagtgattatctttaacaaattctttaaattattctgctttttctatcagtgattaatgtattgtgcctggttcctcttgcctgctaattgttttatacaagtggatgctaatataagcaataaggttttattaatgtcccaatcaaatatattgaagcatatatgtgttaaatacacgagagctaaataggtgatctttcttaaaagaacattaggttttgaacattgatccatatgtattaattaatgtctctttcatagcctttctgtaagatgattaaaattgtttatattttaytatgtaaaacagtacatttattaacatacagatttattcacaaagtatgagaaaccacactacctgaagacacaagcttgaatatagttag

SEQ ID NO: 216923 - DNA, 447 bp, Homo sapiens
atctagcaaaccaggagaagaatcgggagtaatactaggtctttgaatctgatctcagccatggactgacagcaaaccatttaagaggcagcatcaactcactgcatcctctgagggatagaatctmtagaagctgctctctggtgcactacactctaggtagtctgtcttaattctattctaacatcaagagtctatccaaacaaggagggctctgaggaaacctgatcaagactgaacaaggattagaaacgtctctacccattattgaattaaactactgtgtcagagtataatgcaaccctgacaggaatgtcgagtctgggtttgcccacgcttacctatacaatagagtatagagcaaggcgtggctaaaatacaagcacagcaaggggtataaatcctttcaatttttcaaacccaataccatgatttccatcagttttt

SEQ ID NO: 216924 - DNA, 415 bp, Homo sapiens
ttcccacatcccctagctcataagggcataactataaagacaatttgaattttaagagtgcagttattcaaatcgaggagagtttctaagaaataatcttttcattaatgataatcttcaaacactagtaacttatctttctaatayattaatattaatgataaaatataggataaaatattaaaagtgagaaggttttctaataagaatatcagtaacttcttcaaataccagtaacttctctttctaatatattaatattaatataatgataaaatacaggataaaagattaaaaatgaggaagtctccgaataagaatatccaaaagatgtgtattattatatgtgtttgcatatctcatgggaacttactataggtaacaggaaaacttcctttacaacgaagataatagg

SEQ ID NO: 216925 - DNA, 525 bp, Homo sapiens
catgtaaatttgataattttgagagatcttaatgaatgtctattctacaaagatctctggttaatgagtcattaagaggtaacccacactaggcttcacagcatgctcgtcttaaacttcgtgaattttccacagtccagaggctggtaatattcctcagatatttccagcacattgagaacagaaccatctgtcagtgagattgccattaaccaagctcatgaaactgatatataatagtctgaattccattttattgacttgcaataaaaaataacgatcttagagacaggaatayctaaatctgcataactagccaactacttattttagatggatctaaacaggaagccaattcataatcaaaaaataatttgaaaagcatgaaattacaactgagagttaaaattaagggaattcattaaaaggcagttttccaacactctctgaaagccctttggtttctgttaaagcattcaatatgggagattttatttctgatttttaattgcgaggtgaaatgag

SEQ ID NO: 216926 - DNA, 460 bp, Homo sapiens
cagttttccaacactctctgaaagccctttggtttctgttaaagcattcaatatgggagattttatttctgatttttaattgcgaggtgaaatgagagcctacaatcttactttcaaattctcggaagaagcctcacatcagtccccagctactaaccatgactttcattttttcactgtaatttgcactgtattttaattaataaccctacacctgtcttggaatgtgttttctaccttctttagcatgagcaaaaattgccccacactattattactgaagtcagacagttatcttagttatgtcccaatatctttacacagaaaacaattaaggaagccagaaagagaaatactatgccatatcaggatcctattcctgatgttttacagagaatacaagtcatttatataaaaatgcaatgygaatggggtcagttacttaaaagaaattattgtt

SEQ ID NO: 216927 - DNA, 601 bp, Homo sapiens
gactttcattttttcactgtaatttgcactgtattttaattaataaccctacacctgtcttggaatgtgttttctaccttctttagcatgagcaaaaattgccccacactattattactgaagtcagacagttatcttagttatgtcccaatatctttacacagaaaacaattaaggaagccagaaagagaaatactatgccatatcaggatcctattcctgatgttttacagagaatacaagtcatttatataaaaatgcaatgtgaatggggtcagttacttaaaagaaattattgtttctgctgtcatgtgttctacttggtggctggaaatgataaatactaatgttctgagatagacttataagcattcaacttacgttaatagcatcagtaccattaacttaccctctactaattagaaacgtatcatttcaaacagattaattgatgttcattrtaattttaatgaaagtctaaatttaaatattctacacttttaatttttcataatcccaaacataatccacattagcaaggctctactactgtttaaaccacaattgcattctgttatccagaattaaactggaaaacaca

SEQ ID NO: 216928 - DNA, 626 bp, Homo sapiens
gatgatttattcaactttaatcggctcaatattaatttcatgaattttacacctagaggattctgattgctgtagttcttaccatgaataaattttgctcttgaaaactggtaattaattcttacaccttgaaagactgaaaaacctaggcctctgaatacatttacatggaaattaacattcttttctactgtttctttgaaatttctttagagattacctttcctcrttctgttcagactgtatcaaacatccattaatatagttcctttttctttatattctcaaaggcttggggtttagagaaacttcaagtgtgcaaaaatctcaaaactaaggacaagtcaatcaatgttaactatgaactaatttctttaatcttgagaatggtgttgaatgctgtattgttaggcaatactgacataggcatctaattcacatatagctcttccctttatatagcatttttttgaacatccaaaggcagttttaataagggaacttatgtataatatagattatattttgatatgaaaataaaatctggtaggtaatgctaaaatataaatgaatgttataaaactattccaatgagacattcccaacagctctctattttttccttc

SEQ ID NO: 216929 - DNA, 563 bp, Homo sapiens
caaaacagcatggcattggtataaaaatacagacaaaaaccaatggaaaagaatagaaaacccagaaataagaccacacacctacaactatctgatcttcaacaaacttgacaaaaacaagcaatggggaaaggattccctactcaataaatgatgctgggataactggctagccatgtgcagaagactgaaaatggacctctttcttactccatatacaaaaattaactcaagatggattaaagacttacttaaatgtaaaagccaaaactataaaagctctggaaaacatcttagacaataccattctggccataggcacaggcaaagatttcatgatgaggacaccaaaaacaattgcatcaaaagcaaaatttgacaaatgggacctaattaaagagcttctgtgcagcaaaactgtcatcagattaaacagacaacctacagaatgggagaaaattttttgtaaactatrtatctaacaaaggtctaatattcagcatccataaagaactttaacgaatttacaagaaaaaaaagtcctattaaaaagtgggcaaagg

SEQ ID NO: 216930 - DNA, 516 bp, Homo sapiens
atactcaagttgagtatatcacagcaactcaagattagtttaatatatgataatctattgatataattcactgcttttgtagcttaaggccaaaaatgttatataaatatttaatagatgaagttggcatttgacaaaaaaagcccctataatttccaagcctcttagcaaactaggaacagaaggaaacttcttcaatgtgataagtgacaatctacaaaaattcgcatttaatatatttaacagtgaaatattagatattttccttctaagatgatgtaaaagggaaagatgtctgacctagtgacacctattgaacaatctatcagaattgacaatattttgctaaagagaaataagaaaaktatagcaataaatgcagaaaaataataaagatctcaaatcaatgcctttattattcacctaaagaaactagtaaaagaaaacaaaccccaacttatgcagaagaaagcaaaaataaagatcagtgtggtaaacaacaaaggggaaaacaag

SEQ ID NO: 216931 - DNA, 533 bp, Homo sapiens
tgatgaagagcctgactcccaaaaacacgtgtatttttttttttctctgttagcaagagaactatgcagaaagtaaagtaactggagttagagcagaacagttattatgtgcttctctccccaggtgatttagtaagttatttattttacaatcaatttaccctttacctatgagctgaaagtctattttacaattaccacarattgagcaggtcatctctgaaattgttatttttggcccccagatttggcctcctgaaatccttgacatttcccaaatacacttccaagagcgaaggagaattggtcaattgactctgaggtataaacattaaactaatagtaaggtcacttggaataagttctatatcttagtcagttaactttgtgagccccttaaaatccagataacattgtacatctttccagagtgcagtgtatatttggtaaaaaggtaaagatgagtgaaagtggtctgtgttatggttaggggagtggcacttcatataggtgtggctccgggcgtcgcggcc

SEQ ID NO: 216932 - DNA, 533 bp, Homo sapiens
tgatgaagagcctgactcccaaaaacacgtgtatttttttttttctctgttagcaagagaactatgcagaaagtaaagtaactggagttagagcagaacagttattatgtgcttctctccccaggtgatttagtaagttatttattttacaatcaatttaccctttacctatgagctgaaagtctattttacaattaccacagattgagcaggtcatctctgaaattgttatttttggcccccagatttggcctcctgaaatccttgacatttcccaaatacacttccaagagcgaaggagaattggtcaattgactctgaggtataaacattaaactaatagtaaggtcacttggaataagttctatatcttagtcagttaactttgtgagccccttaaaatccagataacattgtacatctttccagagtgcagtgtatatttggtaaaaaggtaaagatgagtgaaagtggtctgtrttatggttaggggagtggcacttcatataggtgtggctccgggcgtcgcggcc

SEQ ID NO: 216933 - DNA, 619 bp, Homo sapiens
attttccctgcccaaactagccttttcaacgttttataagattcaaagatttgatctctaattttcacatttacccaaaattattttgttcaatgaagggtccttcttgtatgtagaatgtcagagagacatcactcccactgaggatatcacctggttctgtttccacaagctgtgctttacaaggcrtcaaaagcaactgtgtgtgtcccatttcctctgggcaccaaaactatcctaatgaattaatctattgtaaaccattgtttgaaaaactcttatgcctgtgtcttactcagcctgaaccctttccttggaataacctttcgtacccctataatctggtttttggaccattgagtacaggttcatgttccagggctcagttgagacatcacagccaccaataaggtctgttttgagtccatttttctaagggaggattgatcactctaccctctaggcactcactgggtagctaatgcttctatcatagaccttaaatctctctcacactatcagttgatcttctaactctcttcaagaagctatacaacactcaaaagtgaaaaacatatttatgtcccaagtctctatcactgtacttgacactgtaggt

SEQ ID NO: 216934 - DNA, 445 bp, Homo sapiens
agtatacaaacaaaccctctggcctcctgaaagctacattstattgagagataaagacaatcaataagtgaataaactacatgtatattagataactagaaataataagaaaaaaggcaagagacagagataatgcgttgatgtcttagatagcttatcaagagaatttattgtaaagatttcaacgaaatcatgcagaaatctgggagtggggggtgacgttcaagacaaagagaatatcagttgcaaagacctgaggatagagcatgcctaagcatctcacaataactgaaatggagtgatggtgtgttttgggagccccagccaaattggggttccattaccagagcagctagcaactctgccctagtgggaaatgaaaaagtactgaagacagaatttaataatatattatttaatatatatggggaaagtaggaatacag

SEQ ID NO: 216935 - DNA, 445 bp, Homo sapiens
agtatacaaacaaaccctctggcctcctgaaagctacattctattgagagataaagacaatcaataagtgaataaactacatgtatattagataactagaaataataagaaaaaaggcaagagacagagataatgcgttgatgtcttagatagcttatcaagagaatttattgtaaagatttcaacgaaatcatgcagaaatctgggagtggggggtgacgttcaagacaaagagaatatcagttgcaaagacctgaggatagagcatgcctaagcatctcacaataactgaartggagtgatggtgtgttttgggagccccagccaaattggggttccattaccagagcagctagcaactctgccctagtgggaaatgaaaaagtactgaagacagaatttaataatatattatttaatatatatggggaaagtaggaatacag

SEQ ID NO: 216936 - DNA, 445 bp, Homo sapiens
agtatacaaacaaaccctctggcctcctgaaagctacattctattgagagataaagacaatcaataagtgaataaactacatgtatattagataactagaaataataagaaaaaaggcaagagacagagataatgcgttgatgtcttagatagcttatcaagagaatttattgtaaagatttcaacgaaatcatgcagaaatctgggagtggggggtgacgttcaagacaaagagaatatcagttgcaaagacctgaggatagagcatgcctaagcatctcacaataactgaaatggagtgatggtgtgttttgggagccccagccaaattggggttccrttaccagagcagctagcaactctgccctagtgggaaatgaaaaagtactgaagacagaatttaataatatattatttaatatatatggggaaagtaggaatacag

SEQ ID NO: 216937 - DNA, 331 bp, Homo sapiens
tcatttctatgtctatatttcctttttttccccaagacacttttaaagagtgtattctattatattaaagtcaaggaagaagaattatttgtagttaacagagaacaaaagccagatatagaacttattaattagaatgctggccacaggtcagctcagaggcgttcatagcaaattccttaattcaaccagggtctgagccgcgtctctggtgggccaggtgagctaaatctgtgtataatacagttaaccccctctaatttcgtrcttacctactgcatcggccacttagtcatcacgtggagaacaaaaccgagagatttagatgaat

SEQ ID NO: 216938 - DNA, 430 bp, Homo sapiens
gaattcctgcatagtccctcttgcgttatttaattacttgccatccacaggagcctaagaaggtgtggtttgtgatttttsctcatgatcagttgttttctcctgtgcttggtaatttggactatgagaacaacttcaggaggaaaacgtgggaactagaactcgtgtgtggcctgggaaagagcatgttcctccaaaaatagttctatatttgcctctgtcaggggctccaggagtgaatccacataggaagtatatatctgaatcccaaattcacctgcagcacagacctgcaattacacattccctgcagagacacagctgcttcatccagagctcaggtcaagacagacaaagttcttattgcccccatgttaatattgggatcttttttctaattcaacttttagaggctctctaaggttccaac

SEQ ID NO: 216939 - DNA, 430 bp, Homo sapiens
gaattcctgcatagtccctcttgcgttatttaattacttgccatccacaggagcctaagaaggtgtggtttgtgatttttcctcatgatcagttgttttctcctgtgcttggtaatttggactatgagaacaacttcaggaggaaaacgtgggaactagaactcgtgtgtggcctgggaaagagcatgttcctccaaaaatagttctatatttgcctctgtcaggggctccaggagtgaatccacataggaagtatatatctgaatcccaaattcacctgcagcacagacctgcaattacacattccctgcagagacacagctgcttcatccagagctcaggtcaagacagacaaagttcttattgyccccatgttaatattgggatcttttttctaattcaacttttagaggctctctaaggttccaac

SEQ ID NO: 216940 - DNA, 382 bp, Homo sapiens
attcagctcaaactagtcctgaattacattttcacagccaagcacagtggctcacgcctgtaatcccagcactttgagaggccgaggcaggtggatcacctgaggttgggagttcgagaccagcttgaccaacatgragaaaccccgtctgtactaaaaatacaaaattagccgggcatggtggcgcatgcctataatcccagctacttgggaggctgaggcaggagaattgcttgaacccaggaggcggaggttgtagtcgagatcacaccattgcactccagcctgggcgaccaagagcaagactccgtctcaaaaaaaaaaaaaaaaaataagtttttgcaagtgttcaatggatgaacatttgatgtcagaaggctga

SEQ ID NO: 216941 - DNA, 289 bp, Homo sapiens
caatgcggtaagcaaccctccggctgtactttgggtaggtagcaagatgaaactgttagaggttctgttgyaggattctaggtcaaaagtgaggcaagtctgaatcaacccagtatggttggagagcaggggagaagaggacagagttatcagtcagcaaggaggaagggccaacagggctgagtgtgattactgagaggaggaaaagtccagaataactccccactttcttaagagtgggatcacaagagaaagagccattggagaaaagaaaatatcaaaaaaagaa

SEQ ID NO: 216942 - DNA, 560 bp, Homo sapiens
ccctccggctgtactttgggtaggtagcaagatgaaactgttagaggttctgttgcaggattctmggtcaaaagtgaggcaagtctgaatcaacccagtatggttggagagcaggggagaagaggacagagttatcagtcagcaaggaggaagggccaacagggctgagtgtgattactgagaggaggaaaagtccagaataactccccactttcttaagagtgggatcacaagagaaagagccattggagaaaagaaaatatcaaaaaaagaagagttctattggagcaccgagtgtgaggtatctgtgaaatactgaagtgggggtctccagaaaggtgtggcttagagaagctgagttgggagcatagcacacagctgaaaccagaaaaagaagaatatcaggtcaaagacaaaacatggtagaacattgtcttggtccgttttactgctataacaaaatacctaagactgggtaattttaaaagaactgaaattcatttctcacagttctggaggctggacgaccaagatcaaggtcccagcaggtttggtgtcta

SEQ ID NO: 216943 - DNA, 560 bp, Homo sapiens
ccctccggctgtactttgggtaggtagcaagatgaaactgttagaggttctgttgcaggattctaggtcaaaagtgaggcaagtctgaatcaacccagtatggttggagagcaggggagaagaggacagagttatcagtcagcaaggaggaagggccaacagggctgagtgtgattactgagaggaggaaaagtccagaataactccccactttcttaagagtgggatcacaagagaaagagccattggagaaaagaaaatatcaaaaaaagaagagttctattggagcacygagtgtgaggtatctgtgaaatactgaagtgggggtctccagaaaggtgtggcttagagaagctgagttgggagcatagcacacagctgaaaccagaaaaagaagaatatcaggtcaaagacaaaacatggtagaacattgtcttggtccgttttactgctataacaaaatacctaagactgggtaattttaaaagaactgaaattcatttctcacagttctggaggctggacgaccaagatcaaggtcccagcaggtttggtgtcta

SEQ ID NO: 216944 - DNA, 537 bp, Homo sapiens
agctttggatgttctaaactgcaggtcccaccctcgtttgcctgagcttcctgatgaaaacatgacttttaggtaatataatttataagaaaatagaactctgttaaagtaactaaatataagctatcactgactgttaaagcagatgatattttaagctgcatttaaaatcaacagatgtcattattaatcaggaatcttttgtcagacagtcagaatttttctctgagatgctctgtatggatcctaattacaatactcttcctaattacaatmctctccttcctaagtgttaggaagagcttcctaaagcttgtactccacagcacaccccatcctgggttcagtcttagccgatattgaagtgctttgaggcagttcattttctactcaaacttttagttcacatgcttaaaactaatgtagttggctgcgttctttcaaagtcttctttagaagtaattgtctgatgcattttagcatcaccccagtccaagaccctaaactgatatgatgtaaaagaagaaagagtcacta

SEQ ID NO: 216945 - DNA, 537 bp, Homo sapiens
agctttggatgttctaaactgcaggtcccaccctcgtttgcctgagcttcctgatgaaaacatgacttttaggtaatataatttataagaaaatagaactctgttaaagtaactaaatataagctatcactgactgttaaagcagatgatattttaagctgcatttaaaatcaacagatgtcattattaatcaggaatcttttgtcagacagtcagaatttttctctgagatgctctgtatggatcctaattacaatactcttcctaattacaatactctccttcctaagtgttaggaagagcttcctaaagcttgtactccacagcacaccccatcctgggttcagtcttagccgatattgaagtgctttgaggcagttcrttttctactcaaacttttagttcacatgcttaaaactaatgtagttggctgcgttctttcaaagtcttctttagaagtaattgtctgatgcattttagcatcaccccagtccaagaccctaaactgatatgatgtaaaagaagaaagagtcacta

SEQ ID NO: 216946 - DNA, 571 bp, Homo sapiens
cctaagtctggaattaatccaaggttgtcactaggaaagcagaattaggaaataaatcccttttgaaaartgataactcttcatcagtttatttcaagaagcttctgtgtctttctcatgtaagttatcattgtgtctttgttcccctgtatgttacatgtcttttttcccctcctttggctactttcaagatttttctctttatcttggtttccagcagtttgtctatgctatacttaggtgtgattttctttttatttattccagttgatattctctgagcttcgtaagttaatgtttttgatgaaatttggacaaatgttggccactatttcttcaaatattttttctgtttttatttttttcttctttttctgagatgccagttatgcatatgttagaatcatttcatgttgttctgcaaggccccgaggctctcgttcattttccttcaacatctttcctctttgatattcaaatttgataatttctatttatctatcttcaagttcactaactttgccctttttttgtcttcattctgttgtcagtcccacccaatggattttta

SEQ ID NO: 216947 - DNA, 531 bp, Homo sapiens
ttactaattatttccatctactgccagttcaaaatcttasgcttctatagcagtacctgtttagttcattagcttcatctttggtgatatagttgaaaaccttctcttgctggcatgttccttctggcagctggatgcttcaccttattatagagctgtgtttctctgtttctgacccagtttccttctcccagagaagtcagcacatcttggtatcctgtgtaaattctcctggactggaggagcctgggatgtctaactaactccttcagccctgttactttccagtcacctttctcttcaggcttccctgagtccatttctctcccagccctaccttggcctgtagatgcactatcaccatgtagtcatccacccccctcttccttctctctacaactatcctcaggcttgtagtggggcatctgccaacagtgatgggcaggtcaaaatggcttcaactaactgcctaagcacagtggctgaaagcacagatgttagagtaagacagtcctagatgtaattcctgat

SEQ ID NO: 216948 - DNA, 531 bp, Homo sapiens
ttactaattatttccatctactgccagttcaaaatcttacgcttctatagcagtacctgtttagttcattagcttcatctttggtgatatagttgaaaaccttctcttgctggcatgttccttctggcagctggatgcttcaccttattatagagctgtgtttctctgtttctgacccagtttccttctcccagagaagtcagcacatcttggtatcctgtgtaaattctcctggactggaggagcctgggatgtctaactaactccttcagccctgttrctttccagtcacctttctcttcaggcttccctgagtccatttctctcccagccctaccttggcctgtagatgcactatcaccatgtagtcatccacccccctcttccttctctctacaactatcctcaggcttgtagtggggcatctgccaacagtgatgggcaggtcaaaatggcttcaactaactgcctaagcacagtggctgaaagcacagatgttagagtaagacagtcctagatgtaattcctgat

SEQ ID NO: 216949 - DNA, 590 bp, Homo sapiens
ttaaacgcactattgagttgctcaataacagatcaaatttgagcaaaaagaacagcatatggaagcgttctagcctaataaaaagagaaactcatgagaaaaaactggactattagactaagttcacaagtaatataaacttagatcggttccataagcctctctctaccaaagaaatggcaatgcctctcttgaatataagccattttgaggatcaggatagaatcttgcacattgtmttacggcttaatagcaaattttaaatcaatatatcatatagggattttaacctttttgacagaatagtccttcaaaatacttttatagacaatttaatccatgtcttgttttcaatgtgtaccataaagataaaattgttagcattttgtatatattagttgtatgtaaagacattatatcacactttttactgtatccaacagaatataaatatcatagccaattaagacccacagatttccttttaaatagtgtaagtacaagctcaattttaacacatggaaatgttaaattattctgtttggtttttgaatctttcatttcagttcattacccattaatattagtac

SEQ ID NO: 216950 - DNA, 590 bp, Homo sapiens
ttaaacgcactattgagttgctcaataacagatcaaatttgagcaaaaagaacagcatatggaagcgttctagcctaataaaaagagaaactcatgagaaaaaactggactattagactaagttcacaagtaatataaacttagatcggttccataagcctctctctaccaaagaaatggcaatgcctctcttgaatataagccattttgaggatcaggatagaatcttgcacattgtattacggcttaatagcaaattttmaatcaatatatcatatagggattttaacctttttgacagaatagtccttcaaaatacttttatagacaatttaatccatgtcttgttttcaatgtgtaccataaagataaaattgttagcattttgtatatattagttgtatgtaaagacattatatcacactttttactgtatccaacagaatataaatatcatagccaattaagacccacagatttccttttaaatagtgtaagtacaagctcaattttaacacatggaaatgttaaattattctgtttggtttttgaatctttcatttcagttcattacccattaatattagtac

SEQ ID NO: 216951 - DNA, 372 bp, Homo sapiens
aatattaaatagttcacttaaaatatttaaggaaaaaacaaaaccaacttaaatccaaaaaaatactattttatgttarcagtgaagttggtaatagtaaataattgttagcaatgagttatttttaaagtattagatgattcttcttgtaaatatgaagttcaaagtcgagacatttcaaccatacactacaatattactgatcgagtttgggaagagtgttaaaatatactcactttatttggaaaacgtattattagaatgctaattaaaattgcatcgaattcatgtatttattttggacaatgtaacattttcgtgttaaattctccaatgttagaatataaaatgtgtttctaattgttcagatct

SEQ ID NO: 216952 - DNA, 372 bp, Homo sapiens
aatattaaatagttcacttaaaatatttaaggaaaaaacaaaaccaacttaaatccaaaaaaatactattttatgttaacagtgaagttggtaatagtaaataattgttagcaatgagttatttttaaagtattagatrattcttcttgtaaatatgaagttcaaagtcgagacatttcaaccatacactacaatattactgatcgagtttgggaagagtgttaaaatatactcactttatttggaaaacgtattattagaatgctaattaaaattgcatcgaattcatgtatttattttggacaatgtaacattttcgtgttaaattctccaatgttagaatataaaatgtgtttctaattgttcagatct

SEQ ID NO: 216953 - DNA, 501 bp, Homo sapiens
tctagaactaatttaagtgtaaaacatttatataagtaattgaattttcaggttctcagcatatcttaaatggctataaacacattcagatatatgagagaagtaagccaaatacaaagaagagctaaaacaaaaaggttaattacccagatttttcaatacgctttttttttgctgtgctcattatacttaggaaaaagtagtaaccagtcaaaatgaaccagctgtacgaattaggttggtaaaaaacaacatctacatcttttggatctgtcctgtagttattatatataataaataaccttaatttgttgttttacagatttacaatgcacttacaaaggtccagatgaatattcgacaatatccacacttcakaaatgaaagaatagagtttcggagctgtgaaatgaatagtcctagcttctcagcttaccgtgggtccactgggtccagatatggactgtggtcctctcactcaatagcacatgctcctccgat

SEQ ID NO: 216954 - DNA, 410 bp, Homo sapiens
tagtacttctgctcaacatttaacaagcttcatatattctacagatctcattaaacaccatttctacttctgaattcattcactttcacttaaatgtataattaagaatggatacattatcaaaatcaagtttcattataagaaaagtattcattatgtaagtcacaaacagtatataaaactgaatacacagtataaaaccaaatttgaaaactctattaataaggcaatatgtaggtacagttgtatagcatagtcagataatttctgcttacaccatactttagccactgaagaaaacggtattttataaatggagagaaacacaaatacttaaaaaatcagaagccagtacacatatayatcaaactctctctataataagataaattacttgttgatatttttca

SEQ ID NO: 216955 - DNA, 586 bp, Homo sapiens
aagcttgcttttcatgtctattgrtgattctctacttacaggcttcttttctcaagagctcaaatgggaagggatttcaaagtaaaattataccacaggacacaatcactctcaggtcctttctacagacttaatgtaacctgagtcatccctgaattacaagtgagctagagttctttcactgtaaataacatgggaacagcagcagtttgagagtatgcttgaaatccttaaaatgaaaaatctgccagagtccagaaagagtgtcctctgtaaccagacccaataggctctctttaaccccactacatccacaaggaaaggttctaagacatcacttttcctagctaggagctgccacagaacacaaatttcaaagggccagagatctgcataaccaaacactagacatgaggtcaagatgggtcatccttctggggagtggtgggtaaacagagagagagaacgctttttttaaggaaagaaaaagtagaaggataatagcacatatcataaaatcatatgcttaatttaaaaatgcatcaggtaatatgccagtgacatccaaattaatttgttcaaaaag

SEQ ID NO: 216956 - DNA, 579 bp, Homo sapiens
ctaagacatcacttttcctagctaggagctgccacagaacacaaatttcaaagggccagagatctgcataaccaaacactagacatgaggtcaagatgggtcatccttctggggagtggtgggtaaacagagagagagaacgctttttttaaggaaagaaaaagtagaargataatagcacatatcataaaatcatatgcttaatttaaaaatgcatcaggtaatatgccagtgacatccaaattaatttgttcaaaaagctgatctctctgatgtcctattgttaagcttaattctataatcctcaaaaaagtgtttgaatctcaagaaatagcaagtactcagcctcaagcaggcaacatcgagtttgctaaaataatggaaaactcagataaagcagaccaggacacttgctcctctatgccctgcatcaccatctacagacagagccaggattcctgaatgaatccaaatcatttcaatacagacatgaggctgagaatacaaactacagataagtaattaaatgcacaagaatgaactgctgtgctttgtacatttaggaaataaacgtgcatt

SEQ ID NO: 216957 - DNA, 530 bp, Homo sapiens
attccacatagaaatacgtacctgtagagcttcaagaagccttggagatcaagaagtactggaccttcattttgcagatgaagaaaaagctctatcaaagtgaacactgaattgaatttggttgacttgctgaagtgaacatacaagttggtaaaggagtctgcatgaatgtttttatagcctgttttaggagaaggacctactgacctctaaatgctagctatacagtcatcccttggtatcctgagggactggttccaagactcttccttgaatgccaaagttcacagatgctcacatcccttataaaaatggtgtagtatttgtatataacctgtgcaagtggggtcttggtcaaaacatatcttggggtyttggtcccaccccactgcaagtgttctcatggaggttcacacccaagcagacctgcttttccagacagtgtgcaaagattcatattctttcttttccaccatcagaacacctgtatttcctagtcttcccagccaaattggttaaaccaatccatc

SEQ ID NO: 216958 - DNA, 592 bp, Homo sapiens
ggaattctcaatctgaattttaaggaatagaagtggtcaactctcaatgtatgggagcatgggaaatacgtgctgggaactctcktctaccatgtcctacaacacagggaagacgctggactactgcagagaaaatgaagctgatatatccgtaagagcagagatgagaatggaaatgaaaatgagagacaaagtgcaagagagcgctgctttcacttttcctaaggcccaattgtagccctttcctccctctgccaagggaaatattcaagaacccttgcaatttctttgactaacttagcttgagttctgctgtggataggccgccaaatctagccataaactggccccaaaactggccataaacaaaatctctgcagcactgttatatgttcgtgatggccgtgatacccatgctgaaggttgtgggtttaccagaatgagggcaagaaacacctggcccacccagggcagaaaaccgtttaaaggtgttcctgaaccacaaacagtagcatgagccatctgtgccttaaggacatgttcctgctgcagataactagccagagcccatccctttattttggcccatccc

SEQ ID NO: 216959 - DNA, 579 bp, Homo sapiens
ggaattctcaatctgaattttaaggaatagaagtggtcaactctcaatgtatgggagcatgggaaatacgtgctgggaactctcgtctaccatgtcctacaacacagggaagacgctggactactgcagagaaaatgaagctgatatatccgtaagagcagagatgagaatggaaatgaaaatgagagacaragtgcaagagagcgctgctttcacttttcctaaggcccaattgtagccctttcctccctctgccaagggaaatattcaagaacccttgcaatttctttgactaacttagcttgagttctgctgtggataggccgccaaatctagccataaactggccccaaaactggccataaacaaaatctctgcagcactgttatatgttcgtgatggccgtgatacccatgctgaaggttgtgggtttaccagaatgagggcaagaaacacctggcccacccagggcagaaaaccgtttaaaggtgttcctgaaccacaaacagtagcatgagccatctgtgccttaaggacatgttcctgctgcagataactagccagagcccatccctttat

SEQ ID NO: 216960 - DNA, 592 bp, Homo sapiens
ggaattctcaatctgaattttaaggaatagaagtggtcaactctcaatgtatgggagcatgggaaatacgtgctgggaactctcgtctaccatgtcctacaacacagggaagacgctggactactgcagagaaaatgaagctgatatatccgtaagagcagagatgagaatggaaatgaaaatgagagacaaagtgcaagagagcgctgctttcacttttcctaaggcccaattgtagccctttcctccctctgccaagggaaatattcaagaacccttgcaatttctttgactaacttarcttgagttctgctgtggataggccgccaaatctagccataaactggccccaaaactggccataaacaaaatctctgcagcactgttatatgttcgtgatggccgtgatacccatgctgaaggttgtgggtttaccagaatgagggcaagaaacacctggcccacccagggcagaaaaccgtttaaaggtgttcctgaaccacaaacagtagcatgagccatctgtgccttaaggacatgttcctgctgcagataactagccagagcccatccctttattttggcccatccc

SEQ ID NO: 216961 - DNA, 592 bp, Homo sapiens
ggaattctcaatctgaattttaaggaatagaagtggtcaactctcaatgtatgggagcatgggaaatacgtgctgggaactctcgtctaccatgtcctacaacacagggaagacgctggactactgcagagaaaatgaagctgatatatccgtaagagcagagatgagaatggaaatgaaaatgagagacaaagtgcaagagagcgctgctttcacttttcctaaggcccaattgtagccctttcctccctctgccaagggaaatattcaagaacccttgcaatttctttgactaacttagcttgagttctgctgtggataggcygccaaatctagccataaactggccccaaaactggccataaacaaaatctctgcagcactgttatatgttcgtgatggccgtgatacccatgctgaaggttgtgggtttaccagaatgagggcaagaaacacctggcccacccagggcagaaaaccgtttaaaggtgttcctgaaccacaaacagtagcatgagccatctgtgccttaaggacatgttcctgctgcagataactagccagagcccatccctttattttggcccatccc

SEQ ID NO: 216962 - DNA, 398 bp, Homo sapiens
taaaacctcatcagtaacctttacaaataaaaaagaagattaattattgagctgactatatcaacgatttcagtttccctgtaacgctgggagactgaaggaatatttctaatattcatgattcatgctcaatagagagaaaggaatgatgcccttcagagaaagcaagtcactggaatgacatctcttcacatgatagctttttgtatacttayagtatcaaggtaaagcaactcactggtctattacatttttgccagcctttcctgaaagtatcagtatgaaatcaagtgaacaagagatgccctgaaggaatgtagtaatctactgtaactgaccacgtaaaattcttgaaaaaaattaagtaacattccaggtttaattcaacaaccaactac

SEQ ID NO: 216963 - DNA, 632 bp, Homo sapiens
cctctaacagcttctaactttttgagcagaaaaaaaaatgctaatacgttttccctctccttcttattaagcagataattctctttcactagctaagccaatcttacatgttaacattgctgatctagtcaaagcaaayattcttgtgtttcagcgagcattagaaaacctctccttccttgacttttgttgatgtaatgttagtgcttatctcaaattttaaattgttccaacatcatagaggaatattattagtttagtaatattttactgacacatactatgttccagatggctcttattcatatggaaaagcttataagagaaatgctaactaaaactatgctcagcataatcctccttacctatcagacaaaatctaaggttagatgacaaaaatctaaaggtttgttgacatactctgctagaaagactctggggaagcaagcattcatctattcttggtggtactgcaaaaggtacaatttctttgaagaagaatttggcagtatcttacaaaatagttatacgcatttaccctttgatctagcaatcctaattctagaaaatctcaaagatagaatggctaatatatagcagggtgtaagcacaaagaaaaactatctgtaaca

SEQ ID NO: 216964 - DNA, 339 bp, Homo sapiens
tcctaacatatacaatttcaggataaatcaagttgattttccatctgaaatcagatatgggactacyacataattaaacacacaaaatctaaaacaatatttcattgatttaaattaacttttaatggcacagtttatgttgtgtaacggtatttttataatgtcattacattgcacgggcagaaaaagaaaataatggctacaagttttatctttaaaattttgacaccacagatctgtatttctaaaaaaccataagctacagatgtctgcaagttacaagatcttattactctattacagaatgaagatgttgttgaggttgcggatgacacaaaa

SEQ ID NO: 216965 - DNA, 376 bp, Homo sapiens
aacaataggcaatagcatgttagtaatactggctgggcatggtggctcacatctgtaatcccagcactttgggaggctgaggcaggaggatcacttgagcccaggagtttgaggctgcagtgagtgatcatcacaccacygtaatccaacctgggcaacagagtaagaacttgtctctaaaaaaattaaaaataatactcaacatttctcgaatgcctaccatgtgccaagcactgttctaagtgctttacaagtattaattcatctaatctttacaataattcctcaaagtcaatactattattttctccattttgcagatgaagaaactgaggcacagagagattaaaaaaaaaaaacttgcaaggcttcacaa

SEQ ID NO: 216966 - DNA, 559 bp, Homo sapiens
caatgttttgagacttttctttaagtaaataagggaatgtgtagtgtggggacttgggttccagggtgctcactgggaactgcacagggatccaccctcccacatggaaatgcaccactgattggggactgaggtcaagttcataccctcccaaactgtacttggaccagagaaggttgtcagatatttggttttccaagaatttctcctcatataaatggcagcagatctggaaacagaatggatgcttattgcttatcaacaagtttgaaaccaagatttgtcaaagatgaaaaatgaatatagagcacaagaaatcacatggtcatgctaccaggcaaaattatatttgaccaaaataaatcaatagggaggcagagcacattttccatcttacaagctataaaccagtaacaatttattaagcacctgctgcaaactccacattatgctaggctctaggagagatctggcagtgtcagacattgttcctgcccctgaagagttcattayctctcttaagagaaacgatcacatgacaatatagcaaattacataa

SEQ ID NO: 216967 - DNA, 519 bp, Homo sapiens
atgccaaggacattcaggtctagagaatgaccaaccatggacctgaatgggaggagcactgtatcaggagtcagaaggcttcaattttagtcctggttctgggttttgctgaccacatgacttagagataaacaaaacaatgaacctatgaaaacacgtcacttcccygctttaaattcccctagagttcctcatcatgctcagagcattgactttggcgcctgacatgaaacattctccttgctgacctctcttctctggactcccatctcgctattctcacattgcagtgctcgtcttgctcttgattctgcctgggacattcttcttccagacacttaaaaaacttctgttctcactgcctttacttccctgcttaaatgcaatcatctttcctgagctcacccctaatttaaaaaaaaaaaaacactagtatgtttgcccatcaccatcatcttttcttgttttaattttttcatggtaccatcatgacatgacattatcatcatctctgttttt

SEQ ID NO: 216968 - DNA, 412 bp, Homo sapiens
tgatagagaggcaccccagagaccacagcaggaagccaacaccataggctgggtaggtagggagagcccaggacggggctgctccccagaagctggagccacagaagaaggtgctgtccaggggagctggggccacaagagatccacgggcataggtggtgctctgagcagagacrgcaggagaaatgccctggcccttctctgccccactcgccaatctctggagatccatagcttcctgcatggatcctccctgcggccacccagcaagagagcctgggggtgtattttcaggggccacggagcagagcaggaagtgaagggggtggacccaagagcacacagtcactgacctgctcagggccaccaggtgggtcgccacctaagaaaggaaccttctgagtctttaaga

SEQ ID NO: 216969 - DNA, 406 bp, Homo sapiens
acacaactcagccatgatagagaggcaccccagagaccacagcaggaagccaacaccataggctgggtaggtagggagagcccaggacggggctgctccccagaagctggagccacagaagaaggtgctgtccaggggagctggggccacaagagatccacgggcataggtggtgctctgagcagagacagcaggagaaatgccctggcccttctctgccccactcgccaatctctggagatccatagcttcctgcatggatcctccctgcggccacccagcaagagagcctgggggtgtattttcaggggccacggrgcagagcaggaagtgaagggggtggacccaagagcacacagtcactgacctgctcagggccaccaggtgggtcgccacctaagaaagg

SEQ ID NO: 216970 - DNA, 355 bp, Homo sapiens
tttgggaggctgagggccaggaattcgagaccagcctgggcaatacagagagttctcgtctctactaaaaataattttttwaaaaattagccgagtgtgctggtgcacgtctgtagtcccagctactcgggaggctgaggtaggaggacagttttagcccaggaggtcgaggctgcagtgagccatgatcacgccactgcattccagcctgggtgacacagctagaccctgtctcaaaaacacttttaaaaacgggataagaaggtgaccttggtttaaaaatgagttaccgcccagcctgtgcttgttctcagtaaacacagtggctgggcactcgaatcagcacacaggcaga

SEQ ID NO: 216971 - DNA, 355 bp, Homo sapiens
tttgggaggctgagggccaggaattcgagaccagcctgggcaatacagagagttctcgtctctactaaaaataatttttttaaaaattagccgagtgtgctggtgcaygtctgtagtcccagctactcgggaggctgaggtaggaggacagttttagcccaggaggtcgaggctgcagtgagccatgatcacgccactgcattccagcctgggtgacacagctagaccctgtctcaaaaacacttttaaaaacgggataagaaggtgaccttggtttaaaaatgagttaccgcccagcctgtgcttgttctcagtaaacacagtggctgggcactcgaatcagcacacaggcaga

SEQ ID NO: 216972 - DNA, 531 bp, Homo sapiens
gatcttgccaagggtgtggccacttcagccattgcatcagagctagtggaggggagatcggggtggccagcttggccgaggatgtacgaagtatgtgtaaacattctttctccactgatatcaagtgtattagtcagggctctygattgcaagcactctgactttcttaggcaaaaagggaatttttgaaaggacgtcaggggttcacagcatcattgtggagctagagggtctatcttggaaaatggaaccaaccaagggcacttcagaaggctggacagcaggaatcacagctgaggccaggatgcaggtacagactgttcattgctgctggagattcaaagtgccaggggagagggccatctgcatagagcctgagtcacaggcttgctcccagctgtgccaaggctggtgtattggtctgttctcacactgctgtaaagaaatacctgagacagggtaatttacaaagaagagaggtttaattggctcacagctctgcaggctctacagggagcctggcagcacctg

SEQ ID NO: 216973 - DNA, 449 bp, Homo sapiens
aaaccacccccaagcatcactatgcccttttctggaccagttttacttttcttttccagctgattytggtaagtgaggcagaaataaaatttaggtaagaatttcattttgagtatctttattagtccatctgcaattaaaaaaatgttcaagattcacataggtaaaatgaaagcacagattaaaaaataaacaaataaatgaaaacgaaaagcatacccatatacactaaaagcaaacccacagtggagtaacctggaaagtctcattgtccacaatgacttttgcagcagcaaaaagcactacaatttgaagtaaaagagttcaaagtggcttaggcaaagtggactttacaggttgaaataattgggaaaggcagaggtgttagctaggaatctaatactgccagaactgcctcttcctctgtgcttcacctctgcttcccttct

SEQ ID NO: 216974 - DNA, 449 bp, Homo sapiens
aaaccacccccaagcatcactatgcccttttctggaccagttttacttttcttttccagctgattttggtaastgaggcagaaataaaatttaggtaagaatttcattttgagtatctttattagtccatctgcaattaaaaaaatgttcaagattcacataggtaaaatgaaagcacagattaaaaaataaacaaataaatgaaaacgaaaagcatacccatatacactaaaagcaaacccacagtggagtaacctggaaagtctcattgtccacaatgacttttgcagcagcaaaaagcactacaatttgaagtaaaagagttcaaagtggcttaggcaaagtggactttacaggttgaaataattgggaaaggcagaggtgttagctaggaatctaatactgccagaactgcctcttcctctgtgcttcacctctgcttcccttct

SEQ ID NO: 216975 - DNA, 468 bp, Homo sapiens
agatctcatgtcaagcatctctaaattgtttggaatccagctgaataaattatagtatacatgacgatctttttcctcccaccytctcatgaactctgaaaaaatatgtcttactcctaaactacttagcacttttgaaatgccaactaattcttcctggttgtccaaaatgagtacagaatggcaattcccctaggaaattttctcctctgggagatgaagctattagcaaagcaagtcaaggtcctgttagacattctgctgttatccaaatgagacttccggcagatgtctggagagttgaaatccccatcactactctgtcttttctctgcactgatttcacaatctgtgtctagtaacacaccacgcatttgctccatgtgtcccagcgtactctcataatgatagcacttctgtgctcttcctttgtcctaacccatatgctctccagcatgttcctgccct

SEQ ID NO: 216976 - DNA, 685 bp, Homo sapiens
attcagaagcaacaatagcatcatcattctgtttgttaacagctaaagaagattggattcacaaaatcatttgtgatggttaatactaagtgtcaactttattgtactgaaggatgcaaagtattgtttctgggtgtgtctgtgagggtgttgctaaaggagattaacatttgagccagtggaccrggaaaggcagaccttccctcagtctgggtgggcaccatctaatcagctgccagtgcaaccagaataaaagcaagcagaagaatgcagaaagattagactggtgtaggcttctggcctacttctctctcccatgctggatgcttccggacctcgaacatcagattcctagttcttcagctttgggactcagacttgcttccttgatcctcagctggcagatggcctattgtgggacctcctcttgtgattgtgtgagtcaatactccttaataaactcccctttatacatacatctatcctattagttctgtccctccagagaaccctgactaatacaattatcaaattgaataagaagtatgagacaaactggagttaaattacacctcttcaatgatggttctagaacacagccaccagtagttctgaaagtgcaggaatgtttcctggtacaaacaaaatctgattcaaatttgtaagtacaactcctattagttag

SEQ ID NO: 216977 - DNA, 685 bp, Homo sapiens
attcagaagcaacaatagcatcatcattctgtttgttaacagctaaagaagattggattcacaaaatcatttgtgatggttaatactaagtgtcaactttattgtactgaaggatgcaaagtattgtttctgggtgtgtctgtgagggtgttgctaaaggagattaacatttgagccagtggaccgggaaaggcagaccttccctcagtctgggtgggcaccatctaatcagctgccagtgcaaccagaataaaagcaagcagaagaatgcagaaagattagactggtrtaggcttctggcctacttctctctcccatgctggatgcttccggacctcgaacatcagattcctagttcttcagctttgggactcagacttgcttccttgatcctcagctggcagatggcctattgtgggacctcctcttgtgattgtgtgagtcaatactccttaataaactcccctttatacatacatctatcctattagttctgtccctccagagaaccctgactaatacaattatcaaattgaataagaagtatgagacaaactggagttaaattacacctcttcaatgatggttctagaacacagccaccagtagttctgaaagtgcaggaatgtttcctggtacaaacaaaatctgattcaaatttgtaagtacaactcctattagttag

SEQ ID NO: 216978 - DNA, 644 bp, Homo sapiens
agttatatacatgtatataaaataactagctaattttaaagggctctttaattcttttttaaaaarggaagaatacagatatagtctgtaaattctaagcattcagccgtagacaaaaataatctggttgtctcctcataacatgaaaggttttcattaggaatttaattcactgaatgtcttgatttctctacacttaagaagattttatgttgtgcctgtatgatacatttcttccttgccgtaagatgttattttaaaaggcggaaatgtagtatggtataggcaacatgctgctttttccccgtgtctacaaacacagacttcaatataattaagggggaaaaaacaaaacaaaacttgcttcaatatagaattgtcacatacaagaaacacacaaatacaaagatgtctattaatttgtagaaaaatccttctccctttcagccagaccacacagtttagcaataaacatgatacttgtggctatgggaaatttctagtttcactttcactttattgaaagtgttctcatcttgtgattattcttccatctaccgtaataatcctttgtggcatgctacatggttactgtgcagggatgctatcctcataggagcacgaattcaggagtacataagaat

SEQ ID NO: 216979 - DNA, 502 bp, Homo sapiens
tggacccacctatggccgaccatggactaatcagcatgcacttcctcccttctgaagcccataaaaaccccagacttagccagactcatggagatgttggaacaacctgccygtggataggagctatccactccaggtctcttctctgctgagggctgcaaactcaatgggatgacctgcctgcggttaggagctacccacttgcagtctcctgagagctgtactgtcactcaataaagcacctccttgccttgctcaccctccacttgtctgcatacctcattcttcctggatgtgggacaagaactcaggactcactaaatggtgggactgaaagagctgtcacacaaacagggttgaaacatgcatcctccacttgtcgtgttgcgggtaacaagaaggagagaagagctgcggtccttccggggcccagacttaggggcttaggcccagacttaggggctccctgagccagggctatgacaccctccttgaggctctg

SEQ ID NO: 216980 - DNA, 461 bp, Homo sapiens
tatgttctttttgcaaattatacttrtgtaaacatggaatgattacttcattgacatccgtctatctccctctgcacccataaacttcatgaaagaaggaccacgcctttcttttaaagtgttttattcctggggacaagtgggttgcctggaaaatgaaagacatgctaaaaagaatacttgtactgtcaatgaattaaaaacataaacaattgccattgaatgtgcgagatgagtgggagtcaaggtttgtcacacataccaccacccttccaaaaataaaaaggcagaaaataaaaaaagaaaaaaataaaagaaagaaagcaaagtaacattccaactgaatgagagatgagtgatgtaaataattcaggcttatgagactacagccaaagatggcagggtgctttggaacaactgcaagaaagagatgggattagtgtgaaatcttctaagatgtg

SEQ ID NO: 216981 - DNA, 461 bp, Homo sapiens
tatgttctttttgcaaattatacttgtgtaaacatggaatgattacttcattgacatccgtctatctccctctgcacccataaacttcatgaaagaaggaccacgcctttcttttaaagtgttttattcctggggacaagtgggttgcctggaaaatgaaagacatgctaaaaagaatacttgtactgtcaatgaattaaaaacataaacaattgccattgaatgtgcgagatgagtgggagtcaaggtttgtcacacataccaccacccttccaaaaataaaaaggcagaaaataaaaaaagaaaaaaataaaagaaagaaagcaaagtaacattccaactgaatgagagatgagtgatgtaaataattcaggcttatgagacyacagccaaagatggcagggtgctttggaacaactgcaagaaagagatgggattagtgtgaaatcttctaagatgtg

SEQ ID NO: 216982 - DNA, 539 bp, Homo sapiens
aattttcatttaagctaagttgaaaaaggggaggaaggcagttcccttaccactagaacataagctctgaaagggcagggatttttatctgttgctcactgatatgttttccacacaataagaacatagtaggtgcttaatatttgaagtattttgtgaatactggatggaaaagaagatgacagataatacatgatagacagacagatgtaaataaacactgaactccaccatgagtgtgtaggcaggataaaatgaaatctctcgtcgcctcatggaatctgtcttttcaaattatccctagaagtcttttcaacctggggcaatacatcatatactgagatttcamctgcatgagtctacctttttttttctagtacagtaagagatgaacactgttgaaggggagctggggaaaaaaactgataggtgacagacaggtactcaacaaggcagttttggaaagaagaacatctaagaaaattaatagctagaaagccgtgcatgcctattgtctcagtatgttctctgctactatc

SEQ ID NO: 216983 - DNA, 539 bp, Homo sapiens
aattttcatttaagctaagttgaaaaaggggaggaaggcagttcccttaccactagaacataagctctgaaagggcagggatttttatctgttgctcactgatatgttttccacacaataagaacatagtaggtgcttaatatttgaagtattttgtgaatactggatggaaaagaagatgacagataatacatgatagacagacagatgtaaataaacactgaactccaccatgagtgtgtaggcaggataaaatgaaatctctcgtcgcctcatggaatctgtcttttcaaattatccctagaagtcttttcaacctggggcaatacatcatatactgagatttcaactgcatgagtctacctttttttttctagtacagtaagagatgaacactgttgaaggggagctggggaaaaawactgataggtgacagacaggtactcaacaaggcagttttggaaagaagaacatctaagaaaattaatagctagaaagccgtgcatgcctattgtctcagtatgttctctgctactatc

SEQ ID NO: 216984 - DNA, 539 bp, Homo sapiens
aattttcatttaagctaagttgaaaaaggggaggaaggcagttcccttaccactagaacataagctctgaaagggcagggatttttatctgttgctcactgatatgttttccacacaataagaacatagtaggtgcttaatatttgaagtattttgtgaatactggatggaaaagaagatgacagataatacatgatagacagacagatgtaaataaacactgaactccaccatgagtgtgtaggcaggataaaatgaaatctctcgtcgcctcatggaatctgtcttttcaaattatccctagaagtcttttcaacctggggcaatacatcatatactgagatttcaactgcatgagtctacctttttttttctagtacagtaagagatgaacactgttgaaggggagctggggaaaaaaactgataggtgacagacaggtactcaacaaggcagttttggaaagaagaacatctaagraaattaatagctagaaagccgtgcatgcctattgtctcagtatgttctctgctactatc

SEQ ID NO: 216985 - DNA, 585 bp, Homo sapiens
agatctgtgatctgctgggacttgctactcttcagagcaaggggatgcagcagctgtgtgacagcaaaatctgtcttgagaatacatccaagggcccatggaaaagtggtttctcatagacatggtctttaattaaagtggttgttgtagaaagaaggtcatcaatcagaggtgacccttggatcgagttttgatctccaactaactgttcagttttattcaagggacaaagagtcaggaggggaccagagggaataatatcaaggcaggagacacatttacttctgatgtgcaaaaccataaaaggttcaaagtttgggttttggttcaaataaaatcctaagggttcagatggttttctaaaccctctgaacctcawgaatgtagagaaccagctgaaagaaatctcgcaagagcacaacggtccttggcatgtttggccacttcactcaaaaatctggccagaaaaataccatcagcaatttaggcaagtccagccagttgacaaagaaaagtgtgccttaagggctgctttcccagatcatagctactatttgcctaaggaaaatgagaggaaaattgaag

SEQ ID NO: 216986 - DNA, 526 bp, Homo sapiens
ctctaggggcactctcatgttttataatattttatcatcttacatttttactgagaagtcccttgcccaaaacaccagttggtactatttagttcaactattgctgaaactaaacaatacgtcttacagctcatactctgaacccactctgatatattagtctcatgtaatatgttaacaacagcttctcaactctctgaaacaaaaggaatgtgaaatttaagtcctcacacatttctaagagccaagtatcctattttctttttcaggaaaaggagagagagagagagagagagagagagagagcaagtcaygttcagccatccctgctaaagcctttgtaatacccacataagtccgtaattccttcacttactgtagcagttaacaaccacaaaaaataaaaccagccaatgccctcaacgaccctttcgctttattcacatgaagtttttgccataaactgcctgtcttttaaaaataatcgctaaggttcaggcaacactgtatccccttggattgtgtg

SEQ ID NO: 216987 - DNA, 449 bp, Homo sapiens
cctggggcagggggccggggcaggggtgggtctttctcgatctcccccacgtggcactatggggcacctgaatgtgattatcgaaaggacacagtctgcttgggggggatcccaggagaccccgagtggrtcaggccatatggagagccatgaactatcaaggtctccatcaaggaacccacgagcccaggatctgacacccaaggcagagaaacggtgaacaaactcgaacgtcgcagctcggaggcagtgctccagctgggctccctcctgagatgggcaggcctggtgcacccaagtcagcaagatgggtgtggcctgccttgtgtcccccacaaagataagttcaagtcctaaaccctggtacctgcaactgtcaccttatttggaaagagggtctttgcacatgtgatcaagttaagatgaggtcagattagattagggtggac

SEQ ID NO: 216988 - DNA, 388 bp, Homo sapiens
caggagtcagtaacctctgttccgatacactgttctgtgtcttaatgatgttccaagaatattgactgaatgtgttggctttcccattccctcattttcccacccctagccccatccattccccacccttctctactctgcttcccycatccctgaggctgattcccatcctacatcagccgggctccatgctggcagctggctgacctctgtttcagtttggccaacaggaggaaccagcaagaggacagaaaggaagagaggcaggaaggggaggttgattggagtaagggtgtatttcccctgcttccactgcagttcaggcagctgtcaccccggctcttcaggcctcagggtgacaatggctcatctctgttgccagtttcag

SEQ ID NO: 216989 - DNA, 431 bp, Homo sapiens
agccatactagactgggtttattaacaaggagtataggaatcaagcgtcatcatggcagataggaggcaggactaaattgcagctctgactcggacagacagagcagtatgcrgggccttgcattgtgaatcatagctccaaatcgactgtaagaacaaaccagcaatcccaagaggattcacaggccttctgaagaaagcggactgctactccaggacccagaagacaccccaaatactgtgagtaccacaactgtgaaggtgggagaggggagagcctcctctcccaaggacacactcccactggagaaactgaaggcctgtttgcaggagaagtttccgaccttacctggaactgagtcaatttagagagatgagtgaaatacaggggtatagaggaggagcagaaaggccctgggagctcgctgggt

SEQ ID NO: 216990 - DNA, 527 bp, Homo sapiens
ggttacctgagtcattgtatgtagagatggagaaaaggcagcgcaggcacagtgtcattcatgctacatatgtcacgtgtatgaaaaatggcraataagctcctctgtgggtgggaattttagtatggtaatgagggggtttcaccaatgttcatccccagctgaaacatgtctggatccaacagttttttgttttttccagggctgaacttctttctaccacttttgtgaaacaacaagaattcaaagtgcaacagttacgaggggatactttttcacagtgcatatcccaaagcccagggactctgggctacactatggcaccagcaaatcagtaatcaggacattcagtggaggactaggggcaatatatagcacatttagttcacaaatatgtggcaacctgaaggagattagcaatctaatgccctttataggctaatacatattatttctgtcctggctttacaagataacccattacgagaaaaatacttaagtttcagaacactcttgctgatatatta

SEQ ID NO: 216991 - DNA, 426 bp, Homo sapiens
ttaacaagcaatgattcaataaagaaattaaaagagacattaaactatatcttgagacaaataaaaatgaaaactcaacatatcaaaatttatgggaatgtagcaaaagcagttctgagagaagtttatagtaataaaattctacattaaaaaataagaaaaatctcaaataaacacytaatattacacctcaaggaactagaaaaggaaggaaataataaagataaaaatataaataagtgaaacacagactagaaaaaataataaatcaatgaaactgagttggttttttgaaaagataaataaaaatggacaaatcttcaggtagactaagaaaaaaagggagaagactcaaataaaattataaatgaaagaaaagacattaccactgataccacagaaatgcagaggatcacaaaagactgt

SEQ ID NO: 216992 - DNA, 556 bp, Homo sapiens
aacctgacttatggctataccatttgatgcctatgtgatcttgggtgagtctcttaagagagaatgatattggttttttattctctaaaatatggaaaataagcatagacaaatgacaagttcattatgagaaataagtgagatagaacatctggaaaagcttttcttttaatctataaaacaacttaaagatgttaactgatattaatattatcactttagtctgtattttaactctacttacttaaataaatgatgttcatacaattagtttgcttttatttaataccggagttcatcctgttttacaggtgaaaaataaaacagaggccaaaacacattaggagtaagaaatagcacagactagaaatgagaaaatatgaattttaatattattttcaccaccagtggctttgaaaccctatgtagtcacatatcttttttataccttaggattcacttttgaaaactgaggcaaatactctaccttgatcactctacaggtattaaaaayacaatgtgaaaacaacaactctgattcccccaaaatattttg

SEQ ID NO: 216993 - DNA, 524 bp, Homo sapiens
tatcttgactgctcccattacaatctatactcagctataatttagactttgggtttctaaatcctcatacgaacttcctgctgacctggctgcctgatctgattcctcctctagacgctgatttccaaacacacacagcactcctctccctttctgccaattcctattgaaaatagagtgccacctcttagctttcaatgtagaagtttatcactcaccaaagatcactcacttttttttttttttttttggagacggagtcttgctctgttgcccaggctggagtgcagtggcatgatctcagctcactgcaaccttgtctcctgagctcaagcaattctcctgcctcagcctcccgagtagctgggactacaggcatttgccatcacacccaactaatttttgtatttttagtagacacrgggtttcaccatgttggccaggctggtcttgtactcccgacttcatatgatccacccaccttggcccctcaaagtgctgggattacaggcatgagccactac

SEQ ID NO: 216994 - DNA, 530 bp, Homo sapiens
gagctcaagcaattctcctgcctcagcctcccgagtagctgggactacaggcatttgccatcacacccaactaatttttgtatttttagtagacacggggtttcaccatgttggccaggctggtcttgtactcccgacttcatatgatccacccaccttggcccctcaaagtgctgggattacaggcatgagccactaygcctcacccattcactttatgtagtacatttataacgtacatttatacagtacatttacaattgccatcaagaaaaattttgctgcccaaagcaacctacagattcaacactattcctatgaaacaaccaatgttatttttcacagaattaaaaagactactctaaaattcatatggtacaaaaaagagcctgactagtaaaagcaatcctaagtaaaaagaacaaagctggaggcatcacattacaggacttcaaactaaactataagtttatagtaaccaaaacagcatggtactggtacaaaaacagacacatagaccaatggaacag

SEQ ID NO: 216995 - DNA, 530 bp, Homo sapiens
gagctcaagcaattctcctgcctcagcctcccgagtagctgggactacaggcatttgccatcacacccaactaatttttgtatttttagtagacacggggtttcaccatgttggccaggctggtcttgtactcccgacttcatatgatccacccaccttggcccctcaaagtgctgggattacaggcatgagccactacgcctcacccattcactttatgtagtacatttataacgtacatttatacagtacatttacaattgccatcaagaaaaattttgctgcccaaagcaayctacagattcaacactattcctatgaaacaaccaatgttatttttcacagaattaaaaagactactctaaaattcatatggtacaaaaaagagcctgactagtaaaagcaatcctaagtaaaaagaacaaagctggaggcatcacattacaggacttcaaactaaactataagtttatagtaaccaaaacagcatggtactggtacaaaaacagacacatagaccaatggaacag

SEQ ID NO: 216996 - DNA, 516 bp, Homo sapiens
ttattttataatattggaaaaagctgtcttctcataggtcccaattgattctgttatctgtaaaatacacggctctgagtttaatattcattacctcctctctgattctatgtaaaaggtttgagaaatttttaaaccttctatcaagttatattaattaaatgttctttatctgattgggcacatttgaggaggctgtaacttttttcattgtttcatttatggtcaaactctgacataaaagaaaatgagaaattttagtagcaacatatcattaactttattgccttgagagcatgagaaagattctattgtatttattttattgttttccttgcttttagytaaaagttgattgaaggggatgaagtagggttgaatagagagggctgaggctcttatttaggaatatttctggaaaagtgtctttgccaggtgccatatcataccataacttggtagctgggtagttctattaaatctggggtacatctgctgtctgtgaaagagtcatta

SEQ ID NO: 216997 - DNA, 549 bp, Homo sapiens
ttttcacttaatgccttggtatggtcttttgtcaaagagaaaaatttattttgccttaaacattacacaagagatttcacttaacatacgtaattaacaatgggaaattatttaggggcacataatttcatacttgaaatcacgtttcatgaaataaattagtattagaatttcatacttgaaatcatgattcatgaaataagttagtactagaatgattctgctgtgcctttcttttggtagagagcatatggtcaattttstgacctttgattaaggggtctattttaaaatgtcttatcagttaattgtagctatagaaaactttatttgaagacaaatacatttctttatcacctctaacccctacttgtgatactgatataagcaaagaattgtattactcaaaaaagccactaatgagtagggatgcttgggtggaatttgaaaagataatctaaagagcttctagtggccaaagatggaacaaattgaacaactgaataataaactaggattgagttataaacccaaagtataatgtaagta

SEQ ID NO: 216998 - DNA, 549 bp, Homo sapiens
ttttcacttaatgccttggtatggtcttttgtcaaagagaaaaatttattttgccttaaacattacacaagagatttcacttaacatacgtaattaacaatgggaaattatttaggggcacataatttcatacttgaaatcacgtttcatgaaataaattagtattagaatttcatacttgaaatcatgattcatgaaataagttagtactagaatgattctgctgtgcctttcttttggtagagagcatatggtcaattttgtgacctttgattaaggggtctattttaaaatgtcttatcagttaattgtagctatagaaaactttatttgaagacaaatacatttctttatcacctctaacccctmcttgtgatactgatataagcaaagaattgtattactcaaaaaagccactaatgagtagggatgcttgggtggaatttgaaaagataatctaaagagcttctagtggccaaagatggaacaaattgaacaactgaataataaactaggattgagttataaacccaaagtataatgtaagta

SEQ ID NO: 216999 - DNA, 541 bp, Homo sapiens
agatgatttcggttttcctcttttcaaacttagacaaggttgtgtacctctttggttgtttgagtatcaaacaagaccatgtctttaaagtgtctattagctaataaatattttatttattagttaatactttatttaacatttaatactttattgccctaatgccgcctccttaatattcagtaagacaaattgttatatccagaaatcagaatcattaacacattccaaagcttccataaaacgtgaacattttaaagactgaagggcacagttacgtgtttgattttgtgctgtccatcacacctgcaaactggaacaataatccaaatgatatgtatggcattggcatcttatgtattaataaagagcataaagattctttgacatctgtagagtaacaaraaacacagggaggtgacttatattatcagcaagaggaaaaataaactggatgatttgaaaatatgcaatgtggtgggaggattacaatagcaatgagggaaaaatctatctgaaattaaaactccaaacttgaata

SEQ ID NO: 217000 - DNA, 358 bp, Homo sapiens
ggcaaggattcggagaaaagtgaacccttatacacaattggtggaaatgtaaatgtacacatattatggaaaacagtgtggaggttcctctacaaattaaaaatactactgccactgatccagtaatctcacttctgtgtgtgtatccaaaggaaataaaatcaatatctggaagggatatttgcagtgctatattcatgacaacattatttacagaagccaagatatagaaacaacctaagcatccctaagtgtataaatgggaaaagaaaawgtgtatgtctctctctctctctttctctctctctccctgtttccttgtctctctctctctcctctctctcactgtgtgtgtgtg

SEQ ID NO: 217001 - DNA, 577 bp, Homo sapiens
tttaccttccagctctttactgagcattctattttagtcatatttctaaatatttcaagaattattttttctctcttgacttatttatgaaaaaaatggcatcctactttttagaaatgcaatatctarataaatcattttttctttaaatattgatgtatttttcttttaaattagtttatctgcattgtttcagctacctgaattttctggagttttttgtttgtttttgtattgttcatgtcatatatttccttcaaatagctaatgttttgtgattgtctactcctacttaatatgtgagcattaaaatccttaatgaaaacccttggtatatggctagggcttactgactgttcactatagagtgagctatcattttgatagaatttggtgaggcaataaaagtaaaatgtacatttaaacttcatctttaattagatgtctagattaattaaaaccacttttgcattgccactataatcccatgtgattatgttgtattcctttgaatttttcaaaaatttgaatttccagaatcaatagtgaaatatttttgagttacagacacataaat

SEQ ID NO: 217002 - DNA, 544 bp, Homo sapiens
atcaacataaataactgatgaattgagggctcagcataaatcaaaatgtgatgttcatcttcccagtgataaggaggagggacagtctgtattctctattacagtattccatataatattgtctttaaaaggtaaaatttttcttgcttctgtaagatattaagtcacagaataaaataattttrggagagaactctccagtcacattttgttcccctcatcctacagatgaggttacaggttcaagaaaataaagacatttaatgacacacaaagggaaagacagcctacaacttggtattgtgtttagacacggattggttgccaagtagaaaccttctcattgcccctcacatttctattcagaaacttttctgtttctttcacttttaaaaacattgtcttttgaaagtagtgaattacaatgcatgaaaaataacattaccgtattgtctccagtccacagtagggggtaggtgctgccacaaaataaggttgtttagatgatttaagtaggaaggtagggaatgaaaacccttctgat

SEQ ID NO: 217003 - DNA, 374 bp, Homo sapiens
atctgatcatgatgtaagaatcatgtaatcaatcattgataataatctttttattaggttgattggtttatgaaagccctaataagtgaggagatagtctgtaaaatgactatcagctttgttgaaatcaggattcaaaaggtcaggctgaatgaagccygcaggcccactctgaccttaactggttctcctgagttttccatccataaatcacgttttcagttatttctccatcagatggcacttcacataaattgcactgccagaaagaagatgttattaatattggaaaactttttaagcataccagtactttgaagataagcaaaatatttatttttcctatcaagttatctttcagttcatatagaact

SEQ ID NO: 217004 - DNA, 536 bp, Homo sapiens
accattaacacatagtctagattcctaaatcctagcctagaaaaagcactagggctttccatataaatggcagagacctgaaggcagttattgtattgacattatttcctttgattaattcatcttgaagggagaagttctgtttatgcctagcataaaaatatgtatttttgtaaacttaattaaataaatgaacaactaaataaatttgttattgctaccttggtcaccataaggtgatttttgacactgttactcaagtcaatttttctttaggtagttatggtctaggacaatgctttatgaattgtaccctatggaktattcaagagggtgatgtgggtgttttggaagcaggagtgaaagataagaaggaggaccaagtatgcagggcttcaggctactcatatgaatttcaagcagagaaaatcccctagtgtgcactttacatattggacttattccaaatatttcagttgaataaatgtttccaagacttaaaaaatgtaaaaaacccaaaaccactgatccaaatc

SEQ ID NO: 217005 - DNA, 644 bp, Homo sapiens
ccatgcttcaccagctttttaagcaaaatgagaaattaagatattggcattctataaaacttgrttccctttgttgagcttattaaggggagagaggcattgtgttttcttttttttacccttattagcaacttttttcaaagggaattctctatttttaggaaacaccctcgactttaaatttttggtgatgaaacagtcttgtacatttaatcaccaggaacttagtaaatgttgcatattataccatgattaggagaagagaaagaaacttgaattagggtaatttgtgacaagatggagcacagaaaagaaacagcatcagaggcctttcagggcagtacactgtgtcttgtgaagccgattgacttctttcattggcagaattgaaagtctaagctaaaaacactttaatcagcaaaaacacaagctggtgttgtaatgcccgttttacatattgaaaataagacacctataggctatttctaagatcataaccttggtaagcagtgaggccaacagtttgccttgcttgtgccagcttttagaacccatgtttttttctaccacacattctccctcattcaagagaaaacaattgaatatttgtaatatgtaagccagtgcatttggctttatggaaa

SEQ ID NO: 217006 - DNA, 625 bp, Homo sapiens
aaaaatgggaggaaaagaattaaagttgttgctatttgtagatggtaagattttttagtaggaaatcctacataatctacaaagaggcaacaagaactattaggtgaatttagcagtttcatttacaaaagtatataatgtaataatttaggaataactgtaaagaaaattattcaagactttcacacttaaaatgacaaaacattgctgagaaaaattaaagcctatgtaaataaatgatgttatatsatgttcataaattggaagattaatattattaagatatctagtctcttcaagttgatccatatatattgaacacaatgccaatcaaaatcatctaaagtaattttatggacactagaattagtttttaaatttatctggaaatgcaaacatagaagaatagccaaaaagttttgaaaaaaatacacagaactatgtgatttcaagggttttagaaagctgcactgatcaacactgtgtgataattgtgtaagaataaacaagagttcaatgaaatagaataaagcccataaatacactaactatatatatgttcattgttttttgtaaaaagacaccaaagtaatccaatgacaatagatatgtattttataaatgc

SEQ ID NO: 217007 - DNA, 625 bp, Homo sapiens
aaaaatgggaggaaaagaattaaagttgttgctatttgtagatggtaagattttttagtaggaaatcctacataatctacaaagaggcaacaagaactattaggtgaatttagcagtttcatttacaaaagtatataatgtaataatttaggaataactgtaaagaaaattattcaagactttcacacttaaaatgacaaaacattgctgagaaaaattaaagcctatgtaaataaatgatgttatatgatgttcayaaattggaagattaatattattaagatatctagtctcttcaagttgatccatatatattgaacacaatgccaatcaaaatcatctaaagtaattttatggacactagaattagtttttaaatttatctggaaatgcaaacatagaagaatagccaaaaagttttgaaaaaaatacacagaactatgtgatttcaagggttttagaaagctgcactgatcaacactgtgtgataattgtgtaagaataaacaagagttcaatgaaatagaataaagcccataaatacactaactatatatatgttcattgttttttgtaaaaagacaccaaagtaatccaatgacaatagatatgtattttataaatgc

SEQ ID NO: 217008 - DNA, 625 bp, Homo sapiens
aaaaatgggaggaaaagaattaaagttgttgctatttgtagatggtaagattttttagtaggaaatcctacataatctacaaagaggcaacaagaactattaggtgaatttagcagtttcatttacaaaagtatataatgtaataatttaggaataactgtaaagaaaattattcaagactttcacacttaaaatgacaaaacattgctgagaaaaattaaagcctatgtaaataaatgatgttatatgatgttcataaattggaagattaatattattaagatatctagtctcttcaarttgatccatatatattgaacacaatgccaatcaaaatcatctaaagtaattttatggacactagaattagtttttaaatttatctggaaatgcaaacatagaagaatagccaaaaagttttgaaaaaaatacacagaactatgtgatttcaagggttttagaaagctgcactgatcaacactgtgtgataattgtgtaagaataaacaagagttcaatgaaatagaataaagcccataaatacactaactatatatatgttcattgttttttgtaaaaagacaccaaagtaatccaatgacaatagatatgtattttataaatgc

SEQ ID NO: 217009 - DNA, 606 bp, Homo sapiens
agagaggtgggaggagaggggtgatacactttatgaagtttactttgtgggccctggaaaacgatacttggatcctgactgaaataaaatctcaaatttaaggtaaaataactggtgatatattttggaacagaaggcttggggaaatatttttatttttgcccttctttcaagttttctcttctcacatcagtatctattttttttttcagcttgaaaaatcattactaatttggagaaaagatgcagagtcatccataaacttttaatagatgtccttgcattcacagagcactgcccctgttcccctgaaggtaacagcaggatgcataatgcataatacactccatgccttasataaatacacataaaactttagcagttaagaggatggggctattaaagaaaacaatgtgagtgtaaaacagttttgcagagattaaaattttttaagccaggagcttttactaaaagaacagattggatttctgattagagattggaggaaatgataattgaaatactcatttcaataccaatagcataaaacatgtgaatcagtccaactcatatttggtttggctagaaaaagaaacaaattatgat

SEQ ID NO: 217010 - DNA, 543 bp, Homo sapiens
gaaaaatgtttgtttgtttgtgatactcactggccaaccagagcaggccttttcagtgttgttctgagttgttttttatttcatttttaaagcttaaaatcctgtaagggactgcctaaccttcctgattcatatgtacatgaataagtaagcycttgttaacatgtgtgatacatagtatttgacagtgtttccaggaatttaggacactactcagaagcttattagatatgctatacttcatgaaaacacccaaattatttatcatcaactctcatgtaactggagaggaatattaccgaaagaaattagattttccagggtaagctgaaattaatttatttgattttgaaatatctttctttttatttccttttcttcctttctttcctttccttttattttaattatcctttgagcaaatatttttcctataaaaaatgactctaaacagtaacctttggctacctcttctcagtaccagatgacttacgcacagtaaatatattcagccaatgatgtgaccaattatttttttgaaat

SEQ ID NO: 217011 - DNA, 543 bp, Homo sapiens
gaaaaatgtttgtttgtttgtgatactcactggccaaccagagcaggccttttcagtgttgttctgagttgttttttatttcatttttaaagcttaaaatcctgtaagggactgcctaaccttcctgattcatatgtacatgaataagtaagctcttgttaacatgtgtgatacatagtatttgacagtgtttccaggaatttaggacactactcagaagcttattagatatgctatacttcatgaaaacacccaaattatttatcatcaactctcatgtaactggagaggaatattaccgaaagaaattagattttccagggtaagctgaaattaatttatttgattttgaaatatctttctttttatttccttttcttcctttctttcctttccttttmttttaattatcctttgagcaaatatttttcctataaaaaatgactctaaacagtaacctttggctacctcttctcagtaccagatgacttacgcacagtaaatatattcagccaatgatgtgaccaattatttttttgaaat

SEQ ID NO: 217012 - DNA, 379 bp, Homo sapiens
gaaggcgttctccagactgactgatggagatggactacccctggtccaaaataagccacyggcatcttctgccagcccatggtgcaactacctgttttctttctttcttttgtagagctctgtgtcttcttgactaacacatgaggccacctcctggggctgtttgaactgtttctgctgataggggagggcatttctccagccctgcttctagactccctcttaatcttcagatggcctctcacccagttgcatgttgagttatcctttcaaaaggtaatttcacaaaaatgtacaaatatgatcttttgtaagttatttgcaatgaataggtgagccaaaagctaaggtgaaagacacaggctttgaatgctaaatc

SEQ ID NO: 217013 - DNA, 379 bp, Homo sapiens
gaaggcgttctccagactgactgatggagatggactacccctggtccaaaataagccactggcatcttctgccagcccatggtgcaactacctgttttctttctttcttttgtagagctctgtgtcttcttgactaacacatgaggccacctcctggggctgtttgaactgtttctgctgataggggagggcatttctccagccctgcttctagactccctcttaatcttcagatggcctctcacycagttgcatgttgagttatcctttcaaaaggtaatttcacaaaaatgtacaaatatgatcttttgtaagttatttgcaatgaataggtgagccaaaagctaaggtgaaagacacaggctttgaatgctaaatc

SEQ ID NO: 217014 - DNA, 568 bp, Homo sapiens
caatatgtaatactctgggttctattaatactctttatcttcccccaggctatgctaatttcaactagttacggtagtgggagaggaagctccatgtctgagagattacagcctgttctccatcaacgtgtaaccccaggttttaaggtcaagaaaaacaaaagtcaaggatgttattatgttcttctaagtctttctctttggcaaagaataatatctttcagagttgccactggcaggaaggagggtccattgcagagtaaagagaaaaattccaacaggtaatattttaatatcttgcttcacacttggccagtagaaaactttyccccttgttgccctttaagactgtgtttgtgtatatcctcaaagctactaaaaaatgaaaacaaaaacaaaaaactggagactgtgatttgcagctttcaacctaaaaatgctagaaaaggggccaatactgggtcttactctggaaagttaaaaaatatcttgaaagccacattcctcctctccaccaaactacctgactcctaccacaggggctgtggtagtgatgacagatgaataa

SEQ ID NO: 217015 - DNA, 615 bp, Homo sapiens
tagtatttattcattatttttctataaaatatttttgaaattggcttctataataaaaagctgcagtaatatagtcatcataaatttcagttcataagattttaacagttgttttaaaatttcttaaaaatagtaaagcagtttgtactttaaaatamgcatttagatttaataagcaggtcttaatttttggtgccattaattctctttatttgtgtattgcttttaaaattgatatataatagttgtacatatttcaggttacatgtgatattttgatacctgtatacaatgtataatatcaaatcagaataagttggatggtcatcacctcacacattcatttttttcttagtattgggaatactagaattcttctcctgtaggcatttaaaaatatacaaaaaaaaaatcattgttaactataatttctctagggtgctatcaaatgctagaacttatttcttctatctaactataattttgtacctgttaaccaaagcaagtcttgattttttatgccattaatttttccacatacatttctcattgtaaatagtattagttttctataattaatttcttgaaaatataggtgtgaatgaaatgcaggtt

SEQ ID NO: 217016 - DNA, 615 bp, Homo sapiens
tagtatttattcattatttttctataaaatatttttgaaattggcttctataataaaaagctgcagtaatatagtcatcataaatttcagttcataagattttaacagttgttttaaaatttcttaaaaatagtaaagcagtttgtactttaaaataagcatttagatttaataagcaggtcttaatttttggtgccattaattctctttatttgtgtattgcttttaaaattgatatataatagttgtacatatttcaggttacatgtgatattttgatacctgtatacaatgtataatatcaaatcagaataagttggatggtcatcacctcacacwttcatttttttcttagtattgggaatactagaattcttctcctgtaggcatttaaaaatatacaaaaaaaaaatcattgttaactataatttctctagggtgctatcaaatgctagaacttatttcttctatctaactataattttgtacctgttaaccaaagcaagtcttgattttttatgccattaatttttccacatacatttctcattgtaaatagtattagttttctataattaatttcttgaaaatataggtgtgaatgaaatgcaggtt

SEQ ID NO: 217017 - DNA, 547 bp, Homo sapiens
  misc_feature (1)...(547): n = A,T,C or G
nnnnnnnnnnnnnnnnnnnnnnnnnnnnnnnnnnnnngaggagttgagtctaatcgatgggagaataagggaggacgacagaaggcccttaggcaattgccaagacaacacgttaggaaaaagggcttcaacttcttgtgctccatgtgctgcaggttcatattggccttctaattctggatgtgctctctgaatctccactggaggtgagctcatctattttaggcgacttggacagtccaggtatgctgatgtagctgtattaccttttcagtgatggtggtctatggagaggrcagtcctgcacgcctccagtttccagaggtaattgtctacatcaaagccttctgatgagtgacctctgtgttgctacattaatattccaagtcagcactctggcaaatgtgtcctgtatcttctccatcttcctgtttctgtctgcccctctctcctatctgcctcccgtttcccttcttaaatacaatgcctcattcagaacctatgggaacggccatatgacatgccttttagaaactggggattacca

SEQ ID NO: 217018 - DNA, 306 bp, Homo sapiens
aagtcatctgttttatgatgttttggtgaggcctcagtttaacaaaacaaacctttaaatacccattatttgctggcactgtagttctttcatgatacttgcattataaagctctcaataggttaagtaaaataaagtttacaaactgcatggagctcagtgaaggcagtccctgttcctactattgtatgaccagttctccaattctacaatgtcattttttcatatagaagtttaaatctttcttctgataacataagtacrtcgtgtaagttttattaaatactgtcagtgagcttctgaagg

SEQ ID NO: 217019 - DNA, 422 bp, Homo sapiens
atccatttaatttttaccttttcttttgtggactgattttggccttacaaatgaccttaagcttttcagaccccactcaactgccattagaatactacacrgcagctttgtccccacgcccagccacatgtttttcttcttcccaagctcaggttgtatagcctgtagatattcatacctgaccaagtacttttggatgtgccatctcatttaatttttgcagtaattctgttgaagcactgtaaaaggtcacatgagataacggagacttgccttttaaaaatatttagttaaaccacatgacatggctgatatttggatatctttgacctacaaaaacaatttcttaggattcaatctaatccttccttgaatatgcaagatatgagttcttaaatagttttagttcacgaagcgcatca

SEQ ID NO: 217020 - DNA, 571 bp, Homo sapiens
aggtcggattgtttttgataatagattatgaggtcatgtttttctcttgtaccagtgtaccaagaagaggatttaaattttcttagtgacaggaatctcagtctgggccttctgactttcttcctgccagtatctttaattgccatgtgttcttattgagaagaaaagttgtcatcaggttctctttgatattaaaatggtttcaaacacctcgatttgatttaatttaggtctgatattgctaagcctctactaaacacaatttcaaatgatttctctttgatcactattctattggtgagataaacttctcagaagtggcttaaaatctgtttgctttgttttttgacaaagttatctrcagatttgcccattagctttttcctattaatcaagttaatttaaatctaactgctaagtaggttttccttagaactctttttaaaaaaactgttgaagaaatgtgtctctggtggattattctgatttcctaaactcagactctaaaattgtgtgttttcatttaagagtctgagaattgctagtgttcaatttgctcagattggatttt

SEQ ID NO: 217021 - DNA, 572 bp, Homo sapiens
gatgaatttgagactgatttcccatctccttggctgcagcaacctattaaagccttcttccctgtaaatactggttgtcttggtgattgacttccagtgcagcaagcagcaggacacagacagaacccctgtgtttcagtaacatcttcattctagccccactttttttcattctttacatttcttcaaacatcccacgttcattcataattcaacaattcaaggctttatacttmtttttttctgtctgtaatggtgttaccctgcaactttcatgagttgttctttacttggtccaagtctttgctgaaaatttacttcttcaggtttattctgaccttcctatcaaaattgatcactttctctcatcttcctaggtctgtctttatccctctatcgtgcttaatttttttccatggcacttattactatctgatatcatatttcagatcactttgctcactgccttctcaacaaaaactttggatgatgagttatcttttttgaaggataaggtatcctacctgataatatcttacaagatattgtgactactaaataaataatgcctg

SEQ ID NO: 217022 - DNA, 611 bp, Homo sapiens
aaacctctgtgtccatagaggggattgggcagctgaaggggaaggcaggatcgaacatcttgaaaggaaacaacatgtgtgtaatgtagtttgttttctggtgaggttttcatttgtctaggggaaaggaaaacattttgaattatatcatagctgtggcattcaaatgcacaaactctgaagagcatcaggagtgtttcttaaaatatatgtaatttacaaatgttgatttaagcttctcacattacttctcttatcctctaaatttgcctgttgcaaactgtttgggcatatctcaaaatcactggtcaaaagatgaaggcagcagctgccaaaagattctggggaaaaaatttcaatacaataaaaatgtaactattaacaacagtataaaatcaaaaaattgcatcaaagttccaaccatttgcattagaaaatgacctttcacacatgaataacctgaggcttggaaatatgattggacttgggtgaaacagaacagctagtaagtgaaagaacccacattggaaactrggtttcctgacttccaggttagtgtccttaacctctgttccttccctcacgttttgttgtgcatcttatgttacaca

SEQ ID NO: 217023 - DNA, 447 bp, Homo sapiens
ggcaaagaaatttttttttttttttttttttttttggctcatgatactacattgaaaatgggatgaaagtaaatgtaaggggtgggccataaaaatsgtagaggaacagcagccagacgattgtagtttgcttagattaggactgaaaacatcgtggactgcactgttgtaagaaatgatggaatggagaataggtttgtggcggaagaggcctaagaggcagcaagcaggaaattaaaagagcaaggcaattagatacaaaggagatttcaagattgagacctttgttgttgctctttcaaaacatggaatcaagctatttacactaaaaaacaaagaaaggaataaatggccaaagataggcaagaagatggctgatttatgcttattatgccagaaattcaaccagtagccagcttgaaaaaataaagatgcataacaaaaaca

SEQ ID NO: 217024 - DNA, 534 bp, Homo sapiens
gtcaaatgttgttcacttttatctaatatcaaaatccatgctcttgttcactctactagaatgggtcatgaaactggaggaagtttgaaaaacctataaagggaaatattttcctgggtacagaacatggtaattatcatcccttgaatgataggactcacgttgcaaattctccctgacctarcatcagtgtgattgatccaagatcccaaacttgaattcatatataatgagttactttattgatctgacaattaaatacaagccagaagatttcagtgtgcaattgactgacaaacgaaaatatttcctaaagtgctttaaaattatgccccatccatcactagtgctgcaggaagctagttagatataactgtttcttcagttatatgccacatactatcttatttgaacctttctgaaatagtgctatgttttataatcaatgatatcttaccattgctgttggtgagaaagcaactttattgtagtcgtcactgctttagcatgtgcaaatatgttttcccatctcta

SEQ ID NO: 217025 - DNA, 638 bp, Homo sapiens
cctcctgaccccatttacctcacccattttaatctggaccattcatttccttttcctcccactctagttgggctttattccccaaagtgtcttctgagaaggagcttcagtagctgagtttcaagaattcacagactgcagactgttcagacccttcagatattagagaggagttttttttctcaccwgcaaagtacttctcccattttcagctactatctatccaattggcctgaaacaatttctcatgagtatctattagaaaattgggtgttatcctgacctcatttccatcaaatacctcattgctttcctctgttgtctcctacaaaaattgtagtatcatctgggtcatgacaatgtcagctcatatttgagaatctgtgagaacactttgccacctaaatttgttgtcaaaattgtttatcattcttttaagttttgctgttctagtcgttttctgttttaatgggaaaattcagagattcacacataatgtcattgctgccaccaatttttccagaattccagaatagacttatcttggggactgcatgaaaagaagcctatcctatttctggcacattctaactactccacattcaatgtggttttgtagtttgtggatgtgtaatatt

SEQ ID NO: 217026 - DNA, 490 bp, Homo sapiens
tcttaaaaatcataacatacataaaaatctgaaaagagatggataaaaataaccattgggaaaacatcacagatgttgaggaattattttctatattcagttaatagaataaaatgtactcctctcatttgctaatacatgataaaatgagatgtgtctaaaatatttggatatcttcattaactgtaggcacactgaaagtgttgctctttttattttaatttttcagctctcctttaagatccttgggacaataaaatagccaaattagttctagatttgagtgtacatttatttattaagctcagtttatagttattaacatgtgagccatggtctccactgatagttttaacaatattttccctctaaaayatgaagctgataaaaagggagagtttacctgatttcctcccataccatgacagttgaatatacccactttttcattttccttgcggcccatgttgtctaaacactgattggtttc

SEQ ID NO: 217027 - DNA, 241 bp, Homo sapiens
ttgttgaaaggctgaaacaaacaaatgtattatgaaaatgtaaaagcatgcaataaactcagcaaggggtaaccatatataaaactaagtatatttctgtgcagaatatagtccctatagtcgaataggcgcaagtgttagaaacaggctstgccatggggtccctgaatctgacttctgaatgtcaagaactttttgaaatctgatgcagaatgtcgtgctcacatgtgttggtgaattc

SEQ ID NO: 217028 - DNA, 561 bp, Homo sapiens
tgctttccttccttcttggctgtgacacaatatttgcataacctttagcacattacttagcctcacgtcaggtcattttctcatctgtataactgttgatgtgaaattgaaatgaagacagcctggtttataacattcaacaagtgttaactgttactgtgagttataaaaattgcactaatataaacagaaggcrtggtcatttctacctttgtaaagctattatttgatttctaaacagaaagatcatacatggaagcgaatcaatggactctggaatatccctggacaacagttataaaatggattatcctgagatgggtttatgtataataattaataataagaattttcataaaagcactggtatgtgtcttacataatttttaatccttttcaaatgtttgtgccatttacatttgatataatattaaaagcagtattattgaggtattagacagtaaaccgtgacacagactagctgtgaagtagagattgggcaggacctacaggctctctgcatacactgtgaacgcgtcactcttctgcccaacttcatag

SEQ ID NO: 217029 - DNA, 517 bp, Homo sapiens
attcagttaaatgtaagagatcatagatcttgatctgcctaaaaatactcttctgccagtttgctgtcatacctgaaatttctatgactgactagtcttttgagttatttccagcaaattagatagttcctgtcctcatgagggttgggggcaataagatcctggaagggaagtagaaagcagtgtggtttgctggaccagtgtgttagcgttgatgctagtgacagtcatcagtcatggtcctggccatggtcgctccatgccagggttccaagacctgtggcctccccagcactgccattgccaccatttctgcaaccatgcattctcttcycttattgtctggggtcaagtagctgcaatgttaagttttcaggaaaattagctttatcagtttaggtttatatggctttgttgtcctttgatatgttgtgatttcttttcacttggtgtttactttctctccttcattgcagaagtaatccatcctgtaccagcatatcattgcaagcaccaa

SEQ ID NO: 217030 - DNA, 517 bp, Homo sapiens
attcagttaaatgtaagagatcatagatcttgatctgcctaaaaatactcttctgccagtttgctgtcatacctgaaatttctatgactgactagtcttttgagttatttccagcaaattagatagttcctgtcctcatgagggttgggggcaataagatcctggaagggaagtagaaagcagtgtggtttgctggaccagtgtgttagcgttgatgctagtgacagtcatcagtcatggtcctggccatggtcgctccatgccagggttccaagacctgtggcctccccagcactgccattgccaccatttctgcaaccatgcattctcttcccttattgtctggggtcaagtagctgcaatgttaagtyttcaggaaaattagctttatcagtttaggtttatatggctttgttgtcctttgatatgttgtgatttcttttcacttggtgtttactttctctccttcattgcagaagtaatccatcctgtaccagcatatcattgcaagcaccaa

SEQ ID NO: 217031 - DNA, 517 bp, Homo sapiens
attcagttaaatgtaagagatcatagatcttgatctgcctaaaaatactcttctgccagtttgctgtcatacctgaaatttctatgactgactagtcttttgagttatttccagcaaattagatagttcctgtcctcatgagggttgggggcaataagatcctggaagggaagtagaaagcagtgtggtttgctggaccagtgtgttagcgttgatgctagtgacagtcatcagtcatggtcctggccatggtcgctccatgccagggttccaagacctgtggcctccccagcactgccattgccaccatttctgcaaccatgcattctcttcccttattgtctggggtcaagtagctgcaatgttaagttttcaggaaaattagctttatcagtttaggtttatatkgctttgttgtcctttgatatgttgtgatttcttttcacttggtgtttactttctctccttcattgcagaagtaatccatcctgtaccagcatatcattgcaagcaccaa

SEQ ID NO: 217032 - DNA, 561 bp, Homo sapiens
tgctttccttccttcttggctgtgacacaatatttgcataacctttagcacattacttagcctcacgtcaggtcattttctcatctgtataactgttgatgtgaaattgaaatgaagacagcctggtttataacattcaacaagtgttaactgttactgtgagttataaaaattgcactaatataaacagaaggcgtggtcatttctacctttgtaaagctattatttgatttctaaacagaaagatcatacatggaagcgaatcaatggactctggaatatccctggacaacagttataaaatggattatcctgagatgggtttatgtataataattaataataagaattttcataaaagcactggtatgtgtcttacataatttttaatccttttcaaatgtttgtgccatttacatttgatataatattaaaagcagtattattgaggtattagacagtaaaccgtgacacagactagctgtgaagtagagattgggcaggacctacaggctctctgcatacactgtgaacgygtcactcttctgcccaacttcatag

SEQ ID NO: 217033 - DNA, 602 bp, Homo sapiens
cttccattgtccaagatggctcataccactgtgtctgcattctagtcagtacaaatggagaaggggacrgtatgccctttgcctgttagaggatcacttagaagtggcatactttccttctcacgtcccattggccagacttagcagccacaccctgctgtagaggagcctgggaaatgtagtctttgttctggatggcctccaatctagctaaaaaattgggattctgcttctacagagggagagaacaaatatggaggaagagcccctgtaatacagaggaaacatgtcaaactaatcacataaatcaacctaaaattgtaagtctataaagagaaaaagagtatgtagggggaatttgatgtagagagggaaatcaaggaagccctctctgagaaagaatttacagaagagtaaagccagagggcatgaggacagtgtggtgttagaagaatcccaaaatatcattaaaaatacagtttattgcgtaactttgaggtatctaaactgacggcagttcataaacatttttgctcatgtcaagataatattgcatggtagttcttagtagcttcattttgcaaatgagaaaattgaagctt

SEQ ID NO: 217034 - DNA, 541 bp, Homo sapiens
agcacacaaacaaaactgctccttttgctgtgatcttctttagaaactggaaagacatttgcaaataaaaggaaaaaaaatccatgactttattcaacaacttcagatatactgtatgggaacatgatgaagaaactgagactaaaactaagaggtcatcttaacctaacctggggcacggcaacacatctcaaaccattttaggaagttggcataaataactttttttaaacttcttactaaagtatgtaagattagggttatgtacagtataattccacaattctcatattttattatacatwtaattattgctagaccatagtataaaattaattgtacaatgaagttcattctaattgtttcttcttaccatcacgcatcaattccacaatttcttcacgtgtaagatcatttttattcctgacttcatatttcaagtttctgaatgtttccctgaggtttgctgcatcgacatctgtaccagaccgagatgtcattccttggaacagaaagaattacttttaattgtatggaaaac

SEQ ID NO: 217035 - DNA, 415 bp, Homo sapiens
acctgacctttacattgcaaagtaggaaaggagctcactgggcaaaacccagactgctggtctaaatatgtggggggaggtgctggtggtagtggaataatatgcttgtttttggtttttgaaacaatagagccaacagtgcaaaattctataggaaggaggtatcctaactagaaatgtgaggcagaatatctagaagtaaattttcaaatatgcgtaaagcaaaagtaaacaaggtgttgtgtttttaagttaatggttgaaggtrgcatctcaacttatagccaaaagcaataaaactgatgccatttagagctccattttcaactattctcttctcactccttataattaatctgacacaaaccctgctatcttcccagtgtaatctggcttccttccatttccaccacca

SEQ ID NO: 217036 - DNA, 484 bp, Homo sapiens
aaatgtcagcatcatgcaaagtgccacggaatagtgaatcttgctctaaaagagcatgaacaagtctttctaatgttttgtacggtgcctggcactctgtgggtgcttaataaatggacaggagtttccattagaagcacatgtgaagtagcacctatgttactaacatgtctcattcattttgctattttttgagacagggtctcgctctgtcgcccaggctggagtgcagtggcgcgatctcagctcactgcaacttccgcctcctgggttcaagcaattctcctgcctcagcctcctgagtagctgggattacaggcacccgccaccacgcccagctaatttttakatttttagtagagacggggtttcaccatgttggtcaggctggtctcaaacccctgacctcgtgatccgcccgcctcggcctcccaaattgctgggattacaggcgtgagccactgcaccgggcctgaatttttaa

SEQ ID NO: 217037 - DNA, 493 bp, Homo sapiens
catgcaaaacagcagacaagtaatcacatattatcaaaataggatttgcattctctggtctaagcttgttttttaatgatgagcactcccccaaaaawtccataaaatcttctaccgatgtcatataacatgtagatattattttcattgcattcactttcttgaaagaaaggcaagatactgggccaggcacagtggctcacacctgtaatcccagcactttgggaggccaaggcgggcggatcacgaggtcaggagatcgagaccatcctggccaacgtggtgaaacccagtctccactaaaatacaaaaaaaaattagccaggtgtggtggcatgcgcctgtagtcccagctactggggaggctgaggcagaggaatcgcttgaaccagggaggtagaggttgcagtaagtggagatcgtgccactgcactccagcctggcaacagagcaagactccgtctcaaaaaaaaaggtgggggggggggagggg

SEQ ID NO: 217038 - DNA, 390 bp, Homo sapiens
tggacataaccaccaatagccccaatgctgccaaaatttccagtaccagatagaaacaaaaggattctcagcccaaaagggccttctacaagcatgaccagagactgtggtttgatgacgtcactgagaatgacacacagatacctattctcctctctgaaatcatgacatctggctgtttttcccactccctaaggttgtatgctatgtctyttctccccagtcccctagaagagtacagctgccacccttgtcctcaacaaaaacaaaccacaacaatatcctgatgcaggcacttccaggcacctaagcacaaccaaaccagatactcttaagatgtacttacatggaaatcaggcatcagacaactttcaacagagggacgtccta

SEQ ID NO: 217039 - DNA, 581 bp, Homo sapiens
ccagctagactgataatgaaacctgggacaatggttcctttcaagtgtggttattgcattcaatgatgccaagctgaaaatagtgataagacttaatttataatcacctatctttacatagcttgttctctggttagtgtaatgcttttgttgggctgagcaggtgttgctttgggggcctttgtgggcacagcaaagctgaagagctctggattcctggcagagaggtaggatccttatccttagggagtraattttctttcccgtttcctctgggtcttgctaagcagtggaaagttacccaagctggaatgcagagttttcctatgtggggcttgacacagcctgattttcagtgatggctagagaaaatacagcgccccctgccactctaacctaggccaggccaagactccacaaccttcagaaagtgcacaggcaaagacctggactattagtggcttacgctccctatccccctccctttaaaaaatgcaaaagtttgggtatttttcttttctttttatttttttagagacaggatctcactctgtcatccaggctagagttcagtggtgcaa

SEQ ID NO: 217040 - DNA, 508 bp, Homo sapiens
cagcatgggggtaatcactcccatgattcaattacctccactgcatccctcccgctacacttggggattatggaaacttcaattcaaaatgagatttgggtggggacacggccaaaccatatcrgtgaggattaagtttcacctcctagaggatggagtatgttcatatgctgtattatctggaatccttctgtaagaaagacttgtctttcctatttatctgtccatttgcttattcaatcagttatttatatcagtatggactcatgtattttcttatactctggcttatagtatgttatttattttcttgctcaaattcttccagtttgggcattggagctctttcaggttggctctggtgtccctttgacatgcccctatacttttattttttggcatcttcttactttctggctatataacaagatccgcactcattttatattttccctgccctagacctagaatcagccatttctccaaggagctctggttccttttattg

SEQ ID NO: 217041 - DNA, 509 bp, Homo sapiens
ccctttctcttgttcttaggaatcaaatggaacaatgttgctctcctttggaaaatagggctctgctcacttaatctgcctggctcatggccctgtgtgacagtgttggaaagtggcctgcaggsgatctctacatttggtaagagctgctgtggagggagaatctgcgctctacccctcagaacgcctctccggcaaggggccccttctcacctctccatccttggccaggggaagctggtcagggccacgctcatctgggttggatgaggctcttggaagagaatgtgtggagggtcttgaatcatacaaaatagctcacgtgtgcggcttgctggggtcactggtggaaggatcctaggctcaggggagaaatgtgacttgccacagaagacagagcctgcccactgaggggctacagggtggcaagatgaagactcccagactccttggcctgggcgttctttcttcagcagttctcagctgtggagctgatgggctgtgatctg

SEQ ID NO: 217042 - DNA, 509 bp, Homo sapiens
ccctttctcttgttcttaggaatcaaatggaacaatgttgctctcctttggaaaatagggctctgctcacttaatctgcctggctcatggccctgtgtgacagtgttggaaagtggcctgcaggcsatctctacatttggtaagagctgctgtggagggagaatctgcgctctacccctcagaacgcctctccggcaaggggccccttctcacctctccatccttggccaggggaagctggtcagggccacgctcatctgggttggatgaggctcttggaagagaatgtgtggagggtcttgaatcatacaaaatagctcacgtgtgcggcttgctggggtcactggtggaaggatcctaggctcaggggagaaatgtgacttgccacagaagacagagcctgcccactgaggggctacagggtggcaagatgaagactcccagactccttggcctgggcgttctttcttcagcagttctcagctgtggagctgatgggctgtgatctg

SEQ ID NO: 217043 - DNA, 542 bp, Homo sapiens
cttagtgaccatacaccccgcaatactccccttactccagctcctcctcgaattctgcccgctaaacctctcctctaaattgctagaacatttaatgtgtccaaactaatttttcatgctaaatagcatacttaccaattatttttaaatggtatgattttcttggatccctagttttcttcagtgactatgctgaggatgtagtaggtattttttaaaatactggctagttaaacacttgaatagttatatggtaattgttcccattgttacctattggttgagaaaatacacattaaaatattactatcaatttgttaatgtttttatataarcatattttacttgacaaaacagcatgtatgcaccttaaaatagtgttactttaccattacttttaatgcaaaaaccccaattacttttcaccagcccaatattacaaaagtgtgagatatcatgaatttggactgttgacaaataactcagaaacctttagttagtattcacacaaaaggttactgacataaaagagagtcagtcat

SEQ ID NO: 217044 - DNA, 542 bp, Homo sapiens
cttagtgaccatacaccccgcaatactccccttactccagctcctcctcgaattctgcccgctaaacctctcctctaaattgctagaacatttaatgtgtccaaactaatttttcatgctaaatagcatacttaccaattatttttaaatggtatgattttcttggatccctagttttcttcagtgactatgctgaggatgtagtaggtattttttaaaatactggctagttaaacacttgaatagttatatggtaattgttcccattgttacctattggttgagaaaatacacattaaaatattactatcaatttgttaatgtttttatataagcatattttacttgacaaaacagcatgtmtgcaccttaaaatagtgttactttaccattacttttaatgcaaaaaccccaattacttttcaccagcccaatattacaaaagtgtgagatatcatgaatttggactgttgacaaataactcagaaacctttagttagtattcacacaaaaggttactgacataaaagagagtcagtcat

SEQ ID NO: 217045 - DNA, 609 bp, Homo sapiens
ataaggttatgttagaaatgggtgtaaggtcttaagagaacataaagggctaacatgtaatccagatggggtgtggaggtttctgggggcaagtgacacctgagaaaagtacattgaatgagaaggagtgacttgatgatgaagatgagtaaagacattccaagaacaggaagaagccratgcaaaggcatggagatatgagaggatgctgctatgactcaaatggagaattatccagaatggcagttgttgtgttcttcagagaggaggccatctgcactgggtgaactgaataggccacatgcaaagttcaggggatccctaagatcaccctaatttctgacataaactgcaaattctgggatccccaagaccactcttaggttcaataattcactagaagtgttcatagaactcagcaaagctgttgttctcatggttacagtttattacaacaaaggatatagattcaaatcagccaaaggaagaggtccatagagcaggggccaggagaaatccaggcatgagcttccagttatccttccctggtagagcctcgcaaacagtgctaatatttccctgaaatgatgtgtgacaacatgtgtgggg

SEQ ID NO: 217046 - DNA, 484 bp, Homo sapiens
actttgctccaagatgagagcaggcactgatagcagggagaatccaggcagagggagcaggcatttctgagcctatgarggcagggggggcttcccgggcccccaagagtgcaggatgcgtgagtctgcagccacggcttgggcagctgcagcaacacctggggagcttctgccccaactcagaaggggcagggctctcactggctccatggagcatgaagccccagccatgtctctctgctgcagccagcatgatgacagcggttgtgctgtctggagcggccactgccatcagtcatccctatcaccccagtcaacatccaacaccaactggtcaaattaaaagtaaagccattctagaataatcagccctcagatggacatggaactacttggtcaacccacagattcaggaacaataataaaatgatcgttagcttaaatttcttgggtggtttctcatgaagcaaaagctaacagatgc

SEQ ID NO: 217047 - DNA, 484 bp, Homo sapiens
actttgctccaagatgagagcaggcactgatagcagggagaatccaggcagagggagcaggcatttctgagcctatgaaggcagggggggcttcccgggcccccaagagtgcaggatgcgtgagtctgcagccacggcttgggcagctgcagcaacacctggggagcttctgccccaactcagaaggggcagggctctcactggctccatggagcatgaagccccagccatgtctctctgctgcagccagcatgatgacagcggttgtgctgtctggagcggccrctgccatcagtcatccctatcaccccagtcaacatccaacaccaactggtcaaattaaaagtaaagccattctagaataatcagccctcagatggacatggaactacttggtcaacccacagattcaggaacaataataaaatgatcgttagcttaaatttcttgggtggtttctcatgaagcaaaagctaacagatgc

SEQ ID NO: 217048 - DNA, 588 bp, Homo sapiens
tcattcattcaactatttaacaagtatttatagctactgaggatacagcagtgaacaaaacagacaaaaatccatgccctgtggaygttataatatagaaaaagaagacaggaaataaacgaataagcttatcatataacataccagcaggtcataaataccatgaaattaataaaacaaaaattgtatatctaacttttcagagtgaaggtgtcttgcatttccaaatagagtggaaaaggaaagtattcatgagaaaatggcactgaaggaatggaaggccacatactgacagcagaggggaagctcttcaggaaaagggaagagcaagtacaaaggtgtcaccaaaatgccaggggttcagtccaggtcctgctgctcactgtgcacaaagccagtcactgagacaataagtattgccagagaagaaggtgctgccgctgaggagatgggagaccagtctcaaatccatctccctgatggtctagaattaagggtttaaatggcagagaagaaatgtaacgtggggggaaaaaaaaagacaggatttagggatgagtaaggaagaggaattggtcaaccagaagc

SEQ ID NO: 217049 - DNA, 580 bp, Homo sapiens
aggtaatttagaacaaaactgtaatactcagtagccgttctaataaattcctttttggaatatttcaaaatttaagtgtcttaactaataccagcaatgggctgaagtgtcttggtgtgatattttgagtgattgctttgtgctgtctgacattacacttgataccatttggttttctaaagtgtgaatcagctttccyagaagtcttggataattggttacattggaaatcatgctcacacctgtaatccagcacttggggaggccaaggtggtaggatcacttgagcccaggagtttgagaccagcctgggcaacacagtgagaccccatctctacaaaaaaaattttaaaattagcctggtgtggtggcgggcacctgtaatcccagctacttggaaggctgaggtgggaggatcacttgagcccaggaggttgaggctgcagtgagccatgatcatgccactgcactcagcctgggctacagagtgagaccctgtctcaaaaaaaaaaacgaaccagcatgttgctgtgggcttcctagagaatatgctgactgtagcacatcatcaccccaaatg

SEQ ID NO: 217050 - DNA, 394 bp, Homo sapiens
tacatttaagattctaacacatgaagaagatgttctttttcactaatgggaaaagatagattacttggtcctcaatcttacaatttataaaatgatggattttgacaaagacatcaatagcaagacagtaaagatttctttccttttttctgtttttaaagattacttaataatttaatggtagggaaaactctcttaactcagaagtttttttttttgaagacagacatatttgttgacattaagccatttaaaattgtttatagcaaaagatacaataaacaaggtgctagttacaaacacttgcaactcagaggccagtggcttcatgtcttgtaygcaaagaaagagctcttacaaattagtaagagacaatcacccagttaaaaaacgg

SEQ ID NO: 217051 - DNA, 628 bp, Homo sapiens
tattgtctttgggtaataagatcatgtgtggtttcccctttatttttatttattttctccatttttttcccctacattttctgagtgttctacaacaggcctgcagttcttggataatcagaaaaacagcgagagagagagagagagagagagagagagagagwgtgtgtgtgtgtgtgtgtgtgtgtgtagcagcatgcagatgaggcgaaacttgtttgcttgctttggtgggagaagttgtcattttaaagatgcaggtgcttctctaacaggaaaagcaaagcacattccctttatccgggcagaaccccagagctggcctccatagctatgcacctgggaacaggcatcttgtgttgatgaaggctgtccctggaaatatcccttggaatgcagaattcacgattcacagcaagagtgtgggtgagcacacagtgggagaagcctcttggaggaaaagggatggagaccttgactccttccctttcacatttttaagaaaaaatttgattgacaataatatacatcagaaaagtgcacaaatcataaatgaactcggttaaactaacaccaagatcaaggcacagaacattccagaagctaccttgtgcccccgcccagtcac

SEQ ID NO: 217052 - DNA, 600 bp, Homo sapiens
tctcaccattctggaggctggaagtctgaggttgagatgccggtgcgtatctcgtttctgatgagggcccatttcccggcctgcagactgccaccttctcactgtgtcctcacatgacagagagggacagcctgagtctctcttcctcttcttagaaggacactagtcccctcgtgggggccccaccctcatgactgcccctaaacctaatcaccccccaaaggccccatctccaaacatcatcacactggggatcagggcttccacatgaaccctgggaggcagaggcgggctctgtgttttagccacgcctggggggcagaagaggagaccctgacagtgtggactccctggggtgggaaggagtgggctgaggayggtgaatgtagacggacttctgggaagtctctaagagaaaagaaagtgagagattgatgggggtgggcgccgtgggatcaggggaagggttttggggttttggtctcatatttgttttgaggcagggatgtgcgagctaggcctggggagacagtgagcaggagagatggagcccagtccaggctggggcaaggggagggtagggctgaggccaggagggga

SEQ ID NO: 217053 - DNA, 574 bp, Homo sapiens
tctcaccattctggaggctggaagtctgaggttgagatgccggtgcgtatctcgtttctgatgagggcccatttcccggcctgcagactgccaccttctcactgtgtcctcacatgacagagagggacagcctgagtctctcttcctcttcttagaaggacactagtcccctcgtgggggccccaccctcatgactgcccctaaacctaatcaccccccaaaggccccatctccaaacatcatcacactggggatcagggcttccacatgaaccctgggaggcagaggcgggctctgtgttttagccacgcctggggggcagaagaggagaccctgacagtgtggactccctggggtgggaaggagtgggctgaggacggtgaatgtagacggwcttctgggaagtctctaagagaaaagaaagtgagagattgatgggggtgggcgccgtgggatcaggggaagggttttggggttttggtctcatatttgttttgaggcagggatgtgcgagctaggcctggggagacagtgagcaggagagatggagcccagtccaggctggggcaagggg

SEQ ID NO: 217054 - DNA, 378 bp, Homo sapiens
aaatccgaaatggtgtcagcattcacgcttgaagcgtatctccagccatcgtgtgcgggctgcagtgaacagtctccctgtgcttcaggagctcattgttatctcttagccacagcaattatgtgaggggcatgatagtagccccattttgcagatgaagaaactgaggctyggagggagtacctgtcctaggtggggtcacctagctcataaggacggaggctgacgccacctctttccaccgccttccgctacctctgtttggaattctctggcaagttgtgcaaagtgtagacctgcacctgcccttcagttttacatgcggggaaaatgaggctctgaggggcggctacacaactggtatagagactccaacca

SEQ ID NO: 217055 - DNA, 622 bp, Homo sapiens
gagagccagaatgcccagtatggggtacagagggcaacagaggggctgatgttggtggcgaggtggggaggagcatttcacagggaactgggcagctccaaggatgggctggaggagggacggtcctaaagggggtggtgggagacaggcagttagtgatggggggagagaaatgctctgaggggggctgctgtaggcagggaggggcaggtagcaggaggcagagggttgagcctgcagaagcccggagcagtctgtagctttctaatgcttcctagggaattctgctgctgagtagccatgggttcaacaggtctctaggatttgccttgaattactgccctgaggcccctaagtctggggtctcataaattcagcggggagggcacacctgtgtctgagtctgagcagcccagagcccccagtgttgtcagtgaacagctcactgaacttgcagagcattaaatcccagggcagaagaaagagcaggagggcagggtggcccccagctccctcccatcccgggtytggggagagacacctctggcctgagactcctcgtggcctctaacaagtcttgctctctctctcttttttttttttttttaaattattgtctccc

SEQ ID NO: 217056 - DNA, 479 bp, Homo sapiens
ccaagatgccattagtattttaacggatgtatctcacagacaattttcttttgatcttgtggttgactaaaacccctaggtctatgccccatgaactgtaaggaaagcctagtcacccaccattgcataattgtgccactgatttttttttcttttttttttttttagacagagtctctctctgttacccaggctggagtgcagtggcgccatctcggctcactgcaacctccgcctcccaggttcaagcaatcctcctgcctcagcctccccagtagctgggactacaggtgtgcaccaccatacctagctaatttttgtatttttagtagagacagggtttcaccatgttggccaggctggtctcaaactcttggcytcaagtgatcctcctgctttggcctcccaaaatgttgggattacaggtgtgagccaccttgcccagcggagacactgattttcaaaacccaaatgtagga

SEQ ID NO: 217057 - DNA, 538 bp, Homo sapiens
ttatgcctcctatttattgcacacttactatgtggtagggrctcccttagcaatttcagctttttatctcatttaattttcttaatactatgaatttacttaatactatttacttaatttacttaatgcttctcattgtgtagtctaggtatcagtatcagtctgcaaactgttaacttgtcaagaccaggtaagtttaaaaatcgagacaaagtttagaaactttaatagaagtgtgacattgttgtgacattcagtgattcattgacggtctcatctcattgaacaggatatagatcatatgtgtgtttttgtacttacacagtgaattgtagtggagtgtaggtaaactgactttcaagaaaaagcagcaaacaacaacaacaaaaacccactttgacttgtagccttggccaatttatgatgtaaatactcccacatggttgatttgaagctaccaatatgatacagaaaacagaaaatttagcaatcagcagttccaagccagcacaagctggcttcaacacatccttgggtg

SEQ ID NO: 217058 - DNA, 494 bp, Homo sapiens
ctttagcaaagaacaaagaaggatggcagatgaatacatgaaaaaaaagtgcaaaaactttagtcattaaagaaatgtaaatagaaacaacatggatatcacctcttatccactagagtagctaagattcaaaaaacagcagaaacatcaactgataaaatcaagtgctgacaaaattgcagaacactgggtctctaayacatcactagtgggaatgcaaaatggtatcatcactttggaaaacaggcagtctcttttaaagtaagtataaatctctactcatagtatggtaccatagccatcatattcctaggtatttacccaagagagttgaaactatccatacaaagatctgaacatgaacatctacagcagctttagccataattgccccaaactgaaaacaccccagacgtccatcagctggtgaatggttgaaaagtttggatacatatctacagtgagagagtacttagcagtaaaaagcaattttt

SEQ ID NO: 217059 - DNA, 494 bp, Homo sapiens
ctttagcaaagaacaaagaaggatggcagatgaatacatgaaaaaaaagtgcaaaaactttagtcattaaagaaatgtaaatagaaacaacatggatatcacctcttatccactagagtagctaagattcaaaaaacagcagaaacatcaactgataaaatcaagtgctgacaaaattgcagaacactgggtctctaacacatcactagtgggaatgcaaaatggtatcatcactttggaaaacaggcagtctcttttaaagtaagtataaatctctactcatagtatggtaccrtagccatcatattcctaggtatttacccaagagagttgaaactatccatacaaagatctgaacatgaacatctacagcagctttagccataattgccccaaactgaaaacaccccagacgtccatcagctggtgaatggttgaaaagtttggatacatatctacagtgagagagtacttagcagtaaaaagcaattttt

SEQ ID NO: 217060 - DNA, 494 bp, Homo sapiens
ctttagcaaagaacaaagaaggatggcagatgaatacatgaaaaaaaagtgcaaaaactttagtcattaaagaaatgtaaatagaaacaacatggatatcacctcttatccactagagtagctaagattcaaaaaacagcagaaacatcaactgataaaatcaagtgctgacaaaattgcagaacactgggtctctaacacatcactagtgggaatgcaaaatggtatcatcactttggaaaacaggcagtctcttttaaagtaagtataaatctctactcatagtatggtaccatagccatcatattcctaggtatttacccaagagagttgaaactatccatacaaagatctgaacatgaacatctacagcagctttagccataattgccccaaactgaaarcaccccagacgtccatcagctggtgaatggttgaaaagtttggatacatatctacagtgagagagtacttagcagtaaaaagcaattttt

SEQ ID NO: 217061 - DNA, 567 bp, Homo sapiens
tttcaatctgtacaatgcttggcccccaggagtcatttcttctaaatctcttgagaatattcctaagacaaaaaaaaaaatattcgattcaccattactgttagcaaatcattttagaaatactcattgtagttaatttactatttggatgctgtggaggctacattgaagtaagatgaaaacataatttaggtaaacttgcttctccagtccatccaccaggaatcagtactcgtgttagttcaaggtctctggacttgagctcctttgaaggagaaactctgtcttgttggtttatttcctaatgagaaattaatgattgtgttagtgtagatgattgacatttgtgtagaactgaagtttataaaacatttctgtctcactgaatatagaaaagaagtcttgtgcagcagatttgactattccccttttcaaaagatacaattaaaatctcaagacaagaaaaaatttaaawaacagaaatgaaaagccagtctagctggaaagtggcttgaaaccagagttcccacccaaattaaagcatgcttctgtaatgcacagctatgt

SEQ ID NO: 217062 - DNA, 547 bp, Homo sapiens
taaaatttatgggcttaggtctttaaattccaactcaaccttatctcccattggctattttctttacaaaactaccatctcttaaagtctataccagaacacataatgatggaatatgaacctcagattctcagacatctcatttttcccattcttatggttagaaaaaatgggttgaagtattctgaaaattgaaattagaaactttcacataaataatttctagcttcctttgaaaagtcagaaattcataatactggccactaccatttcgacacatcaagtaacactaaatcagtaggtgtgacccttctgagacaagtgtgctcttcagtttgacatagaccccatcacctctattgtctcatggaaaagaagactcattgtcagttgtcattttcatcggtttcttgctgttttgttttktgttttttaacagaagatttctattactttacgcagagcaattcattttttcattagctcccattctttaaaatgcccacttggattttgattggaattgcatagataggtcaatttggaa

SEQ ID NO: 217063 - DNA, 400 bp, Homo sapiens
cccaaaacaataatagctggaggcttcagtaccccactttccacattggatggatcttccagatagaaaatcaacaaagaaacatcagacttaatcttcactgtagaccaaatgggcttaatagatatttacaatgcatttcatccagtgactgcagaatacacattcctctccatagcacayggggtattctcaagaatagactatatgttagccacaaggcaagtcttaaaacattcaaaatgaaataaaatcaaatattttatctgaccacaatggaatacaactagaaatcgacaacaaagaggaattttggaaactataggaacacatggaaattaaacaacatactcctgattgaccagtgggtaaaagaagaaattaagaagaaaattgaaaa

SEQ ID NO: 217064 - DNA, 530 bp, Homo sapiens
ggcatgattattatttcctttaattattttttagatttacacatcagggaaacaaagtttaaggctaacaatggatatacatacctaggtgccgcctatacatgaacacacatgcttttgccaggtctrttttttctaacttaaggtaggtgaatgagctcatagtagtagtagtagtagtagtagtagggttcaaatcttactccttccaaaacgtgcaatatatctttggttgaaatcagtcttgaaactgtttaagagagcttaccaacggcattgaatgaaaagccagtatttgctaaactaatagtagatatgtatgtacgtatgtgcatgtgtgtgtatatttatatatacagtatgtgtatttatagatatttattaatgtacgagggaaaaagaaggtggaaaaatttaaataagaaatttctatttacataactaggttatgtacaccagcaatgacctctttaaggaatcttgttgcagaataatgatgatactttcaagatgcatgggaagtaaacaaa

SEQ ID NO: 217065 - DNA, 530 bp, Homo sapiens
ggcatgattattatttcctttaattattttttagatttacacatcagggaaacaaagtttaaggctaacaatggatatacatacctaggtgccgcctatacatgaacacacatgcttttgccaggtctattttttctaacttaaggtaggtgaatgagctcatagtagtagtagtagtagtagtagtagggttcaaatcttactccttccaaaacgtgcartatatctttggttgaaatcagtcttgaaactgtttaagagagcttaccaacggcattgaatgaaaagccagtatttgctaaactaatagtagatatgtatgtacgtatgtgcatgtgtgtgtatatttatatatacagtatgtgtatttatagatatttattaatgtacgagggaaaaagaaggtggaaaaatttaaataagaaatttctatttacataactaggttatgtacaccagcaatgacctctttaaggaatcttgttgcagaataatgatgatactttcaagatgcatgggaagtaaacaaa

SEQ ID NO: 217066 - DNA, 530 bp, Homo sapiens
ggcatgattattatttcctttaattattttttagatttacacatcagggaaacaaagtttaaggctaacaatggatatacatacctaggtgccgcctatacatgaacacacatgcttttgccaggtctattttttctaacttaaggtaggtgaatgagctcatagtagtagtagtagtagtagtagtagggttcaaatcttactccttccaaaacgtgcaatatatctttggttgaaatcagtcttgaaactgtttaagagagcttaccaacggcattgaatgaaaagccagtatttgctaaactaatagtagatatgtatgtaygtatgtgcatgtgtgtgtatatttatatatacagtatgtgtatttatagatatttattaatgtacgagggaaaaagaaggtggaaaaatttaaataagaaatttctatttacataactaggttatgtacaccagcaatgacctctttaaggaatcttgttgcagaataatgatgatactttcaagatgcatgggaagtaaacaaa

SEQ ID NO: 217067 - DNA, 620 bp, Homo sapiens
aatgggtgcagcacaccaacatgacacatgtatacatatgtaacaagcctgcatgttgtacacatgtaccctagaacttcaagtataaaaaaaaagatgaaacatacaagagaaaaatttagaaaccagtatcatatattcaagatgaatataatatgtctaattggagctctgagagaatacaggcaatgatagtaaagaaataatgaaagaaataatagaacaaaaaatcctgaaagtgaagattgggaatragatttatattttaaagtgtacactaaactctgagcaagatataagaatgcacatgggtatttgaacacacacacacacacacacacacacacacacacagtcccctaaaaattcctaaaagcaaatcataaaaaaatacttctgtggatgaactgagagtctcaatttggacttgaagaatgaatatgacatagacaggtagattatagaaagaaaaaagagaaaaggttgaagcttggatgggaatcagaaaattagaatgagaactcagatactaatattcttccattaccaaattttagatttattataataaattaatattaaaaatgagaatttatgcaagtcagttaaatgccccaaat

SEQ ID NO: 217068 - DNA, 620 bp, Homo sapiens
aatgggtgcagcacaccaacatgacacatgtatacatatgtaacaagcctgcatgttgtacacatgtaccctagaacttcaagtataaaaaaaaagatgaaacatacaagagaaaaatttagaaaccagtatcatatattcaagatgaatataatatgtctaattggagctctgagagaatacaggcaatgatagtaaagaaataatgaaagaaataatagaacaaaaaatcctgaaagtgaagattgggaataagatttatattttaaagtgtacactaaactctgagcaagatataagaatgcacatgggtatwtgaacacacacacacacacacacacacacacacacacagtcccctaaaaattcctaaaagcaaatcataaaaaaatacttctgtggatgaactgagagtctcaatttggacttgaagaatgaatatgacatagacaggtagattatagaaagaaaaaagagaaaaggttgaagcttggatgggaatcagaaaattagaatgagaactcagatactaatattcttccattaccaaattttagatttattataataaattaatattaaaaatgagaatttatgcaagtcagttaaatgccccaaat

SEQ ID NO: 217069 - DNA, 508 bp, Homo sapiens
tagttatacatctcatttgatcaagtatatatacgccaaagttttatttaataattcatacatagttatatctttgagtaaccttataattagaatttgtataaatcgttttgctactaagatctttgtacaaaatactatttttctgttgtataatcactgagaatggagtgaaatggagtggacaaaacacagactttggagttaaatagaactggttttgattttcagttctgctccttatagcttgtaattttaagcaatgtatctaacttctcttgggccttggtttcctaaaatataaaataaraatcactatggttactttgtagtactattctgagaataagaattaataactgcaaagtgtaatgtgcttagaacattccctgacacacaatgaatgctcattaaataacagttattatcaatattgttatgagtattaaacctgatattatatggttctccttggggataatgggaaatatcccacggttggggtggg

SEQ ID NO: 217070 - DNA, 531 bp, Homo sapiens
aacaacatgatttttccttcccaagagaaatttttttttttaacactttcttactcctttcagggctctgagggactttgaagcaaattgacccaatgtactaaatagaatagtaattgcatattcgacaggtgttagtgtgtctcttggaggaayaggtgtcctggggatagaaagctcagatgaatacgatatcatcctttggacagacagctggaagtcaacggtaagcgtcactacatgtggaacagcataaacaacgtcctgtgctaaagtgaagggacatggctttcccagtaagttctttatttcaaaatcacatatattagggactttttgttttctaatgatgaatcgatattctgcctgctattttgggatgtcactctgactcttgctctcatacaatagaaaaatggaactacatagcaggaatccttggaagattgtattagtctgttttcgcactgctataaagaactacctgagactaggtaatttatgaagaaaagatgtttaattgactcacag

SEQ ID NO: 217071 - DNA, 471 bp, Homo sapiens
tttctgtacacccagctataggctatcaacttaaaacttgagaggttttttttagtgaggcttgttaatgtctattatgtgaccagtactgatcacaactttataattacatgaggaccatcatgtggttggatgttttcttacactgacaagcagataggcgctttttgaccatacattctccatgtttctccattgtcatctctctgctgtttctgctgataattaaaacctatgaaattcatgactaaatccgatatttaaayaatttattgtatgttttacagacaagctgtatccttcacttattgaaggtacaattaaaaacacataaaactttaattcatataatgtttaattggtaggtttgaagccaattatggtaccagtgtactctttccccagttttaattcctatattagttttcattaaaaatgttaaattaaaagaaattgtcattaagtatcaga

SEQ ID NO: 217072 - DNA, 528 bp, Homo sapiens
cacagtgaaaatggatgaagatttaaatgaaacttcctcagttatgtaatccaaactacaaaaatcgaagtcaagggagatggatgccaggtgttagcctaagagttggcatatattttttggagtgctgtgaggtgtattgcaagtcttgccattatttgtttacatttttcaaaaagctaaaagtcgaaatagccaaaataactcagactatttcaaaagctcattatttgcatagtgtactcatttgagcaagaggaaagtctgactgctaagagctgctaggaaaggataaaagtgaactgtatgtgtaaagaagggaatgagaargttgcacacaggtaataggctctttatcagccagtgctgccatccctagttgctgggaatataggctgatatataacaatatcccctttcctagacaattttctgatcaaccaggagctgcctttcctcaggggctatgcaaccacctcttggagttcagaatttagatgatgactaactgatatcaaggtttaaagg

SEQ ID NO: 217073 - DNA, 557 bp, Homo sapiens
tcttttcttttcttttttttttttttttgagacaaagtcttcctctgttgcccaggctggagtgcagggcatgaactcagctcactgtaacctctgcctcccaggttcaagtgattctgctgcctcagcctcctgagtagctgagattacaggtgctaccaccacacctgggaaatttttgtatttttagcagagacagggtttcaccatgttggcctcaaacatctgacctcgtgattttcacaccttggcctcccaaagtgctaggattacaagcgtgagccaccgtgcccagccakaacaactatttctaaactcattggtttatacaagcatttaatctcatgcctataggtctaaaggctgattttcatttggctgatcttgtatgaacttggctgggcagctctgcttcatgctacagatcaactagtgtggctcaactagtcaagtcaactagttgggaccaggtctgctccacccatatatcttctgggcgcaaggctgaaaggacaaatgactaccctgagcattttcttcagataccagattactgg

SEQ ID NO: 217074 - DNA, 557 bp, Homo sapiens
tcttttcttttcttttttttttttttttgagacaaagtcttcctctgttgcccaggctggagtgcagggcatgaactcagctcactgtaacctctgcctcccaggttcaagtgattctgctgcctcagcctcctgagtagctgagattacaggtgctaccaccacacctgggaaatttttgtatttttagcagagacagggtttcaccatgttggcctcaaacatctgacctcgtgattttcacaccttggcctcccaaagtgctaggattacaagcgtgagccaccgtgcccagccataacaactatttctaaactcattggtttatacaagcatttaatctcatgcctrtaggtctaaaggctgattttcatttggctgatcttgtatgaacttggctgggcagctctgcttcatgctacagatcaactagtgtggctcaactagtcaagtcaactagttgggaccaggtctgctccacccatatatcttctgggcgcaaggctgaaaggacaaatgactaccctgagcattttcttcagataccagattactgg

SEQ ID NO: 217075 - DNA, 557 bp, Homo sapiens
tcttttcttttcttttttttttttttttgagacaaagtcttcctctgttgcccaggctggagtgcagggcatgaactcagctcactgtaacctctgcctcccaggttcaagtgattctgctgcctcagcctcctgagtagctgagattacaggtgctaccaccacacctgggaaatttttgtatttttagcagagacagggtttcaccatgttggcctcaaacatctgacctcgtgattttcacaccttggcctcccaaagtgctaggattacaagcgtgagccaccgtgcccagccataacaactatttctaaactcattggtttatacaagcatttaatctcatgcctataggtctaaaggctgattttcatttggctgatcttgtatgaacttggctgggcagctctgcttcatgctacagatcaactagtgtggctcaactagtcaagtcaactagttgggaccaggtctgctccacccatatatcttctgggsgcaaggctgaaaggacaaatgactaccctgagcattttcttcagataccagattactgg

SEQ ID NO: 217076 - DNA, 557 bp, Homo sapiens
tcttttcttttcttttttttttttttttgagacaaagtcttcctctgttgcccaggctggagtgcagggcatgaactcagctcactgtaacctctgcctcccaggttcaagtgattctgctgcctcagcctcctgagtagctgagattacaggtgctaccaccacacctgggaaatttttgtatttttagcagagacagggtttcaccatgttggcctcaaacatctgacctcgtgattttcacaccttggcctcccaaagtgctaggattacaagcgtgagccaccgtgcccagccataacaactatttctaaactcattggtttatacaagcatttaatctcatgcctataggtctaaaggctgattttcatttggctgatcttgtatgaacttggctgggcagctctgcttcatgctacagatcaactagtgtggctcaactagtcaagtcaactagttgggaccaggtctgctccacccatatatcttctgggcscaaggctgaaaggacaaatgactaccctgagcattttcttcagataccagattactgg

SEQ ID NO: 217077 - DNA, 520 bp, Homo sapiens
ttttataaacaatttatttgagagataaaggagatggtaacgtgatctcaaattagattccatttcagttctgtctgaagctgtggatgcctagaccaaacactgtatctaatagctagatgctgaaccacctaagaaaaactttgaaaggcagtgcgttgaaggccagtttgttttctgtagcccaacttttaccttgagagcgcataaaagatttgaaatgccaagaaggagttttattttcagagaaaatctctttgcaacctttcccccatgggaaaaggaaagggactgcttaacaatcagcctaaaatgcatgaaaggagctycaggaaaactcctgagagactctggtgtgtattcactggacttttcaggaagcagagactggtgccagaaccatggcctggtcctgagtagcgaaaaagagactggcactgtaaagtagatatacattcttagataatgagtcacaggagcctgttatgaggaccagatgaggacccaagagtaggaagag

SEQ ID NO: 217078 - DNA, 473 bp, Homo sapiens
caaggaagcagtggatcttaagtaagtttccaggggtttgatagattttcatggtcagtgtaggttttactgagtgttgggagttgatcaactaataatcctttctttttgtaagtaaagtatttagtaagttgaatttctactgtgcaccaggcattgatacacttcacttgaactttggagttaaactaccagaattaaagcttatttggataatatcctagcagtatgtgcatcaacaagttgcttaccctttttaagccttaattttccacctgtgaaatgaggatactcccagtaataagtgtgcaayaaactaagcaatggttttaataatgtgtgtggtacttataactgcttaataaaataactgttgttgttttatattagttttgttaatattgttttgatcattattgacttggacttcctgtaggtatatacatatactactgtaaatattaagtatcagt

SEQ ID NO: 217079 - DNA, 473 bp, Homo sapiens
caaggaagcagtggatcttaagtaagtttccaggggtttgatagattttcatggtcagtgtaggttttactgagtgttgggagttgatcaactaataatcctttctttttgtaagtaaagtatttagtaagttgaatttctactgtgcaccaggcattgatacacttcacttgaactttggagttaaactaccagaattaaagcttatttggataatatcctagcagtatgtgcatcaacaagttgcttaccctttttaagccttaattttccacctgtgaaatgaggatactcccagtaataagtgtgcaataaactaagcaatggttttaataatgygtgtggtacttataactgcttaataaaataactgttgttgttttatattagttttgttaatattgttttgatcattattgacttggacttcctgtaggtatatacatatactactgtaaatattaagtatcagt

SEQ ID NO: 217080 - DNA, 515 bp, Homo sapiens
gtgaacattgtacccaacaggtaatttttaaccttcactcygctgacttgcccacatttgtagtctcctatgttgactattccactctatatatccgtttgtccacattgttcagcacccacttctatgtgagaacacatggtatactagtcctttctcacattgctataaataactacctgaaactggttaatttataaagaaaacaggtttaatcgactcacagttccataggctgtacaggaagcatcactggggaggactcaggaagcttccattcatggcagaaggcaaagaggaagcaagcatgtcttacatggctgcagaaggaggaagagagtgaagggggtggtgctacacacttttcaacaaccaggtcttgtgagaattcactatcacaagaacagcaaggggaaatccacccccgtgatccaatcacctcccaccatgccccttctccatcactggggattacaattcaacatgaggtttgggctgaacacgaatccaaacca

SEQ ID NO: 217081 - DNA, 365 bp, Homo sapiens
gggtgtgtggcattatttctggtctgtcatttctgttccattggtctatgtatctgtttttgtaccagtaccatgttgttttggttactgtgtcccggtagtatagttttaagtcgggtaatgtgatacttccatctttgttctttttggttaggattaacgtggctatttaggctctttttggtttcatatgaattttaaaatagatatttgcagttctgggaagaatgtcattggtagtttgatagcagtagcattgaatctgtaaattgcttggagkgatatggccattttaacaatattcttcctatccatcaacatggaatgtctttccattcatttgtgccatctctgatttccttgag

SEQ ID NO: 217082 - DNA, 523 bp, Homo sapiens
ctgtagacaggtgccctacttagaaatcaaaatttattgagtattacttagcctgagcattactctaatttccagcatattaactctgaaccttgtcccatatrcgagtagttcataggaaaaaatatatgaagaaaataccatttaacactggaagtagcaaatatgtgaaacttagtaatttatgactggatattaatgaagaatattaaaagggacttaatccaatttactagagcagcatacttagacacatggcaatagagtgagattgagttcaggaatcattgcttatctttatctcctatttctatgtatcttaaaccaatacacttgccctttgattctaagtttccatggaagtttggcactacaagttaaacagagaacatttgttttttgttattttcaaagaatggtgacaattctacctcttcctaagagctactcagctgcaaaaaaatactatttcagaccaagggaataataattaccatttctaatctcttgacagctctgactg

SEQ ID NO: 217083 - DNA, 530 bp, Homo sapiens
caggtgccctacttagaaatcaaaatttattgagtattacttagcctgagcattactctaatttccagcatattaactctgaaccttgtcccatatacgagtagttcataggaaaaaatatatgaagaaaataccatttaacactggaagtagcaaatatgtgaaacttagtaatttatgactggatattartgaagaatattaaaagggacttaatccaatttactagagcagcatacttagacacatggcaatagagtgagattgagttcaggaatcattgcttatctttatctcctatttctatgtatcttaaaccaatacacttgccctttgattctaagtttccatggaagtttggcactacaagttaaacagagaacatttgttttttgttattttcaaagaatggtgacaattctacctcttcctaagagctactcagctgcaaaaaaatactatttcagaccaagggaataataattaccatttctaatctcttgacagctctgactgtgactaaaatgact

SEQ ID NO: 217084 - DNA, 555 bp, Homo sapiens
tgcagctcaaatcctgtatatacttgtcagtctgtctccaagacagccatctctaacctgatttttacaaggcaagatgatcagggtaygtcttcaatatgtgaggcttgtcaaatgtctggatcactttcaaactatttaacttagatatttgaatttacaatacaaaagaagcgacatctaagatgagataatatttataagaagcattttgtgaactggaaagtagcgtataaagttagttaatataaaactaataatattttatgcttttataaaaatgtttaacttctacatattgaactttagggtttgcttctaacttctgatgattagaaccagagaggtcattagtctagggcaaatttgtcccctccactgagtacttcacctgacactctgaatattggtagagttttatttttcactctggttttggatatcaactagtccgagccctgtgtgaacttcggcattgcttcactcctcctttcagcagttctttcctcagcttagtgcatgttcggatcagtacacatctgcacattcaaggag

SEQ ID NO: 217085 - DNA, 438 bp, Homo sapiens
ttggctgtgtgtttatcgtaaatggcttttattacctcaagttatatctcttctatgccaattttgctgggtgttttaaccataaagcaatgctggattttgtcaagtgcttttcctgcatctattgagatgatcatgtgatgtttgtttttaattctgytatgtggtatattacgtttattgacatgcatatgttaaaccatccatgcatccttgagtgaaacccacttgatcatggtggattatcattttgaaatgctgttggatttggttagctagaattatgttcaggatttttgcatgtatgttcattagggatattggtctgtggttttctttgtttgttatatactttcctggttctggtattagggtgatactggcttcatagaatgatttagggagtattcactccttttttatcttttggaatagtgt

SEQ ID NO: 217086 - DNA, 559 bp, Homo sapiens
tattttaaaattttactttattacttgaagaagtggaaaaataaagcaaaaaagtcaaagaaaggcaaggaaatataaaagtcataagaataagtatatcagtataataatgtaaaagggctagatttctgaatcataaaaattaaggatatgcatggtagtttggaaaagcacataatatatattatcctgggaacagtgcataaaatactttttcaatacatctcaaagaaaaacaaagatgcctacttattaaagtcataacaataaratttaatataaaacattttagatggggcaaaatgttcatcttacattgataaaatgtaaacccataaagacataacaagtataaacctcaatatttttattttaagcaaaatatttggtaatattcccactgaaccgtttgttttcagggaactttcagctcctcctatcccaccactgatgttattttcactgttagcattctttggaagctcaactcgctgcagaatggtattggttcaatattctatcaaaatttatactctctatacattttttattcttctag

SEQ ID NO: 217087 - DNA, 559 bp, Homo sapiens
tattttaaaattttactttattacttgaagaagtggaaaaataaagcaaaaaagtcaaagaaaggcaaggaaatataaaagtcataagaataagtatatcagtataataatgtaaaagggctagatttctgaatcataaaaattaaggatatgcatggtagtttggaaaagcacataatatatattatcctgggaacagtgcataaaatactttttcaatacatctcaaagaaaaacaaagatgcctacttattaaagtcataacaataaaatttaatataaaacattttagatggggcaaaatgttcatcttacattgataaaatgtaaacccataaagacataacaagtataaacctcaatatttttattttaagcaaaatatttggtaatattyccactgaaccgtttgttttcagggaactttcagctcctcctatcccaccactgatgttattttcactgttagcattctttggaagctcaactcgctgcagaatggtattggttcaatattctatcaaaatttatactctctatacattttttattcttctag

SEQ ID NO: 217088 - DNA, 559 bp, Homo sapiens
tattttaaaattttactttattacttgaagaagtggaaaaataaagcaaaaaagtcaaagaaaggcaaggaaatataaaagtcataagaataagtatatcagtataataatgtaaaagggctagatttctgaatcataaaaattaaggatatgcatggtagtttggaaaagcacataatatatattatcctgggaacagtgcataaaatactttttcaatacatctcaaagaaaaacaaagatgcctacttattaaagtcataacaataaaatttaatataaaacattttagatggggcaaaatgttcatcttacattgataaaatgtaaacccataaagacataacaagtataaacctcaatatttttattttaagcaaaatatttggtaatattcccactgaaccgtttgttttcagggaactttcagctcctcctatcccaccactgatsttattttcactgttagcattctttggaagctcaactcgctgcagaatggtattggttcaatattctatcaaaatttatactctctatacattttttattcttctag

SEQ ID NO: 217089 - DNA, 559 bp, Homo sapiens
tattttaaaattttactttattacttgaagaagtggaaaaataaagcaaaaaagtcaaagaaaggcaaggaaatataaaagtcataagaataagtatatcagtataataatgtaaaagggctagatttctgaatcataaaaattaaggatatgcatggtagtttggaaaagcacataatatatattatcctgggaacagtgcataaaatactttttcaatacatctcaaagaaaaacaaagatgcctacttattaaagtcataacaataaaatttaatataaaacattttagatggggcaaaatgttcatcttacattgataaaatgtaaacccataaagacataacaagtataaacctcaatatttttattttaagcaaaatatttggtaatattcccactgaaccgtttgttttcagggaactttcagctcctcctatcccaccactgatgttattttcacygttagcattctttggaagctcaactcgctgcagaatggtattggttcaatattctatcaaaatttatactctctatacattttttattcttctag

SEQ ID NO: 217090 - DNA, 602 bp, Homo sapiens
tgaacattttagcaatattaagtcttgcaatccatgaacatgaaatatcttatagcattttttgtattgatttgcagcattactctcttcttatttatttcagcaatatttttttgcttttagtgtgcaagtcttttgcttctttggttaagtttatacctaagtaatttattattttygatgctattgtaaattgaattgttttcttaattttcttttcagattattattttgcagtgtatagaaacgcaaccgattttttgtctattgattttgtgtcctgcagctttgctgaaattgtttattagttctaacgatatttttgttgagtctttagtgttttctatatatgagattatatctgtaaacaaagataattttacttctcccttttagatgcaggtctttttttcccctttgcttaattgctgaggctaggactttcatttctgagtttaatagaacagaggtgagagtgaatattcttgttttattcctgatcttagagaaaaagctttcagttttcaccattgagtgtgacgcttagggatgcatttttcacatatggcctttattatgttaaggtagtttactcctcatcc

SEQ ID NO: 217091 - DNA, 602 bp, Homo sapiens
tgaacattttagcaatattaagtcttgcaatccatgaacatgaaatatcttatagcattttttgtattgatttgcagcattactctcttcttatttatttcagcaatatttttttgcttttagtgtgcaagtcttttgcttctttggttaagtttatacctaagtaatttattatttttgatgctatygtaaattgaattgttttcttaattttcttttcagattattattttgcagtgtatagaaacgcaaccgattttttgtctattgattttgtgtcctgcagctttgctgaaattgtttattagttctaacgatatttttgttgagtctttagtgttttctatatatgagattatatctgtaaacaaagataattttacttctcccttttagatgcaggtctttttttcccctttgcttaattgctgaggctaggactttcatttctgagtttaatagaacagaggtgagagtgaatattcttgttttattcctgatcttagagaaaaagctttcagttttcaccattgagtgtgacgcttagggatgcatttttcacatatggcctttattatgttaaggtagtttactcctcatcc

SEQ ID NO: 217092 - DNA, 549 bp, Homo sapiens
ggtgtctggaattctcatgaaggctttggattgcatattgtttttaagtcgttgtctctgtggaggacaccaagatctgtggctttccattctacctcttgcatgaaacagaggatgccttttatatgacttactttgctttctgctctcaaatttctttctttgtctttcaataatttgattgtaatgtgtttcagtgtggatccctttgagtttattttagagttagtgggcctatttatatgtgtagatgtacgtcttccatcaaattcaggaagttttaggtcattagttcttcaaatgttctttctgtctttttctttcctcttctctgggactgctattataaatttgttggtatttgttgttactagttggactatttgtakgtgtagacatatgtcttccatcaaatttgggaagttttaggttattatttcttcaaatgttctttttgtcttttcccatctctcctcttctctgggactgctattataaatatgttggtacacttgatggtgtcccacaagtctcataggcttttatttt

SEQ ID NO: 217093 - DNA, 562 bp, Homo sapiens
ataagattaagaaggttagaagtcataatatattaaaagtctttcctgaattttagttcaattatccttcattatgagagtaacttctgaaatatctttcaacttctgaattgcctcagttttgccaattgaaaaggttaaatggaatgcgaactgctaaaagagaatatattactgtcttgcaaagaatatgaacagaaaaaaacctgcaaataaccatgtttgattaatagatgaattgatcgatacattgttaagacactgttggtatcttaactcaataaaatgttgagattatttagagtctgtcattgagtctcattttttttcactttataaaccctcactaagttatttgtacattccaatcatttaagctgctaaatacacatatgaatgactatacgaatctctgatcgtattaatccataatgttcaacatttatgaattacaatacttgttgcaatgtctcctaggcactcaaatctcaacatgtctcaygctgaactcaaaaattctttctcttgaaatctatttgttttcttgtattcactcattgtc

SEQ ID NO: 217094 - DNA, 621 bp, Homo sapiens
tatacctgtccttaatctttctatgaatttcaaaacttttcagacctatttggaagaaggaacagggctgggggcatttgcaccacgcttcttctgaatattctttactagctcagttgtatgttttccactacttcccagggcctaggttaatgataatatgtccaaggaaagkcaatctagtgtagtaattgtcaaactgtagtagttgttgcctataatccacattaaaaataaggcaaaaagcccaatatttttcttaatcttccagcaagaaatagtacttgtcaataatggtagacaagatgcagaagaaggaggtcgtggaatctcctgacagctgagtaggaaaggacaaacacactagtgatgtcctcatttacttacttatttaacacattttattgatctccttccatcttctaagaaacaggctgaatgacaggctgttaagaaaggtgaataagatagggctctcccctgttggaaacttctgatagagtagaggagatggaaaatgagcccttgacatcctgagtactttaatggagaagtgcctttaagttataagcaagaggttgacaatacagcaaatagatataaacaattacaactgttaag

SEQ ID NO: 217095 - DNA, 621 bp, Homo sapiens
tatacctgtccttaatctttctatgaatttcaaaacttttcagacctatttggaagaaggaacagggctgggggcatttgcaccacgcttcttctgaatattctttactagctcagttgtatgttttccactacttcccagggcctaggttaatgataatatgtccaaggaaagtcaatctagtgtagtaattgtcaaactgtagtagttgttgcctataatccacatyaaaaataaggcaaaaagcccaatatttttcttaatcttccagcaagaaatagtacttgtcaataatggtagacaagatgcagaagaaggaggtcgtggaatctcctgacagctgagtaggaaaggacaaacacactagtgatgtcctcatttacttacttatttaacacattttattgatctccttccatcttctaagaaacaggctgaatgacaggctgttaagaaaggtgaataagatagggctctcccctgttggaaacttctgatagagtagaggagatggaaaatgagcccttgacatcctgagtactttaatggagaagtgcctttaagttataagcaagaggttgacaatacagcaaatagatataaacaattacaactgttaag

SEQ ID NO: 217096 - DNA, 311 bp, Homo sapiens
tgtggtaatttgttacagcagcaatagaaacctaatatatatctttctgcatttctacgggctcttctccatgcctgtattcattccttcaatctataaatatttattgagtttccactctgaaaaagccccactggtttctgaggaaacttatacttcttggcttcctggctctaaccctctcagcttggtaaacttttactcacatttgagatcattttcaatgtgytgaattgtgtcttccccaaaaaaactatgttgaagtcctaaatctcagtacctcagactgtgtcctttcttggaaatactac

SEQ ID NO: 217097 - DNA, 588 bp, Homo sapiens
ccttctgtttttgcccctatttcatgttgtcattattctttcattttttaaatatctacaggtacttgttgaacaccagttctgagctgcagagcaggaggcacaagacgtaaacaaaaaagtctctgttacggtcctaaagaagccaatcatctagagaaatgtatgcacagcaggtccagcagaatgggctttgcgctgatgagggaagcaagaggagagcatggsctgggaaaggagatgatcaggctcacttcccatttctctgtggaagaaccgtggcaaacacagagtcaactcacaacgttcattggaatttttcccacttgactccttcgcaagttggaataaggagtttggaaagggaggatttcttcatataaaaatggtctgggtatatccacgcaaaactaaagggagtggaagagaccctaggtctacacatttgatgggatagatccttcgggctcagcctcacctgcaggtactgaaggaagccttagtctgctatacagagcactctgcaccatggggagaagatcaatatgctaaacttgggtactgggcctaaatcttacgaagtgacct

SEQ ID NO: 217098 - DNA, 475 bp, Homo sapiens
aatttctcttgggtcccttcttactttagctttctggaagtctgcagctgggcctgaatataaacaccacttcttcagaggagcacatgtaaaatgtaacaaattaatactaacacattcattcaatttccatttattgacacataatttttcattttgactttttttatccccaaaagggttgtttcatcagacacagaagaagagcatcaacaaaggcggatgtctttatgttgcttcttggttgacgcaatagctctgccaagactcaagaccacaggaagcttttacacagatgrgttcagagacaacgtggtcccaccacagaagttagttcccatcctgcatggcatctggtcctaaagggtagcagggggtctttgcagtaggtgagaagacctctttagcaaaaccaccatgtcatacagtcctaaaaaatcatctgtgcttcccaaaattagaacaaaacttcaag

SEQ ID NO: 217099 - DNA, 526 bp, Homo sapiens
tgttcataataggctctgtggatattttgtatttctgggagaataggttgtaatgtcacccttgtcatttctaattgtacctattttgatcttcttttctctctttttttcctttgttaatctagctagcagtctggtgatcttgtttatcatttcaaaggaccaacttttgggttcactgattctttgcataaatttttgggtctgaatttcattcagttccactctgattttagttatttattttcttctgctaactttgatatgagtttgttcttgttttactagttcctctatgtgcaatgttagatcattaatttgagatctatctaactttttgwaggtggcgtttagcacaataactaacctcaaaacaacagaaaaagcagacatcgtagagattttggtatgttgtgtctctgtttttatttatttcaaataattttttgacttctgccttaattgtctttgtttatccaaaagtcatgtagtagcaagttgattttcatgtaattgtgtagttttg

SEQ ID NO: 217100 - DNA, 578 bp, Homo sapiens
tgttaaccagcaattctacttgctcttatgaatgatttccatgactctcagcccagcagggcactttgaattttttgcttatttaatcattcagcatcacttggtcctgatgactattcgtactatttgaggcatttcctttcttggattgtgtgacaccacacttgcaagcatgttttctgcttctctggaccttttttcttggtctttgttgcatatgtaatagaaaggtcactcaggtggattctcaaagatctagtataattattgtaatctatttttcataagagggttaatgtgattatcagttaagatctttggggtgctagtaaacttttgatgctgaatttcaagtcagtttattatcatcattaatttatagtagtctatggacctaggaggacctactgtttgactccaagcctattcttgtttctccctasaccccccaggaaattctgactgctttctcagcagtattgtttttgtctaatgtgattcctcatggaacagtcacaggatcacatctaatttcattttaaagtcattgtaacaggctcagtatgaaatattaatgt

SEQ ID NO: 217101 - DNA, 616 bp, Homo sapiens
atattctattttaaagtctgtcttttctaagaggctttcttcacttggtttcattactatatgcctgtcttctgagttggttgtggggttacatagaagaacaagatcaagaacatcacaatctggtgtaaaatatgatacttcatttctctatcctttttgtatgtgtctaatatctgtaaggagtcagagcctatttcattttcttcttaatgtgttgtatgactttcagtttgttaaaagtaagactgtcagttcctgcagggctggggccttattctgttgttgatkctatccagtgaaatcttgtattatgccttgtgatcttgtctcatgaaatattatattggattgtgagtaggtttttgctaaatttgtttcttttctaaacagaagcatgttcttataactcaccctaaaatctcctgccatacttagtagaaactatagtaaggtgagagagcaaaattcacaaagaattgattagctctttccttctaaccatttaaatttatatttaacattaattaattaatatgtttgttcattcaatcaatcttctctctgtccattttaactatggctggaccagaccacatcttctctggcttccttc

SEQ ID NO: 217102 - DNA, 554 bp, Homo sapiens
gagctaatggatcaacctcatttgcaatcacatttaaagataatggctcctctcaatttctgttctttgaactttttatagcataattttggtattagggttgaaaaagatttcagttgttttctctcctcctacctcctgccattktccaggttacacaaaatttctcttaatcatctatttcctaagtgtttgtccaaacttgttttatgggaactcaagtaatgtggctgctccttctcctttagaagccagctccagtggtcagcaaggattgcctgacgctgtgccttcattttctttttcataatacagtcctagtactcttaaccaacaccctttgtttttccttatccaaagtaattcacttctttccttcatgttcgcgccctttaggtatttgtagactgttatcatgacccctccatctttaattgtcacttaggttatacatatttcgtcttttcatctctccccataagtccattcccccaggcctgtaatcattttgttacttttctttgagccctttccagtttgctgcctctttctgg

SEQ ID NO: 217103 - DNA, 554 bp, Homo sapiens
gagctaatggatcaacctcatttgcaatcacatttaaagataatggctcctctcaatttctgttctttgaactttttatagcataattttggtattagggttgaaaaagatttcagttgttttctctcctcctacctcctgccattttccaggttacacaaaatttctcttaatcatctatttcctaagtgtttgtccaaacttgttttatgggaactcaagtaatgtggctgctccttctcctttagaagccagctccagtggtcagcaaggattgcctgacgctgtgccttcattttctttttcataatacagtcctagtactcttaaccaacaccctttgtttttcmttatccaaagtaattcacttctttccttcatgttcgcgccctttaggtatttgtagactgttatcatgacccctccatctttaattgtcacttaggttatacatatttcgtcttttcatctctccccataagtccattcccccaggcctgtaatcattttgttacttttctttgagccctttccagtttgctgcctctttctgg

SEQ ID NO: 217104 - DNA, 601 bp, Homo sapiens
cctatagtcctaattttgtcagttattcatacctttaacaatcagacaaatctttcctctttgctgagacatcaaacaatatcaacatattcttaaaaattaycaacattgtgagcaaagtagagcttctacttctctccagaaacatctgtgacacaattcgtggaaaatcaacagctttgttagcacacagctttgttagcacacacaaaattacatagcatctccatcacctttaaagaaacctccctgatataattctgttaggtccctaagtcacattttctcctttctaaggtatatatgaggagatataaaaaaagatttttgtactttgattcagatattgttgtgagattacaaatataatatgaatgccattgaaggctggttctttctaatgctggccatattgctaacctatgagtgaccactggaggggttaattaatggccacagttttaaagatcacatttatgtgatttaatcacctttaaatgcctgcagaacaattaagagatctgtccagtctcttgaggtgcttcacataataaaacattatgacaggcttagggatattggattttatagtgtctttata

SEQ ID NO: 217105 - DNA, 604 bp, Homo sapiens
cccacaccagaattcatcctgttcaggtgaggatgtgcctcttccttataggctttctgtgctttagaaacctcatgacattgagtccctgagattaagagagcggacgagcctggggcctgctggctcggccactccaacagatacaacctagytgggaacaagagtgaagcctggcatattgggatatgtgagtgtttctgactaacttgttggaaaaatgcttttggaaggctagaaaaccttttcttctctaagaatgccctgacatttgtgggtttgttttttgtgttctaattcgatgggaactatctatttgacatccttcaaactcataaaggaaccagagccaggtgcaagtggctaacacctgtaatcccaacactttgggaggccaaggcaggtggattgcttgagcccaggagtttgagaccagcttaggcaacatggtgaaacatgtctctacaaaagtacaaaaattagtggggtgtggtggtgagcacctatagtcctggctactcgggggtgctgaggtgagagaatcacttgagcctgggaggttgaggctgcagtaaaccatgattgcaccctgtacttcagcctg

SEQ ID NO: 217106 - DNA, 604 bp, Homo sapiens
cccacaccagaattcatcctgttcaggtgaggatgtgcctcttccttataggctttctgtgctttagaaacctcatgacattgagtccctgagattaagagagcggacgagcctggggcctgctggctcggccactccaacagatacaacctagctgggaacaagagtgaagcctggcatattgggatatgtgagtgtttctgactaacttgttggaaaaatgcttttggaaggctagaaaaccttttcttctctaagaatgccctgacatttgtgggtttgttttttgtgttctaattcgatgggaactatctatttgacatccttcaaactcataaaggaaccagagccaggtgcaagtggctaacacctgtaatcccaacactttgggaggccaaggcaggtggattgcttgagcccaggagtttgagaccagcttaggcaacatggtgaaacatgtctctacaaaagtacaaaaattagtggggtgtggtggtgagcacctrtagtcctggctactcgggggtgctgaggtgagagaatcacttgagcctgggaggttgaggctgcagtaaaccatgattgcaccctgtacttcagcctg

SEQ ID NO: 217107 - DNA, 527 bp, Homo sapiens
tagtcaaactcacagaagtagagaatagaatggtgattaccagggcctggggaacgggaaaacaaagatgtattcgtcaaaggtaaaaagtttcagttatgcaaaaggagtaagtccyagagatactgtatagcataatgcttatagttaacactgtattgtatactcaaacatttgctgaaagggcagatgttatagtaatcacaaaataaatgaataaatagataagtgatgggagggaagttagaggtaatagatatgtttataacattgaccgtggtgatggtttcatgggtgtaagacttatctccaaattcaccaagttgtacagctttatgcatgtctattacagctcagtaaggtggattttactttttaaaaaaaaaattagtttggctgaacacagtggctcacgcctgtaatcccaacatttagggaggcctaggtgggtggatcacctgaggtcaggaattttgagaccagactggccaacatggtgaaatcccatctgtactaaaaatacaaaa

SEQ ID NO: 217108 - DNA, 452 bp, Homo sapiens
ttctaattttataggcaaaatgataagtatactttaattatctgtaaggttaaccacttttttatgtttattggtcatttgaatgtctttttgatttatttataggtaccctttatattatggatactacatttttgttacatgtgttgtaaatattttcttccaatatattcttttttatttccatcttattgatggtttcttttgtcttataagagataaaattttgccttatgatatctagctttcatgccagacttataaagtcttctctaatctaagactaggacattattagatgatatcttttcttccacatgttttcatggaaaaggaggcttccattcccacccaaagacccaaggagtattgaaatgatctcatctrcttctttacttttcaccatgcgaggaggattggctaatttgactggtaagaatcacaggcattta

SEQ ID NO: 217109 - DNA, 393 bp, Homo sapiens
cacgctgctaaaaataataccacataaacaaatatgtaatttggctaaagaccttcaataatttaaccaacagagttttgataagcatattcattctcattttatagtcggagaaactaaagatagcgagataattaactcagcaaagcatccgtgtccagtggcagccacatgatggaaatacccacatctctctacactgagcttgaaagaggtccagcatatttttatgtacgtgcaaactaatgatgaaacagtccatcagaacagctttgaggaaaatgcaaataacacaggcaggcttcaaaaatccagggaaacaattcatttggttgtgaagcactcaagtatrgtaaagttatacaatacacaacagatttattcctagaattc

SEQ ID NO: 217110 - DNA, 393 bp, Homo sapiens
cacgctgctaaaaataataccacataaacaaatatgtaatttggctaaagaccttcaataatttaaccaacagagttttgataagcatattcattctcattttatagtcggagaaactaaagatagcgagataattaactcagcaaagcatccgtgtccagtggcagccacatgatggaaatacccacatctctctacactgagcttgaaagaggtccagcatatttttatgtacgtgcaaactaatgatgaaacagtccatcagaacagctttgaggaaaatgcaaataacacaggcaggcttcaaaaatccagggaaacaattcatttggttgtgaagcactcaagtatgrtaaagttatacaatacacaacagatttattcctagaattc

SEQ ID NO: 217111 - DNA, 474 bp, Homo sapiens
tggctgacatatgtgagaggcatatgtacatgaggttttaaaattaaaaaccactttgtatcattctattacactctgttagtaaatatattctagatttggatactctatcaatggaatcagtmtgtctccaatacttaagaagtagccgtgtactcataaatttaagggatcaggggactctttagtgagtattctgtttccttttttaaaaaattctgtgtatgctattttcctctccacattttgactaagaaaagtccttaaatgaaagttaaccaccagtaaaagttcttaaatggccctaaagtcacttaccacttaccctctctagttctatgctaaagtttgttttccctttcccttagcaaaacaaatgatgtggaatatttctcacaggaagatgtatcagtagtccaggacatgaaaaataacatagaattttactttgcactcctgaagattgagtgctag

SEQ ID NO: 217112 - DNA, 474 bp, Homo sapiens
tggctgacatatgtgagaggcatatgtacatgaggttttaaaattaaaaaccactttgtatcattctattacactctgttagtaaatatattctagatttggatactctatcaatggaatcagtawgtctccaatacttaagaagtagccgtgtactcataaatttaagggatcaggggactctttagtgagtattctgtttccttttttaaaaaattctgtgtatgctattttcctctccacattttgactaagaaaagtccttaaatgaaagttaaccaccagtaaaagttcttaaatggccctaaagtcacttaccacttaccctctctagttctatgctaaagtttgttttccctttcccttagcaaaacaaatgatgtggaatatttctcacaggaagatgtatcagtagtccaggacatgaaaaataacatagaattttactttgcactcctgaagattgagtgctag

SEQ ID NO: 217113 - DNA, 474 bp, Homo sapiens
tggctgacatatgtgagaggcatatgtacatgaggttttaaaattaaaaaccactttgtatcattctattacactctgttagtaaatatattctagatttggatactctatcaatggaatcagtatgtctccaatacttaagaagtagccgtgtactcataaatttaagggatcaggggactctttagtgagtattctgtttcctyttttaaaaaattctgtgtatgctattttcctctccacattttgactaagaaaagtccttaaatgaaagttaaccaccagtaaaagttcttaaatggccctaaagtcacttaccacttaccctctctagttctatgctaaagtttgttttccctttcccttagcaaaacaaatgatgtggaatatttctcacaggaagatgtatcagtagtccaggacatgaaaaataacatagaattttactttgcactcctgaagattgagtgctag

SEQ ID NO: 217114 - DNA, 474 bp, Homo sapiens
tggctgacatatgtgagaggcatatgtacatgaggttttaaaattaaaaaccactttgtatcattctattacactctgttagtaaatatattctagatttggatactctatcaatggaatcagtatgtctccaatacttaagaagtagccgtgtactcataaatttaagggatcaggggactctttagtgagtattctgtttccttttttwaaaaattctgtgtatgctattttcctctccacattttgactaagaaaagtccttaaatgaaagttaaccaccagtaaaagttcttaaatggccctaaagtcacttaccacttaccctctctagttctatgctaaagtttgttttccctttcccttagcaaaacaaatgatgtggaatatttctcacaggaagatgtatcagtagtccaggacatgaaaaataacatagaattttactttgcactcctgaagattgagtgctag

SEQ ID NO: 217115 - DNA, 365 bp, Homo sapiens
tgatcattaatctctgatccacgctcccaagagaacccccatcagaataagtcacttctcagaccttggaaaaatacgcattgggctaagaagtgaggggaagggkctttcattattaaacaccaccatgtgcaggcatcttatttgccttcctttacataatcttcaacatcccatcagataggtattttaacactcatgtttcagaagaggaaacggagacataagctcatagccttgtgcctaggtcaagggtggtgattcaaacccaggttaccatcgttctgcagcaccatttttctaaaatcgtcataacacttcaatggaatgtttctctctctctgaaattttctgtagtttaccct

SEQ ID NO: 217116 - DNA, 631 bp, Homo sapiens
tgtattatttataaaacagaagcatgtagtacaaatgtactacaatctgctttgtctggttaactaaataactgagattctttccatgtcattaaagtcttccagattcggaaacgaagataactaaatygtgttggctttccacaagtgctgtcccacagattatgaatgagtcttagtataactaatagcaactcagcaaattttaaaacgctcttttcatagtctaacattaatactaaatcataaaggaaaccttcatatttctatgcagaggacattttggcaggagagggaggaaaaggaagagaggaaagggcaatgccgggaagaagatatgcatcagaaaaaattcaaaaattccccggggaaaaacaacttgtagtcacttgaagaaactgatcaaatcagtaaattaccaaagcagtaagtcagtaatcagtttattgctctaaaatgttatttttctccttaatactttgtaaatcactggccgggtgtggtgctcacacccataatcccagcactttgggaggctgaggtgggtggatcacatgaagccacagattcgagaccagcctggccaacaaggtgaaacccatttctactaaaaatataaaaattagccagg

SEQ ID NO: 217117 - DNA, 631 bp, Homo sapiens
tgtattatttataaaacagaagcatgtagtacaaatgtactacaatctgctttgtctggttaactaaataactgagattctttccatgtcattaaagtcttccagattcggaaacgaagataactaaatcgtgttggctttccacaagtgctgtcccacagattatgaatgagtcttagtataactaayagcaactcagcaaattttaaaacgctcttttcatagtctaacattaatactaaatcataaaggaaaccttcatatttctatgcagaggacattttggcaggagagggaggaaaaggaagagaggaaagggcaatgccgggaagaagatatgcatcagaaaaaattcaaaaattccccggggaaaaacaacttgtagtcacttgaagaaactgatcaaatcagtaaattaccaaagcagtaagtcagtaatcagtttattgctctaaaatgttatttttctccttaatactttgtaaatcactggccgggtgtggtgctcacacccataatcccagcactttgggaggctgaggtgggtggatcacatgaagccacagattcgagaccagcctggccaacaaggtgaaacccatttctactaaaaatataaaaattagccagg

SEQ ID NO: 217118 - DNA, 631 bp, Homo sapiens
tgtattatttataaaacagaagcatgtagtacaaatgtactacaatctgctttgtctggttaactaaataactgagattctttccatgtcattaaagtcttccagattcggaaacgaagataactaaatcgtgttggctttccacaagtgctgtcccacagattatgaatgagtcttagtataactaatagcaactcagcaaattttaaaacgctcttttcatagtctaacattaatactaaatcataaaggaaaccttcatatttctatgcagaggacattttggcagsagagggaggaaaaggaagagaggaaagggcaatgccgggaagaagatatgcatcagaaaaaattcaaaaattccccggggaaaaacaacttgtagtcacttgaagaaactgatcaaatcagtaaattaccaaagcagtaagtcagtaatcagtttattgctctaaaatgttatttttctccttaatactttgtaaatcactggccgggtgtggtgctcacacccataatcccagcactttgggaggctgaggtgggtggatcacatgaagccacagattcgagaccagcctggccaacaaggtgaaacccatttctactaaaaatataaaaattagccagg

SEQ ID NO: 217119 - DNA, 631 bp, Homo sapiens
tgtattatttataaaacagaagcatgtagtacaaatgtactacaatctgctttgtctggttaactaaataactgagattctttccatgtcattaaagtcttccagattcggaaacgaagataactaaatcgtgttggctttccacaagtgctgtcccacagattatgaatgagtcttagtataactaatagcaactcagcaaattttaaaacgctcttttcatagtctaacattaatactaaatcataaaggaaaccttcatatttctatgcagaggacattttggcaggagagggaggaaaaggaagagaggaaagggcaatgccgggaagaagatatgcatcagaaaaaattcaaaaattccccggggaaaaacaacttgtagtcacttgaagaaactgatcaaatcartaaattaccaaagcagtaagtcagtaatcagtttattgctctaaaatgttatttttctccttaatactttgtaaatcactggccgggtgtggtgctcacacccataatcccagcactttgggaggctgaggtgggtggatcacatgaagccacagattcgagaccagcctggccaacaaggtgaaacccatttctactaaaaatataaaaattagccagg

SEQ ID NO: 217120 - DNA, 450 bp, Homo sapiens
ttttaaaaataagttagtctctgcaatcagtctaacaagtagagaagtttcatttctcttaacataaaagatttcagaattttccaaataggatttgtttgagcagaagaactcataaatagtgtctcctgagagaaggttaagtgtaatgttaaaagtgaagagtagctttatgccacaagaaaagatacttatcatctatatattgaatactcaaaccaattaaaatagcaataaagatcacaatattttatttagtaacaaagaggtaagaatgacagagaatggmgtaaagagctggttctcagtcagacacactgtgacttgaaaacctttatgcttgctccaagccaccaaactcaactgaacaaaatgcttgttattttctttcatgagcctcaatgctgtttattaagataattgacatagatgtatgtttccaatgcatga

SEQ ID NO: 217121 - DNA, 450 bp, Homo sapiens
ttttaaaaataagttagtctctgcaatcagtctaacaagtagagaagtttcatttctcttaacataaaagatttcagaattttccaaataggatttgtttgagcagaagaactcataaatagtgtctcctgagagaaggttaagtgtaatgttaaaagtgaagagtagctttatgccacaagaaaagatacttatcatctatatattgaatactcaaaccaattaaaatagcaataaagatcacaatattttatttagtaacaaagaggtaagaatgacagagaatggagtaaagagctggttctcagtcagacacactgtgacttgaaaacctttatgyttgctccaagccaccaaactcaactgaacaaaatgcttgttattttctttcatgagcctcaatgctgtttattaagataattgacatagatgtatgtttccaatgcatga

SEQ ID NO: 217122 - DNA, 401 bp, Homo sapiens
atccatctctgctggaggggaaaggaggggccttctgtgattcttctgccagttgggatgaaagaaacagtcaatggagaaccagcctattatctgagctcagccctctccaaacaatgctcttgttgatacattctctgcttctttttcaaggggagggaacagctgtaggctgatctatgaaatcttctggcctggaattggaaggatctggcctgactcttctgggggaggccatcatatcaggatgttatccaagcaasgccctggctcagatctatacattctatttcactgcatttgtgtacacagtgctgctcaaaatgtggtcagtcctccactggcatcattaaaataccttaggagtgttaagaatgcaaattcttgggccccgggaattc

SEQ ID NO: 217123 - DNA, 408 bp, Homo sapiens
agaattcttgatttttaagtaggtagagcatccatctctgctggaggggaaaggaggggccttctgtgattcttctgccagttgggatgaaagaaacagtcaatggagaaccagcctattatctgagctcagccctctccaaacaatgctcttgttgatacattctctgcttctttttcaaggggagggaacagctgtaggctgatctatgaaatcttctggcctggaattggaaggatctggcctgactcttctgggggaggccatcatatcaggatgttatccaagcaacsccctggctcagatctatacattctatttcactgcatttgtgtacacagtgctgctcaaaatgtggtcagtcctccactggcatcattaaaataccttaggagtgttaagaatgca

SEQ ID NO: 217124 - DNA, 472 bp, Homo sapiens
tagatttctaagtctaagccattagtctttattacatcataaaggatgaagaaatatatttttatatatgcctacatttgctgaggaggctagtcctgatcaacatttttctgaaagatggtgaaaggtagagcagacttcaagtcaacatttttattgcctctcctacttcagtgaagctaacatcaagggcttatactaagtgcaaagttacctttgattttgtttactggtctatgtcctaagataggcaatgcagctacctattgtatattcagatcaagtcctggggactagcatggttctaaaatgttgacggyttcctgaagacaaactgataaagagaaaacactggaattctagttatttttgttgggaagatgaaggctgagttgtggaatttattgcagcatagattcttaaaagttttgctagataaataaagacaaccagataaaagtggttttagatt

SEQ ID NO: 217125 - DNA, 618 bp, Homo sapiens
agaattccagaaatttgtcagtaggtgagaaacaggggagggagagtttatggctaatcaacaaagatacacaaaggtgcaatattactctgtaaaaggtgatagcagcttttacatatatatttacaagacttcataggtacagctcattagctggcaaataaaaatgtacaagcaagacaccttgctaggtgtgggatctcatttgatccttagataatagtgcaattaggaaaagcaygcattatctccccattttacatatgattaaaaacaaattcaacaaatgtgcctgtaaggtcacagtgctagtcaaatatggaactctgagtcaatattctcttccctacattatattcaccatttttatatgtgtgtaaaatataagtgtgtatataaactctaaagtgcacaatatgtaatccgtaagcacatttgtcacacccttttttatacctgtggctatatactaaatgtaatctgggtgtgtgcaatacagtatatataaaacatggaagatggtgcaggaggcactaagaggtagttaaaaaaaaaaaaacccacctaaatgtgacctggcaggccctgacaaatacacaggtgggtcagggactaaag

SEQ ID NO: 217126 - DNA, 618 bp, Homo sapiens
agaattccagaaatttgtcagtaggtgagaaacaggggagggagagtttatggctaatcaacaaagatacacaaaggtgcaatattactctgtaaaaggtgatagcagcttttacatatatatttacaagacttcataggtacagctcattagctggcaaataaaaatgtacaagcaagacaccttgctaggtgtgggatctcatttgatccttagataatagtgcaattaggaaaagcatgcattatctccccattttacatatgattaaaaasaaattcaacaaatgtgcctgtaaggtcacagtgctagtcaaatatggaactctgagtcaatattctcttccctacattatattcaccatttttatatgtgtgtaaaatataagtgtgtatataaactctaaagtgcacaatatgtaatccgtaagcacatttgtcacacccttttttatacctgtggctatatactaaatgtaatctgggtgtgtgcaatacagtatatataaaacatggaagatggtgcaggaggcactaagaggtagttaaaaaaaaaaaaacccacctaaatgtgacctggcaggccctgacaaatacacaggtgggtcagggactaaag

SEQ ID NO: 217127 - DNA, 635 bp, Homo sapiens
agtattatggatgtctctcacataatctcatctaatagaaagattatcttttttagacagtagcagaaacagcagttttagtttgcaaaagaaacactttaactggatattagtggccaagtaaaaaaattaagtaaataaaagacgtagtaaatccctaaaccaaattgggcatgaggcgtgggaaaagctgctatgtttccagaatccaatatactttsgccctggcttgcatgatactgttacaatgaactgtttcacttgcaacagtcatttcaaagcatatacgatgctttcactgtattaaggattttaacatattttgtcttctttatcctggtatatctggggaagtggtaaacagcaaatgtgagcctttaaaatctagtgatatcttcaagacatttttgttagtttataagatatctgaacaagaaaatctgcaacaagagagcctaaagaaatctgatctaatacagatctgatacagatcacctgggcttggttgttacacaattataccctggtgtattagtctcttgcactgctatatacaattaaatcagactgggtaatttataaagaaaagaagtttaactggctcacagttctgtaggctgtacaggaagtatggc

SEQ ID NO: 217128 - DNA, 635 bp, Homo sapiens
agtattatggatgtctctcacataatctcatctaatagaaagattatcttttttagacagtagcagaaacagcagttttagtttgcaaaagaaacactttaactggatattagtggccaagtaaaaaaattaagtaaataaaagacgtagtaaatccctaaaccaaattgggcatgaggcgtgggaaaagctgctatgtttccagaatccaatatactttcsccctggcttgcatgatactgttacaatgaactgtttcacttgcaacagtcatttcaaagcatatacgatgctttcactgtattaaggattttaacatattttgtcttctttatcctggtatatctggggaagtggtaaacagcaaatgtgagcctttaaaatctagtgatatcttcaagacatttttgttagtttataagatatctgaacaagaaaatctgcaacaagagagcctaaagaaatctgatctaatacagatctgatacagatcacctgggcttggttgttacacaattataccctggtgtattagtctcttgcactgctatatacaattaaatcagactgggtaatttataaagaaaagaagtttaactggctcacagttctgtaggctgtacaggaagtatggc

SEQ ID NO: 217129 - DNA, 517 bp, Homo sapiens
caaagcagggtggggcgtcatctcacccaggaagcacaaggggttagggaactccctcccctaggcaagggaagtcatgagggactgtgccataaggaacggtgcactccagccagatactacacttttcccatggtctttgccacccacagaccaggagattcccttgggtgcctactccaccagggccctgggtttcaagcacaaaactgggcagccatttgggcagacactgagctagctgcaggagttttttttcataccccagtggcacctgggatgccagcaagatagaaccgttcactcccctggaagggggctgaagccagggagccaagtggtctagcttagtggatccccaccccatggagcccagcaagctaagatccactggcttgaaattctcrctgtcagcactgcagtctgaagttgaccagggacactcgcgcttgatgtagggaggggtgtctgccattactgaggcttgaataggcagttttcttctcacagtggaaac

SEQ ID NO: 217130 - DNA, 592 bp, Homo sapiens
tattttgaaagatatgatacattgttattaactatagtcatcatgctatgcagtaggtcaccagaatccattcctcctctctaactgagactttataccctttggccaaaggcttcacttttctcctctgcccttatctccaccattctactctctacttctttggaattcacctttttaagattttgcacgtaagtgagatcatgcagtactttttttttttttctgtgcttggcttatttcccttagcataatgtcctctaggttcatccatgttgtcacaaatgacagaatttcctgctttttaaaggctgaatagtattccattgtgtatgtatacttttttttttttttatccattcatctgttgtattttcttttaaagatgttctgggactttcatgttcttcacatgttctacataaaatattgacaatagataaacaataaaggaaaagacttttaagcaaaaatcttccaraactcacagcactactctggccaccacaaagaaaacagtcaagtaaacaaaggatactggagtttaacagtgatttttagattaatggcacacttaaaaaacaaagaacaa

SEQ ID NO: 217131 - DNA, 583 bp, Homo sapiens
cttttaacatatggttcaaatgtggaagagaaggacagtactcagaaagggtaggcttctcagacaatcgttagtgtccactacmtagaagcatgttttatttctggagcctctgagaatcaatcttacactatttatgctgtttctcaataatggtttctgggttttagggaaaaccttattttaaacatgcaaaaattatagtgaacctatttagaagagttaggacttactgcttttccctctagaaaacgattgacaagacctacctttggaaataaggtacctgacttgtgaggatggttaccagacacacaaatgtggaagccgtttttcctgatctcagttgagagctgctactagaacacaaagatggcactggagtcctcccaaatggacacccccctactgtggtagtcattagggtttttccaaagagtctcattcttttctccttctggatataagattgcacacctctgtctcctttgtaattagatgtggggatatgacttactttggccaatgaaatggaaacagaagggacatgtgtcactggtaggcagaggcttgaagagcccct

SEQ ID NO: 217132 - DNA, 513 bp, Homo sapiens
tatgttaaaattatttctttcaaaagaaaaggctggtcaaagtgcaacggtgttaaccactaattgatcacaaccagttacagatttttttgtwccttctccactccaactgcttcatttgactagcctatggacaaaaaaaaaaaaaaaagaggaaagaaaaagctaaactatttaatctgggctagtaaatggccagaaagggctttataaaaatgaaatatacaaaatgatactcgtacttttaactaaaggtatagttatgactcttcaatttgcacatgttataaataatatcaatataaaagcttatagcatgggtccatttttttttttttctttttgagacggagtctcactgtctcccaggctggagtgcagtggcgcgatctcggctcactgcaagctccgccccccgggttcatgccattctagcatgggtccatttttaataaatacataaatatttaaactttctagatctaaagcttaaggactatggagtggatctca

SEQ ID NO: 217133 - DNA, 513 bp, Homo sapiens
tatgttaaaattatttctttcaaaagaaaaggctggtcaaagtgcaacggtgttaaccactaattgatcacaaccagttacagatttttttgtaccttctccactccaactgcttcatttgactagcctatggacaaaaaaaaaaaaaaaagaggaaagaaaaagctaaactatttaatctgggctagtaaatggccagaaagggctttataaaaatgaaatatacaaaatgatactcgtacktttaactaaaggtatagttatgactcttcaatttgcacatgttataaataatatcaatataaaagcttatagcatgggtccatttttttttttttctttttgagacggagtctcactgtctcccaggctggagtgcagtggcgcgatctcggctcactgcaagctccgccccccgggttcatgccattctagcatgggtccatttttaataaatacataaatatttaaactttctagatctaaagcttaaggactatggagtggatctca

SEQ ID NO: 217134 - DNA, 513 bp, Homo sapiens
tatgttaaaattatttctttcaaaagaaaaggctggtcaaagtgcaacggtgttaaccactaattgatcacaaccagttacagatttttttgtaccttctccactccaactgcttcatttgactagcctatggacaaaaaaaaaaaaaaaagaggaaagaaaaagctaaactatttaatctgggctagtaaatggccagaaagggctttataaaaatgaaatatacaaaatgatactcgtacttttaactaaaggtatagttatgactcttcaatttgcayatgttataaataatatcaatataaaagcttatagcatgggtccatttttttttttttctttttgagacggagtctcactgtctcccaggctggagtgcagtggcgcgatctcggctcactgcaagctccgccccccgggttcatgccattctagcatgggtccatttttaataaatacataaatatttaaactttctagatctaaagcttaaggactatggagtggatctca

SEQ ID NO: 217135 - DNA, 473 bp, Homo sapiens
atatgaaatatcaaataaaaatttatttttacaagaatttaggggaactactacatagctataaatgtaatatatatgttaactaagtatcacagataaaaaccatgctcccttcagcaacacgtgtaataatagatacaaagattgaaaggtaaaagatttaggatgaaaagaatcctctcttaaaaaggaaagcaaaattatacgtatgtgtatataacagttataacacccatcacacagctttatagaaacagcatctattcaaaaatagcagtatttcaaaaatatttaaaataatatttcaagtaataatatttaaaaaaatatatttaataaatatytcaataaataaaataatatttaaataattctatacccatgtttttcaaaataaaccaataaaatagatagtatatattagacgtgttagtatatatatctgagacatgttaaaaatcacaactgaattc

SEQ ID NO: 217136 - DNA, 404 bp, Homo sapiens
gaattctcacaattcagtcacaaacctaaacagcaaataaaaatttctatcrccagaattatgttttttttgtggtggggaactaccaatagctataaatagaagagattattatggaagtatcatagataaaaagagtgctcgcttcaggagcacatataataatacagaaagaaatttaaagataataaaatatttaggataaaaagaattgtctcttaaaaatgaaaagaaaattatctttatgtatatataacaactataactctcatcaaaaaactacaggaacagcatgttttcaaaagtacaacaatttccaaactatttgaaataaatctatgaataattcaatggccaacattttccaaacaaaccaataaaatgcagagtgtgcatgaagctat

SEQ ID NO: 217137 - DNA, 404 bp, Homo sapiens
gaattctcacaattcagtcacaaacctaaacagcaaataaaaatttctatcaycagaattatgttttttttgtggtggggaactaccaatagctataaatagaagagattattatggaagtatcatagataaaaagagtgctcgcttcaggagcacatataataatacagaaagaaatttaaagataataaaatatttaggataaaaagaattgtctcttaaaaatgaaaagaaaattatctttatgtatatataacaactataactctcatcaaaaaactacaggaacagcatgttttcaaaagtacaacaatttccaaactatttgaaataaatctatgaataattcaatggccaacattttccaaacaaaccaataaaatgcagagtgtgcatgaagctat

SEQ ID NO: 217138 - DNA, 416 bp, Homo sapiens
aaacagcaaataaaaatttctatcaccagaattatgttttttttstggtggggaactaccaatagctataaatagaagagattattatggaagtatcatagataaaaagagtgctcgcttcaggagcacatataataatacagaaagaaatttaaagataataaaatatttaggataaaaagaattgtctcttaaaaatgaaaagaaaattatctttatgtatatataacaactataactctcatcaaaaaactacaggaacagcatgttttcaaaagtacaacaatttccaaactatttgaaataaatctatgaataattcaatggccaacattttccaaacaaaccaataaaatgcagagtgtgcatgaagctatctgttacaatctgtggcactgatatttcacagaagaaat

SEQ ID NO: 217139 - DNA, 416 bp, Homo sapiens
aaacagcaaataaaaatttctatcaccagaattatgttttttttgtggtrgggaactaccaatagctataaatagaagagattattatggaagtatcatagataaaaagagtgctcgcttcaggagcacatataataatacagaaagaaatttaaagataataaaatatttaggataaaaagaattgtctcttaaaaatgaaaagaaaattatctttatgtatatataacaactataactctcatcaaaaaactacaggaacagcatgttttcaaaagtacaacaatttccaaactatttgaaataaatctatgaataattcaatggccaacattttccaaacaaaccaataaaatgcagagtgtgcatgaagctatctgttacaatctgtggcactgatatttcacagaagaaat

SEQ ID NO: 217140 - DNA, 417 bp, Homo sapiens
gaattctcacaattcagtcacaaacctaaacagcaaataaaaatttctatcaccagaattatgttttttttgtggtggggaactaccaatagctataaatagaagagattattatggaagtatcatagataaaaagagtgctcrcttcaggagcacatataataatacagaaagaaatttaaagataataaaatatttaggataaaaagaattgtctcttaaaaatgaaaagaaaattatctttatgtatatataacaactataactctcatcaaaaaactacaggaacagcatgttttcaaaagtacaacaatttccaaactatttgaaataaatctatgaataattcaatggccaacattttccaaacaaaccaataaaatgcagagtgtgcatgaagctatctgttacaatctg

SEQ ID NO: 217141 - DNA, 415 bp, Homo sapiens
aaacagcaaataaaaatttctatcaccagaattatgttttttttgtggtggggaactaccaatagctataaatagaagagattattatggaagtatcatagataaaaagagtgctcgcttcaggagcrcatataataatacagaaagaaatttaaagataataaaatatttaggataaaaagaattgtctcttaaaaatgaaaagaaaattatctttatgtatatataacaactataactctcatcaaaaaactacaggaacagcatgttttcaaaagtacaacaatttccaaactatttgaaataaatctatgaataattcaatggccaacattttccaaacaaaccaataaaatgcagagtgtgcatgaagctatctgttacaatctgtggcactgatatttcacagaagaaa

SEQ ID NO: 217142 - DNA, 417 bp, Homo sapiens
gaattctcacaattcagtcacaaacctaaacagcaaataaaaatttctatcaccagaattatgttttttttgtggtggggaactaccaatagctataaatagaagagattattatggaagtatcatagataaaaagagtgctcgcttcaggagcacatrtaataatacagaaagaaatttaaagataataaaatatttaggataaaaagaattgtctcttaaaaatgaaaagaaaattatctttatgtatatataacaactataactctcatcaaaaaactacaggaacagcatgttttcaaaagtacaacaatttccaaactatttgaaataaatctatgaataattcaatggccaacattttccaaacaaaccaataaaatgcagagtgtgcatgaagctatctgttacaatctg

SEQ ID NO: 217143 - DNA, 416 bp, Homo sapiens
aaacagcaaataaaaatttctatcaccagaattatgttttttttgtggtggggaactaccaatagctataaatagaagagattattatggaagtatcatagataaaaagagtgctcgcttcaggagcacatataataatacagaaasaaatttaaagataataaaatatttaggataaaaagaattgtctcttaaaaatgaaaagaaaattatctttatgtatatataacaactataactctcatcaaaaaactacaggaacagcatgttttcaaaagtacaacaatttccaaactatttgaaataaatctatgaataattcaatggccaacattttccaaacaaaccaataaaatgcagagtgtgcatgaagctatctgttacaatctgtggcactgatatttcacagaagaaat

SEQ ID NO: 217144 - DNA, 415 bp, Homo sapiens
aaacagcaaataaaaatttctatcaccagaattatgttttttttgtggtggggaactaccaatagctataaatagaagagattattatggaagtatcatagataaaaagagtgctcgcttcaggagcacatataataatacagaaagaaatttaaagataataaaatatttaggatraaaagaattgtctcttaaaaatgaaaagaaaattatctttatgtatatataacaactataactctcatcaaaaaactacaggaacagcatgttttcaaaagtacaacaatttccaaactatttgaaataaatctatgaataattcaatggccaacattttccaaacaaaccaataaaatgcagagtgtgcatgaagctatctgttacaatctgtggcactgatatttcacagaagaaa

SEQ ID NO: 217145 - DNA, 390 bp, Homo sapiens
cagaattatgttttttttgtggtggggaactaccaatagctataaatagaagagattattatggaagtatcatagataaaaagagtgctcgcttcaggagcacatataataatacagaaagaaatttaaagataataaaatatttaggataaaaagaattgtctcttaaaaatgaaaagaaaattakctttatgtatatataacaactataactctcatcaaaaaactacaggaacagcatgttttcaaaagtacaacaatttccaaactatttgaaataaatctatgaataattcaatggccaacattttccaaacaaaccaataaaatgcagagtgtgcatgaagctatctgttacaatctgtggcactgatatttcacagaagaaat

SEQ ID NO: 217146 - DNA, 414 bp, Homo sapiens
gaattctcacaattcagtcacaaacctaaacagcaaataaaaatttctatcaccagaattatgttttttttgtggtggggaactaccaatagctataaatagaagagattattatggaagtatcatagataaaaagagtgctcgcttcaggagcacatataataatacagaaagaaatttaaagataataaaatatttaggataaaaagaattgtctcttaaaaatgaaaagaaaattatctttatgtatatataacaactataactctcatcaaaaaactacaggaacagcatgttttcaaargtacaacaatttccaaactatttgaaataaatctatgaataattcaatggccaacattttccaaacaaaccaataaaatgcagagtgtgcatgaagctatctgttacaat

SEQ ID NO: 217147 - DNA, 416 bp, Homo sapiens
aaacagcaaataaaaatttctatcaccagaattatgttttttttgtggtggggaactaccaatagctataaatagaagagattattatggaagtatcatagataaaaagagtgctcgcttcaggagcacatataataatacagaaagaaatttaaagataataaaatatttaggataaaaagaattgtctcttaaaaatgaaaagaaaattatctttatgtatatataacaactataactctcatcaaaaaactacaggaacagcatgttttcaaaagtacaacaatttccaaactatttgaaataaatctatgaataattcaatggccracattttccaaacaaaccaataaaatgcagagtgtgcatgaagctatctgttacaatctgtggcactgatatttcacagaagaaat

SEQ ID NO: 217148 - DNA, 417 bp, Homo sapiens
gaattctcacaattcagtcacaaacctaaacagcaaataaaaatttctatcaccagaattatgttttttttgtggtggggaactaccaatagctataaatagaagagattattatggaagtatcatagataaaaagagtgctcgcttcaggagcacatataataatacagaaagaaatttaaagataataaaatatttaggataaaaagaattgtctcttaaaaatgaaaagaaaattatctttatgtatatataacaactataactctcatcaaaaaactacaggaacagcatgttttcaaaagtacaacaatttccaaactatttgaaataaatctatgaataattcaatggccaacattttccawacaaaccaataaaatgcagagtgtgcatgaagctatctgttacaatctg

SEQ ID NO: 217149 - DNA, 522 bp, Homo sapiens
gaattctcacaattcagtcacaaacctaaacagcaaataaaaatttctatcaccagaattatgttttttttgtggtggggaactaccaatagctataaatagaagagattattatggaagtatcatagataaaaagagtgctcgcttcaggagcacatataataatacagaaagaaatttaaagataataaaatatttaggataaaaagaattgtctcttaaaaatgaaaagaaaattatctttatgtatatataacaactataactctcatcaaaaaactacaggaacagcatgttttcaaaagtacaacaatttccaaactatttgaaataaatctatgaataattcaatggccaacattttccaaacaaaccaataaaatgcagagtgtscatgaagctatctgttacaatctgtggcactgatatttcacagaagaaatctgtgccaatctgagcccctgcattgtgccttcaaatgcttctggactgtggtaaccaagtccataagaaacagcacct

SEQ ID NO: 217150 - DNA, 557 bp, Homo sapiens
caaacatttatgtttaatggtgagaaaatgaatgctttcctcttaagactgagaaaaaggcaatatcccctccaccactgctattcaatatcttactagaagttctagctggtgcaatgagaaaataaaaagaaataaaaggtaccaagattggaaaaaacaaaaaacaaaaaacatgtatttattcacaggaaacatgattgtctgtggagaaagttccaaagaattgaccaaaaactcttctggaactaataagcagttatagtaaggtctcagactataaggtcaatatataaaagtcarttgctttcctatatatcagcaatgaacaactggaatttgaaatttaaaaatatcatttacaacagcatcagaaaaggaaatacttaggtataaatctaacaaaatatatactggataaatatgtggaaatgtacaaaacgctaatgaaagaaataaacaaagatgtaaataaatggagagatattctgtgtcattgggttgaaggacaccatgttgctgagatgtcatttcttcccaattcaacttatagattt

SEQ ID NO: 217151 - DNA, 402 bp, Homo sapiens
aactgagtgatgtctgctcccatggggtttagtcactaaggaatggtggacctttcataagcgataaagtgtgaggtgggcagaggtggtctccagtgggtgtttcaagcaggcaggggttgagaaagctgagacagggctcttcagaacttcagtttcccagacaaatccattttaagttataaaagtttatgtaagtgctatgyctacttctagtcttaactacgaatctcaaactgaaatgctctcaaattgcctcctgaaggagcctcccctgaaaacacaaaggtggaaaaacaacttccattgcttggttctgtgtgtctttgggactccagtctggcttatgtgctaatggaagttaattagacaaaaagccttccccgctgcacagggcttctg

SEQ ID NO: 217152 - DNA, 674 bp, Homo sapiens
gcagcagcatcttggacttaggcagaaaattggctgatttgttttgtccacaggttggctgtcatttgagttatacaaatgacaaatgcccctttcagactctagacatagatgacaagggggatctgccgctactgcaggattgatagtggtagaggattagggtattaaagcccctatgtgatggagcctcacatattgcaggagmctcacatattccttagccggctcccttatctacaacctgtgcagtgcaacacagtgcccataattccatttgaccttcatggcaatctgaaatataggtaacattatttccatttgacagttgggaaaactgagtctcaaaaaaggccataactttctccaccccagattacttggtggacagcagagaataagaatcagtcagctagaagctacccatggccatacatacttggtgaagatttagtccagacaattatatgagtagggcaatgtgttctcaaagttatctgaaagtcatcttatggtgataagggcaggtgctttgtgaggaagctgggagctgatatgtgaggctagtgtgggttggctagagacaagctaggacagaggaattgaccagagtgagtgggagtgaatattagtttgctcttctgagttgagtgaccttagacattgatgtcctt

SEQ ID NO: 217153 - DNA, 623 bp, Homo sapiens
tatatattgaaaatgtcttaattattaaatgctcatttggttggttaaacaattttggtttgataattatttttctctgtacatcgaaaaaatttattattgcttttctatcttgtgactttatttttgctgatgggaagggtgctgtcaatcaaagttctgttcctctagtaaataatccgtgtttcctcttggctgatttaaaattgtaccatttcttgttcttttcaccatgatgtatttagaggtggaattacttttatttattctgcataatttttgataatttctaaatctgaatattagtatttttcttctttacttctgtaacattttcagaatgttctttaaatttccattactttcttttaatttttatctccttctttctctatatgacatggytttttctgggttggtctcataccaaacttctttttatttgctacaatagatttgaatttcctctttatattttttctttgctttgcttctgtttcttatgttcagtttaatttctttgtgtgtatctctttttacaaaattttactttgactttgtctaagttgccgattcacctatctagtgtaattttaatttctaatatttgcctttatgtatta

SEQ ID NO: 217154 - DNA, 603 bp, Homo sapiens
tgttagttgttttctatgtgtcttacagttrtttttttcctcttttcccctcatgccgtcttcctttgtatttcactgatttttttaagttgatgtgtttgcatttatttatctttcttttgtgcattttctataggtattttctttttggttaccacgtggattacataaaacatcttatatgaggtaaccatatatttttaactgataacaacctaaatcatatacaaaaactaattttttacattttccccacttcttcatgttattaatttaacaaataattattattaattatgaattttttaaaggaagtaaaatatgcttagaggagggccaagcaggcaacaggagagatccaagtgccttgacgaattatatcatgtcatatttttattcattagcatagttttattgttgtgatttttctttccttttttagcttttaaattttattctttttttttctgcttgattaagtctgctgttaaacacctctggtgacgttttcagttcagttattgtgttcttcagctccagaatttctatgtgaaaggtttttttttttatagttttacctcactttgttcatgcatcactttt

SEQ ID NO: 217155 - DNA, 603 bp, Homo sapiens
tgttagttgttttctatgtgtcttacagttgtttttttcctcttttcccctcatgccgtcttcctttgtatttcactgatttttttaagttgatgtgtttgcatttatttatctttcttttgtgcattttctataggtattttctttttggttaccacgtggattacataaaacatcttatatgaggtaaccatatatttttaactgataacaacctaaatcatatacaaaaactaattttttacattttccccacttcttcatgttattaatttaacaaataattattattaattatgaattttttaaaggaagtaaartatgcttagaggagggccaagcaggcaacaggagagatccaagtgccttgacgaattatatcatgtcatatttttattcattagcatagttttattgttgtgatttttctttccttttttagcttttaaattttattctttttttttctgcttgattaagtctgctgttaaacacctctggtgacgttttcagttcagttattgtgttcttcagctccagaatttctatgtgaaaggtttttttttttatagttttacctcactttgttcatgcatcactttt

SEQ ID NO: 217156 - DNA, 637 bp, Homo sapiens
ctgatatttatttttaagtttactaagtgaaatgcacattagataccttatcttttgttctgataatgaataattgccaaaattcatttcccgatgtagaaatttcccttcattcaccaaagggctaattcctctgatgtgmaatcagtctaccatcagtggatgtattgatatattactccatactgcagcatgctaccaatatttccttacttttcttaattcacaaattatttaattatttcactttctgcatgcttttctgtactagcaacagcatcgttttttttaatgactataacatccatgcaattccacctagtactctgactcatcaggtcttcaaactcttcaagtctacttttccacttctgaaatgttgatttccattatcttgttttctaaacatgatatcttacctttaaaacttacttatgattttatccaaactccaacatattctcagccgtatagtggcatgaggctgagtgatccaactgcttttcactgctaacatcttctttgtgttatttctcatctaatctaacttagattcaatagtctgatgccagtgctgcttttcacagagtctgaacaccttcgaatgacatatatgaccaaaatcaagtctagtaaa

SEQ ID NO: 217157 - DNA, 637 bp, Homo sapiens
ctgatatttatttttaagtttactaagtgaaatgcacattagataccttatcttttgttctgataatgaataattgccaaaattcatttcccgatgtagaaatttcccttcattcaccaaagggctaattcctctgatgtgcaatcagtctaccatcagtggatgtattgatatattactccatactgcagcatgctaccaatatttccttacttttcttaattcacaaattatttaattatttcactttctgcatgcttttctgtactagcaacagcatygttttttttaatgactataacatccatgcaattccacctagtactctgactcatcaggtcttcaaactcttcaagtctacttttccacttctgaaatgttgatttccattatcttgttttctaaacatgatatcttacctttaaaacttacttatgattttatccaaactccaacatattctcagccgtatagtggcatgaggctgagtgatccaactgcttttcactgctaacatcttctttgtgttatttctcatctaatctaacttagattcaatagtctgatgccagtgctgcttttcacagagtctgaacaccttcgaatgacatatatgaccaaaatcaagtctagtaaa

SEQ ID NO: 217158 - DNA, 637 bp, Homo sapiens
ctgatatttatttttaagtttactaagtgaaatgcacattagataccttatcttttgttctgataatgaataattgccaaaattcatttcccgatgtagaaatttcccttcattcaccaaagggctaattcctctgatgtgcaatcagtctaccatcagtggatgtattgatatattactccatactgcagcatgctaccaatatttccttacttttcttaattcacaaattatttaattatttcactttctgcatgcttttctgtactagcaacagcatcrttttttttaatgactataacatccatgcaattccacctagtactctgactcatcaggtcttcaaactcttcaagtctacttttccacttctgaaatgttgatttccattatcttgttttctaaacatgatatcttacctttaaaacttacttatgattttatccaaactccaacatattctcagccgtatagtggcatgaggctgagtgatccaactgcttttcactgctaacatcttctttgtgttatttctcatctaatctaacttagattcaatagtctgatgccagtgctgcttttcacagagtctgaacaccttcgaatgacatatatgaccaaaatcaagtctagtaaa

SEQ ID NO: 217159 - DNA, 637 bp, Homo sapiens
ctgatatttatttttaagtttactaagtgaaatgcacattagataccttatcttttgttctgataatgaataattgccaaaattcatttcccgatgtagaaatttcccttcattcaccaaagggctaattcctctgatgtgcaatcagtctaccatcagtggatgtattgatatattactccatactgcagcatgctaccaatatttccttacttttcttaattcacaaattatttaattatttcactttctgcatgcttttctgtactagcaacagcatcgttttttttaatgactataacatccatgcaattccacctagtactctgactcatcaggtcttcaaactcttcaagyctacttttccacttctgaaatgttgatttccattatcttgttttctaaacatgatatcttacctttaaaacttacttatgattttatccaaactccaacatattctcagccgtatagtggcatgaggctgagtgatccaactgcttttcactgctaacatcttctttgtgttatttctcatctaatctaacttagattcaatagtctgatgccagtgctgcttttcacagagtctgaacaccttcgaatgacatatatgaccaaaatcaagtctagtaaa

SEQ ID NO: 217160 - DNA, 576 bp, Homo sapiens
ctcacttcaatacagagtaattatgaatatcttaggagtaagacaggtgatagcaaagaagaaatatcagtccacttcatgaacctggcaatacataccaaacagcagaagcttttaaaaattaatttaaaaactaaactctacttctaaaagaatttagattgtagtaaaagaattcagaatgtagtattttcactgttgtgcaaaayggcaatccttattcatcatagagaaatgaaaagacaagttccaaactgaggaaagccattcataatatacaccagaaaaaaatcaagaatgtataaatggcccatgcatgccaataaaaaagtataaataacacaagaaaaaaaatgagtaaaatgcatagacaggaattacacagaggaggaaatacataaagcaaaaatcattggaagatatatttaacatcactagtgatcacacaaaataatgaagactacaaaatatattattttatctctaattatttgactcaagttaaagtctgacaataactttgtattcaagaagagtacaaaataattaaccaaactgatactcacataacttatt

SEQ ID NO: 217161 - DNA, 240 bp, Homo sapiens
gtagagccagctccgcgtgaatgactctttctctattgcaattcttttgtcttgataaatcggctctcgtctaggaagcaagcaaagtgagtccattcagcggttacattgcggttgctgatgctctgtttcattaaggcaataaaattgggcaatttccagggatctttctgaagaatscccccacacaggtgaagtctccaggccaccctggcttcgaaaacaaacatctgtttctga

SEQ ID NO: 217162 - DNA, 565 bp, Homo sapiens
tgggcaaggctgagaagtttccacgtcacagtcacgttatgcatatgcaataagttttataatactttaaataaggcagcaatcctctgggcatttgtaggtggtttcttactagaaaatgatttgaaagaaaaaattggttaaatgaagtcaaagagaaaggagagtgttctgtttacttctccatatccacagtcatctcctctcaaacaataaccattattggcatttataattaatcatcaattgttcagtgaggaacttatgtgccatgcatagatcagaagatttgaaatctgagaactaagacaacctcatcaggcattttaagtcagaaaatgaatggcaaaggtttttacaatttttaaaaaatatatactattttatatatttgaggactragatccttttactatggcctcttaaaggggccactttactacaatgggcctttctttctttccttgtaaaagtgataaagtaagactatggcctctaaagcccagatcaaactctcaaactctctcactcacctctagtatgaaaacagccagttacaagcctc

SEQ ID NO: 217163 - DNA, 565 bp, Homo sapiens
tgggcaaggctgagaagtttccacgtcacagtcacgttatgcatatgcaataagttttataatactttaaataaggcagcaatcctctgggcatttgtaggtggtttcttactagaaaatgatttgaaagaaaaaattggttaaatgaagtcaaagagaaaggagagtgttctgtttacttctccatatccacagtcatctcctctcaaacaataaccattattggcatttataattaatcatcaattgttcagtgaggaacttatgtgccatgcatagatcagaagatttgaaatctgagaactaagacaacctcatcaggcattttaagtcagaaaatgaatggcaaaggtttttacaatttttaaaaaatatatactattttatatatttgaggactgagatccttttactatggcctcttaaaggggccactttactacaatgggcctttctttctttccttgtaaaagtgakaaagtaagactatggcctctaaagcccagatcaaactctcaaactctctcactcacctctagtatgaaaacagccagttacaagcctc

SEQ ID NO: 217164 - DNA, 453 bp, Homo sapiens
aataagaaagacataaatatttctttacaaaaaaacccccaaaagacaataatttacaataaaaggagaaaaaaggtataaggaatataaaaaatagaaaaataacaaaagtaaaatccttcctttttagtaattgctttaaatgtaaattgcttaatcttttaaatcaaaagacagatattagcacaatgaatacaaaaacataattcaactacttgctttctacaagggacttactttagattcaaagatgcaaatagactgaaagtgaaaagatggaaagatatattccaagctaatagtaaccaaaagatagaaggaatggttatactaatactcrataagaccgactataaatcaaaaaaggttaagagatatgaaggacataatataggaataaaacattctatacagcaagaagatataacaactatacatattcatgaacttaat

SEQ ID NO: 217165 - DNA, 575 bp, Homo sapiens
taggcattaactagaattcactgtaaatggatttcttacarttagttaaaataggctaattccagagctggatgataactgttttaatcaatttaatttattaatttttcccatgtccttaatttttatccttattcttctcacaatcagagatctacaatgtgtgtgttgaccaaaaaatatcttccagcttacttcctttactgtctttggttcttcttgtatatttgtttggcagcatgttgaggtatatatagtcatgcatttcaactcacctttaatttacttgcatcctcctgctcaaattttaggcttaacagcagtttctcatgactgaaatgatggtgaaacacattgctaccaggaagatggtgccctgaagaaaaggcacacatatacacagaattctcagaaaagctccctctctgccattatatatagaatatgtttcatctgtttctttgcattatatggggttttaaaattaaagataacaactttaattattcccctataaagggcttattacattttaatgctggaccaaagtatattcctgttagtttttgacattt

SEQ ID NO: 217166 - DNA, 575 bp, Homo sapiens
taggcattaactagaattcactgtaaatggatttcttacaattagttaaaataggctaattccagagctggatgataactgttttaatcaatttaatttattaatttttcccatgtccttaatttttatccttattcttctcacaatcagagatctacaatgtgtgtgttgaccaaaaaatatcttccagcttacttcctttactgtctttggttcttcttgtatatttgtttggcagcatgttgaggtatatatagtcatgcatttcaactcacctttaatttacttgcatcctcctgctcaaattttaggcttaacagcagtttctcatgactgaaatgatggtgaracacattgctaccaggaagatggtgccctgaagaaaaggcacacatatacacagaattctcagaaaagctccctctctgccattatatatagaatatgtttcatctgtttctttgcattatatggggttttaaaattaaagataacaactttaattattcccctataaagggcttattacattttaatgctggaccaaagtatattcctgttagtttttgacattt

SEQ ID NO: 217167 - DNA, 575 bp, Homo sapiens
taggcattaactagaattcactgtaaatggatttcttacaattagttaaaataggctaattccagagctggatgataactgttttaatcaatttaatttattaatttttcccatgtccttaatttttatccttattcttctcacaatcagagatctacaatgtgtgtgttgaccaaaaaatatcttccagcttacttcctttactgtctttggttcttcttgtatatttgtttggcagcatgttgaggtatatatagtcatgcatttcaactcacctttaatttacttgcatcctcctgctcaaattttaggcttaacagcagtttctcatgactgaaatgatggtgaaacacattgctaccaggaagatggtgccctgaagaaaaggcacacatatacacagaattctcagaaaagctccctctctgccattatatatagaatatgtttcatctgtttctttgcattatatggggttttaaaattaaagrtaacaactttaattattcccctataaagggcttattacattttaatgctggaccaaagtatattcctgttagtttttgacattt

SEQ ID NO: 217168 - DNA, 597 bp, Homo sapiens
ttaatgtgacctattatttgggcctttttatctgctcatcaatattctaccaaggctgctctgtaatcttcactttattttcaatatgccaccactttttttaagctttaatgaggccttccagcagtgtatcaaagctagctctagctgttcgtgccaggatattaaaccccaagttagagaagaatgcctgaatatcaattaagtttccattatcaatccctatactctcttcrcccactggggtttggcaaactccagaaatatttctaagctgctttcctatctctgtccatccatattggccatttcctttagtaatttagttaataatctctttcctactgcagcagagacaggccatgctgaaacatactgaaacttgaccttgattattgctcataaaaaaataaaaagagaaaagtcttgatgaggcaaatatgatgttgggtaaaaacttgaacaacctcttgacaagggaagcctgttaatctgttgcaaagaggaagaggccacactcaccttctcaaaggattcaggagaatccgcaggttctgatgatccagcacatctattggatgtccctgactttgggat

SEQ ID NO: 217169 - DNA, 597 bp, Homo sapiens
ttaatgtgacctattatttgggcctttttatctgctcatcaatattctaccaaggctgctctgtaatcttcactttattttcaatatgccaccactttttttaagctttaatgaggccttccagcagtgtatcaaagctagctctagctgttcgtgccaggatattaaaccccaagttagagaagaatgcctgaatatcaattaagtttccattatcaatccctatactctcttcgcccactggggtttggcaaactccagaaatatttctaagctgctttcctatctctgtccatccatattggccatttcctttagtaatttagtwaataatctctttcctactgcagcagagacaggccatgctgaaacatactgaaacttgaccttgattattgctcataaaaaaataaaaagagaaaagtcttgatgaggcaaatatgatgttgggtaaaaacttgaacaacctcttgacaagggaagcctgttaatctgttgcaaagaggaagaggccacactcaccttctcaaaggattcaggagaatccgcaggttctgatgatccagcacatctattggatgtccctgactttgggat

SEQ ID NO: 217170 - DNA, 636 bp, Homo sapiens
tggatcttatatttttaattcattcatccagtctatattgtttagttggggaattaaaaatatttataattaatgttattattaataggtgaggacttacacctgccattttgttactagttttttgattgttttatatatttcttttcttctcttccttttttatttacctttataatttggtaaagttttttgttgtaatttcatttgactcctatcctttttcacttgtgtgcctgctgtactagtgaattatatacttctatgtgatttaatgatggtagatgtcagccttccacttccacaagtaggtccctcttaagtatttcttgtagggcccatctagtcatgatgaattccttcagtttttgcttggctgagaaaagctttatttctccttcattttggaaggataactctgctgacaggtttttattttttcctcttagcactttaaatatattttcctttttattctagcctgtagggtttatatgagtaatccactgctagtctaatggwaatttccccatacaaaatttgatgctttctcttgctgtttttagaattctctctttgtcttagacttacaacactttgagtataaatgccttgctggagtcctttgttagttga

SEQ ID NO: 217171 - DNA, 636 bp, Homo sapiens
tggatcttatatttttaattcattcatccagtctatattgtttagttggggaattaaaaatatttataattaatgttattattaataggtgaggacttacacctgccattttgttactagttttttgattgttttatatatttcttttcttctcttccttttttatttacctttataatttggtaaagttttttgttgtaatttcatttgactcctatcctttttcacttgtgtgcctgctgtactagtgaattatatacttctatgtgatttaatgatggtagatgtcagccttccacttccacaagtaggtccctcttaagtatttcttgtagggcccatctagtcatgatgaattccttcagtttttgcttggctgagaaaagctttatttctccttcattttggaaggataactctgctgacaggtttttattttttcctcttagcactttaaatatattttcctttttattctagcctgtagggtttatatgagtaatccactgctagtctaatggaaatttccccatacawaatttgatgctttctcttgctgtttttagaattctctctttgtcttagacttacaacactttgagtataaatgccttgctggagtcctttgttagttga

SEQ ID NO: 217172 - DNA, 458 bp, Homo sapiens
gggctctgctggaaagaagaggaagtatttagcaagggtgaaggtatgatgccctccccaccatccgtctctccctccaaacctgttcaaactggaactttaacattcacccccaatccagtaagctcaacttccttgagtccctcttcagtcctgtcctctctttcccagatgggttcttacttccctgaggcaaccagagataagaaaagaccagaatatgaatatccagcattccacaaagaatcctacaggcagggatattgcccaatcaccagtgcctcgcatcccagttctatccaagatccaagcttgatatcctcctgaaagacttcctgaatcaggtcaccaacatggacatctgaacttccagaatcaggtcaccgtctttcttctcatctctggatgtatttggagctcatttktctgacggtttttgaatgctatcttttaaaaat

SEQ ID NO: 217173 - DNA, 540 bp, Homo sapiens
tttataacctgaatgtatttatttttatcttatgtagaagccaagatattctgaagattcttgtaaacccattcttcaattaaattcctccacctagcttcaactacaataaaatacatgcacggcatacacataccatttaagtaaaatcttaaaatccaaacgctacagcatggcttctgcagttgggcccctattatctctgtatcaccttctgctcttgtgtcagtcactggcccttctggtctgggaacaactgtatcagcacttgtgttggagcctttgaccttgttacttccyctgtctggagtgacattcccttaatgctgcataaaaggttgcttctcttctttgagatctcaggacaaatatcaccatttgtgcaaggcaatcgtattgactgacatacctgccctctgcatctttttcttctttaacacaaggccctgtcttgtgtccatgtccaaggctgcttggtttgggcattgccaatggctgcaggctgggaggatgagtgtgggttgaaatctgactcacaga

SEQ ID NO: 217174 - DNA, 509 bp, Homo sapiens
aaagtaatgtgagccaattcctataataactctcttctctatctaatctattaatatttacatttcttattgtttttcatttacctggagaaccctaataaaacttcctgttgcatacctttaatgtcatcatcattatctcagtccaaaattctccttgcagtcactggaagtaaaatattaatatcacccatattttaaattcaaactcaaatcctgcttttaatatattattagtcagccaaaatgttgcattctctctctgaatttctaaggagtctataatactagtttctacatataatcaaatattgttttgttctttcggtgtggaatatgtacatgttttatctcctacagaaatttgtaaattttcacaagcaagaatcttcttctacttctttaacctcacaatgcatagtaagtacttattgtggaaatgttaaaatttttttctgttttccataacaytgatctgctacaggccaatcagtgagaatgtatataga

SEQ ID NO: 217175 - DNA, 494 bp, Homo sapiens
cagtcaatctgttaaacactttttctttgctttctttttttagaaaaaatctcattccactaaatgcatctatrtattccatactcaattctttttgaaagaagacatagcataaataaacagaaaaatatttattaagcactcaccttgcagcagacattttaatgggagttgagattataaaaataaatgtttatagcctgataaatgagaaaaatatttcaagcaaattattatgacatggtgtgataagtgcaaaagtagaggtctcctatgagggttttaaattgtctcttagaaaatagagaaggagacacttgaactggctcttgatcaataacagggcctttgccaagtaaatatctgtgctgaagagtgaggattgtggtaagaaaggaattgcatgtgcaaatgtatcagacatttaaagaagagctatttgatcagactggctggactcttagataaggtcctttgtgatggcagaacccaga

SEQ ID NO: 217176 - DNA, 363 bp, Homo sapiens
tctaaatcttattctccaaagaaccagggctccttggagaaatggctgattctagtactgggacacagaaaatataagatgagcttggaacatcttgtagtgccagaaagtagggaagtgytccttccttaacccctccagaaaagggcagggtcctgtataagggacacaagagtcaaactaaagaaatacctgatgtctaaagttggaacaacttgatcaatgaaataaatatagtaaaggcatataacccaaaggataaaatagtcatgtgtctatactgatataaatcaatgactgaataaataatgtaggaaaagagacaaatctttattacggaattccaaaaaatatatgtagatc

SEQ ID NO: 217177 - DNA, 554 bp, Homo sapiens
cacaaatctagtaagtgttagaggtaagaatcaaatctatggtttatcatatgactaagcaagtgttcttcatctttaccccctctgatttcctatcttctttgaccttacatgttagcagtaaaaaacaaacaaacaaacatatattggtacatatgttctactagagtaacattttgtgaatatattatgcacattgtaaaacatgcaaaaatggaaactataaggggataagaaaacagaaatagaaatagaagcacaagtagttttttcacataccccayggatcatctaatacatgccctaggtactgagtgtccactctagagtatgttgcttagattctctgaaaattatttgatttttaaaatgaaaatattattcacagcttttgccaaatttagatgtactatgtttgaacttgtgatttcctaggcaagtatattccaatctaatttagcagggagacatagtatagagtgagaatagcagctggaagagattgctacagagagcagagggaggtagaatagagatggaagaacatttgtaga

SEQ ID NO: 217178 - DNA, 527 bp, Homo sapiens
tatctttataactgttttaaatattataatttcagttgaccctgaacaacacttcgctggtccrcttatacatgtatttacttctatctctcccaccttgaaaaaataagacgaaccccttctcttccttctccaccttctcagactatgcaaaggtggtaaggaggaaaacctttatgatgaacaatttctaattaataaatagtaaatatctactgtttttcctatgattttaataacattttattttctctagcttactttgttgtaagaatacagtatgtaattcatatgacatacaaaatgtctgttaattgactgtttatgtcatcagtaatgctcttgtcaacagtaggttattattagttaagtttttgcggaatcaaaagttatacctggatttttgacattgtagtagttgggcttccctaacccgtgagttgttcaaaggtcaagtataccttagtatgctctaaatccagctatcttttctcatctcaatgagtatgctgaatttgttaagctat

SEQ ID NO: 217179 - DNA, 527 bp, Homo sapiens
tatctttataactgttttaaatattataatttcagttgaccctgaacaacacttcgctggtccgcttatacatgtatttacttctatctctcccaccttgaaaaaataagacgaaccccttctcttccttctccaccttctcagactatgcaaaggtggtaaggaggaaaacctttatgatgaacaatttctaattaataaatagtaaatatctactgyttttcctatgattttaataacattttattttctctagcttactttgttgtaagaatacagtatgtaattcatatgacatacaaaatgtctgttaattgactgtttatgtcatcagtaatgctcttgtcaacagtaggttattattagttaagtttttgcggaatcaaaagttatacctggatttttgacattgtagtagttgggcttccctaacccgtgagttgttcaaaggtcaagtataccttagtatgctctaaatccagctatcttttctcatctcaatgagtatgctgaatttgttaagctat

SEQ ID NO: 217180 - DNA, 613 bp, Homo sapiens
acacatgtcaaatgaaaggagcaatcaaacctttattcacatactgttaggttgaaaataagagcaatatataggcactagcttgctaatattccatttttcccacgaaatagcacttatagtgagttaagtggatacagaacagacaaggagaatcacctcattatcaaagagccctgaaaaaaaaagggttcttggcctatttttgaagtgctgggcttrgatgtgggaagagaaggcaaagataggagagaaaaagttctgagtcaaagttgagaaaagtgcctcagtcaaagcctccaataatgaaatatcaacagtgttcaggaatttcctcagccaaggctcctactgataaggaggcttctgaatagaggcactggggttcgaatgcagcgatgcacatgagcatggttgacttgaggaaaaggggctcacagttgagtacatgactttgactctctccagaaaactggaatgtattgattgttcacaaagtcttgtgtgagaggacagcctactctcatgaggcctgccagacaaagccctgtaactgcctgtactgggacccaaaagatcttatgtaggatactgggctgtaatcagccccacg

SEQ ID NO: 217181 - DNA, 613 bp, Homo sapiens
acacatgtcaaatgaaaggagcaatcaaacctttattcacatactgttaggttgaaaataagagcaatatataggcactagcttgctaatattccatttttcccacgaaatagcacttatagtgagttaagtggatacagaacagacaaggagaatcacctcattatcaaagagccctgaaaaaaaaagggttcttggcctatttttgaagtgctgggcttagatgtgggaagagaaggcaaagataggagagaaaaagttctgagtcaragttgagaaaagtgcctcagtcaaagcctccaataatgaaatatcaacagtgttcaggaatttcctcagccaaggctcctactgataaggaggcttctgaatagaggcactggggttcgaatgcagcgatgcacatgagcatggttgacttgaggaaaaggggctcacagttgagtacatgactttgactctctccagaaaactggaatgtattgattgttcacaaagtcttgtgtgagaggacagcctactctcatgaggcctgccagacaaagccctgtaactgcctgtactgggacccaaaagatcttatgtaggatactgggctgtaatcagccccacg

SEQ ID NO: 217182 - DNA, 399 bp, Homo sapiens
aattccctggtgacaatgcatcagtacttgaaaatatcacattttaagagttgtgaaaattaagtgaaataatttatataatacacattgcaaaacatacagtagccattcaataagtgtaatctatcccccttccatctatctggcattctttgagtaggaaaaaatattaccagctttgtaataagaacyattttcatattaaaactacttaataaaaataaaataatttcattaatttaataaaaatatcaacttttatggagttaaaattaaatgagattgcacatacatagaatatatagtatatacctcatttaattatatatattctttatatagaatatataaatttaaatgagactaaatatatggaatattaaaaatctatacattcta

SEQ ID NO: 217183 - DNA, 399 bp, Homo sapiens
aattccctggtgacaatgcatcagtacttgaaaatatcacattttaagagttgtgaaaattaagtgaaataatttatataatacacattgcaaaacatacagtagccattcaataagtgtaatctatcccccttccatctatctggcattctttgagtaggaaaaaatattaccagctttgtaataagaaccattttcatattaaaactacttaataaaaataaaataatttcattaatttaataaaaatatcaacttttatggagttaaaattaaatgagattgcacatacrtagaatatatagtatatacctcatttaattatatatattctttatatagaatatataaatttaaatgagactaaatatatggaatattaaaaatctatacattcta

SEQ ID NO: 217184 - DNA, 399 bp, Homo sapiens
aattccctggtgacaatgcatcagtacttgaaaatatcacattttaagagttgtgaaaattaagtgaaataatttatataatacacattgcaaaacatacagtagccattcaataagtgtaatctatcccccttccatctatctggcattctttgagtaggaaaaaatattaccagctttgtaataagaaccattttcatattaaaactacttaataaaaataaaataatttcattaatttaataaaaatatcaacttttatggagttaaaattaaatgagattgcacatacatagaatatatagtatatacctcatttaattatatatattctktatatagaatatataaatttaaatgagactaaatatatggaatattaaaaatctatacattcta

SEQ ID NO: 217185 - DNA, 605 bp, Homo sapiens
gttatttttgtttttaatgttaatcttagcaaaatattaattaaatatttggcaacattagtctaaatttaaaggaaaaggattcattttgactctagacaaaggaggtgagaaaacttctcttttaattacaactattttgtttcacttctgctaagtgatatatatttttattgacaaacatcataatcagacttctcaggtcttcaacaataaaagttaataattctgttaactgtatatttttaaactgtggagggagcaaagaaacattttcaaatctgattgggatcagcagcaatgtactctgattactgtagattttgtttttccatttttgaagcactagagccccaggctaaaactaaactgaagcactgaaatcatctcctttcctatttttcctgacaatkttacagtactgacagatttcagtaaatggataaagtgaaaaaataaagtgtatatcatgtctttcttttctcagtggtattccagtataatcacatagttgaaagttatttgcagaataattctagtcaataactacaggagagatattagaaagtcatttttgtaagcctaatgaaatgatagatctatgc

SEQ ID NO: 217186 - DNA, 407 bp, Homo sapiens
tagcaatatgtacctctagttgccagaatgtggcttctaattatcatttacatctgattagtactagggctatttgggggaatatctgattccaaatttgaagtaaggggttacagtatgagtctgaaacattctgttgtaccagaaaacaaggaaaaartggagctgcatcaaaaggacaaggaagccagtttaaagttgggtctactgacaaaaggcgagttaagttaaatagcacataaaagactgttactaatgaaaacaagtttcacgtgtaaaagtccattattccagcatgatattcaaaatagcaaaagcaaaagaacaaacaggtaaataaaatgttatgtgccacaattgtaagtaactataacaccaaatactttctaaaactacttagttaaaga

SEQ ID NO: 217187 - DNA, 407 bp, Homo sapiens
tagcaatatgtacctctagttgccagaatgtggcttctaattatcatttacatctgattagtactagggctatttgggggaatatctgattccaaatttgaagtaaggggttacagtatgagtctgaaacattctgttgtaccagaaaacaaggaaaaaatggagctgcatcaaaaggacaaggaagccagtttaaagttgggtctactgacaaaaggcgagttaagttaaatagcacataaaagactgttactaatgaaaacragtttcacgtgtaaaagtccattattccagcatgatattcaaaatagcaaaagcaaaagaacaaacaggtaaataaaatgttatgtgccacaattgtaagtaactataacaccaaatactttctaaaactacttagttaaaga

SEQ ID NO: 217188 - DNA, 427 bp, Homo sapiens
actttagtagcaatatgtacctctagttgccagaatgtggcttctaattatcatttacatctgattagtactagggctatttgggggaatatctgattccaaatttgaagtaaggggttacagtatgagtctgaaacattctgttgtaccagaaaacaaggaaaaaatggagctgcatcaaaaggacaaggaagccagtttaaagttgggtctactgacaaaaggcgagttaagttaaatagcacataaaagactgttactaatgaaaacaagtttcacrtgtaaaagtccattattccagcatgatattcaaaatagcaaaagcaaaagaacaaacaggtaaataaaatgttatgtgccacaattgtaagtaactataacaccaaatactttctaaaactacttagttaaagagaagtacttaagc

SEQ ID NO: 217189 - DNA, 619 bp, Homo sapiens
tccatttttcattcaagtttccgtattacctatttgagggcaaggtattgtctatacctagggaagctatgttaaatagaaaaacctgctccttctcagaagcaacatatgcaaacccatccagttaatattcaaaagatgctatttgtgataattgttgacaggacagtgtagtgcaaayaacatgagtttagaatcagacataaccagatttaaatttaggctgatgagggcagaattcaacctctctgcctctttggaattgtaaatggtagtttggttagacgttattcaaagaaaagttctagcatactgtaaactctcagtacatggtcaataaaagaaagatcaaaaagaaaagataaatgacacagttcaactattaaattcaaactatatcactaaaagtatattgtctattaatgtcagatcaggtgcgttaattatatttgtgtatagaagataccattatactatcaacacaaggaaaatcaagcactgtttcaaataacttaactgtaatcatagtttttgtctttctatcattttgaacagccttatcaaatatatattcctaaatctataataataatagcgtaggagtttctctcaactttaa

SEQ ID NO: 217190 - DNA, 619 bp, Homo sapiens
tccatttttcattcaagtttccgtattacctatttgagggcaaggtattgtctatacctagggaagctatgttaaatagaaaaacctgctccttctcagaagcaacatatgcaaacccatccagttaatattcaaaagatgctatttgtgataattgttgacaggacagtgtagtgcaaacaacatgagtttagaatcagacataaccagatttaaatttaggctgatgagggcagaattcaacctctctgcctctttggaattgtaaatggtagtttggttagwcgttattcaaagaaaagttctagcatactgtaaactctcagtacatggtcaataaaagaaagatcaaaaagaaaagataaatgacacagttcaactattaaattcaaactatatcactaaaagtatattgtctattaatgtcagatcaggtgcgttaattatatttgtgtatagaagataccattatactatcaacacaaggaaaatcaagcactgtttcaaataacttaactgtaatcatagtttttgtctttctatcattttgaacagccttatcaaatatatattcctaaatctataataataatagcgtaggagtttctctcaactttaa

SEQ ID NO: 217191 - DNA, 545 bp, Homo sapiens
tattttggatttaacagttttctacaaaattatttttaagtactgcatatttttatggtactataaatgtatgtttaaaatatttcctctgtttttatataatgatacattggttttttgatattggtattayggtaaaatgtctggattacttataataaaattgagtatttgtctttttagaggattatcttataagtagcttacaactgaattttgttagtttgaaaatgtgtgtctttcattggagagatttagattttaatattcaccgtgattattggaatatttggggatatgtttatacatttaattttgtgttattagtcttgattttctaggcttattgattgagcacatgattttctcacttatttttttgtgctataattgaaaaagtttttttcatttttcattccagatttaacatatataccaaaataaattccttgaaatcaaatatctttataactgttttaaatattataatttcagttgaccctgaacaacacttcgctggtccgcttatacatgtatttacttct

SEQ ID NO: 217192 - DNA, 545 bp, Homo sapiens
tattttggatttaacagttttctacaaaattatttttaagtactgcatatttttatggtactataaatgtatgtttaaaatatttcctctgtttttatataatgatacattggttttttgatattggtattatggtaaaatgtctggattacttataataaaattgagtatttgtctttttagaggattatcttataagtagcttacaactgaattttgttagtttgaaaatgtgtgtctttcattggagagatttagattttaatattcaccgtgattattggaatatttggggatatgtttatacatttaattttgtgttattagtcttgattttctaggcttattgattgagcacatgattttctcacttatttttytgtgctataattgaaaaagtttttttcatttttcattccagatttaacatatataccaaaataaattccttgaaatcaaatatctttataactgttttaaatattataatttcagttgaccctgaacaacacttcgctggtccgcttatacatgtatttacttct

SEQ ID NO: 217193 - DNA, 173 bp, Homo sapiens
ttggcttttcttatttttttgacaggatcttcatcagagcagaagttttaaaatgaagttcagyttatcaattatttctttcatggaccatgtttttggtgttgaatctaaaaattcatagccatactgtaggtcacctagattttctcgtattatcttctaggagtttttat

SEQ ID NO: 217194 - DNA, 343 bp, Homo sapiens
atatcttaaaatgctttaaatcactcaaggcaggcaggtacctactttgtccttgtgaagaaggatctcatgcacttgttcatgcaacaktgtttactggggccctgctctgtgtcagtggctgagactccagcaacacgagcaaagctcacagagctcagccctcatgaatctcaccatccagtagggaaggaaacccatcaaatcatgcgaagaattgcaagcaacttctataaccgaagaagggtaagagcttatgaaagtatataatagggctcctaaacagtgtcagttgtagagaaatcaaatgtgcatttcaggatgaaaaagaatatgtctcaag

SEQ ID NO: 217195 - DNA, 504 bp, Homo sapiens
gtcactaattaatcaaactacatttggttatgaaaatttgtgaaagtgaaaaaaaatggttctgccatggactgacctcagggaaaaaggtctcaggctattttaaggcttaatgaaaaatgggggttagctacatctataaatttatatttgactcatataaactgatctccacagtcatctagtaccagctttaaaaaaaaatcctgagatcttaaggatcctcaaggaaaaaaaatggcacttgggagaatcagctcaattataatattttaagatttattgactttaaagatttttgataaaattaaaaagtttttgaaagtattgaaataagccattaatagaccatttcataggaatcacacatcatcccacaacagttatttctaaccaaatgccctgtttgatcacagtaggwtacattttactttttttttttttttgacaaggtctggctctattgcccaggctggagtgcagtgacccgatctcaactcactg

SEQ ID NO: 217196 - DNA, 413 bp, Homo sapiens
attaagcaatgagccagtcagaagcactaagattcactgtaatgaagaaagtttgctgagccctaagatgtctgaagtggtgcaccctggctttccacggtggatggaggggcagtggtctttttctcttttgacaggaaatggagaggaggtcatctgagagctcttcctgcctcttggtctgggattctctttaagtgtggaaatgtagaaaaaaaaaatcagggtgtcttgtttccttatagacagtgctttgtttttcagaccagcacgcttaccttttcctttccaagatattgaatgatcacttaaatgtatcagctaatagaaaatgactggtcggaggctggatctttttggcaaggtctgtagttgtcctctccaaacgcgggasgtatgaaaatgctgaattc

SEQ ID NO: 217197 - DNA, 591 bp, Homo sapiens
ttgagatctcctttgctttagctgcaggaggtcccttccccaggctgctgtgtgtgagatattcctgaagcctggctcatttcttttgccacccatcctaatgagttctcccaaactttagcctattctaaaacaaataatgaaataacaaaactaggattctgtttatctaacaaaaagtggaatataggcatcattttggtgagtttagtcttatatcagatttcargttggtacatttaaaacttctatagggcaaagacaccaccaatatttttttaaagtctcagagagaagtacatatttaaaactcatgtaatccaaaactagatgataggaagaccatatatggcactcagacatataagggaaaaatcaaataaccagatgtaaaaaatgggtaaaggatttgttcatgcatttcccagaagagcatacctgatgctcaataaatgtttgaaaagacaaaattcttcatcaatggtgctggaaatcaaaacattgagctaccaattcacacattatttttatttaaaaaaaaagtatggcaacttttttttttaagaaaagaaggcttttactttaaaacag

SEQ ID NO: 217198 - DNA, 522 bp, Homo sapiens
gctgctgtgtgtgagatattcctgaagcctggctcatttcttttgccacccatcctaatgagttctcccaaactttagcctattctaaaacaaataatgaaataacaaaactaggattctgtttatctaacaaaaagtggaatataggcatcattttggtgagtttagtcttatatcagatttcaagttggyacatttaaaacttctatagggcaaagacaccaccaatatttttttaaagtctcagagagaagtacatatttaaaactcatgtaatccaaaactagatgataggaagaccatatatggcactcagacatataagggaaaaatcaaataaccagatgtaaaaaatgggtaaaggatttgttcatgcatttcccagaagagcatacctgatgctcaataaatgtttgaaaagacaaaattcttcatcaatggtgctggaaatcaaaacattgagctaccaattcacacattatttttatttaaaaaaaaagtatggcaacttttttttttaag

SEQ ID NO: 217199 - DNA, 561 bp, Homo sapiens
agatctcctttgctttagctgcaggaggtcccttccccaggctgctgtgtgtgagatattcctgaagcctggctcatttcttttgccacccatcctaatgagttctcccaaactttagcctattctaaaacaaataatgaaataacaaaactaggattctgtttatctaacaaaaagtggaatataggcatcattttggtgagtttagtcttatatcagatttcaagttggtacatttaaaacttctatagggcaaagacaccaccaatatttttttaaagtctcagagagaagtacatatttaaaactcatgtaatccaaaactagatgataggaagaccatatatggcactcagacatataagggaaaaatcaaataaccagatgtaaaaaatgggtaaaggatttgttcatgcatttcccagaagagcatacctgatgctcaataaatgtttgaaaagacaaaattcttcatcaatggtsctggaaatcaaaacattgagctaccaattcacacattatttttatttaaaaaaaaagtatggcaacttttttttttaa

SEQ ID NO: 217200 - DNA, 447 bp, Homo sapiens
cattctcccaaataaaactcttcactgacttcctacagaacattgaataaaccccagatctgaaaaatggctcataaggccctgaacaccaaggcccctgcctcttctctccatccttataccctcctgctacactctttccagtcccactgttgttctctctgcagttggaacaccccagctctttctagccccaaggccttgcatgttctttgccccatgtgactgcccatttctacaatcttttccttccatttatctaaatgtggcttcataaaaagttttcaaagtagttcccattatcatcagcctcatctccttatttccttcatagmatttatcatgatttgtaaatattttatttctcttttgttgcttttgtctgttccactaaagcagggtctgtttcttgtattcccagagcctcattccatgaatggaggaata

SEQ ID NO: 217201 - DNA, 565 bp, Homo sapiens
aatttaacaaaattggttttcatgtattgctttgtgaggccagtgtcattattttgtagccaaaatactcctagagttctaagctttataatgtttctgattgctactaaagactaatatcattgtttgatagagcattctgcattcttgcaatgtggagagagctttcaggccataaggactgggaagcaccactattgtaaccaaggaaacttgtacgaacatcttttctggagcmcatttgagaacatgattttctctgtgctaaagtgatattttggcattacacccaggagaatgactttcagtcctgtagttttaggagaaaactatgcccttctgttgaccagagatcaatatgaaggcaacaggtggacctaccctttgaggcacttttctaaaaatgtgctctcagaacactgctagcccctggcagatttacaagaaagaggaatgagcctttctttggttcaatgtgcctctcacatctgaagtgtaaaatcgtgactttcatagaaaggctgttacagtcttaacaaccaattcattcttaaagcttctactg

SEQ ID NO: 217202 - DNA, 608 bp, Homo sapiens
gctctcagaacactgctagcccctggcagatttacaagaaagaggaatgagcctttctttkgttcaatgtgcctctcacatctgaagtgtaaaatcgtgactttcatagaaaggctgttacagtcttaacaaccaattcattcttaaagcttctactgtgctttaccagaaaagtcagcttatatctaacattattagttctattatttctccaactaataaaaatggactacaggctcaaaatggctttctgaagtgaaaaatattgatacaaagtataataaatacaataactcagaaaaatgtcataattgtaagtggtgattagaaattctgtgcaactatagaatgtgaatctatatgctctggttcaaggtgatctgcagatgggataatttcatacatgcaacataaaaaagaaaatgcagaaagaaagtatgcccagtgataaaaccattaaattgaatattcctgaactaataatctatttatccctattccttgatacactgttctgaaattttgtcaaacagttgtgtgaagccagccaaacttcccaaaatttacaaataaagaagagtaacctctctagtaaactaatgaaattt

SEQ ID NO: 217203 - DNA, 608 bp, Homo sapiens
gctctcagaacactgctagcccctggcagatttacaagaaagaggaatgagcctttctttggttcaatgtgcctctcacatctgaagtgtaaaatcrtgactttcatagaaaggctgttacagtcttaacaaccaattcattcttaaagcttctactgtgctttaccagaaaagtcagcttatatctaacattattagttctattatttctccaactaataaaaatggactacaggctcaaaatggctttctgaagtgaaaaatattgatacaaagtataataaatacaataactcagaaaaatgtcataattgtaagtggtgattagaaattctgtgcaactatagaatgtgaatctatatgctctggttcaaggtgatctgcagatgggataatttcatacatgcaacataaaaaagaaaatgcagaaagaaagtatgcccagtgataaaaccattaaattgaatattcctgaactaataatctatttatccctattccttgatacactgttctgaaattttgtcaaacagttgtgtgaagccagccaaacttcccaaaatttacaaataaagaagagtaacctctctagtaaactaatgaaattt

SEQ ID NO: 217204 - DNA, 451 bp, Homo sapiens
ctttaaaaaaaaaaaaaaaatcttctctgccttattctgtccacttgaaccatctttccaagctgcccatttactccaacgactttagaatgattcctcccaaatttctcctccgagtcttacattttcatctggtttttaagcatatcccttatctgcttttaagacacttccattaatgtctttttaaaacttcaactgaaaagcactacttaatttatttattaattcagtaaaaatttaccaggtgtttactgttagacttcttacaaggagrttagaaaataaaagtatatcattgaagaacacgtattaaagtagttaaagtgagatacgcgttgcaactggaaaatacagtagtatatcaaaaatggatttctcaacttattttcttatctttttaatgtcattgacaccaccattcaaccctattaaaactgaatttgtatga

SEQ ID NO: 217205 - DNA, 575 bp, Homo sapiens
ggatcacctggcttctggtttcacgtggtggctgggctctttcttgtggtccagctatatatggaaatctcagtttagcaggtgccgtggccccatatggaggctgggggcctctgcagaggcctaacctctatggtggcttctttcttcagaaggagctggttctgtgagagcgggtgtctcaagtctcatgggtttctcataagctaggagtttcttgagatggcctggctcagctgggccatccgcttcaayggagtctttacatctcccataccacagtgacctggctaccttggatgctcatctgagggcttgataaggggtcacagtgtaaagccattttggaagccttcgtttctccataaggaaccttatgttccttctgttgagtgcttgcagttgactctggaagtctgaatgttagaagacactttcaggggacactttcaagaagaaaggcctgaggggttgcaagtccagaggtatgcacaaggtcatagctgtggctctgatgtcagtcctcagatgtgcatccaggcaagcagtgggagaaagtgtccagaagatgctat

SEQ ID NO: 217206 - DNA, 603 bp, Homo sapiens
atttgagggagtttaaataccctctagaggattccattagttacctggtgtgtgccctaygcaaatgaaaaggataaagtaaagttgcgaaatcatttatggcttatgccctatgcagagaatatttcctgtgactgctaaagtgtgaatcaaccatatgttccctgtctccggaccctgttttcctgcctcattttccccctgagagatgtgatcccccaaaatttttattggagtcagagggaccaatggtctttttactgtaactgcttcatgctggcttggggcatggtacctacctactggggatcacggacctctctccctgctctgtctagtggaggcagggtagctccttgatggccagggtggtttcttcacctggaactggctggagcctttgttgcatactcatctgaagcttgatggtctctaggtgagagggaatgatgtttgttaaaagatttaatgggaatttcaggggtgtatacctatgtggtcaagaatgtttgttatagagatttgcaggagaaaaaacaaaagctggtttgtgatgtgttctagattccacatgttttcttaaaatcatagcataagtcactc

SEQ ID NO: 217207 - DNA, 603 bp, Homo sapiens
atttgagggagtttaaataccctctagaggattccattagttacctggtgtgtgccctacgcaaatgaaaaggataaagtaaagttgcgaaatcatttatggcttatgccctatgcagagaatatttcctgtgactgctaaagtgtgaatcaaccatatgttccctgtctccggaccctgttttcctgcctcattttccccctgagagatgtgatcccccaaaatttttattggagtcagagggaccaatggtctttttactgtaactgcttcatgctggcttggggcatggtacctacctactggggatcacggacctctctccctgctctgtctagyggaggcagggtagctccttgatggccagggtggtttcttcacctggaactggctggagcctttgttgcatactcatctgaagcttgatggtctctaggtgagagggaatgatgtttgttaaaagatttaatgggaatttcaggggtgtatacctatgtggtcaagaatgtttgttatagagatttgcaggagaaaaaacaaaagctggtttgtgatgtgttctagattccacatgttttcttaaaatcatagcataagtcactc

SEQ ID NO: 217208 - DNA, 603 bp, Homo sapiens
atttgagggagtttaaataccctctagaggattccattagttacctggtgtgtgccctacgcaaatgaaaaggataaagtaaagttgcgaaatcatttatggcttatgccctatgcagagaatatttcctgtgactgctaaagtgtgaatcaaccatatgttccctgtctccggaccctgttttcctgcctcattttccccctgagagatgtgatcccccaaaatttttattggagtcagagggaccaatggtctttttactgtaactgcttcatgctggcttggggcatggtacctacctactggggatcacggacctctctccctgctctgtctagtggaggcagggtagctccttgatggccagggtggtttcttcacctggaactggctggagcctttgttgcatactcatctgaagcttgatggtytctaggtgagagggaatgatgtttgttaaaagatttaatgggaatttcaggggtgtatacctatgtggtcaagaatgtttgttatagagatttgcaggagaaaaaacaaaagctggtttgtgatgtgttctagattccacatgttttcttaaaatcatagcataagtcactc

SEQ ID NO: 217209 - DNA, 603 bp, Homo sapiens
atttgagggagtttaaataccctctagaggattccattagttacctggtgtgtgccctacgcaaatgaaaaggataaagtaaagttgcgaaatcatttatggcttatgccctatgcagagaatatttcctgtgactgctaaagtgtgaatcaaccatatgttccctgtctccggaccctgttttcctgcctcattttccccctgagagatgtgatcccccaaaatttttattggagtcagagggaccaatggtctttttactgtaactgcttcatgctggcttggggcatggtacctacctactggggatcacggacctctctccctgctctgtctagtggaggcagggtagctccttgatggccagggtggtttcttcacctggaactggctggagcctttgttgcatactcatctgaagcttgatggtctctaggtgagagggaatkatgtttgttaaaagatttaatgggaatttcaggggtgtatacctatgtggtcaagaatgtttgttatagagatttgcaggagaaaaaacaaaagctggtttgtgatgtgttctagattccacatgttttcttaaaatcatagcataagtcactc

SEQ ID NO: 217210 - DNA, 438 bp, Homo sapiens
caaggattatatatgaatatatatgccaatatgcttcaaaatttattattcaaatgttgataatttattatgatcacaaagacacagaaaataatattgatttagccatgtagaaataagtaatgatataatgtgtgaatatgctttaatgtctataccttatacatttttgtttctgtgagaaccaaatgcatctaggaggaagtaycccaagagagtggacccttagggactcctagctccataaacactgcttctctgtccttttatctgaactccagaatatatgataaatgctacgtgttatttttttcaagtgaagtaaatattgaaattaaaatatttccaaataaattaataaaaattgaatagatatagttttcattatttcagtaaaacatttgataaaaaattttgtgccatgatgttccataggca

SEQ ID NO: 217211 - DNA, 518 bp, Homo sapiens
tggcttgctttttcactaattacagttgacctttgaacgacatgggggatcaacccctagtgcagttgaaaatcgatgtataacttttggctgccccaaacctaagctagagaaaagaagatggtattaagaaaaccacaaggaagaaawaatatatttaccaggtatattagttcgttttcacgctgctgataaagacatacctaacacggagaagaaaaatagactaacagttccacatggctggggaggcctcacaatcatggcagaaggcaaaagacacttcttttttttttttttaatatactttaagttttagggtacatgtgcacaacgtgcaggtttgttacatatgtatacgtgtgccatgttggtgtgctgcacccattaactcgtcatttaacactaggtatatcccctaatgctatccctcccccctccccccaccccacaacaggccccggggtgtgatgttacccttcctgttacatggctgcagcaagagagaatgagagaga

SEQ ID NO: 217212 - DNA, 491 bp, Homo sapiens
gtcaaacataggattatggattgtaaagcactttaggataaaaaattttaagaactccttactattcacacagatcaagctgagtgcagaaatcaagctcttcaccacmagactgtgttgcgtgagttatgaggtaaatcaccaggatacatttatagcacattgctaggcctaaagtggtattcagtttagtaaatctgaacctgccacaggcataatagcagagttcagagctggtagcatattgttcttaaattgcaaattcgtttcattctctattaacagaaagagaagagagatgaagctggggcttcagggtcaggtaaagaactaaatttccaaaccaggacaaagttaacatttaagaatataccactgggccagtcatggtagcgtacatctgttaatcccagaactttgggagattgaagtgggaggattgttaaggccaggagttcaagaccaccctgggtatcatagagagagctcat

SEQ ID NO: 217213 - DNA, 518 bp, Homo sapiens
tggcttgctttttcactaattacagttgacctttgaacgacatgggggatcaacccctagtgcagttgaaaatcgatgtataacttttggctgccccaaacctaagctagagaaaagaagatggtattaagaaaaccacaaggaagaaataatatatttaccaggtatattagttcgttttcacgctgctgataaagacatacctaacacggagaagaaaaatagactaacagttccacatggctggggaggcctcacaatcatggcagaaggcaaaagacacttcttttttttttttttaatatactttaagttttagggtacatgtgcacaacgtgcaggtttgttacatatgtatacrtgtgccatgttggtgtgctgcacccattaactcgtcatttaacactaggtatatcccctaatgctatccctcccccctccccccaccccacaacaggccccggggtgtgatgttacccttcctgttacatggctgcagcaagagagaatgagagaga

SEQ ID NO: 217214 - DNA, 381 bp, Homo sapiens
ttatataataataatggaatcaattcatcaagatgatttaacaattccaaatataaatgtactatattagtttgttttcacactgctgataaagacatacccaagactgggcaatttacaaaagatagagtttcaayggacttacagttccacatggctggggaggcctcacaatcatggtagaaagcaagaaagagcaagttatgtcttacatggatggcagcaggcaaaaaagagagagagagagacagcgcttgtgcaggggatctcctctttttaaaactatcagatctcataagacttattcactatcatgagaacagtatgggaaagatctgccctcatgattcagttacctcccacatggtgcctcccataggg

SEQ ID NO: 217215 - DNA, 643 bp, Homo sapiens
tcatttcaatagatacagaaaaagcatttgataaaaacattctttcctgacaaaaatgctaaacaaagcatagaaggaacatacctcaaaataataaaagccatatatgacaaatccacaactaacatactaaaatgggtatagctgaaagcctttcttctaagcatcgacactagacaaggatgctcactttcaccactcctgttcaatatattacttgaagttcgaaccagaacaaccaggaaaaagaaagaaataaaagtcatccaaagtggaaaagatgggatcaaattgtcactctttacagacaatataatcttatacttaggaaacctaaagattcagccaaaaaaytctttgatctgataaataaagattaaatgaaggatacaaaatcaacatataaaaatgagtagtgtttctacacatcaataacaaaccagctgaaagagaaatcaagaaaacaatcacatttacaataggtaccaagaaataaaatgcctagaaataaatttaattaataaggtgaaaaacatctacaaggaaaagtacacaacactgatgaaagaaattgaagagaacacaaatggaaagacatcctatgctcgtagattagaataattaatattgttaaaataactgt

SEQ ID NO: 217216 - DNA, 449 bp, Homo sapiens
agatcattaatttcagtccttttctgactttatayatttatttttcattttttatttttttattatactttaagttctagggtacatgtgcacaacgtgcagctttgttgcctatgtatacatgtgccatgttggtgtgctgcacccattaacttgtcatttacattaggtatatctcctaatgctatccctcccccctccccccacctcacaacaggcccctgtgtggaaattgcaatataagcactgccttagctgcaaatgatactttttgatagcttctgttctcattttcattaagttcaaagcgattttaagtttttccttttgatttcttctttggcccatgaattgcttagacttgtgccacttagttttcacatatttgcactttttcagctatctttttattatttattttgaattttattccattaagatctgaacat

SEQ ID NO: 217217 - DNA, 432 bp, Homo sapiens
ttaaatattaggcatggtaaatattttgctttgaactgaaacttgaaaaaacacagctattgttgaagactttcttaataatattatattaatttaatatagaaaaggaatagaaacgttaaatctcaagagaaacaggtggagtaaagatgcacataattacttactattgtataaaaagaatagtcttacctctcattctattcatatttactttaaaattatttcctgcctattatgtgccaggctgtctgtttgtgctgaagaggtaactgtgaagaagacaggtgaggtttctgatcttttgaagtatatrgttgataaatgtatccttttatgttttaacattaaaatctcctgaattttagtgtaagagctttgcatctcagagatattctatggttcatatattaattctgacctagtttgaca

SEQ ID NO: 217218 - DNA, 502 bp, Homo sapiens
tcacttttggtgacgtcaatgaaggggtattgcaatgcttaagagaactgttaatccctttccactggtgtcactaacaattgtagtgcttgtttattcatagcaggtacgtgactaagtaatgttaacatcaaagcagaaagaggataatagagtgttctaaaaagaaaattcggtggttgggtgcagtggctcacacctgtaatcccagcacttttgagaggccaatgggggtggatagtwtgagcctaggagttcaagaccagtctgggcaatatggtgaaacctcgtgtctacaaaaaatacaaaaactagtggtgcatgatggcatgcatctatagtcccagctactcgggaggctcaggtgggaggatcacctgagcctggggaggtcaaggctgcagtgagacgtgattgtaccactgtactccagcctgggtgacaaagtgagaccctgtctcaaaaaaaaaatgatttgagataacatcacttgtcattgttt

SEQ ID NO: 217219 - DNA, 581 bp, Homo sapiens
taatgagaacagcatgggggaaaacggcccccataatccaatcacctgtcatcatttttctcccttgatacatggggattttaattcaagatgagatttgggtggggacacagagccaaaccatataattctsgcactggcctctccaaaatgtcatgtcttcacatttcaaaacacaatcatgacttcccaacagtcccccaaagtcttaactcattccagcattaactcaaaagtccaagtccaaagtctcatccaagacaagtcccttccacctatgagccttaaaatcaaaatcaagttggttactttcaagatacaatgagggtacaggcattgggtaaatgttcccatttcaaatgggagaaattcgccaacaagtgtcagcaggccccgtgcaagtcagaaacccagccaggcagtcattaaatcttaaaactccaagtaatctcctttgactccacatctcacccagggtactttgatacaaaggttgtactctcaatgccttgggtagctccctcatgggctggcgttgagtgtctgcagcttttccaggtgcaaggtgcaagctgtcggta

SEQ ID NO: 217220 - DNA, 581 bp, Homo sapiens
taatgagaacagcatgggggaaaacggcccccataatccaatcacctgtcatcatttttctcccttgatacatggggattttaattcaagatgagatttgggtggggacacagagccaaaccatataattctcscactggcctctccaaaatgtcatgtcttcacatttcaaaacacaatcatgacttcccaacagtcccccaaagtcttaactcattccagcattaactcaaaagtccaagtccaaagtctcatccaagacaagtcccttccacctatgagccttaaaatcaaaatcaagttggttactttcaagatacaatgagggtacaggcattgggtaaatgttcccatttcaaatgggagaaattcgccaacaagtgtcagcaggccccgtgcaagtcagaaacccagccaggcagtcattaaatcttaaaactccaagtaatctcctttgactccacatctcacccagggtactttgatacaaaggttgtactctcaatgccttgggtagctccctcatgggctggcgttgagtgtctgcagcttttccaggtgcaaggtgcaagctgtcggta

SEQ ID NO: 217221 - DNA, 581 bp, Homo sapiens
taatgagaacagcatgggggaaaacggcccccataatccaatcacctgtcatcatttttctcccttgatacatggggattttaattcaagatgagatttgggtggggacacagagccaaaccatataattctcgcactggcctctccaaaatgtcatgtcttcacatttcaaaacacaatcatgacttcccaacagtcccccaaagtcttaactcattccagcattaactcaaaagtccaagtccaaagtctcatccaagacaagtcccttccacctatgagccttaaaatcaaaatcaagttggttactttcaagatacaatgagggtacaggcattgggtaaatgttcccatttcaaatgggagaaattcgccaacaagtgtcagcaggccccgtgcaagtcagaaacccagccaggcagtcattaaatcttaaaactccaagtaatctcctttgactccacrtctcacccagggtactttgatacaaaggttgtactctcaatgccttgggtagctccctcatgggctggcgttgagtgtctgcagcttttccaggtgcaaggtgcaagctgtcggta

SEQ ID NO: 217222 - DNA, 644 bp, Homo sapiens
gtcttttttctctaatttttttacccagtgtggtatttctgcaatgagagtgaaatgcctaatttkttattgaaataaagtactgtataactttattataaacaactggcagattcttaccagtacaggcatacctcagaaatattgtgggttcagttccagaccaccacaataaagggaatatcaccataaagtgagtaataaagttttttgttttctcagtgcatttaaaagttatgtttaccctatactacagtctattaagtgagcaatagcattatgtcaaaaaatgtgcataactttaatttaaaatactttattgctgaaaatgctaatgatcatctgagtctcagggaatcataatatttttgctggtggagggtcttgcatcgatgttgctggcttctgattggtcaggatgctcgttgctgaatattggggtggctgtggcaatttctaaaaataagagaacaaggaagtttgctgtatctttgacttcctttcaccaaagatttctctacgatgggatgctgtttcatggcattttacccatagtacaacttctttcaaaattggactcagtcctttcaaattgtgccactgcttaattaactaattttatgaaagattctaaacctttgtta

SEQ ID NO: 217223 - DNA, 644 bp, Homo sapiens
gtcttttttctctaatttttttacccagtgtggtatttctgcaatgagagtgaaatgcctaatttgttattgaaataaagtactgtataactttattataaacaactggcagattcttaccagtacaggcatacctcagaaatattgtgggttcagttccagaccaccacaataaagggaatatcaccataaagtgagtaataaagttttttgttytctcagtgcatttaaaagttatgtttaccctatactacagtctattaagtgagcaatagcattatgtcaaaaaatgtgcataactttaatttaaaatactttattgctgaaaatgctaatgatcatctgagtctcagggaatcataatatttttgctggtggagggtcttgcatcgatgttgctggcttctgattggtcaggatgctcgttgctgaatattggggtggctgtggcaatttctaaaaataagagaacaaggaagtttgctgtatctttgacttcctttcaccaaagatttctctacgatgggatgctgtttcatggcattttacccatagtacaacttctttcaaaattggactcagtcctttcaaattgtgccactgcttaattaactaattttatgaaagattctaaacctttgtta

SEQ ID NO: 217224 - DNA, 444 bp, Homo sapiens
cgaattctatcagacattcaaagaagaactggtaccaatcctattgacactattccacaagacagagaaagaggaaatcctccctaaatcattctacgaagccagtatcaccctgataccaaaaccagaaaaggacataacaaaaaagaaaactacagaccaatatcactgataaacacagatgcaaaaatcctcaaaaacatactagctaactgaatcaaacagcgtataaaaaagattatccatcatgatcaaacgggtttcataccagggatgcagggatggtttaacatmtgcaagtcaataaatgtgatacaacacataatagaattaaaaacaaaaaatcacatggtcatctcaatagccacagaaaaagcaattaacaaaatccagcatccctttatgattaaaaccctcagcaaaattggcatagacgagacattc

SEQ ID NO: 217225 - DNA, 620 bp, Homo sapiens
gacctatatgctgattgtggtggtggtcccgctactgtatacatttgccacgactcatcagattgtgtacttaaaattttattttaaattaattatacttcaataaagctgacaagaaacccctccccaaagaaaactgaggaaggaacttataaaaaatagtgatatgattctcttgtattttgtaaaattaaatatatatacacgcattaaaatgtgttctaatgcatgtatgcaaacatatatattttcaaaacactattttattttatcttttcccatactaaaagtactcatcagattgtcattgatttcttctttcctcctctcacctgtgactgtgggaaagaatgattctctcattatgagtcagagccttttttttccttttctgaatttatagtaacgactcaacactagaagtctcagcagcttsgtttgcctgtcattaattttaccaatggttgcaggtgtagcctgaaagaataggtataatgctggtatgtaatgctttctcctgcttctaaaaggtgctgtggggaggtgttgaatgagatcatggtggtaaacaagaatataaattcaaatattatcttaaaacagaaacagtaaagcatgga

SEQ ID NO: 217226 - DNA, 565 bp, Homo sapiens
gggcattcatcatgtggccaatagagaactcaaatgccatgttaattactgatagaggccaggttggaggtggtaacttagagtgaaggtgagtggagctgtcaaccaaaccccagaatgaggcagaatcaccagcagtcactgggcaaggtggcttcccaagtgagaaaccatacatggaagagtagaaaagaactcagtatcttcatggcctgtygtcaagtggaccgtatgggctgagctaagcatgcccaattattctccctgaatttacagatcagattcgtcactctacctttgcagggactgtttcaggggtggagaagagaccagagtgtgcttagtgagaaaatccctccccaaggagtgggaggagtgttctcataacaaatctgtagaggcaatccacctcccaggctcctggctccttcattgcctactgaaagtgatcactgtggagcacactgttcagccctacttctctgttctttcctctcattcctttcatgcacaatctgctccttatactgccttctattgtgaacacattctcctatgtctcaaa

SEQ ID NO: 217227 - DNA, 565 bp, Homo sapiens
ttgtggccttatgtattttggagaatgttccatatgctgatgagaggattgtatattcttcagttcttgagtagaatgttctgtaaaaagcagttcagtgcgcttgttctagagtgtagtttaagtccagtgtttcttggttaactttctgcctcagtgatgtgtctagtgctgtcagtatagtgttgaagtcccctaatgttaatgtgctgcagtctatctcttttcttaggcctagtagtaattgctttctgaatttggtagctccagagctagacacatayatgtttaggattgtagtatcttcttgttggattgatccttttgtcattatataatgaccttctttgtctttttttttaactgttgttgcttttaaagtctgttttatctgatataagaatagctactactgttcacttttggttgccattcgcatgtcatattttcttccactttaccttgaatctataagaatccttatgtgttaggtgagtgtcttgaagagacactttgggtgtttttatccattctgccactatgtcttttaggtgggaaatttaga

SEQ ID NO: 217228 - DNA, 534 bp, Homo sapiens
atttcatattgatttggatttattgctggagagctagtgtgatcatttggtggtgttaaagaaccctgtttggtcatattgccagaattatttttctggctccttctcattgcagaaaactatttattctaattatttttkaatttattttttgttcgactatgtgttcttttaaatttctttttctctccttgaggatgtgattttaatgactctagtttattgtaacccaattcagctctgcatggtttcaggggtgaagactctgtatgagttccttggttatagagtctgtatgatggctttctcagatactcattgtagtagtaatgtgcttggtgtgtgagtgggttcactgtctcctgtggcattggaatggcagtggtctcttgaaggttatctcattccccagtggtgtgcacttatttattttatccagtatttcatttactaggttgaacagttcaagtttcaggccagtagtggaggtgtccatgagtaaaaaccaaacaggtgggtaatgtaatacccagt

SEQ ID NO: 217229 - DNA, 534 bp, Homo sapiens
aacatcaaatatgcattctattggagaaagggtattagagctctgataattgctcctacataacttaatattkacattgttatgaaaatgaagtgcaaattgtacagtaaaatctgcatctgcaattttatccactcaagagcatttggttagagtaaatccataacattacaaacactatatacattgtaggtgcattataggtaattgttgactgaatgataagctcacattcttgaaagggaagttgcatataagtgacctcagcttcttcaaaacttcaaaaatgattctaaaaattcgattgaagtcattagatgggaagattcaactttacccatttattttattatttattagtaagctgcttttttttttttgtttgtttgtttgttttgagacgggagtctcaatctgttgccaggctggagtgcagaggtgtgatcttggttcactgcaacctccgccccctgggttcaagcgattctactgcctcagtctccaacaagtagctgagatgataggcacccgcca

SEQ ID NO: 217230 - DNA, 547 bp, Homo sapiens
aaagggtattagagctctgataattgctcctacataacttaatatttacattgttatgaaaatgaagtgcaaattgtacagtaaaatckgcatctgcaattttatccactcaagagcatttggttagagtaaatccataacattacaaacactatatacattgtaggtgcattataggtaattgttgactgaatgataagctcacattcttgaaagggaagttgcatataagtgacctcagcttcttcaaaacttcaaaaatgattctaaaaattcgattgaagtcattagatgggaagattcaactttacccatttattttattatttattagtaagctgcttttttttttttgtttgtttgtttgttttgagacgggagtctcaatctgttgccaggctggagtgcagaggtgtgatcttggttcactgcaacctccgccccctgggttcaagcgattctactgcctcagtctccaacaagtagctgagatgataggcacccgccaccacacctaatttttatatttttagcagagatgaggttt

SEQ ID NO: 217231 - DNA, 514 bp, Homo sapiens
ttttcaacttactttgcccaaatccatcaaaggaattactatctttagcagctatagctttatgaaacatttcttaaataataagacttgaaaatcaaaatatcatctcgatccatgggctgaagaatggatactgagttagtaggcatgaaaatagcattactctccatcagagctcttggttgaccagtacattgtcaatagcagtaatattttgaaaagaatctttttttctgagcagtaggtctcaacattgagcttaaaatattcattaaatcatgctgcaaacaggtgtgctgtcatccaggctttgttgttccatttattgagcacagatagaatagatttcacataaytcttaagggccctaggattttcggaatggtaggtgagcaatggtttcaaattaaagtcaccagctgcattaaccactaacaagacagtcttgtcatttgaagcttcgaagttaagcactgacttctcctctctagctatgaaagtgccagatgacatc

SEQ ID NO: 217232 - DNA, 514 bp, Homo sapiens
ttttcaacttactttgcccaaatccatcaaaggaattactatctttagcagctatagctttatgaaacatttcttaaataataagacttgaaaatcaaaatatcatctcgatccatgggctgaagaatggatactgagttagtaggcatgaaaatagcattactctccatcagagctcttggttgaccagtacattgtcaatagcagtaatattttgaaaagaatctttttttctgagcagtaggtctcaacattgagcttaaaatattcattaaatcatgctgcaaacaggtgtgctgtcatccaggctttgttgttccatttattgagcacagatagaatagatttcacataattcttaagggccctaggattttyggaatggtaggtgagcaatggtttcaaattaaagtcaccagctgcattaaccactaacaagacagtcttgtcatttgaagcttcgaagttaagcactgacttctcctctctagctatgaaagtgccagatgacatc

SEQ ID NO: 217233 - DNA, 469 bp, Homo sapiens
aaatatgtctgtttccaatactaccttccttttaaatggctacttataaacatttttttttttttattttacccaatgtcatgatttggagctccagcagaaaatagtttaaagaatagtagtacagaaactaaaaaaaaaaaaaaagaatagactattaactgcattgagcacttgcctaattgccctcctggacagattaacctgcaagtgaaatgactgatttaattctgcctgtcctttctcacctaaraactcaatttggatggccaagttgctaactctgtttctaaacaacaggttaagtggcttaaaagttttagcacagttgtttcgttgtagttgcatttttgtttttgtgtttataactctttgggaaatacagtccaaggaaaattgttcctatagctatactcatatgttgccagacggtgtttggccagagttctaaatttaatctgtccctgca

SEQ ID NO: 217234 - DNA, 577 bp, Homo sapiens
tcatgctagctacctgtctaatattatttaggatgttcaaatatttaactattcttacccacttttaacatgtttttaattcagtatttaaaatttgtatatttaaagataaactttacytattttctgtattatttgtaaaagattatacgtgtcaggaagcacatacatttgcacacacacacacactgtaactatgcttattcattcattgttgggtttaataagtattaattgaatgggtgaaaagatggattctgacaaacactaaattttaaacatcctctaaaagtaaataaaattaagacggacttttctgaatattttcaaaaagaaatgtaaatatgtttcctgcctttcagcttttcccatcttgcctactctccagtgttagccttcatttcgctcttaccaactacatttcatcaacatttactctgagttctatatcttaattataaaacattgtttgaagctctagctatggctgatatatttttaccttacaaatgctattctcttgaacttcctgctggaagaatcttagtaacagatggtggagcttctagagatagat

SEQ ID NO: 217235 - DNA, 577 bp, Homo sapiens
tcatgctagctacctgtctaatattatttaggatgttcaaatatttaactattcttacccacttttaacatgtttttaattcagtatttaaaatttgtatatttaaagataaactttacctattttctgtattatttgtaaaagattatacgtgtcaggaagcrcatacatttgcacacacacacacactgtaactatgcttattcattcattgttgggtttaataagtattaattgaatgggtgaaaagatggattctgacaaacactaaattttaaacatcctctaaaagtaaataaaattaagacggacttttctgaatattttcaaaaagaaatgtaaatatgtttcctgcctttcagcttttcccatcttgcctactctccagtgttagccttcatttcgctcttaccaactacatttcatcaacatttactctgagttctatatcttaattataaaacattgtttgaagctctagctatggctgatatatttttaccttacaaatgctattctcttgaacttcctgctggaagaatcttagtaacagatggtggagcttctagagatagat

SEQ ID NO: 217236 - DNA, 646 bp, Homo sapiens
tgtttatggttggaaacttctattcaccattaaccttagcaatctaatttattataggcatagaatattttatgaggagaaatgaaaactgttcctcttatcctacctgcttttacatagtagatgtgtactcttcaaatctacaagataycttttatcttgattttgctatctattctacaggttaattaagcttttcttttcagattgctgaataagaatatagcggcaaaatgtctaggtcagcagtatttcttcattttatagatgtaaaaattgaggtttgggattcaagttcaagcctgttactggatcggtatagtttccagtagctcttcccttcatcatcttcgatcaatacaagaaaccacaaagacattaactagtttttaatgtttttaataacatcttggttggctagaagattagaagtaaaagaataatagtagcatttattttgagcttgatggatttatgagtaattctttcaggagtaatgatgctgcacttaaatactaacattttctccctgagtaatttagtaacaaaaaaggagctacatattctttttcccactttgaagtcataattctctttcattgacatattcattatcctacatttggatttttattataattaggtg

SEQ ID NO: 217237 - DNA, 646 bp, Homo sapiens
tgtttatggttggaaacttctattcaccattaaccttagcaatctaatttattataggcatagaatattttatgaggagaaatgaaaactgttcctcttatcctacctgcttttacatagtagatgtgtactcttcaaatctacaagatatcttttatcttgattttgctatctattctacaggttaattaagcttttcttttcagattgctgaataagaatatagcggcaaaatgtctaggtcagcagtatttcttcattttatagatgtaaaaattgaggtttgggattcaagttcaagcctgttactggatcggtatagtttccagtagctcttcccttcatcatcttcgatcaatacaagaaaccacaaagacattaactagtttttaatgtttttaataacatcttggttggctagaagattagaagtaaaagaataatagtagcatttattttgagcttgatggatttatgagtaattctttcaggagtaatgatgctgcacttaaatactaacattttctccctgagtaatttagtaacaaaaaaggagctacatattctttttcccactttgaagtcataattctctttcattgacatattcattmtcctacatttggatttttattataattaggtg

SEQ ID NO: 217238 - DNA, 458 bp, Homo sapiens
gagtattaaaccaaatacgaagcccttctggatgtggttccctcagtgactccccagrttgcacacccgtgaagccagccctgatttcaccccttgcctccaacactggattccctccctatgcctctttctgactttatttttctccattacgcgtatttcaatctaactaacatgctatatcatttaacttatttatttggtttgttatttatctgacccacttgaatttaagctccccagggcaggaatttcagtatctttcattacatactgcatatagtgcctcagacactccctggcacatagtaaatacaataaatatgtataaatacatacaaataaaatgtataaaccattctcttaaaaaatggaagaagaaaggctacaggaagagatcaaacccttactgagtgggttccctttccacagcctgaaatcctctcttcattagccat

SEQ ID NO: 217239 - DNA, 586 bp, Homo sapiens
cttaattattctgctagtgtagaaatcattttccacatgatttcatttttagatagaagaatgtcagcagaattgtcattagacttcattgctatcrcagatactgttcctttgggccgtttaattacagaattaaacacattcattttattagaaatatatatttactgataataggtcaggagccaagatttagtgaacatatgcacgggttattaatttagcaatttcataagtgcttagaattttttttaaagtgaggttgaagcctttattttacttgtaagatgtaattggtgcctacataactgagtgtacatagaaaaataaaatggaaaatatgaggcgcccataagacaaaaaaagtctactattgaatatattgagattcaaagtttgagattaaattgcctcatttacatggatatatacttataaaatatttgatgggtaattatttactctccacttcttttaataaatagcaagctatgtaaataactttgcaaacaccaaactacgtaaataacgttcttttgactgagctggaagacagctttttttggaaatttttaattttctgaaa

SEQ ID NO: 217240 - DNA, 586 bp, Homo sapiens
cttaattattctgctagtgtagaaatcattttccacatgatttcatttttagatagaagaatgtcagcagaattgtcattagacttcattgctatcgcagatactgttcctttgggccgtttaattacagaattaaacacattcattttattagaaatatatatttactgataataggtcaggagccaagatttagtgaacatatgcasgggttattaatttagcaatttcataagtgcttagaattttttttaaagtgaggttgaagcctttattttacttgtaagatgtaattggtgcctacataactgagtgtacatagaaaaataaaatggaaaatatgaggcgcccataagacaaaaaaagtctactattgaatatattgagattcaaagtttgagattaaattgcctcatttacatggatatatacttataaaatatttgatgggtaattatttactctccacttcttttaataaatagcaagctatgtaaataactttgcaaacaccaaactacgtaaataacgttcttttgactgagctggaagacagctttttttggaaatttttaattttctgaaa

SEQ ID NO: 217241 - DNA, 528 bp, Homo sapiens
aattgagcctttaatttctacctgtaaattgcaatttatatgttggggatggctctattgagaaaccaaagactatgtaagaacatattgttttcggccctagactagggcactcaatttgttttggtcaaatgaattgcgggaataactaaatctcactgttgttccagcaaaggccttggattaagatatgcatttaacatcataggtagaaatagtagttagaatttgtaatagactagtttttagcttcctaaataatcatattcagtcagtagttatctgggcctttgatcctatattcctgaagaattttttagcatgcacaccacataaatacacatttatctataaataatatacaygttctactattaagcaatattttgacttaatgctttatgaacataaatagaagtagacgttttattatattgtatttatgcatcttcaatggtttgtcctttgcgtttcttgtgatgtgtgcactcttctttggggtctacagttttataggttgctatggtt

SEQ ID NO: 217242 - DNA, 526 bp, Homo sapiens
tatgagttctcattatgagttaatgttcatgattttgaaacaagttttcccttcttctcygtcttcatttaccccagcctccatcttctgtgagacaattgagacttcagtcccaaactcccaatcctgatccaggatatgtaacttaattccaagtctagcctgagcctggtttcattagaaccaacatatgccttgtcctcctgctaaataaagccttctgatgccagctcctagaagatagcagcgagacttgtttcagattacactgtttctctcttctgaattatactgcatttctgtctccatttttcttaagcccaccacttccataggactttctccccctttatcactggctccttctaactcctgtgtcactcctgaggtgccaaataatgatgcagagggtgatcagaaatgagctgttgcttcagctagggtttttctaccctcatagtctgctatggtataggacatcctattgattagattgtaaattattttctctatttgttagaataca

SEQ ID NO: 217243 - DNA, 401 bp, Homo sapiens
tgaaaaagtcgaaatctaaataaattgtctagtatttgtgtgattttattataatttgatgaaagagactacttggcgggtatgggattaaggaaaacagaaataaaagacagttctggaccacggttataggcttaaactgtgtctctccacacctcctacccctattcatatgctgaagtcctaaccccagtacatcagaatgtgactgtgtattagtccgttttcacactgctgataaaaacatacccgagactggtcaatttacaaaggaaagtggtttaatggagaactcacagttgcatgtggctggggaagcctcacaaccatggcggraggcaaggaggagcaagtcacgtcttacatggatggcggcaggcaaagagagagcttgtgcagag

SEQ ID NO: 217244 - DNA, 576 bp, Homo sapiens
gggaagcctcacaaccatggcggaaggcaaggaggagcaagtcacgtcttacatggatggcggcaggcaaagagagagcttgtgcagagaaacccccattttaaaaactatcagatctcatgagacccattcactatcatgagaacagcacaggaaagaccccaccccatgattcagtcatgtcccaccgggtccctcccacaacacatgggaattatgggagctacaagatgagatttgggtggggacacagagccaaaccatatcagattgtatttggagataggcagggcctttagaaaagtaattaagttaaaatgaggtcattagtatgggccctaaaaccaaacctgtggcaccttgatctsagactctggcctcagaactgtgagcggatgaatgtctgttgcggaagccacccagtctgcggtattttgtgatggctgcctggcaaactgatacaaccactcacacacagcaaactgcacagaggggcatgaatacaaatgtgaatgttatagcaggtgcaggttaagggaagtgagatatacaaaaaaaatgagattcagtccaaga

SEQ ID NO: 217245 - DNA, 516 bp, Homo sapiens
agtataatttttttaaccttttgagagtataaggtattatttatttttacttattagtactacctcctttgagatacttaatcttaaaatgtrgattagtgattcttactttttatatgtcctggttcaatttgagactatgatgaaagctgtaaatgcacatatcacgttaaattatccacacaatttcagtgatcatgatcccccgaagtcccagggctcaataaataactctggaatatagagtaataggtgtacctttaagaatattatataaatactgtttattgtaactgagcctttgacacggattgagaaccagccagttggatttaagtgttcctagcattaaataagaatgcagcctgttctatgctgcagattaaacaagtgctttcgtagcctggagaacggtacacacacagacacatttaacaaaacaccatgctaatatttcaaggtttatggggtgcctggatcagatagcctcaacccttgtgcccaagagtctcatga

SEQ ID NO: 217246 - DNA, 408 bp, Homo sapiens
tatactgaaagtgattgagatggtacatctgagtctgatgccacccagataagcatctgcagttgcgctgacctggacttgggtkgtattgctttttagatttcagtatcactctaaaccttgtctggcttttgccagcttcagtacccttgacctataggttgggaaacctgtttgtttctctttctggctggaatgtctatttagagattcatgttataagttgtgactcaagttacatacaccgattcccaaacttttcttgacttgattcttaactaaacagcactgcgattgtgaggcccccacggcaaaaagtaaataagaaaaactacctaatttaatatgctggaaagtttttgtaaacatacagatgactccttcaggaaatactgttttcattgcttt

SEQ ID NO: 217247 - DNA, 646 bp, Homo sapiens
tagcttacataaccataaatttctctctcattaaaggatacacaaagcactaattcatccatacacttaaatttaaaagaataaaaaaaacgcaaacacctctttttttgttagatatgaaggatttttgcatgtaacaattcaacagaaatgtctttgagatttcatgacctatatttatttgcttactaacctatgaataatcaaataacaatttcmaagtttataattgtttttaattcaagtagtttaatagttgctaaaatttatgatagcatgttaaaatttttctcactttttccaacaagttcattttttatttttgcttatcctaaagtgatataagcctttatattgtcagttaaatgcattctgagattgatcacatttttgaagttaaacaaaataaaaattgattcattttctaaagctgtattaactatgtgttgtcggctgaaggtaactttttataaatgtttctaagacttaaaatgtaaatgcccttgtggaaaatgccatgtatcttctcatacttgctatccacctcataaatggacaccaacgaacttgcaattcacttaagacacaaagaacaaggtacaacactaagacattagtgaatcaagatgacagtgtcactggctat

SEQ ID NO: 217248 - DNA, 512 bp, Homo sapiens
atcgcacacaagtggaaacataaatcttcaatataagaaagagcctccgagcatcggaagcataaaaaccgtttcttcccaggtcccggtaaaggggccagagaaaagactgattactatcagctgagacagatggtttcctttaactttggaaactgttatttttaattgcttgtattaattttgcatgagatgtatcggctccagggggaagcttaaagaaggctgttagtatccctgaaagaaacggacataagtctctgatttgccctttttcacctccgggttttttgggkttttttttccttcaccctcgcctagtcgcctagattttccctttttatgctcaggaaaaacgtgagtttatcctcctaaaagttgctattgagtaaaagaggggaaggaaatctggggacatttgtgggagcgtctacataaaataatcgtcgatctgaggctgcaaatatattttcctagacactctgggacatgtgcaacagatcttagtctga

SEQ ID NO: 217249 - DNA, 389 bp, Homo sapiens
ccaggtctgccttgatcttctttaaatcagagaagggaaaagggacatgtacctgggttgggccaaattcccctccccctaaagcttgaaggggacataactaatagccttggggtttttgtggtcctttgaagatgtctttgattatttccttctgggcaggggagattagaggaggcttatcattamtaggaaggggagctatagggaggataggatacaggggtaagctgagaggtcctcctgggggatgtaaattgcaagctttgcctcattgtgtattctccttcaatgaaaagaaagcttggacataaggtatttctctccatttgccttccctcttacagaaaaggtcaagctgcaggatagtattataatttatacttccc

SEQ ID NO: 217250 - DNA, 628 bp, Homo sapiens
gtgcatttacaatcctttagctagatagaatagttctccaagtcccctacccaattagctagacacagagcactgattggtgcatttacaaacctttagctagacacagagcactgactggtgaatttacaatcctttagctagacagaaaacttctccaagtccactacccaattagctagacacagagcactgattggtgcatttgcaaacctttagctagacagagagcactgactggtgcatttacaatcctttagctagccagaaaagttctccaagtcccctacccaacccagaagcccagccagcttcacctcttagtagcacactaaataaacatgagccacatgagtctcccaatattcatgaggatttaaataggtcacttattgatgatgcctcctctagcctcaatgttcttacccagtaacacaagttaaatttgtagctgctcatcaccttaactggtgaaccmtgactgtggtcagttgtactttccccaaagtctctctagcataactgtgtatgtagctggctctagacaccttccatctgctgagtcctgtttttcaaatctcaaacaaaccatcagctgaaaactctgataaggcagagagattgagct

SEQ ID NO: 217251 - DNA, 502 bp, Homo sapiens
ctctctctctctctcttttcatttccaactcaggacccttggtgggcagtgcctaaacagagacaactacaggtttctggctgtggccactctctggtgaaactaaggggtttctgtgtggaggtgcctaacagccaccgtccagtttgggtaagggacctggatttttttccctttatttcttttttctctcttyctttttcaggcttttgatggctgcttcctagtattaaatagctccttagtaactgagcgcaactgtccagggccactctctggtttacctgaagggcaaggagtaaagggggatagctaccatgcctggaagggggaaggatttttctgtcttttccagttgttgtccctgatccctacatgtgggacagcttttccagggtgaactcgcatgcatttcaggtgacttaaacattcttttcctatgctaaattcttcccttcccctactctactggctagggacgaaagaaacccacccatcctcc

SEQ ID NO: 217252 - DNA, 580 bp, Homo sapiens
ttctgaaaagagggtcttctatgaaaaatgtctttaaaccataaaagttaagaaaattagacaaattagcagaaaaaaatcaaaacccttgaatggacacttcacaraatgggccattcaaatttgcactgacatatgatatatatatatatatatatatacacccatgtatgtgtgatatatatgcttatgacatatatatgtgtgacatatatgtgtgatatatatgcttatgacaatgaaaaaaaaaactgcaacctgaaaccactacaaacttatgacaattactaaactaaaagatgctagaaaatactggtgttaataaggagatggatcaatcagagctcacaattctttgttaaggaagaaatgtccagcacaactcagattctgtctccattcctcctagaacaggatgttctgcaagacttgtactcagacagctcagttgcatgcaggttatataaactcaggatggagcacttttagggtccatcagctgtagtgcaatgtggggtacatgcagacaagactccagttattttaggcagctgttctgagcattggaggaccacctcac

SEQ ID NO: 217253 - DNA, 484 bp, Homo sapiens
aaagtcatttactcaggtgaagcatgtcactggctaccactgtggccctcaaagtattgtattatctggctttttccaacctcgctattcttatatcatgctaatcactgtcttcagtttaatctataatcacatgctttttaaaatttctaatggttgttttcttcctgtccattttcacttgctgtttattattccaaaaatctyataccctaccctaacctctacttcctcacatactgaattgaatagcacgcttcagtttaatgggtttttccctctggaaatctttcttgatcttggagtccagctaacattttatagcatgtatctttctctctaaaattgacacaactttaatatatgatttattctagtaaaaagagttcagtatttctctctttaacattggaactacagtaaactaaaagcttttagaaatttaggtagaagtaacattagatttgaatccttctgtaatctc

SEQ ID NO: 217254 - DNA, 430 bp, Homo sapiens
aagcatattaaatactaagggacagaaacttgtaagccatctgttttgactctaccaccttccaggtaacctaatctaataatatcatctaattctgaacatataaaaagaaagaaaacacttcttacaacacagagaatgaatttcaacatgaaacaataagtactagtcagaagtaaaggctatgaggctgtgaaatgcctcagagggtcaccagccaagcaggcacagaatgggttacaaagaggtgttgtctccagtgaaactcraggatgggcagtctttttcttcaggaagaagataaatagggtgaaggtgattgagacaggacagcaagagcaaatgcttcaagttggaaaatagcctacagtttggaaaacaatatgcagcatgacatgaccagacaaggtagaaactgccctcaggtgat

SEQ ID NO: 217255 - DNA, 624 bp, Homo sapiens
ctacaaaaaataaaactaaaaattagccaggcatagttgtgtgtgtctgtagtcttagctacttgggtggctgaagcaggaggattgcattagtccagaagctcaagtctgcagacagctaagaatgtgccactggattcctgcctaggcaacagagcaagactttgtctctaaataataataataaataaaygaatacataaaagagagaggaactggaagaaaatccagagaaaactgaggggaaaagctattagggtcccaggaaagaaagtgaaagaaaggaaagaggccttctttaaaaaggagtgcttaccacctgaacaaatggtgagatttcaagataaataaaacatagatttgagggtgtatcaaatttcactgtctgtattttttgagtcaaacaaatggggaggaaggaaaagacatgataattgaaattttgaaattgaagagtagaaaaattaagggttaatttcatggaagttggctcaatatgaataaacctgaccagaaacctgaaggtccagctgagtttagagtctctcacccactcaatatttactgagtgacaactgcatactcagctctatgcatgtatgaatttgcaaaggaaccaagaag

SEQ ID NO: 217256 - DNA, 554 bp, Homo sapiens
tcagacacctacatctggcaagggcatgagccagtgcgaggctgtatacaccaaagctcaccctgagggaaaatgagctttcactctgagtcaagggaacagaccccttaccggggtggggcaggtacaaatgtgaccccaattagtgttttgagtcttgcatccctcattcatctctaaagaactttggaaaggcttttctatgactttgactcatgagattctcttgttgtctctggaggtcctgggtgctgtgtgaacagaccagcgcttcattctctgcaagtggttggcttttggtcagtgactcaagattttcctaagggatgtgagaagccacagagcaaattagggtattttgaagagatgtcttatgctcctgttctggctgtggatrgcagctgggaattgttttcaaggggtacctgtcccaggaggtcttcatcccagagtccctggagttctctattccagtgtcagtggggtgtctctctctctctcagtatccctagaggtctctgtccaatatctccaatggtttccatctcagcatt

SEQ ID NO: 217257 - DNA, 560 bp, Homo sapiens
acataaggaataagtagctaaactggaatttacatccagaataaggctaaggcaatatttctataagacacagattaaaaatcaattttccaaggaatgcataaagagcatgaatccttactgcctagtaacatatacgcatggattaatttatcaaaaatggtagttgtacccagcaaaggagagaaaaattggaaagaagggaagctggtaatttccagataggagacaggaatgttccagcttggctgcccactgagcaggacataagtgaaggaggagtaccccagagaaaaacagaaagaaaccagggcacaccccaggcagcaagaagtccaggggaaagaagatctcaatattggagaatttatctcccwcaaatgactttccaagacaagtcctatttacattagcaaactccaaaatgtacagatatgctaaaccttacttttgctttgtagaaaggttggaaaatatgaggccaattttttatctccaaatatatgagcctctactattttcagtataactcctattgagggcttagttgaatcaaagca

SEQ ID NO: 217258 - DNA, 610 bp, Homo sapiens
gggaatttgaagaatgtaattgaacactaaataatactgtgctatcgccaacatggtggcacatgtatacatatgtaacaaacctgcacgttgtgcacatgtaccctagaacttaaaatattaaaaaaaataagataaaaaggaatcaggaccgtgaaaaatagtaataataataataatgtgctatatgttcctagaaggaagaaattagtgtgatctgccaggcgcggtggctcacgcttgtaatcccagagctttgggaggccgaggcaggtgaatcacctgaggtcgggagttcaagaccagcctcaccaacatggagaaaccccatctctactaaaaatatatatatacaccaaattacctgggtgtggtggtgcatgcctgtgattccaggtactcgggaggctaaggtgggagagtcacttgaaccagggaggcagaggttgtggtgagctgagatcacaccattggactccagcctgggaaacaagagtgaaactctatctaaacaaaaaaaagaaaagaaaagaaattagtgtgatctgcgagtaacargaaagcctgcacagagtgggaaggactcgggcagactcaaggtggggctgaa

SEQ ID NO: 217259 - DNA, 604 bp, Homo sapiens
tcttttacagccacatccagctgtcttccccagctccccgttctctaatcctgtcaatcacaaatctctcttctatttttataattttgtcatttcaagaatgacatataaatggaatcatgcagtatgtaaccatgtgggatttttttcctcatttagtataattccctggagatgcatccaaaatgttatgtgtatcagtagttcattcatatttttattggtattgatgtaccacagtttatttccaattcaccccctgaaggacatctgggttgtttccagtttgggcctattataaataaagcttctatgaatatctatgtacagattttctgtgaatataagctttcatrtctctagaatacacaagagtgcaatttctggatggtatggtagttacatgtttgcttttagatgaaattttccaaattgttttccagagtggctaggccattttatactgccactagcagggtgggtgtggcccaatttcttttcgtcctcacaaacacttgttgttgtcaatacttatttttacattttggccagtttgaactgtgtgtagtgttatctcattgtagtttttaatttgcatttccct

SEQ ID NO: 217260 - DNA, 492 bp, Homo sapiens
cagcgctgtggggtcaggccgacccagatccgccgtgatctggatgcaaccccacagccagggcacgccggcctcgttgtgcctgcttctctggctgtcaatgggaagtttaagtgaggycacgtgtgggtttttagctctctgcttgacacatagcaggtactcagattgaggtgagcgttttaaggtacaaattagggcaccactggggggagtagcgagggcggaagagtatctttttagaacgcaccgctgatagtggtgatttaaaaaaaaaaaaagaggcaccgttcactttcatcggggagctgggaagaagacagaagaggtgtttgggagaagcaagatgagcagcgagcgagagggaaccggccggcaggtcatgaaaatcggcggcggtcgcccgcacctgtcccgcccccgtacctggcgggcgctcggggcagccgagccctcctgccgccgccacctgccaccgcagcagtttcctgg

SEQ ID NO: 217261 - DNA, 603 bp, Homo sapiens
ccattacactccagccaggagacaacagggaaactccacctcaaataataataacaacaacaacaacatcacttattcttaaagtaatgggaagattcagtgtgtaatagtcacatttggattcacagaaggcctttttctcagtaaaaactcaaatagcgacataaacaaggtcatgcattgaacaactcaactccagggctacycagtgccctacaactgaagtaacagctataaagtggagactaactcaggattgagagagacaagatctcccgtctctgaggaggaagtccagaggcttccaactgtaagaagcagagagtccctcatggctcaatttcactgtgatactcctggggaaagtaggaaagttaacagcacatgcatgagagctgggtcagcttatctagactctggtttccacttttcaatggaatattaattggattcatttaaaatcatgcatgtcttgctgaaatattaaatcataatccatgtgattgtggtcagcaatttcagtggggacccctagtgcaaaaccgaataggatgcctctccttttcctttctgttatgttaaaggactgcaacattatgttat

SEQ ID NO: 217262 - DNA, 629 bp, Homo sapiens
tccttggcatctgtcaccctgctctgacacttccatttatagaaccccctccttcagttaaggacaacttctctcaccctcaagcccttatcaatgttctacttaataaatgctgcttgatggttgacttaatcagtgcaggtaatgcctcagtcatgttaccaacagagaaggttggtcaacttgtactaaacccccaggaagcccatttacccttccacacagtgcctccctcaccgtgaccccgcaagtttatctatgaagtctccagtggttagggaaagacacagagaagagggtgattcacttcttcccctagccacaaaaatcctcagccgcagctgatcttgggtggccgcccccctgagaaagcctgtccctccctcccttggtggaaaacatgaaaacacagtcactgtgtgtgctgaggggtgggggcatcccagagtgtgactgcctgggaaaagccagcctggtgsgagctgcttcacttcagggaatgggatgctggtcagacagaggggtctacagccttgaggggcccatggaggggtgcctatgggcctgttccttccctgcccaccccaccagcctgggccatgcagcccatatgtgcacaaagagcccaa

SEQ ID NO: 217263 - DNA, 629 bp, Homo sapiens
tccttggcatctgtcaccctgctctgacacttccatttatagaaccccctccttcagttaaggacaacttctctcaccctcaagcccttatcaatgttctacttaataaatgctgcttgatggttgacttaatcagtgcaggtaatgcctcagtcatgttaccaacagagaaggttggtcaacttgtactaaacccccaggaagcccatttacccttccacacagtgcctccctcaccgtgaccccgcaagtttatctatgaagtctccagtggttagggaaagacacagagaagagggtgattcacttcttcccctagccacaaaaatcctcagccgcagctgatcttgggtggccgcccccctgagaaagcctgtccctccctcccttggtggaaaacatgaaaacacagtcactgtgtgtgctgaggggtgggggcatcccagagtgtgactgcctgggaaaagccagcctggtgcsagctgcttcacttcagggaatgggatgctggtcagacagaggggtctacagccttgaggggcccatggaggggtgcctatgggcctgttccttccctgcccaccccaccagcctgggccatgcagcccatatgtgcacaaagagcccaa

SEQ ID NO: 217264 - DNA, 593 bp, Homo sapiens
gtctgccccttaatttgcatrtaattaaaggtcaatgtaaatatgactgcagaactgccctgagctgctactctggtcacactacctacagggtagccctgctctgcaaggagcagtccctctgctgttgctataggccactgcttcaataaaagttggcatctaggccaggtgcagtgggtaatgcctgtaataccagcactctaggaggctgaggcgggtggatcatttgaggccaggagtttgagaccagcctggtcaacatggtgaaaccccatctctactaaaaatacaaaaaaattagttgggtgttttggcgcacacctgcactcccagctactcaggaggttgaggcgggagaatcacttgaacccaggaggcagagtctgcagtgagccactgcactccagcctgggtgacagagtgagaccctgtcccgaaaaaaaaaaaagttggcctctaacaccttcggtttgcccttgaattatttcctgggtgaagccaagaaccctctcagtctaagccccagttttgtggcttacctgccctgcatcaacaccagaaacttaaccctttgggaatctcgatcttgg

SEQ ID NO: 217265 - DNA, 593 bp, Homo sapiens
gtctgccccttaatttgcatgtaattaaaggtcaatgtaaatatgactgcagaactgccctgagctgctactctggtcacactacctacagggtagccctgctctgcaaggagcagtccctctgctgttgctataggccactgcttcaataaaagttggcatctaggccaggtgcagtgggtaatgcctgtaatmccagcactctaggaggctgaggcgggtggatcatttgaggccaggagtttgagaccagcctggtcaacatggtgaaaccccatctctactaaaaatacaaaaaaattagttgggtgttttggcgcacacctgcactcccagctactcaggaggttgaggcgggagaatcacttgaacccaggaggcagagtctgcagtgagccactgcactccagcctgggtgacagagtgagaccctgtcccgaaaaaaaaaaaagttggcctctaacaccttcggtttgcccttgaattatttcctgggtgaagccaagaaccctctcagtctaagccccagttttgtggcttacctgccctgcatcaacaccagaaacttaaccctttgggaatctcgatcttgg

SEQ ID NO: 217266 - DNA, 380 bp, Homo sapiens
agttgatcatactaacgaaaaaggtaatgcgacaagatacacattgccttcatctgtayattctgtgataccgggcaaattaccaagtacagacagctacttatattgtatgaaggacattttttgttagatgatctcatcctctgtgttatttgttgattgggtttgttttttgcttgttggtttgtttgtttcttccatgtaaggaaaagtagtgtaagcagtaggaagaaaatgaggaagatgtattttgcatgttcttcctttcagtgttcttacacattgtattactgcattgtggtaatagcttctataaaatctgccatagctggattatgcagctttgcaaaaattctactagattttattctaactcatat

SEQ ID NO: 217267 - DNA, 380 bp, Homo sapiens
agttgatcatactaacgaaaaaggtaatgcgacaagatacacattgccttcatctgtatattctgtgataccgggcaaattaccaagtacagacagctacttatattgtatgaaggacattttttgttagatgatctcatcctctgtgttatttgttgattgggtttgttttttgcttgttggtttgtttgtttcttccatgtaaggaaaagtagtgtaagcagtaggaagaaaatgaggaagatgtattttgcatgttcttcctttcartgttcttacacattgtattactgcattgtggtaatagcttctataaaatctgccatagctggattatgcagctttgcaaaaattctactagattttattctaactcatat

SEQ ID NO: 217268 - DNA, 489 bp, Homo sapiens
catggtttactgatggtattactagatgagataaatgcctttaatttcatccttgaatggtaagattggctgactaatttagggaaggataaggtacagaattgctcttgggtgtttcctagcaggctggccttccaagagcaatagcttaatgtttgttcctttaataagtagtacttaaacagtgatcaggggagttaccataattggtaatctgaatggaaactaaaatgtgtcatcattgaggatagtcaraagtgtccttgtggcagtcctagaaaaggggttccagaattttccgagcagagaaaaatataaacattttcaaggttctaattatttggagactagcctttcaggatcatttatcaccaagattaaccttgccaccaaagggcaaggaaacacttctctggtggttagatcaggaatgatgaaaacacttaagaagaattgaaaacttggttcctgtcttcaatgagtaattta

SEQ ID NO: 217269 - DNA, 557 bp, Homo sapiens
aaaaaaaaaaaaaggtaagtgaaggaggatggtgatttgggttagaagaggcttttaattgtaagccattcagcatgtgaactygtaaaaatgaccttatgttaaataattagttcagagcgctgatcttgagagataggaacgtttcctgtttttgataaatgataagttacccttgtttatggttaggggtgggtttttgtcatggtccaaccaggtgatagttatatatgtgaacatattaaaattgtttttaatgtttaaattctaatccttaaaatgtgacagaactgatttatgttcctcctctcccagttctcttcaaatcatgagagtgaccctcttaaaaactgctttctttcgggggagcggttgttgagaagaatcatgtaactatgtaaaaagcatgtctgtttggtacactatttgctaatgtcagaagtgttaaatagaaataaaatttccaccatagtagctaattattgtttagtgtgtgtcaaaactgtgtgctaattactttttataaaccatcgcctttaaagtcttataacttttct

SEQ ID NO: 217270 - DNA, 557 bp, Homo sapiens
aaaaaaaaaaaaaggtaagtgaaggaggatggtgatttgggttagaagaggcttttaattgtaagccattcagcatgtgaacttgtaaaaatgaccttatgttaaataattagttcagagcgctgatcttgagagataggaacgtttcctgtttttgataaatgatargttacccttgtttatggttaggggtgggtttttgtcatggtccaaccaggtgatagttatatatgtgaacatattaaaattgtttttaatgtttaaattctaatccttaaaatgtgacagaactgatttatgttcctcctctcccagttctcttcaaatcatgagagtgaccctcttaaaaactgctttctttcgggggagcggttgttgagaagaatcatgtaactatgtaaaaagcatgtctgtttggtacactatttgctaatgtcagaagtgttaaatagaaataaaatttccaccatagtagctaattattgtttagtgtgtgtcaaaactgtgtgctaattactttttataaaccatcgcctttaaagtcttataacttttct

SEQ ID NO: 217271 - DNA, 557 bp, Homo sapiens
aaaaaaaaaaaaaggtaagtgaaggaggatggtgatttgggttagaagaggcttttaattgtaagccattcagcatgtgaacttgtaaaaatgaccttatgttaaataattagttcagagcgctgatcttgagagataggaacgtttcctgtttttgataaatgataagttacccttgtttatggttaggggtgggtttttgtcatggtccaaccaggtgatagttatatatgtgaacatattaaaattgtttttaatgtttaaattctaatccttaaaatgtgacagaactgatttatgttcctcctctcccagttctcttcaaatcatgagagtgaccctcttaaaaactgctttctttcgggggagcggttgttgagaagaatcatgtaactatgtaaaaagcatgtctgtttggtacactatttgctaatgtcagaagtgttaaatagaaataaaatttccaccatagtagctaattattrtttagtgtgtgtcaaaactgtgtgctaattactttttataaaccatcgcctttaaagtcttataacttttct

SEQ ID NO: 217272 - DNA, 486 bp, Homo sapiens
acacacagaaaagtttctctaggccggtgctgagatgcattttgttaaccaccccgtggcaccgccccgccccggcccggcccaaaggctgctttgtattaaatacgtagttgcagtgtactaaattgtgaaattaacataaccgaagcaacaaccggcaagacttgtcctttataattttgcaaatctarattaattaaattagaatctggttttaaaatcatttttaaaataaagtttatgaggaagtatttgtgaggaaaaaggacccttttttccttgaagtgaggtgtgtcatgtctttctcagagagactagggtagtagaagtggttaaattgaaaagtttctgttttttaataaatgcttaaatacttattggagaagtagggtagtattatattaagccaaatgtaaacccacgtaggttgtcctaacataaactgaaaaaaggtaatttcttttgcccgatggtcagaatcctcgc

SEQ ID NO: 217273 - DNA, 486 bp, Homo sapiens
acacacagaaaagtttctctaggccggtgctgagatgcattttgttaaccaccccgtggcaccgccccgccccggcccggcccaaaggctgctttgtattaaatacgtagttgcagtgtactaaattgtgaaattaacataaccgaagcaacaaccggcaagacttgtcctttataattttgcaaatctagattaattaaattagaatctggttttaaaatcatttttaaaataaagtttatgaggaagtatttgtgaggaaaaaggacccttttttccttgaagtgaggtgtgtcmtgtctttctcagagagactagggtagtagaagtggttaaattgaaaagtttctgttttttaataaatgcttaaatacttattggagaagtagggtagtattatattaagccaaatgtaaacccacgtaggttgtcctaacataaactgaaaaaaggtaatttcttttgcccgatggtcagaatcctcgc

SEQ ID NO: 217274 - DNA, 436 bp, Homo sapiens
ttaattatatttgtcatggtatttaaagcatgttagtcattatatactttttttttttttttttgggcctatgaaagattttaaacttggttccaaaatgtggtcaaatgccctgtgaggatgagaaaataatgtcaatactatgagttcactttaataaaggctaagaggtaaatagacattagtaaatagacattggtttcctgtgatgtcctaggtattgttttagattatggggatagagcagcaatgaaagacttctggttttccatttttctgccttcctttttaatgaattggcactagtttcttccttaaaactcaagacttcttagcagattagaaatttgtaatggtaatagtcttgtgtctgatgcctttaggattgattcataagccactgggkgtagttgagtgagaataggtttaatgaatt

SEQ ID NO: 217275 - DNA, 527 bp, Homo sapiens
gaattcataaagcagcagagtgctttatgcatrctttccctttcatcacaaagaatatttttaaaaaatgcactaaaggctcaagataattcataatttttgctgttcatcaaggacatcttaagtggaactcccttaaaaaaagaaaaactgagtggagagtataatgactattagtatagtttggtgcctcttccttgatttgtgctaataatgtaccagcagttttgttcacctttgtttttgtactctgattgcaaatgtcaacacagtgtaaaaggcagataatattctagtattgctatgaaaatacctttgatttcacgaacctccaaaatagcctgtgagatccccagaagtccagagaccacactttaaataacaactggcttagttctttacgtatgtttcctttggctcccagaccacatagatcaagggggatcaaacagaggcaaatgactgagatttttagcttggttactaaataaaagcagtgtcattacttaaggtaatgaaacaggatg

SEQ ID NO: 217276 - DNA, 444 bp, Homo sapiens
tttttaaaaaatgcactaaaggctcaagataattcataatttttgctgttcatcaaggacatcttaagtggaactcccttaaaaaaagaaaaactgagtggagagtataatgactattagtatagtttggtgcctcttccttgatttgtgctaataatgtaccagcagttttgttcacctttgtttttgtactctgattgcaaatgtcaacacagtgtaaaaggcagataatattctagtattgctatgaaaatacctttgatttcacgaacctccaaaatagcctgtgagatccccagaagtccagagaccacactttaaakaacaactggcttagttctttacgtatgtttcctttggctcccagaccacatagatcaagggggatcaaacagaggcaaatgactgagatttttagcttggttactaaataaaagcagtgtc

SEQ ID NO: 217277 - DNA, 604 bp, Homo sapiens
aacagccatgaattgcagctgtagactgccagatacataacctgtatatgacagggggtaccacgtggaaattagagacatcccccttcaccaaaaatattatatccaggggatactacataataaaaaaaaaatctgaaaaatgkaatgggattaagatcctttagaataggctagtagtgatgattttgctttttcagtcccctcctcacaaacgaatgatgatgacactgcccttagctttctatgtgcaaagacagtgttaaccttcccaggccaaacttacgactacaccttttccacacgaaatgcaaggcatttctaactccccagattacctcacattcgttggatgccacacaatagattataaagtatcaagatatatattaatttttaaaagttcaccaggaattggatattctaaactgggtttctgattcttaacagtgagaatgaagtcaagctccttatttggtggttagaggagaggatttggccacaaataattcttttaggattgacagacaagtactacgtaagttctatcatctcatccaaaaacttgcttcttatattctgcttttaacccgatctacacaat

SEQ ID NO: 217278 - DNA, 604 bp, Homo sapiens
aacagccatgaattgcagctgtagactgccagatacataacctgtatatgacagggggtaccacgtggaaattagagacatcccccttcaccaaaaatattatatccaggggatactacataataaaaaaaaaatctgaaaaatggaatgggattaagatcctttagaataggctagtagtgatgattttgctttttcagtcccctcctcacaaacgaatgatgatgacactgcccttagctttctatgtgcaaagacagtrttaaccttcccaggccaaacttacgactacaccttttccacacgaaatgcaaggcatttctaactccccagattacctcacattcgttggatgccacacaatagattataaagtatcaagatatatattaatttttaaaagttcaccaggaattggatattctaaactgggtttctgattcttaacagtgagaatgaagtcaagctccttatttggtggttagaggagaggatttggccacaaataattcttttaggattgacagacaagtactacgtaagttctatcatctcatccaaaaacttgcttcttatattctgcttttaacccgatctacacaat

SEQ ID NO: 217279 - DNA, 556 bp, Homo sapiens
agggtagtcttgtctaaggacacaattctattagtctatttcaaaatttagagccaaattgaaaactctaaactcagtgttctttatccacaaaccacatcttttccacaaaacttctcctctttacctatttaagatttataacatttaggcagtaaaggacacaggaactgctggcctagatgctgtggggttccacaagacagaccagtcaagggtttatgttttcaaggagctgatactcatcagtctgtgtttcacgctatcccctaaagaggagattagttgctttcacttgagtcatctctgttaaaacacattaagggaagcgtaagagacaggcctggcttggggactgagggatttacaaagctagtaaaaatattctccatcaagaggactcatcatcttttgtayggtagtttcaaaatttacttcattagtttaaaacttgtccagaatgaataaaggaagaacaaattccaggacatccatttttatgatcaaccagctaatctacctttctcagatattgttatcttctttgaaaaacata

SEQ ID NO: 217280 - DNA, 505 bp, Homo sapiens
aatgtagccacagagccagggtggctgctctcttctaaaaaatgcagtcactgatagtcaattccacaggtaaatgtgtgatttatacacttggaccactccttgtcattatcatatgtgcatatttattttcctcagtgaggcaatrggcacttggaagcaaggattgactatctgcaaagcagaacttaatgctgggtgctcaaccacatcttgtcaattcatagcctttcccctaaactttgtccaaaaccattcaccctttttattgttccactgactgtggaggtgagtttgcctctaaagcaacattgttagtgtccctatgtcattccttgccttgcccaggtatggactccggtttttcatctcaatatgaaggagctcagtaagttcgtataggtctccaaggccatctctgctattaacacaaagcattgctgctgtttgtctagaacagtagcttaagtgccacctgctcatctgtggctttgacagtgtttat

SEQ ID NO: 217281 - DNA, 573 bp, Homo sapiens
tcataatagtgatgggttaaatttattaagggcttattatgggtgggcacttcacatgtcataccctagttattcctcaaaataaaccattgaaatgggtattatcattctcattttaccgctaagaaaactgaggcacagagaagttstctttgttcatttaggctgttataacacaacatgatactgggtggcttaaacatcaaaaatttatgtatcacagtactggaggccaggaagtccaaggtcaaagggtcaacaggtttcatgtttgctgaggggctactttctggttcatagatggctattttgtcactgttacctcacatggaagaaagtagagggatctatctggaacctctctaatgagggcactaatcctattcatgcaggctccaccctcatgacctaatcattggccaaagaccttacttcccaatatcactatattgaggattgggtatcaacataaattttgggaagaacacagactacagcagaagttatgtaacttgcccaagttcaaatggttaccaagtgatgaagccggaattgcaggctcattaccgcact

SEQ ID NO: 217282 - DNA, 586 bp, Homo sapiens
tgatgcctctgaccatctgaaacctcttgagttaaacgctgattgtggtgccaaagtgatctatttgcctccaaacacaacatccctagtttagcctctagatccagggccatacaaacctttaagtctcattacacacagtgatctatggaaagggttgccaacactgtggaagggaactttgacacagaacattctgaaagtctggaagaattatastatcgttgctatgagaaaagccatgaaaaccttagacaataaattcctgctggggaaaactgtgtccagaagttgtgcttgacttcacaagatttatgacagagacagtccaggaagtcatgaaagagattgtgaatatggcaaaggaagggaggtgacagttgtgaagggtttcactatatggatcttggagaaaggagctaatagtcaccacatcagaggaattaacaagagatgaatcgatggacctgagtgctcccaaaccagtgcctaatgatgaggaagaagatggaaaaaaacaaaacaaacaaacaaacaaacaacaacaacaacaaaaaaacagtgccagaaaacaaattgacattag

SEQ ID NO: 217283 - DNA, 402 bp, Homo sapiens
gtgctaattgatagatcctcatcagtgttaaaccctacatatttataaaatgtatatatacatatatataaataaatttgataggtgaaattcattcacttatatcacaattacctgtaaaatattcctagagtttctgagtaattatccatacctttacttagtaattattttagcttttgagagtataaacttttcccacctgcttctagcacaatgggcctcagtgaaagtctttttactctagtcatatatttcttaaggtcgcccagasagccctttcatttttaacttttcaaactgaagagaacaaacagcatagcaggcacaggaggagaattttcagcttgcagctggttagcggttatcaaagcatatcccactaatattccagttccaccc

SEQ ID NO: 217284 - DNA, 316 bp, Homo sapiens
gaattctcacggcacctgctagtcactcagtcttctattgagaaagccagatttctgtaggtaaaaagtcagcctatattctggagatgaaggaatagaccagaaattgatgtctgagccaagagcgggccaayagggacagtccaaatatgatggtgattaacaaatctaacctgatccttccctccttggggaggtgtttttgctatctggtggcatatttgctctatgggtatggtgttaagtgttatggtaagaaagagaaactgatggaagtttctttctctaccaaaatataagaggaactgcttgcctt

SEQ ID NO: 217285 - DNA, 636 bp, Homo sapiens
aggttggcaaactatggcctgaaggccaaatccacccccttagctggttttgtaaatagtctttttttgtttgtttgtttgttttgagacatagtctcactctgttgcccaggctggagtgccgtggcgtgatctcagctcactgcaaccttcacttcctgggttcaaktgattctcctgcctcagcctcccgagtagctgacatttcagacatgcactgccatgcccagccaattttttgtatttttagtagagacggagtttcaccatgttggccaggctggtctcaaactcctgacttcaggtgatccacccaccttggactcccaaagtgcagggattacaggcatgagccactgcacctggcctgtaaataaagtcttattggaacacagccatgaccatttgcttatgtattgtttatggctgctttcctgcaactgggtcagagaatgaatggcatgcaaagctgaaaatacttactctggccctttatagaaaagtctgtggagccctgatctacagcatgttggaagaaccccttgaaaatggacagcttgctgacccctagcacctcctacatattagagatggcatatggttattacacttctgggtaaactgcaaagctatcag

SEQ ID NO: 217286 - DNA, 636 bp, Homo sapiens
aggttggcaaactatggcctgaaggccaaatccacccccttagctggttttgtaaatagtctttttttgtttgtttgtttgttttgagacatagtctcactctgttgcccaggctggagtgccgtggcgtgatctcagctcactgcaaccttcacttcctgggttcaagtgattctcctgcctcagcctcccgagtagctgacatttcagacatgcactgccatgcccagccaattttttgtatttttagtagagacggagtttcaccatgttggccaggctggtctcaaactcctgacttcaggtgatccacccaccttggactcccaaagtgcagggattacaggcatgagccactgcacctggcctgtaaataaagtcttattggaacacagccatgaccatttgcttatgtattgtttatggctgctttcctgcaactgggtcagagaatsaatggcatgcaaagctgaaaatacttactctggccctttatagaaaagtctgtggagccctgatctacagcatgttggaagaaccccttgaaaatggacagcttgctgacccctagcacctcctacatattagagatggcatatggttattacacttctgggtaaactgcaaagctatcag

SEQ ID NO: 217287 - DNA, 407 bp, Homo sapiens
ttcatttaagacaattatttaagattctttagtacattatttatgaaaacaaaatgccaaatttagtcatttaaaaattacaatattgatattttcatgcaatgtttaaaaatatttaggaaactttaccatttaggacctggatacaagccttaaaacttgtatttaaaaagtttttaaaggttttttaaagttcaaatatttctattgctcaatagttcttaagctggtgygacatcattccccaggaggtatctgggaatgtataggagccatctaaaattgtcacaatgactggtgactactgcgacatttcataaacaggaatgtttaacatcctgcgatattttatcaagtatgttaattcccagaaactataaaaatagatataataatatacatggtaa

SEQ ID NO: 217288 - DNA, 616 bp, Homo sapiens
agccccctatttcaggggagtggttggttgtcctgtctcactggagttccaggcgccactggagtgtgaaaaaactcctgcagctcggtgcctgccccaacaaccgcccagtcttttgcttgaaacccagggccctggtggtgttggctcatgagggaatctcttgatccctggattgcaaaaatccgtgggaaaagggtagtacccgggtgggtagcatagtccctcactgcttcccttgggtgggagagggaggtcccccagctccgtgcacttcccagtgaagcaatgccccaccctgtttctgcttgctcttcatgggttgcacccactgcctaaccagtcycagtgagatgagctgggtgcctcagttggaaatcacccaccttctgcattggtctcactgggagctgcagaccagaactctttctgtttggccgtcttggtccctcccccttttagttaattttaaatgtatagttaaattattgacgatagtcaccctgttgtgttaccaaatggtaggtcttattctttttttttaatgcttatcaaccatcttcttctccccttccacgccccccaaacttccccttcactatccttaccagcctct

SEQ ID NO: 217289 - DNA, 576 bp, Homo sapiens
atctggattttggtacttctctcctccatatctatcaatttattgttcttgtttctgaatctctgtggactctttctaggagagtctctcactccaatctttctgttgagttatttgattgtcagcagtatcaactttggggaagtttcattctaaaatttgaatacctttcgtatctattggttccactgcattctttttaatgagttcttattgttctttcctgtacttattttgtactcttatctattcaagtatattcgcattgcttgctttaaaatcccagaacatatactacaataagatatacaaggatgtccagcaggcctctgaccttccctttggagtgactgtactcctcaggtcttaagtcatttgggcctgtgcsttatgttcccaggggaggacctgctactctggatgattaagtgtgaggggacagaaagaagcccaagctgcagtgagagccccaaggcagagaagatctgtccagagcagagggaatcactgcggctcactcctactgagctctttggggccatcccatcatcagggttttactctgaagacagaaat

SEQ ID NO: 217290 - DNA, 348 bp, Homo sapiens
gccaagtctcagactacactcagaatcccctatcccatggaagcctcccatccaccctgtcttacatgttaccgcactgacatttcacatctcacttccctgatgtatgtttttctccttagcactaatgaccacttaacatactttatattttatcatttgttgtctgtcttctcactagaatctaaaggatttttgttctgattagtactaagtttccagcacctagaatggtgcctgaaacctactaggtgcttaataactgtctgtagaataaacttattttagcgaaagcaatgwgactatcacctcttcacctcaggacattctggtcttccgtctccagct

SEQ ID NO: 217291 - DNA, 431 bp, Homo sapiens
accatctgtgtggttcagggtgaatacatgtttttgcttttttcctcctaatattaaagaaaagttggacaatgttatacttatctatttatttttcttatttgtcttatttgtttcctctttgtcttttctactaagggaaatatttatgaaacaatttgttatattttaagactcaggacagaaaaatgaaagccagcaccaaaggtatgaagtaagtaaggagagaaatcaagccagaccctggtttgagattcattggtttatgaagaaaagacttakcataaagagcagtcaaaagggttaggaacagtattctcgtaacagaattgattccagttaaaaatctgtagatacagattgtgtgtatgagtatcttcacgtgttagaaaacaaaacaaaattaatccaacattagaaaattaggatat

SEQ ID NO: 217292 - DNA, 484 bp, Homo sapiens
ggagtttattaaggagtattgactgacacaatcacaagatgaagtcccacaataggctatctgcaagctgaggagcaagaaagccagtccgagtcccaaaacctcaaaaggaaagctgacagtgcagccttcaatctgtggttgaagttacaacagcccctggcaaaccactggtgtaagtccaaaagtccaaaagctgaagaacttggagttcaatgttcgagggcagggagcatccatcacggaagaaagatgaaggccagaagacttagccagtatagtccttccacgttcctctgcctgcttttatcctaaccatgctggcagcggattagatggtgcccactcagattgagggtgggtctgcgtctctcagtccactgactcaaatgttagtctcttttggcaayacacacacacatacacccaggatcaataccttgcttccttcaatccaatcaagttgacactcaatattaactgt

SEQ ID NO: 217293 - DNA, 594 bp, Homo sapiens
tttctacagttctcttttgagtcacccagttggcagcttcctacttctacgtcctgattgggttcatttgctttcctgagtggactctcgctaataactggaagcatagcgtatctcttcatttattgtcttctttgaactctgttaacagaaatttatagttcttgttctatactcgtgtgacatatttctagttaattatgargtactttatattttgttgtttgtgtgtgtgggctagctttgtcataaatctttgagcaggtcattgccagaataaaggaaaacttttaattccatgtcgattttaagtaattaattttttctgaagtttaatgaaagaagagaactgtatgtttcagagcataatcactggagatgtttgtagctatgttaaaagtttatgctaatagcataaatgaagtctacctggttccatcaatgcctgaataatctgactgtatcacaattgacattcactgggaaaaaatgaagaaggcatagtggagactaacaaaggacaaggaagatcacagcagacattgctaaaaataaaaattatttccaaaagaaatgctattcatagtgaattat

SEQ ID NO: 217294 - DNA, 539 bp, Homo sapiens
tttgtagctatgttaaaagtttatgctaatagcataaatgaagtctacctggttccatcaatgcctgaataatctgactgtatcacaattgacattcactgggaaaaaatgaagaaggcatartggagactaacaaaggacaaggaagatcacagcagacattgctaaaaataaaaattatttccaaaagaaatgctattcatagtgaattatatatgttattggtgatgatctgtgaaggcataaaatagaatttcattattttagtatgagagtctcgataggtcaattttgccataatcaaaacaagttcaaaaataagtggagttatcatgggatttaagttgttcagggaattaggtatgtagttgtaaaagatctttattttgactccactactaatccggggagtgtgactaataaaataaaagttagtagttttagttacaaaatggcagagttgattgtttgctaacagatttcaatatgaataaatattactgatgatattgttttgtagctcttcatttcagccaagg

SEQ ID NO: 217295 - DNA, 399 bp, Homo sapiens
ccacagcctctactagaggggcactgaagaagatacagatggatctccctataagggccctctgcagaggcrctatgctaagccccttacacgtatcattccattcagttaacaccatccccacccaaagctaaggagactccgctcagaaggcagggctgggtgtggccttggggaagcagctgcagcctcctggcctcaggccaccatctctgtgcatgcacttagctgctccctcatgatggccctggctgcctgctcctcctgtaggaggagggttccattcttcttcagatgtccccgaggtaccacagagggcctcaggtgcagacactcacttggaatggagaaccctggtgactggctgaccccgacagaggggacggttcagtgacccac

SEQ ID NO: 217296 - DNA, 455 bp, Homo sapiens
aattctccctgggataagttccctgggggagaagggggccgccatctttgctgtttgggtgactcagctattccagtctgtgggctttggagagtccaaagtgactagggtggaggggatccccagaacagcacaactgctctaccaaatcatggcaagatcctttaagtagatccccgatccgttcctcattgggtgagacctcccaagtggggcttccacctcttagttctagagctgacagagatttacattctcccttggatagagttgtcaaggtcstgccagttaagaaggaatgggtcaggaacctgctaaaagaatctgcctgaccaagattttgtagagtagctttgttgtgctgggagatcccttctgccccggtaggtatggattccacaaagccctcaggctggagtggctaagttgcacaaacagcaaagatggcagctcat

SEQ ID NO: 217297 - DNA, 365 bp, Homo sapiens
ctgcctaactagaaaggtgctgagtagtctgaggaacatctgggctgtctgaggatcccctagtcccctagattgggaagtgggagcgaggcttaactgaagcgtgtctaatgtcaaagtccttgctgtcagccccgccttatgcagcttcccccctaaaccactgtgaaaacgtgtgagctgtgtrgtaatgtgccaattccaggggtgtcaacaccatgacccccagatattctcatacactgcctccttagcccatcccaggcaaggagggctctgcaaaccagggaccctgcgaggccaggggacagtgggattatactgccccatcccctctggcctgcctcccgcccttccagcctgct

SEQ ID NO: 217298 - DNA, 380 bp, Homo sapiens
agggaaaaacagggaattaacttggcccagcagcatctgtttgtgtgggctaacaccctgtgtatctcacaccaaccctaagctttgtttcyctcctgtcactttgctcctatttctttcatatgaaagaatgttcattttctttgaaaatgagctcatttcctcattttctttccatctttcagcaggaacaaagatcaccacaactggctccccttcaactatgttagatggcaacttgccttcagtatggtgaaacacatcagttaagactggggttgtgcatggcaggactttctacaaggacacccagtctccttaataaacatgagatgctctctttccagaagttctcttgcctgacacagcataggaagatg

SEQ ID NO: 217299 - DNA, 380 bp, Homo sapiens
agggaaaaacagggaattaacttggcccagcagcatctgtttgtgtgggctaacaccctgtgtatctcacaccaaccctaagctttgtttccctcctgtcactttgctcctatttctttcatatgaaagaatgttcattttctttgaaaatgagctcatttcctcattttctttccatctttcagcaggaacaaagatcaccacaactggctcsccttcaactatgttagatggcaacttgccttcagtatggtgaaacacatcagttaagactggggttgtgcatggcaggactttctacaaggacacccagtctccttaataaacatgagatgctctctttccagaagttctcttgcctgacacagcataggaagatg

SEQ ID NO: 217300 - DNA, 568 bp, Homo sapiens
attaataaacttatacatttggaaatcagtccaatattcattgaaaataatcactttaggattcaattaatgaattcaacattatttttgtctgtaaaattagtctgctctggaatatcactttactataaagaattttcattaaatagctattttaacaagacagccagcactttggaaaaaaactaaatattcatattaaacttcaactcatttgaataactaataaaaaatatatgtgtgatgtctgatactaakaaacatgaataatgaggcactgtggtttatcccaattctagcactccttcttgattccagtagtcattggagcagccagaaatcagatgatccggtatgcaaatattcaaaatgcatctgaagtgagttcactcaggcttcctcagcagaaaccccaaaattacctaaataacttcttccttcccctctttcttgccttgcaatccctctttcttgatgaaaataattactacatcagtggtcaccttgctcctcattctccagtgtttatgggttattatgacaacttcctccctctggtttaagtagt

SEQ ID NO: 217301 - DNA, 568 bp, Homo sapiens
attaataaacttatacatttggaaatcagtccaatattcattgaaaataatcactttaggattcaattaatgaattcaacattatttttgtctgtaaaattagtctgctctggaatatcactttactataaagaattttcattaaatagctattttaacaagacagccagcactttggaaaaaaactaaatattcatattaaacttcaactcatttgaataactaataaaaaatatatgtgtgatgtctgatactaataaacatgaataatgaggcactgtggtttatcccaattctagcactccttcytgattccagtagtcattggagcagccagaaatcagatgatccggtatgcaaatattcaaaatgcatctgaagtgagttcactcaggcttcctcagcagaaaccccaaaattacctaaataacttcttccttcccctctttcttgccttgcaatccctctttcttgatgaaaataattactacatcagtggtcaccttgctcctcattctccagtgtttatgggttattatgacaacttcctccctctggtttaagtagt

SEQ ID NO: 217302 - DNA, 568 bp, Homo sapiens
attaataaacttatacatttggaaatcagtccaatattcattgaaaataatcactttaggattcaattaatgaattcaacattatttttgtctgtaaaattagtctgctctggaatatcactttactataaagaattttcattaaatagctattttaacaagacagccagcactttggaaaaaaactaaatattcatattaaacttcaactcatttgaataactaataaaaaatatatgtgtgatgtctgatactaataaacatgaataatgaggcactgtggtttatcccaattctagcactccttcttgattccagtagtcattggagcagccagaaatcagatgatccggtatgcaaatattcaaaatgcatctgaagtgagttcactcaggcttcctcagcagaaaccccaaaattacctaaataacttcttccytcccctctttcttgccttgcaatccctctttcttgatgaaaataattactacatcagtggtcaccttgctcctcattctccagtgtttatgggttattatgacaacttcctccctctggtttaagtagt

SEQ ID NO: 217303 - DNA, 568 bp, Homo sapiens
attaataaacttatacatttggaaatcagtccaatattcattgaaaataatcactttaggattcaattaatgaattcaacattatttttgtctgtaaaattagtctgctctggaatatcactttactataaagaattttcattaaatagctattttaacaagacagccagcactttggaaaaaaactaaatattcatattaaacttcaactcatttgaataactaataaaaaatatatgtgtgatgtctgatactaataaacatgaataatgaggcactgtggtttatcccaattctagcactccttcttgattccagtagtcattggagcagccagaaatcagatgatccggtatgcaaatattcaaaatgcatctgaagtgagttcactcaggcttcctcagcagaaaccccaaaattacctaaataacttcttccttcccctctttcttgccttgcaatccctcttycttgatgaaaataattactacatcagtggtcaccttgctcctcattctccagtgtttatgggttattatgacaacttcctccctctggtttaagtagt

SEQ ID NO: 217304 - DNA, 410 bp, Homo sapiens
tgcccatctgtatatatgcgcacaaacacaggtacctgttcygtactttttttttaagcaatttcctttatgttgactctagttcagaagaccacatggtctatggataaattagtttcccagttcctatgctatttagaaaactgacagagagacttgggttaattaaggaacaaagattaagagaatgtcttcctgagcttgagttattttaattgcaaaaacaatctatttatacatacaattaggtatttagattaccccattttacacaagagattttcataagtaaaacaattcaaatggatcaaataattggtgaagagaaaaaccagagtagcagcaagtgaccctctaagtcttttggaagttgaactttctccaaagccaggaactctactttacttgta

SEQ ID NO: 217305 - DNA, 410 bp, Homo sapiens
tgcccatctgtatatatgcgcacaaacacaggtacctgttctrtactttttttttaagcaatttcctttatgttgactctagttcagaagaccacatggtctatggataaattagtttcccagttcctatgctatttagaaaactgacagagagacttgggttaattaaggaacaaagattaagagaatgtcttcctgagcttgagttattttaattgcaaaaacaatctatttatacatacaattaggtatttagattaccccattttacacaagagattttcataagtaaaacaattcaaatggatcaaataattggtgaagagaaaaaccagagtagcagcaagtgaccctctaagtcttttggaagttgaactttctccaaagccaggaactctactttacttgta

SEQ ID NO: 217306 - DNA, 410 bp, Homo sapiens
tgcccatctgtatatatgcgcacaaacacaggtacctgttctgtactttttttttaagcaatttcctttatgttgactctagttcagaagaccacatggtctatggataaattagtttcccagttcctatgctatttagaaaactgacagagagacttgggttaattaaggaacaaagattaagagaatgtcttcctgagcttgagttattttaattgcaaaaacaatctatttatacatacaattaggtatttagattaccccattttacacaagagattttcataagtaaaamaattcaaatggatcaaataattggtgaagagaaaaaccagagtagcagcaagtgaccctctaagtcttttggaagttgaactttctccaaagccaggaactctactttacttgta

SEQ ID NO: 217307 - DNA, 477 bp, Homo sapiens
tgaattcctggaatgagttcccacgcgcaggagcaaggagcyatctttgctgtttgtgcaacttagtcgttacagcccgcgggctctggagaatccatacctaccggggcagaagggatatatcatcagcacagcacagctactctacaaaatcttagaaggcagattcttttaccaggttcctgatccattcctccttactgggcaggacctcgacaactccttcccggggagaatgtaaatctctgtcagcttgagaacaccggtggggtggtggaggccccaggtgggaggtcccacccagagaggaggaaagaatcagggatctgcgtaaagaatctgcctggccactatttggtagagcagttgtgatgtgctgggggatcccttccaccccaatcgttttggactctccaaagctggccccaccctctcccccaggccccagttggaaggactcccacagggtgggaactc

SEQ ID NO: 217308 - DNA, 477 bp, Homo sapiens
tgaattcctggaatgagttcccacgcgcaggagcaaggagctatctttgctgtttgtgcaacttagtcgttacagcccgcgggctctggagaatccatacctaccggggcagaagggatatatcatcagcacagcacagctactctacaaaatcttagaaggcagattcttttaccaggttcctgatccattcctccttactgggcaggacctcgacaactccttcccggggagaatgtaaatctctgtcagctygagaacaccggtggggtggtggaggccccaggtgggaggtcccacccagagaggaggaaagaatcagggatctgcgtaaagaatctgcctggccactatttggtagagcagttgtgatgtgctgggggatcccttccaccccaatcgttttggactctccaaagctggccccaccctctcccccaggccccagttggaaggactcccacagggtgggaactc

SEQ ID NO: 217309 - DNA, 477 bp, Homo sapiens
tgaattcctggaatgagttcccacgcgcaggagcaaggagctatctttgctgtttgtgcaacttagtcgttacagcccgcgggctctggagaatccatacctaccggggcagaagggatatatcatcagcacagcacagctactctacaaaatcttagaaggcagattcttttaccaggttcctgatccattcctccttactgggcaggacctcgacaactccttcccggggagaatgtaaatctctgtcagcttgagaacaccggtggggtggtggaggccccaggtgggaggtcccacccagagaggaggaaagaatcagggatctgygtaaagaatctgcctggccactatttggtagagcagttgtgatgtgctgggggatcccttccaccccaatcgttttggactctccaaagctggccccaccctctcccccaggccccagttggaaggactcccacagggtgggaactc

SEQ ID NO: 217310 - DNA, 477 bp, Homo sapiens
tgaattcctggaatgagttcccacgcgcaggagcaaggagctatctttgctgtttgtgcaacttagtcgttacagcccgcgggctctggagaatccatacctaccggggcagaagggatatatcatcagcacagcacagctactctacaaaatcttagaaggcagattcttttaccaggttcctgatccattcctccttactgggcaggacctcgacaactccttcccggggagaatgtaaatctctgtcagcttgagaacaccggtggggtggtggaggccccaggtgggaggtcccacccagagaggaggaaagaatcagggatctgcgtaaagaatctgcctggccactatttggtagagcagttgtgatgtgctgggggatcccttccaccccaatcgttttggactctccaaagctggccccaycctctcccccaggccccagttggaaggactcccacagggtgggaactc

SEQ ID NO: 217311 - DNA, 582 bp, Homo sapiens
tgggaaatgcagggaaagaaactaacatttattaaatgtctcacctgcattatgtgatttggttgtcattgtttatagatgaaaaactcaaaacaaaaataattaagaaaacttccatgaccacacaattggcaatgaatcctcagaaaccatccagaggaaagaggatctggatgagtactgatgcagacaatttagcaagaagtgtttggaaggtttggaggcatcatgtctttatttttatttgtaaattaagcaatgatatttggttgaggctgaaaatgaataggggatatgaaaatagtagaaaacatttkttagtagccaggaaaatggaaggagataatcaagagaaagcagtaaaaggattggtaagaggtgttacacatctattaaatagtaataaaagcagataaaatttattgagttcctattatataccagacactggctaagcattttatatgcactgtctcatttaatcctcaaaacgtctaattaggggagtataactatatatccctatattacatatgcaaattagagattaagtaacttgacctcttagcacaaaggcatgat

SEQ ID NO: 217312 - DNA, 580 bp, Homo sapiens
aaggtaacaagcatggtttttagcttgttttttttttttgttttgtttttgtgttttaggagatggcgagattagaatcactgaaaagttttataggttattctttttcatataatgagttttcatagtacctgttttctttggctctagaatgttttctgtatagccatgatgttttctatttctaagaagtttaatgcatagcattttcactgtattctaactcacctggttaattttttawagtaaaatgtttgtttccggtttacaaaaaattgtgaagataatacaaatagtttctgtatacctacccactcagtttaccctattattaatatatgacattagtatggtatatttgtcacaataaatgagctaatcttgatacattgctataaactcaagtccatactttattcacagtttgttaccttttgcctaatgtcctttttctggataccacatcatccaggataccacattaaatgtagtggtcctgtctccttaagctcctcttggatggacagttatgattaccctcttacccccaaaattgttttgagaatatctgtaattttca

SEQ ID NO: 217313 - DNA, 580 bp, Homo sapiens
ttaaagttgtttctatgtatcattttttattctttatcactgtgttttacaaaataatctcatgataaattctcctccaactgtatagctacagcttttctcaaacaggattttagacatagtattctcctatatcttccttatgtagtgtgtaatacaggtttgttcttattatacgttctttatctatgaatatattccagaaatttgcaaatctataacccagaacttttttaaagctctttacctgagtatctcattatctgcctattaatacatatctctaacaccttgatatttcacagacatttaaaattgaatctagtaaaagttaatcatcatcttttgtactaattcagacagatgggtgctaacctctgtttctttttttcacacactcagttagtgacaaaatcctrtttacttcctttagaatttttatatccctcccttctcttttatgtcccttgtgttactcctttagtgaatcacaatttctatttagtagtatttgtctaactggcacatggctgcgtccttgaaacctttctgaagtcatagaatgaatggcagtcttatg

SEQ ID NO: 217314 - DNA, 398 bp, Homo sapiens
tggctttataaggaggagttttccwccacaagctctctctctctttgcctgatgccatccatgtaagacatgacttgctcctctttgcctcctgccatgattgtgaggcctccccagccacgtggaactgagtccattaaacctctttcttttgtatattccccatctcaggtatgtcttcatcagtagtgtgaaaacagactaatacaaagggcatgattgtgttttgatttgtgagtagaggaaatttgggaggggctgaagtggaatgatatggtttggctgtgttctcactcaaatatcatcttgaattgtagttcccataatccccaggtgttggagcgatcagatggagataattgaatcatggcatggtttctcccatcctgttttcatga

SEQ ID NO: 217315 - DNA, 504 bp, Homo sapiens
acactggcaacatcaaatgctgacaaggatgtggagcaacagaaacyttcattcattgttggtgggaatgcaaaattgcatggccactttgaaagactgtggcagtttcttacaaaactaaggacactctaatcaaaggatctgaatattgtgctgtttggtatttagccaaatgaactgaaaatttcagtccaaacagaagcatgaagacagatgcttatagtagctttattcataattaccaaaacttgggggctagcaagatgtccttcagtaggtaattggataaataaactgcaaaatatacacacaattgagtattatttagcactaaaagaaatgagttatcaagccatggaaagacatggaaaaaccttaaacgtatattattaagtgaaagaatgctcatttctttgcattctgactgatcaacatttttctttttgatttcttatttgttttctaaaagttgagcacagagtattcattatcctgaggccgaga

SEQ ID NO: 217316 - DNA, 418 bp, Homo sapiens
atggaattcacaagttctaactaagtgaaaagaacaagctgtgttccagaataagatggcatatttcatgcacatattaatctctcaccagaaatactactaacctacartaaatagatttttaaaagaaatcaacaaaaataaggataaaataacagatgaagtagatgaaaaattggcaactgactcagagcccttagagagtcaaatcctaaaccactagtgggtatagacatgaaccaaaataatttctactgcaaaaccctcaaaaggcttgcaaactggcagtaccgggtgcctcaggagctgaggttaaaggaggtggttaagatagaagcactggatgttagatcaccagatatccacgacccattgtggaaaggcacagttaccttacagaaaatgaagattaattgat

SEQ ID NO: 217317 - DNA, 539 bp, Homo sapiens
gcatggtgtggagatatctcttgttctgatcttcttagagtagggggtcagagggccccagaagtaccgcaragaagtcccatgcccagatatgactccccagccaccaccatttccagtgataatatgacatccctctcacattcctcaactccacactgaacatggtaagtgattactgctccacatcccagcaacttgagatttgcaagcgaatttttttgaaaatatttcaaaatgatcactctttcacactttagatctgtttaatcaaattattcacctaagacagacacactgagaaaacaagagtgttggtggaagttggagaatgcagccggggaccaacagtttattttggaggtgaatgcctgggaaacaattcttccttgccactctacctaccactgtgctcaccaacagtgcctacaacttcctataccgaccatacttaccttttactttctcgcttgtgaaataccaacatttctccaagtcaggcattcaggtgtgtctttattattttgatctgtgaattc

SEQ ID NO: 217318 - DNA, 543 bp, Homo sapiens
gaattccaaataagtagtgctagcatggtgtggagatatctcttgttctgatcttcttagagtagggggtcagagggccccagaagtaccgcagagaagtcccatgcccagatatgactccccagccaccaccatttccagtgataatatgacatccctctcacattcctcaactccacactgaacatggtaagtgattactgctccacatcccagcaacttgagatttgcaagcgaatttttttgaaaatatttcaaaatgatcactctttcacactttagatctgtttaatcaaattattcacctaagacagayacactgagaaaacaagagtgttggtggaagttggagaatgcagccggggaccaacagtttattttggaggtgaatgcctgggaaacaattcttccttgccactctacctaccactgtgctcaccaacagtgcctacaacttcctataccgaccatacttaccttttactttctcgcttgtgaaataccaacatttctccaagtcaggcattcaggtgtgtctttatt

SEQ ID NO: 217319 - DNA, 584 bp, Homo sapiens
aaaaacaaattgtagaacaattcgtaaagcatgatcccaattatttaacaaaacaaaataagagatgcctgtgsgtgggctgggcgtggtggctcacgctgtaatcccagcactgtgtgaggccgagatgggtggattgcttgagcccaggagttcaagaccagcctgggcaacatggcaaaacctcatctctacaaaaaatacaaaaattagccaggcatggcccaatgtgcctgtgatcccggctactatggaggctgaggtgggaggatcaattgagcacaggaggttgaggaggcagtgtgagctgagatcacgccactgcccagcctgggcgactaagtaagtccctgtctcaaaaaaaaaaaaaaaatctatgacttatgactgcacatacagttaatctgcagaaagaagtctggcaggatataaacagtgggttactttggggaaggaaagatgggtggggctatggaggctttctggtttactctgtataattttgaattatttgaaactttaaaaaatttatttaagttttttgttaagaacagttaacgagatatacacccatatttttaagt

SEQ ID NO: 217320 - DNA, 584 bp, Homo sapiens
aaaaacaaattgtagaacaattcgtaaagcatgatcccaattatttaacaaaacaaaataagagatgcctgtgcstgggctgggcgtggtggctcacgctgtaatcccagcactgtgtgaggccgagatgggtggattgcttgagcccaggagttcaagaccagcctgggcaacatggcaaaacctcatctctacaaaaaatacaaaaattagccaggcatggcccaatgtgcctgtgatcccggctactatggaggctgaggtgggaggatcaattgagcacaggaggttgaggaggcagtgtgagctgagatcacgccactgcccagcctgggcgactaagtaagtccctgtctcaaaaaaaaaaaaaaaatctatgacttatgactgcacatacagttaatctgcagaaagaagtctggcaggatataaacagtgggttactttggggaaggaaagatgggtggggctatggaggctttctggtttactctgtataattttgaattatttgaaactttaaaaaatttatttaagttttttgttaagaacagttaacgagatatacacccatatttttaagt

SEQ ID NO: 217321 - DNA, 595 bp, Homo sapiens
  misc_feature (1)...(595): n = A,T,C or G
gggggaaaagaaaaaaaaaggactcagtgaccatcaaaaacgaaaaggcagagtggctgatctgcaaaagctcccagacaaaatcaccagcactctaagaggactctgaagatgaaaaaggtttgactattttctcatcactgtttgccaactgagtctggttttgctratgaaaacagataatttcatttactttccacttttttttcatggtccaatgatctctcacattactaggttatctaaataatcacaattgtctcctatttactgatgcattgtgtttttcaatccatcaaaaccagtaaagaagcaaataaatatccagcggtgtcaaatataacataaatgctaccaggatgtcattcaaaatagagccatcttttcaaggctcnagaaaaccatccacgtcgatttcggattttcactaaggttggatagctcccaaaatcggattttcgatcgggcggaacatatccatattctcttaatcatcggaaaatcgttcgggatcctcatagcccaccaaaattcaagtgattgaactagagaaagagcagtatttgcttgaatgacataatagactctcctgcag

SEQ ID NO: 217322 - DNA, 570 bp, Homo sapiens
atccaaaaggacagggattttgtctgttttgctctgtaacatattctcagcacctagaacaatgccayatcaaggcattcattaaatattagatgaatgaatgaataaaggtttagcctgaataaacatggaaatctttttattctagctattttaggtagacatcttaaaatgtatagtagcattcttccttaccatcttgagaaaattataaggacattttgcagatgactaagggtcgccatcatgcacattctgtatttcaaggatgctctcagtgtcttttaaaatgctaaaatcactccagaatctttaatgtaatttttcagctcctttatgcatttatcatttttcccatcctcctccacctttctaataggttgtcatttctccctattgtgaacaattggctgttgctaatttattgtgcacgtaaaagccaattagccatgtgtctaaagtaagagtacctgcctctgagggcctaaggcttctcctaagaggaaaaaatatgatccttagactttgccacatctatgtttggctccattttttaatgtttcttgattc

SEQ ID NO: 217323 - DNA, 551 bp, Homo sapiens
cacccagcaaaacctatcctaataaggctgcatttatgatttggccatctttgtctccctgaattcatttccttctattctttttctaagtcatcccartctgaaacatagacttctttgtggttctctggcctccaaatatacacaaagtcaaaattactgcatatgctattctctccaactagaattacatatatatgtatacaaacacacacacatacatacatacatatatatatatacacacaaccacacacacatacatacatatacacactcatggtccacatatatatccacacacacatttgtgttccccctcctcttcaaaactttgtttcaatttgaatttttcagtgagtcttttttctgaccaccctatttaaaactcaaacactaatctccagtttctggcctccattgtccttttctacttccctgcttgattattctccaacaaaaaacctaccacactcaaatacatcatgtattgcatatatttgtgtattgaccatttgactctcttatttggattgtatgatttgtgagga

SEQ ID NO: 217324 - DNA, 551 bp, Homo sapiens
cacccagcaaaacctatcctaataaggctgcatttatgatttggccatctttgtctccctgaattcatttccttctattctttttctaagtcatcccaatctgaaacatagacttctttgtggttctctggcctccaaatatacacaaagtcaaaattactgcatatgctrttctctccaactagaattacatatatatgtatacaaacacacacacatacatacatacatatatatatatacacacaaccacacacacatacatacatatacacactcatggtccacatatatatccacacacacatttgtgttccccctcctcttcaaaactttgtttcaatttgaatttttcagtgagtcttttttctgaccaccctatttaaaactcaaacactaatctccagtttctggcctccattgtccttttctacttccctgcttgattattctccaacaaaaaacctaccacactcaaatacatcatgtattgcatatatttgtgtattgaccatttgactctcttatttggattgtatgatttgtgagga

SEQ ID NO: 217325 - DNA, 551 bp, Homo sapiens
cacccagcaaaacctatcctaataaggctgcatttatgatttggccatctttgtctccctgaattcatttccttctattctttttctaagtcatcccaatctgaaacatagacttctttgtggttctctggcctccaaatatacacaaagtcaaaattactgcatatgctattctctccaactagaattacatatatatgtatacaaacacacacacatacatacatacatatatatatatacacacaaccacacacacatacatacatatacacactcatggtccacatatatatccacacacacatttgtgttccccctcctcttcaaaactttgtttcaatttgaatttttcagtgagtcttttttctgaccaccctatttaaaactcaaacactaatctccagtttctggcctcyattgtccttttctacttccctgcttgattattctccaacaaaaaacctaccacactcaaatacatcatgtattgcatatatttgtgtattgaccatttgactctcttatttggattgtatgatttgtgagga

SEQ ID NO: 217326 - DNA, 551 bp, Homo sapiens
cacccagcaaaacctatcctaataaggctgcatttatgatttggccatctttgtctccctgaattcatttccttctattctttttctaagtcatcccaatctgaaacatagacttctttgtggttctctggcctccaaatatacacaaagtcaaaattactgcatatgctattctctccaactagaattacatatatatgtatacaaacacacacacatacatacatacatatatatatatacacacaaccacacacacatacatacatatacacactcatggtccacatatatatccacacacacatttgtgttccccctcctcttcaaaactttgtttcaatttgaatttttcagtgagtcttttttctgaccaccctatttaaaactcaaacactaatctccagtttctggcctccattgtccttttctacttccctgcttgattattctccaacaaaaaacctaccacactcaaatacatcatgtattgcatatatttgtgtattgacmatttgactctcttatttggattgtatgatttgtgagga

SEQ ID NO: 217327 - DNA, 499 bp, Homo sapiens
tctactgttcccaactacagcgctggattttcaggattttccataaatactcttccttccttccttcctttttatttatttatttttgcttttgcaagtactgattatccacatctacatcatgcccttttattttttttcctaatcaagttactgtataatctttagagccttccctgatactgaactcttctttgaacttcttaataatcttacattgaatccttgacaaaccactaagcttttgagttcatgttttcttttgctaccatgatttcaggtttgttttcttaaacaatttctcyttaaactagattgttaattccttgaggatacagaatggggtgtcatatatcattcacataagggtatttttgaatatatgatgagagatgtgtctttcccatcaaaatctcttcttttttttttgagacagggtgtggctctgttgcccaggctgaagtgcagtggggtaatttcagttcactgcgacctccac

SEQ ID NO: 217328 - DNA, 630 bp, Homo sapiens
cccccttttatcctctctcccagtgaactacatggggaagttgtgtttcttgtccscagaagtttaggctctgtgtgtcttgacatcttgattaggagtgggagtgaggtgcttccaccaagggataaaataaaagtctgtataaattcaaagccacacctgccatctggtcactttgttccttgttcctgtaaaacagcaggcacagaaaggacacaaactggcaggtgaaattgatccttatcttcctgaggtagcatgactgctgctgtgcgtggaggctgggtagaatgtgcctaattcaaaggtgatccaatggggcattttttgatggctttttgcactgttttagttccataatggcatgtaaagcaatcatggtttgataagaccatgataaccagaagttcagccccctcagggatgaggatatgggtcacctcactaagcaaaccattagaaaatagaattgctatcttagggtgatggaaagatagaagatgagtattaattatgtcattaaatcaactgcagtcatggagacactattaatcccaataatattccctttataggttttgccaggaattgaaatcatgttcccctggagatgctgtaattagttggaat

SEQ ID NO: 217329 - DNA, 599 bp, Homo sapiens
taggattcaaactcaagcagtctgactcccacatctgtgatcttaacctctcctttatagtattcctaatataatagccaccttaaggtaagaaagtttatatcacatactgtattaagtacattatatgtattgcttgatttaaatatgttccagttatctcttgcttcataccaaaatttagtgactkaaatcaataaaagtcatttatttctctcatgaatctgtgatttgggctgggtcctaccctacgcaataccaactaaattgaggtgtgcaggatctgcttttaagatgggtcactcacatgctgggaagttattactggctccagggtgagtttttcccacctagcctctgggcctgtgatgggagaggatgccatgaaggtctctgacataactggagacatattccccattgtcttggtgattaacatttggctcctttttacttatgccaatttctgcagccaacttcaatttttccccataaaacaggtttttcttttctatcacattgtcagtctgcaatttttgcaagtctttatgctctgcttcctcttgaatgttttgccacttagaaattttttctgctag

SEQ ID NO: 217330 - DNA, 605 bp, Homo sapiens
tcttctacaactattgaggttagatcactttctaatgtcactattctaataatatatgtaatataaataaatcttacaagatatgtgaataagtattaatatatgatttacttatggcaacttatatagattttatattgaactggcactgcatattccccattttaatttcactaacactagctaagtctttttgataatctaaatacaacttctaagctgggaggggctgcaattcattttttgattcaattccaaagttcctttcagagtaataaaaacattttctaaggaaacagaggatgaccttgcttcattatttaagcagctcagcctctgtttttttccaagcttaccatggagttggcttcaaggacactttttttcataaaggtttttagagaaggaatggtgtcaccatggaaattgtcaagcttgattctttcccagagacattactctgagctagatattaggaaggagaggcccaawgagagaactcctcaaagacatacctagatttagatctagatccacatctgttcttccttaggaaaagactttgctttgaaagtaattcagagggtcacaaaaatttaaaggca

SEQ ID NO: 217331 - DNA, 510 bp, Homo sapiens
attattttatccttcggggatgacagttatatgtgtatatacaacccaggatgacaaaatcatgggtccggtttttgttgccagggctgctgtctcttttcttgcggtcttcatttctcacgagggtgctgggaacttgatcagtcccctggccttttggcactgtggcagagtacacaagtcatacctttatggacagttagctcacaaaacaactgcataatctgggatcactcttggtaaatcaggtgggtggtgcagccaggagatcccctttcctggtcacaacaggagcacaaagaaaccattatctccatgactagctccagaagctgggcccagggagtygtgatgaggagtggaggtgtatttggcctgtagaatcaacggcctttgagaaccatacaatgcaccttatatggcttgggtgatcaaataacttaaggtccaaattcaaacactttggaaaaagggagctttaatataattatgccaaggtgataggcataa

SEQ ID NO: 217332 - DNA, 621 bp, Homo sapiens
ctcctgtggtctttttgccttgactctaaccgggtgatgctgatgagcaggtccagaggcctgggctctgttcactagcctgtgctgggactctcagccaagccttctcagaaaggaggtgtcctctacatgtggtcacaccatagcctaggaccacagagggaatcatggtggcagactccagcccccctgccctcccattgcccaaacacccagatgtggagatgccctgccccggggtgccgtcccaagcctgctttctaacatcaggaggtgggtcttgcctaaggctcctaaccaggacctcatttgttgtttacacatgttggggtcccaaggatatgtttcttggcccacagaatggtcataaacaactgccctgtgaaggagggggtgctgtcttgtgtacagatgaggcaaaatgacaggatcctgtccccagctgcagagtgtctgctgggmgtccccaacacctgggaagtctgtctgtccttccaaggggccaggccagagaaatggggggcactggggctctgctttgcctcctcatggatgtcagtcccgggtttctgatggggtttgtgatgatggcgccctaaagggaagctctgtggagagcca

SEQ ID NO: 217333 - DNA, 487 bp, Homo sapiens
tccaacaagaggaatcagtccctgaaatgcaatttaaactctttgaaaatttattactcccaacacaccacctttttgctccatggcccttcccttttgctgctgctgattctaaatatcagactctagagccaccactgaggaggcagagtcccaaaaaaggtggtgctatgggattggagtcaagctgtgagctgagttttccagactctgaagtggggataaragttccaagacctatggaggcagcagctatagaggaaagaacaccagtgccaggttccaatcctggctaagttgctaatgtgctgtgtgaccttaagtgaggatgtcctctctctgtgcttcatgaaagagagtgggactctctctaaggctccttttagcactaaacgttctctgatattttgactctttaaagcagggctgttaggagacaaaagaagatgattatagtttactcaactctgaaataaggtgagaattc

SEQ ID NO: 217334 - DNA, 487 bp, Homo sapiens
tccaacaagaggaatcagtccctgaaatgcaatttaaactctttgaaaatttattactcccaacacaccacctttttgctccatggcccttcccttttgctgctgctgattctaaatatcagactctagagccaccactgaggaggcagagtcccaaaaaaggtggtgctatgggattggagtcaagctgtgagctgagttttccagactctgaagtggggataaaagttccaagacctatggaggcagcagctatagaggaaagaacaccagtgccaggttccaatcctggctaagttgctaatgtgctgtgtgaccttaagtgaggatgtcctctctctgtgcttcatgaaagagagtgggactstctctaaggctccttttagcactaaacgttctctgatattttgactctttaaagcagggctgttaggagacaaaagaagatgattatagtttactcaactctgaaataaggtgagaattc

SEQ ID NO: 217335 - DNA, 618 bp, Homo sapiens
ggggacatccagctgagaggtaagactcacatcagcaatgccacctccggaaatgctgggtccagagctgctcaactgactaraggtatttccagccatagtggcctcactgcccagtgccttttaatgctctcatccatgcagggggcacatttccctaccagaggccaccatcccacttgccatggactatgcacagttatgccagaggcaggaggctgctttccatgaaaacattcctttctcctcctctgcctccacctccatttcctgatgggggagaatgataaagagccacaggcttcggtgaccctgattactaggtaagataacagggagaaaggacttaaccactggccttcagagaaatatggatgaacacaagggctaggctactgaagaggctccagaaacctcagacatccccaaagtacctagagagccacctaccacctcacccaccagcgggcatgtgcaagcacacagaaggaaaggagcatgcacagctggggggcggccaccggggagaagccacctgtgcctggctgagcaagacccagctaggagggtctacactaaatctactaaaatggggaggctctgagagtgggcacgatt

SEQ ID NO: 217336 - DNA, 549 bp, Homo sapiens
tcagccccagtgggatacagtggsagtgaactggaaagacaagtggtggtcatagagagaaatgcctgaaatcgacatctttaaagaagttaacaatcattggtaaaaacaagaaactatactgtgcagccatagtacgaattgtcttatgtagatggaaggtgataatttaagagaagaggatgtcaaagaactgagaaactgattgaaaataggttttgaaatcacaaagaattaaatcaggaatagtttggagaagagcaactttcacctaaaaactaaactcctgaaggaaaaagagagagtgacctggaggccagtaaatgagcgaaaaaaggaaggaagggtaatgtatagtctcccagcatgagctttaaagctgcaaatatgtacaagtgaaagagaacagattacctagaagtgtcaatgagcaacaagtgcatctgcttcatcaccaggccgagtatttaaaaatacttttaaaaagcattttcatttttatagtttaaagttctcgtacgaggcctgccatataatttaacctaattt

SEQ ID NO: 217337 - DNA, 595 bp, Homo sapiens
agtcctggttccatttattggagagtggtatttagaaacmaatgtgtgggttctaggtgtgctattttgttacaggggtcttactgactctggccccattcagggataaaagtaggaaatatatgtagcatactaattcatgcttacactcattttcatagctatttttgtatatgtttacatgtccatatatatgtgtgtgtgtacacatatacatacttaaaaataaggtaatattgatgccatttactacaatccagcaccataggagccattctaatcttccctcctcaccttttacaacttctttctctggtagcaggaaacctggcttttattatgtacaatacatttatttatttatttaatcctaatataaaaatgtaattcttttaggattcctgatccatatccctgaaagaaacaaagtcacaaactagagcatattctttcactcagcaaaatgtatttaagattcatgcatgttgtcgtttgaaccattagtttgctctgtttattgctaatactacatttgagctatgtgccacagtttgtttatatctttactggttgaaggacatctaggttgtttcta

SEQ ID NO: 217338 - DNA, 569 bp, Homo sapiens
aatctaagatcatgacgaagagggtgactagaggactgtgartatcccatcagagagaggctagttagagtttatcactagattctgaaagaaaaattcagagtatctgcttagaacagcagatggccgtgggacttcaggatagaagtttctagaggtgagcgtctctgaaaagcctatgcaagtgcctcacaagagtcaagtttaatcatgtgctaagagcagtgagaacagctgacttaaaatatctgattcccactctcctgatgccttttgcaggctccagaataaagctggtccaaactagaagagagatttatacttaaacaaattcaaagttctaattaaaatcttgttctggacatgctaattattgaaataacacaatgattgtgacttacggcaaccaatcccataagaatgtgcagaaaatcacagggcctaagttttcgtccaagaatgaagaaaaattacccattgaataaagcctaaaaggtctgtgggaaacaaaaataaagtcacattttgattagttacaattcatgatttatgctatttcggaagactca

SEQ ID NO: 217339 - DNA, 586 bp, Homo sapiens
ctttggttttactgagctgtgttttatgtatttttggttctactgctctttttagtttattcttgattttaattttactaatatgtattagtatcaataaagcattaggtctatgaagattcctacagcgttttaattgagagtaaattgcctacgataaaaggggcctcctaccggcctagaaggctggcccaccctagtggctgggcaccactacttgtttsaagagttaaaccaaggcacgatagcccactttgtcagctgcctagagggaagttgtcaagtctgggaccctgctgctttattcctataactgtgttttagaaacacctcacaagtggaattgtggttgcctcatccagaaaatgtggaaaggattaatgtggcatgtaaaacaaatcactcctgagctcagctgagaaagtgggtattaaaagcactccagtcaaaagagctttagtgagagggtcacggtgatatacattcagcatatgttgggctggtaatgctgcagggtgtttggaaatggtaatggtccatgagtgtaaagtctttcaagacctcttaaaggcacatgtgtttcttg

SEQ ID NO: 217340 - DNA, 544 bp, Homo sapiens
agggttacggtgaatttttcccttatatattcaattgttcagcacacttttgttagaaagactagtgatacagttaagcttggtgttcccacccaaatctcaacttgaattgttgtaatcccaataatccccatgtgtccagggagagatcaggtggaggtaattgaatcatggcggcagtttcccccatgctgttcttgtgatagtgagagagcgctcacaagatctgatataaggggctctttcccctttgctyggcacttcttcctgccaccttgtgaagaaggtgccttgcttccccttcaccttccaccatcactgtaagtttcctgaggcctccctagccatgctgaactgtgagttaattaaacctctttcctttacaaattaccctttataaattactcaggcagttctttatcgcagtgtgaaaatggactaatacaactattgttaaactaaatttggcctgagaaagcctttttacttgcatacttcaattctcatgaattgcaacctaacttagcacataaataaactgaaa

SEQ ID NO: 217341 - DNA, 495 bp, Homo sapiens
tatgctaaagcactgactacattatggaataatatatttccttatcacttttaatgcagttatacattagctgcccccttttttttttttccattttaatggactgaagttggctttatttcctcgtggagttacaccgttaagcacatccaatttaagacatgaaacaaggaaggtagagttccactgttacaaaacttttattagcataaaagagtaggtcctttcattttactctaagctcatgttgaaaataatcacaattacagtgttgcaatataccacattgcaattaacatactacaaaaacwtaatggattcaagtttaagaatgatctagatttttctctgcattttagcaggcttaaggatatccttagaatactatcacccttatttatttttactcccaaaaactttctgacaagagaaagtttaagttgatttaaacaaaatgttcagtgaattgtgcttgatcttagtatgcccatgaaa

SEQ ID NO: 217342 - DNA, 628 bp, Homo sapiens
atttcaataagtacacagattacattggccaataaatcatgcaagcagctgtgtcttttttttaaagcattggtaaataatcagttggactgaaattaattgcatccgttctacacacccctatactcagcagtgtgaaagcatctgcatgcaaaaaataaatataagattttgtcataattataacaatatattacaaaattattcagcatgcataacaagtaatacataatagaatcatagaatcattgagttaatatgtctacagtcaaacaaatcagagtactaagaaattagaatgcaagttttcccaaagaagataaatatttttcaatgtgtgaaaattcatatayatacatatatgggttttattccttttgtggcatttccataaacagttgttttatttacttatgtttcttagactcatcaatttaatccaattatttctgattataaccctttgaaatatgggttatattttcaaatataacacagtttctagggttgactgtgtgaaataagaatatgtaagttgtagataacacttcactgtactccatgaaattgggatgatgattgtgaacaaactttgctaattctgaagagttctatgaaggtgaagggg

SEQ ID NO: 217343 - DNA, 398 bp, Homo sapiens
attgagttaatatgtctacagtcaaacaaatcagagtactaagaaattagaatgcaagttttcccaaagaagataaatatttttcaatgtgtgaaaattcatatatatacatatatgggttttattccttttgtggcatttccataaacagttgttttatttacttatgtttcttagactcatcaatttaatccaattayttctgattataaccctttgaaatatgggttatattttcaaatataacacagtttctagggttgactgtgtgaaataagaatatgtaagttgtagataacacttcactgtactccatgaaattgggatgatgattgtgaacaaactttgctaattctgaagagttctatgaaggtgaagggggaagtagaggagagctg

SEQ ID NO: 217344 - DNA, 398 bp, Homo sapiens
attgagttaatatgtctacagtcaaacaaatcagagtactaagaaattagaatgcaagttttcccaaagaagataaatatttttcaatgtgtgaaaattcatatatatacatatatgggttttattccttttgtggcatttccataaacagttgttttatttacttatgtttcttagactcatcaatttaatccaattatttctgattataaccctttgaaatatgggttatattttcaaatataacacagtttctarggttgactgtgtgaaataagaatatgtaagttgtagataacacttcactgtactccatgaaattgggatgatgattgtgaacaaactttgctaattctgaagagttctatgaaggtgaagggggaagtagaggagagctg

SEQ ID NO: 217345 - DNA, 522 bp, Homo sapiens
agggatgctatgcgtgcagtgagtttgaaggactctcccaacaaatgcaccctgtataatatatatatatttaagtacataaaactgaaaaaactctaaaggttactctgaagagttttaacttaattctgtatagcatggcaagttgtttacagttttaaagttttcaagatgagtgagaagggaatgtaaaaatctaggttgcacaatccaacaaacatttctatagaaatgttctatatttgcactaatacaataattctaaatgaaagcagttttaaacagcagtgtaaagtaagtgactgcaacagaaatgacaggatttgacaagctgtccmttcattcattgttcattcaaaatacatgaatgcttactatgttccaggcactgttctacatacagcaataaacagacaataatccctacctcacagagctaatttgtattctagcaggaggaggctgacaataaattggtaaaacatatgatgtgtcagatggtgttaagatgattgatatata

SEQ ID NO: 217346 - DNA, 617 bp, Homo sapiens
ttttttctttgcacttattaccacgccaaatttatttatttagttattgtttgtctcacttcccaccatgagaatgcaagctccatgagaagcgatttttgtctttttgtttgattgtttgtttgtttrttttagaaaatgatgtttattttccaccagccttatttccatgttgcttaagagcctgtggaagaacagctttaagcccattcagtggttgttcctatgtattcagtggcctggcagtgggagctgcagaccagtcttccgtggcaggctaagcactctagtcttcagtaggcaacttctgaataggcacagagggcagctgcatgccttcagaccagcctgcaacctcaggctgagcagcagtgaactcaggagctagagcagtccattcaacctgaaattcctcattggtcacagctttttcagcagcagcctgctcttccttctcaaactcttcaggatctctgtagaagtaaagatcaggcatgaccttccatgggtgttcatgggagatggtgtcacgcatgctcagaacttccatgggccagcctccaccacatcagacccactgagtgaactctcttgttgcaaggaatgccattgtctac

SEQ ID NO: 217347 - DNA, 548 bp, Homo sapiens
acttctcttttaaaatgcagttaatctttggaatttaagttctacwtcttaatgcacttttattatttattccccatcacacagaaagttttccaggagtaataacatatatacagagactatagaatttaaaacatacaaatcatggtcatggaaatgctttgttctcaaatgcaatcccatatgggcagatagggtcctaatctccctagtagtgaaaatggctacccggcaaagacagggaatcaacttaaatgcccataaatgacagattggataaagaaaatgtggtacatacataccatggaatactgcgcagccataaaaaagaacaagatcatgtcttttgtgggaacatggatggacctagaggctatcatccttagcaaactaatgcaggaacagaaaaccaaatactacatcttctcacttataagtgagagctaaatgatgagaacttatgaacacaaagaaggaaacagtagacactggggtctacttgagggtggagagtgggaggagggagaggagcagaaaaaataactatt

SEQ ID NO: 217348 - DNA, 436 bp, Homo sapiens
tcttactcttttgcctcctccttataaagactttgtgattacatttgtcctacctggataataaggataatctccacatctcatgagcattaacttaatcacatttgcaratttcctttttccatgtgagtaacgtaattcacaatttctgggaattaggacacagccatcgtgggcggctcattattcagcctaccacaagtccatttacacttaatgtgataattgatatggttagatttaagtctgtcatcttggtgttttctctctgttccacctgatctttgtctcccttttccacttcttctgccttattttggattgagtgatttttataattccattttaatcttgtttgttgccttttgggttctgtcagtttttgcttcatatgttttgatattctaagttcatatgcactcaaattattgtatct

SEQ ID NO: 217349 - DNA, 554 bp, Homo sapiens
gcaggggttggcaaaacacgactgcgagtaaaatccatcctacctcctcttccaattacctrgtagttttactggaatacacacacacatcataaatatgtgacacaattgtcactttgggaaaaactggcttttgcatttttcagttttcagaggtctgcttgctccagaggcaacaggtacgtattgtcatttctggatggttattgtcatttttttttaacttccagcatgaaaatgaggacgagtttgtgtgtgtgtatgtgtgtctatgcgtatgtgtgtgtaaaaatttccccaattcctaagaattgggagtcaccaagtgagtcttgatgaaatactcatcggccgccaacctcaagtctgcatcttcgtaatgtggatgattcacaatgggatgaagtgtagacagcttcacgctggccattgtaggcatggcactgcgaagacagcatctgaaaaaaaaaaaaaaggctctcttcttcaatgaaatgttttaaagaaaatcagaagttaaacttacctctaatatgtaaacccgaattaagaag

SEQ ID NO: 217350 - DNA, 554 bp, Homo sapiens
gcaggggttggcaaaacacgactgcgagtaaaatccatcctacctcctcttccaattacctggtagttttactggaatacacacacacatcataaatatgtgacacaattgtcactttgggaaaaactggcttttgcatttttcagttttcagaggtctgcttgctccagaggcaacaggtacgtattgtcatttctggatggttattgtcatttttttttaacttccagcatgaaaatgaggacgagtttgtgtgtgtgtatgtgtgtctatgcgtatgtgtgtgtaaaaatttccccaattcctaagaattgggagtcaccaagtgagtcttgatgaaatactcatcggccgccaacctcaagtctgcatcttcgtaatgtggatgattcacaatgggatgaagtgtagacagcttcacgctkgccattgtaggcatggcactgcgaagacagcatctgaaaaaaaaaaaaaaggctctcttcttcaatgaaatgttttaaagaaaatcagaagttaaacttacctctaatatgtaaacccgaattaagaag

SEQ ID NO: 217351 - DNA, 582 bp, Homo sapiens
caaaactagtgtttaaattataatccaagaaaactttccagaaataaaagaagacctgaatagggatttggaaaggatccagggggtactggaaaaaaattaatctggtatggtaaactaactcaagacatctttcagtagaactatgaaaaatgaagaaaaatttctcagagcctccagrcacaaaagtcacataatttataagggacagaagaatttggctagcatcagacttgttaaaagaaacatacaaaccaaagcagtggtgtagacgcatttttaagaaactttaaaaagtgagaaccaaggattttatatctagccaatctgtcattcaagtatagatgttataaaaaaggtttcaaatatgcaataattgaggaaataatagtaaccttcttaaatacaaaaagttttaaagagaatcatatacaggaacaaagcaaatatagtcaaatacacataaaacttacaacaaaggttttcacattatctcacaaagcaaagacagactcaacttatgctacacagggaagacaaataaaaacagattcagaaaggtgaaaaatagaatgatggcag

SEQ ID NO: 217352 - DNA, 660 bp, Homo sapiens
tgataggttatttttttattcccaagtttggggtgaaaatagtgctcacatgagaaactgaattcttggacttgtatattatttagacttggattcgaattttgtatcatttagttggtgtagaaattcccaaagtgagccaggattactaaacttccaataggaaaatataaatgtatcagattattcattgcaacattgtttgtaaatgcaaaatttaggaaacaacctaaatgcccagatataggagagtgactaaattacagtaaatccaaagcagaacactaggaaactaccagaaagaatgaggaaaatctctacraactgatatccagaataggttgttaaatgaaaaaaaaaagtgcaaaagactatctttaatacaagaagaggagatttaaaaaatatacatgtaacagttattagtactcaaaaaagcccaactaaatgaggtcaaccagaaaactagtaagatttcttacctacagggaataggcagtaacagggtgaaaagaaaggtggagagaatgggctggaaggaatagtggggaatattttctgagtataattttatatatatatatatttcttgggaatattttctgagtataatttatatatatatatatatatatatatttcttcctcattgaaacatgg

SEQ ID NO: 217353 - DNA, 625 bp, Homo sapiens
tcaagtcaatgactttgctttataccttttttaaaaaaaacctagaaaaaaagatcaaaacccaaagtaagcagaagaaatgaggtaataaagatcgagtagaactcaatgaaacagaaaacaaaaacaatagagcaaatcaatgaaaccaaaagttggttccttgagaaaattaataaaattgatatacctctaaccagactgatcagaaaaaaaaaatagaacacaaacatctaataccaggaatgraagaggaactatcactacagatactatagatacataaagaaagaaaatattatgcctttgacatcataaataaaatttaaaaattccttgaaagatacaaccaaagttcactcaagaggaaatggataacacaaatagccttatatcttattaatgaaatagaacgaagctttactaactttttatgtttttaaggaagctatgtttgggacctaagccaaaaacaaaattgcaagaatataaaatttcagttagagtgtcatattcaggcaaaatgctaaaaatctcatgtctgagaaagaaaaggcagttttaaaagtagtaataagtaaaacataaaaacaaaagttttagacagtaaaacacatatacagtc

SEQ ID NO: 217354 - DNA, 625 bp, Homo sapiens
tcaagtcaatgactttgctttataccttttttaaaaaaaacctagaaaaaaagatcaaaacccaaagtaagcagaagaaatgaggtaataaagatcgagtagaactcaatgaaacagaaaacaaaaacaatagagcaaatcaatgaaaccaaaagttggttccttgagaaaattaataaaattgatatacctctaaccagactgatcagaaaaaaaaaatagaacacaaacatctaataccaggaatgaaagaggaactatcactacagatactatagatacataaagaaagaaaatattatgcctttgacatcataaataaaatttaaaaattccttgaaagatayaaccaaagttcactcaagaggaaatggataacacaaatagccttatatcttattaatgaaatagaacgaagctttactaactttttatgtttttaaggaagctatgtttgggacctaagccaaaaacaaaattgcaagaatataaaatttcagttagagtgtcatattcaggcaaaatgctaaaaatctcatgtctgagaaagaaaaggcagttttaaaagtagtaataagtaaaacataaaaacaaaagttttagacagtaaaacacatatacagtc

SEQ ID NO: 217355 - DNA, 594 bp, Homo sapiens
tacaacattgtgttaacactgtattgtacacttacaaatctgttaagagggcagatctcatgttacttattcttaccacaataaaaaagctgaatatatatgttatacatataaaatatataagtttttataaaatataactataattttataattaataaaatataaattaatatatatgtgaggttttagaggcagacatagaatgggaaatccagcttcatcatgtagtaaatgtagaatgtggataagtaacttaattttctctaaatttaaatttcataacttgtatggtgaggctaccaccacccacaaaaaaagtttagtgggaataaatcagataatgtgcatgacrtgattcaactcaacaagtacagtatttccttttctctacagaatatatgtatatgtatatatttactaaaaataaggcaagagatttcatgtttgaaattctagctatttaaacatttcaatcagcatgattaaaatatcaacttataacacgagggtctttgaaatactgtgaagtcataagtagtatacaattatatattgtttcaatgagtatatttctttgttcctctaaacccc

SEQ ID NO: 217356 - DNA, 594 bp, Homo sapiens
tacaacattgtgttaacactgtattgtacacttacaaatctgttaagagggcagatctcatgttacttattcttaccacaataaaaaagctgaatatatatgttatacatataaaatatataagtttttataaaatataactataattttataattaataaaatataaattaatatatatgtgaggttttagaggcagacatagaatgggaaatccagcttcatcatgtagtaaatgtagaatgtggataagtaacttaattttctctaaatttaaatttcataacttgtatggtgaggctaccaccacccacaaaaaaagtttagtgggaataaatcagataatgtgcatgacgtgattcaactcaacaagtacagtatttccttttctctacagaatatatgtatatgtatatatttactaaaaataaggcaagagatttcatgtttgaaattctagctatttaaacatttcaatcagcatgattaaaatatcaacttataacacgagggtctytgaaatactgtgaagtcataagtagtatacaattatatattgtttcaatgagtatatttctttgttcctctaaacccc

SEQ ID NO: 217357 - DNA, 607 bp, Homo sapiens
ccatcattagtccatttaaaataaagactacaccaacataaaagcaagcaggatctcccaatcctttgaaaagatacagataatcagtgtttaatgaatatatgactcgaaagcaattgggcataattatctcagtgctttgcaatcaagagcttatgaatttgctcaaagcatttkctttccagattgccgctgtgtttaattctttacccttataagagtttgtgtgtgtgtgtgtatgcaaacacatatatgtatgtgtgtatatatgtgtgtatatatacacatacacatatgtaagctcacccttaatgaggtattatatagttacactttatactttttataattgcatttgtactttcatctaatgaattactattatactgtaatgatttgttggggattcacatttatttaggtgatgctgctagtgttcagtgtctggaactgtctgtagaaccacttaatgaatacaaaagaaaatccattgcattatttttatcttttgctaggctctaggaagagttaagatatggttttgacttcagggtacagctttagtctatatgaaatgatccagtcatttgatccattattatgtata

SEQ ID NO: 217358 - DNA, 633 bp, Homo sapiens
  misc_feature (1)...(633): n = A,T,C or G
tgggtggagctgaaggtatggattacctttcttccattccattccagatataagtagggaataaagaacagccttctttgggggactcaggcaatggncctgttgtgtaaacttagtgtcacccttaacttgaactggaggcaggggattttattaatattctgctctctcagacaatggtacaggagtagctgtcatctagcagtggtgcaactacttcccttggttccacacaaccatattcctatcttctgcccagatgatgccactggcaacttgatacagaaggtcaccttaaaccagactcagattggcaccatgtgaccccaggactratttttctgcaaggcaagcaggcccttccttgctttttccttggacctaatactgcctgttccctgggagttatacatgacccttgacagggacccaagccctgatagcagcagcaacatcttagcctctggtgccaatggaacaattctctgaggaagacaaggacacggttttagccattttacccaagttttcctcccaaaggcctgatacaacatcttccagtcacccaagggagatattgccaataagacagttaagcctcttaattttaagagactagctttgaccccagag

SEQ ID NO: 217359 - DNA, 558 bp, Homo sapiens
gtcagttcttacatgcatttggcaagcacttatcatacactgtaaagaggcaatatgtctagcttgttagagggtgggctgtggagtcagactcctggctttgaaccccaacttccctgccattttcaaatgacactggagaagtcgcaaaacctatttctgtctcagattcctccccagtaaaagtgggatattaatagtacctcctttgkcttgatatgaaaattcaatgagttgatatatgcagaacatcttagaacagcaactagcttagagtaaatcttcagtaattgtaaactgtgattatactatgtttttggcactgaagccacgtcgtggtgagtaagacagtgcctgacctcaagaagctcagtctagtactggagagaggtaaacaaatacttgcaaagtgtgtggtgtgagagaggtgtgacaggtgggcgggagcctgcagcaggcacatctgacccatcctaggtgtgtatggtgcagagaagttagcctaggctttctaggggcactgatgtctgggctgagtcttgcaggccagggagctag

SEQ ID NO: 217360 - DNA, 558 bp, Homo sapiens
gtcagttcttacatgcatttggcaagcacttatcatacactgtaaagaggcaatatgtctagcttgttagagggtgggctgtggagtcagactcctggctttgaaccccaacttccctgccattttcaaatgacactggagaagtcgcaaaacctatttctgtctcagattcctccccagtaaaagtgggatattaatagtacctcctttgtcttgatatgaaaattcaatgagttgatatatgcagaacatcttagaacagcaactagcttagagtaaatcttcagtaattgtaaactgtgattatactatgtttttggcactgaagccacgtcgtggtgagtaagacagtgcctgacctcaagaagctcagtctagtactggagagaggtaaacaaatacttrcaaagtgtgtggtgtgagagaggtgtgacaggtgggcgggagcctgcagcaggcacatctgacccatcctaggtgtgtatggtgcagagaagttagcctaggctttctaggggcactgatgtctgggctgagtcttgcaggccagggagctag

SEQ ID NO: 217361 - DNA, 625 bp, Homo sapiens
cctggttgggtaatattgacctctcacctatggatttgtgcacctagaaaaggatttactttatttagttaagagtttggaagaaatgctttctgtgtactgcataagtatccaatgtctgtttcttagttatgtttgctttacagttaccatggaaagaataaaaccaaatggaaaaacgtagcaacatggctgtctacaaaacagaaaagaaatcttaaagatattttaagaggcaaagatgctacttattttttgttatagacagcagccagaaggcaaagaaccttttaggatgttttccttggtatggccagacagaggagctattktgaataagtggcagcagagggcactcttcctacgggttagtttctatcctcacttctccaaggaaaacacttgttaaaatgcctgtgtatatatatgttaacaagtttatggccctttaaaaaatagatgacagattagatagatagaagatagatgatatatagatatgatgagagatgatagatgatagttgacatagataattgatagatgataattaggtagattattgatatatgggtagatacatagatgatagttgatatagataatcgatgatagatggttgata

SEQ ID NO: 217362 - DNA, 625 bp, Homo sapiens
cctggttgggtaatattgacctctcacctatggatttgtgcacctagaaaaggatttactttatttagttaagagtttggaagaaatgctttctgtgtactgcataagtatccaatgtctgtttcttagttatgtttgctttacagttaccatggaaagaataaaaccaaatggaaaaacgtagcaacatggctgtctacaaaacagaaaagaaatcttaaagatattttaagaggcaaagatgctacttattttttgttatagacagcagccagaaggcaaagaaccttttaggatgttttccttggtatggccagacagaggagctattttgaataagtggcagcagagggcactcttcctacgggttagtttctatcctcacttctccaaggaaaacacttgttaaaatgcctgtgtatatatatgttaacaagtttatggccctttaaaaaatagatgacagattagatagataraagatagatgatatatagatatgatgagagatgatagatgatagttgacatagataattgatagatgataattaggtagattattgatatatgggtagatacatagatgatagttgatatagataatcgatgatagatggttgata

SEQ ID NO: 217363 - DNA, 625 bp, Homo sapiens
cctggttgggtaatattgacctctcacctatggatttgtgcacctagaaaaggatttactttatttagttaagagtttggaagaaatgctttctgtgtactgcataagtatccaatgtctgtttcttagttatgtttgctttacagttaccatggaaagaataaaaccaaatggaaaaacgtagcaacatggctgtctacaaaacagaaaagaaatcttaaagatattttaagaggcaaagatgctacttattttttgttatagacagcagccagaaggcaaagaaccttttaggatgttttccttggtatggccagacagaggagctattttgaataagtggcagcagagggcactcttcctacgggttagtttctatcctcacttctccaaggaaaacacttgttaaaatgcctgtgtatatatatgttaacaagtttatggccctttaaaaaatagatgacagattagatagatagwagatagatgatatatagatatgatgagagatgatagatgatagttgacatagataattgatagatgataattaggtagattattgatatatgggtagatacatagatgatagttgatatagataatcgatgatagatggttgata

SEQ ID NO: 217364 - DNA, 447 bp, Homo sapiens
aaaaacagcatatctggtcaccttgaaatgtcagttccttaataactccttttgtccactcttcctccaccttaccatacacagagttctttggaggattgccattagtttctttaaaacagaataactaaaattaagaatatttaatattattggccactttaagtgtctttataaatattgaactaatacagttactttcatatagtaatttatgtgttaggaaagttacttcataagcactatctcttttgagtctatgtcataagaagtcggtggtagagtagayaatttctttagctattatctggagatgagactcagaagttagatcaaccacttgtagtattttaagtgtgagttattctgtattttagttgtgaagtgtacagaatctaattagcttttaataattcagagttcttttcacatttggctgcttttctt

SEQ ID NO: 217365 - DNA, 447 bp, Homo sapiens
aaaaacagcatatctggtcaccttgaaatgtcagttccttaataactccttttgtccactcttcctccaccttaccatacacagagttctttggaggattgccattagtttctttaaaacagaataactaaaattaagaatatttaatattattggccactttaagtgtctttataaatattgaactaatacagttactttcatatagtaatttatgtgttaggaaagttacttcataagcactatctcttttgagtctatgtcataagaagtcggtggtagagtagacaatttytttagctattatctggagatgagactcagaagttagatcaaccacttgtagtattttaagtgtgagttattctgtattttagttgtgaagtgtacagaatctaattagcttttaataattcagagttcttttcacatttggctgcttttctt

SEQ ID NO: 217366 - DNA, 447 bp, Homo sapiens
aaaaacagcatatctggtcaccttgaaatgtcagttccttaataactccttttgtccactcttcctccaccttaccatacacagagttctttggaggattgccattagtttctttaaaacagaataactaaaattaagaatatttaatattattggccactttaagtgtctttataaatattgaactaatacagttactttcatatagtaatttatgtgttaggaaagttacttcataagcactatctcttttgagtctatgtcataagaagtcggtggtagagtagacaatttctttagctattatctggagatgagactcagaagttagatcaaccacttgtagtattttaagtgtgagttattctgtattttagttgtgaagtgtacagaatctaattagcttttaataattcagagtycttttcacatttggctgcttttctt

SEQ ID NO: 217367 - DNA, 460 bp, Homo sapiens
tattagtcttttttacattgctataaagaaatacccgaggactgggtagtttagaaagaaaagaggtttatttttgctcatggttctgcaraccgtacaagaagcatgcatggtaccagcatctgcttctggtgaagaccttaagaagcttataatcacggtggaaggcgaagggggagcaaacaagagagagaaaggttccagtggggagggggcaggtcaagagagagggagcaacagagagacgagtgaggtcccagattctcttaacaatcagatctcacataaacttacagagggagaactcccttaatactgtggggcgggaaccacgtcattcatgagggttccacccccatgacccaaacacctcccactagatcccagctgcaacactagagatcacttttcaacatgagatttggagggaacaaatatctaactatatgaaaagccaagg

SEQ ID NO: 217368 - DNA, 460 bp, Homo sapiens
tattagtcttttttacattgctataaagaaatacccgaggactgggtagtttagaaagaaaagaggtttatttttgctcatggttctgcaaaccgtacaagaagcatgcatggtaccagcatctgcttctggtgaagaccttaagaagcttataatcayggtggaaggcgaagggggagcaaacaagagagagaaaggttccagtggggagggggcaggtcaagagagagggagcaacagagagacgagtgaggtcccagattctcttaacaatcagatctcacataaacttacagagggagaactcccttaatactgtggggcgggaaccacgtcattcatgagggttccacccccatgacccaaacacctcccactagatcccagctgcaacactagagatcacttttcaacatgagatttggagggaacaaatatctaactatatgaaaagccaagg

SEQ ID NO: 217369 - DNA, 460 bp, Homo sapiens
tattagtcttttttacattgctataaagaaatacccgaggactgggtagtttagaaagaaaagaggtttatttttgctcatggttctgcaaaccgtacaagaagcatgcatggtaccagcatctgcttctggtgaagaccttaagaagcttataatcacggtggaaggcgaagggggagcaaacaagagaragaaaggttccagtggggagggggcaggtcaagagagagggagcaacagagagacgagtgaggtcccagattctcttaacaatcagatctcacataaacttacagagggagaactcccttaatactgtggggcgggaaccacgtcattcatgagggttccacccccatgacccaaacacctcccactagatcccagctgcaacactagagatcacttttcaacatgagatttggagggaacaaatatctaactatatgaaaagccaagg

SEQ ID NO: 217370 - DNA, 460 bp, Homo sapiens
tattagtcttttttacattgctataaagaaatacccgaggactgggtagtttagaaagaaaagaggtttatttttgctcatggttctgcaaaccgtacaagaagcatgcatggtaccagcatctgcttctggtgaagaccttaagaagcttataatcacggtggaaggcgaagggggagcaaacaagagagagaaagkttccagtggggagggggcaggtcaagagagagggagcaacagagagacgagtgaggtcccagattctcttaacaatcagatctcacataaacttacagagggagaactcccttaatactgtggggcgggaaccacgtcattcatgagggttccacccccatgacccaaacacctcccactagatcccagctgcaacactagagatcacttttcaacatgagatttggagggaacaaatatctaactatatgaaaagccaagg

SEQ ID NO: 217371 - DNA, 424 bp, Homo sapiens
ttcttcaaaaagaaatctctagacccaggtattttcactagagacttctgctagaggtttaagaaatcattaacatcaattctatacaatctcttcyggaaaagagaagaggaaacacttcccaattctttacctcaaactagtattaccttgatactaaaaccaacaaagtaccaacagtatcaaaacaaagtaaacttcagactgatatcccttgcgaatataaacacaaaattcccaaacaaaattgcaaaaatagatttcaataatatattaattatataccatgaccaaatgaggttttcttccagggatgcaaggctgtttcaatattcaaatacatcatattacatgttaagaggcaaaataagaaaaatcacataatcatataaattggtacagaaaaaaaaatttgaaagaattc

SEQ ID NO: 217372 - DNA, 394 bp, Homo sapiens
gaattcaaatgtagaaattcttcaaaaagaaatctctagacccaggtattttcactagagacttctgctagaggtttaagaaatcattaacatcaattctatacaatctcttccggaaaagagaagaggaaacacttcccaattctttacctcaaactaktattaccttgatactaaaaccaacaaagtaccaacagtatcaaaacaaagtaaacttcagactgatatcccttgcgaatataaacacaaaattcccaaacaaaattgcaaaaatagatttcaataatatattaattatataccatgaccaaatgaggttttcttccagggatgcaaggctgtttcaatattcaaatacatcatattacatgttaagaggcaaaataagaaaaat

SEQ ID NO: 217373 - DNA, 394 bp, Homo sapiens
gaattcaaatgtagaaattcttcaaaaagaaatctctagacccaggtattttcactagagacttctgctagaggtttaagaaatcattaacatcaattctatacaatctcttccggaaaagagaagaggaaacacttcccaattctttacctcaaactagtattaccttgatactaaaaccaacaaagtaccaacagtatcaaaacaaagtaaacttcagactgatatcccttgcgaatataaacacaaaattccyaaacaaaattgcaaaaatagatttcaataatatattaattatataccatgaccaaatgaggttttcttccagggatgcaaggctgtttcaatattcaaatacatcatattacatgttaagaggcaaaataagaaaaat

SEQ ID NO: 217374 - DNA, 395 bp, Homo sapiens
gaattcaaatgtagaaattcttcaaaaagaaatctctagacccaggtattttcactagagacttctgctagaggtttaagaaatcattaacatcaattctatacaatctcttccggaaaagagaagaggaaacacttcccaattctttacctcaaactagtattaccttgatactaaaaccaacaaagtaccaacagtatcaaaacaaagtaaacttcagactgatatcccttgcgaatataaacacaaaattcccaaacaaaattgsaaaaatagatttcaataatatattaattatataccatgaccaaatgaggttttcttccagggatgcaaggctgtttcaatattcaaatacatcatattacatgttaagaggcaaaataagaaaaatc

SEQ ID NO: 217375 - DNA, 558 bp, Homo sapiens
aattcccttgctaacccacactaggcatttaccgactgactggtgaacaatttgagctgagttctttaccattgtgtctagtggcatgacccgtataattaaatgcttgtttctgttctccttgcacatggtttttctttttaatttattttgggttatttgattgtcctgtgacctcagctccctgaccacttcaggaaaagttgtcaatttgaagactgtctggcttttgttgttgttgctgctgacattgctggaaggccatgagcaatgttctttttggctttctacatccaagggaaagctgacccaacatgattaaatccaactctccattttctccgtgtttatacttgggaatctgattatagctggagaaacacaattctgttggctggttttgttctcagttcaagaccatcaacctcaaatgaagcccttggtgctgcccaagaaactcacattatatccctagtctattcattctcctagacaagagrtcagtaagcttttcctatagagagccagacgataagtattttaggctttgtgagatag

SEQ ID NO: 217376 - DNA, 493 bp, Homo sapiens
agttgcaaaacattttcttgatgtttgttcctgcaaaaaacattaaaaataataactcagctgaactcatgagtcagttgaattaytgtctttgggttttctctctgtcattgtctgtttgtctctctctattaatctttttctctcaacttctctgtctctcataccctagtgagaaattagagagcatcatttcaagtgtcagttaatctgaagtgaagcattatgggattattaataaaccaggactgaatttcactgagatttagaaagaggaagttacccagtaacctccatttcattacatatcaaagtgttttctactttggtagaagagaagtgacctctctcttcactcaggtagggagtcccagaaaaccagagccccagtgaagtccatctagaggaatttttcacacgaccaacagataaattttctttccaagtaaagccaagtgctgggtccagggtgctaggctatcaacacaagcac

SEQ ID NO: 217377 - DNA, 391 bp, Homo sapiens
atggcgtgctgttaagtcaccctacctggcacacagaacrtatgagcagttagactgcggatgggagaagggaggaggctgagaaagctcatgctcacagccatctcggcctcctgcctcccgccccccactgcgtcttgcctgttgcctgttgcctctatgtttagacacatctaggacaaaaataggtgctgcctggcccctgtcagctcacactgagatgctggtggacttttatatcactccaaggcacatgggagggagcagatgggactgaggaatgcagaatgctcagaacacagtgaagttgggctggccaacagatggaccctttcagaatgggctccaatgttgcttagcaacagcttcaccagggctgggcttctactgg

SEQ ID NO: 217378 - DNA, 462 bp, Homo sapiens
ctgaaacaatgtgcctactgaacaattaactctctttttccaccccctaagtctctggcaaccactgttctgtctctgaatttgatactgtaagtacatcatgtaagtggaatcatacagtatttgtcctttaactggcctatttcactagcrtaatgtcctcagagttcatccatgttgcagcatgtgttataattcccttcctttttaaggctgaataatattccattgtatgtatacaccacattttgtttatccactcatatgttgatggcttccaccttttggcttttgggaatagcgaatcgtgcagtgtacatggctgtacagcttatctgtttgagtccctgctttcagttctgggtatatatcaagaagtagagtttatgtatcaatttttaattttttgaggaaacactgtgtggtgtttgtttgttttggtagagatggggtcttgctatg

SEQ ID NO: 217379 - DNA, 462 bp, Homo sapiens
ctgaaacaatgtgcctactgaacaattaactctctttttccaccccctaagtctctggcaaccactgttctgtctctgaatttgatactgtaagtacatcatgtaagtggaatcatacagtatttgtcctttaactggcctatttcactagcgtaatgtcctcagagttcatccatgttgcagcatgtgttataattcccttcctttttaaggctgaataatattccattgtatgtatacaccacattttgtttatccactcatatgttgatggcttccaccttttggcttttgggaatagcgaatsgtgcagtgtacatggctgtacagcttatctgtttgagtccctgctttcagttctgggtatatatcaagaagtagagtttatgtatcaatttttaattttttgaggaaacactgtgtggtgtttgtttgttttggtagagatggggtcttgctatg

SEQ ID NO: 217380 - DNA, 462 bp, Homo sapiens
ctgaaacaatgtgcctactgaacaattaactctctttttccaccccctaagtctctggcaaccactgttctgtctctgaatttgatactgtaagtacatcatgtaagtggaatcatacagtatttgtcctttaactggcctatttcactagcgtaatgtcctcagagttcatccatgttgcagcatgtgttataattcccttcctttttaaggctgaataatattccattgtatgtatacaccacattttgtttatccactcatatgttgatggcttccaccttttggcttttgggaatagcgaatcstgcagtgtacatggctgtacagcttatctgtttgagtccctgctttcagttctgggtatatatcaagaagtagagtttatgtatcaatttttaattttttgaggaaacactgtgtggtgtttgtttgttttggtagagatggggtcttgctatg

SEQ ID NO: 217381 - DNA, 562 bp, Homo sapiens
ttcctgggctcaagtgatcctcctgcctcagcttcctaaaatgctgagattataggtgtgagccactgtgctcagcccttttctcttatcacacataataagaaatacattttacattgcaattcagtacacacacacttaataatacttacccttgttatgtgtgatatgctattactttctattatttttatttatttattttttttagacagagtcttgctctgtygcccaggctggagtgcaatggcatgatctcagctcactgcaacctctgcctctcaagttcaaatgattctcctgcctcagcctcccaagcaactgggattacaggcgtgtgccaccatgtccggctaatttttgtatttttaatagagacagagtttcgccatgttggccaggttggtctcgaacttctggcctcaagtaatccgcccaccttggcctcccaaagtgttgggattataggcgtacagccacacccaaccaactttctgtttattatttaataaatgcgaatcatgacccactaaatttatttcacaatctgctaatgggttgt

SEQ ID NO: 217382 - DNA, 562 bp, Homo sapiens
ttcctgggctcaagtgatcctcctgcctcagcttcctaaaatgctgagattataggtgtgagccactgtgctcagcccttttctcttatcacacataataagaaatacattttacattgcaattcagtacacacacacttaataatacttacccttgttatgtgtgatatgctattactttctattatttttatttatttattttttttagacagagtcttgctctgttrcccaggctggagtgcaatggcatgatctcagctcactgcaacctctgcctctcaagttcaaatgattctcctgcctcagcctcccaagcaactgggattacaggcgtgtgccaccatgtccggctaatttttgtatttttaatagagacagagtttcgccatgttggccaggttggtctcgaacttctggcctcaagtaatccgcccaccttggcctcccaaagtgttgggattataggcgtacagccacacccaaccaactttctgtttattatttaataaatgcgaatcatgacccactaaatttatttcacaatctgctaatgggttgt

SEQ ID NO: 217383 - DNA, 592 bp, Homo sapiens
tgaaacattcctccctttagctcaatcacccggtcacaagaatctgcrtaacatctcaaactacataccatggcacacagaaagttacatatcgaggaaagaggccagaggaaccttaccccttttcatttattttttaaacttattcaacttcccttcactctcatgttcactactaagagtatgcatcttaagtctatttctttttcttttctttctttcttttttatttttgttttgttttttgagatagagtcttactctgtcacccaggctggagtgcagtggcgtgatctcagttcactgcaacctctacctcctgggttcaagcaattctcctgcctcagcctcctgagtagctgggattacagatgcaaaccaccatgcctggctcattttgtatatttagtagagatgaggtttcaccatgttggtcaggctggtctcgaactcatgacctcagttgatccacctgcctcggccttccaaactgttaggattacaggcgtgacgaccaaacccgacctcaagtctgtttcatcagcaggccctgcaggtcttgtggggatttcttgtaaaagaaaattcccta

SEQ ID NO: 217384 - DNA, 592 bp, Homo sapiens
tgaaacattcctccctttagctcaatcacccggtcacaagaatctgcgtaacatctcaaactacataccatggcacacagaaagttacatatcgaggaaagaggccagaggaaccttaccccttttcatttattttttaaacttattcaacttcccttcactctcatgttcactactaagagtatgcatcttaagtctatttctttttcttttctttctttcttttttatttttgttttgttttttgagatagagtcttactctgtcacccaggctggagtgcagtggcgtgatctcagttcactgcaacctctacctcctgggttcaagcaattctcctgcctcagcctcctgagtagctgggattacagatgcaaaccaccatgsctggctcattttgtatatttagtagagatgaggtttcaccatgttggtcaggctggtctcgaactcatgacctcagttgatccacctgcctcggccttccaaactgttaggattacaggcgtgacgaccaaacccgacctcaagtctgtttcatcagcaggccctgcaggtcttgtggggatttcttgtaaaagaaaattcccta

SEQ ID NO: 217385 - DNA, 434 bp, Homo sapiens
tggactttatcaacctaattatcattcaaaaaaggccattagaattgtttttctttttctcttcttatgtaaatcattctcttttttagatccgttataaagaagagtttaaaaagtccaaggataagtgtacatttgtgactgacagtcctatgctaaaccatgtaaaaaatatcggtgcttttatttctgaggtaaggtatcaaaagcttgcaaactggcttgcatttatctttttcttattatatagatgaaagtctgtgcattaaagagatgaagaataatattttcaaaagcactactgaatgttagtaatagctacataattatctaatgtgatgcgctgtcatttaactcatatagattgacagattttactatgtatgcttcatayattttattatatatgtctatattttgactctaaatctttc

SEQ ID NO: 217386 - DNA, 608 bp, Homo sapiens
attattgctctttctccaaatagaagtgggtcgtcattttcccctaaattgttaactcaaaaagatgaagtcttttccatgaactatgcagatcgggctatcagcctcaggcataaactcaaagatctttgctccttgtttttttttttttcttttaaaactccacaaaggcrctacatgtttagaaagctaggattcaggtccaagctttgctacctgaggctctggctgcttctttgctgtgcaggacatttataaactacatttctaccttcctgtctgaatactttcaatttgcccatccagattcattttctaccctcctttctgttataagaggctggattgttcaagctacatcaactggttcctttaatctctggcttctggttgagtttggccaatagggagttccagcaagagattaaagggagagagggaagagtgagatggaggagtttattttcatgcttctttccaaacgcagtcacaaatagtgggctgcctcccttcactgggggcacagttatgtctgtgatgctctctgcgtattcaagaccactctttccttttccccattcaggcctagaggtgttgatgtatcgtag

SEQ ID NO: 217387 - DNA, 545 bp, Homo sapiens
tttttttttttttttttttctttttgtagtgaacttgtgtttatattctaattagttatgacatgcattctcatatttctctatacatggagaaaaatatagtcctaccaaataagttgataatccctttttggttgttttaagagtgctttaaaaggagacaaacaatttagagagagtattggagatggttttcctgctgaatttagtggaattaaagcagagaaagttttacattgacattaagttgacccaggacatttcaraaaatgtaattcctaaaactaaatttttgagcaaatgaagtataggaaatgatgagaaaaactgtggtacacgtcatgctctttatttggaataattcccttaggaaaaatatttaaattctggggcctagaatctattttctaaatgtgttagaccttaagacatttgtggtctaggtttctaactgatcatagattatagaaatgcagaaatgaaaactgacatttaaaaatgttggtattttagtgcataattctcattaataggatttgagttca

SEQ ID NO: 217388 - DNA, 545 bp, Homo sapiens
tttttttttttttttttttctttttgtagtgaacttgtgtttatattctaattagttatgacatgcattctcatatttctctatacatggagaaaaatatagtcctaccaaataagttgataatccctttttggttgttttaagagtgctttaaaaggagacaaacaatttagagagagtattggagatggttttcctgctgaatttagtggaattaaagcagagaaagttttacattgacattaagttgacccaggacatttcagaaaatgtaattcctaaaactaaatttttgagcaaatgaagtataggaaatgatgaraaaaactgtggtacacgtcatgctctttatttggaataattcccttaggaaaaatatttaaattctggggcctagaatctattttctaaatgtgttagaccttaagacatttgtggtctaggtttctaactgatcatagattatagaaatgcagaaatgaaaactgacatttaaaaatgttggtattttagtgcataattctcattaataggatttgagttca

SEQ ID NO: 217389 - DNA, 521 bp, Homo sapiens
gtttacagtagcattattcataatagccaaaaggtagaaaagtctcaaatacttattctctgatgaatggagaaacaaamtgtggtatatcgatgcaatggaatatgattcagccattgaaagcaatgaatgcagtgctgatacatgctttaacatgaatgaactttgaaaacatgctgagtgacagaagtcagttacaaaagatcccttgttttatgattcagtttttctgaagtgtccagaaaaggcaactctgtagagatggaaagtagtagattgcccacgttgggaggatggagaagtagatatgtggtaggtaaaggtcgcagggttccttgtgatgtgatgaaaatgttctaaaattgactgtgatggtgactgcaaatatctgtaaatgtactaaaaaccatcgaattgcggactttaaatgggtgaattgtatgttatgtaagttatatcccaaagtcgacacaaaaaatgaagtgggttaccttcccacccaagtctattgttttagatga

SEQ ID NO: 217390 - DNA, 521 bp, Homo sapiens
gtttacagtagcattattcataatagccaaaaggtagaaaagtctcaaatacttattctctgatgaatggagaaacaaaatgtggtatatcgatgcamtggaatatgattcagccattgaaagcaatgaatgcagtgctgatacatgctttaacatgaatgaactttgaaaacatgctgagtgacagaagtcagttacaaaagatcccttgttttatgattcagtttttctgaagtgtccagaaaaggcaactctgtagagatggaaagtagtagattgcccacgttgggaggatggagaagtagatatgtggtaggtaaaggtcgcagggttccttgtgatgtgatgaaaatgttctaaaattgactgtgatggtgactgcaaatatctgtaaatgtactaaaaaccatcgaattgcggactttaaatgggtgaattgtatgttatgtaagttatatcccaaagtcgacacaaaaaatgaagtgggttaccttcccacccaagtctattgttttagatga

SEQ ID NO: 217391 - DNA, 521 bp, Homo sapiens
gtttacagtagcattattcataatagccaaaaggtagaaaagtctcaaatacttattctctgatgaatggagaaacaaaatgtggtatatcgatgcaatggaatatgattcagccattgaaagcaatgaatgcagtgctgatacatgctttaacatgaatgaactttgaaaacatgctgagtgacagawgtcagttacaaaagatcccttgttttatgattcagtttttctgaagtgtccagaaaaggcaactctgtagagatggaaagtagtagattgcccacgttgggaggatggagaagtagatatgtggtaggtaaaggtcgcagggttccttgtgatgtgatgaaaatgttctaaaattgactgtgatggtgactgcaaatatctgtaaatgtactaaaaaccatcgaattgcggactttaaatgggtgaattgtatgttatgtaagttatatcccaaagtcgacacaaaaaatgaagtgggttaccttcccacccaagtctattgttttagatga

SEQ ID NO: 217392 - DNA, 556 bp, Homo sapiens
aaaattctctttcatttgcaccattacccattattttcagtctggtatttttttaaaaagcaattagccgcccctaactaatataactcttatcattgaatgcctttcttgtgcccactgagtttaataaatggttctcactgggtatttttrtctttttttcctctgatttatgtacactctaggaggtggtttcaatgactacttaggctacttacattctctataaagtgattttttcccctcttgagttttgtatctttctccttgttggtagtttccttcctataattctagttttatgcatgatatatctgtaatatgatttgaaataaaatgggaaacataaggaattttaccccagaaaattaaaacagagtgaatatagactggataaacacatattatggcctttccacttgtcttccccactctgtacaccggaaagataagattttaaaaaatattacattaggggtaaaatagttctggtgtgtgaagaagataaatgtaggtccggaacaatcagtctagacttttagacctttttaacagc

SEQ ID NO: 217393 - DNA, 424 bp, Homo sapiens
gttactcatttaaataatttatttttcaatcagggacatcagtttgatgattaatactctgcattcgttttctccttttaagaaacctgaaacaaacaggcttgcgcagtgtatatataattcatttaggtgttgaagtctgagcctacatttgtaagagaaratttcaaacgagccataattaatatgtcactttaggaggagcagtgggatgagggggtggaagtaaatggatctacctgatgttcttgcagtgtatgcgtggaaaggagaaattaaagttaatgcacaaagaaaggatcagctttgcaagctcatttctttgagttcatgccaaagtaaataggtatatctgtggtatctccttctggaggtgtggaaagtgtaggttaagtgtgatggactgcagcacatttcaggagag

SEQ ID NO: 217394 - DNA, 552 bp, Homo sapiens
gaatgctaaggtaaagagcatttacttaatttgagggatattgggcatatttgagtagatagtgatgaaatcatagtcgtgttgcaccactagtggccaggatttgggcatcaggacagtgtgaaagaagttaaaccagagttttatgtctttagaagcagattaaggtaggggtagttatataacagttggaaagaatgagaaaggaaatgaaagcccwtatataaaaaaaagattgaccaacctcagacagcttactggatgaggagggaaaatacaaagatgcagtctagaattctgagtctggcaagcattaaagctttgggaaaattaaatagatatcaggaagtcacatgaggaaagaaattgcaagggtaagttgaatattttgattttagaagtattgagcttgagatgtctggccattattcaggtggccagacatcccaagcaaactcaacccacacagctgaagaaaaggaggggatatagttcaagagagaatcagcatgaaaaccagagatttatgagttaaatgcatccaggtaatag

SEQ ID NO: 217395 - DNA, 481 bp, Homo sapiens
tgtaagcagagggaaataggaggagtrtgaactttgtgatttcacagatctgggtctggaaagcagtgctctttagcctcaactttctcatctgtaaaattagggacaataataccaccttttgagaattagaatacatctaaagatcctggtacgttatagatcctccatatatatcagctaatattattagaaataagtactatgctattttagtaaatgagaaaaaactcaaaaatggtccctcttctatggaacagtgtaagtggccctctgtgctggtcttcatggatgatgttcacagtatgtactagcacaacaatttaggcattattacatgccaaactaacttaaaacattaaactataatgaaaagatgattgaaattcattaatgcctgtagagtatttcttataaaaaaagaggacacctacctgtgaccagttcccaactatcaattgtcattcgattaaaaataatc

SEQ ID NO: 217396 - DNA, 569 bp, Homo sapiens
tagggaaaaaaagtcttttatggcaagctggtcattgtccatgacaaacagaagccaagagctggtaaactaagttctccctaccactgagattaaaagttcaaactttcgctacatagaacactaggaatgaagaggcttccattcactgccctaaaggagaccagcattcaccagcagaataccacaagcttgcagatgtgaaccacgatgtcttccaccacgtggggaattttcattgcacagccagacagaagtttagctggcaccaaaaagttaagagaacaataagataaggggatgggggttgggagcagggaagagcyccttagaaatcggcagctagaagaagagagcaagcagaacactcagagtattcagctccttgtaaagcagaattgcatatggagactaatgactttatctaccaaaaaccgaacttgaagtggcattgaaaatttttcaatgacaacattggttaaaaaaaatacctaactaggaagaaaaaaatctaactaggaaacatagctattgagtttcaaagttcaatatagaacttgaaagcaagt

SEQ ID NO: 217397 - DNA, 417 bp, Homo sapiens
ggtgaaccttattgtttttatttggatttggaaataaaccaaaataggattgatctgaaagtgaaagtgactttaaatgcccaccctctactcatatcaatagaaaaatctatattggtagctaaaacattattggataatattttgttgttgttcggcttgtgttttttctttttctttttttttgttatctcaccactcacacattaactttcattggtttcagtatcatattctcattgagtaactgcttctcaagttggaatgagayagttatttcatcattttctaaaatttcttaaatagccaaatagctctaactttaacacaatgataaatgtttcactatttcacaattatgtgaaacaacaagctataaaccaacgaagcatctacagagcatactcaaatatttcg

SEQ ID NO: 217398 - DNA, 566 bp, Homo sapiens
ctctgttttctcttagggacaccgagcttgatgtgatctgagtgaagctcttgctaggaccatgtgatgggcatgcgaccaagcactaagtgactgacgcactcattcgatggccacagtgactggttcagagatggacacatgactaaagcttgtccaaccagagtgaatcagccttggtactcttgtaagcactttyagacaagagatgctgttttcacagaacacggaattgtgaggtagtgagattatggctggaagcaccaccttgctgcaaaatggaacctgtacatgaaatcataacacagagactagcaagggctaactaagggattaagagatagtaggtcctagaaattggtttgaacacccggatcaaaataaaacttgaagccaaatgtactccggactttttggttatgagagtaaatggattccactctgtcacttgcagaaagagttttactcatgtacatctccaggtgactacataaaaagatactactgattgacttagtctctatagtcactctatagtcactcctagggcctacaatatcattgct

SEQ ID NO: 217399 - DNA, 443 bp, Homo sapiens
agcaaggtaagcacagaaagagtatacaagtttkctggctgctggtgcttgggagacatagtttcccagcttcataatcttattaatgtattcaacaaacattgttaagtgctattgtgcctgaactgtactatatactggaaataaaatatagtgcctgtctagcccattggcccaagagacctgtctcctagtccataatgtaccatcatgcacattcagagatagaatgacaagttgctataaaactggagatcaacaactatactatgggactgatagaccataccagctatacaagctagctctattccagagatactacatatacatatgttacatgtatatatcacacacacacacacacacacacacacacacacacacacacacacagagcattcaattcagcaaggaaaagaaaaacagtaaaaatattgacc

SEQ ID NO: 217400 - DNA, 564 bp, Homo sapiens
gcttcatgcatggttatttccaactcattaaacatctttagaaaaatacacaaatgccttcaaagcaatggcttaaaaggatccattcaagcttttgaagtaagagcaaaagagtgggctactataaaaagtgagaaaagctaagtgctattaactgtgatcaggtgtttaatctacaacagataacacattcccagatatagacttggctacaatttttatttagaattcatggaatgtatacttgtgtttattcatttactcagtcatttattatttcgataagtatttattgagaatctataatgtgctagtcactaaacagatagctggaaatataatagrcaaagcccctgccttcctggagtttatattctagtggggcatgatgggtacacataattaaaattgcatataaaaaacaaagataggtagcattaagtatggtgaaaaaaataaagtggagttgtgggactaggagatacagagaatactattttaaatagatgatcaaggaagacctctgagaagaagtggccttttagtagaaacccggataaagag

SEQ ID NO: 217401 - DNA, 380 bp, Homo sapiens
aaattatttctcccagagtgagtggcccaagagagaaaacagattctctgagagagaacaagatagaaactccaatgtgtttttaacttaatttcaaaagtcacttccatcacttctgtggtattctattggtcagaccaatactggtacaatgggagagtggtatgtacaaaggtatcaataccaggagtggggtattgggaggcatattgaaaaygggctatatacagcagaaaatgtacttatacaatggagttacacaatagaaaattgtcaattcaaccactgactaaatgggagactaatactatcttgatattcttcatggtcaaacaggatcagatttctcataataacaaataattttaataggaatggat

SEQ ID NO: 217402 - DNA, 439 bp, Homo sapiens
aaaataatgtcctgagattcccagcatccttagacctaagtggcactagctgcacccagggggaggatgaacccartggcttccatgcatgacaagtcaggcacccaaatcctgaagagcactactgaaaaatatgtttgtgattacaaaagtaatagcttctcattttttgtaatggagcaaaaagaaatatcaccacccaaagacaacccctgttaatatttgtactttgttagaactgcagttgagatcatactgtatattgtataacatctatatattttttatatgttctttatcaagcatataagaaacttttccctcctttataatgacttgatattatcctaatgaaattgccattgggttctaaaattttactgttcccctattattgggcatttgagttgtttccaattgcttgctgtaacagataata

SEQ ID NO: 217403 - DNA, 590 bp, Homo sapiens
aaaagtctgaaagagcaaaaacagacaatataaggtcacacctcaaggaactagagaaacaagaacaaaccaaacacaaacccagcagaagaaaggaaataaccaagatcagagcagaactgaatgaaatcaaacaaacaaacaaacaaaaaatacaaaagataaatgaaacaaaaagctggttctttgaaaagataaataaaattgatagatcattagcaagattaaccaagaagagagaaaatccaaataagcttaattagaaatgaaaagggagatattacaactgacaccacagaaatacaagagatcattcaaggctactgtgaacacctttacgtgcataaactagaaaacctagaggagacagataaattcctggaaagatacaaccctcctagcttaaatcaggaagaattagatacccygaacagaccaataacaagcagtgagattggaatgataattaaaaaattacctacacaaaaaagtccaggactagatggattcacagcagaactctaccagacattcaaagaaggattggtaccaatcctattaacactattccacaagataaagagggaatc

SEQ ID NO: 217404 - DNA, 563 bp, Homo sapiens
cctgtttttaagatgtgagtgaggcaataagagaagatttggaaaaatctcarcactccaagtctgccattttatcttactttcccttgatgcctaggaagtgatcaacgtgtcacctggctatcaacttgttcggaatcgggaacagatttctgtcaccttaggggatgagatgtttgataggaaaaagcggtgggaatcggagatcccggacaaaggcagattttccaggtaatgctgttgcagcaacatgcagctgcttggggctactcccacccagctcagcccggcctcagggacaagccaaagccgctatgcccacacccaggccactggtccctgctctggaggggccgcaagggcacctccctcctcgcccctgcttcctgatgatgcatctctccacatctgcctctctgctctgatcccatccgtgagcagatccaaggggcaggatgaagattgggagttatgtgattgatcccaaaggatagcaattgttcgtggggtgaggaatagatagaatagccataaattagtctgaatttgaggcatgcaaatta

SEQ ID NO: 217405 - DNA, 580 bp, Homo sapiens
gatcctatgactaaaacatttggtagtaagactatattatttaagttataaagcagtgttttcagttttttattgttaaatattttcatcgataggcatgatatagttatcttctgtcctcactagaggataaaggaagaggaaaattcagttatcttctcagcttctggcagtttgatccacagtaatttaagtcacagccatagtgctaccaaagcattctatattgccatatgtcttacttgcccaatggtgttagcaatatttatttttaaatggaaatatataggataatctggaatttgctctgaaaagttagaaaaactaaattagaaggcttrattgctacctacctgcagcacgtgatatgatatttggttttcaagcattttccttttaatgagcaagtatttgatgaatgcttagagggtccttactattgagctagttctgggcagaaagtagggacaacaaaataagtataaatcagagctcttgatatcaagaacccagaaactttgtgtgatcaaacattaaattacatggaatggagtcaggactacagaaataagagttaaaa

SEQ ID NO: 217406 - DNA, 561 bp, Homo sapiens
ggtggtagtgtgatgtccacactctattgcatatagatggatgggggatgaatttgcagacatcagcgttgggctccactggtcttcaacagtgatagaaattgaaattctcggctttcgacccaaagatttggtagctgtggtctattctctgtaggatccagagcagagggggtatctcagccaggtttgaacaggtggcctgtagacaaggcccaaacacctagagaaacttgatccagccattggtactaacatcaggttatgttagattgaaccacatgaaattggcatattggtgaggtcaaagaagtcaaatatcagccatttcatatgattcgatctaataattcctgcaagctaggttcagatttattataaagatgggagggcagtaagtggactctatakcaaaatgcagggtgccctgatctgtactcattaagtgtttatggattaattatgctaaattagaagactcgttaggtgcattagtccattttcatgctactatgaagacataccagagactggataatttataaaggaaagaggtttaat

SEQ ID NO: 217407 - DNA, 621 bp, Homo sapiens
ggtcaatttaatagtgtttagtatgttcacagttgtggggatcatcagaacctcattttagagcatttttgtcaccctcaaaagcaaactggccaggcacagtggctcatgcctgtaaatcccagcactttgggagtccaagatgggaggatcacctgaggtcaggagttcgaaaccagcctggccagcatggggaaactccgtctctactaaaaatacaaaaattagctgggcatggtggtgggctcctgtaatcccagctacttgggacgctgaggcaggagaatcacttgaacctgggaggcsgaggttgcagtgagccgagattacatcactgcactccagcctgggcaacagagtgagactcagtctcaaacaaaacaaaacaaaacaaaacaacaaaagaaaactcacacccaatacaggtactcctctctccatcctcctagttcaaggcaaccagtaatatactttttgtaatgtatgtatatataggtatgctaattttgtactttttatataaatggaatcatctaatatgtaatccttttgttctttaactaaccacaatgtttttaagatgtatccatattgtagcatgaatcagtacttcattcctct

SEQ ID NO: 217408 - DNA, 621 bp, Homo sapiens
ggtcaatttaatagtgtttagtatgttcacagttgtggggatcatcagaacctcattttagagcatttttgtcaccctcaaaagcaaactggccaggcacagtggctcatgcctgtaaatcccagcactttgggagtccaagatgggaggatcacctgaggtcaggagttcgaaaccagcctggccagcatggggaaactccgtctctactaaaaatacaaaaattagctgggcatggtggtgggctcctgtaatcccagctacttgggacgctgaggcaggagaatcacttgaacctgggaggcggaggttgcagtgagccgagattacatcactgcactccagcctgggcaacagagtgagactcagtctcaaacaaaacaaaacaaaacaaaacarcaaaagaaaactcacacccaatacaggtactcctctctccatcctcctagttcaaggcaaccagtaatatactttttgtaatgtatgtatatataggtatgctaattttgtactttttatataaatggaatcatctaatatgtaatccttttgttctttaactaaccacaatgtttttaagatgtatccatattgtagcatgaatcagtacttcattcctct

SEQ ID NO: 217409 - DNA, 398 bp, Homo sapiens
agtgaaaagtattttgtttgctttcataaaatccattacttccttttcccgacagttctactctaagtttcctttggaataaaaaatgcaacctttcccttctctcagtcaaatggtcccagctccaagagccccctgattggaataaaccaataaragattgtcttaggagtgacccatagccaatcagagccaatgagatgtggtaagtcatctgtgggatttttgggaaagagaagtcttctgtatttttttgtattggtcattgtgataatgtaagcccagagcaactggaagtctgacaatggagacacaacagaggatggagtccaaagagatgcatcaaaaaacagcatttgagccctgtagccaaccaaccttttaaataatatgaagta

SEQ ID NO: 217410 - DNA, 550 bp, Homo sapiens
ccttttaaataatatgaagtaacagattaattttggtttaatctagtagatctcaattgcaggtaattttgtcctccagggaatattgggacatccttggagacattttttactttcacaactgaggatgtgagtgggggtcagtgaaggagttgttatttgtatctagtgggtaatgatcagggatgcaggtaaaattcctgcagtgcccaggacaggcccagacaacaaagaattacttggcctaaaatgaatgtcaatagtgctgaggctgagaaattccagtttagaccactttgagctaaattatctgtcatttayaaaattaaagatcctacataatacaaaggctctctgtggagaaaagtcccatctgcaaatcattgactccattaactttttagattaaaaaatagtaagtcaaatcacatcaatcctgtgctctaaaacacccagtggcttcccatcccctcagtataaaatctaaaatacttgttattgcctatatcaggaattggcaaacttgttccgtaaaaggcttgatattaaa

SEQ ID NO: 217411 - DNA, 488 bp, Homo sapiens
tgttaaaacaaaacaaacacaatatacacacaaaacaaaatgtataccgaaccaaagtatttaagcatatagatatattttaaagagacagaaactgagccaaattttcttagatgaaagtagagttctgaaaatatgcatatcaaactttcaataataaaatctacaacgaggaaaacaggttttaagtatccaataaattttataaattcatacactaatgaagtggtatgcttgtaaataagctctctaaaagaaataaaactgaataaagaaggaagtaaacccttgatttgtagtgtttacctgctttcaggtacaactctcactatatctgatttcaagttatcaatggcttaacaagcagctcacaaaatttctgaatctttaataatcaactttcataagccaasatgagataactcaaccacaccactgttactcttttagcaataccccaggtaagattcagaatatttgtatgacca

SEQ ID NO: 217412 - DNA, 504 bp, Homo sapiens
tattttcaccttattaaagttggcaaacctggaagcaataagctattttgtagtggttactgatttaaacagacaagagtaaaaaaccatgacaatttctgcagttcatgtcagtaaagcaaaaaaagtttgtaataagaaataagaaacttgtacataatacattttaaatctctttgtcaaactctgttaacatcttgccatgactgctagatattcatgaaattttcatttgcttgagtaagttaataaccatgtgggaataaatctgtcarctgatgatactatattgatcaggtagataaaagagcctctgctttccaaaactcaattgccaagttttctttccacggttgaattagcaaggaacgtttccattgtgatttttttcaagctgaatatcatgactggtaatataaatgcaaagaaagacattgttcagaaaacgcctcagagggctatgtttaagctgtgactcctctgcatttcagacaaggtgttgat

SEQ ID NO: 217413 - DNA, 628 bp, Homo sapiens
ggtgagtggtaagaaaatctaatttatgtaagtatcaaatatggttatggttgtagaatccctttttcttagcaagaagctactgctattacttggctctaaataaagtgtcttaaaaagttatgttaacttttctcttgttctgttttttttaaatagttttaggatgtaatttcaggaagccaattaattatattcatgagaaaagttactaactttcaattggcatataatatttgatttatgataatacagacctatatccaaaataccttctagatagtatatgattgattgccttttgtcgattatgagctattcatttggctagaggtcaacagtagaacacacaatctgtcaggtcttcttgcaagacttttattttctgayatgcacatatgattttttttcctcaaggcaaataatcagtgaatatgaatggaattaaacaatgcttttaataatcttgtaaaaattttgaaatatagcagaaaatattatatgatcattataaaaactataatattaagttggtgcaaaggtaattgcaggttttactattaaaaataatggcaaaaccacaattacttttgcaccaatccaatactacatatactattgctgtgtg

SEQ ID NO: 217414 - DNA, 474 bp, Homo sapiens
agagaagtattcctattttctactttttaaggtatctgccatttaaagtcatatttccccaaaaagttatcataacattttatgtatatagcttttatcacatttaatatagagatcatattattgttacgctaatattttctcccctgctatactgccaacttattaagtgacaataacacagcttatcagtttttaaactcttattgtccaacacggcacctcactttcagctattgcttattgtataaatattagacctgaatcaaggattgtacaggattttagccaagttattaacagaaatgggaatagagtcctaatctccaatatccctctttcattgcacagagccattggctatctagaaacagtggaaagataaatgaggagaatrccaggtactatgaccagatatatatcccagtaacatgtacagtattcgagtttctacaacactaggaaggggaattc

SEQ ID NO: 217415 - DNA, 628 bp, Homo sapiens
ggtgagtggtaagaaaatctaatttatgtaagtatcaaatatggttatggttgtagaatccctttttcttagcaagaagctactgctattacttggctctaaataaagtgtcttaaaaagttatgttaacttttctcttgttctgttttttttaaatagttttaggatgtaatttcaggaagccaattaattatattcatgagaaaagttactaactttcaattggcatataatatttgatttatgataatacagacctatatccaaaataccttctagatagtatatgattgattgccttttgtcgattatgagctattcatttggctagaggtcaacagtagaacacacaatctgtcaggtcttcttgcaagacttttattttctgatatgcacatatgattttttttcctcaaggcaaataatcagtgaatatgaatggaattaaacaatgcttttaataatcttgtaaaaattttgaaatatagcagaaaatattatatgatcattataaaaactataatattargttggtgcaaaggtaattgcaggttttactattaaaaataatggcaaaaccacaattacttttgcaccaatccaatactacatatactattgctgtgtg

SEQ ID NO: 217416 - DNA, 547 bp, Homo sapiens
taggtcagccttggtgagtggaagtccacgttgctgagcccatgcataacttccwtccctgccaccatggccactgtgttcatgggtctattgggcgatgacaggggtggctggggaaagagctgagtgatgtccacagaacaggtcattccatccacttgattattaaaatcctcttctgctgaggtcacccattcatgagcactcacatgggatacaaatatcttcacagtttttgaccactcagagaggtccatccacatgcctcttcctcaaatttctttgtcaccaattttccaatcatgcttcttccaagtcccagaacatccagccaaaccattggctatagcccattaatcagtatataatcacacatctggccatttctccttccaggcaaagtgcacaaccaggtgcacttcttgaagttctgcccactggaaagatttcccttcatcactatcattcagacctatcttagaaaagggctgtagtgctgcagctgtccactaccaggtggtgtctgaatatcatgcagaatcatctg

SEQ ID NO: 217417 - DNA, 547 bp, Homo sapiens
taggtcagccttggtgagtggaagtccacgttgctgagcccatgcataacttccatccctgccaccatggccactgtgttcatgggtctattgggcgatgacaggggtggctggggaaagagctgagtgrtgtccacagaacaggtcattccatccacttgattattaaaatcctcttctgctgaggtcacccattcatgagcactcacatgggatacaaatatcttcacagtttttgaccactcagagaggtccatccacatgcctcttcctcaaatttctttgtcaccaattttccaatcatgcttcttccaagtcccagaacatccagccaaaccattggctatagcccattaatcagtatataatcacacatctggccatttctccttccaggcaaagtgcacaaccaggtgcacttcttgaagttctgcccactggaaagatttcccttcatcactatcattcagacctatcttagaaaagggctgtagtgctgcagctgtccactaccaggtggtgtctgaatatcatgcagaatcatctg

SEQ ID NO: 217418 - DNA, 635 bp, Homo sapiens
ttctccagatttttgtttatgtgaattaggaaattcaagcagttccttttgagtgcagaacacctcctcatgggtcacactctcaacctcaccactaggggctcactgggactttagcctagttataggtctagaagcaaataggggtgttgggggtggctcctgagragaatcaacattatcatgcctggcaactgcctcagcagaagccatcactgttatctcaggtagtgcagggtctaactcctctggcaaaggtggaaaggctgatggcagcgtgggtcagggaggggatgttgccactactggggatggggaagctgtttcttctggcaaaaaaggtttatcagagtttacaaattcagtgtccccagcttcatcagggtcctcccacacatccccagtccaagttgcagggtcccattcttttccaatcaatgccctcactttaacagtagatacctggtaaggttgtgcatgtaccttttgttgcaggtcagccactcacatgataagagcttgtgtctgtttttccacaatttcagctctttctctacaggagataagattctcactcagagcaatctgagcagatttgaggctcagtatctgcttctgcagcagggagaaaaaaa

SEQ ID NO: 217419 - DNA, 506 bp, Homo sapiens
tttcaccttcccctcactcctctactgaccaaatgactctttttcctttgytgtccacctctctaaataacattagcatctattcagtttccaaagtcagaaataaagacataattctaactattcactttcctttattctcaaatggaaataattagcaaatcgtgccactcttattcataattttctttgctgggatgctagtctcagctacgatggcctttcacctgaatactacagtacaacagtttcctaaccctagtctcattaactcttgtcttgccttctccagttaatttttatatcagagttgcactcctttttaaaaatacaaatctggtcttgccatttttttttaagaattaatactttttaattgattcttgttgtacttagaaagaattcaagtatatcagcatggtttgaaagattcttcattatctaggccttgattacattactggcttttatatcctgccccctcctacttattcatacacattcaa

SEQ ID NO: 217420 - DNA, 604 bp, Homo sapiens
tactattttcattcagtgactttctataggtatttgttcttgcagaacctgtgctccaactagggcatcagacaaataattataacaaaatgacaaaaatattttgatagaggtaccttttagaacatgaaatagggaattatttctagatgggagacaaggaagtctttaaaaaattgttattttggcctggcacggtggcttatgcctgtaatcccagcactctgggaggctgaggcaggtggatcatctgaggtcagaagtttgagacaagcctggccaacatggtgaaaccccatctctactaaaaatacaaaaattagctgaaaattctgatccccagaattttccctcaggtaagtattctagtcacccagcattctgtttaactgataacttaattctttgttatcctaaatccttatgaaaatttgtggtccttttaatagcaacrtgaaggggactcaggaaagaaaaggacagccactgtgcaaaggcagcagccttttaggagaatgggcagaccacctggaatcatcattcatttggctaccctgctattctgggaatttgggggaagacttacaaatagaatcctacacaa

SEQ ID NO: 217421 - DNA, 537 bp, Homo sapiens
attggccagactggattcaaactcctgacctcaggtgatccgccygccttggcctactaaagtgctgggattacaggcatgagccaccgtcccaggctcttggcccttttatatacattttccatattcccagagggattcttttaaaaagcaaagaggatcttgtgatattcaccttcataaagtaattaaatggctcctggtagccttacaaatgaagtccaaaccttagcaggtatatgagccttctcataatttgtccactggcgagatctccaccccatctttctccttatctgactccagtcacaccaaattacctggaattctccaatgcccagtgctctccttcttaactatgggcctttactaatcgcagcttctttgttgagaacgatttccagattcccaccacaaccccactcacaactccactagacctggctgactcttccttcaagagctcagttcagaatacttttcaagttctccctacctgttcccaatatattaatagtttatgtgcctattatctgt

SEQ ID NO: 217422 - DNA, 537 bp, Homo sapiens
attggccagactggattcaaactcctgacctcaggtgatccgcccgccttggcctactaaagtgctgggattacaggcatgagccaccgtcccaggctcttggcccttttatatacattttccatattcccagagggattcttttaaaaagcaaagaggatcttgtgatattcaccttcataaagtaattaaatggctcctggtagccttasaaatgaagtccaaaccttagcaggtatatgagccttctcataatttgtccactggcgagatctccaccccatctttctccttatctgactccagtcacaccaaattacctggaattctccaatgcccagtgctctccttcttaactatgggcctttactaatcgcagcttctttgttgagaacgatttccagattcccaccacaaccccactcacaactccactagacctggctgactcttccttcaagagctcagttcagaatacttttcaagttctccctacctgttcccaatatattaatagtttatgtgcctattatctgt

SEQ ID NO: 217423 - DNA, 537 bp, Homo sapiens
attggccagactggattcaaactcctgacctcaggtgatccgcccgccttggcctactaaagtgctgggattacaggcatgagccaccgtcccaggctcttggcccttttatatacattttccatattcccagagggattcttttaaaaagcaaagaggatcttgtgatattcaccttcataaagtaattaaatggctcctggtagccttacaaatgaagtccaaaccttagcaggtatatgagccttctcataatttgtccactggcgagatctccaccccatctttctccttatctgactccagtcacaccaaattacctggaattctccaatgcccagtgctctccttcttaactatgggcctttactaatcgcagcttctttgttgagaaygatttccagattcccaccacaaccccactcacaactccactagacctggctgactcttccttcaagagctcagttcagaatacttttcaagttctccctacctgttcccaatatattaatagtttatgtgcctattatctgt

SEQ ID NO: 217424 - DNA, 537 bp, Homo sapiens
attggccagactggattcaaactcctgacctcaggtgatccgcccgccttggcctactaaagtgctgggattacaggcatgagccaccgtcccaggctcttggcccttttatatacattttccatattcccagagggattcttttaaaaagcaaagaggatcttgtgatattcaccttcataaagtaattaaatggctcctggtagccttacaaatgaagtccaaaccttagcaggtatatgagccttctcataatttgtccactggcgagatctccaccccatctttctccttatctgactccagtcacaccaaattacctggaattctccaatgcccagtgctctccttcttaactatgggcctttactaatcgcagcttctttgttgagaacgatttccagattcccaccacaaccccactcacaactccactagacctggctgactcttccttcaagarctcagttcagaatacttttcaagttctccctacctgttcccaatatattaatagtttatgtgcctattatctgt

SEQ ID NO: 217425 - DNA, 537 bp, Homo sapiens
ctcatgagtcaggctaacacttaataagctaacaaaaacattttatttaaagtcctggatactagacaaaaattatgggattgtcagcatctttatgttgtagcattgattagcaaaattaaaattttgaacaatcatagaaatgtgaatgagaaacacagataaaatttggtgtatatgagtaaagaatagaacaactgaaggctggaagatcagttaggaggcttaaacaactatctaggcaagatttcataatagttgaaatttgaatgatggcagtgaaaatggaaagtaaagtgcagatgcaaaagacattatgaaagataaattgtcagaacttaatgactgggccaagtgagagggatatatgaaaactatcttgaggttttggctctgagagaatggtggtrcatactacaaccagaataagaaaaatcaaatggagaagtaaatttgttaaagtttcttgacaagaaatgatgtgctctgttttcaaaacattaaatattcctgaacttggcatttgttgttctacac

SEQ ID NO: 217426 - DNA, 456 bp, Homo sapiens
aaaaaagttcagttcaatgtagatttattgaagataaattaaaattttacmtttgttatttttgcatgatagaaaacctggtatgtgtcaagtaagatgctttctttcttttatcatttttaattatgtacacagaatctatacacattacctcttctgtgatcattcagagatcattctgtgatcaattttattttacaagctcttgtctagtacttgctgtgtgtcagccactcttctaaatgttctacctagatcaacttgttaaatcttatgacagcatttgaatttaccctttttggtaatttatatgagaatattaaatagtgactctcctggcacacattggttagtaatttgagttaaactaaacatgtatgaaaaaatacatttaagtggtaatcaaatgctaccagggtggatacatcaatatttaccttaagtagagttttcgaa

SEQ ID NO: 217427 - DNA, 458 bp, Homo sapiens
aaaaaagttcagttcaatgtagatttattgaagataaattaaaattttacatttgttatttttgcatgatagaaaacctggtatgtgtcaagtaagatgctttcwttcttttatcatttttaattatgtacacagaatctatacacattacctcttctgtgatcattcagagatcattctgtgatcaattttattttacaagctcttgtctagtacttgctgtgtgtcagccactcttctaaatgttctacctagatcaacttgttaaatcttatgacagcatttgaatttaccctttttggtaatttatatgagaatattaaatagtgactctcctggcacacattggttagtaatttgagttaaactaaacatgtatgaaaaaatacatttaagtggtaatcaaatgctaccagggtggatacatcaatatttaccttaagtagagttttcgaatc

SEQ ID NO: 217428 - DNA, 458 bp, Homo sapiens
aaaaaagttcagttcaatgtagatttattgaagataaattaaaattttacatttgttatttttgcatgatagaaaacctggtatgtgtcaagtaagatgctttctttcttttatcatttttaattatgtacacagaatctatacasattacctcttctgtgatcattcagagatcattctgtgatcaattttattttacaagctcttgtctagtacttgctgtgtgtcagccactcttctaaatgttctacctagatcaacttgttaaatcttatgacagcatttgaatttaccctttttggtaatttatatgagaatattaaatagtgactctcctggcacacattggttagtaatttgagttaaactaaacatgtatgaaaaaatacatttaagtggtaatcaaatgctaccagggtggatacatcaatatttaccttaagtagagttttcgaatc

SEQ ID NO: 217429 - DNA, 458 bp, Homo sapiens
aaaaaagttcagttcaatgtagatttattgaagataaattaaaattttacatttgttatttttgcatgatagaaaacctggtatgtgtcaagtaagatgctttctttcttttatcatttttaattatgtacacagaatctatacacattacctcttctgtgatcattcagagatcattctgtgatcaattttattttacaagctcttgtctagtacttgctgtgtgtcagccactcttctaaatgttctacctagatcaacttgttaaatcttatgacagcatttgaatttaccctttttggtaatttatatgagaatattaaatagtgactctcctggcacacattggttartaatttgagttaaactaaacatgtatgaaaaaatacatttaagtggtaatcaaatgctaccagggtggatacatcaatatttaccttaagtagagttttcgaatc

SEQ ID NO: 217430 - DNA, 516 bp, Homo sapiens
gccctttgctattattgtacaatttctactccatcagctcagaaatataactataactgaggatccaaaaaaggccaagcttgattaatraatggatatccttagggtgtgaggtacagccttaattcagagtgtcctcaaaagctaacagtgtgggaaaccctcccaatagtcagaattttggataatgtccctggtcatacacattgtgtggaaatataagctagccagggtaagaatacatatgctctcatgggaagtggcaaaaatgagagattaggaataaattaatttggaggaaaataaattagaacagactgaggcacaaagttgaaaatctttgtgttgcgcattttcacacaccaaataatatcaactatggaagatgagcaaaattaccaagcagacaggatcaactggtccgttgatacagtccagtttcttttctggaaagaaaaggctagagtgcagtggcatgatcttggctcactgcaacctcggtctcctgggttcaag

SEQ ID NO: 217431 - DNA, 570 bp, Homo sapiens
aactggtccgttgatacagtccagtttcttttctggaaagaaaaggctagagtgcagtggcatgatcttggctcactgcaacctcggtytcctgggttcaagcaatcctcctgtttcagcctcccaagtagctgggactacaggcacacaccaagacacctggctaattttttggtatttttaatacagatggggcttcaccacattggtcaggctggtcttgaactcctgacctcaggtgatccacccgccttggcctcccaaagtactgggattattggttatcttaatgctggcatagtgggtgcataaacagagcagccagggtgtcaaggatagaggtggccatgagcctgatagtttgggttcccactcaccaaggctgacacagctacttccactgctgggtattcaacattccccaacaaagactactctgggatcccatctctcaaggagacaaacaagtcatcaagtggcaacttccatcctggaaggagcacttactcatcttggtcagaaacaacacatcttctatcaataattacaggtttgctgtttacgtactca

SEQ ID NO: 217432 - DNA, 499 bp, Homo sapiens
gatacgtactagggcctggtacacttatgggcctagcacctaacatcaatggtcagtggtcatggtgcaaatagatacagacaccacatgtatagaatgaggattaggacaaagcagccaatgggcgggccatggcgaatgtgaatactcactactcatgagccctggcactagtcatttgcacaaagagttgagctacatacagatgccttatcatatggatcaataaatgggctgcagacaactggcaggttttaggcagcccttctggggaatgtctatgtaggagaacatctggatcaggttacaagaaaaggatgcctgtcgtacagtgtaccatgtgaatgcaaacagccccaagtcacctcccagaaatcaggaggcagatgcccttattcatgtgtgagcawtttgcccgagcccatgggtacattataaaagcggccactgcggcgtggcacagtgtggccatagcaaaggcagtgggcaactctatcca

SEQ ID NO: 217433 - DNA, 595 bp, Homo sapiens
actttaaaagtgtaagttactgtttttatatgttgaagtacaggagaaacacataagaatgaargagtatatagattgttatgggttgaattgtgactcccaaatttcatacgttgaaattctaattcctaatacttcagaatgtgaccttatttggagacagggtcattgcaatgtaagtatttaagtggaggtcatactggagtagggtgggtctttattgcaatatgactagtgttatcataaaaatgagaaattcagatgcagacacatataaaagaatgccatgtaaagatgaagggagaaatagggtggtattatacaaaccatgtaaggcaaaggttgacgtaaaatcaccagaagctaggaaagaagcataaaacatatcctgttctgttgccctcaggaccaaccctgattacactttgatcttggacttctagtctgtagaactgtgagacaatatatttaagatacccaatttgtggtactttgttacaatagtcctagaaactaatacattgatctgaaactggtaatccacaaatctgtccatattcttgattttctaaagtagaagtgaaaagaaaaaaag

SEQ ID NO: 217434 - DNA, 591 bp, Homo sapiens
tctctggggcctctttataagggggctatttatgagagctctaccctaatgatctaatcatctcccaaaggccacatctacatcatcacatcagtgattagggtttcaacatacaaatattttttgaggtcaagggaagcacatacattcaaaccacagcactattttcttttaattttttcaagaaattgactagtattattttcctgctttacagctgaagaaacaaacatggaaaggttcatttcattgtccaggttttcatagctcataaagggcagagctgagactataaatccaacctttctaactctaaagccatcctctccccttccattcttgccagttggttattgcttatttgtaaggacaagcattattcacagtttattttacttyccagagaacacctgctgttagtttcctgaggttttttttggcagccaaagtcagttctctttgggcaattgcattcacaggtgtctccctactctagagatttttgtacacctggccataaatattctctaattttaaacattctataatccgtaattctctatcctaaatccatggcatagtgactggcat

SEQ ID NO: 217435 - DNA, 498 bp, Homo sapiens
  misc_feature (1)...(498): n = A,T,C or G
nnnnnnnnnnnnnnnnnnnnnnntcacccagacttccttgccctgagacatttgctgcatctggctaattggaaaaccaaaagataagagtatgggaataaagataaatttgagtctttgtttctgctgcttctattctgccaggctgtggttttggcagtggttgtttttctctactcaagatcagatctcttactgggtgactcctcccartgctcatttcactgcactaacatttctctcttcaggtctagctgtgataacagcattccattgttggtccctaatggctcaccatcccttactaattagttcctttgcctttcctgcgcatacatcagatatgataccttcactaaacgctattcatttaagcactgtgaacatgcatgtccatctgtgtccactgggaccctgaaggataccataggccagatgattcagaaataaagttgaaatgtgagcaatgataaggaaaggagaatttgttacatacca

SEQ ID NO: 217436 - DNA, 474 bp, Homo sapiens
ttgtttaatggcttcagatattaggaacataaaagaataagttaattattatatacaatggttaagtatcaatcttttgtatttataattaaatgcatttttcttctttatgtaatttattttaattgtaataacctggtcatatttttaagtaaacacttaaaattttataattttctcttttaatatatactacatttagtatattttaggtgaaccaacatcccagtggggaatgattttgtctttgtaatataaaacaccttatggcacaaargacaaagcaatcaaatgagaaattaattataaatatttgttttctcttgttattcttgtttgccttaaattagattatacttaattttattttacagcagtgggttttttaatctatctttttttaattcaaaaataccattagccaaaaccttactgatgttagacacaatatccacatagtaagagttttttaaa

SEQ ID NO: 217437 - DNA, 430 bp, Homo sapiens
ggaattccctcccactgtttggtaagacaggaagaggttgacaaggtgttttgtagcatcaactaagatgttttcctaatgatatagaagtargattgcatattatacatcctgttcatccagtttccacaatggatatgccacaagatataactgatgtgtcagcaaatgagtagatcataacaattgtactcagttgcttttcatagagaaaagaaagccagcagggataattcacttctggtattgtccatttgagagggtagttacaaaaaggactacggcactctgggcaaaaaaaaagtcaactgccccaatcaagatgggataaagagttttaaaactaaaagctaattttcccttcatgtttatagaccttagctaggtctcttggggcaataagggtagaatcatgcccaacatgtatgtt

SEQ ID NO: 217438 - DNA, 542 bp, Homo sapiens
ggtaaaagatattccatgttcatggattggaagattcaatatcatcaaaatgtccatactacccaaagtaatctacagtttcagtataatccttatcaaaataccaaggacattcttcacagaaattcaaaaaaaaatcctaaaatttatatgtaatatcaaaagacccagaataaccaaagctattttgagcaaaaggaacaaagctggatgaatcacattacctgacttcaaatctggtgctacagcaaccagaacaggagggtattggcataaaaacagttacacrggtaccagcatgaaaattaaaaacacaccaaaaaataatataaaaaaccaaagaaatagaatggaaaacccataaacaaatccatacagctacagtgaactcatatttaacaatggtgccaagaatatacattgaagaaaagatagtctcttcaataaatggtactgagaaaactagatatcaatatgtagaagaattaaacttgaccccactctttcaccatatacaaaaatcatattaaaatggattaaag

SEQ ID NO: 217439 - DNA, 508 bp, Homo sapiens
gagacagcactaggaggatagtgctaaaccattagaacccccacccccacatgatccaatcacctcccaccagtccccacctccaatattgggaattacaattcaggatgagatttgggtggggatacagagccaaatcataacacaggccaatacagtggagagtaactggatgagaaagagggacagaaagaatcattaaagaaggtgtttgaaaagattgctctgaggaagtaatatttgccctaattcataaggagtcagttaatgaaatggrtatatcaataaaatccagcttctttgatatcttcaagaaaatcattaaccacatgaaacatatcttaagggtactctttagcctacaaatgatggcttgcaagagagaacctgaaagtaatacttatatggtttggctgtgtccccacccaaatctcatcctgaattatagctcccataatccccacgtgtcatgggaaggatccggtgagaggtaattgaatcatggggg

SEQ ID NO: 217440 - DNA, 489 bp, Homo sapiens
ggttcaggtaaggttctttatttattgtcccaccacacttttcaaaataagaataaaaatgaaagaaaaataaaataaattccctttgcatttgagttgaaataggttgcttgtttgttgggtgtatccttcytttgtagagcatggatgtgcagccaggaatgcagactttgtaaaactctctgaagtcagcagatacatggctccactgtgagacctatagtgttcctaccatacacaagcaagtaaagcaaatggtccatgtgagggcgacatgagatagatgtggatttctgtcatcttacttgttataatttcatcctttttctcttgcatgctgtaagctagttgcacactagtttgcatactgtttataacacttttggaatatagcatgggagttttcatccaagggaggtgttgtatctgggtcatactctgaagttctttgatatagcctccaattggaacacagaaaatttcattttg

SEQ ID NO: 217441 - DNA, 395 bp, Homo sapiens
acaggggcatctcaatggtgacargctggacaggagaactgctaccatttgtaaaaacatgcaggtgacatagcatttccactaagcaccctccagctagcaacttccatttaatccaaaacaaaggaccttaatcccccataataagggggattaaggttatccctgtatgtaagtcctcagtaaaccctacgtctcattcgctgcttctaggtcttttatttgacctctcagacatggtgccattcctactggagtcaacaggggttcagcatgacagtgggtaaattacaaaacactcatgaataagagcagtggctaagagttccacattatggtgcttctcaaagtagccaggaagttgacattcaagagaaaactattgtttcaataca

SEQ ID NO: 217442 - DNA, 582 bp, Homo sapiens
ctgttattatattgaggtagttttcttctattcttaatttrttaagtgttttttgtttatcataaaagggtgttgaagttaatgaaatgttttgtctgcatcaattgagataagtatgtgtttttttcttcattctgttaatgtggtataatgcatcgattgattttcatgtgttgaaccatccttagacgccaggaatacatttcacttggttgctatgtatataatccttttaatatgctgcagattttggtttgctagtattttgttgaggattttttaatcaatatttacaacggatattggtctgcagttttctttccttgcagtctctttgtctgactttaatatcaagtaaatgctgtcctcctaaaattaatttagaagtgtttctttttcttcaactaaaaaaagtttgggaaagattgctattatttttttctttaaatgtttggtagaatttgcctgtgaagccatcaggtccagatcttttttttttttttttttttttggtgggagattttgaatactgatttaatattctcacaagtttctattcagattttctatttcttcatgatt

SEQ ID NO: 217443 - DNA, 555 bp, Homo sapiens
cagtcttctcgtttttctcttttgccccaaattagcawtcacaggcatttagaacaaaaacaaagtcttatagcaaggagaggggtcttggaaaccaggaaaggaagggagagatgtaagaaccctactgccaggtcctcatgcttgcttatttatttattgcatacccttttcacaccatcccttattctggaaaaaaaagaattctgtttattgatatgttgtgctgcataaatcaaagagccttaactaatttttgacccatgttttaacttttgatgtatcagagaagtggtttggattaccatactttttgctctatatttagactataccactaaagaaggtgcacagacatcatttaaaatttgtctagtgattcaaggaaatcagacaattttcaaaatatgcatataccacctatttacaactaagataaaattgcagttgcatgttaatttaattttccttcactttaatggaacaacaagcacaaaaatcaaaatcagattcgtctagagcagaaagtgggctcaatcttaagccaccaatgaa

SEQ ID NO: 217444 - DNA, 433 bp, Homo sapiens
ctagctgtactaaatacaaactgaatttttggagttaaaaaactctttcattacgcttaagatatattatttatcatattaataagcttctcacatcatacattgtgtattgttattgtggttatttttgtcaacaatttttatcaaatgagttctaatttttggtggagaaattttggcaactacacaaagaatgtaccaaatatcacttctgcaaactacrcatatgaacttttcaaaatccataaattactcttctctggtttggctgaagttagagaagcattgttaaataatatttactgaacactttttctaaaaaaaattgtgtgttttcataatgtgttttgatttaaaagaaagttgttattattagtgaaaacattttttgtaatgagccaataaagtcctcaaaattaaaatgaatcatact

SEQ ID NO: 217445 - DNA, 558 bp, Homo sapiens
ggaggccaaggttgcagtgacctgagatcggtccactacaccgcagcctggtgacagagcaagactccatctcaaaaacaaacaaacaaaaaaataaaaaagaaagagtaaggctctttaggggtttagaaagcccactgaagttattgatgaaaaatttaaaacaatttcaatccattatgttaagtaattttctcaaagcaatgtttgactttctaggtacaagaacagagaaaacaagtttaaacagggatgtgatgatgctagatgagttttatttgaaaaaaaaataggaggggtgggagaaagtaaggtttggcaagagagttttgaattgaagactatgagtcctaagcttggggtgaaagtaaaaaaatgcaggwggagaggaaaaatttatagttgaagttaattaaatagaggtgctgatgtaatccacatgattttgaatgggcaaggtaggaagatagaagaccatggtgagaaagcaagaaacctgaatgagcagtttgggggatggagagatttggatgagagaaaagcacagttatgactgta

SEQ ID NO: 217446 - DNA, 537 bp, Homo sapiens
ggagaggaaaaatttatagttgaagttaattaaatagaggtgctgatgtaatccacatgattttgaatgggcaaggtaggaagatagaagaccatggtgagaaagcaagaaacctgaatgagcagtttgggggatggagagatttggatgagagaaaagcacagttatgactgtagaagtgggtggctggaaaaagtgcagaagtctttgggcaagataaggtcaacaaactgagaagtgtgggtagaaaatacaatcatccaagataattgcagaaattgtttagtgtagaccaataccttgaaaggtgacatcaataaagagggatggtatggaggcactaatgactttgcactaataataatasataagtaatcataattgaaataataataataattaatatctactgattactttctcactgccaagaattaactgtttaatatgcattatctcaattaacctttacaataaactaaggctaggtcattattctccccactttagagctgaagaaactaaaattacagggaa

SEQ ID NO: 217447 - DNA, 406 bp, Homo sapiens
cagaattctaaattttttctctgtattatcttgaatctctctgagttttctcaaaacagatttttkaattctttgtctgaaatgtcacatatgtctgcctctctgggcttggtccttggtgccttatttcacttttttggtcagctcatgtttttctggatggtcttgatgttttccagtgtctgggcattaaagagtttcatgtttattgtagtcttggcagtctgggcttgtttgtacccatccttcttggtaaggctttccagttattcaaagggacttgagtgttgtgatctacatttttggtcactgcagctatatctgcattaggggcaccccaagcccagtaacgctgtgcttcttgcagcctcacagaggcacacattggtggtcatggataagatct

SEQ ID NO: 217448 - DNA, 663 bp, Homo sapiens
tttttctttaaaatctaatgattttaccatcatatttctgttggccttctgggtcattttccctcataatagtttgctttttcattatgtattttccagtaattttttttcagaataattttattgaatcatagtttgtagtacttgttctcttccattgcattaatttttttccatgaatattcctatgtaaacatgttatttttctattttgtytctctttcaatatattctctttttgaataatccctttttccttttgtttttaattgacataataattgtacatcacatatggggtacagtgtgatagtttaatgtgtatacaatgtgttaatagtcaaagcaaggtaattggcatatcaatcatctcaaacatttttggtgttgtgaacatttaaaatcctttattctagttttttgaaatatacaatacattatagttaaccatattcaccctatagtgctgcagaacaccagaactcagtcctcctatctagctgtaactttgtatcacttgatcttagccaaaaggccaagaagtgacaactttgcatcatttaaccaatctcttcttttccccctcccgctacccttcccaagctctacatgattctactcttcccttccatgagctcaaaatatttttttagcttccacata

SEQ ID NO: 217449 - DNA, 578 bp, Homo sapiens
aaactgaaaacgattggaattcaaaagtcctgcctttctctattactagtgggtctgtcaatgagaaatcacaaatagagactgaataaggcaatgtatgattgactctcccacgtgaactttcaggattgtgttttatgtttttgtggaaatgctatcacttcataaaacgtttcttttcctttccagaggctaagatgctaaacttcaattgacaatactagaaggagggaagggggaaggagggaagaagtgagggaagaagggaggagggagggaggaaggctaacaagttaaaaatcaccaaaagtagtattcttacggcagtaaataaacatrtcataacttttatatgtgaacatactgaatgtcaagaacttaaaagcctgaaattgtaccccacttacatgttaacaagttagcctttaacaagttagcttttcatagtttcatggatactggctggagatacagagctcctgcatcagaaatgaatgactttattacacacagcacagctgactgtctgaacttcgtattgctaccagttactcacatttcaagttactcactcttaa

SEQ ID NO: 217450 - DNA, 342 bp, Homo sapiens
tgtctgtgcccacatttctcgttttcataaggacatgatgagttatattggattggggcataccytactcagtatgattttatcttaactaattacatctgcagtgatcctgtttcccaacagggtgacattctgaggtacttggagttgggacttcaacatatgcatttaggaggacacaattcaacccataacaatatgtattaaatagatggatatggacattcttggagtcaacctgcagattatctactcatttgagatcatttgtctctcatagttacccagagaaattaaagacagggaagttttcatcagaagagggattgttttccacaagta

SEQ ID NO: 217451 - DNA, 515 bp, Homo sapiens
gactcatgtgtaattaaaatggtattggttagtgactaccagtacatcctctaatatctttatcaagtgtgtgctatagcaaagataaagctattttgtcagggaaattaaaataacattcttcagttgcaatgtggtgtttgatgttgggrcacccaaaagtagtgtagccatgtttttatcataagctcatgctgcttccattgtcaagcactattctgaaagtctctaatcctctaaccaggcctgctactgaggaccaaaattctctttccaaaatctctaactgattttgttgaccctaagattactaatccgtaatggcttcccaatgcttactacatgaattttacatctttttgcatctcctgtggaaagctcaactgagaaaaagcaatatttagaaaagattgttgaaggcacatggtatccatcaactttaaatatatacacacaccctgcccctggctccagtcatagaaggctgcccaaacccatcaatttatcccctactg

SEQ ID NO: 217452 - DNA, 515 bp, Homo sapiens
gactcatgtgtaattaaaatggtattggttagtgactaccagtacatcctctaatatctttatcaagtgtgtgctatagcaaagataaagctattttgtcagggaaattaaaataacattcttcagttgcaatgtggtgtttgatgttgggacacccaaaagtagtgtagccatgtttttatcataagctcatgctgcttccattgtcaagcactattctgaaagtctctaatcctctaaccaggcctgctrctgaggaccaaaattctctttccaaaatctctaactgattttgttgaccctaagattactaatccgtaatggcttcccaatgcttactacatgaattttacatctttttgcatctcctgtggaaagctcaactgagaaaaagcaatatttagaaaagattgttgaaggcacatggtatccatcaactttaaatatatacacacaccctgcccctggctccagtcatagaaggctgcccaaacccatcaatttatcccctactg

SEQ ID NO: 217453 - DNA, 515 bp, Homo sapiens
gactcatgtgtaattaaaatggtattggttagtgactaccagtacatcctctaatatctttatcaagtgtgtgctatagcaaagataaagctattttgtcagggaaattaaaataacattcttcagttgcaatgtggtgtttgatgttgggacacccaaaagtagtgtagccatgtttttatcataagctcatgctgcttccattgtcaagcactattctgaaagtctctaatcctctaaccaggcctgctactgaggaccaaaattctctttccaaaatctctaactgattttgttgaccctaagattactaatccgtaatggcttcccaatgcttactacatgaattttacatmtttttgcatctcctgtggaaagctcaactgagaaaaagcaatatttagaaaagattgttgaaggcacatggtatccatcaactttaaatatatacacacaccctgcccctggctccagtcatagaaggctgcccaaacccatcaatttatcccctactg

SEQ ID NO: 217454 - DNA, 343 bp, Homo sapiens
tatgttagctgtgaaatgctgctggagatattattcattatttcccctatataaaatgtaatatgaacwttgtcttttttatttaacacagagaatattttattggccctgagaagatgatattctaaaaaactgaatgtcttccaactttcttacctgtttttctttgtatcctagctccagaaggattaaaattaatctcagttattgctggttcttatggttactatattttactgactgtattaggccattcttgcactgctataaacaaatacctgagcctgggtaatttactttttaaaaagagttttaattggctcatggttctgcaggctataca

SEQ ID NO: 217455 - DNA, 343 bp, Homo sapiens
tatgttagctgtgaaatgctgctggagatattattcattatttcccctatataaaatgtaatatgaactttgtcttttttatttaacacagagaatattttattggccctgagaagatgatattctaaaaaactgaatgtcttccaactttcttacctgtttttctttgtatcctagctccagaaggattaaaattaatctcagttattgctggttcttatggttactatattttactgactgtattaggccattcttgcactgctataaacaaatacctgagcctgggtaatttaytttttaaaaagagttttaattggctcatggttctgcaggctataca

SEQ ID NO: 217456 - DNA, 652 bp, Homo sapiens
aattctgtaatattcatccatgaaaagatttatagtggaaataattggtaggaatcatgaaaaggtaaaaatctcacaggaatgataaaagttatatatatagtataattttcaattaaaagtgggaagctgattaatttttaaatattctttcaagatttagacaattctctaactctgtttcatattatagagtgaagaagttatatagtatgtaaaacttgcaagaatatgactagctgaaatgatactgccatggatctattgaagataactatatttggaacacatcaagcattctgatttagtatagcaataaagataaatctactttttccataacttcattttacccagaygtcctttgaaagatgtctgcagtaaaatgtccacctcttaatatgcagtgatgactcagcaatttttcttatgctctattttttttgtagtattgcagacttttgccctctcttttttttcttctaaacttagtgttttactttgttttggctttgtttttaatatgtaatagcagcatcaagcagactgtatgaaaaacataaagatcgcttttcagatataaaagcatcataaagttgtacatcaaagccagcttttttcttattttacaaatatctctcagtgtgtgtcc

SEQ ID NO: 217457 - DNA, 287 bp, Homo sapiens
ggtgaaccctgttactctcctactggacataaacaayctcacagaataccaaccacagacaagttcagcataaaatgatgataaaacaaaagaagctcatttcataattctgtgtaagtacagacaaaaacacgtttgccacattacccacaaaatgacaaacttccttatttctcaactaaaatcagggattgctacttcctgtcaatcgcagctttatcctttttccaggtggccctccttgtggataaaacttactgagaagcccaatcttagaattgctcctg

SEQ ID NO: 217458 - DNA, 287 bp, Homo sapiens
ggtgaaccctgttactctcctactggacataaacaatctcacagaataccaaccacagacaagttcagcataaaatgatgataaaacaaaagaagctcatttcataattctgtgtaagtacagacaaaaacacgtttgccacattacccacaaaatgacaaacttccttatttctcaactaaaatcagggattgctasttcctgtcaatcgcagctttatcctttttccaggtggccctccttgtggataaaacttactgagaagcccaatcttagaattgctcctg

SEQ ID NO: 217459 - DNA, 571 bp, Homo sapiens
tgctattctgtaccatgttccctaaaagcataatgctaatagaaatctgcaccttgattaatttttatattaaaaaacaagtggctaggcacagtggctcacatctgtaatcccaacactttgggaggctgaggtgggtgatcacttgaggtgaggagttcaagaccagcctagccaacatggtgaaaccctatctccactaaaaatacaaaaattagctgggcatggttgtgcacgcctgtaatcccgggcaacagagcaagactctgtttcaaaaaacaacaaaaaaagaaaagacaaataaaaaaatgataaaatattacagtgttctgaaaagccccatacagmatcagctcacacatgtacacagatacacattaccaatagacgtatgatctacacataagaaccaagagagcaattttactttaatggtactttggttcctaaaaggtcattgtgaagagtggatttcttatctaattttacttgtttttaaattttaattcctaatctaaactagctgcctcatgtacgctttcagaagcacttgatgctggaaacagacaat

SEQ ID NO: 217460 - DNA, 571 bp, Homo sapiens
tgctattctgtaccatgttccctaaaagcataatgctaatagaaatctgcaccttgattaatttttatattaaaaaacaagtggctaggcacagtggctcacatctgtaatcccaacactttgggaggctgaggtgggtgatcacttgaggtgaggagttcaagaccagcctagccaacatggtgaaaccctatctccactaaaaatacaaaaattagctgggcatggttgtgcacgcctgtaatcccgggcaacagagcaagactctgtttcaaaaaacaacaaaaaaagaaaagacaaataaaaaaatgataaaatattacagtgttctgaaaagccccatacagcatcagctcacacrtgtacacagatacacattaccaatagacgtatgatctacacataagaaccaagagagcaattttactttaatggtactttggttcctaaaaggtcattgtgaagagtggatttcttatctaattttacttgtttttaaattttaattcctaatctaaactagctgcctcatgtacgctttcagaagcacttgatgctggaaacagacaat

SEQ ID NO: 217461 - DNA, 559 bp, Homo sapiens
atcaataaagaaattaagaagaaaattgaaaattttcttgaaataaattataatggaaacgcaacatattaaaaccattttattttattttattttattttatttattttatttttttgagacrgagatttgctcttgttgcccaggctggagtgcaatggcacaatctcggctcactgcaacctctgcttcccaggttcaagcaattctcctgcctcagccacccaagtagctgggattacaggtgcccgccaccacaccaagctaatttttgtattttgagtagagatgggattttaccatgttggacaggctgttctcaaactcctgacctcaggtcatcccagagtgctgggattcacaggcatgagccactgcacccagcctaaaacttattaaatgcagcaaaatcagtactaatagaaaagtttatggcgataagtacctgcatcaaaaaagtagaagaacaatcttatgatgcatcttaaagaattagaaaaatattagtaggagaaaataaatgataaagatcagaggagaagtaagtggaattgaaacg

SEQ ID NO: 217462 - DNA, 632 bp, Homo sapiens
tgatgttgctgttacattggttcaaattttactttagtttgcccttgaagctttttggctgtccatcttatgcttgattgygttgctcacttcatcatgtaactgctgttttggcattcttttcttatctttcatttgttttactccctgaaatgtaagaatgtggcttcattgccaatattttaatagtattcagaagtatcattattgattttgatattgatgctgtttgataatggatggcaatgaatctcgtcctccggcggaaaatgcttttaaaaatgagtctaactctctggccattagggctccttgggaggccatcatttcacaagactaccgtgtagtttgagctggaggcttgttgtgctacaatttttcaagtttcctattgtgctgaatcatgcacatttttcttcagtttggtactgtgtcatgcctgtgataatttaatagttgagtggacttcatttgtaattttgctttagaggatgaaataactcccatttcaaagaccagccctaatatatctgactttttaaagttgtattcgttagttatgaagaagtgtatttttatgagtctaaaatgtaaaacacaaaaaatattttaaaaatcttaactttatatgt

SEQ ID NO: 217463 - DNA, 632 bp, Homo sapiens
tgatgttgctgttacattggttcaaattttactttagtttgcccttgaagctttttggctgtccatcttatgcttgattgtgttgctcacttcatcatgtaactgctgttttggcattcttttcttatctttcatttgttttactccctgaaatgtaagaaygtggcttcattgccaatattttaatagtattcagaagtatcattattgattttgatattgatgctgtttgataatggatggcaatgaatctcgtcctccggcggaaaatgcttttaaaaatgagtctaactctctggccattagggctccttgggaggccatcatttcacaagactaccgtgtagtttgagctggaggcttgttgtgctacaatttttcaagtttcctattgtgctgaatcatgcacatttttcttcagtttggtactgtgtcatgcctgtgataatttaatagttgagtggacttcatttgtaattttgctttagaggatgaaataactcccatttcaaagaccagccctaatatatctgactttttaaagttgtattcgttagttatgaagaagtgtatttttatgagtctaaaatgtaaaacacaaaaaatattttaaaaatcttaactttatatgt

SEQ ID NO: 217464 - DNA, 632 bp, Homo sapiens
tgatgttgctgttacattggttcaaattttactttagtttgcccttgaagctttttggctgtccatcttatgcttgattgtgttgctcacttcatcatgtaactgctgttttggcattcttttcttatctttcatttgttttactccctgaaatgtaagaatgtggcttcattgccaatattttaatagtattcagaagtatcattattgattttgatattgatgctgtttgataatggatggcaatgaatctcgtcctccrgcggaaaatgcttttaaaaatgagtctaactctctggccattagggctccttgggaggccatcatttcacaagactaccgtgtagtttgagctggaggcttgttgtgctacaatttttcaagtttcctattgtgctgaatcatgcacatttttcttcagtttggtactgtgtcatgcctgtgataatttaatagttgagtggacttcatttgtaattttgctttagaggatgaaataactcccatttcaaagaccagccctaatatatctgactttttaaagttgtattcgttagttatgaagaagtgtatttttatgagtctaaaatgtaaaacacaaaaaatattttaaaaatcttaactttatatgt

SEQ ID NO: 217465 - DNA, 400 bp, Homo sapiens
tccggcggaaaatgcttttaaaaatgagtctaactctctggccattagggctccttgggaggccatcatttcacaagactaccgtgtagtttgagctggaggcttgttgtgctacaatttttcaagtttcctattgtgctgaatcatgcacatttttcttcagtttggtactgtgtcatgcctgtgataatttaatagttgagtggacttcatttgtaattttgctttagaggatgaaataactcccatttcaaagaccagccctaatatatctgactttttaaagttgtaktcgttagttatgaagaagtgtatttttatgagtctaaaatgtaaaacacaaaaaatattttaaaaatcttaactttatatgtggaaaagctccctaaacctctatagt

SEQ ID NO: 217466 - DNA, 643 bp, Homo sapiens
cagtgcccagcagagtcccagcatccaggttcagacctagaaggagactaatcaggaagagcccaacactgcaaatcaacatggtgaccaggctgcagaagagtccaatgcccagtgtgatgcccgtgctcacccccaatctcagctgtatctccagcacctgctccttgtgaaagagcaggaagatcaccagagctccagacagcaggcctgagagaaacatcactgccttgaagcagtggtggccatagctgcaggagatgattccaaagcagcagcagcaaagggcacacaccagggcgggtgccagttcaggattgtcctggggttccaaaatgtatcttgggtctsgaagctctgggagttgttgattaagggatctgggagaagatgccacagccagagacagcaaggcttcctccatgactgaagagaaagtggtcacagacagtgtcagctcctctcattcatcgtgaatgtgttcagggtgttgggaaaccaccctgccagggctgagaagaggagggggtggaagtgctccctagactctgagccgcatccccacctggaggtcctaggcagctggggggcagttggtagaagacatttccaggaccactatgtttgttgccccctaaactgt

SEQ ID NO: 217467 - DNA, 643 bp, Homo sapiens
cagtgcccagcagagtcccagcatccaggttcagacctagaaggagactaatcaggaagagcccaacactgcaaatcaacatggtgaccaggctgcagaagagtccaatgcccagtgtgatgcccgtgctcacccccaatctcagctgtatctccagcacctgctccttgtgaaagagcaggaagatcaccagagctccagacagcaggcctgagagaaacatcactgccttgaagcagtggtggccatagctgcaggagatgattccaaagcagcagcagcaaagggcacacaccagggcgggtgccagttcaggattgtcctggggttccaaaatgtatcttgggtctggaagctctgggagttgttgattaagggatctgggagaagatgccacagccagagacagcaaggcttcctccatgrctgaagagaaagtggtcacagacagtgtcagctcctctcattcatcgtgaatgtgttcagggtgttgggaaaccaccctgccagggctgagaagaggagggggtggaagtgctccctagactctgagccgcatccccacctggaggtcctaggcagctggggggcagttggtagaagacatttccaggaccactatgtttgttgccccctaaactgt

SEQ ID NO: 217468 - DNA, 544 bp, Homo sapiens
ggatcgattttactatttatcattattttaatatgttgttttaggaaaatcgacatagaacattttttattgcaacaattaaactggaaatatgtttgtactaaaagagaaatagatggtggtttttattgcaaagccaatacaaaaaaatagcaaagaataaaaactccaagccaacaatgaagaatgtcaagtggccaaatggaaatgctacaactgtgctgatcagcatcactttccttataaaaacattcaagtaattttcaaagcatcagctaattttaaacaagtttgggagtattagaaaacttttaattgtgtttctttccatttgtgatgaaggaatttcraatgtgtttgcctgtttctatgaactcaaatcgctattattattcacatttagtgggctttcagactttcacatttcttttcagactttacttctcacagttgtagcaaagggatagcagactgatgtactctctgatgtgtagagtaagagaaagttttaaattctcttgactgactcctagttgcatttttc

SEQ ID NO: 217469 - DNA, 647 bp, Homo sapiens
gagtgagtaggataattaaggatgattgtaagttatatgacagaagattatgaggaggaacagatctgtagaggaaaggaatgagttcagtattagacacactgagtttgaaatatgtggcagtcctccaggtcaatacacccattggcagtattaaatatggatctggagctcaggagagaaattctggatttscagatttgggtaatgttagtatttagaagatagtcaaaattataagagtgaatgagattcactatggaatgtgcaaagtaagatgacaacctaaggacagcaccctggggactatcaacacttaaataagaggccattgaagagactgaatgggagtagatagccatttggatggaaatccaggtatgaaagtcaaacccttcatataagataggatgctcaatgatgtcaataatgcagaactgttagccagaataaagactggaagtatttcctttgcaccctgcttgggttttgctgggcctgatgaacacagttttctaatagcatcttatgcattaaattgtatagcatagtgatttctcctcctttctctctgtctcttgaccaactttataattttattatgtctttgtagtattccttaaatggagatataatgcttctatctc

SEQ ID NO: 217470 - DNA, 647 bp, Homo sapiens
gagtgagtaggataattaaggatgattgtaagttatatgacagaagattatgaggaggaacagatctgtagaggaaaggaatgagttcagtattagacacactgagtttgaaatatgtggcagtcctccaggtcaatacacccattggcagtattaaatatggatctggagctcaggagagaaattctggatttccagatttgggtaatgttagtatttagaagatagtcaaaattatargagtgaatgagattcactatggaatgtgcaaagtaagatgacaacctaaggacagcaccctggggactatcaacacttaaataagaggccattgaagagactgaatgggagtagatagccatttggatggaaatccaggtatgaaagtcaaacccttcatataagataggatgctcaatgatgtcaataatgcagaactgttagccagaataaagactggaagtatttcctttgcaccctgcttgggttttgctgggcctgatgaacacagttttctaatagcatcttatgcattaaattgtatagcatagtgatttctcctcctttctctctgtctcttgaccaactttataattttattatgtctttgtagtattccttaaatggagatataatgcttctatctc

SEQ ID NO: 217471 - DNA, 647 bp, Homo sapiens
gagtgagtaggataattaaggatgattgtaagttatatgacagaagattatgaggaggaacagatctgtagaggaaaggaatgagttcagtattagacacactgagtttgaaatatgtggcagtcctccaggtcaatacacccattggcagtattaaatatggatctggagctcaggagagaaattctggatttccagatttgggtaatgttagtatttagaagatagtcaaaattataagagtgaatgagattcactatggaatgtgcaaagtaagatgacaacctaaggacagcaccctggggactatcaacacttaaataagagrccattgaagagactgaatgggagtagatagccatttggatggaaatccaggtatgaaagtcaaacccttcatataagataggatgctcaatgatgtcaataatgcagaactgttagccagaataaagactggaagtatttcctttgcaccctgcttgggttttgctgggcctgatgaacacagttttctaatagcatcttatgcattaaattgtatagcatagtgatttctcctcctttctctctgtctcttgaccaactttataattttattatgtctttgtagtattccttaaatggagatataatgcttctatctc

SEQ ID NO: 217472 - DNA, 647 bp, Homo sapiens
gagtgagtaggataattaaggatgattgtaagttatatgacagaagattatgaggaggaacagatctgtagaggaaaggaatgagttcagtattagacacactgagtttgaaatatgtggcagtcctccaggtcaatacacccattggcagtattaaatatggatctggagctcaggagagaaattctggatttccagatttgggtaatgttagtatttagaagatagtcaaaattataagagtgaatgagattcactatggaatgtgcaaagtaagatgacaacctaaggacagcaccctggggactatcaacacttaaataagaggccattgaagagactgaatgggagtagatagccatttggatggaaatccaggtatgaaagtcaaacccttcatataagataggatgctcaatgatgtcaataatgcagaactgttagccagaataaagactggaagtatttcctttgcaccctgcttgggttttgctgggcctgatgaacacagttttctaatagcatcttatgcattaaattgkatagcatagtgatttctcctcctttctctctgtctcttgaccaactttataattttattatgtctttgtagtattccttaaatggagatataatgcttctatctc

SEQ ID NO: 217473 - DNA, 640 bp, Homo sapiens
tggtacatgctgttaaaacaatcatttttttgataatactagtgatctgaaaactaaggtatggaaaaataaagaaatactgctgtcaggaaatcagcaaactgtctctttataaaatacactgatttttgccactgaaatcagcatttgctacagaatgaagcccatacaattagaattttttaagcatctgaagcccccctgcctggccttggcatttatgtagctgaaagggagcattactctaaaaaatgctttctttctgtagcacatttttcattaagaccacgttgtcacttaactcatattgcttaagaataccatcctggagacaaaaacatttcaaaggaattgtaccatgacattcctaccatgtgggtcattacaaattgccttgctgtggtttaaaagcagaataatttaaacagaagcacacagtacaagctctagaactatcttcccagtagggttttaccctgcagggtacaagcaataaaaacattgagcacagagatggttttaggctgtggctcaaatcacacacacacacacacacacacacacacacacacacacacacacmcctcacattcacacctgtttccctttcttgctggaggtgaaaattggaatgctatta

SEQ ID NO: 217474 - DNA, 597 bp, Homo sapiens
caaatttcagcaagacggccagatgatcctcagagtctgctacttattaaacttacctggggaacgtaaaaaaaaaaaaaaaaatcctagtgcccaggcctcacctgtagcaatcagaacctctgggggtggggctcaggcttcagaatgattttccagctgcccaggggagggggcagggatttccatgagtagccaggtctgagagcctccactgtaagcctctgcctcccctctttcacctactccccactgtaggatttcaaaaagatccctctccagtgtcccactgctctctctccccaatctctgccattattaaattggcagaattgaggcttcacggggacagggtgaagagttaagactgagtcaggataaaatgcacatcccccatggaggggtaacactgaagctaygtccattcagctgggctttagcttgaatgagtttattggatgcttcctacctagtaacaaactgaaaatgggttgcgcatgggggtggctctgtataaagtagaaacaggaacccgttccagatgcgggggttggagttggtgggtcttgtggagttttgcttgctctgttgtggtga

SEQ ID NO: 217475 - DNA, 437 bp, Homo sapiens
gaattcttcagcgccattctggcttgcaaaaagaaaaagaaaaaaaaaaaagaaaaaagaaagagagagaaaaaaaaaaccagctactggtcagagggaatgctcttccattgccaagctcagcttgaatttaatacacaacacaacctcttaaagaggggcactgctttaaactaagagtctcttctgaaaatgtaactgatttgaaaaagcaacaggaagttgagaatattctggaaggaaaaaggctgcaacctgatacattttcttcaccccagtgtttgcaatcttgtcactctggtcaaggccacaccttyaagtcaggagggatgaagcctttgaagcaaaggatgccagtttcacttccccaagcaaaacaatgcccaggacccatcctgagcttgctgcctccctagggcctctgtggtctggttgag

SEQ ID NO: 217476 - DNA, 567 bp, Homo sapiens
ttttgcatgtcgtccaggctggtctcaaactcctgggctcaagtgatccacctgcaattccttaaatttgtatttcttcctggagagtttgtatagtgtcttgtcccaccaaaagaatgtgtgaaactgggaatattaatgttttagaactatgcagatcagctttttttttgcatatctggcaagcccaaactcctttgattttcctagtttactcttttcatgttcagatttaacttgtgaatgtactaatgtactttcttaagtaccaactctttgtctcctgacatttaagcctttagcaatgtacccataacctatatcttcaagctcatttcccatcttttcaactacattgcacttgtaacactcaatcaagctcatctacctttgtcttttttttttaacctatttaattctctattgttggaatatccttacctatacctctttcagcaatacttttcattcttgaaggctcaygacgtactttatctatgaaataatttataattctttcatataaaagtaatcttaaaatcatttaaatctctatgaaaagacaat

SEQ ID NO: 217477 - DNA, 553 bp, Homo sapiens
tttgttctactcatttcctaaaatggctcatttgtatacagcagggtaataatacaagcaggtgcttagtctgtgcaaagaaattgacaatttcctgtggatattgtctgttcacatagggtggaggcaatgatgtaaaaaccttgtggcagttgcagattctcattctggatcaaaggaagggtaaaggctatgtctgttagctaacactacagtgttatgagtacactaacactacagtgttacgagtacactaaaggtactgggtaagtagtggcctctctgggatgtgtttggctggcaggcaggtggaggaggacccttargaagtaaggaccagaataagaggagtacactgtctatgacacacagtgattgtcaaaaacagtgaccaagagggttatgaatgttcatttaaccaaattttatgtggatatctgcacagcattaacaataatcgctaagtaagtggttttgaatgtggaatgtggtgacctattttcaccaaataggttcctgaggaagctgactctgagccagagatcgacatgca

SEQ ID NO: 217478 - DNA, 527 bp, Homo sapiens
cgaattcacactggagagaaaccctatcgatgtaatctatgtgggaggtcctttaggcatggcacatccctcactcaacacgaggtcacacacagtggagagaagcccttccagtgtaaggaatgtgggaaagcctttagtcgatgttcttcccttgtccaacatgagaggactcatactggagagaaaccttttgaatgtagcatatgtgggagggcttttggtcagagcccatccctttataaacatatgaggattcataagagaggcaaaccttaccaaagcagtaactacagcatagatttcaagcacagcacatctctcactcargatgaaagcactcttaccgaagtgaaatcctaccattgtaatgactgtggggaagactttagtcacattacagactttactgaccatcagaggatccatactgcagagaacccctatgattgtgagcaggcttttagtcagcaagctatttctcatcctggagagaaaccctatcaatgtaatgtatgtgggaaagc

SEQ ID NO: 217479 - DNA, 610 bp, Homo sapiens
tggtgaaaccaagtctctactaaaaatacaaaattagttgggcgtgatggcgctcacctgtaatcccagctactcgggaggctgaggcaggagaattacttgaacctgggaagtggaggttgcagtgagccaagatcacaccactgcactccagtctgggcagcaagagcgaaattctgtctcaaaaaaaaaaatggcctcaaactcccactgaaaatgatttctcayggcattagcataatttcagactactcatcagaatgatgaagtcccatgtgaaatgacctggagtggggagggcagggaggaagctgcagccagaacagacaaaggagaagggctgggatgcctgtggagctagtggtgaaacttgtgaaccccaagtacctgagatgggtctcagtcaatttacaaagttaattttgccaaggttaaggatgcatgcctgtgacacagcttcaggaggtcctgatgacatgtgctcaaggtggtcagggcagagcttggttttatacatttttagggagaaatgggatattaaccaatctatgtaagatgaacattggttcagtcctgaaaggcaggacaactcaaagcaaaggcatgacaa

SEQ ID NO: 217480 - DNA, 506 bp, Homo sapiens
cattgaatggggatgaagggaggatgcagaccctgtsctgaaaaaggagaaagctggaaaccctgcacagggttgtcgagcacctggactcattcctggccctgagcagctcctggagaaggagttagtgaaataaacatggagtggcccactctcaccatgaacctcaagaatcctagctgcagaaaaccccacgaccccatggacatttgaattggtagagagaacttcccagtgagttggcagatacagaactccagccagcatggagcctgaaggatttggtgcataaatggctgcagtggagcaaagccaggggtgcccttcacccaaggctcaccatgctcttccaggtgactttagcctctggtggcagctggatctgtacacagcaggcctatcttgcccacaggatggggccagtctgatctgagcatgaccctgtctgcctatcccagggtcccagcctggctacacttgcttgtagtgcagccttggctacctag

SEQ ID NO: 217481 - DNA, 473 bp, Homo sapiens
ggaattccttaaagaactaaacgcagatctactatttgatccagcaatcccatgatgggttctacccataggaagtgaagtcatatcaaaaagacacttgcgcatgtatgtttattgcataattcacaatcacaaagatatggaaccaacctaagtgtccattgaccaatgactggatcaagaaaatgttgtgtatatacaccataggatactacccatcattgaaaaggaacaaaataatgtcttttgcagcaacttggatggagttagaggccatccttctaagtgaaggaactcaggagtagaaaaccaaataccatatatttttacttataagtgggagctaagctatgtgtactcaaaggcatacagagtgatataatagactttagagacttagaagggggagggtggcaaaggagtgtggrataaaaacctatacattgggtataaggtatactacttgggtgata

SEQ ID NO: 217482 - DNA, 545 bp, Homo sapiens
gctaaatatgaaacttagagactcttacctgccactacaaaagcacacttaagtacatagtccactgacactataaagcaactatacaatcaagtctataaaacaaccatctaacaatatgatgacagtttcaaattctcacatatcaatatcaagcctgaacatagatggactaaatgcctcactcaaaaggcacagagtggcaagttgaataaaaaagcaaggctcaactgtatgctgtcttcaagagacccacctcacatgcaatgatacccataggctcaaagtaaagggatggagagagatctatcaagcaaacagaaaacaaaagagcaagggctgctgtycttatttcaaacaaaacagactttaaaccaacaacaataaaaagacagggacattacataatgataaagcattaagttaaacaagaagacttaactatcctaaatatacacacatccaacactggaaaacctagattcataaaacaagttcttatagatgtatgaagagacttaaataaccacacaataattgtaaga

SEQ ID NO: 217483 - DNA, 439 bp, Homo sapiens
cctggcccattcatgcttggccattcctgcagcccctgaaagtgctcaccgtgagcggctggtacctgtcccctgggaactgcaagatgcacaggaccttgtgtacctgtttgtgatcacagccgaggaccagcgaggtagcattaccacatccacacagggcttttaccataacyggtgagtccctgccagcctaccaggggcacccactcagggaccaccctcttcttgtaggtctccagcctgtcacttcaaccccaagcccaccagcccccgcttcctaagcaattcgcaggggagctgctctgccagatctgactgccttttacagaacattgtgccctgcgtcaggggaaggggagtgcctttgccccgtctgctcctgccccgcttcatgtcacacaggggtctgggatgatttggctagcccaaactcagt

SEQ ID NO: 217484 - DNA, 605 bp, Homo sapiens
taccggttgttcctttccatgtttagtgcttccttcaggagctcttttagggcaggcctggtggtgacaaaatctctcagcatttgcttgtctgtaaagkattttatttctccttcacttatgaagcttagtttggctggatatgaaattctgggttgaaaattcttttctttaagaatgttgaatattggcccccactctcctctggcttgtagagtttctgctgagagatcagctgttagtctgataggcttccctttgtgggtaacctgacctttctctctggctgcctttaacattttttcgttgatttcaactttggtgaatctgactattatgtgtcttggagttgctcttcttgaggagtatctttgtggcattctctatatttcctgaatttgaatgttggcctgccttgctagattggggaagttctcctggataatatcctgcagagtgttttccaacttggttccgttctccccttcactttcaggtacaccaatcagacgtagatttggtcttttcacatagtcccatatttcttggaggcttgttcatttctttttattcttttttctctaaacttctcttctcgcttcatt

SEQ ID NO: 217485 - DNA, 589 bp, Homo sapiens
tgtcacccagggtggagtgcagtggtgtgatcttggctcactgcaacctccgcctcccgggttaaagcaattctcatgtcacagcctcctgagtagctgagattacaggcacgggccaccatgcccagctaatttttgtattttttgtagatacggggtttagccatgttggccaggctggtctcaractcctagtctcaggcgattcacctgcctcggcctccgaaagggctgggattacatgcataaggcattgcacccagcctctttccttcttttaaggacactagatgttggattagggcttaccctaaatccaggaccatctcatcctgtgactctttattatatctgtaaagaccctatttccaaataaggtcacattcacagttaccaggggttaggacttggacctattttggaggagacgctcctcaacccactacaggccccttctaaagctccttctgtcttcctaattacatcaaggaagaagtctctgtctataaataaaatctcattaacctctctttgaagctgaccagtctccatttttaaacccagcttcagctgacctcaggccccgggc

SEQ ID NO: 217486 - DNA, 561 bp, Homo sapiens
tccagaagaggagactgaggcagaggctttgcagacacacagaggacatgtgaggacaggtgaaggtcatggtcattgtcagccccctccccgaacttgacattcccagatctggtggacttccagccagaggagacagaaggactggatcactcaactctgccatgggtgccaggacccaatttttccctggctaactcggtcacatcctgtctgggatctccaactactacccatcccacaagtctcagctaaaacagcaattcaatggggaacttttttctgagtctccaggattgggccaggccctctccatggctctctgcccttcccctcctgcaaaacttagcacctgtatgtcactactggttcaaatatgtgtctttcgtatgytctccacgttatctgcagcatctgccaagaataataatgaatagtaaaacctaatctctattgagtgtcgatgatgcacttttaatgtgacatcttatttaatcctcactatatctgcaagactagaagctattaatagccaattttcagataagaaaatcaaagcac

SEQ ID NO: 217487 - DNA, 609 bp, Homo sapiens
catctggcatcaagaaacagtaatctttcagcaaaaactctcacttggtgtatttttctcagccttgtcacaagaccttccaatttaacctgaagacactcctgaattagtaggaagctcaacaatatttcttccctgacaaatccttgtacttcagctccagctatctctgggaatgcaaggtgactccttgttgggaaaatactgcatttgtcccttccacggtaatgggctgttgctcaccatatatagtgagatttttccaagaaagagaaatatgtcccctttgctccataacctaagaagaaaataaaaaccatattcgcccaaatagaagaaggttgaattttgcttgttattgtcagctttgagactacattgattacttctagacaaaaaaaaaaatgttgtttctaatatacagttaccctgcattaaatttatgtacttgagcttaaaagaatccaagtaaagttrtctgttcttgttgtacctgattaacctcaatacacaaatcccactaatcaatagttaatttaaaatgtggcactacctcacccctatgcaaacatgacccatcttgtatatcactaagctaaaagccatgcg

SEQ ID NO: 217488 - DNA, 548 bp, Homo sapiens
gatagcagagaacatggaggaggctgaaacttgttctgatccagctgtgatgtgatgctttgtcttacggtcctgcaagacgcagaacagagcagactgggactctaacagataaaaggcataaagtgatccgggtgatggagggcagggcagcatgggcgtgctctctcggaagcaaccttaccttgctccgcagagcattgctgtgcatttaactcgatctttcatgataaagctctaatcatcagaattctacaagaccccggccaggcatggtgactcacaccgtaatcccagcaatctgggaggccaaggcaggtgggtcacttgaggtcatragctcaaggtcatggtaaaaccccgtctctactaaaaatacaaaaattagccaggcatgttggcatgcacctataatcccagctatttagaaggctgaggcaggagaatcactagaacccaggaggaggaggttgcagtgggtcaagatcatgccactacactacagcctgggtgacaagggtgaaactccgtctcaaaaaaaaaaaaag

SEQ ID NO: 217489 - DNA, 207 bp, Homo sapiens
gaaaacctgagcatatgtcctattaatacaacttaccctcacagctctgcatgagaagaagggggaattccctcagtagaacagtcagaatggaatcacagacttgttttgagccagtcactsgtaagggggattaggctaaaatgataagctcagaatctaaaccttagactagggaatggcaaactttttccataaagaggcaaa

SEQ ID NO: 217490 - DNA, 364 bp, Homo sapiens
gaattcatcttcaacaaaaccgattcctacacagctgtgacggttggccttactgatagttctgtgaacatctgcccatcaccagggttctgtgccaactggctgagtgtccctgtaacatagactggggataaatgggttcagcagcgttgtgatggcagggacaatgggaaatcccttaattaggaactgagttttgtaattctgacagagaygatgttatttttggtgagctgtcatattacacgtgtatagtgcttaatgattttgaaagtgctttcccctacactgtctcagatgggcatcacatgagtctcttttagtgttgtgtctctttgcaaagtgtttgccagtgcttctgccc

SEQ ID NO: 217491 - DNA, 364 bp, Homo sapiens
gaattcatcttcaacaaaaccgattcctacacagctgtgacggttggccttactgatagttctgtgaacatctgcccatcaccagggttctgtgccaactggctgagtgtccctgtaacatagactggggataaatgggttcagcagcgttgtgatggcagggacaatgggaaatcccttaattaggaactgagttttgtaattctgacagagacgatgttatttttggtgagctgtcatattacacgtgtatagtgcttaatgattttgaaagtgctttcccctacactgtctcagatgggcatcacaygagtctcttttagtgttgtgtctctttgcaaagtgtttgccagtgcttctgccc

SEQ ID NO: 217492 - DNA, 429 bp, Homo sapiens
gaattcatcttcaacaaaaccgattcctacacagctgtgacggttggccttactgatagttctgtgaacatctgcccatcaccagggttctgtgccaactggctgagtgtccctgtaacatagactggggataaatgggttcagcagcgttgtgatggcagggacaatgggaaatcccttaattaggaactgagttttgtaattctgacagagacgatgttatttttggtgagctgtcatattacacgtgtatagtgcttaatgattttgaaagtgctttcccctacactgtctcagatgggcatcacatgagtctcttttagtgttgtgtctctttgcaaagtgtttgccagtgcttctgcccagcacctgcctcctcctagtgttgggggagggggygggggctggatcagcagcacgggcatcacc

SEQ ID NO: 217493 - DNA, 570 bp, Homo sapiens
ctgtccctgttttggcagttaggttctctgatgactgttgggctgttgtatacattattcatatgtctttttatatcacctactggggcaccagctggggccagcaaatactacaaacatggcaccaataaaaaagaatgtgtaatcagtctttaaaaattccttcttgtctgccaagagcggcacgtgggggtggggaatgagcagctggccagtcctgctaattcagaggcggcttttctccgaaaatcatggctgcttcactaccagcctctccccaacccctggaaagagcagatcccaggagccctggctgattttgtgagggaaggagtgtgtgtctgatgctgcaatggagagaaaaataattttttttaaatgcattatcctgcttcaataagtggggggaattatttctggctctgtctttcagaagctgaaaagaggaggaacttgttggttgttgcttatttatttttttcctcccattttgttttattttytaattcaggtataacctttattcagtaaaatgtattcatcttaaaggtgcaatttgtggcgttttct

SEQ ID NO: 217494 - DNA, 551 bp, Homo sapiens
tgctttgtctaatggaatatgagtagaagcattgtgtgtctctatcgggcataacctataagagccagcttgtgacttgctatgtctattttgccctctcccacaaaagctaaaatagtttagataaagccttctctgtcagtctggattctgaatgaggatggaaaggagcagaaccccagttagcctacaacagacatgaattgccagtgagaaaccagacttgaaatccagtgaaatctgtacttgttactgcagcacaatctagcatatcctgactgatacattatcttaataaatatctggcwtggactaataacagttttccacctgttatttctcagcttccgggtcatcttccaaactgctgccatagtgatttttgtagtgtgatcacattattctcaattctctaactcaggcgtcagcaaactttttctgtaaagggacagatagtaaatattttaggctttgcaagccatgtggtctcttgccacaaccactcaactccgctgttggagtgtgaaggcagccacaggcaaaaaataaac

SEQ ID NO: 217495 - DNA, 562 bp, Homo sapiens
cctctctttccatgtttgtctactattggaaatatggaagatgcagaaaagtaggaaagatgctgataatctcaccagtcagtgatcatcacctgttaaataaaatttgtaagaggacatttatttgaactcagctcctgtactgaacccaacagacaaaaccaatatggagccattcatgctcaatgaaactcattaacttgggagtctactcagaactgagtttgagttagttacagcagctgagctttagtcaattgcaggtggccagttgattcaaacaagatggaaacacggagctgtaaccaatgaagttgttctttttcctcactttcatttttctgcccatcgatgctgtctgaccacgtagcaggcagagcatctttgaacccatccagttcactgaaccatttatttaaaggatgagagctctgagtccagagaaaggaggtacctttgtcaaagccacattcagtatttgaacctgacctgttcagtggaaagcccaggctctgraaaacatcacccaagtcatcccagaatgcagaaacctcagactgcc

SEQ ID NO: 217496 - DNA, 537 bp, Homo sapiens
cctggggtctacatgagtggagggtgggaggagagagaggatcaaaaaaatacctctcaggtactatgcttattagctgggtgacaaaattatctgtacaccaaacccccaagacacacggcttacctatataacgaatctgcatatgtacccctgaacctaaaataaaagtttaaaaaattatgcaaaatttattcatattctaaatttccaataataaaatatttcaaccaatacaaggaaattgactaaaatttaaaagttccctcacctcttctataaatacactcttccccagaggtaaccactgttaacagctaaattcaaatccttctggcatattttcaatgcatttacatattaaagatgtatacatatgtaaagatgttttgttttattggtagaaaamtaggtatgtactgtactatgacttgctttgtcacttaagtaaaatgtcttagaaatcactccatgccagctctataggatataaatataactctaccttattgtttgtttgtttgagacagagccttg

SEQ ID NO: 217497 - DNA, 387 bp, Homo sapiens
tccttccctcttccattccaagatccacttcatttctcagttcgagtcttacctttccctgacaaaactcaaccaagagaacatgcattattttcaggtcttgtagcccctgctccaccaacaaaagactagaagctggcttcatggctggcacaggtcactaagtccctcttccctcaacacacaattactgagccttttttcacatgctaggaacctgcggcagaaagatcaacaagacagaacttgattcctgtcctgatggagcttacaatctagtgggggagaaccagcctccacccacsccccggtaaagcaagcaaataaacaaattattaagtacaaactgtctctgtttatatgcagaaaggaaacagaaaccaggct

SEQ ID NO: 217498 - DNA, 503 bp, Homo sapiens
tctcacccggtaattctttcaggtgggctttggtacaatttctgcaagatccttagaagtctcaataggattttgattgaaatattgtgaacttatatatamatttttaaataattgacaccttggcaatatctaatcccctcattttaaaaagaggtattttttaaagatatactcctcagtcaaattgtatatatttatcaatatatattacttaaatttaccattgtgattacttctaagtgtctgtgtggcagctatggatgaatcatttttctgctatgacttacagttaattattgatgataccttaaatgttttgctttaaagatttgtctatccactgcactgaattccctacagatttaaactttttttattatcttcagtttcctaggtatcaattaatataatctgcaagtaaacaattaaaagttctctatttaatagttgtagctcttatttctgttttctacattgttacattattgcaaacttccaaa

SEQ ID NO: 217499 - DNA, 503 bp, Homo sapiens
tctcacccggtaattctttcaggtgggctttggtacaatttctgcaagatccttagaagtctcaataggattttgattgaaatattgtgaacttatatatacatttttaaataattgacaccttggcaatatctaatcccctcattttaaaaagaggtattttttaaagatatactcctcagtcaaattgtatatatttatcaatatatattacttaaatttaccattgtgattacttctaagtgtctgtgtggcagctatggatgaatcatttttctgctatgacttacagttaattattgrtgataccttaaatgttttgctttaaagatttgtctatccactgcactgaattccctacagatttaaactttttttattatcttcagtttcctaggtatcaattaatataatctgcaagtaaacaattaaaagttctctatttaatagttgtagctcttatttctgttttctacattgttacattattgcaaacttccaaa

SEQ ID NO: 217500 - DNA, 503 bp, Homo sapiens
tctcacccggtaattctttcaggtgggctttggtacaatttctgcaagatccttagaagtctcaataggattttgattgaaatattgtgaacttatatatacatttttaaataattgacaccttggcaatatctaatcccctcattttaaaaagaggtattttttaaagatatactcctcagtcaaattgtatatatttatcaatatatattacttaaatttaccattgtgattacttctaagtgtctgtgtggcagctatggatgaatcatttttctgctatgacttacagttaattattgatgataccttaaatgttttgctttaaagatttgtctatccactgcrctgaattccctacagatttaaactttttttattatcttcagtttcctaggtatcaattaatataatctgcaagtaaacaattaaaagttctctatttaatagttgtagctcttatttctgttttctacattgttacattattgcaaacttccaaa

SEQ ID NO: 217501 - DNA, 503 bp, Homo sapiens
tctcacccggtaattctttcaggtgggctttggtacaatttctgcaagatccttagaagtctcaataggattttgattgaaatattgtgaacttatatatacatttttaaataattgacaccttggcaatatctaatcccctcattttaaaaagaggtattttttaaagatatactcctcagtcaaattgtatatatttatcaatatatattacttaaatttaccattgtgattacttctaagtgtctgtgtggcagctatggatgaatcatttttctgctatgacttacagttaattattgatgataccttaaatgttttgctttaaagatttgtctatccactgcactgaattccctacagatttaaamtttttttattatcttcagtttcctaggtatcaattaatataatctgcaagtaaacaattaaaagttctctatttaatagttgtagctcttatttctgttttctacattgttacattattgcaaacttccaaa

SEQ ID NO: 217502 - DNA, 596 bp, Homo sapiens
attcagttccatcagtcctatgattggtggaattttctttcagattttgacaacagtttcagtatcagcttgggttttcaaggttgtatgagttttcatttttctatgtcttcttagggtcttttaatacgaagttggaaaagactgtgtccagtatcatttttaaacaggcgccaattgatcatgttcgacatagcactatataactttttggcagtttagaagagttcgrgcattatccaagtatcagacagacctcagattgtgtattagttgagaatctttttgtttggtggaacaaaaaccccaaattaaagtggctgaagcaatcaatagaattcagagattcgcgtgactaaaacatccacaagagggcatcaggtaagacttgtgctaatggaaccaacaatatcaccaaagtcctggtatctgtccatctctcttttctgtccttcccagagtagcacgtatacggggccctgcctcatggcagcaaaatggctgcaggagcatccactttcatatcttcacactgcaccctccagggaaagaagcaagaatcatctgaaggcttctgcaaagtaaaagtgaatttc

SEQ ID NO: 217503 - DNA, 596 bp, Homo sapiens
attcagttccatcagtcctatgattggtggaattttctttcagattttgacaacagtttcagtatcagcttgggttttcaaggttgtatgagttttcatttttctatgtcttcttagggtcttttaatacgaagttggaaaagactgtgtccagtatcatttttaaacaggcgccaattgatcatgttcgacatagcactatataactttttggcagtttagaagagttcgagcattatccaagtatcagacagacctcagattgtgtattagttgagaatctttttgtttggtggaacaaaaaccccaaattaaagtggctgaagcaatcaatagaattcagagattcgcgtgactaaaacatccacaagagggcwtcaggtaagacttgtgctaatggaaccaacaatatcaccaaagtcctggtatctgtccatctctcttttctgtccttcccagagtagcacgtatacggggccctgcctcatggcagcaaaatggctgcaggagcatccactttcatatcttcacactgcaccctccagggaaagaagcaagaatcatctgaaggcttctgcaaagtaaaagtgaatttc

SEQ ID NO: 217504 - DNA, 401 bp, Homo sapiens
ggaattctacattacttatttcagtccccwccctaaacatattttttcttcccaatttattcttaaggttgaaataaagttcgaatgaaacctagcaacacataaacctagagaaaagaagtaaataatttattttctggtatagaggaaactatttgtagctagaaataaaccaaatgttctcaaatctgagtggaattatattaattatattttttttcaagaatattctgaaatgggatttttctgacctaaatgaatcatccaactgttatgataatagccctccaaagctaaggaagcccagatttttgatactataatgtactgcagagtcatctatcatataatttgaacaacaatctctaattgtgttttccttcataaccaaaaagaacatc

SEQ ID NO: 217505 - DNA, 527 bp, Homo sapiens
tcatataatgtatatgtatgtcaataacccaaagtacagctgtttattcaataaaaaaactagactagttatgaacatctcccagttgtctttgattttgtgtatttatttgcttgtatccagaaggccattggtggttttagatttttttttatttgtagaagaaggaaacattgactataatcatcagctgcctttctaacaccttctaagaaaaaccttggggtatgtttcagctaagaggtggtaagatttcttaatcatgatccaaactgtttttaacaagtttcaacaaaaactatatatagccaagaaccaccatctgtttcacatatttttstgtcagtgatagatgagggaaaaaagctacttgaagtcactgtcttgaaggtctttagaattgtcccttgaagcctgtgctaacatttttttttttttttttgcttttccacaatctccacaaactggccagcattaactatacgtaaatggaattcaatataatatttattttcaagaaaaagaag

SEQ ID NO: 217506 - DNA, 545 bp, Homo sapiens
cttaaaataaattacctaaacccctttcaaacaaaatttgaaatgaaaatcttaattcaaagaattatcagatgcagaaatcagggagtgtttatatttacatattttaaattttaaagaggctgctatcacctcaaatagttatgacatggctcggatgtttgtcccctccaaagctcatgctgaaagtgattcccaatgttggaggtgaggcctggtgggatgtgattggatcayggcgcagattcctcatggtttagcaccatccctgcattagtctgttttcacactgctataaagataccacccaagacttggtaatttataaacaaaggaggtttaattgactcacagttctgcatggctgggaaggcctcaagaaacttacaatcatggtggaagaggaagcaggtaccttcttcacaaggtggtaaaagagagaagagtgaaaaaggaacttccaaacacttataaaatcatcagatctcatgagaactcactcactatcatgagaacagcatgggggaaactgcctccataatcca

SEQ ID NO: 217507 - DNA, 545 bp, Homo sapiens
cttaaaataaattacctaaacccctttcaaacaaaatttgaaatgaaaatcttaattcaaagaattatcagatgcagaaatcagggagtgtttatatttacatattttaaattttaaagaggctgctatcacctcaaatagttatgacatggctcggatgtttgtcccctccaaagctcatgctgaaagtgattcccaatgttggaggtgaggcctggtgggatgtgattggatcatggcgcagattcctcatggtttagcaccatccckgcattagtctgttttcacactgctataaagataccacccaagacttggtaatttataaacaaaggaggtttaattgactcacagttctgcatggctgggaaggcctcaagaaacttacaatcatggtggaagaggaagcaggtaccttcttcacaaggtggtaaaagagagaagagtgaaaaaggaacttccaaacacttataaaatcatcagatctcatgagaactcactcactatcatgagaacagcatgggggaaactgcctccataatcca

SEQ ID NO: 217508 - DNA, 561 bp, Homo sapiens
ataactgtgcaaactgaatccaggcaaagcagtcttaataatttatgcaaaaaaattatgtctgttcatgacctttcaaattttttgttgaaatatttaaaacttctgtcagttatgaatgtataggtatgtcaaaaaataataaaactaacatttatttagtacactataatcaaaaacagcagaaacttgaaaattaaagtgctttatttttttgtaaaacatttatcaagaatagtttgaacagtacctgctttcttctcattgcgccacttacaatagggaggaaacattttttacacctgggcaaattttcactctccttattaggcttaaattagcttctagtgttgtatgctttgtgctttcaatgtcatgacatttctaagaattcttttaattcttcatccttttcatcacaaccactttgctcatttatgctgatgaattcacctttactgagtccctctggctgtctatttagagcttctagagctgtggcmggtgtaggagcccagggaatatttccccttcaccctctgatggtttgctggaaaatca

SEQ ID NO: 217509 - DNA, 489 bp, Homo sapiens
tatatctgcaaagtatttctctgaatcacagaatcatggttagactttcaaattcaccctgtttttctatttggtgaactggcccagtaatttaaaaaaaaagttaaagaggaagtttaacatccaccctactttcttttctgtgctgagccttgagttctctaaggctccactttccctttctcctcatctggtcctcacttcttccctgcaatccactacagccaaatttgcctcaaaaataaatacacttcctggcctgggatkgtggctcctgcctgtaatcccagcactttgggagactgaggcaggcggatcgcttgagctcaaagtatgagaccagcctgggcaatgtggcggaacgctgtctctacaaaaaaatacaaaacattagctgggcatggtggcacgcacctgtggtcccagctatttgggaggctgaagcgggaggatcacttccacctgggaggctgaggctgcagtgagccg

SEQ ID NO: 217510 - DNA, 489 bp, Homo sapiens
tatatctgcaaagtatttctctgaatcacagaatcatggttagactttcaaattcaccctgtttttctatttggtgaactggcccagtaatttaaaaaaaaagttaaagaggaagtttaacatccaccctactttcttttctgtgctgagccttgagttctctaaggctccactttccctttctcctcatctggtcctcacttcttccctgcaatccactacagccaaatttgcctcaaaaataaatacacttcctggcctgggattgtggctcctgcctgtaatcccagcactttgggagactgaggcaggcggatcgcttgagctcaaagtatgagaccagcctgggcaatgtggcggaacgctgtctctacaaaaaaatacaaaacattagctgggcatggtggcacgcacctgtggtcccagctatttgggaggctgaagcrggaggatcacttccacctgggaggctgaggctgcagtgagccg

SEQ ID NO: 217511 - DNA, 500 bp, Homo sapiens
aatccagtcaaaatatcagctgacatataaaaacatttacatyccctggtaaacttgtaagtaaaatgccatctctaaatttttcagttgaatgatgcactttcttaaaaatgtgaatgggaaagtctattttttcttagagtgtcagtttaaacaaaaattatacattttagacatagatagatacagatatagctatagacagggacttctcctataaatgagggaaaataaagtgcagctagaaagttaactaaatgaagttaactaagatcaatacatagaaccttagcagcaatatgttactgctctctcttaaccctaagaaacaaaatagcttttaaaagtgcaaatagggtggatataatttttcttgcactaacttcaaagcatatttcaaggttttctgttcaaaattccaaaataaatcactaagttgttttgtcaataaactgggcaaataaaaacctatttagtacaattactatggcatattttgg

SEQ ID NO: 217512 - DNA, 634 bp, Homo sapiens
aatgtagccttatttggagacagggtctttacagaggtaatcaagttaaaatgaggtcattagggtaggtctccatccaacatgactgctgtcctttaaaaaagaggatatttgtgaaacagagacagacatttacagagaaaagaggatgtgaagacacagaaagaatgccgtctacatgcaaagaatgcggaggctgccagaagctaagagggaggcacagccctcagaatgaaccaaccctgcagaaaccttaatctcagccttctgccctccaggactgtgggacaatacatttctgtcatgtaagccacttagtttgtggcactttgttatggcagccsttgaaaaccaatacatggtatattgtcacagcaaaatttgtgcaaaactaatatctccaggatttttatcctcgaggatttttatctctctaggattacttacatttaagcctgaacgcaaatttggaaacagcacgcactgtttaaacagtatatggtcattaaaatataagaaccaaaagctctgttggtatcaacatttcttttctgggacttacttaacttcaccaggcgaatctggctgggacttcctcttctctgtgctgctaccctgagggcagaatgaaaga

SEQ ID NO: 217513 - DNA, 634 bp, Homo sapiens
aatgtagccttatttggagacagggtctttacagaggtaatcaagttaaaatgaggtcattagggtaggtctccatccaacatgactgctgtcctttaaaaaagaggatatttgtgaaacagagacagacatttacagagaaaagaggatgtgaagacacagaaagaatgccgtctacatgcaaagaatgcggaggctgccagaagctaagagggaggcacagccctcagaatgaaccaaccctgcagaaaccttaatctcagccttctgccctccaggactgtgggacaatacatttctgtcatgtaagccacttagtttgtggcactttgttatggcagcccttgaaaaccaatacatggtatattgtcacagcaaaatttgtgcaaaactaatatctccaggatttttrtcctcgaggatttttatctctctaggattacttacatttaagcctgaacgcaaatttggaaacagcacgcactgtttaaacagtatatggtcattaaaatataagaaccaaaagctctgttggtatcaacatttcttttctgggacttacttaacttcaccaggcgaatctggctgggacttcctcttctctgtgctgctaccctgagggcagaatgaaaga

SEQ ID NO: 217514 - DNA, 634 bp, Homo sapiens
aatgtagccttatttggagacagggtctttacagaggtaatcaagttaaaatgaggtcattagggtaggtctccatccaacatgactgctgtcctttaaaaaagaggatatttgtgaaacagagacagacatttacagagaaaagaggatgtgaagacacagaaagaatgccgtctacatgcaaagaatgcggaggctgccagaagctaagagggaggcacagccctcagaatgaaccaaccctgcagaaaccttaatctcagccttctgccctccaggactgtgggacaatacatttctgtcatgtaagccacttagtttgtggcactttgttatggcagcccttgaaaaccaatacatggtatattgtcacagcaaaatttgtgcaaaactaatatctccaggatttttatcctcgaggatttttatctctctaggattacttacatttaagcctgaacgcaaatttggaaacagcacrcactgtttaaacagtatatggtcattaaaatataagaaccaaaagctctgttggtatcaacatttcttttctgggacttacttaacttcaccaggcgaatctggctgggacttcctcttctctgtgctgctaccctgagggcagaatgaaaga

SEQ ID NO: 217515 - DNA, 604 bp, Homo sapiens
ctccaacagcaaaaaaagttggagatttataaccaatgagcaaagcgaagagtatagtggataagaaagtagtaagaggagcataaagggtagaggaattcttgctaaacaaatccaacatgacatgattcttgctaagataggccaaagacatacatcaaaggttgagtccttggcacctgaacctgatcagatcgcaagggtaatcacattatgagattatatayacatataagcacctgatataacaagggtaatcatatacatacacacacacacacacacccctatatatatgcatacatatacacatatatacacatgcacagatatataaacgcacacacaaacctactgtactgccacttgtataaaatatatagcacaattatgtacagtatataatatttgatcatgataataaatatgttagttggtttaggtacttagtatattatacttttaatctataatttagaatgtattccttctacttattaaaaaaagttatctgtaaaacagcctcaggcaggtctttcagaaggtattcctgaagaaagcattattaccatagtagatgacaactccatgcctgttatcgcta

SEQ ID NO: 217516 - DNA, 585 bp, Homo sapiens
gttattttcttagtgacttcatcttaaattttttaaaatctagtttggattagtactaacttaattttggtagcatacaaaaattttcctgcaaaatatcttgcttcccttccctctcttttgaactattagtgtcatagactttatatctgatgtgctattagtccatcagcacggtcttacaattggggcttaatgcagtagtcttttaaaacaagtaaatgaataaaagaattacaaaaaaacatgtttatactgtctttcacagtacctasttagttacctttactagtactcttttatttatctcttcatgtgaataaaattcctatccagtgttcttttatttcatcttgaaggactcttgactatttcttatagggtagtctgctaatgatagattttctcattttttaaatttaatttttatgtaaaattgatgcaataattctgtatttttatgaggcacagtctgatatttcagtgcatgtatgcattgtataataatcaaattggggtaagtaccatgtccatcactttaaacatttattatttcattgtggtaacaacattaaaaaacttctc

SEQ ID NO: 217517 - DNA, 489 bp, Homo sapiens
gggacaggaagagcctacaaatgtcctgtgcacataactggtggtcaactctaaaaggctggcttacatgtagcaaaagctcctttcattacagatgactgaagttgaaaaagcaaaataaggcaaaattcagcaataagcccacacgtacacagccccccaacccctcgtccttcgtcatgcccacagactgagtgtccctctctgaggtcttccccgcccctctcygcagtccgcacccctgtgacctcatttccagaccactccactcaacacagccagactgcctaggattttatttgcatcatgttttaacacatatagtccagcttcccaggtagattagaaatctttaaggacaaatactacatgataaatatactacttcctcatactgccaggataacaatattggcttttaaatgggcacttaataaacattcgtaattgctactgacaataattagcggcttttaggcacgatcccct

SEQ ID NO: 217518 - DNA, 525 bp, Homo sapiens
gaattctgttgttaaaataaaagggacaggaagagcctacaaatgtcctgtgcacataactggtggtcaactctaaaaggctggcttacatgtagcaaaagctcctttcattacagatgactgaagttgaaaaagcaaaataaggcaaaattcagcaataagcccacacgtacacagccccccaacccctcgtccttcgtcatgcccacagactgagtgtccctctctgaggtcttccccgcccctctctgcagtccgcacccctgtgacctcatttccagaccactccactcaacacagccagactgcctaggattttatttgcatcatgttttaacacatatagtccagcttcccaggtagattagaaatctttraggacaaatactacatgataaatatactacttcctcatactgccaggataacaatattggcttttaaatgggcacttaataaacattcgtaattgctactgacaataattagcggcttttaggcacgatccccttgcttttaaacagt

SEQ ID NO: 217519 - DNA, 410 bp, Homo sapiens
tggcagtcctcaagtgacatttaggtagtgtatctcagtctttaagaactccggctttggagtcagagaaacatgagcttgagtctcagctgctctcggcttctttgtggatatttgctgataatgggyaacataattatgttttctaaatcttattttcctcattgataaatgggtaaaacaagaacactcattacattggcttgtgtaaattattgttatgcatttttttcatgttcaaacaagcaactaaattattgaaaatgtatctgtctctaagatgcttgaagaacctacagcacttgcctagtgtatgacttatagagagtaggaaggaaatagcacctgccactgttagttgcttaccagtttattagtcatttctactttctgttttgcaataagaattc

SEQ ID NO: 217520 - DNA, 609 bp, Homo sapiens
aatagtttatttgcttggttagctgaaaaatggatcaaaagatggtccactatgagtgacctggagacgcctgttcttccttggtttactatagaggaagggattcaaaggcttagggaaatttgaatgctagagtggattagtcactttagacctactcatctcagctgggaggggccagaagacaaacccttcaccaatactttgtgaaaaagatttgtgagggcarcacctgcagctttgaaaactctgtgattgctcttctctgtatgccagatcttacagtgggaaccacagtcactcaactacaaaatgtaaatgcaatgggaagaattggatcccagggtgactggagccaagttatagcactcaaccatcaaagcaaaggtgggtatagttactgtaatggatgcagaggcaaagcagcaatcagaataatctgactcacatggaattctggagttggttaattaatcatggtgttcttagaagtgaaattgataaaaagcctactacattcttacataatttgtataagcagaaaacttccatgctgagtggacaaaagacttatttgaattataaatagagactcacagctccccaatc

SEQ ID NO: 217521 - DNA, 609 bp, Homo sapiens
aatagtttatttgcttggttagctgaaaaatggatcaaaagatggtccactatgagtgacctggagacgcctgttcttccttggtttactatagaggaagggattcaaaggcttagggaaatttgaatgctagagtggattagtcactttagacctactcatctcagctgggaggggccagaagacaaacccttcaccaatactttgtgaaaaagatttgtgagggcaacacctgcrgctttgaaaactctgtgattgctcttctctgtatgccagatcttacagtgggaaccacagtcactcaactacaaaatgtaaatgcaatgggaagaattggatcccagggtgactggagccaagttatagcactcaaccatcaaagcaaaggtgggtatagttactgtaatggatgcagaggcaaagcagcaatcagaataatctgactcacatggaattctggagttggttaattaatcatggtgttcttagaagtgaaattgataaaaagcctactacattcttacataatttgtataagcagaaaacttccatgctgagtggacaaaagacttatttgaattataaatagagactcacagctccccaatc

SEQ ID NO: 217522 - DNA, 609 bp, Homo sapiens
aatagtttatttgcttggttagctgaaaaatggatcaaaagatggtccactatgagtgacctggagacgcctgttcttccttggtttactatagaggaagggattcaaaggcttagggaaatttgaatgctagagtggattagtcactttagacctactcatctcagctgggaggggccagaagacaaacccttcaccaatactttgtgaaaaagatttgtgagggcaacacctgcagctttgaaaactctgtgattgctcttctctgtatgccagatcttacagtgggaaccacagtcactcaactacaaaatgtaaatgcaatgggaagaattggatcccarggtgactggagccaagttatagcactcaaccatcaaagcaaaggtgggtatagttactgtaatggatgcagaggcaaagcagcaatcagaataatctgactcacatggaattctggagttggttaattaatcatggtgttcttagaagtgaaattgataaaaagcctactacattcttacataatttgtataagcagaaaacttccatgctgagtggacaaaagacttatttgaattataaatagagactcacagctccccaatc

SEQ ID NO: 217523 - DNA, 463 bp, Homo sapiens
gggccttttgaattttggaggcaaaacatttctcatttggttgtgttactctgacccatttattcagtgacctaaaaggctgccagttttgagtgggatccagaatagaggaaggctctgcaacaggtccaggctgctgtgcaagccgctatgccacttaggccatatgacccagcagatccaatggtgcttgagatgtcactggcagatagagatgctgtttggagcctttggcaggctcrcataggtgaatcacagtggagggctttaggattttggagcaagaccttgccatcttctgcagatagttattctcctttagagaggcagctcttgacctgttactgtcttttagtagaaactgaacatttgactataggtcttcaagtccccatgtgacctaaactgcctatcatgaacagggtgctttctgacccatctagccataaagtgtgtcatgcac

SEQ ID NO: 217524 - DNA, 575 bp, Homo sapiens
tgagctgtcaatatggcaccattccccagggtgatcagccagctacttggtggcaggttgattatattggacctcttccatcatggaaagggcagaggtttgccctcactggaatraacatttactgcagatatgggtttgcctatcctgcatgcaatacttctgcaaagactaccatccatggactcatggaatgccttatccaccatcatggtattccacacagcattgcctctgaccaaggcacttactttactacttaagaagtgcaacaatgggctcatgtttatggaattaactggtcttaccatgttccccatcatcctgaagcagctggattgatagaactgattggaaggccttctgaagtcacaattacaacatcaactaggtgacaatattttgcaggactggggcaaaattctccagaaggctgtgtatgctctgcattagcatccaatacatagtactctttctcccatagccaggattcgtgggtccaggaatcaaggagtggaagtggaaatggcaaggatgcaaacaggtccaagctgctgtgcaagctgcagcctgga

SEQ ID NO: 217525 - DNA, 575 bp, Homo sapiens
tgagctgtcaatatggcaccattccccagggtgatcagccagctacttggtggcaggttgattatattggacctcttccatcatggaaagggcagaggtttgccctcactggaatgaacatttactgcagatatgggtttgcctatcctgcatgcaatacttctgcaaagactaccatccrtggactcatggaatgccttatccaccatcatggtattccacacagcattgcctctgaccaaggcacttactttactacttaagaagtgcaacaatgggctcatgtttatggaattaactggtcttaccatgttccccatcatcctgaagcagctggattgatagaactgattggaaggccttctgaagtcacaattacaacatcaactaggtgacaatattttgcaggactggggcaaaattctccagaaggctgtgtatgctctgcattagcatccaatacatagtactctttctcccatagccaggattcgtgggtccaggaatcaaggagtggaagtggaaatggcaaggatgcaaacaggtccaagctgctgtgcaagctgcagcctgga

SEQ ID NO: 217526 - DNA, 595 bp, Homo sapiens
ctggggtactgaccaggactatcacaagtaaattagtctactactccacagtggcggtaaggaagagtatgcatggaatacaggagatcccttagggcatctcttagtattaccatgctctgtgattaaggtcaatgggaagctacaacgacccaatccagtcaagactataaatgatggagacccttcagagtcactctaccaggtaaaaaaccactactagaggtgcttgctgaaggtaaagagaatacagaatgggtagtagaagaaggtagtcatcaataccagctatgaccacgtgactagttgtagaaacgaggactgtaattgttatgagtatttctccttattttgttaagaacgtgtttgtgcatgtatayacttgtattaagaaaatattttcattttacttcctttccttttcctttatcatgtgacataagatttattgactttataactgcattcaagtgttgttaactttatgtaatagcatttaggttaaggattagtgcacatcctgttatatgaaggatacctgtactgtgtttggagtaattatcaccttattattgtctttatttgaagattacgt

SEQ ID NO: 217527 - DNA, 478 bp, Homo sapiens
aaaaaaaaaagtctacagcataaagtaaaaagaacatcatctagaaactcaaaagaaaagttttttatcaggaagaaatgttatagtgtaaccttaacaaatgttagaaaacttttaaaattgtcctcaatatgytataaggagatatgactgctatgaaatagaagtaagaagcaggaagaattatacacaaaggcaagccaacatatgagattcaaagacaatactctggacttagaagatagcagtttgtcttgaggaaggatgaaagccaaatcttgaaatacccatgaagcagtaagaaaattattgacaagaaatcatcatcaaagatctgaagtagaaaacacagaagaaatgaagaagaaagattttgaaagaaaatataagaactctgaaagacagagaatggaaatctgatataaaaactaagtgtttataaggaatgagccaaaaatactgaatggaagaagaattc

SEQ ID NO: 217528 - DNA, 596 bp, Homo sapiens
tgaggcattgcttttgcttcattacacttgtatagaagtatagtttcagaagctttcaagtgtcttttctttctaagtaaactttacttgatgggttagagaaccaatgtgataatattgccagctactaagatctctctgagaacatctccgaccagactgcatttatgactgtcatacatttccactttcactgcttaatcaccataaartcctatgtggccaacatggttagagactgtgttagacagaataatgcctgcttctcaaagtgcccatgttctactctccaaaacttgtgaatatgttaaggaattaatgtttcagacggaatgaaagttgctaataaatgacttgaaatgggaaacttattctgcattatccaggtgtgcttaatgtaatcacaaagtgattataactggaaagggaaggtagatgattgtgtcagagtgatgtgatataaggaacactctactagtcgttgctggctttgaagacggaaacaggccaggaaccaagaaatgcaagcatcttctagaagctgaacaaagcaaggaaatagattatcccctaaagtcccggaaaagaatgtagtc

SEQ ID NO: 217529 - DNA, 541 bp, Homo sapiens
ttttgaacaactaccctagttctcgtgagaactcactcactatcacgggaacagcaaagggaagatccagccccatgatctaatcacctcccactaggctcctcctccaacagtggattacaaatccaaaccatatcaatgacttttcacatatatgtaatatcagcattctctacttaacttataattattaaattatgaaacatgttaaggaatcggtagagatgatccttccagacatttaactcttgtattcactctycagtttatctgccattgaaagctgtgttgtattcttctttgcaaggaaaaatttaaaaaattataaatgctgaatctatttaatatgaagactagttgtccaacttacagtttgtaaaagttgggactaaatgattttttttattttgtagaaatactaaatgtttattcagtaattgaacatttggaacagaatatttgattcctaaaccagcattaattgttatttatgatcagctttccattttaccacatagtaatagtctcaactttaacattt

SEQ ID NO: 217530 - DNA, 599 bp, Homo sapiens
attcctgttcaataggttttggtcatttaaaaaaagtatatagctgcctaatttattttttaagtgtgaataccaaaccatacatttacctcatatattttactttattgggtctgctacatcctcaattattctgtttttcaacacataatgttgaggatttatcaacaaaatgcatgaattatattgaatgaatcagataatttcagaaattccttttaacatccattgtactgtctttctctcccagttgtattttcatacaggcagtagcctttaattttaataattgctggagttatttacaaaaaaattaagttatttagacctatggcatatgatttcagatccccytttaggttgtcactaattcttgccaccttacttaagcgttgctacaaaatacataggcatgcatctgtccctctctctccctctaggtttaacacagacatacacattcttattaaattcacatttacttatattttgggctcatactcgcatccttttctatagtaccatctttgataggaactcccctttctgggtcttaatctagctgatgactcactaaaatgggaccataggagctctgt

SEQ ID NO: 217531 - DNA, 446 bp, Homo sapiens
ccccagaaaattctgtaactgggcccttaagccacttgcttgggcctactcccacccagtggagtgtgctttcattttcaataaatctctgcctttgttgcttcatcctttccttgctttgtgtgttttttccaattctttgttaaaaactccaagaatctggacaccttccattggtaacatattttagcaagccaactaagaggtaagcacaaagtttaagatttatttttctcctttttctttctgctccatacatgggaatctcaatctctctctctctctctctctcttcctttcccactcaggacccttgatgggcgtgcaacaattttcaagcaagtttcaagttcacatgamttcagtataactttactaaacaagctggttttaaaattattcataaaataaaaatagaaatgccttcagaactgtcagcatacatt

SEQ ID NO: 217532 - DNA, 608 bp, Homo sapiens
aagctttttaaatatttcccactacaatttcactttcatggggagtaggactcctcatcattttggttaccgttgggtgccaagtacctagagcagtgcctgatwcatagtaaatgttggttgaatgaatgattgaattaataattaaattacaaaatgcaagtcagacaagagaaacatgagtttggattaggattagatcacagagtatctttaagtgttccttagtgacactttttatctactttgtctcctttagtctcctctcagctctaggaaatctaatgatagcatagtatgttgtaatcaacatttcaattcacatttccctctagactttggcctcataatgtgaaattttcttgatgcagtttcccatcacaactttctctgtgtccacttaccatgggatatatttttgaagataggaactgatttaatttgcctcatattcttcatggaagaaaatctttctagatacaattttcactcagccacagctagctggaaagaccacggcttatgcccattggggttaaaagcattgtgttcatatctcagttctgacatggcccaggcttacaagtatgaaataattatctttaata

SEQ ID NO: 217533 - DNA, 571 bp, Homo sapiens
cattttaaaaatatgaattactgaacatctstcctatgcattaactcagaatgttttggatttggaaccaggaatatatattgtgtcccagatgattttgatatgtagatagctttgggaaatttgattattgtcagatcccaaactaatttacaatgtttaattagatttataatatctagcttgatgggctagagattcaatattgaatataggcaataaacatccgaggatgaaatctgataagctaaacagatcaacttttcagtgatctttaaaatacagcctgttatgttttcctcttatcatattagtatattagtttcacatgggttttcaagggtgagaactatggaatttccacctattatttcaattcccaaattgaagtaggccaattaagctgtgaagcaagacaattaaactgtgtggtcatgggcatacggcaatatactaaaaattacatttaggaaatacttacgtgaataaaagataatgctaatgcattattgagttttaggaaaggccaaaaacattttagaaaacattaatgggttcagagaatggatgc

SEQ ID NO: 217534 - DNA, 481 bp, Homo sapiens
atcaatttcatgtctctgttgatgtggtttcaatgttttaayagtcagtctaaagagtttttgcctttttaaaatgacagaacatgatagcaaagccatcaagtatcagatttcagagatttggtcagtcctatcaatgtataaatataatgggttggatgtttttatgagaagtattaccactaagatttttatatttttcttcttctctgtctgtaatgatgcgaagcaagaattgggatttttgctctttaagcatttttgctaaaattttgtaaaatgtgtgaattttaaaatcatcattcttcagtgtcaggtattttttacaatctactaataactgtcaccccaaaatctttttttgttgttgttgctttgctgtttttgagaatctgaggaggaataacactgttagaaaatatattgggtcttaagtttcccaatgaaagccctagttcttaaaatatattatgcttgaagg

SEQ ID NO: 217535 - DNA, 481 bp, Homo sapiens
atcaatttcatgtctctgttgatgtggtttcaatgttttaacagtcagtctaaagagtttttgcctttttaaaatgacagaacatgatagcaaagccatcaagtatcagatttcagagatttggtcagtcctatcaatgtataaatataatgggttggatgtttttatgagaagtattaccactaagatttttatatttttcttcttctctgtctgtaatgatgcgaagcaagaattgggatttttgctctttaagcatttttgctaaaattttgtaaaatgtgtgaattttaaaatcatcattcttcagtgtcaggtattttttacaatctamtaataactgtcaccccaaaatctttttttgttgttgttgctttgctgtttttgagaatctgaggaggaataacactgttagaaaatatattgggtcttaagtttcccaatgaaagccctagttcttaaaatatattatgcttgaagg

SEQ ID NO: 217536 - DNA, 575 bp, Homo sapiens
ggaattttgacaatacaaaaatacaagacatccagtaataaacatcaaaaatgtgcagaaataacatgatatacctataamatttattaaaatatacaaaataaaacagctaccttaatatgttcactcataaattaacaagatgaggtatgagaataatttaaaataatttgtttcttaattcattcttaaaataaataaaataaccaaatttcattaaaaaacaaattgattgaattaaacattttgagaaaataattgaaagatatttttctcaaacatttaaatataaaattgaatattttataaagaacgcaggaataaatatgaaatcaacaaaaattttagaggtcagttaaattattggtattaataggatacacaataaaatattatttaaaccagcaagggaaggaaaagatactttattaatctggaaatatgtattgaaggaaaaaagcagaatcaccttactctattatacctagtatcagaagaaagtagagataaatattaatagtatagatatatattcatatgcagaaatagcaaattaatagttatggctgtagaag

SEQ ID NO: 217537 - DNA, 456 bp, Homo sapiens
gaattctatagtttcttcctattgtcttttctgttctaggatcccatcatagataccactttgcatttacgcattatgtctcaggctcctcttgtctgtgatagtttctaagactacttatgtttgaagaccttgacagttttcaggagtactaggcaggtattttgtagaatgtctytcagttgggatttgtctgatgtttctctcatgattagatggaggttatgtggttttagaaggaagaccacagagataaagtgccagtctcttcatatcatataaagggtatatactatgaacatgacatatcactgttgatattaactttgatcatcttgcttgaggtagcatttggcaagtttccctacagtaaatttactctttctctctttttccatattgtattctgtggaaggaaatcactctagcaactcacacataatgagaaaaaagcta

SEQ ID NO: 217538 - DNA, 572 bp, Homo sapiens
aaatgatggtggcacttgtacaactactggaagaagaaatccagatggataacagaagtaagctccaaatatttgaggaggacaatgattggaatatttgagaaatgtcaactgagccactatggctgggctgtgatgagtaaggataaaaataataggatatgaggtcttagatatcatgtaagctaccttaagaaccatgggtttagactgaatgagaatagatatcactgaaatttttttgagatgaagagcaacatcatcttgtttayacttaacaggaaaactagcttttgtgcagagcagagggtaggaaagggagacacaaaaccagtataaagagctgttggagaaagagaaatagaaatgaatgatgttttgaaacttggatggcaattgcagtattaaaaaacactgggttctgggtatatacttaaggaaataaaatgattttatgatagattagaatacaaaaaagaatgagttagtcatgacttcaggttttagggttatctgtgttttcagaagaagagccatacatcattttggaaattttttttttaaggtaataa

SEQ ID NO: 217539 - DNA, 648 bp, Homo sapiens
tgtatatgtatattacaacatcacattgtgcatcttaaatatataaaattatatttgtcatttatacctcaataaatctggggaaaaacagaatatgttaccttctgaataatatttatgagcttaagaattaaaaatgaagtgaaatatgtattgttgaaagaaaaacctaccaagccagaattccatatcgactgaaattgttcctcaaaagtaaaagagaaattaaaattttctcagagaaacaaaaactgaggaaatttatcaacagcagacttgctcygcaaaaaaagataaaaaagtttttttaacagaaaataagaatttttaatgtcatgataaaaatattaaaggtaatagagaaaaatttaaaatattttctaaagaaagaagataattaatatgcaccaaaaacaggactaaagaatggactagtattcaggatggaataaatgaaggtaaaacaaaatattttatagtgttgttttaaaatagattagctaaaatatatggaatatataaattataaccattaaaatatttataaaataagtataattgataaactaaaagataatataaagtgggattatataaaaggtttcattaaatttggagaaagcatgaaaataaataaataaataagta

SEQ ID NO: 217540 - DNA, 560 bp, Homo sapiens
gcatgaagagtttacatgatgttaagtaataagttgtattagcctattttcaaactgctataaatatactacccaaaactgggtaatttataaaggaatgaggtttacttaactcacagtaccgcatggctggggaggcctcaggagacttacaatcatggtggaaggggaagcaggcactcttacatggcagcaggtcasagagaaagagtgtgtgaatataggaggaactgtcaaacattttataaaaccatcagatctcatgagaatttactcattatcacgagaacagcatgggggaaactttccctaggatccaatcacctccctttctccacatgtggggattacaggtccctgcatccacacatggggattacaattcaagatgagatttgagtagggacacagagccaaaccatattatagggtaataaaagttcaaatccatagcacagaatcaaaatatataggtgccaaaaaatattagaacatcacaaaggacaaagggttctaaaatcccaaagaatcaaacgcagactaccatgacctaaattcac

SEQ ID NO: 217541 - DNA, 383 bp, Homo sapiens
tagccccagtaaatcatagaaacttaaataaatggagaatttcctccttctgcctcttaaaaaatctggttcttcttcatgtattaacatcattatatcaaatccagtttatccacaaagcagggtaatactagcacctaaagatctggatttactttcttacagtctcatgaccactggctagtgtcatgtaaaatgcaattattgggacccatgtgctcagttcctgaratagtcattatgatgaagaaagctaaagtaatatatttgactttgtgccatatgcccacaaatatggccattgaggagaggtctgttaccagaagatggataatgattatatataaactaaaggtagctgaaagagaaaaatgtaaccctag

SEQ ID NO: 217542 - DNA, 383 bp, Homo sapiens
tagccccagtaaatcatagaaacttaaataaatggagaatttcctccttctgcctcttaaaaaatctggttcttcttcatgtattaacatcattatatcaaatccagtttatccacaaagcagggtaatactagcacctaaagatctggatttactttcttacagtctcatgaccactggctagtgtcatgtaaaatgcaattattgggacccatgtgctcagttcctgagatagtcattatgatgaagaaagctaaagtaatatatttgactttgtgccatatgcccacaaatatggccattgaggagaggtctgttaccagaagatggataatgattatatataaactaaagrtagctgaaagagaaaaatgtaaccctag

SEQ ID NO: 217543 - DNA, 408 bp, Homo sapiens
agtactatctatatgtgctcaataaacatttattggaaattcatgagtaaataaataaatgactgaataattaataaatgtacttgaggtgaacaacaagttaagggctgtgtttctgtgtaggatgggaatagaaaaattaacgtataaaattcttcatttgtgtttcaggagaattattttgttgacaccttactataattattatgtcatattgatgtttccctttatagcctgatttattgacatgattgccaataaatcactttctactctttgtggtctctcagtctattctcagctgactttagttgggttcttgttcccaccgcttcactgaaatttttgtcaagatccctaatgacctctatgcaatggttttatctyatctcatcaacttcttagcag

SEQ ID NO: 217544 - DNA, 371 bp, Homo sapiens
tgaacttgaattttttttggattcattgtaaaaaaaagtcaatttcccttataaaaagtcatccatatattttttacttttatgacctccaattagtcccccgccccagaggtaacagccttatttttttttcttcatactatatatacttcttggttaactacttgttmtctcatatggattatttatatattcaggatgttaacctttcatcatgttataatatttcctcaacttttcatttgtcttttacctctgtttatgaactttcttaccacctacatttaaaatttttgttatgactatttaatgacatatgtaaataacctctatctcaagatcataaaacatacttaattttgtttcagtac

SEQ ID NO: 217545 - DNA, 370 bp, Homo sapiens
tgcttatttgtgtcacttttccttaaaggagactcatatagccaaaattagtaaatgttaaataattgtaaatattttgtgattgaattaagatagcttttgcatgcggtttagaaattctttgttctgattgcaaccattactaacccacaaaataattccttactrtacatactgattttatcgtgtttgttataattagctttttatactttcttaaggactaaatagtggacacacctataaagttacttataatgcaattattttatcctgctatatttcttaaagtctgttttgtctgttatcagttgtcacatcaacttcctttcagttagtttttgcttagtgtatcttttcccatcaattt

SEQ ID NO: 217546 - DNA, 370 bp, Homo sapiens
tgcttatttgtgtcacttttccttaaaggagactcatatagccaaaattagtaaatgttaaataattgtaaatattttgtgattgaattaagatagcttttgcatgcggtttagaaattctttgttctgattgcaaccattactaacccacaaaataattccttactatacatactgattttatygtgtttgttataattagctttttatactttcttaaggactaaatagtggacacacctataaagttacttataatgcaattattttatcctgctatatttcttaaagtctgttttgtctgttatcagttgtcacatcaacttcctttcagttagtttttgcttagtgtatcttttcccatcaattt

SEQ ID NO: 217547 - DNA, 370 bp, Homo sapiens
tgcttatttgtgtcacttttccttaaaggagactcatatagccaaaattagtaaatgttaaataattgtaaatattttgtgattgaattaagatagcttttgcatgcggtttagaaattctttgttctgattgcaaccattactaacccacaaaataattccttactatacatactgattttatcgtgtttgttataattagctttttatactttcttaaggactaaatagtggacacacctataaagttacttataatgcaattattttatcctgctatatttcttaaagtctgttttgtctgttatcagttgtyacatcaacttcctttcagttagtttttgcttagtgtatcttttcccatcaattt

SEQ ID NO: 217548 - DNA, 484 bp, Homo sapiens
ctatattacttaatcgaaaaaaggcctctggttattcacatagggcaaaaaaaaaacatgtaataacattatcttacagttttttaaaaaattagaaactagagatgtattcagattttgtaaatctctagttgatgaagccctaagtaaaccccagaaagaatttctgaataggtatataacatgaaaaaggatagaatgagagtctgtacaatataatagcggattgtattctctgtcttgtagcaatacgtgccctactttgtcttcattatttataaataacctggctttaaaaagcatctacagcaactgcatttccaayggaaatggcacttgctttacatgaatgttctaaaccagggtagctccatgataaccctgacctttagaaatgtaaccagcctcaatactagtaaaaatgatattgcaaatggtagcaggaccacaagtagctttcattttattctattttctgtatttt

SEQ ID NO: 217549 - DNA, 588 bp, Homo sapiens
caaataactcaaagtttaaaaatccattgggtgggactgacaacagaatgaagacaaaaaaagggcaaagttagtgaacttgaagatagataaatagaaattatcaaatttgaatatcaaagaggaaagatgttgaaggaaaatgaacgagagcctcggggccttgcagaacaacatgaaatgattctaacatatgcataactggcatctcagaaaaagaagaaaaaaataaaaacagaaaaaatatttgaagaaatartggccaacatttgtccaaatttcatcaaaaacattaacttacgaagctcagagaatatcaactggaataaataaaaagaaaatcacacctaagtatagcatagacaaactgctggaaaccaagataaagagaaaaatcttgaaagtagccaaaggaggggaaaaaagacatgtaacatacaggggaacaaagacacaatgataacttacatgagaaagacacagaagcttcttgaaataaactgatgaagagttatcatttttcaaaagggatttatttcctaattctgctttcctagtgacaaccttggattaattccagacttagga

SEQ ID NO: 217550 - DNA, 560 bp, Homo sapiens
tgggtgggactgacaacagaatgaagacaaaaaaagggcaaagttagtgaacttgaagatagataaatagaaattatcaaatttgaatatcaaagaggaaagatgttgaaggaaaatgaacgagagcctcggggccttgcagaacaacatgaaatgattctaacatatgcataactggcatctcagaaaaagaagaaaaaaataaaaacagaaaaaatatttgaagaaatagtggccaacatttgtccaaatttcatcaaaaacattaacttacgaagctcagagaatatcaactggaataaataaaaagaaaatcacacctaagtatagcatagacaaactgctggaaaccaagataaagagaaaaatcttgaaartagccaaaggaggggaaaaaagacatgtaacatacaggggaacaaagacacaatgataacttacatgagaaagacacagaagcttcttgaaataaactgatgaagagttatcatttttcaaaagggatttatttcctaattctgctttcctagtgacaaccttggattaattccagacttagg

SEQ ID NO: 217551 - DNA, 396 bp, Homo sapiens
aatacaaaactaccatagaaattgttgttctatttgaattaaaaagatcttctagacagtaagctccttgaaatgtatgccatgcctattgcttgccrttgtatttctagcatcttgcctagttagaaaagaattgttttttttttgagttattcattaaagactgggttttcaatttaagctataataattttctgtgtacaactggtaagatagaactggtatacaccatatcagaatgttgatggtaataatcttttatgcatgcagggtgaacagagttgaagcatgtttatgggaatgtgtacactaaaagccaactaagccactgaaacctgcaaaatcaaggctggttttgcaattgcatataacacagatatcagtctaagtcaaaat

SEQ ID NO: 217552 - DNA, 532 bp, Homo sapiens
aacctctggctattttatagatggagggcaccagaggcgctggtgattatcctgatagtccactgacgacaaaactgaagcctgcagccctcatttctacccgcttgggagagttcacatttctatgtttttccttttcacttttgttggcaaatcccactgacaaatgagagatctcacagagtttattctaagtgtagacttgtgggaaatgaagaactaagatattccctttgtgtttctaattggagaacatcctgccattagaaaaatagacaggattctatcagcaccaagttgtaaacaacctgaatgcccatccacaggagattgttttggtaaattctggaagatccacacaaggggacactttgcagtaactacagtgatgagtccatgagtgtttattaacacagagtctgtgatatgttaaatgaaagcatattataaaacagtataaataatataattctcattttcattgaaaaatctgtacaataayaaacttggaaaatattatatgctaaaattt

SEQ ID NO: 217553 - DNA, 476 bp, Homo sapiens
tcgaaattatgaaatttcctgacacagattaagccaaaacacagaaaatgtacaacagctatataccaatcatcattatactaaataccaagataccatatgtaactaagaaatagtaatttacagaatttcttctgaaaataggcccaaaagaaaatattactgttattttagaataaaagtatccccaatagagagaatgtattttcatccaagtattgttatcaaaaaaatctatgtaacacttatttttataagtctcagaggaaaaatttctctaagtctgagattaaaatacgaggttttaaaaatgcatgttcattttgtgwtgaaatccaaatgcctgtattttaaaatgactgttttaaaaactccatcttggaaaacaaataataatttaggtaagtatttcttagagtggaccaaggactgcccacgtctgaatcacccaggattcttgttagaaatatgaattc

SEQ ID NO: 217554 - DNA, 548 bp, Homo sapiens
aagtcaatatcctagagatccagtatttgtcctgacacattcactaagctaacaagaacacacggctggagccttggtacctttcagctgataccaccactcctgaagaaaaataacacaacttttttttttttktttttgagacggagtcttgctctgttgcccaggttagagtgcagttgcacaatctcagctcactgcaacctctgtctcccgggtttaagcaattctctgcctcagcctcccgagtagctgagattgcaggcacccgccaccacgcctggctaatttttgcatttttagtagagatggtgtttcaccatcttcgtcaggctggtcttgaactcctaacctcatgatctacctgcctcagcctccagacaacttttcttatagcctccaaatccaggacaaggctgtgaggttccaactcactaaaacatggcataatttgcagcagttgattttgctcaaacagaagctcaatgcaaaggcattcaacagagagactaagagcgtcatacctgaatgttaacatctgccccgtt

SEQ ID NO: 217555 - DNA, 605 bp, Homo sapiens
gatatagtggtgaccacagtgaccgaatccctgcccttctaaaacttatggtcttggtagattcctgagaatttgcctttgtctaggcaacaatggactgactagataaccattaaatacataggggttcaaatatttagtgcagaagcattttgggttctcgaatagggactgtgtgatacaagtggtttctttgaaaattatccatgatctaagctyacacacttactggctcataaaagccagtttcagaggccagatgactttcgtgtttggtgccagtgtgctcccactggatccctatctgcctggttgcaaactcttggctctagtactgcctgatctctagcatactttgatccaccagaaagtccctccttgttccagttccaaaactctagctctgcaatatctcctctccttcccccaaagtggtgctgtggggtgtgtgtgtgtgtgtgtgtgtgagagagagagagactgagagagagagagaggctcagtgaagggaattcccgtgcatgagcttactgttgattactagcccttcatcaccggagtgttggtcacaaacctgaggagggcaaagtgattggagtcccgag

SEQ ID NO: 217556 - DNA, 591 bp, Homo sapiens
tgatgacataactggtggatcatccagatttctcctaaactggaacggcaaatgggccagctgttattgactggtaatgattgcctggactgcytgagtgctgaggaagagtctaaggttgtgcttattcaagatggaaaagagtatcatgcttgattagtgatgtctgctaaaggcacaggaatggatgtggcagctctgactacatatttgtcaggcctttctccgactcccatcccaccatttctctgttcatttgcactcccacttgagagcagttggggaattgaaagtgttttcaagccaggtttactctggtaaatgatttagcagggctgaagcaggatgccaactaaaacttgtttttcatgattatctatagattttatatttatcctattcttggtgtacattcacataattaagagttgctatgaagtcagagtttttttatctcaaggctcataaacagcatcaggatttggtctattcgaagaaactactcagaacatcttgtcttttcatctctgaacagccatgagaatgtgaactgtaggcaaggaaatgaattgcattcatgaatcacttgag

SEQ ID NO: 217557 - DNA, 435 bp, Homo sapiens
caagttccttttcagatatgtgatttgtaaatatttgcttccatattctaggctgcctttcactttctggattgcatcctttgaagttcaaaagctttcagttttgatgaagcccaaaccatttttcttttgtcacttgtgttgttagtctcatctctaagaagyctttgcctaattcaagacaattaagatgtgtttctatattttttccaaagatttctataattttagttcttacatttacaactgtgatccattttgagttaatttttgtatgcgatgggaggcagagtgcaacttctttcttttgaatgtggatcttcagtggtcgcagttgaaagactatgtttccttattgaattgtcttagcatccttattgaaaatcaattaattataaacataaagatttatttctagaatttccattgtatccc

SEQ ID NO: 217558 - DNA, 249 bp, Homo sapiens
actgctgggtatgtattgccaaccccattttgatgacctctcctggttcactcagctagtacatggcagtgctagcatacagatttagtcttctgagtctgaagtccatgctgccccttatctttcaagctgctgctaaaataaccctgctgtagtgcagcttagattataacacactctcttcagtgagtccttattgcttataatgtctaaattctcaggcttakaagtcaaagccttcaattatct

SEQ ID NO: 217559 - DNA, 378 bp, Homo sapiens
tttacatctgagtcatgtctagagctttgtttggctatgattttggattactataataaataatttaattcccaatattcccaaccttttccttgactacttgtccacttaataaagccatttccscccccccctcttttaaatatcttaagtgtacagtcttgcttacagtgaaagtccgtatttcttggtttatcaggaaaacagtgcaaggttttatatttactcgaaacctttcaaatactcctacctgttcttacattttctgagtctttattttcacagataactttagaagtgattgctttgagctcactataaagcaagcagatcatgttaaatatcaggtggggtttagtgagctcctataagacgatg

SEQ ID NO: 217560 - DNA, 442 bp, Homo sapiens
atccatttttatttcttttactaaactactgctgattgcttctacaatttaaaaaattccaaatatgaatgaatatttagtatctttttcccttttgagtgatcaatgtgaaaaaaatacaaaatttaaaacaaacaaaatggacttttctcaacaccaagaagaagtctccggaattatctttaacatataaacatcaatagaaagatttagaaaggtaattctgttgatctccttaggctgaagtgaagacattaattattttacaaatgacaaatcatcttgattgatttcctcaaccaattaaatttattagctmactttcccatattccacctgattctctctctagaacaaaaacttttaactaaatgaaggaactgtcaaaaagaaaagtgagaatatgctgcgttcataagtacttaatacatgctgactagct

SEQ ID NO: 217561 - DNA, 655 bp, Homo sapiens
aactatagttgcatattaaaattatagacagggtaactaataaactagaacatagaggcatattaaataacttgagtcaccactggctctatctttctctacattttcagtagcattatgtagctagaagggatcttggagaacatgtagctcaagtctttcaatggtacacaagcagaacctgaaagtgtatgatctcagagttaaacatgaaaagtagacaagatactttgataagaaatagataaacccaaagacagtcaatgcattacctggtatttggggggtaggtatggagttaaggacaatacaaggtattaccttcaggtgggttcatcagttttttagataacgattgaatacacatttacttcccttaacatggaaaaagggcagatgaaactacatgacatgtcctgttgttatcttagtttcatgtatttcaaacctttaaattgagtcaaatataatcattgagatcatggatgtttatttggtatccagtatgtgctaggaaatgttctaggtgctgggaatacggtgataagtaaactcctaaagtctctgacctcatggagcttatattctgatagaagatacatgatarttaagtaagcaagtaagtaaataaatgtagctcatatatattaaaatg

SEQ ID NO: 217562 - DNA, 571 bp, Homo sapiens
tgttgaattttaaatatgttttgattaggaactgacagttttgctgttgatttggatttggggtgtgagagaaggagagcagtcaacgatgactctcaggttgttttttttttttctgagcaactgagtagatgattgttcatttacttagatggtggccactatgggaagaaatcaattggtgccataagtaagcattgaactattgccaatggttcatctgtggcatgattatgttttcagatctctcctgatccagttatggctctacttttgcttattagtgctccaccatttagttggggtcaaaacaagtacaaaacaagaatctgacatgcyagagtgccaaaagagagagagaaaaaaggagaactggaaagcataagattgtaggattgagaagcaatgattatggtgtttgtctttttttttttctggaatagttgcaacaaagcatacgagatgttctgcccttctataaggaatgtagaaaatataatacaagggttcttttaaattctataatgttccccatttttattgatattttcctaaaatgaaatagaaatga

SEQ ID NO: 217563 - DNA, 440 bp, Homo sapiens
aattctactacctaccataccatctttcatccaaccagcaacaaattcctaaaaaatacattctttgccagttctgccaagataaatatgcttttgccttaggaaagttttgccaaaagcaggacatgttggtgagaagcccttatcraaatcatcatcccattattataatcattatcatcatcacattatcattgtcatcatgtcattatcttggggtgggaggcaagaaaagcttgtgataagatgatacatttcttagacacacagagtatttctactctgttttccacacgtctcatagactctgtgccttgagatcttttaatatgcatgttcagagacttgtggttataataaagcgaaacttaattgatgtgctgcagtaatatgtagctccaactaactcttataaagtgacagcccatctacagagaaaa

SEQ ID NO: 217564 - DNA, 581 bp, Homo sapiens
catgtcttataccagactcatgtaatagaggaaaggtaaaatgtcttggcttgttgagggctcccttcttcaagtagttgtctttttggtgaggggtgtgcagcttgattaaactacgtcacgaaggtcattgaccaaacgttgtctttaatagtttcccataacgtgtattcctcatagggagcttttctcagctcaggttatttccaccaatgttctcaaaccaaaagaatggtctttgcagtaaaccgacaaattcccacatttcatcctttatctcacacgtaagtgatgacagcatttatatttcttctgctgtctgggccaagaacaactggattaatgagcctatctctttttcataagtgcattatactctctctttgaccttytaagcatgggaatttttgattttataagactgattaaagaggagaattccccatccccatgccactgttcttctcttcacatttccccccctaaatggccagccatcaacgaggatgtattcagtaaatatacacacagacatatacactctatgcacactttcacatcaactggaatgtagtgtctat

SEQ ID NO: 217565 - DNA, 634 bp, Homo sapiens
tggctggccatttgtatatcttcttttgagaaatgtctgttcatgttctttgcccacttttaaatggggttatttggttttgtttgtttgttttttgagacggagtcctgctctgtcgccaaggctggagtgcagtggcacaatctcgaagtagctgggactacagcgcacgccatcatgtctggctaattttttttattgtttgtatttttagtagagacagggttttgccatgttggtcaggcatgtttcaaactcctgacctcaagtgatacccctgcctcagcctcccaaattgctggaattacaggtgtgagccaccacacccagcctggttatttgttttttcttgttcagttatttatagattctggatatgagtccttcgttggatgcatagattgcaaatattttctcccattctgtaggttgtctgtttactctgttgatagtttcttttgctgtgcagaagctctttagtttaaktaggtctcgcttgtcaatttttgttttgttggttttgttgtgtttgtttctgaggtcttagtcagaaattctttgcctagcccaatatccagaagagttttcttctaggatttttatagtttgaggtcttaacatttaaggctttagt

SEQ ID NO: 217566 - DNA, 370 bp, Homo sapiens
atactgatctgcaggtcttatgactgtcaggtgctatcaaccacatatctctctacgtaatttgatttctttctcacagaaaaccaataaggaagacaytttttctgtttcccagatgagaaactgagggacttgtctagggtcattcaagctatgatcatagcgtacatagagcctaagtcctagctttttggctaatttcttctaattcattccgtctttcctttcttccttttttctgttcttccatccttcctccatctattcactcagttcaatataatgcagagtctactgtgtgatttgtatcgccctttacacccagaatgttaattcttacagcatctcagtctactgttaagtagtattt

SEQ ID NO: 217567 - DNA, 470 bp, Homo sapiens
ataggttacgtgcaaatactatgcctttttatataaggaamttgaacatctgaggattttggtatcttgagggaccttggaaccaatccccctcagacactgagggacacttgtatgcttttttaatggggcaagtatcgatcaatatgcagccactggggccagggagcagtagccattcctgctaaagccagattttcaggcacaaacatcccgaggggtgtctgacaggatcatttccctgtgattcttcaggccaatgtgctgattcatgggcaaacggtctctctaaagtggagcacacctgcattatgtcctgcagtagatgcagctcgtttcaaatgaaacctcagtgaaaatggccttggtgacaatgaacactcagacatcatatcggtgggtgaaagatgctgaaggcaggacatgggatttgagtgattgcactcccagcacgtccatgtttacagagc

SEQ ID NO: 217568 - DNA, 410 bp, Homo sapiens
gccctaccatttattttatgtgaatcctaaatgcagaatgaggaagttgatttcctcctcccgggcggctaaaccccagtggcagaaaaaaatggatattgcatttctctcgggggactatgtgacggttcactcacgggctttcaaaccccaccaaccctacagggcctctgttgcctatggggcccgagtgcagaaagatggacactaggcagagttttggggacaggactctgatgagcatcaggcctacagggactggcgactggtccagctgagccctgaggctgactgctaccacgaaggaccttcttcaaacccagctcagtcctggtctccgggaagttaaagtcatcgtacactatctcaagacaccacaatcatcartggattcccagagaagaactggt

SEQ ID NO: 217569 - DNA, 400 bp, Homo sapiens
tgtggcccccaggaagcagactgattgacagcaagttctcccaagtgctgtagaggaggcttgtcaatcttaagtttgctccagtgtcagggaatttgattgtttgccagttctacttggacatggatttactctgcctgcaaatgcccacctttctgtacagcatctcatctgcacctccagaaaataaactgtggtctcagtgaggggcaggcactgatatattttctcccatttggaatcacatgctcacttctctgcttccacagcttcccccatgaggtacttaatttccttataatgagttgtcatagatccttcctccttactaccttaccagctctgtgaggaccaacaattccctattatataygttcgtaaatgattaataaatgtttgg

SEQ ID NO: 217570 - DNA, 580 bp, Homo sapiens
  misc_feature (1)...(580): n = A,T,C or G
gtcccaggtcttatttagtctgagtggactccatttcctttctttttggataatgcactgctgtcctgcccttggtcagctaatcctctcctgtccctggtctagcctctgtgtagccttctgacctctggagacaggaagtgcagagatagcayattgcccagagctcctgacacaaggctcgtcctgcccacgatggattctttcctctgaagccatgtgtttgtcaatgacttcatgttgagatttgatttattgggcatctttcccgtgtacagctctgtggtaggtgttaggtgatgtgagaatacaganaatgattcatggactcttatcctcaaagagttgcagtcttagggcagatatgacaggagcacaaataactaggaagtgtggtgaagcataagggccataatggtggtaaaaaataaaagcccacagacatttagaagagaagttatttctaggttgatgagatgaattaattatacttaatttatgtgctttctagttggtatttatctatgaggtttgtgcaaagatgagtggtcagaagcttacttgttctgggttctcctaa

SEQ ID NO: 217571 - DNA, 580 bp, Homo sapiens
tataattaaaaagaagtgaaaggacacagacttcccaaattctttgcttgatgacacaaagttggagctaaatctcccctatgtcctctatgaaagagaccaaggtctcaacggcagactgctccacagcagctcagagtatgagccctgccacttcctgaccattcacaccccaccccatccaaaccaaaggacggcatttagtggtcctgtgmagtgttcctccaagtgctcatggaaatgagttggttcacctcctccatcagcccagtagcccacctggaaaaccagattctaggcagaaagagggtgtcagagtttcagaggaatggccaggatctctctcctcaggcaggccagagaccccactcttagaatgttctaggagaagccctgaactggcagccaggagaccacggttctagttcctctctacctcttaccacccatgtgaccttgagccagttttctcatctataaatgggggtgacagttccatgtcatagagttgttttcagtattaactgaaatcatgtaccttgaactacaaaaaacggagagtgctatgcaaataaagatc

SEQ ID NO: 217572 - DNA, 465 bp, Homo sapiens
gtctgataactctatttcctcaaggaagtttcctaaaagtggaaccttggggttcaaaggtcttaaatacaaagtttttaaggttcttaaaacatactgccaaacttttctagaaaagttctcccagttcaccttctcaccagcagtatgtaagagtccctaactcactacatccttgctaggactgagtattatttttatttatttatttatttatttatttatttatttatttatttaaattaagacagggtctcacactcagtcacccaggctggattgcagtgctgagatcacaactcactacagsctcgaccttctgaggagaactcccaggctcaggtgatcctcccacctcagcctcccaggtagctaggactacagacgtgtgccaccatgcccagctaatttttttgtatttttagtagagacaaggttttactatgttgcccaggctggtctcaa

SEQ ID NO: 217573 - DNA, 410 bp, Homo sapiens
atattaaaaaggggattaattataatatctaccccaagggtctgttttaaggatgaaattagataatgcatgttaagtacttgttacatgactggcaggcagtaagcactcaayaaacgctagctctaatcatcatttataactcttaaatggctttatcaggatgctgtgattcaattaacagaaatgtgaattaagcagaatttttttaggggtgtgtctagacctgcaaactgaggcttaccggaaatctctggatttcactcactgaaatctactatttctctacacagataagaacaagtaataaaagacgctcttcaatgcctttctcatcacagaaagatgctacacaaagggagagtgttgttattgacagcatcccacataaaatgagaattctgtcggtg

SEQ ID NO: 217574 - DNA, 611 bp, Homo sapiens
gtgttaccgcctacctcagaggtgggaggaagagagttggtttttctttgtcttttatccatcctatttttctattttccttgcttatgtcttcctctaccttctcctttctcccattttcatcttctagcaatctgggcagctatagctgactctccctgaaggaagagggaagagaatgctttttgctcctccatcagtgacttctcataaggagtcaacagagcattgtgaaaacaaattcataagaagcccgcctttatctaagggttggatgactggttatattgctaaattggccatcccagacccttctgagccattaggtggggagatattgtcattattatactatagttattagtagttgagcatttagtgtggatcaggcagttaaacaagcactttacttctccaaacctaagaggagactgtgttgtctgttttatagaacatggcttgacttggaagatcagtggttgtgatttgtgctatttgtttaataaattattactgaggccaaataactgaaagatgcagaaaataaaatctattaayactctgtgtagactctttcaatagtcatttcatttagtctcataacaatcttg

SEQ ID NO: 217575 - DNA, 587 bp, Homo sapiens
cacccctggaagtgttgtaaccaacacaggggtcataaaagtgttaacaacaaacccattaagatattgtttctttcccccaccctttcatatccttggagggccaggttctcagactgtggccagggaaggcttacagtgacataaacaggaaagtacttttggtttgtttgtttcctgggaaatcatcccatggaaggctagcagastcagctggccctttcctgctctaagtgaaggtttcctgagaaccttaaaatcctttcctaccctccagaacgtcaatccagaatgacatgcagaacagggcgtggtctctggcatgggtatgaaaacaccaagagaaagaagtcatacccatccattggtgactgggcaaactccatatggtacagccatatgatgggacgccagtcaatggtcaaaaatggacccggagacgtgctataaaatggatggacctcaaagacgtgatgctaagttaaagaagccagacagtaggtgaaagaccgcctattgaatgattccattgatagaaaatgtctagaaaaggtaaatctgtggggccagaaagcagattagtggtt

SEQ ID NO: 217576 - DNA, 607 bp, Homo sapiens
aaggctagcagagtcagctggccctttcctgctctaagtgaaggtttcctgagaaccttaaaatcctttcctaccctccagaacgtcaatccagaatgacatgcagaacagggcgtggtctctggcatgggtatgaaaacaccaagagaargaagtcatacccatccattggtgactgggcaaactccatatggtacagccatatgatgggacgccagtcaatggtcaaaaatggacccggagacgtgctataaaatggatggacctcaaagacgtgatgctaagttaaagaagccagacagtaggtgaaagaccgcctattgaatgattccattgatagaaaatgtctagaaaaggtaaatctgtggggccagaaagcagattagtggttgtctggggctgggagtgggcacaggattgaccgcagactagcacctaggctttttttggggtgatgaaatgctcagaaacgcgattgtggtgctctctccacagctctataaatctgttggaagtcactgacttgtacacttaaagtgggtgcattttatgatatataaattacagtctgataaaggtgttagaaaaaaaggagagagaggaagag

SEQ ID NO: 217577 - DNA, 607 bp, Homo sapiens
aaggctagcagagtcagctggccctttcctgctctaagtgaaggtttcctgagaaccttaaaatcctttcctaccctccagaacgtcaatccagaatgacatgcagaacagggcgtggtctctggcatgggtatgaaaacaccaagagaaagaagtcatacccatccattggtgactgggcaaactccatatggtacagccatatgatgggacgccagtcaatggtcaaaaatggacccggagacgtgctataaaatggatggacctcaaagacgtgatgctaagttaaagaagccagacagtaggtgaaagaccgcctattgaatgattccaytgatagaaaatgtctagaaaaggtaaatctgtggggccagaaagcagattagtggttgtctggggctgggagtgggcacaggattgaccgcagactagcacctaggctttttttggggtgatgaaatgctcagaaacgcgattgtggtgctctctccacagctctataaatctgttggaagtcactgacttgtacacttaaagtgggtgcattttatgatatataaattacagtctgataaaggtgttagaaaaaaaggagagagaggaagag

SEQ ID NO: 217578 - DNA, 466 bp, Homo sapiens
aacccacattcttaacctctatgctatactccttctccacatcagatttaatttggaaaaaaaaaartcccagggaagaaactgttagaaaattaagtaatattctcactacagtacaatggaatgccctgagtgtacccttctccgcactttgctgcctctggttctagattttagtaaaagctgcttagtcagagttggcccaattaataaataagtatctttcagaaacctcaaacttgttccactcctgcctgattttgggatgggagactgagcagacccactggggtggtggaatcactcaatcacactgaaaatgacatccaaataaataaagaagatcaagcgtgccatctgggccctgcacacagcacgtcatctgctgcagctgcagggtgctgtttattctgagctgtcttggacagagaaggagacacgtgagttcatgcagggttaaagaatt

SEQ ID NO: 217579 - DNA, 565 bp, Homo sapiens
aagcttcggacaacgaaaatgactacagaaatagcaacataatgactggtgtgagcaataaatataaatacttacagaactatgaygaagtaagggataaagaggaaagagaagcatatgtaatggctatctgcccggggcagctatgtgtagtacagtacacaaaatcacaggagaatggaaagaacatatacaaaaaaaagttgaatgctctcaatttttatattaattatggtggtagtagtaaagattgtgactctaatactgtgtgtaaggagaggtaaagtaaatgaataattacaatatattctaattcaactatcacatgtgtttctgagagacatggttctcagtgtgaaaaaagaaatgcagatatgatatacacgaggttaaataaaaagtcctgtcgtcctgaatttgagttggaaatatcaatatgaactcatgatgtaccttgtgatatacatatgtatgtgtatttcatatagatgtatgtttatactgatatacatatatgcatgcacatatatatttcctagctctgttcactcaaaaaaatagacaa

SEQ ID NO: 217580 - DNA, 565 bp, Homo sapiens
aagcttcggacaacgaaaatgactacagaaatagcaacataatgactggtgtgagcaataaatataaatacttacagaactatgacgaagtaagggataaagaggaaagagaagcatatgtaatggctatctgcccggggcagctatgtgtagtacagtacacaaaatcacaggagaatggaaagaacatatacaaaaaaaagttgaatgctctcaatttttatattaattatggtggtagtagtaaagattgtgactctaatactgtgtgtaaggagaggtaaagtaaatgaataattacaatatattctaattcaactatcacatgtgtttctgagagacatggttctcagtgtgaaaaaagaaatgcagatatgatatacacgaggttaaataaaaagtcctgtcgtcctgaatttgagttggaaatatcaatatgaactcatgatgtaccttgtgatatacatatgtatgtgtatttcatatagatgtatgtttayactgatatacatatatgcatgcacatatatatttcctagctctgttcactcaaaaaaatagacaa

SEQ ID NO: 217581 - DNA, 510 bp, Homo sapiens
atgaatgccgagctattgaatttcctctgctctgtaaagcctattgattttgtgacagtcaaagataagttatgcccatgaaagttgtttttttcttccttttccttcacaacatattttttcagacatattggcattggggatttaagtataactgttattggtttctttckatttaaatgtaggtcagtgctcaagcgaaactaagaaccatttttactgtgacttccaatgcaaaataaatgaggcaagaatctccagacctggggtcactctgttatgttatttcaatctccagcaggaatgctccaggcatctcaggcatttcaggaattctgacattagcaatgatccacttattcactctttgtcctctctctaccacaccactctccgcttattgacctgtattcccttcccaccaagccataccataagatcagtcaaccaaggtgtcgaaaggcaacacttgaaagaagcacttgctgccatctaaaatgtctgcagtgt

SEQ ID NO: 217582 - DNA, 544 bp, Homo sapiens
tccatgatgtttaattccatacttttcaaatgtcagactttttaatgttgttttcygagcacttgaggacttagaattagctgtgtttgaatgattaacagtgatagaggtaatgattatagtaattcaagccattgttataaataatatatgtttaatatatcacagctttatcacttttacattacaaacaaaagcttaccatttgtttcaaaaagaaaaaaaattatcatttttacattacaaaaaaagcttaccatttgcttcaaaagaaaagttcatagggaagaagtaggctttgcaaagaaatcagttctaggatattcacaccctgaacaatatgatgactcctgatatttctcttggattagaattgatttgaatcttcctttaccacaagcaacacactatgcaactagccagaacctacatttttggcttccttttttgtctcaaatatcagttggtagaattcaatagaaaagagatgtttgagacactgaaccatgttggtaaagtactgttttgtttggaaatattacaa

SEQ ID NO: 217583 - DNA, 505 bp, Homo sapiens
taaaataccacagactgcatggtttaaacaacagaaattaatcttctcacagttctggaggctggaaaatcaaaaattgagatctggcaaggttcagtttttggtaaggtctatcttccttgcttgtagttggccaccttgttaacgtgtcctcacatggcctgtcctctgtgcatgtgcaaggagatatttctctctctcttcctcttcttagaagcccaccagttttattggattagggccccaacttggtaacctcatttamccttaattacctcctaaagacattatctctaaatatgatcacattaggggttagagcttcaacatatgaacttgggatagaggagggcacagttcagtctataacagaaaataaatatggagatttattggcagtgtctcaactgctgaaatcttttttttttttgagatagaaaattacttaaatgtgtaactaaatgtgacttgatctttaaattttggtagtgtttttaaagataaa

SEQ ID NO: 217584 - DNA, 598 bp, Homo sapiens
aagaagataaaatcccaaacagtaaaaaaaaaaaaaaaaaaagataggggtagatatcaacagacaaagaacttgtaacagatttctgaagaccaacagaaaatgaaggactggttgtgggtgatgcagttggccagtggacaacacagccatgagttcatgtggagagatccatgaccctggctggagtttatcctcacttaagaactctgaaaaggattaggcctcagaaatggaagacactactaaaggtaaagaaaaagctgtggaaatgacaaaagaaaaattaaattctgtgtataacccagtcgatctccagtaacaaaatgcctggcatcaagcgtatctacccactgccactaccactgtcactgcaaccacagcaaccaaggacttttctctaaagaagctgaagtaactattygggggaaattagggtagatggtgtgggagttgacaatccacatcaaaactctctgtactctgccatttagggacaccaaagcatgatagctcattccttgttagttcttcctggagagaaggctgttggttatggagattgtaaagaagatccctgcttctatactatcaccca

SEQ ID NO: 217585 - DNA, 480 bp, Homo sapiens
ttgaaaatatgtatgtattctcttctccctgcctttcaacttgtgctctcaatttgattcttcccctcaagtttttgagtactcttctattaaaaaataaaactaataaaaaccaaaactgtcccctgatcccacactccctttatctccatcacagccaacattcctgtaagarttgtctactcaccactgtctctatttcctcatatcccactccttcttcaaccactccaacttgactccttcatacatcattccatcaaaaaagcacccctaaactcactaatcagctccagaaagtttagtcaaaagggtactttttggtctttatcttacttgattcaacatttgtattagtcagagttattcagagaaacaggtaaataggatagatagatagatagatagatagatagatagatagatagacagatagatggagatagagatttattatggaaattggctcatacaattatg

SEQ ID NO: 217586 - DNA, 480 bp, Homo sapiens
ttgaaaatatgtatgtattctcttctccctgcctttcaacttgtgctctcaatttgattcttcccctcaagtttttgagtactcttctattaaaaaataaaactaataaaaaccaaaactgtcccctgatcccacactccctttatctccatcacagccaacattcctgtaagaattgtctactcaccactgtctctatttcctcatatcccactccttcttcaaccactccaacttgactccttcatacatcattccatcaaaaaagcacccctaaaytcactaatcagctccagaaagtttagtcaaaagggtactttttggtctttatcttacttgattcaacatttgtattagtcagagttattcagagaaacaggtaaataggatagatagatagatagatagatagatagatagatagatagacagatagatggagatagagatttattatggaaattggctcatacaattatg

SEQ ID NO: 217587 - DNA, 450 bp, Homo sapiens
ataattgatatccatatcatattcaatcattctctttttattactatcagagctgtttaacttgacatactatcagtttgtaaaaacacacttttggtttctgtaagttcatactttctgtcattaatacaaatgcatagatttmagtaaccttaaacaactacttataggaggcagaataatttttaatgacatgaaatagatatcctcctatttccccattgttgcttctaagccatttttccttcatcactgggcgtctcagttccttggcatgccccctctaaagagcttttcctccgtaactgtgctaccttgaaaaatcccagttacaagcatccccacttctaacctccaatctgttactctagcacttgcgttttaataacaccttgactacatcaggaactttaatccattcacgtcgctgttggtcacctccatgttccc

SEQ ID NO: 217588 - DNA, 468 bp, Homo sapiens
ctcactgtacagtatatactcactgtccatactcactgtcttcactttctcactttcagttatatattcaaccctctctaattaggcattggagttcaccacttaaataaatctatatttccagttgttcagtccaaaactttacattctgcctttacattttatcgtaaatattggtacttctcattcacctcatgtcatcactggggtttgagcctctgaaagttttcatgtgattctagcaatagacttctaacaactttcttactacttactacttatttatgtattaaccaaagtctttttaaaattataaatcaaatggtgccactccctacctaaaaatagtactttttcagttgacagcagaataayatctaaattgcttaccaagaatcatgcataatctccaaatctaggatcagacatggttgataattatcatgctcccatctaatatttttgatg

SEQ ID NO: 217589 - DNA, 380 bp, Homo sapiens
agagttaataactgaaacacaccatgaaaatgctctgtggtcaaacagatttgggcaatgctggttaagtaaagttaaagagttggttttgcaatatgacttctcagagctrttaatatgttagtatatatttgaatactcaagagggagctataagcagtaagcaaaattttttttagaatatatttgatgaagaaattatttttagatggaaatctataaggctgttttatataaaaaaggaaggcactaatctttctcttctgaaatgccaaacttcaatgatgagtcctgcaaactggttccttatggcacgatgctatccaggaataggatagcattgatgtaggattggctatgtgttcgtatctgagtgttag

SEQ ID NO: 217590 - DNA, 380 bp, Homo sapiens
agagttaataactgaaacacaccatgaaaatgctctgtggtcaaacagatttgggcaatgctggttaagtaaagttaaagagttggttttgcaatatgacttctcagagctattaatatgttagtatatatttgaatactcaagagggagctataagcagtaagcaaaattttttttagaatatatttgatgaagaaattatttttagatggaaatctataaggctgttttatataaaaaaggaaggcaytaatctttctcttctgaaatgccaaacttcaatgatgagtcctgcaaactggttccttatggcacgatgctatccaggaataggatagcattgatgtaggattggctatgtgttcgtatctgagtgttag

SEQ ID NO: 217591 - DNA, 485 bp, Homo sapiens
aagcaacggagcaaaacaggaggatgggacaagaaacagtgcttgagggtttaaaaaggtaagaagttaatagagttaaaggagaaawttgatattaagaaaagccacgggagaaaaacagatacaacacccccctaataattttccttggagctggactactcaataccaaggttggaaattaaaagttaattttttttctcaagtggttttgagaaaaaaaaaagtggaaacaatggcagagggcttgggttaaaattatttactaaatagtaacaagccaagtttcttgacttgtaggatctatagctacactgtctaaaatggtaaccactagccatattatttaaatgaattgaaattaaataaaatttaatatttagtttctctatcacccttgccacattgcaagtattcaataagcacatatggctagtggacagcacacagatctaaaatcttgccttttttgcagaaagttctat

SEQ ID NO: 217592 - DNA, 238 bp, Homo sapiens
cttctctctgaacttctgtctcccactgccatgtgaagaaggacatgtttgcttccccttctgycataattgtaaggcctctccagccatgcagaactgtgagtcaattaaacctctttcctttataaattacccagtctctggcagttctttacagcagcataagaacgaactaatacacaaacatatctcagaattgtcccattccagaagcaagagaattagagtattgtatcag

SEQ ID NO: 217593 - DNA, 508 bp, Homo sapiens
gtgtggcccatttaccctttgctcagacaaaatatcttgggtttagggctatgcccaaataaataaatcaataaatcaatctgtgactttgaacataaagaaatataacctttcaaagtgcagatctttttcagatgaattaaaaaggcttattcatctggtacattcaatctttaccttaatgatctcaacccccatattatagcagaggggcatctcagtcatggattttatgtgtttgtgcgcacgtgtgtgtgtgtgtgtagccttggcattgtgaaaatgcctaaattctgattgaatagcttgtccttaaactcccaaactgyttcaaccatcatcaagtgagagatgcccagtcattttctaggagccagggagtctgctggcttctagtttcaagtctctgtcaatagagatgagctcattaataactcacatgggataagagtaattattgacgattcctaggtaaaatatctctgaattatggcttaagatgctttag

SEQ ID NO: 217594 - DNA, 618 bp, Homo sapiens
ttttattcaaagttcccaggtaattctattgtttgrccagggttgagtactactggtctacacaagtcatatgtgaccattctgcttcctgtcatccctcccactgttaatttcattcaccattttctcttctttgtctctaagtacctttgttctatttctctccggttgtctatagttttacaagtctttctaccttcctaaattcttggttactttttgacttattgaacacccagagcccaaacagttgatttagataaagaccataatcctcattcttaaagaagtaagaaagtttgcatgtggtgcttgcgtgtgtgtgcatgtgtgtggtgtgtgtgtgtgtgcatgtgtgtgttatgggtagtatgagtaaaacttgtaataacaaccaagttcatatgctgtttgatagaggttcattgcagcatctttgggcaaaaccacagcatactttgagttgtactaacagcatagacagtttaatgcccacattcatgttagaaagcaacaactctactcattaaaattgggtttagagttccatttgaaactataataatttatgctaactgcagttgcagtcttcttagtttatcaattatcctatctagt

SEQ ID NO: 217595 - DNA, 535 bp, Homo sapiens
gcttcctgtcatccctcccactgttaatttcattcaccattttctcttctttgtctctaagtacctttgttctatttctctccggttgtctatagttttacaagtctttctaccttcctaaattcttggttactttttgacttattgaacacccagagcccaaacagttgatttagataaagaccataatcctcattcttaaagaagtaagaaagtttgcatgtggtgcttgcgtgtgtgtgcatgtgtgtggtgtgtgtgtgtgtgcatgtgtgtgttatgggtagkatgagtaaaacttgtaataacaaccaagttcatatgctgtttgatagaggttcattgcagcatctttgggcaaaaccacagcatactttgagttgtactaacagcatagacagtttaatgcccacattcatgttagaaagcaacaactctactcattaaaattgggtttagagttccatttgaaactataataatttatgctaactgcagttgcagtcttcttagtttatcaattatcctatctagt

SEQ ID NO: 217596 - DNA, 590 bp, Homo sapiens
ttatatcttctgtagtttcatgtagtttcctcctttcttgcttaaagattttcaccataacctctgtgtgtgtgtgtgtgtgtgtgtgtgwgagagagagagagagagagagagagagagagagaggcaacattttcacaaagtttggtggttaaggcagaagaatcgcttgaacctgggaggcggaggtttcagtgaaccaagatcatgtcactgcactccagcctgggcgacagagtgagactccatctcaaaaataaaataaaataaaataaaataaaataaataaagatagaaaaaagaaaaaaattaaaagaatgtctaagatgatactaggaatgtctttctttggtcggttttatttgaaaatagaagagacataattaggattgttggcaagtgaagaaaggctaagtggaagagtatggattgaagatgatagaatgaaataatgtttgatggatcagtacaaaaaatagaagaggagaaagggaagagaacacaaaaaaacactgcagaaaatacagtagctcagtgaactatggcatacaatattcagtcaaattaacatcaactcaaaataggtggga

SEQ ID NO: 217597 - DNA, 469 bp, Homo sapiens
agatcgataactgaaatacagaaaggctaagtaacttgcataagtcagacatctagtaagttgtagagtcaggaatcaaacatagggattctaattccacaacctgcatgcttaatcaactctaatataagcagtcaggtttgattccttatggatttccattgttaaaactgtataataatattctcttttctgacttttaacacgtctttaaaataacagcaaactgaagcaacttcaaaagtagaataaaaaacatttttaaagaagagaataataaaaacaggtattctttgtayagaacagaagatttctaagataaaaacaatactattcattcatgcagtaatttaccaatataaatatcactagttaatcttaaagttatgcaagatgactggtcaaggtcctaaatgatccatggaaaattagtttcacatataaattcaattgtgttaatagtggttat

SEQ ID NO: 217598 - DNA, 469 bp, Homo sapiens
aaccgtttatctttgcaagccctctaaataaaacatcatattagaatataagacaaagcaaaggaactaatattagtttagaaattgccctcagtctctgaactgcaatgtggatgtcagcgtgcttgtctgaaccgtgtgcatgtgcaccatgtgcgtgtgtgtccacagtgaataggtgaggacttttgtcaaagtgtggtcactaaaatgaacaaacccaaacataactgtacatactcccattccacagcttagtctaacatgcaaaaagggcatgattagagattgttggtcattaagaagaacaggaggaaacgttctggagccttgcsactatgcctggggaagagaggatctcaacacccctcagccatctctgggccagaggaaaatcacctaggggttgtcctaaagagttccacgggagaagagattatgctgtctgatgaccccttacggttttctc

SEQ ID NO: 217599 - DNA, 469 bp, Homo sapiens
aaccgtttatctttgcaagccctctaaataaaacatcatattagaatataagacaaagcaaaggaactaatattagtttagaaattgccctcagtctctgaactgcaatgtggatgtcagcgtgcttgtctgaaccgtgtgcatgtgcaccatgtgcgtgtgtgtccacagtgaataggtgaggacttttgtcaaagtgtggtcactaaaatgaacaaacccaaacataactgtacatactcccattccacagcttagtctaacatgcaaaaagggcatgattagagattgttggtcattaagaagaacaggaggaaacgttctggagccttgcgactatgcctggggaagagaggatctcaacacccctcagccatctctgggccagaggaaartcacctaggggttgtcctaaagagttccacgggagaagagattatgctgtctgatgaccccttacggttttctc

SEQ ID NO: 217600 - DNA, 528 bp, Homo sapiens
tccatgggactgtaatgtattaaaagggtaagctggattaccaaagatttaataatttaatatcatggcttggaaatctgtctccacttcattcaaaggcaaaatctctttgtgatgagaaactattctcctaattcattgaagcctcccatttgcctctgatgaaggagctagtgctaatgtcaaatccrtgagtcaggtgtagttgctatgagtcactgaaaggaatgacactagtcctcaaccatctgttttcagttgtgctgacagcaaggtctggatgaggtaagttgcagctactaggtcctgcatctgcgacttccacacctatccctaacctattctatgccaaaacttgaagtggatgatgtctaggcagagggacttgctatatattcttgatatgccactggtaaaatggtggctttgtacaaaatttcatgtttaaaaagtggcaaacaataaagcaaggtaccttgacatagcaagaagtgaaataatactgtaagtgctcagtggcctcaataa

SEQ ID NO: 217601 - DNA, 528 bp, Homo sapiens
tccatgggactgtaatgtattaaaagggtaagctggattaccaaagatttaataatttaatatcatggcttggaaatctgtctccacttcattcaaaggcaaaatctctttgtgatgagaaactattctcctaattcattgaagcctcccatttgcctctgatgaaggagctagtgctaatgtcaaatccatgagtcaggtgtagttgctatgagtcactgaaaggaatgacactagtcctcaaccatctgttttcagttgtgctgacagcaaggtctggatgaggtaagttgcagctactaggtcctgcatctgcgacttccacacctatccctaacctattctatgccaaaacttgaagtggatgatgtctaggcagagggacttgctatatattcttgatrtgccactggtaaaatggtggctttgtacaaaatttcatgtttaaaaagtggcaaacaataaagcaaggtaccttgacatagcaagaagtgaaataatactgtaagtgctcagtggcctcaataa

SEQ ID NO: 217602 - DNA, 535 bp, Homo sapiens
tggcctggtatgagtctatgaagctccctctggttattccagtttakgctattttcttttttaagcagatattacatttcttgcttatagtataatagatagcatttcagttttagtatattattaattgatttatgtgttttacagtcagatttaatatttaataaacactgaatatacaagtttcatattatctaataagatcatattaaattctagacatttagtgtaataaaataaatttttagagagcaacaaaaatagtatcttatatttgtaaaattattttcatactcaaaactttttcacatatattatttcatttggttcttaagtaatcttgtgatgtatgcaaattggataattttatttctatgtaaaaatatacacagagcttatggtgattgtatgaagtgacaaaacttccaaaatttgtatgtggtagagctgaggttaattaacagttcttctggcatataatattcagggagaaatatacctagccccaatttgtagagtggattactgagccaat

SEQ ID NO: 217603 - DNA, 579 bp, Homo sapiens
agtgatgtggagcagtttttcatgtgtttgttggctgcttctatgtcttctttttttttttttttgagaagtgtctgttcatgtccttagcccaccttctaatggagttatttgttttttgcttattgatttgtttcagtttcttttagattctggatattagacctttgttggatgcatagtttaagaatattttcttccgttctacaggttgtctgtttactctgttgatagttttcattgctgtatagaatctctttcatctaattgggtcccacttgtcaacttttgttttcattgcagttgattttgaggacttagccttacattccttgccaaggcccatatgaaaaagggtgtttcctaggttttctaggaattttatagtttgaggatttacatttaaatctttaatccatcttgagttaatttttgtatatggtaaaaggtaggagtccagtgtcattcttctgcatatrgatcgccagctattccagcaccatttatgagatagacagtccttctcacattgcttgtttttgttgactttttagaagatcatatggctgtaggtgtgca

SEQ ID NO: 217604 - DNA, 480 bp, Homo sapiens
ggatatccttttcagtaagttgttcttatttatttttccataaaattatgacctgattcattatcttggcattgatytataactacagttctttggaaaatatataaggtctgaagtcaggaaaacatctcagaagcattcactctaccatgtaaccattaatttaccctgatttggaaaaatagcctgaaaactagtgaatgcttccatctcaggagaaacttcagtgtcactagatatggtaaactgtagtatgctattttaacaaaatccagagcaaaaaatggatgaatccaggggaactacctatagcaccatctgaggcttaggatgttaaaaaaaaaaaaaaaaaaaaaacagaaacaaaacaaaacaaaaactcttctggtaaaataaaatgattcttaaattgataaaaactaatatttaacattattatagagaatcattaagcaaaatttgaaagtaaaaatatggcaa

SEQ ID NO: 217605 - DNA, 480 bp, Homo sapiens
ggatatccttttcagtaagttgttcttatttatttttccataaaattatgacctgattcattatcttggcattgatttataactacagttctttggaaaatatataaggtctgaagtcaggaaaacatctcagaagcattcactctaccatgtaaccattaatttaccctgatttggaaaaatagcctgaaaactagtgaatgcttccatctcaggagaaacttcagtgtcactagatatggtaaactgtagtatgctattttaacaaaatccagagcaaaaaatggatgaatccaggggaactacctatagcaccatctgaggcttaggatgttaaaaaaaaaaaaaaaaaaaaamcagaaacaaaacaaaacaaaaactcttctggtaaaataaaatgattcttaaattgataaaaactaatatttaacattattatagagaatcattaagcaaaatttgaaagtaaaaatatggcaa

SEQ ID NO: 217606 - DNA, 484 bp, Homo sapiens
ccaacgtagtcaagaaaagaaaaaggagatcccaagagggatattatgaaagctttggggagtgaggaggtggtctcctattttgccttcacactaataaggaaggataaagaggtagctcatggctgcccagttcccaatagcccatttccacgctatccacctcagccctttccacatacacaaaaatattcacagctctaggctactcctttaatttctaatttttgggctattgttctaattccctttattccagcaaaatcagragaattgggtaaccaacagaggctattgctcagatgatcagagaaggcacctgtcgcaggaataaatgtctgctattttcttgactagttaatggactacttagaaaaaaaatctcaacgtaaactgaaggtgtaaggaagatgagactgaatccaacataacagtttatcttattgaacaaatggatatgaaatccataatatctgttgactaa

SEQ ID NO: 217607 - DNA, 472 bp, Homo sapiens
tgactaatctgcaaagtggctaatctactgaaagctaatgaacagtcaactgtgatttgatctgaactgtgcatggtattgagttatctgtagcttaccttatttccactcaccctccaaaattctatctgataatcaaacattaactataattgcatattgtcccccaaatttccctatgcatgtaattttgcagcattctaaccaatcctgttttttcttccaaaagtttcatttcttttcagggatcctaagatatagccctatatattttaaatatgatactcatgggcatawgtaaaaattgcccaacttataaatttggtttttgatgttcaactctgaaaaactgggccgaaattgatgtctaaacttagggaatagtttccaaatgctttgaactttttagtctagctaattctttgctccaaaatgtgtttacttgatggcatcatccatatcttttaaattt

SEQ ID NO: 217608 - DNA, 565 bp, Homo sapiens
agatgtgacaccaaagcacaaaaaaaagagacaaattggactccatcaacattttaaaactttcatgctgttaaggacaatcaggaaagtaaaaagaggtggtaaccaggaaaatggcagacaggagacaggactaacatgcagctcccacttggatggacagaacagtgtatgaaggttcacatcatgaatttttcctctaagaaccaccacaggaacatattaggaaaaccaaaataattcacggaccctttgaaataagtggcttgccactggaaactctgagacagccaaaaaactgtgagtccccgaagtgtgagaggggaaacagtctgcagaacgagcgatccacgtggggaaccgtgaaaatccagatcacaggagaaggacttaaccttacctagaggtgaaatggatttagggagccaagcaaaayacaaaagtagaaaagccagcagaaagacccataggcactcccaagtccccagcttgagcccagggaagcaatcccaggcaatatctcacaggggtccttggagaaggcagccagaagaactggggaggg

SEQ ID NO: 217609 - DNA, 485 bp, Homo sapiens
tctgtgaactgctcatgcaagggatctaggttgcactctccttatgataatctaatgcctgatgatctgaggtggaacagtttaatccccaaactatccccacactgtcccttcccacggaaaaactgtcttccttgaaaccagtccctggggccaaaaatattagggaccactgatctataggattttcattttatttaaatgagatgtgaaagcatgggaaagtttggaaaagtctcatgatcttatttaggatgataaaatcatgaattaaaaagctacttggtggagagagaaagcaaagagaccagcaaggaggctattgtagcatcaagtgacaaatgatggtggattgagccakaatggtggcagtggagtggaatcaggttctggatattctttgaagatggatttgatatggtaagggaaggagaggaattaagaatgggtcctagattcctcagctgagctgggaaaatccattt

SEQ ID NO: 217610 - DNA, 373 bp, Homo sapiens
gtggagatatgccaaaagtaacagctgtaatcattagaaaccttcatgccactagacctagagagtacctggctataggaatgctttcttcaatatactctcagacaggcatttttaaaaaactttacrtgctctaagtgttgtcctttatccatgtaattttggtctgtctttgaaaaatctatctccatgctttctcccattctgattagagggtatgctatttttcccttgaaatgtctcaggctcctggggcctgctgtctaagaagaggccttgtattcactcagttttccacacagcctatttcaaatatcccagttcataactaccttcattgttacacatcaaactcttattcaaaccatgtggc

SEQ ID NO: 217611 - DNA, 578 bp, Homo sapiens
acacagtaattctccagcaaaagattccaattaaaaagaaatctaaaaaatgcatgaaaaatcaaaatcatgatattaaagaagctcagtgagatacaagagaacactgataaatattacaaagaaatcagaaaccattcaggatatgaatgagaaattcaacacagaaataagtatcataagaaagaaccaaacagaaatcctggaactgaggaattcaagaakgaaataacgaatataattgagaacatcaacaatagactagaacaagcaaaaattaaatttagaatttgaagaaaggtcttttgaaacaacccagtcaaataaaaggaaagaaagaaagaaagaaagaaaaaaaaaagaatgaagaggccagatgaagtggctcacgcctataatcccaaaactttgggaggctgaggtggcaggatcacttcagctaaggagtttaagactagccagggcaacacagtgagaccctgtctctaaaaaaaaaaaaagttagctgggcatgccggcacatgcctgtagttccagttacctgggaggctgagatgggaggattggttgagcctggg

SEQ ID NO: 217612 - DNA, 578 bp, Homo sapiens
acacagtaattctccagcaaaagattccaattaaaaagaaatctaaaaaatgcatgaaaaatcaaaatcatgatattaaagaagctcagtgagatacaagagaacactgataaatattacaaagaaatcagaaaccattcaggatatgaatgagaaattcaacacagaaataagtatcataagaaagaaccaaacagaaatcctggaactgaggaattcaagaatgaaataacgaatataattgagaacatcaacaatagactagaacaagcaaaaattaaatttagaatttgaagaaaggtcttttgaaacaacccagtcaaataaaaggaaagaaagaaagaaagaaagaaaaaaaaaagaatgaagaggccagatgaagtggctcaygcctataatcccaaaactttgggaggctgaggtggcaggatcacttcagctaaggagtttaagactagccagggcaacacagtgagaccctgtctctaaaaaaaaaaaaagttagctgggcatgccggcacatgcctgtagttccagttacctgggaggctgagatgggaggattggttgagcctggg

SEQ ID NO: 217613 - DNA, 480 bp, Homo sapiens
aacgtaactcaaagcaatgaaagacaaaaagaacccagatggatgagttaggcaagacactcattcatctttcttttgtctttcacagtttttcctgactgacgttttcttttaaatctagaacttctagataaccaaaataagaaaacacatgtgggaagtggaaaagatttaaatgcaggtctctaaaaattttcagattgtataatcaagcagctagatgtcttattttctgaatagttacttacatcaagtagatgggactctcattgtcctakttttaaaaatacccatagaattgttatatcttgtttaataaatgcctttatcattatataatcaccttttttgtcttttttttttaattgttgttgacttaagtctgttatcacatgtaatagctactcctgcttttggtttccatttgtgtacagtattttttccacccctttattttaggtctataacaatttttacctg

SEQ ID NO: 217614 - DNA, 550 bp, Homo sapiens
tgtttactgaccttttgtttagatagtttttatactggtatttatctacctttatcttttatcagttcttctaggccttgtctactggtgatgagttcctcagcatttgcttatctgggaaaaactttatttctccttcatttatgaaacagttttgctgtatacaaaatacttggctgacagttattccacctgagggctctaaagataggacctcaatttcttctggcttgtcaagtttctgctgagaattctgctgttagtaacacaggttttcctttacaagttatctgatgcttctgtctcactgctcttagaattctttctttcatgtagactttagatagcctgatgcccgtataccttggtaatgtcctttcggcagtgaatctcccgagtgttctttgagcttttttaatggatgtccaaatctctaccaagaccagcaaagttttcctcaattawttcctcaaataggtttttcaaactttctgcttttcttccctcctgtacctatgatttttagttttggatattttacataatctca

SEQ ID NO: 217615 - DNA, 591 bp, Homo sapiens
  misc_feature (1)...(591): n = A,T,C or G
ttaatcattgcttttaataatttaaaagcaagacacttaaagaaagttagtacatgaacactgtataaaataagagttactttcaaaggatgttgtgctgttctgggtgaagtttaattatgggcagtggctgaggaagtattttgggagttaaacacattgtctctcaaccatatattctatctcagtcagtagttgctgattctgcaactataaggccagactgcttncagtaaaggggcttttggaattgcaaaagtaggataaaaatgcaatatggggagagacagtttgtctgacctataggatgatgttccagaacggacggcaggcagggtgccttctgtgagtgggttcagagtagacaattaatccagagaacagggaacttgcagatattggaggaagaaacaaatgatcacaccactgggctccagatggtcctcagggtgccctttggatggggcttttctctgaagaaygagtaggagacgtgcttttcagctccccttgcccacgttcctttctaaacctacctctgatcccctcttctaggaaactggcttgactttctgcgtcaggttgagtgct

SEQ ID NO: 217616 - DNA, 579 bp, Homo sapiens
cataggaagccatgctttgctaaagcctgatgcatattgaaataacttctatcttgcaagattcccagtgcccttgtcaaactttgatgaatcagcttaagttattcagatgcaaataagttagaagagaacaaacttactctgaaaacctatgttttaatggcatttacctctagaaacctaattatattcattccttgctcctagaagctccatcaccacaaagaccacaggggtctttgtttagtcctrtcttcccaatgcctcatacatttttgacacatagtagataccaacatatacttcttgtttgtacaattaaaccttgcatactacccaagaaaatacaactagaaagaattctctaagtctacttccagtcctatggatctggtcttgatgggtttctccaggtgttgtcaggccctttagatgttcaagttgtcacagcatgacccatattccctctcaaggctcctatgattcaagttcatgtaagaattgtattccagctttcaattttagctcttataattcaagttcatcgaaaataaactgtataccagcagaaacaagaaa

SEQ ID NO: 217617 - DNA, 579 bp, Homo sapiens
cataggaagccatgctttgctaaagcctgatgcatattgaaataacttctatcttgcaagattcccagtgcccttgtcaaactttgatgaatcagcttaagttattcagatgcaaataagttagaagagaacaaacttactctgaaaacctatgttttaatggcatttacctctagaaacctaattatattcattccttgctcctagaagctccatcaccacaaagaccacaggggtctttgtttagtcctgtcttcccaatgcctcatacatttttgacacatagtagatrccaacatatacttcttgtttgtacaattaaaccttgcatactacccaagaaaatacaactagaaagaattctctaagtctacttccagtcctatggatctggtcttgatgggtttctccaggtgttgtcaggccctttagatgttcaagttgtcacagcatgacccatattccctctcaaggctcctatgattcaagttcatgtaagaattgtattccagctttcaattttagctcttataattcaagttcatcgaaaataaactgtataccagcagaaacaagaaa

SEQ ID NO: 217618 - DNA, 588 bp, Homo sapiens
aagctttcatttttacctttcatcctcatttgcctaagtcaccttcctaggtatcttttaatagtatttagaagaagctgcccaccaaggattgatagctatggcaggagagactcagagaatcataggattttgaagtaaaaagagacattagagaccaaaaagtaatgagtaataaccaaaggaacatttcagaggagggcagcagttggtgactcaagatctgagtgagtttgagaaatgkgacctaaaggccacaccaaaagcctctactccctcagtggtccaaagagctatgaaggagagcttcagttagagctgggaaatggaactggaaagaatagcaagagtctgaaatatccacgcatctgtaactttcctagtttgtatataggttattttatttatttatatcttgtcttgttccaaaaaaaggtttaaggcagtttacaaagagtcatacaacatagcaagtttaaataaactttaaaaaggccgaggaaatgcaatggtaggaggcttatcgttttaactcagattctccagcacgccagggaaacacatatttatacattttcaacagtcaga

SEQ ID NO: 217619 - DNA, 503 bp, Homo sapiens
ttttaagtgagcagagaccagcagcagcttccatacctgggggaaggcatctggtaaatgtaggaacaatgaggaaataagcctgctttagcctgggtagattatgcaggaataattaaagcttggacggcactataggttggcagtatagattggaatctagyagagcccaaaatgaaaaattgcttgaccaaataatcctccccaccccagaagcagcagtgaatgaagggccacaaagcagaaaaaaactacacaatcctacacattcttatacagcctggattttaggaccttgctagcttttaatataaaggtgacaataaacaatacccaatactacagcccaatcttttctcctgaccacatcaaagaggcagtagtggtgcaggaggttaggcagagattaattcaatctagttaaagttactgctttcttcagctcaaatgggccataggaaaaatctaaataattagcccccaccccaaccacttcatgaata

SEQ ID NO: 217620 - DNA, 505 bp, Homo sapiens
atttttaagtgagcagagaccagcagcagcttccatacctgggggaaggcatctggtaaatgtaggaacaatgaggaaataagcctgctttagcctgggtagattatgcaggaataattaaagcttggacggcactataggttggcagtatagattggaatctagtagagcccaaaatgaaaaattgcttgaccaaataatcctccccaccccagaagcagcagtgaatgaagggccacaaagcagaaaaaaactacacaatcctacacattcttatacagcctggattttaggaccttgctagcttttaatataaaggtgacaataaacaatacccaatactacagcccaatcttttctcctgaccacatcaaagaggcagtagtggtgcaggaggttargcagagattaattcaatctagttaaagttactgctttcttcagctcaaatgggccataggaaaaatctaaataattagcccccaccccaaccacttcatgaata

SEQ ID NO: 217621 - DNA, 490 bp, Homo sapiens
ttttaagtgagcagagaccagcagcagcttccatacctgggggaaggcatctggtaaatgtaggaacaatgaggaaataagcctgctttagcctgggtagattatgcaggaataattaaagcttggacggcactataggttggcagtatagattggaatctagtagagcccaaaatgaaaaattgcttgaccaaataatcctccccaccccagaagcagcagtgaatgaagggccacaaagcagaaaaaaactacacaatcctacacattcttatacagcctggattttaggaccttgctagcttttaatataaaggtgacaataaacaatacccaatactacagcccaatcttttctcctgaccacatcaaagaggcagtagtggtgcaggaggttaggcagagattaattcratctagttaaagttactgctttcttcagctcaaatgggccataggaaaaatctaaataattagcccccaccccaac

SEQ ID NO: 217622 - DNA, 446 bp, Homo sapiens
gggagaagctattgtaaataaagctctgtgaagtgctgagccatactttcatttccctatactcatgaagtggggcacgtatccactgagccctttcggcgtgaggacagcgtgttttgcctgagctcactctagtaagcaaagaactgcttgtgtcctttgatctggtaggcaagtgctatagtggaaaacctagtgataagtaggcacagaataagttataaattttcccaaagatgtcattactgccttccacaaagtttgagggtctacatgaaaatcagacaagtccatctccatcttcaatcccttayaggtgaggaaagtgaggctcgaaagataaggccatttgttacatagatgggaaataatggagctgggatttaaactccaattgttctggcttctaaccttaagccctttccatgcaacctttaatatcatca

SEQ ID NO: 217623 - DNA, 486 bp, Homo sapiens
atgcagaatcatacacttgagttgggaggttttagcagcacgtaaggcaataggggagaagccacggtgacaataagatctccaaattccttcaccttaaattccttgactgccagtttgtctatccatggacttacaaataactgaaagatgggctgctgtgcctgatcctaaatcctaatgtgaccttgggacatagcttttgccttatcccaagaattcaaaggcaggtggtagaagatacagtrgaggtagaagagagtcagtttcttgtggaactattgagaaatttctgagacataaggacttttgccttggtcatgtattcaattgatcaaacttttcaaaaagagaaaggagatcctcctagaagttaggagaggggtttgtttcactaggagagcaggtttatgttttcctgaaaattggcgtcatgatacacataaaactggtacaatctgagtcaggttgatggactgtatcaat

SEQ ID NO: 217624 - DNA, 486 bp, Homo sapiens
atgcagaatcatacacttgagttgggaggttttagcagcacgtaaggcaataggggagaagccacggtgacaataagatctccaaattccttcaccttaaattccttgactgccagtttgtctatccatggacttacaaataactgaaagatgggctgctgtgcctgatcctaaatcctaatgtgaccttgggacatagcttttgccttatcccaagaattcaaaggcaggtggtagaagatacagtggaggtagaagagagtcagtttcttgtggaactattgagaaatttctgagacataaggacttttgccttggtcatgtattcaaytgatcaaacttttcaaaaagagaaaggagatcctcctagaagttaggagaggggtttgtttcactaggagagcaggtttatgttttcctgaaaattggcgtcatgatacacataaaactggtacaatctgagtcaggttgatggactgtatcaat

SEQ ID NO: 217625 - DNA, 571 bp, Homo sapiens
gctgggattgcaggcatgagccgtcctgcctggctttgaagtttatttcttcatgtacaaatatatgccaagaatatggtagctgtgtatttattctatattttatttttataactgcatttctttgtattattatgtgcattgatatactaaagtattttctaaagaactatttcctttggaaatatctcttaattgaccttacctttttagaagaaaagttgaaaactgggctggggaacaaatggaaaataagatgcttttaactatcatgtatgtaatagagtgacattygtcaagcaaatggaaatttcacattcaagaataacttagacatatctatataatgacatggtgagttacactggtttataattttcacagctctttcacatatagcaatgctctaaaatataaactgcaaagattcctttcatttttcttaccaaaggtgacattgagatttacaaagtttggtgcttgttaccaagtcatgtttaaggaaacattgaagctatgaccagaagtcaggctttgagctttgagttcagtggcttctcccactttatac

SEQ ID NO: 217626 - DNA, 413 bp, Homo sapiens
ctgatttttttttaaagccagtgcgttataaagctaccaactgttcaaaattcaaactgggaggttttaaaaattcctttagtccaacttaattataatgtccaaatatgggcagaaatgatctgattcaaatcttagaattttagcaagcaagaaggaattgtagcactcttctaattcaatctcccattttaagattataaagcccatggaaatttagtgatttgttaaatcatacaccttgatttaraaaactttggtttcctcagtatacttttcagcaccctcaaactgcctggttattaatttatagaatgtcacaattatatcatctaatgtttcctaagtgcttactctttactaggtattgttctatgcactattacctccccccctccatggactaaatacca

SEQ ID NO: 217627 - DNA, 639 bp, Homo sapiens
cagaaaaactgatagaaaagtacatgaagacaagagggagctgataggaagaaggcagagaaatgatggaattagggtcctatgagactgaagggracttcatcagagaactggaaggaaaagcaattgcagtcagagagaaagcagtttgaatttgcagtttcagaaggcaaggtatcttgggtccagaatgtgattataaatgtagatttgtaaaatgatggaagagagtgtaataacttgagaagaccaaagacagaaaccggcttttaaatggattgttgatggtaggtgctaaggtgaaatgagagacagtgagtcaattattgaagtcttcaatgaatgtgaatgaagaatgagtaggctatagagccaaggaatggtaggaaatgatatagctgaatggcatgatccacaaagtgtcaaaaatctcttttattttttctttataaaaataataggaaggaaaagtgaccagaaatcacattggaaagaaagaaagatacctattttttctttctaacctgaggaaagtggagtggggaagaatgagctccctgtatttgagagggttgcaagggaaatagagtcttcaagatagagccagatttagccatcatcctctgaaaactgaaacag

SEQ ID NO: 217628 - DNA, 639 bp, Homo sapiens
cagaaaaactgatagaaaagtacatgaagacaagagggagctgataggaagaaggcagagaaatgatggaattagggtcctatgagactgaaggggacttcatcagagaactggaaggaaaagcaattgcagtcagagagaaagcagtttgaatttgmagtttcagaaggcaaggtatcttgggtccagaatgtgattataaatgtagatttgtaaaatgatggaagagagtgtaataacttgagaagaccaaagacagaaaccggcttttaaatggattgttgatggtaggtgctaaggtgaaatgagagacagtgagtcaattattgaagtcttcaatgaatgtgaatgaagaatgagtaggctatagagccaaggaatggtaggaaatgatatagctgaatggcatgatccacaaagtgtcaaaaatctcttttattttttctttataaaaataataggaaggaaaagtgaccagaaatcacattggaaagaaagaaagatacctattttttctttctaacctgaggaaagtggagtggggaagaatgagctccctgtatttgagagggttgcaagggaaatagagtcttcaagatagagccagatttagccatcatcctctgaaaactgaaacag

SEQ ID NO: 217629 - DNA, 639 bp, Homo sapiens
cagaaaaactgatagaaaagtacatgaagacaagagggagctgataggaagaaggcagagaaatgatggaattagggtcctatgagactgaaggggacttcatcagagaactggaaggaaaagcaattgcagtcagagagaaagcagtttgaatttgcagtttcagaaggcaaggtatcttgggtccagaatgtgattataaatgtagatttgtaaaatgatggaagagagtgtaataacttgagaagaccaaagacagaaaccggcttttaaatggattgttgatggtaggtgctaaggtgaaatgagagacagtgagtcaattattgaagtcttcaatgaatrtgaatgaagaatgagtaggctatagagccaaggaatggtaggaaatgatatagctgaatggcatgatccacaaagtgtcaaaaatctcttttattttttctttataaaaataataggaaggaaaagtgaccagaaatcacattggaaagaaagaaagatacctattttttctttctaacctgaggaaagtggagtggggaagaatgagctccctgtatttgagagggttgcaagggaaatagagtcttcaagatagagccagatttagccatcatcctctgaaaactgaaacag

SEQ ID NO: 217630 - DNA, 555 bp, Homo sapiens
tgtttgaacattaggagacagcaatcaaatatatgactgatggatgtttactgaaacatattctgggagacccaaatcttaccaaattcagtgtcattattttggatgaagcccatgaaagaactctaactacagtgagtattttaatttattattatttttttattagcaagtagtttgtttgggtagctttttattgtgtagagaattgcctcctcttactttttaatttaatttaattttttagagatggagtcttgctccatcacccaggctggagagcagtggcacgatcatagctcactgcacccttgaactcctgggctcaagtgatcctcccatctcaacctcctgagttgctggtactgcagacrtgcatcaccatgtctggctaatttttaagaatattttttgtagagacagtgtctcgttttgtttccctggcaggtctcgacctcctggcctccgaccttggcctcccaaagtgctgggattacaggtgtgagccactgcacctggctcctacttatattttaatgtattaaaataggaatt

SEQ ID NO: 217631 - DNA, 554 bp, Homo sapiens
tgtttgaacattaggagacagcaatcaaatatatgactgatggatgtttactgaaacatattctgggagacccaaatcttaccaaattcagtgtcattattttggatgaagcccatgaaagaactctaactacagtgagtattttaatttattattatttttttattagcaagtagtttgtttgggtagctttttattgtgtagagaattgcctcctcttactttttaatttaatttaattttttagagatggagtcttgctccatcacccaggctggagagcagtggcacgatcatagctcactgcacccttgaactcctgggctcaagtgatcctcccatctcaacctcctgagttgctggtactgcagacgtgcatcaccatgtctggctaatttttaagaatattttttgtagagacagtgtctcgttttgtttccctggcaggtctcracctcctggcctccgaccttggcctcccaaagtgctgggattacaggtgtgagccactgcacctggctcctacttatattttaatgtattaaaataggaat

SEQ ID NO: 217632 - DNA, 554 bp, Homo sapiens
tgtttgaacattaggagacagcaatcaaatatatgactgatggatgtttactgaaacatattctgggagacccaaatcttaccaaattcagtgtcattattttggatgaagcccatgaaagaactctaactacagtgagtattttaatttattattatttttttattagcaagtagtttgtttgggtagctttttattgtgtagagaattgcctcctcttactttttaatttaatttaattttttagagatggagtcttgctccatcacccaggctggagagcagtggcacgatcatagctcactgcacccttgaactcctgggctcaagtgatcctcccatctcaacctcctgagttgctggtactgcagacgtgcatcaccatgtctggctaatttttaagaatattttttgtagagacagtgtctcgttttgtttccctggcaggtctcgacctcctggcctccgaccttggcctcccaaagtgctgggattacaggtgtgagccacygcacctggctcctacttatattttaatgtattaaaataggaat

SEQ ID NO: 217633 - DNA, 605 bp, Homo sapiens
aagctttgatgacaagagatccttcagttggacaatgtagttaaagggtataaaaataagttcatttacagtttcacaaggtaactctacactcacacttaagttccccatttcttgtttccagtttttatcctacgtgtttcagaaagttttctgctacttagcaaactggtagaagctcagaggtcaaagaccaaagatgccaattaaaataatccttattagttgggctcggtggttcacacctattatcccagcactttgggaggycaaggcaaaggattgcttgaagcccaggcattcgagactagcctgggcaacatgaaactccatctctacaaaaaatacaaaaattagccaggtgtggtggctcatggctgtagtcccagctactcaggatgctgaggtgggaggatggcttgagcccagtaggtcaaggctgcagtgagctgtgatggtgccactgacctccagcaaaaaccctgtctcctcaaaaaaacaaaatgcttattaatttttaaaaagggaggagataatgatatgaagttaggagatatattatcatgaaagaggctgtagttatttgggctccacaattaatcaac

SEQ ID NO: 217634 - DNA, 632 bp, Homo sapiens
accattctgaagggacagtacttatgttttgtcaatttccatagtgtttgtcaatttccatagtgtttgtcaatttccatagtgcacgtacttccaccatggtttgatttccagctatcaatgtgacacatctaagtgcagagctgggaagaaacactcaattgcattgcagtataagatatttccaccataaatattacacacataaataacctcacaagcattagatagtagtaacatggtaaaaaaaaagttttcactattatctttgttttaatataacttacttcattgtaagtttatataaggcaatttttaatcatggctgtgctaatcaagagacatgcaaaatttttgaaaagttattggtcaattcttgtaagctggtaaaagycagttccaacacaagctcttcacatcattttgctctgccatctttagggtgtggaccttcatccatgcgcctgttgcttcagggtcacaggatggttactgcccttctgagcctcacgtgtgcatgcaagaagagaaaggtacaaaacagctaatgtggcataccaatttaaaaatatgtatatttcccaaaaccccacctagaggcttcagtttacaatgcattggccagaatggag

SEQ ID NO: 217635 - DNA, 632 bp, Homo sapiens
accattctgaagggacagtacttatgttttgtcaatttccatagtgtttgtcaatttccatagtgtttgtcaatttccatagtgcacgtacttccaccatggtttgatttccagctatcaatgtgacacatctaagtgcagagctgggaagaaacactcaattgcattgcagtataagatatttccaccataaatattacacacataaataacctcacaagcattagatagtagtaacatggtaaaaaaaaagttttcactattatctttgttttaatataacttacttcattgtaagtttatataaggcaatttttaatcatggctgtgctaatcaagagacatgcaaaatttttgaaaagttattggtcaattcttgtaagctggtaaaagccagttccaacacaagctcttcacatcattttgctctgccatctttagggtgtggaccttcatccaygcgcctgttgcttcagggtcacaggatggttactgcccttctgagcctcacgtgtgcatgcaagaagagaaaggtacaaaacagctaatgtggcataccaatttaaaaatatgtatatttcccaaaaccccacctagaggcttcagtttacaatgcattggccagaatggag

SEQ ID NO: 217636 - DNA, 632 bp, Homo sapiens
accattctgaagggacagtacttatgttttgtcaatttccatagtgtttgtcaatttccatagtgtttgtcaatttccatagtgcacgtacttccaccatggtttgatttccagctatcaatgtgacacatctaagtgcagagctgggaagaaacactcaattgcattgcagtataagatatttccaccataaatattacacacataaataacctcacaagcattagatagtagtaacatggtaaaaaaaaagttttcactattatctttgttttaatataacttacttcattgtaagtttatataaggcaatttttaatcatggctgtgctaatcaagagacatgcaaaatttttgaaaagttattggtcaattcttgtaagctggtaaaagccagttccaacacaagctcttcacatcattttgctctgccatctttagggtgtggaccttcatccatgcgcctrttgcttcagggtcacaggatggttactgcccttctgagcctcacgtgtgcatgcaagaagagaaaggtacaaaacagctaatgtggcataccaatttaaaaatatgtatatttcccaaaaccccacctagaggcttcagtttacaatgcattggccagaatggag

SEQ ID NO: 217637 - DNA, 587 bp, Homo sapiens
ttgtgttgctaaaaagtgttgttgaagagtcaaagtctgtaaaatatttgaacagatttattctgagccaaatatgatgaccatggcctgtgacaaagctctccaagtgctcagggtggtcagggcacagcttggttttacacattttaaggaggcgtgaaacatcaatcaaatacatttcagaaatacattggttttgttcaaaaaggcaggacaactcaaagtgggggagaggggaagggaaagggggagggggaagagggagagaggacagggcagggggatgaggggagggagacttccaggctataggcaaatttaaacattttttggatgacaatgggttgagtttgtctaaagacctggaatcaatagaaaggaaatgttcagggtgagataaaagattgtggagaccaaggttcttttaaaytctcatagtggctgcccttagagacaatagatgacaagtgcttcctattcagatctttaaaaggtgctagattcttagttaattgttgcggggtcaggcagaatacagccatatttttcttcttgcagaaagtgtgtaggagaaatattgctgaatt

SEQ ID NO: 217638 - DNA, 405 bp, Homo sapiens
ctctgctccatggattgaaaaacaaaaaggggccaggtgtggtggctcacacctgaaatcccagcactttgggaggctgaggtgggtggaccacctgaggtcaggagtttgagaccagcctggccaacatggtcaaaccccgtttctactaaaaatacacaaattagccaggcgtggtggtgggtgcttgtaatcccagctacttgggagactgaggcaggagaatcacttgaacccaggaggtggaggttgcagcgagggaagatctcaccacttcactccagcctggacaaaagagcaaaactcaattaaaaaaaaaaaaggaagagaaaaaaaggacagatccattcaycaaaaggacagatccattcatcaaagagctaaagaaaccttcagatagtctcc

SEQ ID NO: 217639 - DNA, 378 bp, Homo sapiens
ttttgtttttgataaaaatgccttgtcagtgattctatatacttccctattgtatcataaggtacataatgtctggtatgcttccttttgtgcttatagttttaaaaagaaaccaaagaagaaytaccaaaggttaataacaatgattacctataggggagtgaggaaagagtgggagaaacaagcatagaaagaaaacttctctgactgcattttgttgaaactgtatagacattcacataatttaaaaagagcatcctaggctgagggaatagcatgcgtaaatgacctgaggcaggaacatggttggtttttgtaaagaacaaggttggtgatatcgttgcgttgtgtccccttactcttcttttttgtccccct

SEQ ID NO: 217640 - DNA, 582 bp, Homo sapiens
acccacttgtccattttgcaaaaaatagtttttggattacataatccaaaaatcmatttatcaggcaccacaaaaaaataatgtctcgcttaaatcaaaagagggaggatgccagaggcagctgtcctgcctgtgagctctcactcctctcctcttctagagcacctctcataaagtctgtgacatgtaacatcagacattcacacctaatgaagcttccaggatattaaatgtgaatagagattaatttgttttagataaacatataaatggaatttctagaatattcttctaaatcccacaagccatacacacttcactttagaggccactgcactagggcatgttcctcaaaggctggttcttagactacttgcatcagaatcactgaagtgcttggttaagtggtctccaaccccactagacataacgagtcaacttaaagcacatataaattttaattctctgaacaccagttggttacagtgtgtgctccaaaatctctggggccagggcccagtaacctgcatgtttaacaagcaattttgctacttttgcaagtgttcaaccactgaggaaaaa

SEQ ID NO: 217641 - DNA, 622 bp, Homo sapiens
tcagatctttagcacaaactggaaaaaacacccagacattttctttaaaccacttaaaacaacaatacagtctggaccgcagacatactggcttcatctccaacctcaaattcagccctcaatatttgcctatataagcaatgtttacagcctcagaagccaaacaatctcttcttttagtttttatcttgattccaggccccatactttattcttatctgagagtccttggaatattttcatttcctgaagttctgaaaaatggattgtctctgctgtgtagctcctctctcctttctctcattctttatagcttatttgtgatttttttactctgtctctgtagtgcctttagcattaaaaagatagtgatctgccatcytggtgggtgtgtatttctccttctttgtgtgtgtgtgtgtgtgtgtgtgtgtgtgtgtgtgtgtggtttgtatctaaagccatggtgacttctgtatggctctatatgtatattgatgtagatgtgggaaaagagtgtaattctcatgtgggttctttagttgcatcatagtataattaaagtggcattgggccaatcttcatttttccttttatcctatgggtctctaacattcaaaac

SEQ ID NO: 217642 - DNA, 481 bp, Homo sapiens
actttcttcttttctaatacaggcatttactgttacaaatttctcccacgtacaactttagcgtgatgcaagttcccaagaccatctctaggttcaatgattcaccaggaggacccacaggactcagcatatattcacgctcctgtctgcggtttattacagccaaagtgagaggtgaagatggttgggcttctgggtcgggtggggacttggagaacttttctgtctagctaaargattttaaacacaccaatcagcactctgtgtctagctaaaggtttgtaaatgcaccaatcagcactctgtaaaaacggaccaatcagcactctgtaaaatggaccaatcagcaggatgtgggtggggccaaataagggaacaaaagctggccacctgagccagcagtagcaacctgctcaggtcccattgcgtggaagctttgttctttcgctcttcacaataaatcttactgctgctcattctt

SEQ ID NO: 217643 - DNA, 541 bp, Homo sapiens
gaattcccatcagtaattactccgaaaaagaaagaaaccagaaatcagagaatggatcataattggcttaatgttacaccatgggtgagctttatgaccaggggcagaataaaaaaccagtgttcaaagggatgtgacatatttagatgtatcatgggccagcatcaatacttataagggggttataattccacagataaaaattggaagctgtcattttttaaaacagtaagtcaatgagttacatgtgtgacagtatcactgtttaggctactgttgtggctaatttgtttgaagctaaagccaaacattactargcaataagaagtagaatgctccgtatattagttgtttattggtatataacaaattacagccaatgtagcagcttaaaacaacactcatttattatctcacagttctgtagctcagaatccggtttaccataagaggttctctactcaggatctcacaaaactgaaatccaagtatcagccaaatccaattgtcatttgggctcagggttcacttccaagcacat

SEQ ID NO: 217644 - DNA, 541 bp, Homo sapiens
gaattcccatcagtaattactccgaaaaagaaagaaaccagaaatcagagaatggatcataattggcttaatgttacaccatgggtgagctttatgaccaggggcagaataaaaaaccagtgttcaaagggatgtgacatatttagatgtatcatgggccagcatcaatacttataagggggttataattccacagataaaaattggaagctgtcattttttaaaacagtaagtcaatgagttacatgtgtgacagtatcactgtttaggctactgttgtggctaatttgtttgaagctaaagccaaacattactaggcaataaraagtagaatgctccgtatattagttgtttattggtatataacaaattacagccaatgtagcagcttaaaacaacactcatttattatctcacagttctgtagctcagaatccggtttaccataagaggttctctactcaggatctcacaaaactgaaatccaagtatcagccaaatccaattgtcatttgggctcagggttcacttccaagcacat

SEQ ID NO: 217645 - DNA, 541 bp, Homo sapiens
gaattcccatcagtaattactccgaaaaagaaagaaaccagaaatcagagaatggatcataattggcttaatgttacaccatgggtgagctttatgaccaggggcagaataaaaaaccagtgttcaaagggatgtgacatatttagatgtatcatgggccagcatcaatacttataagggggttataattccacagataaaaattggaagctgtcattttttaaaacagtaagtcaatgagttacatgtgtgacagtatcactgtttaggctactgttgtggctaatttgtttgaagctaaagccaaacattactaggcaataagaagtasaatgctccgtatattagttgtttattggtatataacaaattacagccaatgtagcagcttaaaacaacactcatttattatctcacagttctgtagctcagaatccggtttaccataagaggttctctactcaggatctcacaaaactgaaatccaagtatcagccaaatccaattgtcatttgggctcagggttcacttccaagcacat

SEQ ID NO: 217646 - DNA, 576 bp, Homo sapiens
aaaccaaatatcacaagttctcacttacaagtgagctatatattgaatgcacatggacaagaagggaacaatatacattgggtattgcttgagagaagaggctagagaagggagcgtgttttggaaggctacctattgggtactgtgttcactaacttggtgatggggtcatttgtacaccaagcctcactgccacacaatttacccatgtgacgagcctgcacatgtactccctgaacctaattttttaaaaaaagcaggtaattattcttcccatgcgtgaagccaacctgaaaataaaactgtttcatgcagtggggcagagcatagagagccacagggaactcacagggatctggattttcagtcttgaaaatacagtggcctctggatcaaaacaacattatttctgatcattctacttacatgaattttctcattgtttcttgatattttgacttgaagttttaagtagtctgccaccaaaggcatactactattacacaagcgtatsgcttgtatatattaaaacatatactgtcatctaaaaagtaacatctttctgttgtatattct

SEQ ID NO: 217647 - DNA, 613 bp, Homo sapiens
ggaggagtgggtggggggaaattgagctgcaatgcagcccaacagaagccttggccaaacctggggaagcactgaaactagaataacacttcagttgtgtcctgagttggagaggtagccaggcctttaagtcctgtcttgaatgttcacgagatttggtcacctctgggaagagcatagcctcaggtaaatctgctttstttcactactatacactagagtatttgtcatttaatattaaccagctacagaatgttttcatcaagtatatatatatatatatatatatatatatatatatatatatatatataaaattttagaattttggcctgcagaaataagtcaatagggcactctgcaattgtagtcatattatgtggaaagttaactattcagaatagctacaacacaattgtacattatgagagaatgacagatgtattaataattgaaaggctttctaccgtaagtgggatcatacaggtttactccacccttgaggtttagattaaattattttatggcaggagataacacatttattaacaatttggtgacaagtccttcctctcattgttagatttatgttttccactcaagtctttgcatg

SEQ ID NO: 217648 - DNA, 653 bp, Homo sapiens
ataacttctaatacaaaagattagctttgtcttttttgaatttcatataaatatagttacacagactgtatcctgtgtctggtttatttcactcgacataacatttatgaagttccattaattgttgtagcttgttattgtcattgccatatgatagtcaattgtataaatatactataagttttatccagtttgggactattatgaatagtgcttctatgaacacaccttttgatgcatatatgtatgcatttatgtttagtatataacctaagtttatatgttacatgcattagtagatgctgccctagaatttttcaaaatgcttgtartaatttatactttcaccagctataatgattgcaatctttttacatcttgaacagtacttgttattccatgcaattttcatttacatcattttcccaatgtgctttgtaagacatgtatatatggtacaaacgataatactagaaatttcttaaactatattgcaaagactatcagtctgcagcgaaataaacaactggctggaatagatgatcatgatacttgtccccatacctcctttctccatcccatatctgagcaccttaggcaatgagaaaaagagaagataatgaagatggccttaattcaaattctggggtcct

SEQ ID NO: 217649 - DNA, 653 bp, Homo sapiens
ataacttctaatacaaaagattagctttgtcttttttgaatttcatataaatatagttacacagactgtatcctgtgtctggtttatttcactcgacataacatttatgaagttccattaattgttgtagcttgttattgtcattgccatatgatagtcaattgtataaatatactataagttttatccagtttgggactattatgaatagtgcttctatgaacacaccttttgatgcatatatgtatgcatttatgtttagtatataacctaagtttatatgttacatgcattagtagatgctgccctagaatttttcaaaatgcttgtagtaatttatactttcaccagctataatgattgcaatctttttacatcttsaacagtacttgttattccatgcaattttcatttacatcattttcccaatgtgctttgtaagacatgtatatatggtacaaacgataatactagaaatttcttaaactatattgcaaagactatcagtctgcagcgaaataaacaactggctggaatagatgatcatgatacttgtccccatacctcctttctccatcccatatctgagcaccttaggcaatgagaaaaagagaagataatgaagatggccttaattcaaattctggggtcct

SEQ ID NO: 217650 - DNA, 595 bp, Homo sapiens
ctacctgcttttattctggctgtgctggcagcttatgagattgtgcccactcagattgagggtggtctgcctttcccagtccactgattcaaatgttaatctcctttggcagtacccacacagacacacccagaataatgctttgcatccttcaatccaataaagttaacactcagtattaaccatcacaatatgtatattctcccattccttaaagggctcttcaccagtttttattgaatatgtgttataaatcacagtgagcatrgaatcagacataattaatttctaaaattatttacaataacagcagataatgaaagaaacctgactggtggcatgggtagttggagggttggagcttgtctgatgtgaagaacttattgcctcaccatgctgtttcccctccttgggaatttatcattctggagactttggttaccatttgggttgtacacatctctgaagttagtgttaaacctgtgcatctgggaacacaaggataccagacgctcatttatctgataaagacaacctggttcctcttaacataaatgatctcattctcaaataaattgtgtgactataccttaaa

SEQ ID NO: 217651 - DNA, 595 bp, Homo sapiens
ctacctgcttttattctggctgtgctggcagcttatgagattgtgcccactcagattgagggtggtctgcctttcccagtccactgattcaaatgttaatctcctttggcagtacccacacagacacacccagaataatgctttgcatccttcaatccaataaagttaacactcagtattaaccatcacaatatgtatattctcccattccttaaagggctcttcaccagtttttattgaatatgtgttataaatcacagtgagcatagaatcagacataattaawttctaaaattatttacaataacagcagataatgaaagaaacctgactggtggcatgggtagttggagggttggagcttgtctgatgtgaagaacttattgcctcaccatgctgtttcccctccttgggaatttatcattctggagactttggttaccatttgggttgtacacatctctgaagttagtgttaaacctgtgcatctgggaacacaaggataccagacgctcatttatctgataaagacaacctggttcctcttaacataaatgatctcattctcaaataaattgtgtgactataccttaaa

SEQ ID NO: 217652 - DNA, 595 bp, Homo sapiens
ctacctgcttttattctggctgtgctggcagcttatgagattgtgcccactcagattgagggtggtctgcctttcccagtccactgattcaaatgttaatctcctttggcagtacccacacagacacacccagaataatgctttgcatccttcaatccaataaagttaacactcagtattaaccatcacaatatgtatattctcccattccttaaagggctcttcaccagtttttattgaatatgtgttataaatcacagtgagcatagaatcagacataattaattyctaaaattatttacaataacagcagataatgaaagaaacctgactggtggcatgggtagttggagggttggagcttgtctgatgtgaagaacttattgcctcaccatgctgtttcccctccttgggaatttatcattctggagactttggttaccatttgggttgtacacatctctgaagttagtgttaaacctgtgcatctgggaacacaaggataccagacgctcatttatctgataaagacaacctggttcctcttaacataaatgatctcattctcaaataaattgtgtgactataccttaaa

SEQ ID NO: 217653 - DNA, 595 bp, Homo sapiens
ctacctgcttttattctggctgtgctggcagcttatgagattgtgcccactcagattgagggtggtctgcctttcccagtccactgattcaaatgttaatctcctttggcagtacccacacagacacacccagaataatgctttgcatccttcaatccaataaagttaacactcagtattaaccatcacaatatgtatattctcccattccttaaagggctcttcaccagtttttattgaatatgtgttataaatcacagtgagcatagaatcagacataattaatttctaaaattatttacaataacagcagataatgaaagaaacctgactggtggcatgggtagttggagggttggagcttgtctgatgtgaagaacttattgcctcaccatgctgtttcccctccttgggaatttatcattctggagactttggttaccrtttgggttgtacacatctctgaagttagtgttaaacctgtgcatctgggaacacaaggataccagacgctcatttatctgataaagacaacctggttcctcttaacataaatgatctcattctcaaataaattgtgtgactataccttaaa

SEQ ID NO: 217654 - DNA, 477 bp, Homo sapiens
tctatccccattgtactgccttatttgggccatcatctctaatagcaatatcctaattgatgttcttgcctcttttattgctcctgcaataaattatccataccatttccagatttttcaaaattttaaattgccaaaaatcacataaagaagaaaataataaatattagagtgaaaataaatgaaatataaactaaaaaaaaataaaacytagaaaaaaatcaatggacccagaaatttgtttattgaaaggattaataaaattgataaaatcccacagcactggtcaagaaaaataacagaaaatataattactcaaagaaaggacagcactacagagcctagaattattaaaaatacaaataagagagtactatgaacaactgtatgtcaataaattcagtaacatgaatagagaaatttctcaaaaactcgaactaccaaaactgacgcaaaaaagaaactgaaaacctgaat

SEQ ID NO: 217655 - DNA, 477 bp, Homo sapiens
tctatccccattgtactgccttatttgggccatcatctctaatagcaatatcctaattgatgttcttgcctcttttattgctcctgcaataaattatccataccatttccagatttttcaaaattttaaattgccaaaaatcacataaagaagaaaataataaatattagagtgaaaataaatgaaatataaactaaaaaaaaataaaacttagaaaaaaatcaatggacccagaaatttgtttattgaaaggattaataaaattgataaaatcccacagcactggtcaagaaaaataacagaaaatataattactcaaagaaaggacagcactacagagcctagaattattaaaaatacaaataagagagtactatgaacaactgtatgtcaataaattcagtaacatgaatagagaaatttctcaaaaactcraactaccaaaactgacgcaaaaaagaaactgaaaacctgaat

SEQ ID NO: 217656 - DNA, 572 bp, Homo sapiens
tgcaactggcttattttgtattaaagatgttgtgcatttgtaatgaattacacttttttgtgttgggatatttgtgattaaatatgcagcctaatttttacccttatttccccttacygatcttttctatgtattttaaatttatttcacttggctacatttttacattttcgcagctactgtaaatcacttttgatattaaaataggctttaaaatgatattaacatagcaattaaaatcttactaaatgatatgtacacaatataatttagtatatttattgtaactctattttcattaaaatgcagttttccctccttcaaactcaaaataactttgattcaacagaaaacaacaaaatggaactgatgtgcaggtattactttacagtaaatagcaagttatcttaatttatttgagagtcttgccaaaggatgggaagtaagtgaaaaggtcttctcatctggcaaaaagcaatagaacaaaatctgagctcctagactttattcctagaaaaacacaccagcacctcgctcataactttatagccacaataatacaagagtttctt

SEQ ID NO: 217657 - DNA, 562 bp, Homo sapiens
catggctctgtcctggaggagctcaccctttagctggggggcacgagaggaccaggaaattcacaatgccagtgaatttctggtctaagatggaccagtgctaagatggaggtctgttcagggccccacaggtgcaccaaggaggagtggccttagtgcctacctgggccaaggaaggaggaggggtgtttgccagacagagggaaagggtagacgggtcacccgtgacagactgccatggttactacttgagaccattgctacgatagttactactgtcactacttgagaccatcgttatgagacagaacaaagggtggatgaacgtagaaatgaaaactgaagacaaaagaaacttttaaaggaaggggtcaggggaagaagaaaagggctccctactcctagtgagcaaagacagcccccrccctcagcttcttcagcccttagtatttattgggtagaatgagcagggaggaggaggtaacgattggtcagctgcttaattgatcacaggttcatagtattactaacaggcttcaggtgtgccctgtagataatcaca

SEQ ID NO: 217658 - DNA, 562 bp, Homo sapiens
catggctctgtcctggaggagctcaccctttagctggggggcacgagaggaccaggaaattcacaatgccagtgaatttctggtctaagatggaccagtgctaagatggaggtctgttcagggccccacaggtgcaccaaggaggagtggccttagtgcctacctgggccaaggaaggaggaggggtgtttgccagacagagggaaagggtagacgggtcacccgtgacagactgccatggttactacttgagaccattgctacgatagttactactgtcactacttgagaccatcgttatgagacagaacaaagggtggatgaacgtagaaatgaaaactgaagacaaaagaaacttttaaaggaaggggtcaggggaagaagaaaagggctccctactcctagtgagcaaagacagcccccaccctsagcttcttcagcccttagtatttattgggtagaatgagcagggaggaggaggtaacgattggtcagctgcttaattgatcacaggttcatagtattactaacaggcttcaggtgtgccctgtagataatcaca

SEQ ID NO: 217659 - DNA, 565 bp, Homo sapiens
gattgatactgaaattaattcaaagagttataactaaaattgttccttaccaatcacatcaaaatattaacctccagtatgtgacatttattaaatataacgtgatgctagaattacattgatgaaactcrgtgccttcactccactagcataatttttatcgtgtgttataaataccatatttaattacacgggatcttgttcctgaaatacgataatgctaaccaatggtcaagagcaagaaatcggtggtggttgcaaggattttctatctcagtgatggcttttacattgaactgaaaagcaacttattctttttttataactgtttccatccttaaaatacacagcaaaaaggcaaaaaaaaaaattaaaatgtatgctactggttgagtagctgaggtttgttttgttttttaagggtaatgactccaaggattagaaatgtcctaagtgtgtttaggtttggtgctagtggccagctccaaaggtaaaagacaaaaattgtcttttgttctgctgctccttcctacttgttccttgctccattttgttggatctttaa

SEQ ID NO: 217660 - DNA, 565 bp, Homo sapiens
gattgatactgaaattaattcaaagagttataactaaaattgttccttaccaatcacatcaaaatattaacctccagtatgtgacatttattaaatataacgtgatgctagaattacattgatgaaactcagtgccttcactccactagcataatttttatcgtgtgttataaataccatatttaattacacgggatcttgttcctgaaatacgataatgctaaccaatggtcaagagcaagaaatcggtggtggttgcaaggattttctatctcagtgatggcttttayattgaactgaaaagcaacttattctttttttataactgtttccatccttaaaatacacagcaaaaaggcaaaaaaaaaaattaaaatgtatgctactggttgagtagctgaggtttgttttgttttttaagggtaatgactccaaggattagaaatgtcctaagtgtgtttaggtttggtgctagtggccagctccaaaggtaaaagacaaaaattgtcttttgttctgctgctccttcctacttgttccttgctccattttgttggatctttaa

SEQ ID NO: 217661 - DNA, 602 bp, Homo sapiens
aagatctgaatagtagcatatctgaacaccaaaccatgacaaagggactaaaatgatcatgttgaacagtttgtgtttattgtattgacttatccctgcttcagtctcccaaaagcactgtaagaatgtatcttttgcttggagatggagtcttgctctgtcacccaggcttgagtgcagtggcatgatctcggttcactgcaacctccacctcccaggttcaagcgattctgctgcctcagcctcccaagtagctgggactacaggcacgtgccaccatgcccagctaattttttgtattttyagtataaatggggattcactgcgttagccaggatggtctggatctcctgacctcatgatctgcccgccttggcctcccaaagtgctgggattacaggcatgagccaccatgcctggccaaacattcttatatatactattagttccttgtgtggaactgctctaaaaattccttagaatatcctcaataatatgaaaacttttggctaatttaatgaatgcaagaggttaaaggatagtattttagtgttcgacaaaaataagcaatgttagccttggaaatttattaaatgtcagat

SEQ ID NO: 217662 - DNA, 602 bp, Homo sapiens
aagatctgaatagtagcatatctgaacaccaaaccatgacaaagggactaaaatgatcatgttgaacagtttgtgtttattgtattgacttatccctgcttcagtctcccaaaagcactgtaagaatgtatcttttgcttggagatggagtcttgctctgtcacccaggcttgagtgcagtggcatgatctcggttcactgcaacctccacctcccaggttcaagcgattctgctgcctcagcctcccaagtagctgggactacaggcacgtgccaccatgcccagctaattttttgtatttttagtataaatggggattcactgcgttagccaggatggtctggatctcctgacctcatgatctgcccgccttggcctcccaaagtgctgggattacaggcatgagccaccatgcctggccaaacattcttatatatactaytagttccttgtgtggaactgctctaaaaattccttagaatatcctcaataatatgaaaacttttggctaatttaatgaatgcaagaggttaaaggatagtattttagtgttcgacaaaaataagcaatgttagccttggaaatttattaaatgtcagat

SEQ ID NO: 217663 - DNA, 444 bp, Homo sapiens
aatttgtctgtgaagaggaaaatgcctccacatttgtattactgtaaaggaattcagagctctagaaaagcctatgtgtgttttctaccatatggctatctgttgctgagttatcccacttagagaatattcaagcatttgatggaaacatatccctactcrgaaaatgagctcctttagagtttgaatgacatagatagagatttcctgagataataatacctgcactggggcaggccagactgattgtcctacagcttcctaaattacctgaagctaggtggacagcacaagctttgttaatttattgtccaaaagcactatttttcttttgtatagttctttaaattaagctgacttaattaagctctgtgtaagagcaaaagaacattttctggacttccacaagggagagattctgaataataaggattcctgccttcc

SEQ ID NO: 217664 - DNA, 580 bp, Homo sapiens
ggtcagccaccctactttgaatatacatcttctacaaactatctaatatggtatawataaaataccataatatggtatatataaaataccataatatggtatatatactagtaaataataacagatagaactaaaattaaaagagtaaataacaagagtaaacacacacacacacacacacacacacacacacacacacacaatactgttgattctattaggaaatagaatgcccacaccaaccttgaaatcagacattaagagtttattgctaaataactttaagagatcaccaccaatcaattactattatatctttttaagagaaacatgcataattggatagaaacacccattatggatggaaaatttgtaggccataagaaaatgatatttttcaatcccattaagtatctccagaaagtccccagagcttctacttttcatatggttcaccataccaaatctgcctactgggcaaatttaaactgtactaatttgtctgcttgcaaatctgaagttattgacacattcacttcatctaatattatatctgtaacaacaaacaatttatataaaa

SEQ ID NO: 217665 - DNA, 580 bp, Homo sapiens
ggtcagccaccctactttgaatatacatcttctacaaactatctaatatggtataaataaaataccataatatggtatatataaaataccataatatggtatatatactagtaaataataacagatagaactaaaattaaaagagtaaataacaagagtaaacacacacacacacacacacacacacacacacacacacacaatactgttgattctattaggaaatagaatgcccacaccaaccttgaaatcagacattaagagtttattgctaaataactttaagagatcaccaccaatcaattactattatatctttttaagagaaacatgcataattggatagaaacacmcattatggatggaaaatttgtaggccataagaaaatgatatttttcaatcccattaagtatctccagaaagtccccagagcttctacttttcatatggttcaccataccaaatctgcctactgggcaaatttaaactgtactaatttgtctgcttgcaaatctgaagttattgacacattcacttcatctaatattatatctgtaacaacaaacaatttatataaaa

SEQ ID NO: 217666 - DNA, 614 bp, Homo sapiens
gaagcagcaacaggtattacattcaatcccctgggctccagacattcttctccctgcctgctagggggcagcagcgctgtctcctcagctcattcagataagctacctttgccagaacagtagtaactcctttctttgcttgatggtccactggcatgaggagctttgtttttgtttttatttttgtttttttgttttgtctttatttcttctaaaaacacacasacacacacacacacaacaacaacgggatacatgtgcagaacatgcaggtttgttacataggtctacgtgtgccatggtggtttgctgtacctattgacctatcctttaagttccctccctgcaccccacacaccccaacaggccctggtgtgtgttgttcccctctccgtgtccatgtgttctcaatattcaactctcacttatgagtgagaacatgcggtgttgggttttcttttcctgtgttagtttgctaaggatgatggcttccagcttcatctatgtccctgaaaaggacatgatctcattcctttttatggctgtgtagtattccatggtgtatagtgccacattttctttatccagtctatcactgatgggcattttggttg

SEQ ID NO: 217667 - DNA, 532 bp, Homo sapiens
agaggataggtgggaagacactggtaggagagttttaagaaygaatgagttgacacgagtttccattctaacaggcaaaatgtgatgacagtgtctctggaatgtgtacacttaaccacaaacatgtatgcacattccaaaagtttatgaattccttggactacagactaaagcataaattcttagaatgttttctcaggcattctgagaattttgggcaacttcttatttcagctgtgtcacatgccttagtttatatagtccatttttccaagacagccttgccctatattatctgatatgagcctttctgtcctggaagcacagttttaattctatttcactcataaagcattgctaaatccctccatttagaattgttcttttccttctttataatttcatagtccttttttatgctactattatatttttccattcattctataaaaaatgtatttagaacatattgcgtatcaagcactgtgttaggcacagagacacagtggggcatgagctcaggcctgtttcc

SEQ ID NO: 217668 - DNA, 519 bp, Homo sapiens
gaagacactggtaggagagttttaagaatgaatgagttgacacgagtttccattctaacaggcaaaatgtgatgacagtgtctctggaatgtgtacacttaaccacaaacatgtatgcacattccaaaagtttatgaattccttggactacagactaaagcataaattcttagaatgttttctcaggcattctgagaattttgggcaacttcttatttcagctgtgtcayatgccttagtttatatagtccatttttccaagacagccttgccctatattatctgatatgagcctttctgtcctggaagcacagttttaattctatttcactcataaagcattgctaaatccctccatttagaattgttcttttccttctttataatttcatagtccttttttatgctactattatatttttccattcattctataaaaaatgtatttagaacatattgcgtatcaagcactgtgttaggcacagagacacagtggggcatgagctcaggcctgtttcc

SEQ ID NO: 217669 - DNA, 531 bp, Homo sapiens
gataggtgggaagacactggtaggagagttttaagaatgaatgagttgacacgagtttccattctaacaggcaaaatgtgatgacagtgtctctggaatgtgtacacttaaccacaaacatgtatgcacattccaaaagtttatgaattccttggactacagactaaagcataaattcttagaatgttttctcaggcattctgagaattttgggcaacttcttatttcagctgtgtcacatgccttagtttatatagtccatttttccaagacagccttgccctatattatctgatatgagmctttctgtcctggaagcacagttttaattctatttcactcataaagcattgctaaatccctccatttagaattgttcttttccttctttataatttcatagtccttttttatgctactattatatttttccattcattctataaaaaatgtatttagaacatattgcgtatcaagcactgtgttaggcacagagacacagtggggcatgagctcaggcctgtttcccat

SEQ ID NO: 217670 - DNA, 555 bp, Homo sapiens
cattaaacttcattcccttgggcatgtgsctaggtttattctgttactttgtcctcattagaatagttttcaggcttttatgttaaaaagcttgaaaaacaagaaacaaatatataatagacttttaaagtagatggtaatatttaaatattgaaacctatttaaaatgcatatacatttaaatatataaaatacatgattttacttatttataaacagaaaaaaaattaaaatagatgtaaaaatctatctacatctattgatttataatatccaaatctatatatattttataccttcatctatccaaaaaactgtgatctaattaaacagctgaataaaccaatatggttgttctgtattgttcttagtacctaatacattatgactgtgattatggggatatagtagcaaagcctactgtcattgtatttttttctaattttttcatgtaacacaaggataacttttaataatatgtgttatttttcttacagaggggtgaaatttgcttgagtagatttatggtgttttcatttccagcagagatctgag

SEQ ID NO: 217671 - DNA, 555 bp, Homo sapiens
cattaaacttcattcccttgggcatgtggctaggtttattctgttactttgtcctcattagaatagttttcaggctyttatgttaaaaagcttgaaaaacaagaaacaaatatataatagacttttaaagtagatggtaatatttaaatattgaaacctatttaaaatgcatatacatttaaatatataaaatacatgattttacttatttataaacagaaaaaaaattaaaatagatgtaaaaatctatctacatctattgatttataatatccaaatctatatatattttataccttcatctatccaaaaaactgtgatctaattaaacagctgaataaaccaatatggttgttctgtattgttcttagtacctaatacattatgactgtgattatggggatatagtagcaaagcctactgtcattgtatttttttctaattttttcatgtaacacaaggataacttttaataatatgtgttatttttcttacagaggggtgaaatttgcttgagtagatttatggtgttttcatttccagcagagatctgag

SEQ ID NO: 217672 - DNA, 555 bp, Homo sapiens
cattaaacttcattcccttgggcatgtggctaggtttattctgttactttgtcctcattagaatagttttcaggcttttatgttaaaaagcttgaaaaacaagaaacaaatatataatagacttttaaagtagatggtaatatttaaatattgaaacctatttaaaatgcatayacatttaaatatataaaatacatgattttacttatttataaacagaaaaaaaattaaaatagatgtaaaaatctatctacatctattgatttataatatccaaatctatatatattttataccttcatctatccaaaaaactgtgatctaattaaacagctgaataaaccaatatggttgttctgtattgttcttagtacctaatacattatgactgtgattatggggatatagtagcaaagcctactgtcattgtatttttttctaattttttcatgtaacacaaggataacttttaataatatgtgttatttttcttacagaggggtgaaatttgcttgagtagatttatggtgttttcatttccagcagagatctgag

SEQ ID NO: 217673 - DNA, 555 bp, Homo sapiens
cattaaacttcattcccttgggcatgtggctaggtttattctgttactttgtcctcattagaatagttttcaggcttttatgttaaaaagcttgaaaaacaagaaacaaatatataatagacttttaaagtagatggtaatatttaaatattgaaacctatttaaaatgcatatacatttaaatatataaaatacatgattttacttatttataaacagaaaaaaaattaaaatagatgtaaaaatctatctacatctattgatttataatatccawatctatatatattttataccttcatctatccaaaaaactgtgatctaattaaacagctgaataaaccaatatggttgttctgtattgttcttagtacctaatacattatgactgtgattatggggatatagtagcaaagcctactgtcattgtatttttttctaattttttcatgtaacacaaggataacttttaataatatgtgttatttttcttacagaggggtgaaatttgcttgagtagatttatggtgttttcatttccagcagagatctgag

SEQ ID NO: 217674 - DNA, 605 bp, Homo sapiens
acagtacaagaataacatgaatctgctccagtttaagtcatgtgaaaatttcagtacaaaatgactacaaaaattagccaggcatggtggcgggtgcctgtaatcccagctacttgggaggctgaggcagaaaattgcttgaacccaggaggcggaggctgcactgagccgagatcacgccactgcactccagcatgggcgacagagcgagactcygtctcaaaaaaaaaaacaaaaaaaaacaaaacacaactttgcagattgtttcttggctaaaggaaaacaaatgtacaagtctgttgagactaaagcaagcaaaaacaacaaaataaacttttacccttcagattctgcctccacaaatacttcatctccatcatcacctgttgctgtttcatttgttgtagataaagtgccagtggatgtagtcaccattggaacagattgagaggcatgttccgaagcatcagaggtggtgctctcagtaaatacagtcactttaaaaagacaacacaagaaaaagaactttaaaactttgtggtttatcacatttttagccagaagatacttcataggttttcattttaccaataaaacagaaccta

SEQ ID NO: 217675 - DNA, 547 bp, Homo sapiens
taagatttggaaaatatgaagtgttatagtgttatattcatttgttgtatctctacctattgccattatattgttaatttttttatacaayacgataaagctttgtgattatgttttagctagtaaaagtgtaaaattttaatatttccatgttttccaatataacttttagattgtacttgtgtcacaaaaagagggattaatctgcttgtaataatttccattgaagttgtagaatacccaacagttttatatccacaatgcctagatattttttataatgaactagggtaagtgaatacactagttttgaattcttaaaagatatattcaatttgattcttttttcttttacaggtgtgagccatgcaatgggagggagaggaggaataaacagaggaaatattaattaaatggtctgtaaacaataacaactgtgaataagattatcaaatctgttttagtgtaatgattgtcaagtttaaaaacatttttatatataaactggtatactcatgtcaatattctttattaataaaatgttttt

SEQ ID NO: 217676 - DNA, 568 bp, Homo sapiens
ttaatttgctttttatcattgtctaatctgctatttaaactgtacattgagttttttacttcaaatattaaatttttctttaagttttatttgattatttctccagtctgcctggccatattgataatttcttattccttgcttaatttttcatttcatcttttaaggtatttaggtgcttcataaataatcattttatattccataactgggcttaaaaacaaaacaaaaacaaaatgaaacaaaaaaacagggtctcactttgtcacccaggctgtgaagtggcatgatcatggctcactgcatgagcaaactcctgggctcaagtgatctctcacctcagcctcctgagtagctgggactacaggcacatgcaaccacacccagataattttttttttttctttcagtagagatgaggtctygctatgttgcccaggctggtcttgaactcctgagctcaagtgctcctcccaccttggtctcgaaaagtgctgggattacaggtatgagccaccgagcccggcctttaactgttatttttaatatctgaaattcttgaagatct

SEQ ID NO: 217677 - DNA, 451 bp, Homo sapiens
ggctcaagcctgtaatcccaacactttgggaggctgaggcaggtggatcacaaggtcaggagttcaagaccagcctgaccaacatggtgaaaccccgtctctactaaaaaaaaaamcaaaaaaacaaaaaaacaaaaaattagccaggcatggtggtgtgcacctataatcccagctactcaggaggctgaggcagaagaaacgactggacccgggaggcggaggttacagtgagccgagatcacaccactgcactccagcctgggcaacagagcaagactctgtctcaaaaaaaaaaaaaaatcacatctccttcaaataaggataatttgacttcttcctttccagtttggatgccctttatttctttgtcttgtccgattgctctagctaggacttccagtactgtgttgaatatcagtggtgaaagtggggatctttgtcacgttcc

SEQ ID NO: 217678 - DNA, 451 bp, Homo sapiens
ggctcaagcctgtaatcccaacactttgggaggctgaggcaggtggatcacaaggtcaggagttcaagaccagcctgaccaacatggtgaaaccccgtctctactaaaaaaaaaaacaaaaaamcaaaaaaacaaaaaattagccaggcatggtggtgtgcacctataatcccagctactcaggaggctgaggcagaagaaacgactggacccgggaggcggaggttacagtgagccgagatcacaccactgcactccagcctgggcaacagagcaagactctgtctcaaaaaaaaaaaaaaatcacatctccttcaaataaggataatttgacttcttcctttccagtttggatgccctttatttctttgtcttgtccgattgctctagctaggacttccagtactgtgttgaatatcagtggtgaaagtggggatctttgtcacgttcc

SEQ ID NO: 217679 - DNA, 451 bp, Homo sapiens
ggctcaagcctgtaatcccaacactttgggaggctgaggcaggtggatcacaaggtcaggagttcaagaccagcctgaccaacatggtgaaaccccgtctctactaaaaaaaaaaacaaaaaaacaaaaaamcaaaaaattagccaggcatggtggtgtgcacctataatcccagctactcaggaggctgaggcagaagaaacgactggacccgggaggcggaggttacagtgagccgagatcacaccactgcactccagcctgggcaacagagcaagactctgtctcaaaaaaaaaaaaaaatcacatctccttcaaataaggataatttgacttcttcctttccagtttggatgccctttatttctttgtcttgtccgattgctctagctaggacttccagtactgtgttgaatatcagtggtgaaagtggggatctttgtcacgttcc

SEQ ID NO: 217680 - DNA, 409 bp, Homo sapiens
aagtactaagcatcaaaatgcctaatgaatgggtaacaaaaactagctacttttctttctttaatagccttattgagacatacttaacatactatatggtttacccattaaaatatgtacttaagtggtttcagtatattcacagttttgcaaccattacaacaaactaattttagaacattttcatcactccaaaaakgaaaattgtgtatcaatcagcggccactccctgtcctgcctgatatagccttttatataaataaaaccacaaaatatgtgatcttttatagatggattatttcacttagcatgttagcataatgttttcaaggttcatccacactgtagcatgtttcagcactctattcctttgcatggctgaatagtaagtacagcaatgtttggatat

SEQ ID NO: 217681 - DNA, 529 bp, Homo sapiens
ccaatggctttactttagaattttaccaaacacttaaagaaaaactaccaaccatactcaagttaatctaaaaaatagaaaaggggagactatttccaaactcattctacaatgccagtattactctgatatcaaaaccaaaggcacaacaaaaaaagaaaactactagccaatatatctgataaacactgatggaaaaaaactcaacaaaatgttagaaaattgagttcaacaacacacattaaaaatattattcatcaagaccaagtgggatttttcccagggatgcaagaatggttcaacaaacacaaatcaatcaacatgatacatcgtatcaacagaacgargcctaaaactatgtgaccattaaaatagatgctgaaaaagcatctaataaaattcaacaccccttcatgataaaaaccctcaaaaaactgtgcatacaagaaacttaccttaacacaataaaagccatatatgacagactcacagctaatgtcatactgaatgggaaaaaaatgaaagactt

SEQ ID NO: 217682 - DNA, 371 bp, Homo sapiens
agttgtgttgtcataaaattcaaatgaggtgatgtctgttaaaccactcattagacaggaaatgcaatttatatttatttctatgtctaatggtaatctaaatttaacagtataagatttaggkgtgctatggtttgaatgcatccctgctgaaattcagatgttgccaaagtgatagtattaagaggtggggtctttaagagggattagggcatgaggactccatgtttctccattgtaaattggagtaagatccttataaaagaggcttcttgttggttttggctatctgttgtccttctaccttctgctatatgaggatgcagcatgaaggacctcatcagatgcagtaccttgattttggacttctc

SEQ ID NO: 217683 - DNA, 474 bp, Homo sapiens
acgcccatgtctggggctttaagtttattcttccctccgactctatttcacatagatttccctggatatcttcatggctccttccctcaatgtctttagatttctgctaaaatgctaaatttaccagaaagcgttttcctgattatctcatttagcacattctgttccacttttttgctttatttttcttcataacacatatcaccactctataagagtttatttgtatatatgtttgctatgtcttgtccattagactgtacatgccagagttctatatcaaagcaagactttgtccactaccaaattcatagcatctagaacattgcctagaatatggctgatacagtgtctgttgaatgaaggaatggatgaagaaaaatgaagacatgttrtatgtttgctttttctgtgtggcattttctaagtaaaaatgaaagaaaagtattttttctttgcaacattctatatttt

SEQ ID NO: 217684 - DNA, 532 bp, Homo sapiens
tatttctacttctgttgtaacaaccactcaaggcataaagttcttaatgtggcacttatacacttcaaggatcatttaaaataaaatctaaaacagtaaaacattagcaacattgcaaagcagaaaatcacattaaaaatctacattgctgtatatttagacatttgtatgtatcaccctccctgccacaaccaccttcctcttgtcttgaatgggaatattttatttaaatcagaaggaagtcayagttaaaatactaagtgtgattttatatttaaattatattttaaaggatttaattcaataatgttcaagtttaaactggctccttacaagagcaatctgagagctttattccatactaaaagaggatacacttactatttatcctgttagcctgatctttgagctctccacagctccacatagatctaagaaagcagctgaacttaacagatatgacagtgggtcgagataaaaagatcatgtattcttctactgtcacagaacaatgtgggaatatagattattt

SEQ ID NO: 217685 - DNA, 532 bp, Homo sapiens
tatttctacttctgttgtaacaaccactcaaggcataaagttcttaatgtggcacttatacacttcaaggatcatttaaaataaaatctaaaacagtaaaacattagcaacattgcaaagcagaaaatcacattaaaaatctacattgctgtatatttagacatttgtatgtatcaccctccctgccacaaccaccttcctcttgtcttgaatgggaatattttatttaaatcagaaggaagtcatagttaaaatactaagtgtgattttatatttaaatwatattttaaaggatttaattcaataatgttcaagtttaaactggctccttacaagagcaatctgagagctttattccatactaaaagaggatacacttactatttatcctgttagcctgatctttgagctctccacagctccacatagatctaagaaagcagctgaacttaacagatatgacagtgggtcgagataaaaagatcatgtattcttctactgtcacagaacaatgtgggaatatagattattt

SEQ ID NO: 217686 - DNA, 498 bp, Homo sapiens
gaattctggcccagtggggtaaaggaaattcataatttacaaactcatccagccaaatgtgtatatctagtcttagtatyacattatttccttagcagagccctgactttgacagaatagacctcttgaaggtcctgcacatttagttcagagcagggctgcaaaaaccatagtgcaggcctggtgcctgtgtctgcacatgttggcctggtgccagaggccaagggtgctgctgacttggtgcctggtgggcctgaaacctggggatgtgttgtccagcctggctcttgattggtctggaacctggggtaggactggaggctgggtctgtggattttggcctaataagtaaagccgtgggggcaagactagtacccagtgcagtccagagcctgagactgttggggctggcctggtgctagggcaggcctacagctcagggccactgggctgacccagttctggggctttcctactgtcttgtccactggggttgag

SEQ ID NO: 217687 - DNA, 410 bp, Homo sapiens
gaattcagttccccagcaccattgaatagatacttgattttaatacaattgttaaaatcatatgtaaataataaacactgtgattactgaccttttaataagcactatttttttcctttttttcccctctaatctgatcttaacaactctattgtcatcccccaaaatgtcttttgcctgtgtcaagaaaacccaagaacaaagttttttagggattttgaggttacactaatcaaacattttaggcaaatyttctctgcatgacctatttgcatgttagttgagaatgttacacttttgatagtaatgtttcagactcagactttctagtttggatcttggacaatttccaagacttcatagaaataattccttggtgaaactatatgagtttatattattttaactgg

SEQ ID NO: 217688 - DNA, 410 bp, Homo sapiens
gaattcagttccccagcaccattgaatagatacttgattttaatacaattgttaaaatcatatgtaaataataaacactgtgattactgaccttttaataagcactatttttttcctttttttcccctctaatctgatcttaacaactctattgtcatcccccaaaatgtcttttgcctgtgtcaagaaaacccaagaacaaagttttttagggattttgaggttacactaatcaaacattttaggcaaatcttctctgcatgacctatttgcatgttagttgagaatgttacacttttgatagtaatgtttcagactcagactttctagtttggaycttggacaatttccaagacttcatagaaataattccttggtgaaactatatgagtttatattattttaactgg

SEQ ID NO: 217689 - DNA, 539 bp, Homo sapiens
tttattcgactgcttcagactcctgaaatcacctcaactaagtcatgtctttccttacctggaaagtcatgacttatgtaagtcaagacttttatgtaagtcacccaggagttcgtttttggaaaattgtctgctatataatgtttatatagtagtcctggataaaactgtgatttttaagcaaatgttttccttttttttaaagtggtcttttttatttattataaattcagtataatctctatattrtatttttaacatttacatgtcctatttgattactaacaacgttatatttttatataaattagtgaattctacttctagccatgatggaaatcagatttgttacctccgtctgaaacaactaaaaaactggacaaacgtttgaaaacaaaacaaaacaaatcaaaaaccttttcagaaatgttaaaacaagcagcacagactctaagctctatgaaaaggagagtaaacagggtgatccctgaaggcacattctggaccatggagtagagaagagtatattaagaagagct

SEQ ID NO: 217690 - DNA, 407 bp, Homo sapiens
gaattctacttccagccatgatggaaatcagatttgctacctccatctgaaacaactaaaaactggacaaacatttgaaaacaaaacagaacaaaacaaaaaccttttcagaaatgttacaacaagcagcacagactctaagckctatgaaaaggagagtggatatgttcttgcaaactacaactttaagtgaaatgataaaaaacagatcctcataatgatgttttcattcaacattgtttcattataccattgataagaaaaaatattagtctcatatgtctcattccttaaagttacagtttccaagaacctatatatgacattaagtgaggacttaccgtataaggaaaaagatagtttaaaagttgaaggatgaaaaaatatgtaccatataaactctaaac

SEQ ID NO: 217691 - DNA, 604 bp, Homo sapiens
ttatcctcctcaatcctttttccttattatttatatgcattttatttacacacatattttaaactcagtgatacatttttataacctttgatacaatctgrtatgtgtgaagcgttactcttttcatttcctttatttttccagcatactcgtttttccttgtgggttcattttccttctgtctgaaaaattcccttttgtatttctttcagtgctgttctatgagtgattatcttagctcatgactaatagcctgcatttattggctgttcactccaagatctgtaccactgatctggcatcatgaagacatcttggttaaaatatacagcacaaaaattttaaactgagatgattcagtgtgatgcccctgcaccaaaaattttgatctgacccagtccaggagaaaataagataggtgataacctctttctccagaagtttgtgctcaacctcatttatcagtaaatagtaaaataatgtattcaaaatgtcttttttaaaaattatattttaagttttagggtacatgtgcacaacgtgcaggtttgttacatatgtatacatgtgccatgttggtgtgctgcacccattaactcatcat

SEQ ID NO: 217692 - DNA, 604 bp, Homo sapiens
ttatcctcctcaatcctttttccttattatttatatgcattttatttacacacatattttaaactcagtgatacatttttataacctttgatacaatctggtatgtgtgaagcgttactcttttcatttcctttatttttccagcatactcgtttttccttgtgggttcattttccttctgtctgaaaaattcccttttgtatttctttcagtgctgttctatgagtgattatcttagctcatgactaatagcctgcatttattggctgttcactccaagatctgtaccactgatctggcatcatgaagacatcttggttaaaatatacagcacaaaaattttaaactgagatgattcagtgtgatgcccctgcaccaaaaattttgatctgacccagtccaggakaaaataagataggtgataacctctttctccagaagtttgtgctcaacctcatttatcagtaaatagtaaaataatgtattcaaaatgtcttttttaaaaattatattttaagttttagggtacatgtgcacaacgtgcaggtttgttacatatgtatacatgtgccatgttggtgtgctgcacccattaactcatcat

SEQ ID NO: 217693 - DNA, 631 bp, Homo sapiens
ttacaatgtatcatataatatggtacaattacttcaacaatattgacacattattattatttttaaaattcatattttattcatatttcctcagtttttttctctaatatctttttctcttctaggatcccatacaaaatactgaactatagttagtaaccatgttttctaagccttctcttagttgtgaaagttttccaagttttccttgcttcttggtttggtattttgtgtaatgcccctcaatggcaatttatttaatattttttttcatcattagagtagggtaatgcgtttcttgggaggaagaccaaggagtaaagcattattctcagtacatcatatcaagggtgcatgtaatctccacaagttataacaattgatgttgtccctgacgacttggtttaaagtagtgtttatctggtgtcttcactgtaaaattagcttcattttttccrcattttcataatatactctttggaaaaagtcaccaaacacagcccagatttaaggaatgaggatgtacgctccacctcctaatggcggaggaactatataaattatttagaattttctgcatggaagatttgtgtcttctcacagatttatttatttgatcagtcacttattt

SEQ ID NO: 217694 - DNA, 631 bp, Homo sapiens
ttacaatgtatcatataatatggtacaattacttcaacaatattgacacattattattatttttaaaattcatattttattcatatttcctcagtttttttctctaatatctttttctcttctaggatcccatacaaaatactgaactatagttagtaaccatgttttctaagccttctcttagttgtgaaagttttccaagttttccttgcttcttggtttggtattttgtgtaatgcccctcaatggcaatttatttaatattttttttcatcattagagtagggtaatgcgtttcttgggaggaagaccaaggagtaaagcattattctcagtacatcatatcaagggtgcatgtaatctccacaagttataacaattgatgttgtccctgacgacttggtttaaagtagtgtttatctggtgtcttcactgtaaaattagcttcattttttccgcattttcataatatactctttggaaaaagtcaccaaacacagcccagatttaaggaatgaggatgtacgctccacctcctaatggcrgaggaactatataaattatttagaattttctgcatggaagatttgtgtcttctcacagatttatttatttgatcagtcacttattt

SEQ ID NO: 217695 - DNA, 634 bp, Homo sapiens
aaagacagagaatcaatccagaaatcaaataaaaaatttaaagctatctagggactaaaakgttaagtcaccaatcagattcaactcaaataaaaacaccccaggacgtattataatcaaactctgaaaggccaaagacaaagagagggtcatgacaacagaaaaagcaaataacatataaatgagatcaaatatttcttgtagcatacatcttagcagaaattatgcaggccaggagggagaggaacaatatattcagaatgctgaatttaaaaaaatgaagccaaacagtagtaatttaaccaacaaagtaaatcatcagaaatgaaggaaaggtaaagattttcctagacaaaaaacaaagttgagggaatttattcctatgagaccagttttacaaggaatgctaaagggagttctttaaaacaaaaataaaaaatgttaaagtgattgtgtggttgctatactaatattgtaatcatagtgtttaaaccacttctatgtttagtaagaagtctaaaaaataccattaaaataataactacaacaaatacttaggagataggtaatgtaaaaatgtaaatcatagcatcaaaaattcaaaatgtgggaggaggagggaaataataggtgc

SEQ ID NO: 217696 - DNA, 634 bp, Homo sapiens
aaagacagagaatcaatccagaaatcaaataaaaaatttaaagctatctagggactaaaatgttaagtcaccaatcagattcaactcaaataaaaacaccccaggacgtattataatcaaactctgaaaggccaaagacaaagagagggtcatgacaacagaaaaagcaaataayatataaatgagatcaaatatttcttgtagcatacatcttagcagaaattatgcaggccaggagggagaggaacaatatattcagaatgctgaatttaaaaaaatgaagccaaacagtagtaatttaaccaacaaagtaaatcatcagaaatgaaggaaaggtaaagattttcctagacaaaaaacaaagttgagggaatttattcctatgagaccagttttacaaggaatgctaaagggagttctttaaaacaaaaataaaaaatgttaaagtgattgtgtggttgctatactaatattgtaatcatagtgtttaaaccacttctatgtttagtaagaagtctaaaaaataccattaaaataataactacaacaaatacttaggagataggtaatgtaaaaatgtaaatcatagcatcaaaaattcaaaatgtgggaggaggagggaaataataggtgc

SEQ ID NO: 217697 - DNA, 472 bp, Homo sapiens
aatgtggctctggcctttgatgatgtttcaatctagaaagaactggaagatatttcctgtgggatgaggccactctgatctgaaaacacccctgtcttctggcctcttctgaggccacagcctggccacacctgcttgcaatgcagccccagatgcccaaccagtgtgcttcctgagtgtcatcacatagctccttcactgacatactgcacctraccatcagagagctccagcagacagccctggctgacaggcacccacccacctgcagcctccctctgacactttgccagtgcgaacttgcagacagcccacctccactactttgctggcccacactcacaggtggacatttgttaacagcgtctgtcatgctactgctaaggtgcgagcacacacatggacaccatagtactctcctcaccagcatgccaaccccaaaaacttgtgagcaccctgccatgccactgct

SEQ ID NO: 217698 - DNA, 637 bp, Homo sapiens
attggtagaccactagttagactaataaaaaagaagataacataatcagaaataacaaaggcgttatacccttgaaccgacagaaatacaaaaaaccatctgagactattacaatcgtctctatgcacagcatacaaactggaatacctacaaaaaatgcataatgcctggaaatacacaaccttccaagattgaaccagggygaaatttaaaacctgaacaaaccaataatgagttctaaaattgaattggtaataaaaagcctaccaacaagaaaaagccctggaccagacagattcacagttgaattgtacaaatgtacaaagatgtagtaccattgcaacttaaattattccaaaaaattgagggcagggacttctccttaacccatatgaggccagcatcattctaataccaaagcctggcagagacacaatgaacaaagaaaactacaggccaatatccttgatgaacacagatgcataatttctccacaaaatactagcaaaccaaatccagcagaacatcaaaaaactaatccaccatgatcaagtaggctttatccccgggatgccaggttggttcaacatatgcaaatcaataaatgtgattcaccacataaatagaactaaaaaac

SEQ ID NO: 217699 - DNA, 625 bp, Homo sapiens
cttctttgcagatatgtgtttytgtctttgcatgataatctattaatacactcaaaacagtagcaagaatgatctttaaaataaatagtattatgattcttgtcttactcaacataaacccaaagactttgcagtggcctacaaagcctacacacattctaccattgcccagtctttttttatttcatcccgacttgattcccttttacttactctgcttaagtcacaccaggacttgactattattgaaacatacaaggggactctcgccttaagacacttatacttgttcccaaggcctggaatgctcttcaaagagccacacagctcactctcccttccatctcatctcacctctaaagtcactttcttagtggggacttcctgagccatgttgtctaatattgcagtttgtaccatcccaacccacatttgtttcttatttttcatccccactgaatatttctctctagcactttttgctgtcttattagaaatttttcttatttatctttttaattgtatgtccttccaatagaatgtaagctccatgagagtaaagattttgctttgctttgtcttgttcactgtgttatctttattgcctagaaacatgatgagtgca

SEQ ID NO: 217700 - DNA, 585 bp, Homo sapiens
ttgctggtatgaaaaatgcattagtatgattttctttatttttatgtttttttttctggtggcttaagagatctcttctttgtcttgatattctggagttttactaaagtatctaactttgtgtggggggcggtggggatggtgtctgtcctagtatactttgtactttcttttatctgtagactcatgcatttcatcagttttggacaatttatagaaatatctcttcatatatctcatctcatttttcctttagtcccaaattctgsaagtcttattagatacatgttcaagcttctcattctaaactctaagtcaatttctttctttgactctctctctcgaagtctgaatcagtctctctctctctgtctctcttattaggattttctgaccgctgatttattcttcatttgtgtctagccatttgtttaaattatctgctaatttttaaattctcaattataggtttcattttaaatctaattattgttggtagattacttttgtgatttcattttttatttatttacatgctacacctagtttttattttaattctgtaaatgattaatgcaataccca

SEQ ID NO: 217701 - DNA, 597 bp, Homo sapiens
tttttaaaatgaattttgagtggtacaactccagtggagtactggctgaatttcaktgggctgtgttggttgtttgcaatgacacagagagacacatacagagagagagagaaacagagaaggagacagacacagagaaagagggagaaagaatatgtgcaggatttcctttgtttttttctatatcaattttaagattctccaggcaaataagaactttgttcataaacttaaaaaaaagagcaaatttatttttattactttgtatttaatgacttgctgagtattgcatagtaattattgagaaatattgtgctttttctaatagaacttgagcaatcacgggttagagtttgtgtatattttctatgcgttgaaacaatattaaattatacctggtaatatttttaagccttgccttgagagccatctgcaacacttgaatgataggcctcggctttacactctctaaattctattgcatgagactatgttaaagctgacatgttttttaggaaataactttttttctctggagaataggtgtcaagtatgtcatctatggctggctaatttaccacttcactgatcttatta

SEQ ID NO: 217702 - DNA, 597 bp, Homo sapiens
tttttaaaatgaattttgagtggtacaactccagtggagtactggctgaatttcagtgggctgtgttggttgtttgcaatgacacagagagacacatacagagagagagagaaacagagaaggagacagacacagagaaagagggagaaagaatatgtgcaggatttcctttgtttttttctatatcaattttaagattctccaggcaaataagaactttgttcataaacttaaaaaaaagagcaaatttatttttattactttgtatttaatgacttgctgagtattgcatagtaattattgagaaatattgtgctttttctaatagaacttgagcaatcacgggttagagtttgtgtatattttctatgcgttgaaacaatattaaattatacctgrtaatatttttaagccttgccttgagagccatctgcaacacttgaatgataggcctcggctttacactctctaaattctattgcatgagactatgttaaagctgacatgttttttaggaaataactttttttctctggagaataggtgtcaagtatgtcatctatggctggctaatttaccacttcactgatcttatta

SEQ ID NO: 217703 - DNA, 597 bp, Homo sapiens
tttttaaaatgaattttgagtggtacaactccagtggagtactggctgaatttcagtgggctgtgttggttgtttgcaatgacacagagagacacatacagagagagagagaaacagagaaggagacagacacagagaaagagggagaaagaatatgtgcaggatttcctttgtttttttctatatcaattttaagattctccaggcaaataagaactttgttcataaacttaaaaaaaagagcaaatttatttttattactttgtatttaatgacttgctgagtattgcatagtaattattgagaaatattgtgctttttctaatagaacttgagcaatcacgggttagagtttgtgtatattttctatgcgttgaaacaatattaaattatacctggtaatatttttaagccttgccttgagagccatctgcaacacytgaatgataggcctcggctttacactctctaaattctattgcatgagactatgttaaagctgacatgttttttaggaaataactttttttctctggagaataggtgtcaagtatgtcatctatggctggctaatttaccacttcactgatcttatta

SEQ ID NO: 217704 - DNA, 597 bp, Homo sapiens
tttttaaaatgaattttgagtggtacaactccagtggagtactggctgaatttcagtgggctgtgttggttgtttgcaatgacacagagagacacatacagagagagagagaaacagagaaggagacagacacagagaaagagggagaaagaatatgtgcaggatttcctttgtttttttctatatcaattttaagattctccaggcaaataagaactttgttcataaacttaaaaaaaagagcaaatttatttttattactttgtatttaatgacttgctgagtattgcatagtaattattgagaaatattgtgctttttctaatagaacttgagcaatcacgggttagagtttgtgtatattttctatgcgttgaaacaatattaaattatacctggtaatatttttaagccttgccttgagagccatctgcaacacttgaatgayaggcctcggctttacactctctaaattctattgcatgagactatgttaaagctgacatgttttttaggaaataactttttttctctggagaataggtgtcaagtatgtcatctatggctggctaatttaccacttcactgatcttatta

SEQ ID NO: 217705 - DNA, 594 bp, Homo sapiens
cctccgacttcaagactttgtctatcttttgctgccactattaactctgtttttcctcattgcctttctaaaacttcttttttttattattgaattacttttaaaaacgcctctcttgcctcctttccaagcatccacacaaaagttctgtaggttccaaaaacattgccatcttcttcctaagtgtcttttaatccacattgatgacatacattcctgtgttgtgctctctttaatgccacaattaagtataatcgatttaatgcaarctttacctcccgtgataaagataagtcaaatttatagtatcattctaattctctgtattccaagattatacaggtttctgtagctgtaacaccagtcactttccactgaaatttcaacatgtggaggctctaaggtcctttagggtcttaaatcttcatgaggatagaaacctggaggtttttttgtttgttttctgctatatcatcattgctcaccagatttctactcttagtaatagttcaacaaataccttataaaagaatgactgagtgtttttatttctagggtctcagctgcatgggtggtctccatagctggagagca

SEQ ID NO: 217706 - DNA, 413 bp, Homo sapiens
attgctttggctattctggcttttttggttccatatgaattttaggattgggttttttaattctgtgaaaaataatgttggtaagtttgataaggattatattgaatctgtagatttctctggggagatggtcattttaacaatgttgattcttctaacccatgagcatgggatatttttccatttgtctgtgttgtctatgattactttcatcggtgttttgtagttcacctccttgtttaaatatattcccagctgggtttttttttttttttttstggtagctattataaatggggttgactttttgatttggtcctcggctagatcattactgtactagtgtacagaaaagctactgatttctatatgttaatttagtatcctgaaaccttactgaattgatttatcaa

SEQ ID NO: 217707 - DNA, 500 bp, Homo sapiens
ttttctaaacttaccaacagttgatgggcagggttcctcrtcatagagtttcactaaaggtttattttaccccctgcactgagagcacttacctttctcacgtgtgtataatttaagcctaattcttacaggatatttaacagttatccctcagagatcttgagcattctcctagagacctctttaccttatggcactaggtcttacaatgaatgtttccagtctaacagggccttgatcttcttagcataagctgcagtgcttcatccaagggccctatcaaggtttctccccttccttccacggcaatgtcctagggtgtcacaaagaatagtaacagcagcgtgatctaagggcagagagacagacctggcttcccatcccggctcatacacttcttgcaatcctggtttcaacttttctaaatgggaatgccatctcctcacccttattcagggtagctatgactattacctaaaagcacgaagggtgcctagcga

SEQ ID NO: 217708 - DNA, 642 bp, Homo sapiens
tgtttagctgagccaaagtttgcatttattaaaaatgtaaattttatcttgaaatgatgcctaatctcacagaactataggttccaatctctaagtcactgtgatcagtagtacaactatgtactctgtgtccgtcctactagctatattgctgggatctggagcgtgacttttgtgtctttctgtaatgccttacctctcatcaaaattcacaagacctgctctctggattgtgagacttatgcattacaaataaaaaggtgctgtcctaatggcattccaaagccatttgaaatgagttgctttcgtttccagggagtcattttttatgttgattatcattactttaccattaccttttaatttggaaatgttaaaatccattgccatgttccttggaatataaagatcatatagggtcactgagatgagtctggaaatatcaatcactggagcccttctagtgggataatgttgttgctaatattgctggtattctattcttcacgtttcctccagtaaaatgtaaagcgaccaaaatataagcgtcatgcaggcaagggttcttttatttgttcartgaacactgccttcacgtagtagtcagttaatattcactactagaatgcatgttgaatggca

SEQ ID NO: 217709 - DNA, 388 bp, Homo sapiens
ttttcacattatttcacataatttcttaagcataatagtataagtaaattatactttctacacaagctcttcatatwtatgaatagactaagttctaaatgtttaagtcattgggaaatcccaatgttccttcctagagaaaccgtgtgagaaattgtagctaagctaaaaaaatggaagacaaaagtcgatttaacgaggaatgtagattaatatcatagtattgtctcaactgtggcaaccactacttataaaaatggtataagaaatgcagtctgaaatctgaattctaaataacaatgtagggccattatccctctgggaccttagggtcaaaataagagaaaagggatgaatggtgggttggaagtaagtcaatgatccttgt

SEQ ID NO: 217710 - DNA, 388 bp, Homo sapiens
ttttcacattatttcacataatttcttaagcataatagtataagtaaattatactttctacacaagctcttcatatttatgaatagactawgttctaaatgtttaagtcattgggaaatcccaatgttccttcctagagaaaccgtgtgagaaattgtagctaagctaaaaaaatggaagacaaaagtcgatttaacgaggaatgtagattaatatcatagtattgtctcaactgtggcaaccactacttataaaaatggtataagaaatgcagtctgaaatctgaattctaaataacaatgtagggccattatccctctgggaccttagggtcaaaataagagaaaagggatgaatggtgggttggaagtaagtcaatgatccttgt

SEQ ID NO: 217711 - DNA, 388 bp, Homo sapiens
ttttcacattatttcacataatttcttaagcataatagtataagtaaattatactttctacacaagctcttcatatttatgaatagactaagttctaaatgtttaagtcattgggaaatcccaatgttccttcctagagaaaccgtgtgagaaattgtasctaagctaaaaaaatggaagacaaaagtcgatttaacgaggaatgtagattaatatcatagtattgtctcaactgtggcaaccactacttataaaaatggtataagaaatgcagtctgaaatctgaattctaaataacaatgtagggccattatccctctgggaccttagggtcaaaataagagaaaagggatgaatggtgggttggaagtaagtcaatgatccttgt

SEQ ID NO: 217712 - DNA, 429 bp, Homo sapiens
gatatttgagttgtgttcatttttttactatgattaataatgtactgtgatgagattcatgtaatcatttttgtctggacgtatttttacaattttctttatatatctaggagtggacctatggtaaatctatgtttaaatttttgaaaaacttcaaaactgttttccaaagtctctgtaccattttatattattaccagcagtktatggaggttcattttttcctacctccttgccaacatctgttatttttgttttttaaaaaaatatagccatccttgtagatgtgaagttgtatctagttgtagttttcacttgcatatccttaatgactaatgatgttgagcatcctttcgtgtgctgattggccatttgtatatctttttagagaaatgttcatttagactgtttgctcatttaattgggttg

SEQ ID NO: 217713 - DNA, 411 bp, Homo sapiens
tgtgtttgtatggctcatgagttataagtaggtgtatcatttataagtctaaaatgtaaaatatagggaaatttttcagcagggaaakttccataaatttgcctcttggaacacaaagcctccaatatttactgtctggctctttgtcaaaaatgttgctgactcctgatctagatgaaaccctgcgggacgagagtgttgatagaaaagagagaagcatcatagtggaaattaaaattatgtcaactgaagtgtatagggtagagaatttaagcctgagtataacagtaaaagattaaaataacaataaattcattgtcagcatgatcaataaaacctttgggggcaaaaaggaactatcttcatcagacctttcactcacccatacaaacatcttaggcaggaaatata

SEQ ID NO: 217714 - DNA, 399 bp, Homo sapiens
ctgctgcctgtgtttgtatggctcatgagttataagtaggtgtatcatttataagtctaaaatgtaaaatatagggaaatttttcagcagggaaatttccataaatttgcctcttggaacacaaagcctscaatatttactgtctggctctttgtcaaaaatgttgctgactcctgatctagatgaaaccctgcgggacgagagtgttgatagaaaagagagaagcatcatagtggaaattaaaattatgtcaactgaagtgtatagggtagagaatttaagcctgagtataacagtaaaagattaaaataacaataaattcattgtcagcatgatcaataaaacctttgggggcaaaaaggaactatcttcatcagacctttcactcacccatacaaa

SEQ ID NO: 217715 - DNA, 399 bp, Homo sapiens
ctgctgcctgtgtttgtatggctcatgagttataagtaggtgtatcatttataagtctaaaatgtaaaatatagggaaatttttcagcagggaaatttccataaatttgcctcttggaacacaaagcctccawtatttactgtctggctctttgtcaaaaatgttgctgactcctgatctagatgaaaccctgcgggacgagagtgttgatagaaaagagagaagcatcatagtggaaattaaaattatgtcaactgaagtgtatagggtagagaatttaagcctgagtataacagtaaaagattaaaataacaataaattcattgtcagcatgatcaataaaacctttgggggcaaaaaggaactatcttcatcagacctttcactcacccatacaaa

SEQ ID NO: 217716 - DNA, 399 bp, Homo sapiens
ctgctgcctgtgtttgtatggctcatgagttataagtaggtgtatcatttataagtctaaaatgtaaaatatagggaaatttttcagcagggaaatttccataaatttgcctcttggaacacaaagcctccaatatttactgtctggctctttgtcaaaaatgttgctgactcctgatctagatgaaaccctgcgggacgagagtgttgatagaaaagagagaagcatcatagtggaaattaaaattatgtcaactgaagtgtatagggtagagaatttaagcctgagtataacagtaaaagattaaaataacaataaattcattrtcagcatgatcaataaaacctttgggggcaaaaaggaactatcttcatcagacctttcactcacccatacaaa

SEQ ID NO: 217717 - DNA, 462 bp, Homo sapiens
tgtgtcatgcacacccctcagtatatgaaagatcttgaatataccagcacagcaactcctgtaaagggatgctgaggttggcaatggggttaattcctctgcayttctggcccacttatgagcatgcaaaacactggggctaaggacaaggaaagccctcaggcaaaggaaagcaggtgctggctgactttgcactaaaatagtaagaggaaaggctaggagtgggcttaaagtcttaaaagcgtcactttcataagagctaggttaagcaaacacagataggtttctttacttcagtttttctcacttctgttagtatgttaatgtaaatataaattatatagcttcaatacaggagtataagtgtttcccaaactgtttaacaaagaatcctttgccttcccaaacattttgtaagattagagtttcttataaatattatagcatctaggatctattcca

SEQ ID NO: 217718 - DNA, 480 bp, Homo sapiens
gcacacccctcagtatatgaaagatcttgaatataccagcacagcaactcctgtaaagggatgctgaggttggcaatggggttaattcctctgcacttctggcccacttatgagcatgcaaaacactggggctaaggacaaggaaagccctcaggcaaaggaaagcaggtgctggctgactttgcactaaaatagtaagaggaaaggctaggagtgggcttaaagtcttaaaagcgtcactttcataagagctaggttaagcaaacacarataggtttctttacttcagtttttctcacttctgttagtatgttaatgtaaatataaattatatagcttcaatacaggagtataagtgtttcccaaactgtttaacaaagaatcctttgccttcccaaacattttgtaagattagagtttcttataaatattatagcatctaggatctattccaattgcctatattttacaaataaggaa

SEQ ID NO: 217719 - DNA, 497 bp, Homo sapiens
tgttttccacatgagattgaggtaagagagagaccctctcatattgttttacrttgctttatactcagtacctgttttaaggaaaaacaacaaggaagtaaaaccaaagacaggcagcctggcgccaggctgcaaaccaggcgtgcctgccgtggcctacaacccagctagttaaaaatcaactcataacttagaaaccaatgttattcatagattacagacattgtatagtagagcattgtgaaactccctgccctgttctgtatctctctgaccactggtgcatgcagcccctgtcacataccacctgcttgctcaaatcaatcacgaccctttcatgtgaaatctttagtgttgtgagcccttaaaagggacagaaattgtgcatttggggaactcggattttaaggcagtagcttgccgatgctcccagctgaataaagcccttccttctacaactcggtgtctgagaggttttgtctgcggctcgtcctgct

SEQ ID NO: 217720 - DNA, 497 bp, Homo sapiens
tgttttccacatgagattgaggtaagagagagaccctctcatattgttttacgttgctttatactcagtacctgttttaaggaaaaacaacaaggaagtaaaaccaaagacaggcagcctggcgccaggctgcaaaccaggcgtgcctgccgtggcctacaacccagctagttaaaaatcaactcataacttagaaaccaatgttattcatagattacagacattgtatagtagagcattgtgaaactccctgccctgttctgtwtctctctgaccactggtgcatgcagcccctgtcacataccacctgcttgctcaaatcaatcacgaccctttcatgtgaaatctttagtgttgtgagcccttaaaagggacagaaattgtgcatttggggaactcggattttaaggcagtagcttgccgatgctcccagctgaataaagcccttccttctacaactcggtgtctgagaggttttgtctgcggctcgtcctgct

SEQ ID NO: 217721 - DNA, 497 bp, Homo sapiens
tgttttccacatgagattgaggtaagagagagaccctctcatattgttttacgttgctttatactcagtacctgttttaaggaaaaacaacaaggaagtaaaaccaaagacaggcagcctggcgccaggctgcaaaccaggcgtgcctgccgtggcctacaacccagctagttaaaaatcaactcataacttagaaaccaatgttattcatagattacagacattgtatagtagagcattgtgaaactccctgccctgttctgtatctctctgaccactggtgcatgcagcccctgtcacataccacctgcttgctcaaatcaatcacgaccctttcatgtgaaatctttagtgttgtgagcccttaaaagggacagaaattgtgcatttggggaactcggattttaaggcagtagcttgcygatgctcccagctgaataaagcccttccttctacaactcggtgtctgagaggttttgtctgcggctcgtcctgct

SEQ ID NO: 217722 - DNA, 497 bp, Homo sapiens
tgttttccacatgagattgaggtaagagagagaccctctcatattgttttacgttgctttatactcagtacctgttttaaggaaaaacaacaaggaagtaaaaccaaagacaggcagcctggcgccaggctgcaaaccaggcgtgcctgccgtggcctacaacccagctagttaaaaatcaactcataacttagaaaccaatgttattcatagattacagacattgtatagtagagcattgtgaaactccctgccctgttctgtatctctctgaccactggtgcatgcagcccctgtcacataccacctgcttgctcaaatcaatcacgaccctttcatgtgaaatctttagtgttgtgagcccttaaaagggacagaaattgtgcatttggggaactcggattttaaggcagtagcttgccgatgctcccagctgaataaagcccttccttctacaactcggtgtctgaraggttttgtctgcggctcgtcctgct

SEQ ID NO: 217723 - DNA, 586 bp, Homo sapiens
ttactatgcaggacttcactgagtatttctcacagagtaagtaggtatagtgataagaaactccctcagtttttatctgggaatgtctaaatttcctccctcacttttgaaggatagttttgccagatatagaattatttgttgacaacaatttttttttcctttcagcactttgaatatattggcccactgtcctctgtctcccaaagattctgatgagaaatctgttgataattttattgaagatcccacatatgtaataaattgcytttctcttgatgctttcaagattttgtctgtcttcgaaaagtttgattataatgtgtatgtgtctttgagttcttcttacttgtagtttattgagcttcttggatggttatattcatgtccttcatcaaatttgagaaattttcacccattctttcctcaaatattctctctaccctaaccatacctcttctgttactcacacagattcgatggcaactgctgagtgacaacgccaactatattaaaaactctcattaattacaactgaaaataggaccattatgtttaacatattattatgtggcatatatgtgca

SEQ ID NO: 217724 - DNA, 636 bp, Homo sapiens
gtgagacagtgaatttaataaacttttatacataatagaaataatgttacttatgtggccatttttaatggggcagaatgtctccctgaagaaataaagctatttaaaactttacagggaaaatgacaaggcctttttatataaaaagtaggttcagatttcacttggatatttagcagcagaaaraaaggtgatgttactataaactgaattagcagtatacaaagctccttacgttccacagacctgtagtttgcctattagagctactaatgatcttgatggatgttacaactgttaatattcttaccttttatttcctacctccttttgtagcgctgtaataaatccttacaactgaggtaagttaaatggccctttttttttatctgaaagttatggaatttattatatgtatctattgtatataaaaaataaaaagaactagaaactctggtacctagataattatagcattgttagatggtaatgacaattttccattattccagtgtatttattattatatttatcctagtcctaagggattaagttaatttattatttatatctaaaatttctccactttgatctattttcccacagggtttgtaagcactccagtaatgttgacaa

SEQ ID NO: 217725 - DNA, 636 bp, Homo sapiens
gtgagacagtgaatttaataaacttttatacataatagaaataatgttacttatgtggccatttttaatggggcagaatgtctccctgaagaaataaagctatttaaaactttacagggaaaatgacaaggcctttttatataaaaagtaggttcagatttcacttggatatttagcagcagaaagaaaggtgatgttactataaactgaattagcagtatacaaagctccttacgttccacagacctgtagtttgcctattagagctactaatgatcttgatggatgttacaactgttaatattcttaccttttatttcctacctccttttgtagcrctgtaataaatccttacaactgaggtaagttaaatggccctttttttttatctgaaagttatggaatttattatatgtatctattgtatataaaaaataaaaagaactagaaactctggtacctagataattatagcattgttagatggtaatgacaattttccattattccagtgtatttattattatatttatcctagtcctaagggattaagttaatttattatttatatctaaaatttctccactttgatctattttcccacagggtttgtaagcactccagtaatgttgacaa

SEQ ID NO: 217726 - DNA, 636 bp, Homo sapiens
gtgagacagtgaatttaataaacttttatacataatagaaataatgttacttatgtggccatttttaatggggcagaatgtctccctgaagaaataaagctatttaaaactttacagggaaaatgacaaggcctttttatataaaaagtaggttcagatttcacttggatatttagcagcagaaagaaaggtgatgttactataaactgaattagcagtatacaaagctccttacgttccacagacctgtagtttgcctattagagctactaatgatcttgatggatgttacaactgttaatattcttaccttttatttcctacctccttttgtagcgctgtaataaatccttacaactgaggtaagttaaatggccctttttttttatytgaaagttatggaatttattatatgtatctattgtatataaaaaataaaaagaactagaaactctggtacctagataattatagcattgttagatggtaatgacaattttccattattccagtgtatttattattatatttatcctagtcctaagggattaagttaatttattatttatatctaaaatttctccactttgatctattttcccacagggtttgtaagcactccagtaatgttgacaa

SEQ ID NO: 217727 - DNA, 636 bp, Homo sapiens
atgttattagaattctgtggtggaagtaaatgtaaccttaatgtatttacctttcagttctttcacccttagtagctgtctgtatttctagtaattttttwaaaaatataatctataaatcataaactgacattgaaacagtgagacttgtctataggtcttaaagccagtgccacatgctcatgtgatgaatttagcttacatatttgcaataccatataggtagaattattagttactgtttcattacaattaatccaggaatgcacatagacatcttttcaataaattttccttttgacaataatgcagagaacatgtttatttaatgaaagcatgggttgttactcaaaaccactattcactttgtcttccattgttgactgttataattctggttagtaactcctgtctaacaggactaatgatttagttttgtaggaatgaaagtgaggaggaaattattctgatttttaaaatatagaaaagctaaaaaacatcaaacatgtgaaaacttccaagatggaaggagctctggctttaagtagtaggttcagtttataacaagtatacaaatttatattgtagtgcatattctagttgcacagtaagtcatctctaaacataataatagta

SEQ ID NO: 217728 - DNA, 636 bp, Homo sapiens
atgttattagaattctgtggtggaagtaaatgtaaccttaatgtatttacctttcagttctttcacccttagtagctgtctgtatttctagtaatttttttaaaaatataatctataaatcataaactgacattgaaacagtgagacttgtctataggtcttaaagccagtgccacatgctcatgtgatgaatttagcttacatatttgcaataccatataggtagaattattagttactgtttcattacaattaatcsaggaatgcacatagacatcttttcaataaattttccttttgacaataatgcagagaacatgtttatttaatgaaagcatgggttgttactcaaaaccactattcactttgtcttccattgttgactgttataattctggttagtaactcctgtctaacaggactaatgatttagttttgtaggaatgaaagtgaggaggaaattattctgatttttaaaatatagaaaagctaaaaaacatcaaacatgtgaaaacttccaagatggaaggagctctggctttaagtagtaggttcagtttataacaagtatacaaatttatattgtagtgcatattctagttgcacagtaagtcatctctaaacataataatagta

SEQ ID NO: 217729 - DNA, 428 bp, Homo sapiens
tgagacttattcactgaccatgagaacagtatgggggaaaccaccacctkgattcagtctcccactggtcctcccacaacacgtggggattacgggagtacaattcaagatgagatcgggtggggacacagagccaaaccatctcaccgaggttgcagtgagccgagaatggcgccatgcactccagcctaggcaacaggggcaagactcctcaaaaaaaaaaaaaaattagcttggggcatggtgacatgtgcctgtggtcccagctacttgggaggctgaggcaggaggatcgcttgagcccaggaggcaagctgcagtgagctaagatggcaccactggcacctccagcctggcaatagagtgagaccctatctctaagaaaaaaaaaaaaaaagtcaatagctttgctggtactgggcccgttt

SEQ ID NO: 217730 - DNA, 431 bp, Homo sapiens
ctcgtgagacttattcactgaccatgagaacagtatgggggaaaccaccacctggattcagtctcccactggtcctcccacaacacgtggggattacgggagtacaattcaagatgagatcgggtggggacacagagccaaaccatctcacsgaggttgcagtgagccgagaatggcgccatgcactccagcctaggcaacaggggcaagactcctcaaaaaaaaaaaaaaattagcttggggcatggtgacatgtgcctgtggtcccagctacttgggaggctgaggcaggaggatcgcttgagcccaggaggcaagctgcagtgagctaagatggcaccactggcacctccagcctggcaatagagtgagaccctatctctaagaaaaaaaaaaaaaaagtcaatagctttgctggtactgggcccgtt

SEQ ID NO: 217731 - DNA, 431 bp, Homo sapiens
ctcgtgagacttattcactgaccatgagaacagtatgggggaaaccaccacctggattcagtctcccactggtcctcccacaacacgtggggattacgggagtacaattcaagatgagatcgggtggggacacagagccaaaccatctcaccgaggttgcagtgagccragaatggcgccatgcactccagcctaggcaacaggggcaagactcctcaaaaaaaaaaaaaaattagcttggggcatggtgacatgtgcctgtggtcccagctacttgggaggctgaggcaggaggatcgcttgagcccaggaggcaagctgcagtgagctaagatggcaccactggcacctccagcctggcaatagagtgagaccctatctctaagaaaaaaaaaaaaaaagtcaatagctttgctggtactgggcccgtt

SEQ ID NO: 217732 - DNA, 431 bp, Homo sapiens
catcgttagtcttcttaccaggcttttttttccatttgcaagttctttatttttgttcatctcttcatggactaaattaatcgttaagctgtttttccaggaagtattttcgatgtttaacagtatctgtctgtgcctcgatactggaaccatatcttggctgggtataatatccttgagtctcatctttcccactgaatgtggtaggttttgcctctttttcttctgggaagaagcctgaggccagcctgaattttcccctttataggagacatttttttctgcttgaatgcctaaagaagtcactcttcatcttttttttaggttcaataacttarctaagatgtcttagtagtaaacatttcaaatcaagcttttctggaatatagtgtgttctttcatctgcagctttagttttgaaatttacctgt

SEQ ID NO: 217733 - DNA, 598 bp, Homo sapiens
aatatttttaaattgtgtcagtagataaaaagataaaacgttgcatccttttgaatacacaattttcatgtgagtggggagtggaggaaatattcatgccttagtctggctcagttaatctgtatttttacataagataacgtagacaatagggcagaggaagcaatcagatatgcatttgtctcaggtgagkagagggaagactttgaattctgtcctatgtcccaatacctgtgaagatatcaacttacattgcaggttgaaattcaaccagaactgttttagagtaaagatcttgggcctaaaaggaatttccttgtgggtaaaatgtgagggaagtatatagcttttatcttgtagctatcttatttaggaaccaaatgggaggcaggttgtgtgacccagttcccagcttgacttttcccttggctcagtgaatctggggttttcctttctcatctttaacctccaaaactgccctggtcattcctgggcttgcaccaagctaacttgggagaaacttagtttacagtttaagcgataatagcccctccccaaaactaaaccacttttgtaaaactaatgaaaagccaccagg

SEQ ID NO: 217734 - DNA, 531 bp, Homo sapiens
cagaattaagtcaaattcaattcacaatgttgatgttgtacttagaatcaatccatagcctgtgtttaaaatgccatgatcagtaacaacagtgagtttatggattcaaaacatcttgcatacaccttgattatttcttaggataaatgattagaagtagaatgctggatcaaaagctatgcccctgtgaaggttttatgcatgtcatcaaactgtattcccgcaaatctgaaccagttcagactcacactagcaatatgcaagaaggtcatttcccaagtactcttatcaaggctcattaatatcattgccagttaaataagttacaakggtatcatatgtttaaatatacaattttatgcactttactaatgaggtgaacattttaaatctatttatgaccatttatatttcttaccttatgacttatatgctcattttccttgaccattttttaggtttttctcttttcttaatttataaagctctttatatattaaagtatcacatcatctcaaacatttgcaaaat

SEQ ID NO: 217735 - DNA, 574 bp, Homo sapiens
atcagctatatgtttatgaaatattttcttccagactacggcttcacttttcactttcttaacaatgactttgatgaacataagttttaatgtgatgaagttttatttattattatttttatatgatggtgctttacgtgtctgtgaaatctttctctgccacaagatgtaaaaatatatttttcctacattttctttagcaagctttataaatttagctttcacagttgaatgtcatgcattatataaagtaagagtcaaagttcatttttttccatatagatgtccagtgttccattatcatttattgaaaagactttgtttcccccatkggctttaatttgccctgtttaaaaaactaataaactttatatgtgtagatctatttcagattctcttttctatttcattagttgtctacccttacaccaactatactgtcttaattactatagctttcagtaagtcttgaacatgatagtgtgaatccttccatttgttcttccttttcaaggactattataagaccttgcattttcaaatacattttagaatcagcttgtcaatttctcca

SEQ ID NO: 217736 - DNA, 435 bp, Homo sapiens
actgtgtcatactataagaattttggtcatttattgcactagttactcaatgagacttgacaatcttgagacatgttcttcagactagaacaggattgttagggttttttttaattaaaaaattatttcccctactaaatggtttttggttttttattctgcaatttctgttaattgtatactgacctggtttgatatttaatttttcttattcttgttctatcttctgtctttattttcctggattccagtaaatttcctctatggytaaattttaagcttttgctatcatagttttactttcagaaagctttttcttggtctctgcatatttctttctatagtagccttgcagttttaaaattctttggtgagctataattcacataccataatattcacttttttaaaaattgagtttggtggtttttagta

SEQ ID NO: 217737 - DNA, 590 bp, Homo sapiens
cttgtctctagactcacctatagttacaaatcactattcagtcttccaattccctaaatttcaaccttttataatgaagagggcatcagttargactgattgctaaaaattcaaataacacttttgctggagtcattttctcaaaagttacctttcatgtatttacgtaataatgttcttgatgtcccaccgtttaagtttaagtggatatgaattcagactactgtaggtctacaatactgatagtttatgtatcacaactgctccagattaactcactgctctggcattgtatcttatgtatattttgacttacacgttgctgaaatttaagacggaatgttaatggatctgggcatcaaatgagatccttcccaactctgtcagtaaaataaaccaggagatggagaagatgtgaacagtacaaatggaaattgaaaggaactctcaaactcaaaacataccttttgaagctatcagtaagtgattattcaagtggatgtatatatacttgttttaataatgtcacctttcacctgtcatttggagaagtacaaattcaaatagttttaactttagaagaaatgatg

SEQ ID NO: 217738 - DNA, 592 bp, Homo sapiens
ctaaactagttgattatttaaagtcttgctagttattggccaacatcatcccagagtatcagttacagsatgaaatttaatataacacgaaattttaccatcctcaaaagaagttttaagaagccaagcgaaagggaagatctgaattgcattctgaaacaaagttgtatgctccatcactccctgtagtcttggtgagggcagggtcatgttgcttttgtttcatgctctattctctgtgtgcccagcacatagtggacttcacttcagaaagtgctaaaaaaaaggcatgagaaaattgcattataatgagactttaaattatacattaacaatactagtaatattaacttcccaattaaaatatgaataactatgaaagtatataaatgcattagaggcctaacatttcctaccacattcaggatctgataaagaggattctggagtcttcattttgtcactcctcatcactgtgcgtgtaggacatataatgtgtgtgtaggacatacacagtcctataatcctatagggtgagagaagggagttactctttggatgtgaggaatcagggcaatagttgtttgtcaca

SEQ ID NO: 217739 - DNA, 576 bp, Homo sapiens
acagtagtgtatagtaatgtcctaggccttcaccttcactcaccactccctcacagagtcatccagagcaattcccattcctgcaagctgggtaagtatcatataaatggtaagtgccctatacaggtacactttaaaaaaaatcttttatatcatatgttacgtactttttttatgttcacatattttacatatacaaaaccactgtattacaaatgcctacagcattcagtagagtaacatgctatacasgtttagcctaggaccaataggctataccatatagcccaggtgtgtagtagcttatacctctaggttgtatgaatacattctatgatattcatataacaaagaaatgcctaataacacatttctcagaatgtgtccccatcattaagcattgcatgactatatatgtagaatccacatgatacaagagggtactttttggtactcacttgccctgtgtaattataaataaacagatcaagggctcagtcctctgaggattgaaggtttatataagtgtaccagaatgaccactaaaacctgctaagttgatggctgaaggtgaag

SEQ ID NO: 217740 - DNA, 527 bp, Homo sapiens
agatgcctacaacctatgttggacttaagataggttaaaagtttaaacaatcctgaaacattactagtaacttttaatagtcccataccagtgatattgaacacttccatgcttgatttcaggatgattcatttacatgaaaagyctggtatgatcttccaatctatcttttagcaattttttctacctttataattaaatataggcaatcgggcatttattctggcatttcacttttctcctagaagttgtttatgggttacttttaagaaacagttttagaacacgcagcattagttataatgttgtttttattattttgttaagaaataatcaatatttattgagtgccttctgaacaccaaattgcaagagctttatagttgttgagcagttgcatataggggcttttcatatagaattttaaattcaataataaattctattcaaaagaaaatgtactgtacttttttttaccctctcccatttccctaacctttaactcaccacttgccatattccataaa

SEQ ID NO: 217741 - DNA, 571 bp, Homo sapiens
gagtgaccattataatgcagactatgtggtagacaatagaatataaagatgatcaaggcacatccctactttaaaggagttcgcctatgaggaaaactgatacattgaaagataattctaaagcaaaattttagtcaataataacttaattgtacattttaaaataatttaaagagtgtaattggattgtttgtaaatcaaaggataaatgcctgaggggatggatacctcatacctccatgatgtgttaatttcacactgcattcctgtatgaaaacatctcatgtactccataaatatatatatctactatgtacccacaaaaattataaagaaataaataagtaaaaatagtagtgtgcccaagtcaggttatgtggtgaaggcttcctgtaagaggtgatgcrgaaatttggtatccagcacgattatgaagtaatttgatgaaatcaagtaggagagaggagtggggggaaaaggtcataaaactttctttctttgaaggtttcctctgaaattgtgctacttgtctgcataaacatgatagagtatgtggtggacattttgccca

SEQ ID NO: 217742 - DNA, 529 bp, Homo sapiens
gtaattttaaagtgaaattagtttacagatcataaaatatttgagtaatgaaattcagwtacacaaaaaacccatatctgcatttatacacagatgatcagagtctataatgtcatatctgatttattatgcatacaagataatttaaaaaccatgccattttacttccttgtccttaagagaagaccagaatatccattttttgcacttttccttctagaattttattaaaacaataatttgatgatatttatgggatgagaaaataattttattaggcacttttggtgagaattgctcgaattaacatttctaaggataaattattacactgcaatagatctctcattcatcaccagtgacttacgggattacttgaaccaactacaaaacccaatatttagaaaataatgttaaatattctatgaatttaaaacaaaatcacattgcaggttattaaatttgctaatactacttactaaccaaccctaaaagaatgtacctatggaaaaatagataataatcaaca

SEQ ID NO: 217743 - DNA, 574 bp, Homo sapiens
caagagtcaacatatatttactaagtacctattatgtgcctgagcatatttataagttaacaatagtgtgttaggaggattcttagagagatctacctatggagcaaggagccattctctcctacaaacagatgctcatattgacacctagaggcattaagagatatctaaagagacacaaaaagatatttttaaaatagcaatcatgtgtatttcagaaaaactatcagccagaaagtgaatatttatttgatctcttagtaaagaaagccttttcttaaaaaaataagagtgtttctgattttaatcaaagagccatgtgcattagtgaaagttagggctagaattcagcccttaaattttttggaaaaagtattttttcaccagtaatccattctcwgttaaaaatgttttcaaaaagagataagcagccaagcacgaacttctactcatatatgaatagattgaggtaaacatgtatttacaacacatatgtttttaaaacataggtgagcttctatttcaaaagcattcctttttatcaatatgcaggactaaatgtgtcaatagaaat

SEQ ID NO: 217744 - DNA, 556 bp, Homo sapiens
ttgtgtgtctgattatatgcctaaacaataactctatttgataaaaatcttaattacaactatccatactaatattcaactatcaatactaatattcaaagtatttcacaatggatcttatgctttctaaaatgcaaaacattagatctttccagcaattataaacagatgttaaatatttctttataatacatattcattatatattacatatatatgatctatatatataaatacttacaagcacgtgtatataaaattaacagtctcaaacctgtcaaaattattctattacaaagtcaagtttttcttgatttacgttactatkgtactttaaagttattcttcctttatgaagggatctgggaacactatatccagacacttaatgcaaactggtctactggacattacatggtgccaaaatcagatactgtgaatttaacacacctaaggccatctttacattagtacatgctcacagcttcagcagaaagcatatggacaaagtcacctgctaaataacttggctcaggaagtcagaaaataagccact

SEQ ID NO: 217745 - DNA, 581 bp, Homo sapiens
tagcggtgttgctgtagaactactctgaattctttttaccaatgtaatggaattataatggcattataatggactcccgataatttctttttactattgtaatgctgtcataatggcattgtaaagggttctccataaacatatactgaaatcattttgccaccatcatgacagtgaaatgagtccccatagagtttatttgaaattgttttgctcttataatggcattattaatgcagtctccacagacttacagggaaattgtttgaccatcataatgtggtcttcatagacttacaataaaattgcttaccagtgtaatgtggtttccattaacttgcactaaaatcattttcctaccataatggcattataatagggtatccatgaacttgagctaccaaagtttggttctcttgatggcatcatagcagcacattacaaagacagytaaagtaatgttgatgctttgttgtgtcataagcaaatactataagtaatgcacatctacttttcacacttaaggatcatgtggtttctcctttaaaagtaatgtactgaccacagcatactttataaac

SEQ ID NO: 217746 - DNA, 491 bp, Homo sapiens
tgatgtatgttgcgagaacagcaaaaatcattattaaacatctacttttaaattttctccccactgtgattatcatgcaggccatgagcaggctaaattagaaagcattttggaaaaggaagagttctcccctgcctgtgagttctataattacttgcccttattgtattcaccactagtttaatgatgggtagggtatagtactgtttgttggttttctctcaagtatattttaaagtctgcctttaytttgggcgacatcatagatcaaagtttgatcctcagttttacaggctcaaaaacaacttcatttcaacaatactgtgcagaaaactgaccactattcaagtattcatgatgtattaatttacgatggaatttatgcttggctgaagaaatggattagttgtctacagaaaagtaaaattcaaaggttgaagcttctttgtgatatactccaagaggagacagaatataagttctgcaactat

SEQ ID NO: 217747 - DNA, 491 bp, Homo sapiens
tgatgtatgttgcgagaacagcaaaaatcattattaaacatctacttttaaattttctccccactgtgattatcatgcaggccatgagcaggctaaattagaaagcattttggaaaaggaagagttctcccctgcctgtgagttctataattacttgcccttattgtattcaccactagtttaatgatgggtagggtatagtactgtttgttggttttctctcaagtatattttaaagtctgcctttattttgggcgacatcatagatcaaagtttgatcctcagttttacaggctcaaaaacaacttcatttcaacaatactgtgcagaaaactgaccactattcaagtattcatgatgtattaatttacgatggratttatgcttggctgaagaaatggattagttgtctacagaaaagtaaaattcaaaggttgaagcttctttgtgatatactccaagaggagacagaatataagttctgcaactat

SEQ ID NO: 217748 - DNA, 514 bp, Homo sapiens
tgaacaggaacacttctaaactactggtgggaatgtaaactagtacaaccactatgaaaaacaatgtggtgactattgtagaataaaatagtactgatctgggagttcaaagatctgaatttgmgctctagttgccacgcctagtaactgtgaacaatttcttagtcaacagttcccttattgttataaaaaagataatatcctttatttttccataatttttctctttacatgtatgtattagagttctctagagggagggacagaactgtgaggatagatgtgtgtataaagagaagtttgttaaggagtattaactcacatgttcacaagatgaggtcccacaataggctgtatgcaagctgaggagcaacgaagccagtccaagtcccaaagcctgaagaacttggagtctgatgtttgaagataggaagcatccagcatgggagaaagatgtaggctcggaggctaagccagtctcatctttccatgttcttctgcctgcttttattct

SEQ ID NO: 217749 - DNA, 545 bp, Homo sapiens
aagttttctacggtatgagcatattgacttatgaaatatgtatttatatttctaaattgcttaacaaatgtattaataaatgttgtaataaaagatcaagttttggaaatgtatgccttttttctaccaatctcagaaaaagtttaggagattctagttgatgttaggtattataatacatgcacaatatcttaagcaaagcatctgggttggtatctaagtcgtcaatgagaagagggctgcataatgttgggtaagtacagtagtacccacttatctgcaggggatacatttcaagcccctcagtggatgcctgaaaccacagataataccaatcctacatatactatgtttttccctatacataaataactataataaagtttaacttataarttaggcacagtaagagattaacaaaaataataataaaatagaacatttttaacagtgtgctgtaataagtcatgtgaatatggtttctccctctctctttcaaatagcttcatattttcgatcatggttgaccaggtgaagtgaaacca

SEQ ID NO: 217750 - DNA, 424 bp, Homo sapiens
cactcctgtattataggtggggtatgaactggtaaaagcactttgaaaagcaatttgacactgtctggtaaagttgatgatgttcatacataccttcatagccagcagttctagtcctaggcttcaaacttcctgttaatrttctttttttgtgcttgatggattatattaggcatttaaaaaattattcatctttagattgagtacatctgtcacataatctgatgtgtaaaatattactgattaaggaaaataaaaattatacatgaaagcattggaaaaatgattaaggcaagttagtaaaaactatcattaaggtaggtgtgtatgaaaaacattaatgattaaaaagaacactgtaaaagtccaggagtcatttctcagactgttttgtaatttattatgttttagctcccttttaatg

SEQ ID NO: 217751 - DNA, 424 bp, Homo sapiens
cactcctgtattataggtggggtatgaactggtaaaagcactttgaaaagcaatttgacactgtctggtaaagttgatgatgttcatacataccttcatagccagcagttctagtcctaggcttcaaacttcctgttaatgttctttttttgtgcttgatggattatattaggcatttaaaaaattattcatctttagattgagtayatctgtcacataatctgatgtgtaaaatattactgattaaggaaaataaaaattatacatgaaagcattggaaaaatgattaaggcaagttagtaaaaactatcattaaggtaggtgtgtatgaaaaacattaatgattaaaaagaacactgtaaaagtccaggagtcatttctcagactgttttgtaatttattatgttttagctcccttttaatg

SEQ ID NO: 217752 - DNA, 422 bp, Homo sapiens
ttttgaggctattttctagaccttgtaggcatgctttgctcctttttattcttttttcttttgtctcctctgtgtattttcaaatagcctgtcttcaagctcactaattcttctgcttgatcagtgctgctattaagagactctgatgcattcttcagtctgtcacttgcatttttcaactccagaatttctttttaatcctttagttccatttctttgttaartttatatgatagaattttgaattccatctctgttattttgaatttctttgagtttcctcaaaacagttattttgaattctctgtctgaaaggtcacatatctttgtttctccaggactgatccttgctgccttatttagttcttttggtgaggtcatgttttcctgttggttttgattattgtagatgttcactgttg

SEQ ID NO: 217753 - DNA, 530 bp, Homo sapiens
tcgtataggtttgccttaaaatctaatttttctgatataagtatagctactactgctttttgttttcctgtggaatgcaatatctttttccatccttttatttttagtttatatgtatctttataggtgaagtgtgtttcttctaggcaacagaacaatggtcctgtttttcattcattcagccactctatgtctttgattggagattttacaccatacacattyaatgttattattgataagtaagaactcactcctgccagttgatattagtctcctggttgtttagtggtcttctcttccttctttccttccttcctgtcttccttttagtgaaggttattttctctttgatataatttactttcttcctttttattcttgtgtacccatgtattttttttaatttcacgtatgatatggtttagctgtgtcctcaccaaaatctcatcttgaattcccacatgttgtgggagggacctatgggaggtaattgaatcatgggggcaggtattttccatgctgttctc

SEQ ID NO: 217754 - DNA, 496 bp, Homo sapiens
tcatcctcatggaggggcattctggcacggggtatcatggcagagcccatttgagtggggcggacattcccacagagggtctgggctccagtgcagtaatgagagcatctgtgcaagagtggtgacctggtgtgagatcagtgcctgtgctagtgtgaaagcaagaggagtggtagtcagagacagagcagggggagraggaactgccaaacagggagatggcctactgtgaggtgctggccaaccagggtgagaagggcattgccatgaaggccaaggggatgctggccaggcccagggtatcaatgtgaagctataagagctggcttgggggttttggaacatagggatagtgagcaaggcatccactcatgacattggttacattcacagggttgaacaagcaagtaaacctgaacaaagaatttctgtattaatgataatgagtcagatttcttttttttttttttttgtaactttcattttaaattcaggg

SEQ ID NO: 217755 - DNA, 586 bp, Homo sapiens
cttttctgtcttctctgactgtattttcatacagcctatcttcaggtttactaattctttcttctgcttgatcaattctgctcgctaaagactttgtgtttatttttcaatttgtcaatttaatttttaagctcccaaatttctgcttgatattttaaaaaatcaattactctttgttaaatttctctgatagaattctgaattccttgtctgtgttatctgtggagtttgtttagcttcctcaagacrgctattttgaattccctgtctgaaaattcgtatatctctgtcactctttagtctgtttggtgaggtcatgttttcttggatgctcttgatctttgtggacattaattgatgtctaggcattgaagagctaggtgtttattacaatgtttgcagtttggacttgtttgcacccacccatattaggaaggctttccaagtattcaaagcgaattgagtgttgtgatctaagattttggtcagtgcagccatatctacattagggcgcaccccaagcccagtaacgctgtgactctacaagagtcacagaggtgcctctgtgacaagagtcacagagact

SEQ ID NO: 217756 - DNA, 586 bp, Homo sapiens
cttttctgtcttctctgactgtattttcatacagcctatcttcaggtttactaattctttcttctgcttgatcaattctgctcgctaaagactttgtgtttatttttcaatttgtcaatttaatttttaagctcccaaatttctgcttgatattttaaaaaatcaattactctttgttaaatttctctgatagaattctgaattccttgtctgtgttatctgtggagtttgtttagcttcctcaagacggctattttgaattccctgtctgaaaattcgtatatctctgtcactctttagtctgtttggtgaggtcatgttttcttggatgctcttgatctttgtggacattaattgatgtctaggcattgaagagctaggtgtttattacaatstttgcagtttggacttgtttgcacccacccatattaggaaggctttccaagtattcaaagcgaattgagtgttgtgatctaagattttggtcagtgcagccatatctacattagggcgcaccccaagcccagtaacgctgtgactctacaagagtcacagaggtgcctctgtgacaagagtcacagagact

SEQ ID NO: 217757 - DNA, 552 bp, Homo sapiens
ctagagtcaggagctttagggctcttcttgatgtttattttactgtggctaagctagtacccaacttctaagacttaagtcctctgtattcttccctctcttttccccaagtaggaatctctccccaagctgcactgccaagagttctgggaggggtgacatgagtaatctcttagctgccacagctggtgttacactkggtcacatgcaccccaagtcccattgcctctgagattagtgcagcaccaggccttgcccaaggactgtagtcctttgggcagatggccactcagttttattctcttacctgccacagctggtataacactgggtcacatgcaccccaagtcttattgcctctgagactagtgcagcaccaggccttgcccaaggacagtagtccttttcgccagatggccactcagttttattccaggccctaggtcactttagtcagccagtggtggaaccagctgtgatctgggttcctcctgctggggctgagagtttccctccggcccaggggctggtctaaatgtttcctgtcgatac

SEQ ID NO: 217758 - DNA, 552 bp, Homo sapiens
ctagagtcaggagctttagggctcttcttgatgtttattttactgtggctaagctagtacccaacttctaagacttaagtcctctgtattcttccctctcttttccccaagtaggaatctctccccaagctgcactgccaagagttctgggaggggtgacatgagtaatctcttagctgccacagctggtgttacacttggtcacatgcaccccaagtcccattgcctctgagattagtgcagcaccaggccttgcccaaggactgtagtcctttgggcagatggccactcagttttattctcttacmtgccacagctggtataacactgggtcacatgcaccccaagtcttattgcctctgagactagtgcagcaccaggccttgcccaaggacagtagtccttttcgccagatggccactcagttttattccaggccctaggtcactttagtcagccagtggtggaaccagctgtgatctgggttcctcctgctggggctgagagtttccctccggcccaggggctggtctaaatgtttcctgtcgatac

SEQ ID NO: 217759 - DNA, 486 bp, Homo sapiens
ttgtgtagatagttgttcaatttggtgttcctgcaggggggtgatcgctagagaatttggccatgttgctatgcctctttgtctgtctaatacataagctctttattttcattttttatatttttagacagtcttgytctgtcgcccaggctggagtgcagtggcatgatctcggttcactgcaacctctgcctcccgggttcaagcaattctcctacctcagcctcccaagtagcttgggttataggtgcatgccaccacacccaggttgtttctgtatttttagtagagcggggtttcactatgttggccaggctggtctcgaactcctgacctcgagatccgcctgccttggcctcccaaagtactgggattacaggcgtgagccaccatgcctggccctggtatttaatactgaagcaaccatacgaccaagcagcaggtatataccatgggatatatacctgggggtttattgttgtgtgc

SEQ ID NO: 217760 - DNA, 486 bp, Homo sapiens
ttgtgtagatagttgttcaatttggtgttcctgcaggggggtgatcgctagagaatttggccatgttgctatgcctctttgtctgtctaatacataagctctttattttcattttttatatttttagacagtcttgttctgtcgcccaggctggagtgcagtggcatgatctcggttcactgcaacctctgcctcccgggttcaagcaattctcctacctcagcctcccaagtagcttgggttataggtgcatgccaccacacccaggttgtttctgtatttttagtagagcggggtttcactatgttggccaggctggtctcgaactcctgacctcgwgatccgcctgccttggcctcccaaagtactgggattacaggcgtgagccaccatgcctggccctggtatttaatactgaagcaaccatacgaccaagcagcaggtatataccatgggatatatacctgggggtttattgttgtgtgc

SEQ ID NO: 217761 - DNA, 532 bp, Homo sapiens
actttctagctaatcaagggtacaaggcgtctaggtcaaaggcccagctttgtctatagcaggtcaaatawctaggcctaatcttagccagagggaccagggccctcagcaaggaacaaatacagcctatactggcttatccttgccctaagacattaaaacagttgtggtcattccttggaatcacggcttttgctgactatggatccctggatacagcgagatagccaggcccctttatactctaatcaaggagacccagagggcaaatactcatctagtagaatgggaaccacaagcagaaacagccttcaaaaccttaaagcaggccctagtacaagctccagctttaagccttcccacaggacaaaacttctctttatatgtcacagagacagcagggatagctcttggagttgttagactcgtgggacgaccccacaaccagtggcatacctaagtaagtaaattgatgtagtagcaaaaggctggcctcactgtttaagggtagttgtggtggtcatcttagtgt

SEQ ID NO: 217762 - DNA, 532 bp, Homo sapiens
actttctagctaatcaagggtacaaggcgtctaggtcaaaggcccagctttgtctatagcaggtcaaataactaggcctaatcttagccagagggaccagrgccctcagcaaggaacaaatacagcctatactggcttatccttgccctaagacattaaaacagttgtggtcattccttggaatcacggcttttgctgactatggatccctggatacagcgagatagccaggcccctttatactctaatcaaggagacccagagggcaaatactcatctagtagaatgggaaccacaagcagaaacagccttcaaaaccttaaagcaggccctagtacaagctccagctttaagccttcccacaggacaaaacttctctttatatgtcacagagacagcagggatagctcttggagttgttagactcgtgggacgaccccacaaccagtggcatacctaagtaagtaaattgatgtagtagcaaaaggctggcctcactgtttaagggtagttgtggtggtcatcttagtgt

SEQ ID NO: 217763 - DNA, 396 bp, Homo sapiens
ggaattctggataatgtatcagaagaatgtttcatttctgcttataaattagtaataaataataatgtgggacttgaaaaaaataaaactgcatttcttttttctgtggtttagactctctggttcaaacagtgtcttcctcactaaattattagtaaacctactgaagtgccgggcccaccagtaatccacatctctagtaaaatttttgcatctgaaggctcagcctttaattcttcaattcgaaattaatatatttatccttccatcactgtctcccacggatttgagaattaattagaaacaaaatcacyttcagtccttggatgttacattctgtgctgaaaaaatatgagatactgaagtgttattaataatgacaaagattcatccaat

SEQ ID NO: 217764 - DNA, 548 bp, Homo sapiens
ttaattcgtttggatttggtttgtatatggtgagagataggggtctagtttcattcttctgcatatggatatccagttttcctggcaccatttattgaagagactttcatttccccaatatatgttcttggtacattcatcaaaaatgagttgaatttagatgcctggattgatttttgggctctctattctgtttcactggtttatgcatctgtttttatcacagcaccatgatgttttgattactataattctatagtataaagtcaggtaatgtaatgcttccagcttgttcatttgctcaggatagcttggctatttgggtctttgtggttccatataaattttagaatgtttttctatttctttaataacgtattcattttgatagggattaaatggaatctgtagattactttgagtagtatagatattttaataataytgattcttccaattcatgaacataaaatatcttttcattttttggtgtgtcctcttcaatttctttcatcaatgctttatgattttcattgtaaagatctttc

SEQ ID NO: 217765 - DNA, 653 bp, Homo sapiens
aaaaggtaggggtctagtttccttcttctgcatgtggatatccagttttcccagcacaatttattgaagagactgtcttttccccagcttgtgttcttggcagctttttgaaaaatgagttcactgtaatgtgtgcattgtgtctgcattctctcttatgttccattartgtgtgtgtctgtttttatgccagtacaatgctgtttggttactatagctctgtagtataatttgaagtcaggtaatatgattactccagtttgttattttttcttaggatatcttttgccattctgggtccttttcagtttcatataaattttaggattgtttttctattttgtgaataatgtcattgttattttgataggaattgtattgaatctgtagcttgctttgtatagtatggacattttaacaataatgattcttcaacttcatgagcatgaaatatttttctattttttggtgtcctcttctatgtttttcatcagtgttttcacatgttcgttagggacatctttcaccttcattaattcctagatatttaattttaagtgtggctattgtaaatggcattacttttttctttctttttggattgcctgctgttggcctatagaaatgctctttattttgtatgtttatgttgt

SEQ ID NO: 217766 - DNA, 535 bp, Homo sapiens
tttccccagcttgtgttcttggcagctttttgaaaaatgagttcactgtaatgtgtgcattgtgtctgcattctctcttatgttccattaatgtrtgtgtctgtttttatgccagtacaatgctgtttggttactatagctctgtagtataatttgaagtcaggtaatatgattactccagtttgttattttttcttaggatatcttttgccattctgggtccttttcagtttcatataaattttaggattgtttttctattttgtgaataatgtcattgttattttgataggaattgtattgaatctgtagcttgctttgtatagtatggacattttaacaataatgattcttcaacttcatgagcatgaaatatttttctattttttggtgtcctcttctatgtttttcatcagtgttttcacatgttcgttagggacatctttcaccttcattaattcctagatatttaattttaagtgtggctattgtaaatggcattacttttttctttctttttggattgcctgctgtt

SEQ ID NO: 217767 - DNA, 499 bp, Homo sapiens
ggagaggggcagagcaagatggccaaatagaaggcttcactggttatctgtcctacaggaacaccgaatttaacaactatctacatacagaaaacagcttcataagaaccaaatatcaggtgagcacacacagtacctggttgtaacttcatatcgctgaaagrggcactgaatagggtaggaaacagtgctgaattgccaacaccatccctcccccatccattggcagcaggtgtgtggtgctgagagaaaatctgtgcctttgggagagggagaggacagcagttttgagacattacattgaactcagtgctgccctgtcacagtggaaagcaaaactgggctgaactcagctgatgcctgctacagagggaacatacaaagtggccttagcagaaggtgaatcacccatcccagtggttggaacttgagttctagcaaacttgccattgtggactaaagtacttggggccctaaataaacttgaaagacattctag

SEQ ID NO: 217768 - DNA, 570 bp, Homo sapiens
tagtagcacatagggcaagtatagttaaaataatgtattatatattttaaataactaaaggagtgaaattagaatgttcctaacacaaagaaataataaatgcttgaggttatgggtaccctaattacccagacttgatcactgcacactgtatgcctgtatcaaagcatcaaatgyaccccataaattgtacaactattatgcacccttaattttaaaaaatgtttaatcataagtgttaggcattctctctactatgccctttctgtataaatatatactccaatatctagatatctatatttatatgcacatttatgtgttcaacaaccttaaggtagattcttttctttctttcataaaggagaaaatgaggttctttcacaaatttaaaaaataagatactaagtaaattttccagggtcacataccaatagatgttaaaacttggatttgaagtcaggttgtgtggttcctaaacctatgcttttcaaaataacatatcttttcttcaaaatgaagcatttcaaaaatgtatccatggatcacagaggtagtatgatcatgtga

SEQ ID NO: 217769 - DNA, 570 bp, Homo sapiens
tagtagcacatagggcaagtatagttaaaataatgtattatatattttaaataactaaaggagtgaaattagaatgttcctaacacaaagaaataataaatgcttgaggttatgggtaccctaattacccagacttgatcactgcacactgtatgcctgtatcaaagcatcaaatgtaccccataaattgtacaactattatgcacccttaattttaaaaaatgtttaatcataagtgttaggcattctctctactatgccctttctgtataaatatatactccaatatctagatatctatatttatatgcacatttatgtgttcaacaaccttaaggtagattcttttctttctttcataaaggagaaaatgaggttctttcacaaatktaaaaaataagatactaagtaaattttccagggtcacataccaatagatgttaaaacttggatttgaagtcaggttgtgtggttcctaaacctatgcttttcaaaataacatatcttttcttcaaaatgaagcatttcaaaaatgtatccatggatcacagaggtagtatgatcatgtga

SEQ ID NO: 217770 - DNA, 570 bp, Homo sapiens
tagtagcacatagggcaagtatagttaaaataatgtattatatattttaaataactaaaggagtgaaattagaatgttcctaacacaaagaaataataaatgcttgaggttatgggtaccctaattacccagacttgatcactgcacactgtatgcctgtatcaaagcatcaaatgtaccccataaattgtacaactattatgcacccttaattttaaaaaatgtttaatcataagtgttaggcattctctctactatgccctttctgtataaatatatactccaatatctagatatctatatttatatgcacatttatgtgttcaacaaccttaaggtagattcttttctttctttcataaaggagaaaatgaggttctttcacaaatttaaaaaataagatactaagtaaattttccagggtcacayaccaatagatgttaaaacttggatttgaagtcaggttgtgtggttcctaaacctatgcttttcaaaataacatatcttttcttcaaaatgaagcatttcaaaaatgtatccatggatcacagaggtagtatgatcatgtga

SEQ ID NO: 217771 - DNA, 327 bp, Homo sapiens
ggtgaaacggggaaagggagacagtatgtcatactgtagtagtagcggtttaaatgaatctcctttgtgctcaaacagsgtatttttaacttaacagagagtagctagtaggagtgggcttaacaaggagcctgcatgtctctccacattccagtgcttcaaaggagtgtccttctccttgaacacagtgtttgcagataagagagcaggtctcactctgagcatgggaacatgatggcaattaggaggctttcctcctcagcggcctcttgtggctttccacaacttattgtcccatatttttatggccagtttatgcaggcaccc

SEQ ID NO: 217772 - DNA, 575 bp, Homo sapiens
ggaggctgaagtgcgaggactgattgggcccaggagattgtggcttcagtgagctgtgatcacaccactgcattccagcctgggtgacagagtgagaccctgtctcaccaaaaaaaaaaaaaaaaaaaaaaaaaaaaaaaagtatttttcacagttctggaggctggcaagtccaagatcaaggtgccagcacactcggtatctggtgagggtccggtctctgctcccaaggtgatgcattgaatgctgcacccccaggaggggaggaacactgtcttcacatgwcagaagggcagaagagccctgagacaggactcactcccaccagcccctttataaaggtatgaaacccactcatgaggcacagccctcacggccgaatcatcacttaaaggtcccagctcttaacagtgttagaatagcaatcaaatctcaacatgcattttacaggggacaaatattcaaaccataacagtggcaattcttggcattgcttgtcttgtagccacatcattccaatctctgcctctccctgtgtctctatcctcacatgttcttataaagaccccagtcat

SEQ ID NO: 217773 - DNA, 336 bp, Homo sapiens
ctttgggccaatgcttatgtgcccgttgcmatttttgacccatctttttttttttttttttttttttgagacacagtctcgctctgttgcccaggctggagtgcagtggcgcgatctttaggttgtgcttcatagtatttcagatgaccacagttacaagcgggtgcacacaattaccagccatagaaatatgcctttatacatctcggttttcgacctatttctttgtgtgtatggtttgtctcttcatagctgttaacccaagtgactgtcattagtatacctgactgttgatgcttgcaaaaataaaacaggcaataaaatattgtctatttt

SEQ ID NO: 217774 - DNA, 511 bp, Homo sapiens
ggacagcactagggggatggtgctaagccgttagaaccccccccccgccccccgtgatccaattaccacccaccaggcctacctccaacattgggggttacagttcaacatgagatttgggtggggacacagagccagatcacaccaattaatatctccatttaattgttgcagttatattctggaaaatataataccatgctgatataatctaaggatacagtcatgcctggaataggagatttggtgtgtgttgcaggttggaggggtgcctayctatgaggaaagggtgagtcctcaggtgtctcttttattccagaaaggcacatactgaagggcatcagtggcagccatggtagagtgagaggaggtgtttcctaagagactaaatgaggatgtgtgagagaaaactcggccataatatgggctggctagatagtaaccttaaggaacatgttacaagagaatgatgtaagatggtaacagcataatgggtttcaggggttgtggt

SEQ ID NO: 217775 - DNA, 511 bp, Homo sapiens
ggacagcactagggggatggtgctaagccgttagaaccccccccccgccccccgtgatccaattaccacccaccaggcctacctccaacattgggggttacagttcaacatgagatttgggtggggacacagagccagatcacaccaattaatatctccatttaattgttgcagttatattctggaaaatataataccatgctgatataatctaaggatacagtcatgcctggaataggagatttggtgtgtgttgcaggttggaggggtgcctacctatgaggaaagggtgagtcctcaggtgtctcttttattccagaaaggcacatactgaagggcatcagtggcagccatggtagagtgagaggaggtgtttcctaagagactaaatgaggatgtgtgagagaaaactcggccmtaatatgggctggctagatagtaaccttaaggaacatgttacaagagaatgatgtaagatggtaacagcataatgggtttcaggggttgtggt

SEQ ID NO: 217776 - DNA, 495 bp, Homo sapiens
tacatgaattaatgagaaacttatgtgaaaaggtgcttcacttttattgcgatgtaggtacatgcccacgcatagaccagaatataaattctaaccagtttaactatatttttgtagattgtcactgaaaaagagttacttttatttaaaccatcaattaatacttcaaaaacagaaaatataaaaagggcaaaaatataaaactaaccacacaaagaaacttgagtttgtcrttattgtggtgactggtcacttaggtattattttagatctcatttccatttaaaaaaaaaaccaataagcaagaactcaggaagcatgtataaatactaaaaccagattaaatatatcatatgtaactttcaataaaaagcaggaagaacccaaccatgaaagttcctcagatcaaaaaggcaggctgtgttccatgccctgaagagctatttaggaaaacagtgtggaactataaaaacgttctaaaaaattaaaaataag

SEQ ID NO: 217777 - DNA, 581 bp, Homo sapiens
acatatctctaactttcaatactataataatctagaatctttagctccaaagaatgtataatttacgcagcaaaaagcaaacaaaaaatggaatctattactagatattaaaacattaaaggaagtaggaattgttgaaagggacaaagaagttctaagtaaggagtggaaaaaactggaaaggaattagaaaacgccttttagaaagcatttgaatcctgcmcatgtatatgtgctatgtaacaaacctgcacattctgcacatgtatcccaaaactttaagaaaaaaagaaaaatttaaatcctgacagccataaagagaaaactgtaatctcaattccaaccagcaattttgggggagtagtatatttctaactagtggcaatctggtgaaacttatgaagctcttctcagaacactgtttttaagtgcatagagaaacttaaccagaaaaccaattatatctaaaaaaaatagtaatgatcatcaaaagattttaaagtaatatgtgcatctttaccacacattaaatgaaaatagcagtcattctagtaacttctacagttttgaagtgatgagca

SEQ ID NO: 217778 - DNA, 477 bp, Homo sapiens
catcagaaatctgaaatgcttcagtgaatattttctcttaagtgtcctgtcggcactcaaaatatttcagacttggagcattttagatttggactttggattgggacattcaacatgtaacttggtgttaatgcgatgtcagtacagtgatgaagaaatacaggggacagtgatattgtggggctgtgtgagtgtcgtgtgatggggsccgtaagaaatggtttggcatgtgccttgaacaccagagaatccggatcgtgaaggcaggatgactggcatgtgtgtctgcttgcttggtggcacgctggagatgtttgggcacatgtgtcgtgcgcacacctgctgcggacagcagttgttgggtggaaatcaacagttgtagccttgacacagatggaagtgaatgtgaatacaattgaatatgaggcataaaaccctctacatgatcagcatggtgtttaaaatgccttaacgccc

SEQ ID NO: 217779 - DNA, 595 bp, Homo sapiens
gtcaaaaagtgtgggttgcatactgagggttaaaactacctctggctgagaggcactagcttaacccaccagcatctcttgccagaacaccttcagtaactctttaattggttctgttatgtatactcttggtctttaacatttgattctacactgcagcaagaatgatcttttaaaattcaaatctcatctgggcacggtggctcacacctgtaatcccagcactttgggaggcagcgacgggcagatcacttggggccaggagttcaagaccagcctggccaacatgacaaaatcctatctccactaaaaatacaaaaattagccaggcatggtggcacatgcctataatcccaaccacttgagaggctgaggcacaagaattgcttgaacccaggaggcaggggttgcagtgagccaggatctcacctccagcctgggtgacagagcaagactgtgttaagaaaacaaaacaaaagaaaacaaaacaaacaacaacaacaamaaaaaaaacactcaaatctcatgtaatcctgttgcttaaaaccatcaatgtctttcctctatttttaagacaaaagtccaaatttggtaa

SEQ ID NO: 217780 - DNA, 636 bp, Homo sapiens
tctgccttgcaatctttgatgaatcaagctgccatgttggagagatccacatgacaagaaattgagggcagtctytggccaacatctagcaaggaactgaggttcttagtccaacaacccacaattaactgaagcccaccaataagcatgagagctcagaagcagatccttcccctatcaagccttcagataagactttaccccagccaacaccttgattataaccttgtgagagactgagtagaggaccacaaaaagccatgttcaacctcctaacccacagaaactatgaaataacaaatatgtgttgctttaagcaagtttgggggcaatttgttacattataatacataactaatatgaagcccaagaacaggctgctatgagagatcccagagggggactgcttgagactaagtggtgagcacaggcttctctgaggaatcacatttaagcagagtcctgagtgacgagcaggtgcccaccaggaatgtgaggaaagagaattccaagtctttgaaccttagtggagcctcaatttcctcaaatagaaaatgagaattttccctaggtatttcctgcatatagttgctttgaggattaagtaagaaaatatttgtaatgtgctttacatca

SEQ ID NO: 217781 - DNA, 636 bp, Homo sapiens
tctgccttgcaatctttgatgaatcaagctgccatgttggagagatccacatgacaagaaattgagggcagtctctggccaacatctagcaaggaactgaggttcttagtccaacaacccacaattaactgaagcccaccaataagcatgagagctcagaagcagatccttcccctatyaagccttcagataagactttaccccagccaacaccttgattataaccttgtgagagactgagtagaggaccacaaaaagccatgttcaacctcctaacccacagaaactatgaaataacaaatatgtgttgctttaagcaagtttgggggcaatttgttacattataatacataactaatatgaagcccaagaacaggctgctatgagagatcccagagggggactgcttgagactaagtggtgagcacaggcttctctgaggaatcacatttaagcagagtcctgagtgacgagcaggtgcccaccaggaatgtgaggaaagagaattccaagtctttgaaccttagtggagcctcaatttcctcaaatagaaaatgagaattttccctaggtatttcctgcatatagttgctttgaggattaagtaagaaaatatttgtaatgtgctttacatca

SEQ ID NO: 217782 - DNA, 636 bp, Homo sapiens
tctgccttgcaatctttgatgaatcaagctgccatgttggagagatccacatgacaagaaattgagggcagtctctggccaacatctagcaaggaactgaggttcttagtccaacaacccacaattaactgaagcccaccaataagcatgagagctcagaagcagatccttcccctatcaagccttcagataagactttaccccagccaacaccttgattataaccttgtgagagactgagtagaggaccacaaaaagccatgytcaacctcctaacccacagaaactatgaaataacaaatatgtgttgctttaagcaagtttgggggcaatttgttacattataatacataactaatatgaagcccaagaacaggctgctatgagagatcccagagggggactgcttgagactaagtggtgagcacaggcttctctgaggaatcacatttaagcagagtcctgagtgacgagcaggtgcccaccaggaatgtgaggaaagagaattccaagtctttgaaccttagtggagcctcaatttcctcaaatagaaaatgagaattttccctaggtatttcctgcatatagttgctttgaggattaagtaagaaaatatttgtaatgtgctttacatca

SEQ ID NO: 217783 - DNA, 636 bp, Homo sapiens
tctgccttgcaatctttgatgaatcaagctgccatgttggagagatccacatgacaagaaattgagggcagtctctggccaacatctagcaaggaactgaggttcttagtccaacaacccacaattaactgaagcccaccaataagcatgagagctcagaagcagatccttcccctatcaagccttcagataagactttaccccagccaacaccttgattataaccttgtgagagactgagtagaggaccacaaaaagccatgttcaacctcctaacccacagaaactatgaaataacaaatatgtgttgctttaagcaagtttgggggcaatttgttacattataatacataactaatatgaagcccaagaacaggctgctatgagagatcccagagggggactgcttgagactaagtggtgagcacaggcttctctgaggaatcacatttaagcagagtcctgagtgaygagcaggtgcccaccaggaatgtgaggaaagagaattccaagtctttgaaccttagtggagcctcaatttcctcaaatagaaaatgagaattttccctaggtatttcctgcatatagttgctttgaggattaagtaagaaaatatttgtaatgtgctttacatca

SEQ ID NO: 217784 - DNA, 588 bp, Homo sapiens
gttacgttgcttaagatatcttgttggcttgatgaagtaagatgccatgctgaggaagcccacatggcaaggaactgcaggcagcctccagctggtagtcagccaaaagtcaggacgtgaagttatacagacataaggaaatgagtttgccaaaaatgtaaatgagcttagaattagattcttccctcatcaagtccccagattaaaacaagcctggccaatacctaaattatagcctttcaagactctgagcagaggacccagtgaagccatacctgcactcctaacccacagacactgtgagataataaatatatgcttttgtttttggctgctacatttgtggtaatttttgttttgcagcaatagaaaattaayatagttagccaacgatagctcacaagccaaatctggcctgctacctatttccgtatagcctacaagcaaataatgatttttacatttttaagtggcaaaaaataaatcaaaagaatgttttgtaacagatgaaaattatgtgaaatccaaaccagtgtccataaagttttattaaaaaacagctacatccatatatttatgtattgtctg

SEQ ID NO: 217785 - DNA, 464 bp, Homo sapiens
tttcatgatttctcactgctctaaaggcaaggtcccaattcctgccttgatatgccgggctcttggtgcctggagccctccctacctcattgccccatttccctccaycctgcctcagactctgctttccattcagacccatggctccgacctgcaccgtgctctcttccccttgcctctgactgcacctgtgcataggctgtatcttccatctggaaagcctctccccacctttcacaccctgttctgttctttactgccagcatctcctccaggaacactttccagcccagcccagcctgaccccaggctaagattggtaccctcctgacttggggtctcatagcaaatttactcattttttcctgcccctggccacactactgcccagtcccacactggactgtagggcctgcctgcctccctgccactagagtatgagcaacttgtgggcacattctgtg

SEQ ID NO: 217786 - DNA, 483 bp, Homo sapiens
agttttcaaggcactttcatgatttctcactgctctaaaggcaaggtcccaattcctgccttgatatgccgggctcttggtgcctggagccctccctacctcattgccccatttccctccatcctgcctcagactctgctttccattcagacccatggctccgacctgcacygtgctctcttccccttgcctctgactgcacctgtgcataggctgtatcttccatctggaaagcctctccccacctttcacaccctgttctgttctttactgccagcatctcctccaggaacactttccagcccagcccagcctgaccccaggctaagattggtaccctcctgacttggggtctcatagcaaatttactcattttttcctgcccctggccacactactgcccagtcccacactggactgtagggcctgcctgcctccctgccactagagtatgagcaacttgtgggcacattctgtgtcttt

SEQ ID NO: 217787 - DNA, 456 bp, Homo sapiens
cactgctctaaaggcaaggtcccaattcctgccttgatatgccgggctcttggtgcctggagccctccctacctcattgccccatttccctccatcctgcctcagactctgctttccattcagacccatggctccgacctgcaccgwgctctcttccccttgcctctgactgcacctgtgcataggctgtatcttccatctggaaagcctctccccacctttcacaccctgttctgttctttactgccagcatctcctccaggaacactttccagcccagcccagcctgaccccaggctaagattggtaccctcctgacttggggtctcatagcaaatttactcattttttcctgcccctggccacactactgcccagtcccacactggactgtagggcctgcctgcctccctgccactagagtatgagcaacttgtgggcacattctgtgtcttt

SEQ ID NO: 217788 - DNA, 464 bp, Homo sapiens
tttcatgatttctcactgctctaaaggcaaggtcccaattcctgccttgatatgccgggctcttggtgcctggagccctccctacctcattgccccatttccctccatcctgcctcagactctgctttccattcagacccatggctccgacctgcaccgtgctctcttccccttgcctctgactgmacctgtgcataggctgtatcttccatctggaaagcctctccccacctttcacaccctgttctgttctttactgccagcatctcctccaggaacactttccagcccagcccagcctgaccccaggctaagattggtaccctcctgacttggggtctcatagcaaatttactcattttttcctgcccctggccacactactgcccagtcccacactggactgtagggcctgcctgcctccctgccactagagtatgagcaacttgtgggcacattctgtg

SEQ ID NO: 217789 - DNA, 483 bp, Homo sapiens
agttttcaaggcactttcatgatttctcactgctctaaaggcaaggtcccaattcctgccttgatatgccgggctcttggtgcctggagccctccctacctcattgccccatttccctccatcctgcctcagactctgctttccattcagacccatggctccgacctgcaccgtgctctcttccccttgcctctgactgcacctgtgcataggctgtatcttccatctggaaagcctctccccacctttcacaccytgttctgttctttactgccagcatctcctccaggaacactttccagcccagcccagcctgaccccaggctaagattggtaccctcctgacttggggtctcatagcaaatttactcattttttcctgcccctggccacactactgcccagtcccacactggactgtagggcctgcctgcctccctgccactagagtatgagcaacttgtgggcacattctgtgtcttt

SEQ ID NO: 217790 - DNA, 483 bp, Homo sapiens
agttttcaaggcactttcatgatttctcactgctctaaaggcaaggtcccaattcctgccttgatatgccgggctcttggtgcctggagccctccctacctcattgccccatttccctccatcctgcctcagactctgctttccattcagacccatggctccgacctgcaccgtgctctcttccccttgcctctgactgcacctgtgcataggctgtatcttccatctggaaagcctctccccacctttcacaccctgttctkttctttactgccagcatctcctccaggaacactttccagcccagcccagcctgaccccaggctaagattggtaccctcctgacttggggtctcatagcaaatttactcattttttcctgcccctggccacactactgcccagtcccacactggactgtagggcctgcctgcctccctgccactagagtatgagcaacttgtgggcacattctgtgtcttt

SEQ ID NO: 217791 - DNA, 498 bp, Homo sapiens
agctacagcttcaaagtgttttgaccggttccaagttaatggcatgcttttgatagatatttgttatcaccagatcaaagttcatttatattattcgcaaaatattaactgttttcacatttattttgctttaactattataataagatattaaaataatgtatggaaaataaaggttttaatgcaagtaagtgttggactagagcggccatattatattccagagaaagtatactccacrtagttggtgccacattaaagctgcacactaccactccctggtggctgcatggctaaactgtagctttctggaaatcacctcctttgaggttgaaaatgcataatacaaacaaacaaaaccacacagtaacaggatgacacctctatgtgagtccaaatggccattgtccaaactgcataattctgtaagaaacagagaaagtagaagtaccatttttttttgcacttttaaaaataatctgaagagattggcagtga

SEQ ID NO: 217792 - DNA, 601 bp, Homo sapiens
cttctttaattcacagatcatgtcctagtctccgccttccccagcttccagagatcatacggcagatattcaaggtgcttttttctaaaggtctcttacttgctgctcactggtttaagataaacttaaagcatcctcctaccatataggatggggaaacaaagtagcagcagagctctctctctttctagagaaattttgttcatcagtctctcctgcttagtattctagcccttctagcctccccttttgtattgtcaaaattactaatgsaaagtggccagtcaagtttaggacacaaagcagttgactatacatggtctaatacctgtctttgaaatgtgggataagttaacctttttagcttcgatccttagagtctcaaaaaagtaatggaaaaattctcacttttatatttttttaaagctttttgaagtcaaacaagctacacataatgaatgtgaatgaatgtgtgtgatgggataggtgttgacatgtatataacatagaaccattaccacaatcaagttttctcacaaatgtgtccatgataccctaagagatccttgagcctctttgtaatcctcctttgtcttgtcaa

SEQ ID NO: 217793 - DNA, 435 bp, Homo sapiens
tcagtctctcctgcttagtattctagcccttctagcctccccttttgtattgtcaaaattactaatgcaaagtggccagtcaagtttaggacacaaagcagttgactatacatggtctaatacctgtctttgaaatgtgggataagttaacctttttagcttcgatccttagagtctcaaaaaagtaatggaaaaattctcacttttatatttttttaaagctttttgaagtcaaacaagctacacataatgaatgtgaatgaaygtgtgtgatgggataggtgttgacatgtatataacatagaaccattaccacaatcaagttttctcacaaatgtgtccatgataccctaagagatccttgagcctctttgtaatcctcctttgtcttgtcaatctccactcttgtcttcaggcaactactgattgtttttc

SEQ ID NO: 217794 - DNA, 504 bp, Homo sapiens
gaaagcaggcacatcctaaatggctggatcagaaagaacagacagagcaaagggggcttttaaacaagcagatcttgtgagaactcactatcacaacaacaggaagtgggaagtccacctccatgatcaaatmacttaccaccaggccctaacactggggattataattcagcatgagatttgggtggggacacagagccaaaccgtatcactctgttttgcctcttcagcctttatagactgcccgtattcctcggcttatggcccctttctccagtttcaaagtcaataatttccacacaagccattctcatgttgtatctctctaacattgattcttttgcctcccatttacatatttgagaacgctgtgagggccgggcagggtggctcatgcttgcaatcccagcactttcggaggccgaggcaggtagatcacctgagatcaggggtttgagaccagcctgaacaatatggtgaaaccccgtctctactaaaaataca

SEQ ID NO: 217795 - DNA, 504 bp, Homo sapiens
gaaagcaggcacatcctaaatggctggatcagaaagaacagacagagcaaagggggcttttaaacaagcagatcttgtgagaactcactatcacaacaacaggaagtgggaagtccacctccatgatcaaatcacttaccaccaggccctaacactggggattataattcagcatgagatttgggtggggacacagagccaaaccgtatcactctgttttgcctcttcagcctttatagactgccygtattcctcggcttatggcccctttctccagtttcaaagtcaataatttccacacaagccattctcatgttgtatctctctaacattgattcttttgcctcccatttacatatttgagaacgctgtgagggccgggcagggtggctcatgcttgcaatcccagcactttcggaggccgaggcaggtagatcacctgagatcaggggtttgagaccagcctgaacaatatggtgaaaccccgtctctactaaaaataca

SEQ ID NO: 217796 - DNA, 504 bp, Homo sapiens
gaaagcaggcacatcctaaatggctggatcagaaagaacagacagagcaaagggggcttttaaacaagcagatcttgtgagaactcactatcacaacaacaggaagtgggaagtccacctccatgatcaaatcacttaccaccaggccctaacactggggattataattcagcatgagatttgggtggggacacagagccaaaccgtatcactctgttttgcctcttcagcctttatagactgcccgtattcctcggcttatggcccctttctccagtttcaaagtcaataattyccacacaagccattctcatgttgtatctctctaacattgattcttttgcctcccatttacatatttgagaacgctgtgagggccgggcagggtggctcatgcttgcaatcccagcactttcggaggccgaggcaggtagatcacctgagatcaggggtttgagaccagcctgaacaatatggtgaaaccccgtctctactaaaaataca

SEQ ID NO: 217797 - DNA, 550 bp, Homo sapiens
cttagcacatgtgcatcaaatttagtgcatactcaaaagcatttgatgcataaatggatgatgaataacacagatctaatagaatcaaatggaagtactgtggaagtccacatgccagcttcagggtctcatgaaccccactgaagtttatataacatgtggactgtacgtgcttaagtgcattttcaaggaagaagtttcatagttctcatcagattctcagaaaggtaccagaccccataaatattaagagccatcagactcaaggtagggaaactagttaaaagtaattgaatttgtacaaaaraaatgtataaaggactaaactagtgctatggcaataaagaataatacaaaaccaaatgatatttcataaataagcccacagaatttgacataaaaacctagtagccattaggtttattgttatactgaatataataatcatccaagcagcatctatcacatacttttctctcattgtttttatgccactcactagtctaattgaaacaagttactcaaatgaaggagtccttgtagtataatt

SEQ ID NO: 217798 - DNA, 447 bp, Homo sapiens
aaaaaaaaaaaagacactttcaagtcgtttaccaagaatttacaataaaataacataagctataaaaaataaaataaaataggctattggctatttcaatgacagaagaggaggataaagttaattccatgggctcacacattcgttgtgaattaaaaatagaggattaggacagagaaaagtcaatgaactttacaatgagtagcccaggtgatttggaaggtagataaaccagtgacagaaaattgacagggagggacatttgatggaagttacttagttttgttttgataattgcaagtcctttctagaaagtttgtctctgaaatcaatactatgtagtctatatataacagktatctcttaatggatgaggcattctaaccaattaatgtgctttactgataaaacctttgtgcctaagaaaaagcaacatagtaagattac

SEQ ID NO: 217799 - DNA, 578 bp, Homo sapiens
tgcattcaataaatttccacaaagtaaacacacctgtgtaattagcactcaagtctagaaatagaacattatcagccactcataaattccacccctcccttttctagtaactatctcccaagcaataataatmaattatgtatcatcttaaacccagcagagttcacagtctttagaactcaatacaaaagctaggaagggaaataaaagggagtgaagaaaatgagggcacactttagtctcatgacccaattactcaatatttatagtttttatgccatgttgaatgtaaaaataggctataggaggagatatcagagaaaagaagacataatctctttctcagtgatggctttctaaccttgaactacctactcccctttgagattaaaattatgtaaccagtacctagaaaaataccaatatatttgaattaattacttgaaatatttcttttaaatagataaattctgatatagagactcagtgacaatatgtgctgatgaacccacacaaaactagaacattatattcaaaatctatgcttgtcattatgggcattgagacattaagtccca

SEQ ID NO: 217800 - DNA, 578 bp, Homo sapiens
tgcattcaataaatttccacaaagtaaacacacctgtgtaattagcactcaagtctagaaatagaacattatcagccactcataaattccacccctcccttttctagtaactatctcccaagcaataataataaattatgtatcatcttaaacccagcagagttcacagtctttagaactcaatacaaaagctaggaagggaaataaaagggagtgaagaaaatgagggcacactttagtctcatgacccaattactcaatatttatagtttttatgccatgttgaatgtaaaaataggctataggaggagatatcagagaaaagaagacataatctctttctcagtgatggctttctaaccttgaactacctactcccctttgagattaaaattatgtaaccagtacctagaaaaataccaatatatttgaattaattacttgaaatatttcttttaaayagataaattctgatatagagactcagtgacaatatgtgctgatgaacccacacaaaactagaacattatattcaaaatctatgcttgtcattatgggcattgagacattaagtccca

SEQ ID NO: 217801 - DNA, 538 bp, Homo sapiens
tctccctttccctagggctctcccttccctggatggtgatcagctcagtctcattcctgagcaccaaagtytctgagttatgtatacatggcagtaaatgagcctcttggagcaagataatgcatgataatgaaagggtctccacattcttgtcttttcagggcagcctactttttaatattcaaataaagtgactataagctccctcttgtgtggaccagggaagtgcagggttgttcctggtgtttcagaagattctcacaggaattttctcagggaatgttttacatcttgctctgaatcactgctcctggcttcaactcattaagcacttgacttcttgttccttctctgaagttagaaattctcctcctaccccctttcactccatgggtggacaaagaccctttctctgtaattccctacggcaccaacagggtagtgacaaatctgctgcagtttggagagcagtcacagcacagaaaaggacagtttaaccctaggttttatatacctctaaagccattctttcagcatt

SEQ ID NO: 217802 - DNA, 580 bp, Homo sapiens
actataggcccatgcaggtctgaaatccagcagggcagtcaaatctttaagttccaaaatgagtctccctaggctctgtctctcacatccaggccaygtggatgcaagagaggggttccatggtcttgggcagctctacccttgtggccttgcagagtacagcctccctcctggttgctttcatgggttggcattgagtgtctgcagcttttctaagggcatggtgcaagctatccagaagacggtggtcctcttctcacagttctactaggtggtgccccagtaggactctgtgcaggggctccagtcccacatttcccatccacactgccctagcatgctctctccatgagggccccaaccctgcatcaaacttctgcctgggcatccagggggcttccatacatcctctgaaatctaggcagaggtttccaaaccccaattcttgatttctgtgcactcacaggctcaacaccacatggaagctttcaaagcttgaggttgcacccaatgaagccacggcctgagctccacattgacctgtttcagccatggctggaggggccgggatgcaaggcac

SEQ ID NO: 217803 - DNA, 440 bp, Homo sapiens
ctgggtctaactcattcaatgaattggttacacatttttttcctaattgactgatcaacactttattatgtgtatgaactcagtttaatatactcatgatacatactacctcaaattgctcagaggaatctttaaccattgttaaaatattgcttattaatataacaaagatattaatgttggagtcttagtaattaaatataattgtaataactaatacagagctataatkattttcaactttgtcacaaagaatctttatacaatatttgttcttcctctatttagggtgctataattgattctaatgagatcttacattgtattggatatacttatagttcacctttccattgaacctaaattagattttttttaacataaccttatttgaacacatattggaagacaaatgtgttcccccccaatacctccttctg

SEQ ID NO: 217804 - DNA, 525 bp, Homo sapiens
aattaaagaattcaagataaaatcatcttggatttagggtgggttgcaaatctaacgactggtctctttataagakaaataagaaggatatttggatactgagatacagataatgttctagaaatgaatcgtggtgatggttgcacaataatatgaatgtacttaatgcccctcaactacatactttataagggaaatattgtatgattccatctatatgaggtatctatagtaggaaaatgcataacatgatgcatattatatgacatatatattatgctatatcacatatcactatgatataatgatgatatattatacattatgacataatctctctctctctctcacacacacacacacacacacacatatattatatatatatattagaaggcctgaacagcaaatctaaagggccaaaaacatggactagtacatgtaaactacgatacttcatgagagaacatcttcctgaggagagagagttgaagacgcctggtaaagtctggaagagagagaaaa

SEQ ID NO: 217805 - DNA, 525 bp, Homo sapiens
aattaaagaattcaagataaaatcatcttggatttagggtgggttgcaaatctaacgactggtctctttataagagaaataagaaggatatttggataytgagatacagataatgttctagaaatgaatcgtggtgatggttgcacaataatatgaatgtacttaatgcccctcaactacatactttataagggaaatattgtatgattccatctatatgaggtatctatagtaggaaaatgcataacatgatgcatattatatgacatatatattatgctatatcacatatcactatgatataatgatgatatattatacattatgacataatctctctctctctctcacacacacacacacacacacacatatattatatatatatattagaaggcctgaacagcaaatctaaagggccaaaaacatggactagtacatgtaaactacgatacttcatgagagaacatcttcctgaggagagagagttgaagacgcctggtaaagtctggaagagagagaaaa

SEQ ID NO: 217806 - DNA, 643 bp, Homo sapiens
cagaaaaaatttaaagaaagaaatataaactagacacattagtacttttttaaaacaartatgttcctgtaagcatcagtctctattaatatggctcaatatatgcttactatttatatatatttattgtagatctttctgttggcagattgttgaatcattttacataaagttcttaattcgtcctaattaatattttttaaaaaacaagcaactatatcatactagacactaatttctcaaagattcataatatttaactgcttattaactaccctgatttcaaaattttagcatatttaagaataatatttttcacagaagtatattatttcttcattgtggtgatctaggttttattgatcctgaagcattttgtagatagatagatagatagatagatagatagatagacagacagacagacagacagacagacagatagacagacagatagatagatatttgtggggaatacatacattatatatatatgtgagtaaattagtgagggcaaattggagtcaaattataattaaaaaaataggaaggcctcaggacacttgcaatcatagcagaaggcaaaggggaattaaggcaccttctttacaaggtggtaggaaggaaaatgaacacaggagga

SEQ ID NO: 217807 - DNA, 643 bp, Homo sapiens
cagaaaaaatttaaagaaagaaatataaactagacacattagtacttttttaaaacaagtatgttcctgtaagcatcagtctctattaatatggctcaatatatgcttactatttatatatatttattgtagatctttctgttggcagattgttgaatcattttacataaagttcttaattcgtcctaattaatattttttaaaaaacaagcaactatatcatactagacactaatttctcaaagattcataatatttaactgcttattaactaccctgatttcaaaattttagcatatttaagaataatatttttcacagaagtatattatttcttcattgtggtgatctaggttttattgatcctgaagcattttgtagatagatagatagatagatagatagatagatagayagacagacagacagacagacagacagatagacagacagatagatagatatttgtggggaatacatacattatatatatatgtgagtaaattagtgagggcaaattggagtcaaattataattaaaaaaataggaaggcctcaggacacttgcaatcatagcagaaggcaaaggggaattaaggcaccttctttacaaggtggtaggaaggaaaatgaacacaggagga

SEQ ID NO: 217808 - DNA, 643 bp, Homo sapiens
cagaaaaaatttaaagaaagaaatataaactagacacattagtacttttttaaaacaagtatgttcctgtaagcatcagtctctattaatatggctcaatatatgcttactatttatatatatttattgtagatctttctgttggcagattgttgaatcattttacataaagttcttaattcgtcctaattaatattttttaaaaaacaagcaactatatcatactagacactaatttctcaaagattcataatatttaactgcttattaactaccctgatttcaaaattttagcatatttaagaataatatttttcacagaagtatattatttcttcattgtggtgatctaggttttattgatcctgaagcattttgtagatagatagatagatagatagatagatagatagacagacagacagacagacagacagacagayagacagacagatagatagatatttgtggggaatacatacattatatatatatgtgagtaaattagtgagggcaaattggagtcaaattataattaaaaaaataggaaggcctcaggacacttgcaatcatagcagaaggcaaaggggaattaaggcaccttctttacaaggtggtaggaaggaaaatgaacacaggagga

SEQ ID NO: 217809 - DNA, 611 bp, Homo sapiens
ggttggcaaagtaattgaactggaaagaagtcaataaggttttggtttccaatgacaaacactgttcctaaaaagtgaaaataaggaagaagtcagattttaatgggatgaccaggacctacatagtataacaatcatyggcaacatgttcaccaagtgtgatgataaacagaggaagagaaagaagatattttttaaagagaaggaaactcaaagatttttagtgtttctgttcatttattttacgtttatgtatgtgaactttaaagatagggaagatgagcattttgtttagaggaaggagaaagggaagcttcttgaaattaaaggaaagggtaacggataaatttctcatctggggtgaaacatcacagacttcaaaattcagggcatcgacattcaggcaaggagcagctacatctatctctaaccctccctgatttatgaagtaagatatcctgatattctgcttggcttggtagtaggtaaaacagcctacagataacaggaaatctcaactggcatatatagatgagacaaggataggttaatgaatgggatcaatcaaacacatgtagggaagtcaaggcattttaggcagaggaaatgac

SEQ ID NO: 217810 - DNA, 611 bp, Homo sapiens
ggttggcaaagtaattgaactggaaagaagtcaataaggttttggtttccaatgacaaacactgttcctaaaaagtgaaaataaggaagaagtcagattttaatgggatgaccaggacctacatagtataacaatcattggcaacatgttcaccaagtgtgatgataaacagaggaagagaaagaagatattttttaaagagaaggaaactcaaagatttttagtgtttctgttcatttattttacgtttatgtatgtgaactttaaagatagggaagatgagcattttgtttagaggaaggagaaagggaagcttcttgaaattaaaggaaagggtaacggataaatttmtcatctggggtgaaacatcacagacttcaaaattcagggcatcgacattcaggcaaggagcagctacatctatctctaaccctccctgatttatgaagtaagatatcctgatattctgcttggcttggtagtaggtaaaacagcctacagataacaggaaatctcaactggcatatatagatgagacaaggataggttaatgaatgggatcaatcaaacacatgtagggaagtcaaggcattttaggcagaggaaatgac

SEQ ID NO: 217811 - DNA, 611 bp, Homo sapiens
ggttggcaaagtaattgaactggaaagaagtcaataaggttttggtttccaatgacaaacactgttcctaaaaagtgaaaataaggaagaagtcagattttaatgggatgaccaggacctacatagtataacaatcattggcaacatgttcaccaagtgtgatgataaacagaggaagagaaagaagatattttttaaagagaaggaaactcaaagatttttagtgtttctgttcatttattttacgtttatgtatgtgaactttaaagatagggaagatgagcattttgtttagaggaaggagaaagggaagcttcttgaaattaaaggaaagggtaacggataaatttctcatctggggtgaaacatcacagasttcaaaattcagggcatcgacattcaggcaaggagcagctacatctatctctaaccctccctgatttatgaagtaagatatcctgatattctgcttggcttggtagtaggtaaaacagcctacagataacaggaaatctcaactggcatatatagatgagacaaggataggttaatgaatgggatcaatcaaacacatgtagggaagtcaaggcattttaggcagaggaaatgac

SEQ ID NO: 217812 - DNA, 450 bp, Homo sapiens
cttgggtaatttataaagaaaagaggtttaattgactcasttccacgtggctgggaaggcctcaggaaacttacaatcatggcgaaagacgaaggggaagaaatgcaccttcttcacagggaggcaggaaggagaagtgcagagcaaatggagaaaagccccttatacaaccatcagatctcatgagaactcactcactgtcgtgagcatcatgcatgggtaaccacccccatgattcagttacctcccaccgggttccttccacaacacgtggggattatgggaactataattcaagatgagatttgggtgggcatgcaatcaaactatatcaaggctattatgattatttgtgtcattcttgttaattctgctgatttgattagtacttttcagttttggacacagggtcattttgaaatgcagaggatgcttctggctgatataata

SEQ ID NO: 217813 - DNA, 483 bp, Homo sapiens
  misc_feature (1)...(483): n = A,T,C or G
tgtagattccttatttctacatagacagtcatattatgtgcaratagggacagtttttcttccttttctcatctgtatggcttttatttgcttttcttgccttgtcaggactccttttcctacaaatgttcaatttctccagcactatttgatgagataactatcctttctcattgaatttcttttgtaccttagtcttaaacccactggacatatttgtgtaggtccattttggagttctgtgttccattccattgatctatgtgtctgcccctctgccagtagcatacaatgtggactactatagcttgaaatcatgtagatcgattcttaccatattngttttcaaaattgtcttagcgtgttcaattttctttttctttctttttttttttttttttttgagacggatcgtctagtgtcacccagactgaagtacaatggcgcaatttcgtcttctaattactgccaggtttgagtaga

SEQ ID NO: 217814 - DNA, 483 bp, Homo sapiens
  misc_feature (1)...(483): n = A,T,C or G
tgtagattccttatttctacatagacagtcatattatgtgcagatagggayagtttttcttccttttctcatctgtatggcttttatttgcttttcttgccttgtcaggactccttttcctacaaatgttcaatttctccagcactatttgatgagataactatcctttctcattgaatttcttttgtaccttagtcttaaacccactggacatatttgtgtaggtccattttggagttctgtgttccattccattgatctatgtgtctgcccctctgccagtagcatacaatgtggactactatagcttgaaatcatgtagatcgattcttaccatattngttttcaaaattgtcttagcgtgttcaattttctttttctttctttttttttttttttttttgagacggatcgtctagtgtcacccagactgaagtacaatggcgcaatttcgtcttctaattactgccaggtttgagtaga

SEQ ID NO: 217815 - DNA, 483 bp, Homo sapiens
  misc_feature (1)...(483): n = A,T,C or G
tgtagattccttatttctacatagacagtcatattatgtgcagatagggacagtttttcttccttttctcatctgtatggcttttatttgcttttcttgccttgtcaggactccttttcctacaaatgttcaatttctccagcactatttgatgagataactatcctttctcattgaatttcttttgtaccttagtcttaaacccactggacatatttgtgtaggtccattttggagttctgtgttccattccattgatctatgtgtctgcccctctgccagtagcatacaatgtggactactatagcttgaaatcatgtagatcgattcttaccatattngttttcaaaattgtcttagcgtgttcaattttctttttctttctttttttttttttttttttgagacggatcgtctagtgtcacccagactgaagtacratggcgcaatttcgtcttctaattactgccaggtttgagtaga

SEQ ID NO: 217816 - DNA, 235 bp, Homo sapiens
gtaggtggaggctgctttttgcttttcttctattgggccccctaatgacgattgagatatgcaagctaacatgtaggcagcacctaagaacaggaggctgtctgtactacaggatctttaaggacartgtagaatcactgccagcagttctctgtgtcacgtttcctcacagttcatgatctggacggattgagtgagatgcatttcacgtcctgagttacaaaccctgcaggtc

SEQ ID NO: 217817 - DNA, 235 bp, Homo sapiens
gtaggtggaggctgctttttgcttttcttctattgggccccctaatgacgattgagatatgcaagctaacatgtaggcagcacctaagaacaggaggctgtctgtactacaggatctttaaggacagtgtagaatcactgccagcagttctctgtgtcacgtttcctcacagttcatgatctggayggattgagtgagatgcatttcacgtcctgagttacaaaccctgcaggtc

SEQ ID NO: 217818 - DNA, 585 bp, Homo sapiens
agtaaataccttttcctcatcccctctcccaaattgattctgaaaacaagtattactttctggatttatgactatctgctggtcctatagagctttccaattttttcacgtcaagacatacattcatagaaaatgataatattggtccagatcattgggatgcatagaaggggggtcaaggttggagttgtatcctagaatttactaggatatatccctgttgttgattctggcctgtgggataaatggaatctmgtcatccccagactggtttaaccccagtcatcacctaatctatatatggtaaattctatcaatagctacctccttcccatcacaactacagttcagggaagctagaagaaagaaatgacttctagaaatattgacttttttctactaaattttggggtgacttggtttagggctattttaaactcctcatctgttctatgattaggaaatattttcaccactaatgcagaatttttctgatatacattatgatttaaaatctttctgcatattcttatatatacattagaatgtcatgccctgtttctccagcaaaactcttaggatcct

SEQ ID NO: 217819 - DNA, 391 bp, Homo sapiens
ttctgccctaagaccgcaacatagaaatcctgcttggaaattcaaggaattgggactaaagactgcaagatcaactcttagcagaacttccaggctgactgcttgctttatggattttggacttgccagccccacaattatgtaagccaaattaaaatctctctcttcctgtctctctgtttgcctccaacatatccatcggttctgtttctctctctctcgctttgcctccaacatatccatcagttgtgcttctctctctctctctctctctctctctytgcgtccaacatatccatttgttttgtttctctggagaatcctaatacaacatacatcaatgacaagacgaattagctgcagttgtttgacttcagactgtcttttgtgt

SEQ ID NO: 217820 - DNA, 547 bp, Homo sapiens
gtgcagcctggggaaagcaggctccaggacttgctaagattaaggtgtttgcattcaattgctattttcgsttaaaacaggtgagatgatttactaagtcttttcagtttagtatgatatggtaaggaaacagaaaaaggaataaaatcaattgtaaatattccacatttttgatagctgttttccctttaatctgaattttgtgtcatatgtccatgtgcatacacctatgcacatatctaaacaccacacatacaatcacacacacacacacacacataatatgtatttttctagaggagaaccaccacttacacaagaagccatgttaaagcaagtcctctcacaatgaatgaggacatccaatgacaatttttaaaaaggcattgttactctctgacatctgtgcaagaagcaaagaaaattaccaagaacagcttcttccttcaaatctcattttagatctatgtctattaatttatctacaaaatttgcatgactattcttatttttaactgatttcacttcttatgctaatgaattccat

SEQ ID NO: 217821 - DNA, 547 bp, Homo sapiens
gtgcagcctggggaaagcaggctccaggacttgctaagattaaggtgtttgcattcaattgctattttcggttaaaacaggtgagatgatttactaagtcttttcagtttagtatgatatggtaaggaaacagaaaaaggaataaaatcaattgtaaatattccacatttttgatagctgttttccctttaatctgaattttgtgtcatatgtccatgtgcatacacctatgcacatatctaaacaccacacatacaatcacacacacacacacacacataatatgtatttttctagaggagaaccaccacttacacaagaagccatgttaaagcaagtcctctcacaatgaaygaggacatccaatgacaatttttaaaaaggcattgttactctctgacatctgtgcaagaagcaaagaaaattaccaagaacagcttcttccttcaaatctcattttagatctatgtctattaatttatctacaaaatttgcatgactattcttatttttaactgatttcacttcttatgctaatgaattccat

SEQ ID NO: 217822 - DNA, 581 bp, Homo sapiens
aataaaactagcacttcatggtgataagctgaagggggtggtaaataaacacttaagggagaaagtggcactttagttggctttactgtaaacatgaataggagagagtattctaaataaagctaatgacatgaactaaccaagaaaaataggcactacctgtaaatgcgaataggaaagccatgaaataatgtatgtgaaatagttttgtatcctttaaaatgtgaagcaccacattagttatttattattattgttgttatccacggtcttcatcttgttttgtggaacaatatttcagtgtcctatttcttaggaaacatatgggaaaaaatgtcatttttctttgatacatgcccacacaggtcagccactttctgataatatcrtgtctatgggtccttcctaatcacatttgacctcttcaggttacattgttggctttcttaagcattaaataactggaagagaaccactggttgaggtcagattatttattaggatcaatagctttgaatgatttggggtagatgtggtgcactttccatttgaaaggtcaaaaatctgtcaactagcagtaa

SEQ ID NO: 217823 - DNA, 643 bp, Homo sapiens
taaatttcaattcccattcaattttgttaaaaaataacaaacatatatcgaatgccttcaatgtgcccgagcatgtgccattagggaaattcaaaaatgaattatatagcactcctgcccaaaaggaatttataagctgggggtaacactaagtaccattgctgttcaatctgcttctgttttctctcttgygttttgcggaaaaatgttagcttccacaatgtttccttgtgtgatgccttgtatcatgtgtcctagcaatttactgtcaatgacctctcccaaacaggcctccaagcctccaaaaaatgggaatccaactgtgtttgactggcaacacctcagaaggaaggtgttaattcactttcttaagattgctaattaaatatggaatattctgcttcatcctcttattacaaagaaccagttcactgcctgttttaagaaaggtcttaagcagttttcatgtagtcattgttgctgagtcttttagcttccagagctgaaaagcgaagtttgaagaaggcatgagtgtacgtgatttctctgtgtttcgggttaggctttgagtcagggggacctggtggatttgggctcatatttttcttgctgtggcagagtgcagaagaccgacacttccttt

SEQ ID NO: 217824 - DNA, 643 bp, Homo sapiens
taaatttcaattcccattcaattttgttaaaaaataacaaacatatatcgaatgccttcaatgtgcccgagcatgtgccattagggaaattcaaaaatgaattatatagcactcctgcccaaaaggaatttataagctgggggtaacactaagtaccattgctgttcaatctgcttctgttttctctcttgcgttttgyggaaaaatgttagcttccacaatgtttccttgtgtgatgccttgtatcatgtgtcctagcaatttactgtcaatgacctctcccaaacaggcctccaagcctccaaaaaatgggaatccaactgtgtttgactggcaacacctcagaaggaaggtgttaattcactttcttaagattgctaattaaatatggaatattctgcttcatcctcttattacaaagaaccagttcactgcctgttttaagaaaggtcttaagcagttttcatgtagtcattgttgctgagtcttttagcttccagagctgaaaagcgaagtttgaagaaggcatgagtgtacgtgatttctctgtgtttcgggttaggctttgagtcagggggacctggtggatttgggctcatatttttcttgctgtggcagagtgcagaagaccgacacttccttt

SEQ ID NO: 217825 - DNA, 643 bp, Homo sapiens
taaatttcaattcccattcaattttgttaaaaaataacaaacatatatcgaatgccttcaatgtgcccgagcatgtgccattagggaaattcaaaaatgaattatatagcactcctgcccaaaaggaatttataagctgggggtaacactaagtaccattgctgttcaatctgcttctgttttctctcttgcgttttgcggaaaaatgttagcttccacaatgtttccttgtgtgatgccttgtatcatgtgtcctagcaatttactgtcaatgacctctcccaaacaggcctccaagcctccaaaaaatgggaatccaactgtgtttgactggcaacacctcagaaggaaggtgttaattcactttcttaagattgctaattaaatatggaatattctgcttcatcctcttattacaaagaaccagttcactgcctgttttaagaaaggtcttaagcagttttcatgtagtcattgttgctgagtcttttagcttccagakctgaaaagcgaagtttgaagaaggcatgagtgtacgtgatttctctgtgtttcgggttaggctttgagtcagggggacctggtggatttgggctcatatttttcttgctgtggcagagtgcagaagaccgacacttccttt

SEQ ID NO: 217826 - DNA, 634 bp, Homo sapiens
atatttgtgaggctgtattgtctttgtatacttcaatgaaaacaacatatcgaaacagatagaatgcagaagcagatttgagaattcggttgtcttctattaagtctaacaataaaaaaatgaaaatgttaaaggcaactttatttartattttgttttcatttgaaaaacatagttattgctcataaaattgtgtaatttattttgacatttttatacgttaataaacacattattttacaattctaagctttaatttctaacatagcaaatatcgaaagatataacctacaaaaaccacagctttctggaggtctcaataatttttaaaagttttgtaaaagtatcctgagaccatagactttgagaactggtctagaaaacctggaaaaaaatgcagaattgggttgcaggctatatacaaaacaactctactatctgttgactgtttcccaggctgagttaatatgtctcagtgtctttaccaataaaatgggtatattaaatattcatagggctgttttgccacttaaatggcttattgtcatataagaagtgttaacagctgttattatgaaccaaggccaggaataacaaaacatagacccagattacagtgaagtttattactatt

SEQ ID NO: 217827 - DNA, 634 bp, Homo sapiens
atatttgtgaggctgtattgtctttgtatacttcaatgaaaacaacatatcgaaacagatagaatgcagaagcagatttgagaattcggttgtcttctattaagtctaacaataaaaaaatgaaaatgttaaaggcaactttatttaatattttgttttcatttgaaaaacatagttattgctcataaaattgtgtaatttattttgacatttttatacgttaataaacacattattttacaattctaagctttaatttctaacatagcaaatatcgaaagatataacctacaaaaaccacagctttctggaggyctcaataatttttaaaagttttgtaaaagtatcctgagaccatagactttgagaactggtctagaaaacctggaaaaaaatgcagaattgggttgcaggctatatacaaaacaactctactatctgttgactgtttcccaggctgagttaatatgtctcagtgtctttaccaataaaatgggtatattaaatattcatagggctgttttgccacttaaatggcttattgtcatataagaagtgttaacagctgttattatgaaccaaggccaggaataacaaaacatagacccagattacagtgaagtttattactatt

SEQ ID NO: 217828 - DNA, 597 bp, Homo sapiens
tttacctcaataaccaacagtgaatctcttctctcctatagatgatttccatgtaataatcttgcatttccacccattaatcaagcagtaagcagtgtgctagcccctatgggcaagtgtcacgtgtcacacattgtttgtattccaatactttttatgkcagtgtaggcccttcatcaaatctgtgaatttagctgaagtcactgataataatgaattatttcagtagcgctatgactggttaaaaacaatcttgatcaaaacttgagagataaaagagcagctttgcactcttccctcatcccctcccttccatctacccattcaacaacctgccaatccatgtaacatgtattcagcattaatatggaaaacttcatttatttaattctaagatgtcagtgataatataatgcaccatcaatttaaccactgcttagaagagaggaagagggaaaaacattgaatagataataaacatgattcttataaaatggagcaacagtagtatacatttatctgcatgattgcaagcaatactcttctttagtatgaccatcaacattttagactaaaccttctttttaagcctagaaa

SEQ ID NO: 217829 - DNA, 597 bp, Homo sapiens
tttacctcaataaccaacagtgaatctcttctctcctatagatgatttccatgtaataatcttgcatttccacccattaatcaagcagtaagcagtgtgctagcccctatgggcaagtgtcacgtgtcacacattgtttgtattccaatactttttatgtcagtgtaggcccttcatcaaatctgtgaatttagctgaagtcactgayaataatgaattatttcagtagcgctatgactggttaaaaacaatcttgatcaaaacttgagagataaaagagcagctttgcactcttccctcatcccctcccttccatctacccattcaacaacctgccaatccatgtaacatgtattcagcattaatatggaaaacttcatttatttaattctaagatgtcagtgataatataatgcaccatcaatttaaccactgcttagaagagaggaagagggaaaaacattgaatagataataaacatgattcttataaaatggagcaacagtagtatacatttatctgcatgattgcaagcaatactcttctttagtatgaccatcaacattttagactaaaccttctttttaagcctagaaa

SEQ ID NO: 217830 - DNA, 533 bp, Homo sapiens
gcaatattaaaaagaactctaccatttattgattatcttctatgaattcagtgcttccaaatctttaatcttaaaagaaacctgacaaggtaaagaatttgtcatcttccaaatgaggaaagttaggttttggacaattaagtaacatacccaaggcaactcagttaagtcagtggtgtattgaggattagaagtcaaagctccatgatccccaaagttgtattgtttcctatacaccagagggcaaagagacaggcaaacagcagcttccaaggacatarataactgtttgcaattccttgccaagacgtaagatagagataactatttttatgaaaatcaagacttacatggagcttaattaatacaatgttagattttagaaattatttgacaaaaacctaatgaaagaatatcgaccaattttttgcatctatatttttcttttttaagagattattcttcccagtgaccttcttaagtaaccattagtaaataaggattacttgataagttaagcttagagaaaactt

SEQ ID NO: 217831 - DNA, 615 bp, Homo sapiens
tgaataaaatcagctttttttttcctacacagctgcagtggtaaaacaaaatgcacttacaaaaaaaaaaaaaaaaagaaaagaaagaaaaagaaaaagataaacaagaagtcccaggtccaaatcctactaagcagggtcacccgtcagcaggctgctgcagccacctaggtgatggcagacaagtggtgtggacgagkgtgatagcagcggagatgaagagaagcttgagaaatggaacttacttgagattaggaagtttgtgcttgggaaatccacaaattatctccctggactgaagctacatggaaaacaaaatcaaaaccagagaccatgtccaagtttaccacaaatgattactttgataggatctaaaatgtttgtaacccgaacaccatttcttgaaggcaaatctgatgagccgagagataatcaagagggtggctttgtgggcatagaatttgaataagggagctaactgactcggatgctgactagcactagggaacatagccagattcagcattctcacagtaagaatggtctggccagcaaggtcagaaatacttgaagtgcagtggccatacttctgtgcctcttcctccaggaatcatt

SEQ ID NO: 217832 - DNA, 500 bp, Homo sapiens
cattttaattatagctgctttaaaatctctgataattctaacatatttgttatcttggtattggcatctatagattgycatttttaattcagttatgagatattgctgattcttgatatgacaagtgatttttgatgagaacttggatatgtttgtaatattttctggaaccctggatcttatttaaaccttctgctgtacctggctttttctgacactgctacagtagatgaaggtggaggcaattcttcaatacttctaggtggaaaaaaaaagtctaaattccctacttggcctctattgtcacctgaggcaggggtgggtttctaccttatcatgtggttttcagagaccatggtggaatgggggtggccttgtaaccgtggggaaatagtgaaagatctgactcttcaataggcccctctgcttctgcttcctcccagcagagagggagaagaatgcttcatttatgtcggttgtagtggaagtccagtctgctc

SEQ ID NO: 217833 - DNA, 500 bp, Homo sapiens
cattttaattatagctgctttaaaatctctgataattctaacatatttgttatcttggtattggcatctatagattgtcatttttaattcagttatgagatattgctgattcttgatatgacaagtgatttttgatgagaacttggatatgtttgtaatattttctggaaccctggatcttatttaaaccttctgctgtacctggctttttctgacactgctacagtagatgaaggtggaggcaattcttcaatacttctaggtggaaaaaaaaagtctaaattccctacttggcctctattgtcacctgaggcaggggtgggtttctaccttatcatgtggttttcagagaccatggtggaatgggggtggccttgtaaccgtggggaaatagtgaaagatctgactcttcaataggcccctctgcttctgcttcctcccagcagagagggagaagaatgcttcrtttatgtcggttgtagtggaagtccagtctgctc

SEQ ID NO: 217834 - DNA, 556 bp, Homo sapiens
aatagctaatgcatataaaattgccagaggaatgcaaggcacacagtaaatacccaataaataccaatattcatgtctttcttcttgccttagaaatcctaggaggaaaaagaaatacatgtcatctaaatattatctttgtaagacttgaaatggttttgattacaaataacatcatttttactgcagctaatcaatcacatcttgagttcccataccagctttgtaggcagctctgatgggaccgtgggatctgtttcagaacacagaagctttctcttttctttttttttttttttcccagagttggagtcaayagtggttagtacttgaaagtctctgtggtgccacatgcctgctaagtgacaccaaatatactagcgacaggcttggcaaagcaactttgatttggagtgcctctgatgtttattcttggctctggatttggataatctgtggcaaaggtttctgtttcctcatgacccttttcccttcaatttacttcactttgggagggagatgtaacacaaatgaacctctgccagaggttttttga

SEQ ID NO: 217835 - DNA, 505 bp, Homo sapiens
gaattcagttattcaattgtttcaattatttcactgttcttaaataatactacaatgaacatccaatgaatatctatctatctatctatctatctatctatctatctatctatctatctatctacctagctacctacctacctacctatgtcacatattccctatttatttttttctaggataaatgtatagaaacaaaatttatatgtcaatcagtacacatattttgcattttgacataaaaccacattacccagctgaaaagttgtgccagctgaaattcctataagattgtatcaaagtccttaatttcttgtactcttgccagtactgattacttcatattatgttttagtgcttgtttatttctctgccttcctactagactgctattataaaggacaaggatgtatatttattatattttgatattcaattaggtttttaaaatatatatgaatacttagctaatgtktctgaaataaaagtgaatattttaaaatgc

SEQ ID NO: 217836 - DNA, 433 bp, Homo sapiens
ttaataagggtctattcacaatggtgggggcaaaataacagtgaaggagggctatacaaggagggcctgaagaagcaaaaggaaaaggcagagaggatggggtagagaggaccacccctttacaggagctaagaccttcggttaagggaagcaactagcctcaggtaccccaaccctactcctttctctaattccttgtggactctccctttggtgtggctccaactacaggaacacagagcccattgatataatctttayggagtattctcagtctttaactagggagcagaagagtagagcaggtatccagaggaacaaatcaaagatatccaccatagatgggaaattgaaatctacctatttttccccaaatgggtagttgtcccccatccatttatcaaatagtttattctttccttgatgggctgag

SEQ ID NO: 217837 - DNA, 597 bp, Homo sapiens
ataaacatgtaccaaaaactactggctgttgcttgttgcttgccaccttggccatccacctggggctaggctctggatctgttccgtgggcagctcctctccctgcctttgcctcaagcttggactccaggctgtccattagtacccacattatggttagggccaaacagcaatggttaataagatgttgaggacttggggagtgccccaaagtcctcacagagatcctacataactggactaagggttggctgctcttaggcccacgagcccaagctcatccttagaggttccctgctctcagctcctggcctgtctcacacaaggtgggcaccaggctgcctgcctaaccccagtggcctctttacttctccttcaaagawtacccctgtacaagtcccaggttgccccaatttccagacctaactcccctccacactagtttgcttagcattgtagttaagaaggtggacttccaggtcaagtgatctgagattgaagtctggcattaccacttactaatgacgttaggcaagtcattttagacacccagtgcctcaggtgcctcccccataacatgggggtggtaatattaat

SEQ ID NO: 217838 - DNA, 450 bp, Homo sapiens
taatcttttggtaaatagaggatttaatttaaatgtggtccacattatcttttttttgttcatgattagcaccwtttttgctccatttaagaagtttttgcctacctcaaagtcgtgaagatgttctcttgtatttccttccaaaagcttcatagtttttatctttcatatctagatattgaactgatctgtaattgaatttgtgtatggtgtgaggtaggagtcaatagtctttctgaatttttttttacaggactattgattgaagtgtccatctttttcccacttcattacagcattacttttgtcatacatcaagtgactgtacatctgtgggtctgtttcaggactcttctgttcttctgttccattgctgtatttgtctgccctgcaaataatacactgtctttattatggttcctttacaaaaagctttgatatctgggagtg

SEQ ID NO: 217839 - DNA, 529 bp, Homo sapiens
tggactacctcttaacagctgaacttgagcaagktacttgatccctctatacctcagcttcatttatttgcaaaaggagtactacctacctcataggcaggagaattaaacgagataaccagggattcttggccctggctgcatattggaatcacctgagcagcttttaaaacttacctgtcctttggccccacctctggaaattctgatctcatctgtctggggtggaattagggcacccaaatgattctaatgagcaaccagggctgcaaaccctggaactaaataaaatgtctactacagagtgcctagcacatcacaagcactcagtagatgctagttatcactgtcatactggttggtgataaaaccaaggcatgtgggccaacactgatccattggtaccaacatccagtaggtcccagttactgtgccatgcactgtgggtagatacaacggtgaacaagagtgagtctctaccttataagggtttcattaattctctagtttggtaaaaaaaaaggcataa

SEQ ID NO: 217840 - DNA, 538 bp, Homo sapiens
gatgatagtaatgcctacctcttggttggggggattaaatgagttaatatttgtgaagcacataggaaggtgcttaactgttaaataaacaataaataaataaaatatcttatgcttaactttctctttctgccttagatccaatatgctataagtcctgatgaattttcctaccatgtgtctcatagagtctctatttcccatgcccctttctcagttctgaccttcagagccgccgccatcatctcctcctcttgaagccttgccattgtgaagttagtcacttcacctctgcctcccatggctcctccattatcatgttccacattgatttccagtttcctttttctgtttatctcttttcacccactagcataggagctccttrctggaagtcatcgtttcttattcctctttgaagtttcagctcctaacatagtgcctggcacaaaatgagtgttcagcatatgtttttgagtgagtgataattaatcaggaataatctcatttcagctactggaattgcttttttgcagtc

SEQ ID NO: 217841 - DNA, 557 bp, Homo sapiens
ccttcaatgccttgataagaagtgtggatatcaccctggggaggggggatgaggcagtactgaagggcttgcgctaggacatttcatattcagatttatggtttaggaagatcaggctggaggttgtgtaattattgaattacagctttgycctaaaagccacatcagtaacaaaggcctgccttatttatatgaagactgatatttcacactagagcctggcctcaaatcccgacccagggcagagttctttccatccttgggtacacttaccctacctaattaccaaatagctttctgggtctttcaaatgttggtgtgtcaaccttctaacaaaaactctaataaactattacccaaattcatcttctatgcctattaccctcactggatcttgtccagttccatcttcctccgcactctgtctcttgggtttcagaattattaatagaactccaacctcaatgagaagaccctgagtcccagctccatcctatggccagcccctgccatccacctgctatgtgttactgaaatgccccagtcttgctacacac

SEQ ID NO: 217842 - DNA, 603 bp, Homo sapiens
agtaactttgctttcttaattgataaatgcatttactacatccaccatatttccttcttctatcagcctagtaacattttcatttaagaaaagtgggttaatctgctggggtttctttgcaaactcatggcagttcctagcaatcaattcttttttttttttttttttaacatacatatatactgtttcttggaaaatctgttgtaagagagactgctaattatgtactcaatataaattcttttcttccttactaacaaattcctgatcttggccagggagaggagccatgtgcctagctaaatcactatattccccacttgtttcagataccactggaccatctggcacagttttgaccagtgagataagagaaggaagttgacggatagagcctcggggagagtccctcagaagggaaagggaggctggagacagctgatgcatccaattatgcccytgtcctttatctttcttctgcctggaatatggacacttaggttggtgatagaggagccatgttgggaccatgaagtgacaatgagggaaaggccaagagaatctcagagatctcagtcctgacatccttgagcagttaaagca

SEQ ID NO: 217843 - DNA, 593 bp, Homo sapiens
gttttctctctgtcatgcaccacccttacagcctctccgttagccagattcagggatctgcatgtgttctccttccasacagatgataataggctgttctgttgattttgacatttcttacctgtctcagctcagtttggtctccaaccttccttacatgattccttatatatatttgcagattgaatgaatgtttctaagatatgaataaactaatgaattcaatcaaccatggaaattcaacaggggatgctcagtcgctcagagagtgcaggcatggcttgctgttttgtttctgctacatgtagagtgtgggctgactgcacttcttaactatatttgtgtagcaacattccctattcaaaaatgctggaaagtcttagcagaacatacttggaaaacaatctactacagaagtgagtgcctgaatttattatctcttggtccagccatcctctttgccaagctaaatccaaattccttctcttctaactatttgtcttctaactatttttctgggagcagaagatgattccatcaaacccagtcttgaccgtcttgacccagtcagtaacacactaactgatctatta

SEQ ID NO: 217844 - DNA, 593 bp, Homo sapiens
gttttctctctgtcatgcaccacccttacagcctctccgttagccagattcagggatctgcatgtgttctccttccagacagatgataatagsctgttctgttgattttgacatttcttacctgtctcagctcagtttggtctccaaccttccttacatgattccttatatatatttgcagattgaatgaatgtttctaagatatgaataaactaatgaattcaatcaaccatggaaattcaacaggggatgctcagtcgctcagagagtgcaggcatggcttgctgttttgtttctgctacatgtagagtgtgggctgactgcacttcttaactatatttgtgtagcaacattccctattcaaaaatgctggaaagtcttagcagaacatacttggaaaacaatctactacagaagtgagtgcctgaatttattatctcttggtccagccatcctctttgccaagctaaatccaaattccttctcttctaactatttgtcttctaactatttttctgggagcagaagatgattccatcaaacccagtcttgaccgtcttgacccagtcagtaacacactaactgatctatta

SEQ ID NO: 217845 - DNA, 608 bp, Homo sapiens
tatttgtgtagcaacattccctattcaaaaatgctggaaagtcttagcagaacatacttggaaaacaatctactacagaagtgagtgcctgaatttattatctcttggtccagccatcctctttgccaagctaaatccaaattccttctcttctaactatttgtcttctaactatttttctgggagcagaagatgattccatcaaacccagtcttgaccgtcttgacccagtcagtaacacactaactgatctattaagcattctctattttaaagctcctgacaatctctcatttcagaaggtacttattttaggcagggctctgtgttgtgtgaaacagagaagagatcagcacatttttcaggtgataaatgttttagggcccaagtttgttcaacctgctttattttgttgttgttctgttttgttttgttttaggcttttagcagcctgaagccatggtttttagtttatgtctctggtgataaatggaaaagagggatgaggaaggggcttcactggaccagccagaaacagaaactaagaacccatgackgtgttctctcccttggacacccctgtctaaggctctgggggtcatatgatc

SEQ ID NO: 217846 - DNA, 571 bp, Homo sapiens
gccatggaaactgctaaaccatcctacaatgcattggatagcatctcctataaaaaagaagtatctggccagatgcggkggctcacacctgtaatctcagcactttgagaggccaaggtgggcagatcatgaggtcaagaagtcgagaccatcgtggccaacatggtgaaaccctgtctctactaaaaatacaaaaattagctgggcatggtggcgtgcacctgcagtcccagctactcaggaggctgaggcaggagaatcgcttgaatttgggaggtggaggttgcagtgagccaagatcatgccactgcactccagcctgggtgacagagtgagattctgtctcaaaaaataaaaataaaaataaaaaataaaaaaaaatccaacccaaaatatcaatagctctgagattgagaaccaagtcttagaccaatcagaaaaccccctggagctggagtgggattaccttccttgaggcacatggccagggaggaacatgaatatatctgtatgaaatcagagttctataaagcaggagaaataaaaaggaggtagggagttggggagaaat

SEQ ID NO: 217847 - DNA, 571 bp, Homo sapiens
gccatggaaactgctaaaccatcctacaatgcattggatagcatctcctataaaaaagaagtatctggccagatgcggtggctcacayctgtaatctcagcactttgagaggccaaggtgggcagatcatgaggtcaagaagtcgagaccatcgtggccaacatggtgaaaccctgtctctactaaaaatacaaaaattagctgggcatggtggcgtgcacctgcagtcccagctactcaggaggctgaggcaggagaatcgcttgaatttgggaggtggaggttgcagtgagccaagatcatgccactgcactccagcctgggtgacagagtgagattctgtctcaaaaaataaaaataaaaataaaaaataaaaaaaaatccaacccaaaatatcaatagctctgagattgagaaccaagtcttagaccaatcagaaaaccccctggagctggagtgggattaccttccttgaggcacatggccagggaggaacatgaatatatctgtatgaaatcagagttctataaagcaggagaaataaaaaggaggtagggagttggggagaaat

SEQ ID NO: 217848 - DNA, 571 bp, Homo sapiens
gccatggaaactgctaaaccatcctacaatgcattggatagcatctcctataaaaaagaagtatctggccagatgcggtggctcacacctgtaatctcagcactttgagaggccaaggtgggcagatcatgaggtcaagaartcgagaccatcgtggccaacatggtgaaaccctgtctctactaaaaatacaaaaattagctgggcatggtggcgtgcacctgcagtcccagctactcaggaggctgaggcaggagaatcgcttgaatttgggaggtggaggttgcagtgagccaagatcatgccactgcactccagcctgggtgacagagtgagattctgtctcaaaaaataaaaataaaaataaaaaataaaaaaaaatccaacccaaaatatcaatagctctgagattgagaaccaagtcttagaccaatcagaaaaccccctggagctggagtgggattaccttccttgaggcacatggccagggaggaacatgaatatatctgtatgaaatcagagttctataaagcaggagaaataaaaaggaggtagggagttggggagaaat

SEQ ID NO: 217849 - DNA, 502 bp, Homo sapiens
acacttggagctcaggatgccctaatggaggctctggaacaagttagaacccagtagaaacttacgtgttytatttcagaaaccagagaaagcatgcagagctttcaccagagagtcaaagaccaccaaagggaaggtctgggtagggccgaatgacatacactcaggatcagctacataatttgcagggcccagtgcaaaatgaaaacatgaatttcattaaacaatgactaggactgtcaagatagtgacaacaggatgtgaaaccaagcacaggactctttgaagtgtgggtccctgtgcaattgatcagactgcacacccacgaggccaggcctgcacacacctcatatgcatgaacttatactcccaaaagcatctcagaatgcatttcaaattcagaaatcctgtgcagctcacacactgtcttgaaagggcctagaacattggcatggtaggttctaaataaatataaagcccttatattatcatcattgttttg

SEQ ID NO: 217850 - DNA, 500 bp, Homo sapiens
gttaaagtagcacctcctcctccttctttgcactggccagtccctgctctaaatgcagacggattcaagtcagttgagatgctgctaaactttaccagccagctggccagtgtctcattgagcatcartattgggactggttgtttactggatggtgagaaaagaaaagaacttttatctgaggaatgggagtccttttaattagcaggcccagagagatattaaaatgagacagcaatcacatcctacttcccccttgagctacgtattcttctcttgaaactgcttgctattactacaggctataaattaacctcataatgccacaccagacactatcagccacaacctattgcttaacaatgtctagccaatcactaatcaatgttatttctgtaaaccagtgagaattcctgacgaacaactttgtatcaatccactccttgtcccctgttttgcctttaaaaatccacttgtaactgctgctaatcaaagtgtat

SEQ ID NO: 217851 - DNA, 458 bp, Homo sapiens
atagcacaaaaatacagtactataatattaaaatatctgacacaactatatagctgttctgaaatcctttttattcaataccctacacctttcaaatgaatatgctggattctgattgtgaaataatccgagggtcaagagaacaagacaagcatagaacatttgatctggttaatataagttgaatatacctattytgaaaatctgaaatccaaaatattccaaaatctgaaactttttgaacaccaacatgatgccacacgtggaaattcctcatcttacctcaggtatacaaattttgtttcgtgcacaaaattatttaaaatattgaataaaattaccttcaggctatttgcatatggtatgtatgaaacataaattaatttcatgtttagacttgggtctcatccccaagatagctcattatttatttttttatttatttgagatggagtttc

SEQ ID NO: 217852 - DNA, 458 bp, Homo sapiens
atagcacaaaaatacagtactataatattaaaatatctgacacaactatatagctgttctgaaatcctttttattcaataccctacacctttcaaatgaatatgctggattctgattgtgaaataatccgagggtcaagagaacaagacaagcatagaacatttgatctggttaatataagttgaatatacctattttgaaaatctgaaatccaaaatattccaaaatctgaaactttttgaacaccaacatgatgccacacgtggaaattcctcaycttacctcaggtatacaaattttgtttcgtgcacaaaattatttaaaatattgaataaaattaccttcaggctatttgcatatggtatgtatgaaacataaattaatttcatgtttagacttgggtctcatccccaagatagctcattatttatttttttatttatttgagatggagtttc

SEQ ID NO: 217853 - DNA, 618 bp, Homo sapiens
ttggctcctgggccctgctgccagccatgacacacaccttttcccctactccagacctctgtggattccctttcctccaccctcccctaatcaatgcctgttgaaattttacacatccatcaaggatatttcaaacacttccgtcttcaaatttcccttgagccagatgtgatctcattttcctctgagtatccaaactattttgtttctatatatcctgagaaaacttacagtattttgacttgcatttgtatcagtacccttgtatttggttttcctattcttcagaccacaggttctctctgttcaatgccctcagcatgtaagaatcygctaataagatttttttaaaggacccctgggctccacctagaaccaagcacaaggtggggtagggggacaggtatgagtagtttgtaaaggcctgctattgatgctgatgtgcagccagggttgacaaaaattgtataattgtggtggaggtctaaactttatttttgtactcaatatatacacctgaattgaatttaagctgatgcgtgctttgacctctgtaaaatactttctggtccacaggctacactacacataatccttatagttactgaaatgatttac

SEQ ID NO: 217854 - DNA, 450 bp, Homo sapiens
gtgatctcattttcctctgagtatccaaactattttgtttctatatatcctgagaaaacttacagtattttgacttgcatttgtatcagtacccttgtatttggttttcctattcttcagaccacaggttctctctgttcaatgccctcagcatgtaagaatccgctaataagatttttttaaaggacccctgggctccacctagaaccaagcacaaggtggggtagggggacaggtatgagtagtttgtaaaggcctgctattgatgctgatgtgcagccagggttgacaaaaattgtataattgtggtggaggtctaaactttatttttgtactcaatatatacacctgaattgaatttaagctgatgcrtgctttgacctctgtaaaatactttctggtccacaggctacactacacataatccttatagttactgaaatgatttac

SEQ ID NO: 217855 - DNA, 524 bp, Homo sapiens
atatcttgaactccacctttcactcattaggaagtcctgcaatataaagctcacctataatattttctctatatttgctctcataacacattgatttatattgaactttctccttgttgctatttatacagtgtcagttctgctctatgagctgattttttttttctctgactacctgagaattgaggcagcagggccaagggggccgacttgccacgtgaggttttgtctttcccaccttgttaggctkcttctttgcctttctgcctggcaattcctgaaggtggtgttctgttttatctcttttttgtttttaaagtgtttgtgcaaagcatattattctgtttttactttgcttcttaattgagtatcggccatgtaacttattgtttgaagcagttacagcatcagggaatagtcccaaatggcacgatgagcctgatttttcctgatggctgtcactgtggaaagggacacccatgaggtcggtccaagccaaagaaaggagatgtataagtacagcc

SEQ ID NO: 217856 - DNA, 535 bp, Homo sapiens
tggaacacatccttctgctttcctggattatttctgcctgtagttatgragtctctaaaaaataattatgttgttggaacgcattaatctcattaatagagctattactgccaccagtgaataatgttgatgataggcttttaaaatcaacttttaaaactacttttaagagttttgtttacttacgtactgtctctacttccaaaaaaggatttgagatgccttagaacacaaagaccaaaacccattaacattgcatataaaatcaaagtcaaatagcaacaacgaaatggcatcccaaaacccagactgagcaaaacgacctcatttgagcacaacatttaattctggtagctcctattgctcaattacaggaacgtaataggtcatttcgggtgataaatgctattctggtgctgagaacaaagaggaatttatcatgtgaatttttctttgcaattcaccaggttacatggtgaatacggtctttgacagcagctctcaggaaccacgcaaaggcatctttaagggctag

SEQ ID NO: 217857 - DNA, 486 bp, Homo sapiens
ttcttttgatctcactaacaatttttttcaatttgtttttcagtatccttttgttctactctaatataggtttcttttccaaacttcatcctaggccattttctctttttagcaaatatctcctttatgggtgggctcagtctttctaatatatrtgtgtgtgtgtgtgtgtgtgtgtgtgtgtgtgtgtgtgtgtgtatatatgtgtatatatatatgtgtgtgtatatatatatatatatatatatatatatgctaatggcactcaagtgtatatcacatagagcttacttttgagaaatgtgtaccttgcatctcacccgagtactttgaagcatctacacttcatatgtaccacacggaaattatcattttcctacattattgaagctctacctgatccagttttttcccatatcggtgacatattttacctacttaaggtccaagctgtaaaactgaaaatcattttggtagtttcctctc

SEQ ID NO: 217858 - DNA, 355 bp, Homo sapiens
cagtgaacaaaaccaaaatcstcttcttggtaaatgaatttataaattatatagtatgatagaaagctacatattttatagaaaatcaaagtataaaaataattttaaataggctagtaggtagtctattgaaaagaaaacatttggataagaattatattagtgatacaggggatctatattttagacagaggaaatactggagtcaggtattctaggagcacatattctatgagaactgagtcaggtattctaggagcagatattctatgagaatggaaaattagatccatggcctggctaataggccagtgtaagaatattggattttacactaaataaattggatgttggt

SEQ ID NO: 217859 - DNA, 518 bp, Homo sapiens
tgatttaaattcaaaataccccaagtagctagtgtctaatctattggaacagcacagctctaggcccaagaacaatagctcttcgtgtgggaattatttagccacatttgaggaaaagaagagagatcagtgttagtagcttacaggaagcatggttgaaattgtaccaacatgggagtttggaaaggaacaggaaacatgcagagtgatctaagccatgttgagtagtaaggtttcaatcaaattaaggtagccattgatgtttttaaaattaattttattaaggtggarggtacataaaataatgttaatttctgtctcatgatagtatatattttcaagaagcagaaaccactctgactagtttaagcagaaatggtagaaatatatggagatgccgacttgccatgaggctaatgaagcttgttttagaggctttcatttgtactggttttaaggcttaagagaggacgttgcattatattctcttggttaaaaatttccaaatgaagatattt

SEQ ID NO: 217860 - DNA, 590 bp, Homo sapiens
ttatgtaaaacacatgttaagtgttatgtgtcatcgtaactagactgagctaaacttttgagaagttcctatcttatatgtttctaatgtggacacattagaagattgttaggagaaggttcttgggagatttggagggtaaatggaaggtagcaaccattttctctctctctctcgtgtgtgttctctgtgtaagtcacacacacacacagacacacacgcrtgtttgttgatctgatgactcatttcaatgccatgaagcagtagctggatgtgtaactgctctacctattcttgtgttttccttcagcatgtttgactccttggaaaggttcagttttctaacacaaggcccctgcttctgcatgatactcttaatgccaaagtcaaaggcaagaagaatggctggtttcagtttagggttccagtttattctgtcattgctgcctgcctttgatattcctccttcacatctatcagctgcttaccctgcaacttcaagattacacatcagatgtggatacaaaaagcattataaaggctttttaacaacctcctgtgattgtatgaggctgatttcctgcaacaaa

SEQ ID NO: 217861 - DNA, 388 bp, Homo sapiens
ctgatgtttaaaaagtggttaatattttattttctgactttcatgttactgaaatagcacctttctaaatttactgtttctgctgacggcaactatcaattttagttgaatgtgaactgatgcttttaggattattgccatttcctttatttcaaaccaatgaaaacttaaaagaagtatcatctctctccttcttagagtattctgggccaattgacttatccccttagctctgttcttataaatacatttacttattaacatccacaattgatgtctcccagatatctcaaattttacatgcacaaagtagatacttgatttcaaaatttcaccaracctcacttttactaatttccatctctgtcaattttacattttctacatt

SEQ ID NO: 217862 - DNA, 365 bp, Homo sapiens
gcatcctttagctcagtcaagttgacacataaaattagccatcacagacagctcagaataatgactctaatttgaaaatcagacacattgaagatgttaaaattttaatctcaccatcctaagtccatttcccctccaaccttgatagagwtgatcttttctagatcataagacacagtaaaaagataattcaacagaggaaaaaatgtaacttttgtataaatataaaatgtgaacacaggtcaaatactttatttaactaattcaagaatgagggaactagaaaggcatcaaaaataatctgattatattaatatataggcaatgaagaatgctgaaatgaatttaatacatacaaaactgcc

SEQ ID NO: 217863 - DNA, 506 bp, Homo sapiens
ttattactcttttctttggtcggcttatgctcatgcgaaactatattctcaaaattaccaggactctgaacctattgggcaaaattgcttttattcaattcagcaccattttctaaaattgttagatgtaatgcaatarcatcttcctggcatgccacttgaaattttttttacataaaagcaagcatggctataataggaagtgagatattttcaatatcaatatcttgtttttcttttttcaaaataaaacatgttctttcaaagatgttttaaactttcacctgggcatgtgggaagagcacaatgctatggattccctctgttacatgtttactcctttcttctctcattagagatgcctaaataggattgcagcaccctccgacttgtgatttgttctctctctctcccactcacactcactcacacacacatacacacatgcacacaaacaggcccatcctgttgcagaccacttagccatggtgagagttgcctgcctt

SEQ ID NO: 217864 - DNA, 495 bp, Homo sapiens
attataaattacctagactgtgatagtccatcaatgaagttcatagctctactaatgtaagaaaatatatttgattagcacacaattacatcctgtttacatccagtcaacacataattacatcctgtttaaaaagaaactttttattgttaacaaagaaatatttgtttaaaattatttctaattttcatggctataattcctgaaatcataaacatctcttctgaatctgtggggtgtgttgtgaatataatctaaaacaacaccttacctttagctatgggatctctaagtgattactgaggctgagacaggtgaaatgatgtgatccacgtcgcctgacaccagacccagctatttttaattggttccaagttgctttatccatcctaatgattcaaaaggaagaatccaaaataagactgaaggaaaaatatttcygagaagtcatattaaattaaatggacttattttttaaaataatttcagatgtgg

SEQ ID NO: 217865 - DNA, 547 bp, Homo sapiens
ggaatttctagatcatcaggtagttctagttttaattttttgagaaaccttcataatgttttccataaaaattttatcagcttaaattcccatcagtaatgtacaagggttcccttttttctacacccttgccaacgcttggtatgtcttttgttttttataayagccatcctaacagatgcgaagttatatcttatatggttttgatttgcattttcctgataattggtgatgtggagcaccttttcatatgcctgttggccatttgtatgtcttctttgaaaaaatgtctactcagatcttttatccattttttaattgggttggtttttttctattgagttatataagtttcttatttattttggatactaaccttttgtctgatatatggtttgcaaatattgccttctattctgcagattgccttttcactctatagattgttacctttgctgtgctgaagatttttagtttgatgcaatctcatttgtctacttttgcttatcttgcctgtgcttttggtctcatattcaaaaaaaaaaaa

SEQ ID NO: 217866 - DNA, 547 bp, Homo sapiens
ggaatttctagatcatcaggtagttctagttttaattttttgagaaaccttcataatgttttccataaaaattttatcagcttaaattcccatcagtaatgtacaagggttcccttttttctacacccttgccaacgcttggtatgtcttttgttttttataatagccatcctaacagatgygaagttatatcttatatggttttgatttgcattttcctgataattggtgatgtggagcaccttttcatatgcctgttggccatttgtatgtcttctttgaaaaaatgtctactcagatcttttatccattttttaattgggttggtttttttctattgagttatataagtttcttatttattttggatactaaccttttgtctgatatatggtttgcaaatattgccttctattctgcagattgccttttcactctatagattgttacctttgctgtgctgaagatttttagtttgatgcaatctcatttgtctacttttgcttatcttgcctgtgcttttggtctcatattcaaaaaaaaaaaa

SEQ ID NO: 217867 - DNA, 555 bp, Homo sapiens
gtgcctgctcttcctttctgatgccatctctcacctttggcaggatccacagaggaatggaatatgcttttggcactatycccaattgaaaagtcatggaatcgacctaggtgtctatcagtggtggactggagaaggaaaaatgtggtatgtatacaccatagaatactatgcagccatcggaaagaatgacgtcatgtccttcacagcaacatggatagagctggaggacattagtataagtgaaataacttagaaacagaaaaccaaataccacatgttcccacttataagtggaagctaaacaatgggtacacatgaacatgggatggagatagatattgggaaagccaaaaggggagagctggggaagggagtgaaggttgaaaaactacctactgggtactgtgttcactatttgggtgatgtgcacattagaagcccaaacctcatcattatgcaatatatccatgtaacagacctgcacatgtacctcagaacctaaatttttttaatgtgcttttgagcacttattgcatttattggataaaggct

SEQ ID NO: 217868 - DNA, 555 bp, Homo sapiens
gtgcctgctcttcctttctgatgccatctctcacctttggcaggatccacagaggaatggaatatgcttttggcactattcccaattgaaaagtcatggaatcgacctaggtgtctatcagtggtggactggagaaggaaaaatgtggtatgtatacrccatagaatactatgcagccatcggaaagaatgacgtcatgtccttcacagcaacatggatagagctggaggacattagtataagtgaaataacttagaaacagaaaaccaaataccacatgttcccacttataagtggaagctaaacaatgggtacacatgaacatgggatggagatagatattgggaaagccaaaaggggagagctggggaagggagtgaaggttgaaaaactacctactgggtactgtgttcactatttgggtgatgtgcacattagaagcccaaacctcatcattatgcaatatatccatgtaacagacctgcacatgtacctcagaacctaaatttttttaatgtgcttttgagcacttattgcatttattggataaaggct

SEQ ID NO: 217869 - DNA, 555 bp, Homo sapiens
gtgcctgctcttcctttctgatgccatctctcacctttggcaggatccacagaggaatggaatatgcttttggcactattcccaattgaaaagtcatggaatcgacctaggtgtctatcagtggtggactggagaaggaaaaatgtggtatgtatacaccatagaatactatgcagccatcggaaakaatgacgtcatgtccttcacagcaacatggatagagctggaggacattagtataagtgaaataacttagaaacagaaaaccaaataccacatgttcccacttataagtggaagctaaacaatgggtacacatgaacatgggatggagatagatattgggaaagccaaaaggggagagctggggaagggagtgaaggttgaaaaactacctactgggtactgtgttcactatttgggtgatgtgcacattagaagcccaaacctcatcattatgcaatatatccatgtaacagacctgcacatgtacctcagaacctaaatttttttaatgtgcttttgagcacttattgcatttattggataaaggct

SEQ ID NO: 217870 - DNA, 589 bp, Homo sapiens
tcgccattgctccacttaagtgtggaagctttttttttttttttttggagacggagtcttgctctgtcgtccaggctggagtgcagtggcacgatctcggctcactgcaagctccgcctcccaggttcatgccattctcctgcctcagcctcccgagtagctgggactacaggcgccccgccaccaccccggctaattttttctatttttagtagagacggggtttcaccgtattagctaggatggtctcgatctcctgacctcgtgatccgcccaccttggcctctcaaagtgctgggattacaggtgtgagccaccgcrcccagaggaaacatttttttaagtaactttatgtatgggaaaatatgcaacatcaggtcatttggcatccacaaatgaaacaaatttacaatacaaagttatccacctcctcaattcatcaatttactgttgtatctccagatcagttctttcaattataaccaaatatccataaagactggtattacatattgacagcacttcgagtttgctgtcttaaatttgtaacggacaaaggtaggtagaaacggcaagaagcttcttaact

SEQ ID NO: 217871 - DNA, 535 bp, Homo sapiens
ggctaatttttgtatttttagtagagactgggttttgcaatgttggctaggctggtctcggaatcctgaccttagatgatctgcccatctcagcctcccgaagtgctgggattacaggcgtgagccacacgcccagcctaccctggtaaatcttaagctcacaggagacagggtaggagggcatgaacacaggcaatgtaatatgactctgctggtagttaggaactgttctctaagcctcaacttcctcctttgtaaattagaaataattattttttttagctcatagattcactatgagaattgaattcaataatatggttgaaaaaytttaatgttttattcaaatgtaacaaattaataaatgggtcctagaggtgggtggcagagggtcataagcacaaaaaactaacatgtattaagatgggataggagcgttgatataagtaaatgaatacataaatacataatataagaaatgtcagttactgaagttctgcctgaaattactcctgaaaaaacagtgtagatattg

SEQ ID NO: 217872 - DNA, 590 bp, Homo sapiens
tgttacattcaggcagaacaggctaactacagttaagtgtttccaattattcttgttcttcctgcccatttcatttaccttttgatgccttttatctcccagcaacatgcaaacctataaggcagaggatgtggtaaatatttcttgagtagcttgtcaggttcacttttgaagaagaccttaaaaacaactatgccttattggtatgcaactatgtcaaactgagtggttttaatttttttcttttactactgaataccaacaaaagtgtctggtgctattagcaacaaattatgctgcctataacttataattagaagaatattagcattttcactcctkgcttctaaccaaaatatttgattcctaagttattagtataataatattgaaaattagtatggtataattggagtacagtgacgtgttcacattttaaaaatcctcatcctttatatattccctagataaaattttctgcagagtctccagtaattcatgcatatgaccccatgtaaaatttccttggcagggaaattcagagtttaaaatggctttttcctatagaaaggtataaatttaaaccttgt

SEQ ID NO: 217873 - DNA, 590 bp, Homo sapiens
tgttacattcaggcagaacaggctaactacagttaagtgtttccaattattcttgttcttcctgcccatttcatttaccttttgatgccttttatctcccagcaacatgcaaacctataaggcagaggatgtggtaaatatttcttgagtagcttgtcaggttcacttttgaagaagaccttaaaaacaactatgccttattggtatgcaactatgtcaaactgagtggttttaatttttttcttttactactgaataccaacaaaagtgtctggtgctattagcaacaaattatgctgcctataacttataattagaagaatattagcattttcactcctggcttctaaccaaaatatttgattcctaagttattagtataataatattgaaaattagtatggtataattggagtacagtgacrtgttcacattttaaaaatcctcatcctttatatattccctagataaaattttctgcagagtctccagtaattcatgcatatgaccccatgtaaaatttccttggcagggaaattcagagtttaaaatggctttttcctatagaaaggtataaatttaaaccttgt

SEQ ID NO: 217874 - DNA, 544 bp, Homo sapiens
taagggtgttttggctgagattaacatttaaattgttcgactttgagtaaaacagattaccctccataatgtggtgaacctcattcaatcgctgttgaaggccttagtagaaaaagactgacattccccaggcaaaaaggaattctgccaacagactgcctttgcattcmaagagcaactcttccctttttctccagcttaccagcctacatcattggctttggggctcatcaaacttccacaatcacagaagcgaattccttaaaataaatttgtgctgtctctttttctctctcacactctcgcactctatgattatatcacataccccttcttggttctggaagaccctgactaatacagataggtattatttatttatttatagatgagaaaactgagaattttagtcaaatttgtcttgaataacttggaatctctgactctttttttttttttttttttagtatttcttaaattccttctttactgttcaaagcaactgaactacaagatccatagagaatcagacacaccatatagt

SEQ ID NO: 217875 - DNA, 557 bp, Homo sapiens
taagggtgttttggctgagattaacatttaaattgttcgactttgagtaaaacagattaccctccataatgtggtgaacctcattcaatcgctgttgaaggccttagtagaaaaagactgacattccccaggcaaaaaggaattctgccaacagactgcctttgcattccaagagcaactcttccctttttctccagcttaccagcctacatcattggctttggggctcatcaaacytccacaatcacagaagcgaattccttaaaataaatttgtgctgtctctttttctctctcacactctcgcactctatgattatatcacataccccttcttggttctggaagaccctgactaatacagataggtattatttatttatttatagatgagaaaactgagaattttagtcaaatttgtcttgaataacttggaatctctgactctttttttttttttttttttagtatttcttaaattccttctttactgttcaaagcaactgaactacaagatccatagagaatcagacacaccatatagttgagggcacccat

SEQ ID NO: 217876 - DNA, 594 bp, Homo sapiens
tggggttaatgagcaaagcttgttagggggacaaatataattcacactgttgtgacatcaagtgagaaaaggaaacaggtcagaataaagccagaggaaagcagcagctgtcattcagaggcttgtcaggtatttgacttttttctcgtggtaacaaagccattaattaaaggaatttaagctgagaaatcatatcattagatttttacattaagatgatcctttcagatgcagtgcagagaggagggagataaaactggttaacagggaaatcaattaagagactgtagatgaacaagagrtgatggcagccaaaagagaaacacagtagcccccctcatctgtggtttctttttccacagttcagttactcatggtcaatcttggtctgaaaatgttaaatgaaaacttctagaaataaaaaaatttatattttaaagaagtgtggtactctgggtagatggtaaaatctcatgccatcccagtctgtcccacccaggacactaatcatctctttgtccagtggatctatgctgttgatgctccccacccattagtcacttaggaaccatctcagttctcagaccgactctc

SEQ ID NO: 217877 - DNA, 558 bp, Homo sapiens
tcttatttgtttaaaaaagcaaaactattctgaaatgcaacactgccctttgttacccttcagaaagaatcaagataggctgagcattagtgatgctatttatttttacataggaagccacagaagaagtacacgtgaaaaggatacccttcaggaaaggatatcaaagttagccaatgcatgggaatggggcagaccacggagggggaactgakattccatttacatggcccccaaactaaagcaaaccactggctccaagactcaacagagtttggcactcattgaagtgggcaaagagaccatttgctcaaaggaaatatgaatggattgagtgtataaaaatattaaggcagtgcatagtggctcacatttgtaatcccagtactttgggaggccaaggcaggaggatcacttgaggccagaaatttgacaccagcctgggtaaaatgtgagactccatctctaaagtgtgttttaaattagctgggtgtgatcacaattgcctatagtcccagctacttgggaggctgaggtaaaagaatttcttcagctcat

SEQ ID NO: 217878 - DNA, 511 bp, Homo sapiens
gttctcacctaatggaatttgcttaaaaatatccactgaggtttttttgtttaacagtttctcaagattatcaattatatttttaggttaaaatataattttataagcataattgtagtcatttttaaagggagagatgcttttaacttgttaggacttttagccagtcctaacatgttaaaatttttctgtggttttgcctgaatactatgaagactacttatttacagaaaaagagagtgaacaagagagagcagtctatactgcctaaaagtgatattttgagtgaactttatttttrtctcgaaatctttagtgaaatattagtaactgttggttactaaccagttcatgtattagctatttcaggaaggtgattactttagatttacattgggaattagagaataaaggccttctgtaataaaatcatcaccatcatgaattgtctccaaaattttacattgaagatgttcatatggagtatctgcttaagttggaatacacttct

SEQ ID NO: 217879 - DNA, 564 bp, Homo sapiens
cagaagggatattaaacaccacgtaatgctgtaaggaaatgatccacaaaagaaggtatagttaagctaagagaattaggagtttatcaggtcggtgagagtaaggacagcagtattccaggttggtaaactttagaaaggcctggagatgtcagcacatactaggttctaggattataagtaccagtggtctcagtaagaacagcatgtttcagaggcaactgagttataattataacagcttatattcatatatatgcctcatacttttaaaaatgatttacatatattaactcattcaattgtattatatctgttggctttttctgcattaaaaaaaatccaaccccataacttagtaacttaagacaatcatttactattgctcttgagtctaggaatctgcagggtgattsttcccctatggggcaggcttgggtcatcttggctggatttgctccttcatctgcgctcagctgttcatctgggatggcctcattcacatgtttggcaattgtttttcttttggctggggcagtgcagatggctggggcagtggagatg

SEQ ID NO: 217880 - DNA, 564 bp, Homo sapiens
cagaagggatattaaacaccacgtaatgctgtaaggaaatgatccacaaaagaaggtatagttaagctaagagaattaggagtttatcaggtcggtgagagtaaggacagcagtattccaggttggtaaactttagaaaggcctggagatgtcagcacatactaggttctaggattataagtaccagtggtctcagtaagaacagcatgtttcagaggcaactgagttataattataacagcttatattcatatatatgcctcatacttttaaaaatgatttacatatattaactcattcaattgtattatatctgttggctttttctgcattaaaaaaaatccaaccccataacttagtaacttaagacaatcatttactattgctcttgagtctaggaatctgcagggtgattgttcccctatggggcaggcttgggtcatcttggctggatttgctccttcatctgcgctcagctgttcatctgggatggcctcattcacatgtttggcaattgtttttcttttggctggggcagtgsagatggctggggcagtggagatg

SEQ ID NO: 217881 - DNA, 623 bp, Homo sapiens
tggggagtagttactgcatctagagtaataatatatagcaccctggagtccacggctggaaaataaaacacgaggcagcagcctcagctcaaatctgcatggcgtctacttctgatggaaccaattcttttccaaacaactattatggtagctcacgtccagccagcattcacttctgcccwggaaagtactgcaatgtgggtaaaatctgtgtccactccccaatccccttccatcctaactaccagccagccactgccaaccacctcctctcccttctctgaagattcttccttggtgtgtgaattctcattcctttcagaaatccacagccttttctttaatacactggcttttcttctctctgccttctccaccccactgttaggaattacattatcgaaaggactggagtttagagctcaacaccacagaacaaaccaacacttaactgctcccaaggacatttatctttttcctttttccatggaatataaggttttgttttctgttgaatgcaccttcccagacagacctaaacagccagggggaagagtacttctccagataacgggctttggtcttcttggtgctgccctgaatcacctgtctctcaaaccttc

SEQ ID NO: 217882 - DNA, 623 bp, Homo sapiens
tggggagtagttactgcatctagagtaataatatatagcaccctggagtccacggctggaaaataaaacacgaggcagcagcctcagctcaaatctgcatggcgtctacttctgatggaaccaattcttttccaaacaactattatggtagctcacgtccagccagcattcacttctgcccaggaaagtactgcaatgtgggtaaaatctgtgtccactccccaatccccttccatcctaacyaccagccagccactgccaaccacctcctctcccttctctgaagattcttccttggtgtgtgaattctcattcctttcagaaatccacagccttttctttaatacactggcttttcttctctctgccttctccaccccactgttaggaattacattatcgaaaggactggagtttagagctcaacaccacagaacaaaccaacacttaactgctcccaaggacatttatctttttcctttttccatggaatataaggttttgttttctgttgaatgcaccttcccagacagacctaaacagccagggggaagagtacttctccagataacgggctttggtcttcttggtgctgccctgaatcacctgtctctcaaaccttc

SEQ ID NO: 217883 - DNA, 626 bp, Homo sapiens
agcatctagtgatgattctttccttaaatagttaatactgtgttttttgccaaatggtgacatttaaattttattattctaggctaggcatggtgacttacagctgtagtcccagcactttgggaggctgaggtgggaggatygcttgatgtcaggagtttgagaccagcctggccaacatggcaacactctgcctctaataaaaaacacaaaaattagacaggcgtctcaggcctccaagtagctaagcttgggagaactgcttgaacccaggaggcagaggctgcactgagctgaggtcatgccactgcacttcagcctgggtgacagagcgagactttgtctcaaaaatgaactaattagacaaataaataaattttcattattctttctatatttgtcacttggtactctatggtaaagacatgctttctcttatactttatttctttatattagcatgagctcatggattattatgcttttggttcagttttcattgctgtcatgtattttgttggtcaaaattatcccatatttgcctgctatgaggcccctggaatgagctgctgtcttcttttgatgtccccatcattttctaaagcacttttcctattttatgatac

SEQ ID NO: 217884 - DNA, 626 bp, Homo sapiens
agcatctagtgatgattctttccttaaatagttaatactgtgttttttgccaaatggtgacatttaaattttattattctaggctaggcatggtgacttacagctgtagtcccagcactttgggaggctgaggtgggaggatcgcttgakgtcaggagtttgagaccagcctggccaacatggcaacactctgcctctaataaaaaacacaaaaattagacaggcgtctcaggcctccaagtagctaagcttgggagaactgcttgaacccaggaggcagaggctgcactgagctgaggtcatgccactgcacttcagcctgggtgacagagcgagactttgtctcaaaaatgaactaattagacaaataaataaattttcattattctttctatatttgtcacttggtactctatggtaaagacatgctttctcttatactttatttctttatattagcatgagctcatggattattatgcttttggttcagttttcattgctgtcatgtattttgttggtcaaaattatcccatatttgcctgctatgaggcccctggaatgagctgctgtcttcttttgatgtccccatcattttctaaagcacttttcctattttatgatac

SEQ ID NO: 217885 - DNA, 454 bp, Homo sapiens
gatatctacctgaacaggtttttaatgcaaatgtaaatgctctagtctggaggagaaagtaccacctaggacatttattagtaaagaagagaagaaaktaccaggacttaaggcaggaggcatacgctaaccgtgctgttttgtgcaaatgcagttgagtttaaaatttgcattgcccttatttttaaagctgctaactcctgagccttgataggaaaagggaaacaccagctgccagtctttgagttacataacaagaaggcctggacaacaaaaatcctcttggatttatttcattgatgctttatccccgaagtcaggaagtaccctgccagtaagagactgtcttttaaagttcttttaatactggacaatgctcctgaacacccagaaccccatgtattcaacacaaaggtatctaagtagcctacgtactcccaaatacaatgtctct

SEQ ID NO: 217886 - DNA, 358 bp, Homo sapiens
agaagaaattaccaggacttaaggcaggagkcatacgctaaccgtgctgttttgtgcaaatgcagttgagtttaaaatttgcattgcccttatttttaaagctgctaactcctgagccttgataggaaaagggaaacaccagctgccagtctttgagttacataacaagaaggcctggacaacaaaaatcctcttggatttatttcattgatgctttatccccgaagtcaggaagtaccctgccagtaagagactgtcttttaaagttcttttaatactggacaatgctcctgaacacccagaaccccatgtattcaacacaaaggtatctaagtagcctacgtactcccaaatacaa

SEQ ID NO: 217887 - DNA, 570 bp, Homo sapiens
aggaaatgtttccttttaacctaatattcctcataaggaatagcagtcacactgcagaaggtctttcctttcgccttgggtaactggcctaataaacagattttatgccttattgaaataattcctatcattattactaagttttgtttgcttagaaaaaaacattcatttggctagatgtggtggctcatacctacaatcccagcaatttgggaggccgaggtggatggatcacctgaggtcaagagttcaagaccagcctgaccaatatggtgaaaccccatctctactaaaaatacaaaaattagccaggcatggtggtgtgtgcctgtagtcccaactcctcaggaggcagaggcaggagaattgcttgaacctaggaggcagaggttgcagtgagctgagatcacaccactgcactccagcctgggtgacagagagagactccatctcaaaaatgttaattttttaaattcaggrtactacatccctgtaactttctgtatgtgtttgtaaagtcattgtgtcattaagttacaggactttgactcatgagtctaaaaggacacc

SEQ ID NO: 217888 - DNA, 569 bp, Homo sapiens
aagtgtatttatctctgtggtttacaataactttacccttcaccttttatttttggtgaaaaacctggttagtaagcaattttaattatgttccagctgtggatcctaggacccagacagaagtgcagataaagtctgacttttcagcttctagctccatgagtcccaggccttacctatgtgtaaagcaggcagtatatgaccttgsaacatttagcaaacctggtatctaaattatatgatttagacaacctatttgcattttgatgacacttgccttttactaataatccttcagactatttttatttcttcaagtcatgtgaactaaaacatttgattgaagcacttatttttctttaagccaatcaatcagagctctttttatagacatcacacacagcacatatatagcaacactaagaaacagaagattcagcacttgtaagatttttcacttggtagtctcttaattggattactggctttagggtggagcccttgaaggaacagggctatgtagcatacctaataaacagacgcagctgaaggcaaaggcagatccctaa

SEQ ID NO: 217889 - DNA, 481 bp, Homo sapiens
atggttccagcagagtctatgaaggggagtattgamcaagtcatcggggtcaggcaacgatgtccatggatggaaagaataaactaaaatcttgagtcaattgtgtaaaaaggagggagccataaaaagcatcaatgatgaaaacaaaaaaaccctgcataggtgttaatcgtggtaggactaataaaagtatacgcaaacaatcctctgtcagagatacacatgctccccaatggactgtacagatgacaaggtgaatgtcaagcctgagtgaggataaactctcatccacaaaaagggtggatgcttcacagacctgtctactgcaaaagaggcctcagtcctgaagcccatattcatgggtttgcagcctccaagaccatgagctgggtttccttttccatttatgtcaaagagaaatggtgtatctaggtgtccgtgtagttctgcaagtaggtgatttagtggattttggctgtgc

SEQ ID NO: 217890 - DNA, 481 bp, Homo sapiens
atggttccagcagagtctatgaaggggagtattgaacaagtcatcggggtcaggcaacgatgtccatggatggaaagaataaactaaaatcttgagtcaattgtgtaaaaaggagggagccataaaaagcatcaatgatgaaaacaaaaaaaccctgcataggtgttaatcgtggtaggactaataaaagtatacgcaaacaatcctctgtcagagatacacatgctccccaatggactgtacagatgacaaggtgaatgtcaagcytgagtgaggataaactctcatccacaaaaagggtggatgcttcacagacctgtctactgcaaaagaggcctcagtcctgaagcccatattcatgggtttgcagcctccaagaccatgagctgggtttccttttccatttatgtcaaagagaaatggtgtatctaggtgtccgtgtagttctgcaagtaggtgatttagtggattttggctgtgc

SEQ ID NO: 217891 - DNA, 481 bp, Homo sapiens
atggttccagcagagtctatgaaggggagtattgaacaagtcatcggggtcaggcaacgatgtccatggatggaaagaataaactaaaatcttgagtcaattgtgtaaaaaggagggagccataaaaagcatcaatgatgaaaacaaaaaaaccctgcataggtgttaatcgtggtaggactaataaaagtatacgcaaacaatcctctgtcagagatacacatgctccccaatggactgtacagatgacaaggtgaatgtcaagcctgagtgaggataaactctcatccacaaaaagggtggatgcttcacagacctgtctactgcaaaagaggcytcagtcctgaagcccatattcatgggtttgcagcctccaagaccatgagctgggtttccttttccatttatgtcaaagagaaatggtgtatctaggtgtccgtgtagttctgcaagtaggtgatttagtggattttggctgtgc

SEQ ID NO: 217892 - DNA, 615 bp, Homo sapiens
gtaaggtcataaactgtttctttggcttttgaaaattgtttaacttacctgctttccagctaggtaaggtctgggaacatgtggaattggccacaccctagctatgctgcaaatagtcaaaacttatcagaatgtaatttaccaggttttaccttaaaattcttcattacaacatgaaattaagaccactagaarcagttttacatgcaagatatgtaagtagaatgtgtttttttttccttgtaagaggctataaaaggtttttacatctttaagatttctgagtcatcattttggcaaaataaataatttatggtaatctggaattccaaaatcaaacttcagtttcaaaattgtctttcctaattcctggctttctagatgaatcagagggcccctgaaaacatcttgaaaagaggtaaacaggattatttgatgtgtttaggtacatgggccaaaatgatgttcaatcttctttaggttatatttttgtgaataatactaatatatattcctaaattgtatgggatttctaaaattctaatgtctaagtatatgctatcaattataattatggttattatgttaagttattgtaaaccacaaaaataatga

SEQ ID NO: 217893 - DNA, 615 bp, Homo sapiens
gtaaggtcataaactgtttctttggcttttgaaaattgtttaacttacctgctttccagctaggtaaggtctgggaacatgtggaattggccacaccctagctatgctgcaaatagtcaaaacttatcagaatgtaatttaccaggttttaccttaaaattcttcattacaacatgaaattaagaccactagaaacagttttacatgcaagatatgtaagtagaatgtgtttttttttccttgtaagaggctataaaaggtttttacatctttaagatttctgagtcatcattttggcaaaataaataatttatggtaatctggaattccaaaatcaaacttcagtttcaaaattgtctttcctaattcctggctttctagatgaatcagagggcccctgaaaacatcttgaaaagaggtaaacaggattatttgatgtgtttaggtacatgrgccaaaatgatgttcaatcttctttaggttatatttttgtgaataatactaatatatattcctaaattgtatgggatttctaaaattctaatgtctaagtatatgctatcaattataattatggttattatgttaagttattgtaaaccacaaaaataatga

SEQ ID NO: 217894 - DNA, 615 bp, Homo sapiens
gtaaggtcataaactgtttctttggcttttgaaaattgtttaacttacctgctttccagctaggtaaggtctgggaacatgtggaattggccacaccctagctatgctgcaaatagtcaaaacttatcagaatgtaatttaccaggttttaccttaaaattcttcattacaacatgaaattaagaccactagaaacagttttacatgcaagatatgtaagtagaatgtgtttttttttccttgtaagaggctataaaaggtttttacatctttaagatttctgagtcatcattttggcaaaataaataatttatggtaatctggaattccaaaatcaaacttcagtttcaaaattgtctttcctaattcctggctttctagatgaatcagagggcccctgaaaacatcttgaaaagaggtaaacaggattatttgatgtgtttaggtacatgggccaaaatgatgttcaatcttctttrggttatatttttgtgaataatactaatatatattcctaaattgtatgggatttctaaaattctaatgtctaagtatatgctatcaattataattatggttattatgttaagttattgtaaaccacaaaaataatga

SEQ ID NO: 217895 - DNA, 388 bp, Homo sapiens
gccactgctcccggcctaaaataaagaatttaaaatgcaagtccaagcaaccaagatttgttagcatacatgactggaagtcatgcaccacttaattaagtgcctcatgaagtgggaagtgcagattatgggtatgaaacagcacgagtgctagaattgtttaaaacaaaagtcagtggttataacaakgagtatttctgtctgtttataaagatgtgttggttacgagttttgttttttgtttttcgtttttttcgagatggagtttagctcttgttgctcaggctggaggcaatggcacgatctcggctcactacaatctccggctcctgagttcaagtgattctcctgcctcagtcttcggagtagctggaattactggcacaca

SEQ ID NO: 217896 - DNA, 426 bp, Homo sapiens
atgctcgccaggactttgaaaacaatttgaataattgttttaaaaaatttgaacacctccttaacagtaagcaaaatcaaactacctgaggctgcaaaagaggcatccatcaagataattagggtttctaatttataagcagggcgcataatttctactaaatggatgaacggtaggcactaaataattttccatgatgccagatgctttccaatgatcatagggcactgttcatcctaattactttccagtgtactactaccaacaattcrtcaacgagcatttgtcaaatattaatagcatgcccaaccctgggatttgtagacattgtggaggatacaaaaggaatatgacatttctgcaagacactttcagtctagtgtgggttgcaagtatatgtgcccaaatgtatgaggttgggaagaa

SEQ ID NO: 217897 - DNA, 441 bp, Homo sapiens
tgtgtcagatgatgtaatgtgaggtctggggtgaatctgggatccgccacttcccagccctttgaccttgggcacaatgctcaccctccctgagcctcctcctatcactggtagttagcgcttctgccaggagaggctatgagaatggagtaagaaagattaatactgtcaaaagagtctagctgtgggctaagcatggcgctcatgcctgtaatcctagcactttggaaggtcaaggagagtgaattgcttgagctcaggagtttgagtccrgcctaggcaacgtggcgaaactccagctttaccaaaagaaatatgaaaaatcagctggacgtggtgacatgcaccagtagtctcagctacttagggggctgagatggggatatcgcttgagcccaggaggtagaggctgcagtgagccatgattgagctactgaattc

SEQ ID NO: 217898 - DNA, 551 bp, Homo sapiens
cttctcatgtcacctgcctggatgccatgtccccagagtgtgctgaggacatggggagtgagcctgggcccaggcagaaatggtaaarggccaagcatgggcgcctcgctgctgggagctttcctgagaccaaactgccctcatgtaatggacacagtcactgtggaatgtcctggggagcatgggagccttgaacagggagaggaaggcagggagggacatagagcaggggctcctgcagatgtagcactggcaggctggacttctctgcagcttctgcagagccaggaaggagcccctcccagctcctgagaccccatactcccctccacacccacgacactctcctgaccatggccagtcgtccaagaccctagctagtctacctcctgcagtgccatggaagcgggatgttctcactctgtctttctcaagaaatcagaggttttccaggggcctctctgcctggctgcctctgagttgctgtcctgaggtttagctgcaaatgctcatggaagctgcaggctcgggactgagaggtgctcgggccc

SEQ ID NO: 217899 - DNA, 505 bp, Homo sapiens
gaattctggcaaatattgtgcttaataaatgttagctagggtggtcactttataatgcatgagctctatacttaaaaacatatgtggtcctgaacaagttatcttacctctttgaatattagtttccttctctgtaaaacaggggtgataataatacttcattgagaagattaactggtacaaacatagcacttaataaatgttcrtttctttctccttgactttaggtgccaatgaacagagaaatagccaaagggctcgctgagtgggagcagaggtaaatgggcctggataattggaaaactggatagtcacgaggttaactatgccacaggcaagaatccagatggttccaacctacctcagccagtgtgagaatgcccagtagatgtgtttcttttgtagttcctttactagaagctttataagagcaggcatgttcactgtttcacaggctaatagaaataaagtatgtatgtgcatcttatgtaacatatccctacgt

SEQ ID NO: 217900 - DNA, 459 bp, Homo sapiens
cttaagttggcagcagtaatcttcttttaggagcttgtaccacagtcttgcacataagtgcagatttggctcaagtaaagagaatttcctcaacactaacttcactgggataatcagcagcgtaactaccctaaaagcatatcactagccaaagagggaaatatctgttcttcttactgtgcctatattaagactagtacaaatgtggtgtgtcttccaactttcattgaaaatgccatatctataccatattttattcgagtcactgatgatgtaatgatatattttttcattattatagtagaatatttttatggcaagatatttgtggtcttgatcatacytattaaaataatgccaaacaccaaatatgaattttatgatgtacactttgtgcttggcattaaaagaaaaaaacacacatcctggaagtctgtaagttgttttttgttactgtag

SEQ ID NO: 217901 - DNA, 377 bp, Homo sapiens
ctattaggttaacaacaatgtaaccagtggcacctaccaactaccaaacaattactccagtgtactaattaatacctcagtggcctatgaaacattttctgactgatagatgtctctaattgtgtttttcacacaactatagagctctttatcagatgcaatgtggtctttttaaaaattattatttttggtgcaaagawgtgcagtaaaccagctcataagtccttgctactaatttagataccaagacccataagaaagataattattattctatggccctatttaggtaggaaggggaatctgaaatgcattaaattatattttgcaagaaaaacgttctaaaggagaagagtagggccaagtgggaattaaca

SEQ ID NO: 217902 - DNA, 606 bp, Homo sapiens
tgggatcgtgccagattcggccattcttcccctctggagggaacgggactgcgggatgctctggtcgagcggccgtcgtggctccccggcgccccgcccgaggcccccaacttcgaggcgctgaccccggcgccccgttaactgggcgggctcgctggccgccagcaggagcctgtcgccaacatgacaccctgctctcctcgcccgccaagggttctttcagcccagatgccggcggcctcccctgtgagtgtacagaggggagtcacgggaggagaataaaactaaawgaccgtcaaaagtcaaggcttctgttcctaaattatcttaagagacagagagaaaacagccactgggcgagaggggttttctgtagcatatcaaagacgaataagtcaggaaaataaaacgttagatgaggaagtaacttcccagaaatttaggacaaaaacctaccgacgtgtaaaaccaatgtcacattccggataccaagtacataaatagttttcgaaagatgagcgaacactttcatttgttctcttagcctgaaaaattggttcctcaaagaggccgtaagttttgtgtgttgaagctaaagtccgtgca

SEQ ID NO: 217903 - DNA, 544 bp, Homo sapiens
aatggacttgacctgtacacggagcagctaaaggtccctgatgggtagtgaattctgaaagcactcctcaaccaatgactgataggagttggaggatagccaccacaactccttgcccctcacaggttattccaagtcatgttctacccatttccaagagttcaccagtakgaccaagcttcaattgtccacagtggcaatgcttgatatcatagtctttattaggcttcatctccttccctgtctcacttctcattgccctacctgtacttctaaggattcccatctaaataagctattttactcaagtcctcaatttagggtcttctctgggttcacccagaccatgccagaagaacatatagggcaaaagaatcagtaaatatctataacaacctaatcatgttatttaaaaatatggaggataatgccagaaaaatcaggtaaaacaattcaaagtgattgcctctggtgcggggctttgggatagggatagagaaacaggtggccaaggaacaactggtgtttgttaaaactttgtagt

SEQ ID NO: 217904 - DNA, 447 bp, Homo sapiens
gaattccttatatacatgtgtctaacacagagctgaaagcttttctcgtgcttattggtgaaaggtctatctcctctacgaagctgtacrttccttgagaacattcactgagacattattttgtttgaataatcaagctgtttctactgtcaccctgaacttcactgaatttcttctcttgaaccctgatccttctccagtcaagccactaaacatgggcccaccatgcccgaggggccataatgacagtaacattttgtcttttaagtttgaaaaagataaagctgaggttcagggaggaagataaagagatattcctgtcccttcttttatattaagaaatatttctccaagccatgccaggggtgtagagctatgagttggaaggaaagttagaggactgaatgttgaagggtctctccaaagtttccctgagaaagcactcct

SEQ ID NO: 217905 - DNA, 573 bp, Homo sapiens
gggtttttccatgttggtcaggctggtttcaaactcccaacctcaggtgatccacctgcctcagcctcccaaagtgctgggattacaggtgtgagccaccragcccagcctaaaatgacaatttttaaaaatttaattatactttgttattattagatcaaatattatcataaagaataactttccctcccttatcatccaaagctctttggacagtatgaattatcaatcataaggaaaattcagactaaattcttgattatttcattttagttgctaatttaaggaacaggtgttggtgccaaatttctccagtggtgttgttcaatgaatttcttgattcctttacaattcctgcacccccagccccaccttgttctctctctcatctctacctctttcaatctctcatcacataataaactcagaaccctattttaatgttttatataattcccttaatcattctttcttatgttcaaattattctcctatatttgaaaaatgtgagctatttatgttggtttctgtgtccttttacacaaaataacagagtttgacagatgcttgatt

SEQ ID NO: 217906 - DNA, 554 bp, Homo sapiens
gaattcactaacttattatttaaccaaattaagcttatttccataaaatcagttgggtgtttaaaaattacataaatggaatttattaaatcataatctgtcagtaaagattccagcttattttaccacttatcttcaakaataatgataaattatttcacttgtgtcagcttttactaatgactagcatattatgacgtttaggactttttttcagttattatctttttcagttctaaaatttccactttttcccctttgtatcttccatttctttgtggagacattctgattttcacatttgattcaatcttcaggattttagtaccctcctgagtaaatagacctgattataaatgatttacataactttcttaaacttctaaagagtactggaattgaatgtgtttttgttcaacttggagaatatgcctagtaataaaaaaatagcaaaaatgcttgttgaagcatttttgtgatccttgctttaaattcctcgtcagataattctagcaccttttttcatcttggttttgcacctgttgatctattgg

SEQ ID NO: 217907 - DNA, 554 bp, Homo sapiens
gaattcactaacttattatttaaccaaattaagcttatttccataaaatcagttgggtgtttaaaaattacataaatggaatttattaaatcataatctgtcagtaaagattccagcttattttaccacttatcttcaataataatgataaattatttcacttgtgtcagcttttactaatgactagcatattatgacgtttaggaytttttttcagttattatctttttcagttctaaaatttccactttttcccctttgtatcttccatttctttgtggagacattctgattttcacatttgattcaatcttcaggattttagtaccctcctgagtaaatagacctgattataaatgatttacataactttcttaaacttctaaagagtactggaattgaatgtgtttttgttcaacttggagaatatgcctagtaataaaaaaatagcaaaaatgcttgttgaagcatttttgtgatccttgctttaaattcctcgtcagataattctagcaccttttttcatcttggttttgcacctgttgatctattgg

SEQ ID NO: 217908 - DNA, 590 bp, Homo sapiens
gataaccaaaactctaaaagcaagtttcagaatttaaaaattctggtaccagatggacagctaagaaatccaattggctgcaaataagaaataatgaagcactcaacttttcaaaaagtttcaagttaaatgatctaaccatgatattgtatctctgtaaagttgcaaacagaataataacccctccaggaaattctttgaaaatccaagattaactgaaaacatataaatacatgagtatgacttaatccctgcactcaacaattttatagcccaatgggagaaaaacagatgaagaagataaacacaaataaacacttcaaatattgaaaagtaaaatcagaacagagaaagcagcaattttygggtgaaatttcccaacatgctggcatcctgtgttgtaagaaagtccaaaggggatttatcatgcaaataaaagagaaaaattatcttgatttgtcaccttgtctatttatttttatttatatatataaataatacttatttattttttcttgtcactttgtttatttaaaatttgatgctaatgaaggcaattttaaatcagtagtgctttactagtcctctga

SEQ ID NO: 217909 - DNA, 454 bp, Homo sapiens
gggagtcaaacaaaaatcaactaaaaaccctgtaagtaattttaaatggcaaccatgccatgaagaactataactgggttgcagtacacttttttttttttgcctccccagcatctatttgctctgattttttttggctgggggtcaggggtatttactctttacatatgtagcttataaacttctgkggaagctgatggatgtttcctctcttaccctgtatgaacgtatttgttctaaaagcaattccatctctttgcaaacaatcagctgagtgattcagttcaaagcaatgaagtcaggaatggtaatgtaacacaattctagccaatgaaatacgaggggacactattcaaacctctaggggaaaagttgtctcactcttaagagaaagccactgggaagaaaatggcttctttgctcttgtgtttgtgatgcctagagctgccctatc

SEQ ID NO: 217910 - DNA, 454 bp, Homo sapiens
gggagtcaaacaaaaatcaactaaaaaccctgtaagtaattttaaatggcaaccatgccatgaagaactataactgggttgcagtacacttttttttttttgcctccccagcatctatttgctctgattttttttggctgggggtcaggggtatttactctttacatatgtagcttataaacttctgtggaagctgatggatgtttcctctcttaccctgtatgaacgtatttgttctaaaagcaattccatctctttgcaaacaatcagctgagtgattcagttcaaagcaatgaagtcaggaatggtaatgtaacacaattctagccaatgaaatacgaggggacactattcaaacctctaggggaaaagttgtctcactcttaaragaaagccactgggaagaaaatggcttctttgctcttgtgtttgtgatgcctagagctgccctatc

SEQ ID NO: 217911 - DNA, 580 bp, Homo sapiens
atctaatgttttgaattttatcaccataaaggaagttttgcctattttaaaatttgatttgtggaaataaaatcagtaagaatatataagtcctggacaacactgataaacatcttgatttaattaatatttgtagaaaaacctaccaacaatgatagaatacacattattttcaggaatattcaccaaaagagaccacactctggcccataaaacaatccttaagtaaaacagatttaaaattacacagtgtataactataatggaattagaccagaagttaacaaaacatacatctttaaaatcccctatatactggaaattaaacaatatgcctaaaatggcctgtgattcaaagrggaactcatgagggataattgaacctattttgtattgtatggaaataaaattaagatatatcaatatttaccgcttgctgatgaaatagtgcttaggatgaaatttacagcactacttctatttgaagaaaagtattgaaacaattacctaaacttctactttacaagacagtaaagataatagcaaattaaatgaaaaggatacaagagttaaaaatact

SEQ ID NO: 217912 - DNA, 527 bp, Homo sapiens
gacactttcataaaatgtcaaaccaagaaacagatgaggttaatagtatattcatctttctaaaagaagaaaaaaattataattttggaaattaaagtgttatcaacttagctttgctttgagaaacaaacgtaaacttcataatttatgatgagtataaaaaggactctgagaaaatactaggggactgtcaggttaaatgaaacactgaagaccttgggagattcaaaatatctatgaaggaattccatttattattttgatgttttgggaaatttgtgttgcttgatccactataagagtttaagaaatattaggaagcaaagaggcagtgtattagtccatcttcatgctgcggatagagacataccygagactgggtaatttatacaggaaaagctgtttaatggatttacagttccaagcagctggggaggcctcagaatcatggcagaaggcaaggaggatcaagtcatgttttacatggatggccgcaggcaaagagagggctcgtacagggaaaccag

SEQ ID NO: 217913 - DNA, 524 bp, Homo sapiens
agatctcatgagacttattcactatcacaagaagagcacaggaaagacctgcccccatgattcagttatctcacaccaggcccctcccacaacatgtaggaactatgggagctaccagatgagatttgggtggggacacagaaccaaaccatatcagggaggatgtcagtaaagagagacyaggaggcaggagggagaaatggaggtaggtctctatgacatgcttagcaagctttttaaccataaagaatcatgattgtttaaatcatcatagaagccagaggaatgaaacaagggtagaagaccaatttattaaatattacctatcagctactatgctaagtatgaactaactcaatgtaacccatttaggctttgtgctactaggctcaatagaacatcactgctgcaaccaaggacacttatgaaaaaaagtcaaataaatattttaatgataaattagttacgttgcaaaacttttcagaaatatatattcttcaacttttattctcaatgtagatttc

SEQ ID NO: 217914 - DNA, 469 bp, Homo sapiens
accagtgtttattaagtgttgagtgtgaagctcacttggtagcccaaagatttcactgggatcagtcactgtatttgaaaacgtcataactccactttgagcttttttaagagcaaagtgtcattggccctactttcagtctcagcacctaaagagcttactatcaattaaaggattctcactccaaacccactagaatcctgcatcatgttcctgaagcatgcatctaagaagattcctaagacatcccaatttactgttctaaaatagccacttcccagcagaatcctttcctctctggctttgacagtaaattggaaagaaatcctccttacactcaaagttagcagaaaccttaaaaagaaaaccaacacgtttstgctggatagaatgccctgtaattgtgattcaagctgttatcctcttaagatcttggtcatcatgctctgtgtctcttatttcccacctc

SEQ ID NO: 217915 - DNA, 581 bp, Homo sapiens
caaaaaactaatatgtctaatctactttctcttacaaaacctattcttttcaatttagtttcctctaagacaatttccttttcatatttagttcttagaattataccaatggggaacaataaaggcaggaattaaactgatcacatacaaatgaagcctaattttctattgcatattcttaaagtgggcctatttttgagttagccaatgtgcatggggtatggagcatgtaatcttttaatttttctccacttttttcctgccactgcctcatcaaagttgttttttaatgtctgcacatcatgatctgtgggaataggcgtcagaaaaaataaaaaagttattaaattacccawgctagttctatttctcatctagtttcacagatttaaggctggatcatcagttagggagacttccgcattgtgaagagggtcctctcactcctccactgcctctcagcaaaagtcctgtggacgcaaaataattccacagggagaagcctattctcagtttgggaaggtctccggcaattcaatgaaattaaaaaacttttgttctctggaatctgatctacataa

SEQ ID NO: 217916 - DNA, 517 bp, Homo sapiens
gatctaatgcctgatgatctaaagtggaacagtttcaacccaaaaccactaccccaccacattagaggaaaaattaaagagtcatcttctatgaaactggtccctgatgccaaaaagattagggactgctgctctacatcttttcccacaaaaatgtgttcaatacaaccccttccttcttctttctattgctctgagagtgcatctaattgcmgaaatgtaggtaatatactctaaaaaaggctaggaaaggaaacttttggattttatgctgggaaattatgattcatgttgggaaaaattaacaaaatattgaaagatatttaaaatatactgtgaccacaaaatgacaatgttttaccaaacagatacgtataaaatatatctaataatgttataatgaagcaggataatgcatatttattatttaaaacaatacctccacttggtgctcataaatagtattatatgaatttcaaaaatgtttatattttttcataaaaataagcaaacaaca

SEQ ID NO: 217917 - DNA, 489 bp, Homo sapiens
tcctgggtattacaacccatgttctgccattaagagatgtgtttcccacatttctttttatcccctgccttatgttctacctcttttcttractttgcccatgtcaaggactttcactggtcttacttccctaactttatcttatgtatttcacttctcaaaatccttcagtgacttttcacttcaaagtaaaacaatgccctcgaaatcacgggcctgctgacttcttaaatctcatttcctgctactctcactgcatcagtccactgcagccacatcagcctcctcatggaagcaacttttctcaccaaggcacctttgcttcaggttctttgcatcctctgtttcttttcctgacatgctcttctcataaggctccctcctttctttcagtaatttatttaaatgtcgctttcttatgcttctcctctctgtcccttttttctttatttttaaccctttatcacttctttactctctccctaacta

SEQ ID NO: 217918 - DNA, 477 bp, Homo sapiens
gtaagcaagatagatggcctccttagcataagaatctttgcacctaggtacaattaagttccttccaaaatgctgccattttgtactatcaacttgaacatttgtcataaaacacttgagattattatttgaaaacatattaatggactcctgctgatcattctttctcaaattcttacagatgaacccacaaatccccaaatgttttcttttcaatcccaaaaattgtttaaatagtccctggataggtcaaattatccccatgtcctttgtaaaaaaaaaagaaaaattcactttcagtatcataaaaaaatattctttgaggaaggcctggcattggagggaagtgactggaaaaatgcaacagaatgtatctgtcgagagaaaaaggaaacaaaaagagtagtgrgaccaagggagtgcttgctgagcacagctttcaatggcttcattttaaaaccacgagagaaaactggg

SEQ ID NO: 217919 - DNA, 560 bp, Homo sapiens
tctaccattctggggtctggaggacggtagccctcttctcatagttccactaggtggtgccccagtagggactctgtgttggtgctccagccccacatttcctttctgcactgccctagcagaagttctccatgagagccccacccctgcagctaacttctgcctgggcatccgaggcattttcmtacatcttctgaaaccttggcagacgttcccaaaccccaattcttgacttctgtgtacccgcacggtcaacaccacatggaagctgccaaggctaggggcttgcaccctctgaagccacagcataacctctacgttggcccttttcagccatggctggagctggtaggatgaaaacaccaagtccctagactgcacgcggcatggggaccctgggctaggaaggaaaccctattttcctcgtagacctccagatctttgctgctgcaaaggtctctgacatgccctggagacatttttttccattgtcttgaggattaagattcagctcctcgttacttatgcaaatatttgcagccggcttgaatttcttctca

SEQ ID NO: 217920 - DNA, 560 bp, Homo sapiens
tctaccattctggggtctggaggacggtagccctcttctcatagttccactaggtggtgccccagtagggactctgtgttggtgctccagccccacatttcctttctgcactgccctagcagaagttctccatgagagccccacccctgcagctaacttctgcctgggcatccgaggcattttcctacatcttctgaaaccttggcagackttcccaaaccccaattcttgacttctgtgtacccgcacggtcaacaccacatggaagctgccaaggctaggggcttgcaccctctgaagccacagcataacctctacgttggcccttttcagccatggctggagctggtaggatgaaaacaccaagtccctagactgcacgcggcatggggaccctgggctaggaaggaaaccctattttcctcgtagacctccagatctttgctgctgcaaaggtctctgacatgccctggagacatttttttccattgtcttgaggattaagattcagctcctcgttacttatgcaaatatttgcagccggcttgaatttcttctca

SEQ ID NO: 217921 - DNA, 560 bp, Homo sapiens
tctaccattctggggtctggaggacggtagccctcttctcatagttccactaggtggtgccccagtagggactctgtgttggtgctccagccccacatttcctttctgcactgccctagcagaagttctccatgagagccccacccctgcagctaacttctgcctgggcatccgaggcattttcctacatcttctgaaaccttggcagacgttcccaaaccccaattcttgacttctgtgtacccgcacggtcaacaccacatggaagctgccaaggctaggggcttgcaccctctgaagccacagcataacctctacgttggcccttttcagccatggctggagctggtaggatgaaaacaccaagtccctagacygcacgcggcatggggaccctgggctaggaaggaaaccctattttcctcgtagacctccagatctttgctgctgcaaaggtctctgacatgccctggagacatttttttccattgtcttgaggattaagattcagctcctcgttacttatgcaaatatttgcagccggcttgaatttcttctca

SEQ ID NO: 217922 - DNA, 480 bp, Homo sapiens
aactactatttgggttacagggctctctggtgtctggctcactgctatatttgaaaagtcactttgctggtctctcatctaagttgctacttgacactttaagctggaaaaattggcatgaactttctattctcatgttcggaacaaagaattgtaggctttttattatcataatgtctggtaaatatcaatctcactgatactgtagcagaggaggccaatatctccctgtgattcagatgtgtttgctttagtaagtgaaaaaattactcttccaacacagaattgcctgagacttgaactcatgatgtgtaaacgtccttcatcatgtttaaagatgtctagtggaasctaataaaacagtgcaccttattcatcttctttttttttttttaacaagtgtgaactacaccataatatgacaaggttattcatgccttagttacttttcagaggaatttattttcaaatgaaaactac

SEQ ID NO: 217923 - DNA, 617 bp, Homo sapiens
aaggaaacagatcctcctttagagctcctaggaaggacacagttctgtccaactcctgttggacttctaatccaaaaaaaawatataataaatttatggtattttaagcatgctaacttcatagtaatttgttacagcagcaatgggaaactgtacagtattatgtgacattctatgtggttaaaattaatttatcagactgtagagagctaataaagcttttcaatcaaggcagtgattttacttaatttcatatgtattaggaaaatgacattactttgtctttaaaatgtaatacaaataaaactagagttagaaaaatcagatttccagaagaaataggaaataattatataaataaaatatattttgcctttaaatatgaattagaaaatccagtataacatttgtaagacaagaaaatatatttgatataaattataactgcttaaaataaattattagagaaggaagctattttttcatctgatattttgttatatttctaaacaggttgcagagatgaaagaagtatagagtgaaaacttacgtcatcacaatctagattctattattgatgttattatacatgctttatcacaatctattcatccacc

SEQ ID NO: 217924 - DNA, 566 bp, Homo sapiens
tgtgattaggtttatgcatcagaaaagctaatctgaaattatatgcaggccatatcacacatgataaaaactggaggcaggaacactagcgaggaagctagtccagacaaatgagaggcaatgagtgcagaaattaggacaatggaagggagactgacatttctgagggctgactggaacatatgctctgtatatctgtcaataaactcttaaatttgagatactctccatccccaaacaacaaagttcaaaaaattaaaagctccttcatctccatccccaaggyactcattattcccatcgctggcatcatctccttcacttttctcaactcatcagtcactcactcctgttgattttatttcccaaacacttcttaaatcctttaaccattctgtttatattgcctatggagaagaagaaggaaacattatttagtgagcatagttaaccagataacatgatccagtcctacccacagtgattaaattaattttaaatgatctttggtgagccacttaatcttgctgcattttcccccttatctgtcaagaatataataatca

SEQ ID NO: 217925 - DNA, 566 bp, Homo sapiens
tgtgattaggtttatgcatcagaaaagctaatctgaaattatatgcaggccatatcacacatgataaaaactggaggcaggaacactagcgaggaagctagtccagacaaatgagaggcaatgagtgcagaaattaggacaatggaagggagactgacatttctgagggctgactggaacatatgctctgtatatctgtcaataaactcttaaatttgagatactctccatccccaaacaacaaagttcaaaaaattaaaagctccttcatctccatccccaaggcactcattattcccatcgctggcatcatctccttcacttttctcaactcatcagtcactcactcctgttgattttatttcccaaacacttcttaaatcctttaaccattctgtttatattgcctatggagaagaagaaggaaacattatttaktgagcatagttaaccagataacatgatccagtcctacccacagtgattaaattaattttaaatgatctttggtgagccacttaatcttgctgcattttcccccttatctgtcaagaatataataatca

SEQ ID NO: 217926 - DNA, 590 bp, Homo sapiens
ggttgttaaagattggggtggctgttgcaatttctaaagacaatgaagtttattgcattggttgactttttctttcgtgaaagatttatctgtagcatgcaatgctgattggtgccattttacccacaatgtaacttctttcaaaattggagttagttctcttaaatcatgctgctgctttatcactaagtttatctaatattctaaatttttagatttcattccaacaatatttatagcaccttacacagaagtaggttccatctcataaaaccactgcctttgcctatttataagaatcaactcctcatttgcattattatgagattaaagcaattccataacattttcagactccatttgtagttctcttgctatttctaccatatcttcagttacttccaccactgaaatcttgaactgttcgaagtcacccaggaaggttggatcagtttcttccaaactactgctagttcaatattttaacattctcacatgaatcatgaatattcttaatggcatctaaaagagtaaatcctttcaaaatsgttttcagtttactttgattagatccattaggggaatcactg

SEQ ID NO: 217927 - DNA, 566 bp, Homo sapiens
tattcactaccacgaggacagtatggggaaacagcccccattattcaattatctccacctggcctcaccctggacacatggggattaaagcaattcaaagagagatttaggtggggacacaaccaaactatatcattgatatatgattttacttgaaattcctatatccctgaaatatataataccaaactgtaacacaaccacatcaggcacacttactcaggaccttttgagattgtcaccctgggccagtcactcatattggctcagaataaacctctttaaatatattttggcagaatttgttttttctatcatcactgccataacaacataccacaaacygggtggcttgaacaacaaaaacatatggtctcacaattctggagattagaagcctgcaatcaaagtattggcaggtctagtgtcatctaagctctccttggttcgtagacagctaccatcatacaaagtcctcacatagtctctatctgtatggtctctctttctctctgtatattctaatctcctttcttttaacaacaccaatcatattgcagtagggc

SEQ ID NO: 217928 - DNA, 419 bp, Homo sapiens
tcatgtgcatttcctcatgtgattatctcaataaccatattaggaagagcacatagtgtcacctttttacaaatgaaggaattgagcytcagacaggtttatagatttgcttaaggtgaccaaccagtgtatagtaaaaatagaaaataaagcaatgtctctggactcctggcctcataattgttccatcattgttagtcaagatatataagagatgaaaatttaattaaatatccttccctttattcagtacacatatattaatcaccagtaatacgcattgactcataagggatacagagaggcagagacatgaccttggtaggagatcccagtctagtggggaaagttaagacatttaaagagatttctgtaatacaagatagaaagcaaaatgtcccagtaaaattgaggaagag

SEQ ID NO: 217929 - DNA, 610 bp, Homo sapiens
atagctgtgaatttaactggaagcgaatgaaaacaataggatttttccattagactacaatattttacacacatttaattgttgagtattaatatggaatttcattccggtgcattgtatgcatgtactcaactagcaaaaaaaatatgtaggtctttaattgtcattagtttttagaagatgaaggacagatattatttacgataagcaaattaaaaccaagtgactttcctgaaacttcactgtggcttgaaagtaaaccatagtttaygtgattgtctttagggtctccacgtattcttttctgacacacttcatttcaaaatatctcatcaagataataaataaaaaagaaaaatacacactgattacataaaatataatttttgctacatacattgtaaataaaatagtagcctataaaattaagggtttcattttttcaagtaaggtacaaaatgtgatattatgaaaggaacattaagcttggaataattttacctgtgtttttgctacagtgctgtataaaacaaaaccactgagtcttaaaatttcttgtgtaaatttggataattaatcctatcttcacagagtaactgagggttaagta

SEQ ID NO: 217930 - DNA, 374 bp, Homo sapiens
gagaatttaagactatcatcacttcttggagtaacaagatttgtagctatactagccacttcgcaaaaccatgctttgtatctatctgaaaattataattcagttcaactaaataaaaatttactaagaatttacctagtgaatagtacaatgcaaaaaccagtagaaatacaaaggtggacaaggagcccacaaaagtgtctgcaattgtcctggaggagcrgatatgttgtggagaagtatatgttatatataaaatcttttaaaaagtcccttagagggagtgctgaggcttagggaatctgtccatattatcccaaaaaatgttacattacaacttttgaacttggatcaagatgtcacccatttgtaga

SEQ ID NO: 217931 - DNA, 470 bp, Homo sapiens
aaatcaggaatccatatctgaatttaacttatctttttaaatcaatttacgtattagttattaccacctattggattattgacctctctaaatgtgtcttcctcttccaggcttcaatgggagttctcttcaatcagcactgtgggattcagaaaatagccttgtactttctcaatagagaccactggtgacattagtgacttcaagcacgtatctgctctgcctccttctttctagatgaaagagtccaggctttccaatctgtcttcagaggatagtacctccagcctcttgagcatctcagttctgttctctagacaactacattgaattggaggtatagaattcagaggcaatttaagtggtttctcccagctttatgctttttccaccatactttttttccttagtaaaactttagttcyaattatggaataatttgagtggatcttttttatttctccccaaac

SEQ ID NO: 217932 - DNA, 596 bp, Homo sapiens
aagcctattccaatagttgagttgaaagctaatggggtactaaattaaggcaagagcagcaaggatgacacggtatagggctacaagtgggaaagatgttaaaaaagcagaactgacagatttggtaacattgaaatcagaacatgagagagaaagggaaactccacaaagattttttggctcaagtaggtaattttactgtccagtaaaattaatagtttgttcttaattctgtattttgacatgggacacttgttggtcctggcaagccctggaccatcttttcatcttcgctaaaacacctgtctgctcttattctctcacgaggctagtgttttttctcaaagacttgttttttgggactcaatgtctatcccacacgttttgttgctaaagaacacacaactttgtcctgttgttatttgagaaccaggggcagacacaagggttggccttccccagtggagatgtgaggtctttgcatacagaagccagagcctgaattctacttcttgattgtccttrtaacatctgacattgacatatgcataagggaagcaaaactgacttcaattatggcagcatatcagatgctt

SEQ ID NO: 217933 - DNA, 596 bp, Homo sapiens
aagcctattccaatagttgagttgaaagctaatggggtactaaattaaggcaagagcagcaaggatgacacggtatagggctacaagtgggaaagatgttaaaaaagcagaactgacagatttggtaacattgaaatcagaacatgagagagaaagggaaactccacaaagattttttggctcaagtaggtaattttactgtccagtaaaattaatagtttgttcttaattctgtattttgacatgggacacttgttggtcctggcaagccctggaccatcttttcatcttcgctaaaacacctgtctgctcttattctctcacgaggctagtgttttttctcaaagacttgttttttgggactcaatgtctatcccacacgttttgttgctaaagaacacacaactttgtcctgttgttatttgagaaccaggggcagacacaagggttggccttccccagtggagatgtgaggtctttgcatacagaagccagagcctgaattctacttcttgattgtccttataacatctgacattgacatatgcataaggraagcaaaactgacttcaattatggcagcatatcagatgctt

SEQ ID NO: 217934 - DNA, 445 bp, Homo sapiens
cttcctcgtggtaaagtgcagaaaattttaaagaaatgtttaattatgggaagaagtgacaactgtacatcccagccatagttgcccagtctcttctgatctcaagttacagaacaatgccctatgcctgattgggtaccagacatctacttcacctccttaatccttatgcctattctgtcttatgtcttttgcttattatgccttatgcctatttggaaaattaatttaaaaactggaagagtctgacatatcctataataatgagagctttattacttttttaaataaawctgagagtgggaatgattgttagataatttaaattttaaggattctataaataacaaaatattttgcttttagaaaactgtaaatgaaaacagcattgtattagcctgttttcatgctgctaataaagacatacctgagactggctaattta

SEQ ID NO: 217935 - DNA, 579 bp, Homo sapiens
atttccaaaggtccaaaatttatcattttaataattctagccatcaagtctcatgtttagttttccaagtcacagctcagaaaatcgtcaagataccagccatgcaaattccaatttccagcttaaaatgaaagtatcataatcaaatccaaggcactctcattcctcttggaggtcccaaaacaagctattcctcttaagtgggagagggcttagaggccccaagaccttgcaaacaagtaggaaggtctaaccagatatttctgaatgaactattactgatacctttgtaaaaactcaagctgtgcctcccatgcataaatagcaaggtagaattctaaaccacacattctagttggttatttggtcagcccccaactcaattatttttctgcataccattccaattgtgacatgttccataagcagcaagtaatactaccttctctatgttctgttacaggcactaaactaaacattttacatttgttatctcatttaatacttacaaaaatcccattagaatatatcattattcccattttgcrgatttactagaataaatagttcttcaagctt

SEQ ID NO: 217936 - DNA, 604 bp, Homo sapiens
attgatagtacttttactaccaggagaaaagacaataaaaattcaaaatacatgtagaaacatgaatatgaagaagtttctgtttctgtttataaaaaagagatatttttagtggaaactacaaataacagcccactaaaatagctgggttttagtcaagtgtgttttagtgtaccaaagaaaatgattataattaataaaatgagcatttgtgcagggtatggaaatttgctgaaaagccacaaagaggacagagcaaattgtaaagtgtagtaatgcagggaatcagtgtttaagtcttatacatttgatattataaagggtctaaagtaggatataggaaagttgcatcttaatracactattgatgatgtcaaattatactttaatacttcagtgagacattatgagacaccaggaacaggaaaggaacaaaatggaggctaaattaaaaagaagctaagaaaattattttcaaattagataatgtaagattacactttgggaaaatgagacagaaccttcaatatctcatgagaaaatgctaacaaataataaaaaataaataaaacccacacatacaataatacataagtagaagctt

SEQ ID NO: 217937 - DNA, 603 bp, Homo sapiens
tagaacagtttacagcctagttaaaatgccaaaatgaagacgtggtaagcgtttttatattattttacctaccatctgggtagaatggagtaattaagaaaccwgtctctgcatagttctgaataaaatagtttaaaacgtcaatttgatacgttctaaatttggaagatcaaatcatttaacattaaatcaggagccaatttcagaatatagtcattgctcatggaggactcttacccgactttttgggagctcactggttgttcctttagagactcgtaagagtaaacattcacataaataataacggtttaagagttggttagtcgtcatggctacagggataggtcaagtttttaggtaaggtgactggtatacttccatgagatagggcagaacattactagttctaccacggacagcgagtatttatacacatattgtcattctcctggaaatttacaaacctaccccagtaagtacaaagttaatgaatgctaaaaataaaatataaactgtatagaactcagtggtcgattttaataatgagttagatgccgcagaatgtaagatgtaggtaaacggacgcaaaaatccttgttt

SEQ ID NO: 217938 - DNA, 560 bp, Homo sapiens
ctcttcactaataccttggtcacggtgtataaacctgctagtaatacagttgtctttttcatagaaaatagactataagggtttttttttttttaagtaattaacaccacattagatttttctcaaaactaaggactrttttattcaggtggacaaatacggttgctgtataatttttcaatcaattcgtatcaaactctgtggggttaaaactagctgggacattttggtaggcttcatgcactcaagggcttcctgcgggcttaactgttaagccgagctcatggaggtggtgttatcagaatgcttaatggggaccgagggaacgtgctggctgatgaggttctgcacatatcaagtaatgtcaactctgtgccactcagcagctgcctgtcagctagagcagcacctttgataagtgggtcctgggtagagatctggcagtcccaggctgggatttttcttttaataaaacatccgtaggttgctgtgctgacgacaaatgaccttgaaggaggtgacacagtggagcagggggatttttttttttttggtatagc

SEQ ID NO: 217939 - DNA, 415 bp, Homo sapiens
atagtttaatattagtgtgatggctaatactgagtgtcaacttgattggattgaaggatacaaagtattgatcctggatgtgtctgtgagggtgttgccaaaggagattgacatttgagtcagtggagtgggaaaggcagacccacccttgggtgggcacartccaatcagctgccggcatggctagaatataagcaggcagaaaaatgtgaaaagagagagactggcgtagcctcccagcctacatctttctcccgtgctggatgcttcctgccctcgaacactggactccaaattcttcagttttggaactcagactggctctccttgctccttagcctgcggtggcctactgtgggaccttgtgattgtgtgagttaacaatccttgataaactccccttttatatatacct

SEQ ID NO: 217940 - DNA, 613 bp, Homo sapiens
gggtttcaccatgttggccaggctggtcttgaactcctgacctcggcccacctctgcccaccttggcctcccaaagtgctgggattacaggcatgagccactgtacctggctgcatccagctaatttttaattttttttagagatgggatttcaccacattgcccaggctggtcacaaactcctggcctcaagtgatctgccttccttgacctcccaaagtgctgggattacaggtgtgagccaccatgcccagccttgatttgtacttttaaaagatcactctggatagtgtgtgacaaactgagagtttgagggcaagaatagcaacaggatgctgagtacggtggctcatgcctatagtcccagctactcagggcctaaggtggagggattgcttgagcccaggagtttgaggctgcaggaagctatgagagtgccactgcacaccagtctgggagacagagcaagaccctgtctcaaaarcaagaaaaagggtagcaacaggaacttattgcatcagtgagagataatggataatggaggcatgggcctggtggtggccatggggtggaaggagtgggtgaggtccgaatacgttttgggcatggaatt

SEQ ID NO: 217941 - DNA, 565 bp, Homo sapiens
ttttcatcaccccaaaaagaaatcccatacccattaggagtcttttcccattctcccctattcccagctcctggcaaacactaattgattctctgtctccatacatttgcctgttctggatgcttcataagaatgcaatcattcaacacgtggtcctttgttgttggcttctttcacttagcatactgtcaacaaggttcatccatgtggcagtgtatatcagaacttcattctttcatggttgaatactctgatttctattcagatctcttttgccttttatggctgaataatgtctcattgtacaaatataccacattttgtttatctattcagctactgatagatgtctgggttgtttacaccttttggcaatgatgaataatgctgctataaacacttatgtccaagtctttgtttacacagctgttttcatttctcttgggtatatatttaggagtacaacrgctggatttatggttgactttttgaggaacttccaactggttttcaaaatggctgcactattttacattcttaatcatcaatgtatgggcccttcaat

SEQ ID NO: 217942 - DNA, 565 bp, Homo sapiens
ttttcatcaccccaaaaagaaatcccatacccattaggagtcttttcccattctcccctattcccagctcctggcaaacactaattgattctctgtctccatacatttgcctgttctggatgcttcataagaatgcaatcattcaacacgtggtcctttgttgttggcttctttcacttagcatactgtcaacaaggttcatccatgtggcagtgtatatcagaacttcattctttcatggttgaatactctgatttctattcagatctcttttgccttttatggctgaataatgtctcattgtacaaatataccacattttgtttatctattcagctactgatagatgtctgggttgtttacaccttttggcaatgatgaataatgctgctataaacacttatgtccaagtctttgtttacacagctgttttcatttctcttgggtatatatttaggagtacaacggctggatttatggttgactttttgaggaacttccaactggttttmaaaatggctgcactattttacattcttaatcatcaatgtatgggcccttcaat

SEQ ID NO: 217943 - DNA, 477 bp, Homo sapiens
tggtcaatgagattaactcacatgagacttaagagtgatcaactaggccgagcgcaatggttcatgccagtaattccagcactttgggaggccgaggagggcggatcacctgagctcaggagtttgagaccagcctggccaacatggtaaaaccccgtctctactaaaaaaacaaaaaattagctgggcgtggtggcaggcasctgtaatcccagctactcaggagtctgaggcaggagaattgcttgaacccaggaggcggaggtcccaccattgcactccagcattggcaacaagagcgaaactccatctcaaaaaaaaaaaaaaaaaaaaaaaaaaaagagtgatacattgccctggtttgctcaggatggaagtgttgcctgacatacaggaatttcagtgctaaaatggaaagttttgatcaactcaggatggatttgctagatttgggaaatggaagtgatgtcacttatt

SEQ ID NO: 217944 - DNA, 555 bp, Homo sapiens
gctagtaaccgtgggatagagaataatgtttatactattaaatgaataatggctccacattgtctcaaagaggagaattttcctgggttgcatttggtttgctagttggttttaaatcatttaatgggtcaggaagatgctatgcttggtatgaatactaatgttccaacaagactactgaggagcagcatgcttcaggaaaagttagtaagaatttctctctgtcactctgggattgtgctttccatgaagttttggaagtcatcgtaaaactgtactgttaatgtgtgcaaagtgaattcaaagggctgttgatttcccagtgaattgggtgttgggtaaaggaggcagcctasccaaaacttctctctgctctaggttggaaagggcaagtcttgagtccaagccttttctaagacaagtttctatttcactttcagaaccagtccatttcagagatcattcatgtatttttaggactaaagttgataattaccttcagagtgttagccagaatcagagtattctcactatgtgcagggacctgtacatcca

SEQ ID NO: 217945 - DNA, 442 bp, Homo sapiens
gtaaaggagaaatccacaactgaacctccccttgtccaacatggcaatgttgtttgatggggactataaaaatggttaacgttggcagatttttattctctccctaacaggaaaacccagaagtgcattgcagatgctcagaaacccttgggagtccacagacaggattgcatgtgacactacaatctggacagggcctgcttgagtcagagctccaataaacataggtaggcctaatccmccatgcattcaccctaaacctctcctctggacagagccctgtgctatttgagtatattcactatgaatatgatgttccctcttcttcccaaaaatacagtgtagtaattaagttatatagactgcttttaggtatagttttcagatgtctctttccaaagggaaagtataacatttaattccacaactaggtcaaggaata

SEQ ID NO: 217946 - DNA, 434 bp, Homo sapiens
tgcctcctcactggggagctatccaactctgaaggataaaatcagaattaaatatctgtgcacagaagttaggtccatccgatcttcacttggggagcttcacagttggttccaaagcagacaagactccaactgggagatttccacagctgtaccatgaatggtcatcgaggacacgggcttcccaacagggctgataccaactcaccaaggtgggttgtgcctgctgcctccagttcctctgccctccatcagtccttcatccttgcaactgaatttccaccctctctactctacaggcatccaattcccatggctatcactaataccataattacaaaacccaacagttcttcaggctttatttgccycaagtttctccttcacatttgacaacttggtatttctttcattcttagaattcctcgtcccag

SEQ ID NO: 217947 - DNA, 434 bp, Homo sapiens
tgcctcctcactggggagctatccaactctgaaggataaaatcagaattaaatatctgtgcacagaagttaggtccatccgatcttcacttggggagcttcacagttggttccaaagcagacaagactccaactgggagatttccacagctgtaccatgaatggtcatcgaggacacgggcttcccaacagggctgataccaactcaccaaggtgggttgtgcctgctgcctccagttcctctgccctccatcagtccttcatccttgcaactgaatttccaccctctctactctacaggcatccaattcccatggctatcactaataccataattacaaaacccaacagttcttcaggctttatttgccccaagtttctccttcacatttgacaacttggtatttckttcattcttagaattcctcgtcccag

SEQ ID NO: 217948 - DNA, 507 bp, Homo sapiens
agaattcacaacacaattcaatgggtatttttggatattgtagacccctattggttcctaaaaaccagggaccctctcctccaaaaagttagcatgcgtgcctacacacaagcacattttacacacagcttcccagggagttctggttccccagaactagttaaatctccttaaccaaattctagtagygggcaaagtggtttctcgttcatgtttacatgaaactgcctgaaactgcctccctacccccacagtaatgagctcctcagagaaaagtactcaagcttgaatgtgcccagtgggaatggattggccacactgactcactttacaggcccatctccaagtgctggtgactttgctcactgctgacacttcaatgcgaactgccagctccagggccaagaaagtagaaaatgctcttcgtggccagtcctcgataaactgctataagcaaaagacatacaaattgttttctcccctaaacattataatcaagctgatggg

SEQ ID NO: 217949 - DNA, 543 bp, Homo sapiens
ttttcaaatcaatatttaaaagacataaattccaagtaaacgatagttgaaatatttgaataaacattttaccaaagaacacatatgaatgcctartatgcacatgaaaagatgctcaatatcactagtaattagggaaatgtaattgaagaacacaatgagataccaccgcacacacagtaatggctgtaattaaaaagacataaaatgagtgttggcaaggaagtggaaaaattggaaccctcacacattgctggtgggaataaaaatggttcagctactttgggaaagagtttggcagtttcttcagaaaaaaagtacatctaccatatggccctacctttccactcctaggtatttactcaataaaaataaaagcatatggccatgcaaagacttgtatatgaatgttcacactagcattattcataacagccccaaactggaagcaacccaaatgtgtatcaaccagtaaatgagtaaacaaaatgtgttgtattcataccacatttgccagatacgaacgactgtatacggtataat

SEQ ID NO: 217950 - DNA, 531 bp, Homo sapiens
tatttaaaagacataaattccaagtaaacgatagttgaaatatttgaataaacattttaccaaagaacacatatgaatgcctaatatgcacatgaaaagatgctcaatatcactagtaattagggaaatgtaattgaagaacacaatgagataccaccgcacacacagtaatggctgtaattaaaaagacataaaatgagtgttggcaaggaagtggaaaaattggaaccctcacacattgctggtgggaataaaaatggttcagctactttgggaaagagtttggcagtttcttcagaaaaaaagtacatctaccatatggccctacctttccactcctaggtatttactcaataaaaataaaagcatatgkccatgcaaagacttgtatatgaatgttcacactagcattattcataacagccccaaactggaagcaacccaaatgtgtatcaaccagtaaatgagtaaacaaaatgtgttgtattcataccacatttgccagatacgaacgactgtatacggtataat

SEQ ID NO: 217951 - DNA, 557 bp, Homo sapiens
gggaaaaatcccacactccagatgagaaccacagcatttgttgacagtttgatttcagccatctgagaccttgatcaaccatgccatgttggacttcagaactatgaaaacagagctcataaacagattttgttataaatagctaagtttgtggtaatttgttgtgcagcaaaagaaaaggaaaatttgtttattctgtcatttccactgcatgaaccatgagtaaaacattttttcttggtgtttccttctttctaawatcatagattgggtcgtctagaaacatggaagaaagaaacactgcctgaaagataataaaatgcaggtgcataaaagtagaatggacttggaaaaactgcttttacattttgatttggtcacttactggctctatgaccttaagcaagcctatttttattttctttaagtcttacatttcatggctgacaaaaagagaaaataacaacactatttcttagagttgttgtggagataaatagaaaaaagtcgttttgaaggcaaaatgcacattatacccaaactgaaaagcagaattc

SEQ ID NO: 217952 - DNA, 585 bp, Homo sapiens
ctgcctgaaagataataaaatgcaggtgcataaaagtagaatggacttggaaaaactgcttttacattttgatttggtcacttactggctctatgaccttaagcaagcctatttttattttctttaagtcttacatttcatggctgacaaaaagagaaaataacaacactatttcttagagttgttgtggagataaatagaaaaaagtcgttttgaaggcaaaatgcacattatacccaaactgaaaagcagaattctaaatggggagctgggaagaggaatggaagagctaaatatgtcttttctgctatagtctttgccagaatcttaacagtaatagtagaataggatcctcccactccagatatctatatataccatttcttatgagagtctgattmtagcctgaaaaaaattgggcctgtcttagcccactttcactaatgagaactatattcagtaaactgttttctattttcaacatactctaaagaatatgttaaaagctctgtctgatatcaaggtccacttcttcatttctaaggaatggttggaagccaggtgaaatgtctgctgatcacgtat

SEQ ID NO: 217953 - DNA, 559 bp, Homo sapiens
aaaaactcctggccaagatgctcttgcctaaggagagcatctccctgactttctatttaaagcagcaatgagctgcaggcaaaacagagtccaaatattgctacggaagaaaagcttctgcctttcataaccctccgtcttcatataagaaagaatatgtctggcaaccttatgggtttgaaatttgtttatagccctctgtgaaaggttttcactagctctgtgttaacacatggcaggggtgggggtgttgtttattgattgtgtctttgatccaaatttatmttttagcatatctatgagaatcttgaattattttcctataaattcgtcttttatatctcatacaatggatcatttgacactaatgtgttggccaaatgtttgccttatttacattattaaattgcaaaatctttgatacatgaggtcttttaaattatgataaattaataataatgacagcaactctggtggcagtaatttctatttagctcatttaattttcacaatatcactataccttctaagagtcatacaaactaaagtcaagaaaagt

SEQ ID NO: 217954 - DNA, 559 bp, Homo sapiens
aaaaactcctggccaagatgctcttgcctaaggagagcatctccctgactttctatttaaagcagcaatgagctgcaggcaaaacagagtccaaatattgctacggaagaaaagcttctgcctttcataaccctccgtcttcatataagaaagaatatgtctggcaaccttatgggtttgaaatttgtttatagccctctgtgaaaggttttcactagctctgtgttaacacatggcaggggtgggggtgttgtttattgattgtgtctttgatccaaatttatattttagcatatctatgagaatcttgaattattttcctatwaattcgtcttttatatctcatacaatggatcatttgacactaatgtgttggccaaatgtttgccttatttacattattaaattgcaaaatctttgatacatgaggtcttttaaattatgataaattaataataatgacagcaactctggtggcagtaatttctatttagctcatttaattttcacaatatcactataccttctaagagtcatacaaactaaagtcaagaaaagt

SEQ ID NO: 217955 - DNA, 559 bp, Homo sapiens
aaaaactcctggccaagatgctcttgcctaaggagagcatctccctgactttctatttaaagcagcaatgagctgcaggcaaaacagagtccaaatattgctacggaagaaaagcttctgcctttcataaccctccgtcttcatataagaaagaatatgtctggcaaccttatgggtttgaaatttgtttatagccctctgtgaaaggttttcactagctctgtgttaacacatggcaggggtgggggtgttgtttattgattgtgtctttgatccaaatttatattttagcatatctatgagaatcttgaattattttcctataaattcktcttttatatctcatacaatggatcatttgacactaatgtgttggccaaatgtttgccttatttacattattaaattgcaaaatctttgatacatgaggtcttttaaattatgataaattaataataatgacagcaactctggtggcagtaatttctatttagctcatttaattttcacaatatcactataccttctaagagtcatacaaactaaagtcaagaaaagt

SEQ ID NO: 217956 - DNA, 559 bp, Homo sapiens
aaaaactcctggccaagatgctcttgcctaaggagagcatctccctgactttctatttaaagcagcaatgagctgcaggcaaaacagagtccaaatattgctacggaagaaaagcttctgcctttcataaccctccgtcttcatataagaaagaatatgtctggcaaccttatgggtttgaaatttgtttatagccctctgtgaaaggttttcactagctctgtgttaacacatggcaggggtgggggtgttgtttattgattgtgtctttgatccaaatttatattttagcatatctatgagaatcttgaattattttcctataaattcgtctttyatatctcatacaatggatcatttgacactaatgtgttggccaaatgtttgccttatttacattattaaattgcaaaatctttgatacatgaggtcttttaaattatgataaattaataataatgacagcaactctggtggcagtaatttctatttagctcatttaattttcacaatatcactataccttctaagagtcatacaaactaaagtcaagaaaagt

SEQ ID NO: 217957 - DNA, 574 bp, Homo sapiens
tatttcttggttttctattgtattccacagatacatttgtttattctttcaccagtatcatgctctttttgttcctgtaactttatagcaaatcttgaagttgagcagtctcagttctctatattgtttttcttcagtattttcttggctattttagatatgttgaatttccattgaaactttagaatcagtttgccaatatccacagaataacctgctgagattttgattaggattgagttgaatgtacagatcaagttaagaagaagtgacattctaaaataacaatatagagtattcctatacatgaacatagattgyctctgcatttactcagatcttctttgatttctttcatcagagttttttagtttccctcacatagattgtgtatatctactaagacttacacttaaatatttcatatttttgtttctaatgtaatggtattatgtttttaattacaaattccatttgttcattgcctacgtgaaaacaattaatttatgtatagtaactttttatcttgaaacttcactatatttattcccagttatttttgtagattatttga

SEQ ID NO: 217958 - DNA, 629 bp, Homo sapiens
aagcttggcatggtgttgcatgcctttagtcccagctactcgggaggctgaggttagagtatcgcttaaatctgggaggtggaggttgcagtgagccaagattgtgccactgcaatctagcctggrcaacacagcgagactctgtttcaaaaaaaaaaaaaaaaaaagaacttaagatacatcatgtggttaaagcaatacaaaaacaaaaacaaaacatttgactatgactagaaatcgggtgaccttgattcaagtcctggcaatatcagtggttccaaaacttagtgaatcatcagaatcatatttccatgtcccaccagcagaagttcccaattgaatagccttacagtgggtctgtaacttgtcagccaaccgctaccttcccctctaaacatacaactctgcaggtgattttgataatcagattaggggatcattaagttaaatgatattgtgcacttaactttacgtgtaatggtaagagatgatttctaaagggatttttgaattgcatattttatgactcagatacacttcttgctttgtccaggggtttcttctagaaaatgcttgacaaatcatcattcaccttcactcaaagagagctcattctctctggaggctag

SEQ ID NO: 217959 - DNA, 629 bp, Homo sapiens
aagcttggcatggtgttgcatgcctttagtcccagctactcgggaggctgaggttagagtatcgcttaaatctgggaggtggaggttgcagtgagccaagattgtgccactgcaatctagcctgggcaacacagcgagactctgtttcaaaaaaaaaaaaaaaaaaagaacttaagatacatcatgtggttaaarcaatacaaaaacaaaaacaaaacatttgactatgactagaaatcgggtgaccttgattcaagtcctggcaatatcagtggttccaaaacttagtgaatcatcagaatcatatttccatgtcccaccagcagaagttcccaattgaatagccttacagtgggtctgtaacttgtcagccaaccgctaccttcccctctaaacatacaactctgcaggtgattttgataatcagattaggggatcattaagttaaatgatattgtgcacttaactttacgtgtaatggtaagagatgatttctaaagggatttttgaattgcatattttatgactcagatacacttcttgctttgtccaggggtttcttctagaaaatgcttgacaaatcatcattcaccttcactcaaagagagctcattctctctggaggctag

SEQ ID NO: 217960 - DNA, 629 bp, Homo sapiens
aagcttggcatggtgttgcatgcctttagtcccagctactcgggaggctgaggttagagtatcgcttaaatctgggaggtggaggttgcagtgagccaagattgtgccactgcaatctagcctgggcaacacagcgagactctgtttcaaaaaaaaaaaaaaaaaaagaacttaagatacatcatgtggttaaagcaatacaaaaacaaaaacaaaacatttgactatgactagaaatcgggtgaccttgattcaagtcctggcaatatcagtggttccaaaacttagtgaatcatcagaatcatatttccatgtcccaccagcagaagttcccaattgaatagccttacagtgggtctgtaacttgtcagccaaccgctaccttcccctctaaacatacaactctgcaggtgattttgataatcagattaggggatcattaagttaaatgatattgtgcacttaactttacgtgtaatggtaagagatgatttctaaagggatttttgaaytgcatattttatgactcagatacacttcttgctttgtccaggggtttcttctagaaaatgcttgacaaatcatcattcaccttcactcaaagagagctcattctctctggaggctag

SEQ ID NO: 217961 - DNA, 465 bp, Homo sapiens
aaaagaaccatctcttcaataaatggtgctgggaaattggatacccacatgcagaagaatgagactagaaacctctgtctcactatattaaaaataatcaagagagaaactccatctcaaaaaaaaaaataatgatcaaccaaaaagtggattaaagacaaacgtagggcacaaaacaatgacactagtataagaaaacatgggggaatacttaatgacaatggactargcaagaactttttttaaagacctcaaaaacttggacaacgaaagcaaaaataggcaacaaaactaaaatactcacatcaaactaaaaagcttctgcacagcaaagaaaacaatcaacaaattgaggagacaatctacaaaatgggagaaaatatttgtaaagtatacatccgacaaaagtttaatatccagaatatacaggaatccaaacaactcaatagcaaaataaaaagaaaa

SEQ ID NO: 217962 - DNA, 586 bp, Homo sapiens
cattaatggcaaagtggtccttacttaacatttccttagaaactaagattttaagtatatgtttacatgctcaacactttgaactttgcagaacatttagagtgctacagggtaggatgaaaccttaaaaatatatgctttgagctatatttaaaayagtaagcctctattatgcaaaatgttgtaacatactacacgtgaagtaaataagttcagggccctttaagaattctagtagtaaaataataggggcagacatgaggtcctgcgtgattctactctgagaggttaaaatacagctcaaggaaaatacagctctatctgagtgtgaacaactctaatagggaagtttattagaaatattctctttcagtagaaatcaagttaatgaaagctttaaagaaaatatatcagagtgttactagcataagtgaaactatgacagtgatcagaatcttcctgataaagagaaaaaagaatgattcgcagaaaaaaaaataactgaatgttaatggctaacaaatctatgatgtttaaaaatatagattctgaagaaacctgtttaagatagaggaaaagaaaagga

SEQ ID NO: 217963 - DNA, 631 bp, Homo sapiens
ccattaaaaaaaattttatcaagagtgtgttttgtaccaggttctgttctaaataccaataatacagaactggacaaaagtttctgtgcttatggaacatatattctagtaggagacagacactaaacataataagtaaatagttattatgttatagggtaataaatgctaagaagaaaaataatgaaagcagagaagggggctagagacttcagtgtggaaggggttgcaattttggagaggatggccagagaaaaatcatccctgaaatgatgacatttgagcaaagacctgaaggcaataagcctagagatatgagaaggaacagcattccaggcagaggggatagyaagcaccaaattcctgaggtataatcactcttggtgtattcaaggaacagcaaggtggcaggtatgattggagcagtgagtgaaggagagtgtaggaagagatgaagccagtgaagtaacaggaaactagactggatagggcctgggaagctcatgtgaggattatactgtggtttttttctatactacaatccatttttcatcaatgtcatattttagaattgctgtagtactcttgtgaagtatagtcaagctcttttatgttatatagatataaaatt

SEQ ID NO: 217964 - DNA, 631 bp, Homo sapiens
ccattaaaaaaaattttatcaagagtgtgttttgtaccaggttctgttctaaataccaataatacagaactggacaaaagtttctgtgcttatggaacatatattctagtaggagacagacactaaacataataagtaaatagttattatgttatagggtaataaatgctaagaagaaaaataatgaaagcagagaagggggctagagacttcagtgtggaaggggttgcaattttggagaggatggccagagaaaaatcatccctgaaatgatgacatttgagcaaagacctgaaggcaataagcctagagatatgagaaggaacagcattccaggcagaggggatagtaagyaccaaattcctgaggtataatcactcttggtgtattcaaggaacagcaaggtggcaggtatgattggagcagtgagtgaaggagagtgtaggaagagatgaagccagtgaagtaacaggaaactagactggatagggcctgggaagctcatgtgaggattatactgtggtttttttctatactacaatccatttttcatcaatgtcatattttagaattgctgtagtactcttgtgaagtatagtcaagctcttttatgttatatagatataaaatt

SEQ ID NO: 217965 - DNA, 485 bp, Homo sapiens
ataacattattcacaatagcacagctgaaggtgaattaacacaggaacagaaaaccaaataccacatatcctcatttataagtggaagctaaataycaggtactcatgggcataaagacaggaaaagtttaattgattcagagttccacatgaatagatattgtggactattagaaaggggaggaagaagaaggagcatgggttaaaaagctacctattgggtactaaactcactatctgggtgacaggatctgtaccctaaacctcagcatcatgcaatatactcatgttacattcctgtacatggacactctatatctaaaataaaagttgaaattttagaaatcaaacccacaaaaattatttctacattggtaaatattctatgacaaaaattctaaagcctctgtattaatttcttcttgctgcaataacagcttaccacaaacttagtggcttgaaaccatacaaatttattatatttc

SEQ ID NO: 217966 - DNA, 485 bp, Homo sapiens
ataacattattcacaatagcacagctgaaggtgaattaacacaggaacagaaaaccaaataccacatatcctcatttataagtggaagctaaataccaggtactcatgggcataaagacaggaaaagtttaattgattcagagttccacatgaatagatattgtggactattagaaaggggaggaagaagaaggagcatgggttaaaaagctacctattgggtactaaactcactatctgggtgacaggatctgtaccctaaacctcagcatcatgcaatatactcatgttacattcctgtacatggacactctatatctaaaataaaagttgaaattttagaaatcaaacccacaaaaaytatttctacattggtaaatattctatgacaaaaattctaaagcctctgtattaatttcttcttgctgcaataacagcttaccacaaacttagtggcttgaaaccatacaaatttattatatttc

SEQ ID NO: 217967 - DNA, 653 bp, Homo sapiens
gttatttgtaaaatgagttatttacggacattgttacaattttagtaaaaatgtatcatgttagtgcagtaaaaacaggtaaccatttttgtcatacacacacatttacatccttaattcaataaagcaaatatttagttaataagccctatttttaaagcaagaagtgattcactgggaactgtgatttaataagattaatcatacagtagtgtgtaccctataatggagataggcgaatctagagtcaaagagaccaattaggacattactgtcttaatccaggtatacacttgatttaaaaactaactttaaatagggtaagtgtaataaattgcataggaaaaaatgtaaaggttcctaattatcaggtttgtcttttatatttgaaaaggtactgatttatgccaatgttatcaccccaaactttawgatctcagtggaggatactcaaattaagggatttttagaatagttaatagtttacacttcaaataaaaaacagctaagatcctgacattttcctccactagtgttttatagtaaatccgtttgaaaaccatttgtatctgattgtctactcacaattagacagaagactaagagtgatacagctctaatgggatgaaagtagattatatagttcaataccc

SEQ ID NO: 217968 - DNA, 603 bp, Homo sapiens
caatcattgattccttacattgatatctgcacatttgaggggatggctacttcttccagcttttgcacgttagacctttactatttaacattggaacttaattattggtctccaaataaataaatatcaggtagttataagtactacaaatacaaattaaaaagtataaggggatagaaaatgtgtataagggatagaaaaagtggctagggaggatttttctgataaagtgatatttgagtgcagacaaaaattatttgaggagacaagtggttttctgagggaagagtgttctaggctaaagagatactgcatgtaaagccccaaggcgctaaaatgtgtggcatgtacaaagaaatggcaaagaagctaaagtggctgaaatgaagggagtaagaagaagtgtaataggagataagttcatcaaartagccagggaaaaattatatggaaaactagcagaaatttagagcagagagagacatgatctgagttatttcttttttttaatttctagaaagtatatgcagaatagactgcaatggagcaagcatagaagcagataggatagttagagggctatgccagcaaatcaggcaatag

SEQ ID NO: 217969 - DNA, 451 bp, Homo sapiens
cagtaatttatgccaataggaaaaaagaaaacatgtgtaacctatttacacaatacaataacagttttaattataaggtrcatattgaaagtcattttatgtgccattttctgtattttgaccatcagattaaaaaataacttttacttaactggagtattccattctatgaaaaaattatttattaaacacttttatgtactgggaaatgaccaggttataaataagagcaagtccttttttttccccatcaacatttattttatgttctggggtacatgggtaggatgtgcaggtttgttacctaggtaacaaaccatgtgtgccatggtgatttgctgcacagatctacccattacttaagcaataagcccagtattcattagctatacttcctgatgctctccctcccccaatggccctcagtagaacccagtgtatgatgtttccc

SEQ ID NO: 217970 - DNA, 522 bp, Homo sapiens
tacctttcactgtgtcctcacaagggtgaaggggctaccgtctctggaggctctgagaagggcactaattccattaatgagggctctgcccaaaatgacttcscaaaagtttcttctcttaataccatgacattagggattagggttcaacatacgaattttggcgggggcagggggactcaaatattcagaccatagcaccttgtcaaaggtaaataagagttacccaggagtcttacctgagtcatatgggaaggctggttctttgcagtgaacatttttctcctataaaaaagagtagagagatttctttaaccatcactgttatctaggatcacggggctctgacaaagttcagcactgtcaagagaaagaacccagcaacatgacagtaactaaatatggcagtgatgatcccctatagggaactatggccatttactcaggtaagtgtatcctaggaaaaaaaaaagaatacctgggaatttttaataaaggagtgagttgatattgctagtgagg

SEQ ID NO: 217971 - DNA, 403 bp, Homo sapiens
ggctgtatttatcccattaattttctcataaatatttacctgaagataacaatagtgattctgtagaaaatgttgacagaaagartagaattattaagtggatcaaagtcataaagttgtggattattactagttaatatgctatgtgacataattctcaccccttaagaccaaagtgcctagacacctagctattgcaagtgttattttttgatagatcacagctagctaagttccttttcgggctgggtgcaatggcttacacctgtagtcctggctactcaggaggctgaggcaggaggatcgctgaatctaagagttagaggctgcagtgatctatgattgtgccactgagctccagcctgtgcaacagagccagactttgtctctaaaaataagtaaa

SEQ ID NO: 217972 - DNA, 563 bp, Homo sapiens
ttctgaccctcaaattttccatattgtcacgttggccccatacattacctaaaatgtgctttattccagcagaagttttcttcttgggcaagacaaatacttagcttatccctctttctttcccattctttagtaacactgtttaacattgtttcttccccttgtttagtaacattctttgtttagtaacattatctactagtagggaggagggccggaattgtctgccaatcttaaatagtttctcttcttttgggtacgacattaataatttattcaattaacagctctttcatatttcactgtggtttcagtactttacattttatttttatatgttttttgttcttgggagcatcaagctactgtgtcctactacatgttattggggagaagtttcagagtaaaaacgtgaacttgctcttatacactataaaatattgcatagtcaccctacttagccagttttcttttcttttcttttttttgagaccgagtctcactctgttgcccaggctggagtgcagtggcacaatctyggctcactgcaagctcggcctccg

SEQ ID NO: 217973 - DNA, 411 bp, Homo sapiens
tggtaggaaagggaaggaaatgacatattttcctttcaagtctgtgcctagatcttattttgagtacagtaatttgattcatgcttatactctgtgtctgatttattacygatttcatcatgagtgcccagctccactggctcttgcccatttttctctaaggtagtgaaaccaccatccacacaatgactgtaccagttgaccctgttagcacttttaactttccacttaaacatctccttttgctagttatttttagatttatagttgtatgggatatgtacattgtatagcaatatgatacctatggaatgttctgcactatgtaaatcaatcaccataatagcatctctgggtgaaaccaggggcagagaggacaggatgaaatggggacagagaatggaatagagg

SEQ ID NO: 217974 - DNA, 411 bp, Homo sapiens
tggtaggaaagggaaggaaatgacatattttcctttcaagtctgtgcctagatcttattttgagtacagtaatttgattcatgcttatactctgtgtctgatttattaccgatttcatcatgagtgcccagctccactggctcttgcccatttktctctaaggtagtgaaaccaccatccacacaatgactgtaccagttgaccctgttagcacttttaactttccacttaaacatctccttttgctagttatttttagatttatagttgtatgggatatgtacattgtatagcaatatgatacctatggaatgttctgcactatgtaaatcaatcaccataatagcatctctgggtgaaaccaggggcagagaggacaggatgaaatggggacagagaatggaatagagg

SEQ ID NO: 217975 - DNA, 411 bp, Homo sapiens
tggtaggaaagggaaggaaatgacatattttcctttcaagtctgtgcctagatcttattttgagtacagtaatttgattcatgcttatactctgtgtctgatttattaccgatttcatcatgagtgcccagctccactggctcttgcccatttttctctaaggtagtgaaaccaccatccacacaatgactgtaccagttgaccctgttagcacttttaactttccacttaaacatctccttttgctagttatttttagatttatagttgtatgggatatgtacattgtatagcaatatgatacctatggaatgttctgcactrtgtaaatcaatcaccataatagcatctctgggtgaaaccaggggcagagaggacaggatgaaatggggacagagaatggaatagagg

SEQ ID NO: 217976 - DNA, 484 bp, Homo sapiens
ctgtcaatggtagcatcttacacaattatagtacaatatcaaagcaggaaaattcatgttagaatccacagacattacgcagaatccacaaaagttatgctcttttttagtatttcttctaccttctatgctttagtgtaccaccctctcaattagacaattttaaatttatgggatacctatgtattaggcattatgtgaataagagtattgccatacatgggcattcacagtctacagggagaggaagactcataataaagaattaccatatttcatgtagtctaagacaccctcaattgtaagatgcatcattattttatttgacactgaaaaattatrccaaataataacacttctgccattataagagacctcttgatttcagagatgttaaaatgtaaaattttaaaaagcacatcttaaaattgacaatatgcaatataataaatactataatcgagatattagtataatattatag

SEQ ID NO: 217977 - DNA, 484 bp, Homo sapiens
ctgtcaatggtagcatcttacacaattatagtacaatatcaaagcaggaaaattcatgttagaatccacagacattacgcagaatccacaaaagttatgctcttttttagtatttcttctaccttctatgctttagtgtaccaccctctcaattagacaattttaaatttatgggatacctatgtattaggcattatgtgaataagagtattgccatacatgggcattcacagtctacagggagaggaagactcataataaagaattaccatatttcatgtagtctaagacaccctcaattgtaagatgcatcattattttatttgacactgaaaaattataccaaataataacacttytgccattataagagacctcttgatttcagagatgttaaaatgtaaaattttaaaaagcacatcttaaaattgacaatatgcaatataataaatactataatcgagatattagtataatattatag

SEQ ID NO: 217978 - DNA, 583 bp, Homo sapiens
ttgcatatatatttttgaagcatgcaaaatatatatggcattattttgcatgctttaaaactataataaaatcattatgtatattcatatatggtgaatgaaacacatgcatgagtatgttcatcacagcactattcacaatagcaaatataaaacaattttttgctcattttatatgtgagctttcttaatggtgaaaaactgtagctatgctctataatattccattttgttaaaatttggtcatgtgtatctccatttttatggtgattaaaacataaagtttccaatttttttattgttatacacattgctgaaaacagctttcttgtacaagccccttagccacatatataagtgtgtcatccatccaygtagaaaatttcccttttctctaagaaaaatagccaaaagtcagtattatcatcacttacatcttcaaagtcttattttagagcctgaatagccaaagcaaacctaagcaaaaagaacaaagctggaggcatcacattgcctgacttcaaactattaatatactacaaggcttcagtaaccaaaacagcatggtaccaatataaaaata

SEQ ID NO: 217979 - DNA, 579 bp, Homo sapiens
tttgggacatgttactagaaaatatggcaccatggcatgtcagaaaacagcagaagcaggaaggccactctgccctttcccctttttccttgaagcaggttataaaacctaggaaagattttttttctggcctttccctgaaactgatcataagaccctcattcgagaggcacctacctatgcctataaaggaacatccttatctctgaagataggaaaaagtctgaacgaacacgatttgctaagttttccctagctttttaccattagatcataccccctttgtccagtcatacttctccatggactatcaatttctttattaagtctagcataaaaaatacattggtttacacgtttcttcaggtcttcatttccttataaaacttayattaaatacattcatatgcttttatcttgttaatctgtcttttattatagggacctcagccaagaacctcagatgagaaggaaagacactgttcatcccccacactatctaggatttgctcttggtatttatgtttaggaaaaggggatttgctgttcattttttaaatataggaaggtttttgataa

SEQ ID NO: 217980 - DNA, 443 bp, Homo sapiens
agatgttcccaagttggaatctggatggtaacaaaagctactttgcacctttgatcatataaagatggcaacttaaatattttgacacatggaaattatgtgattacttaataataaaatgagagctaataacaaattgttcatttaaatccatttgaaatggctacatgagttctcataagaaaagtgggggtctaagtgaggtttgagaagtatagatcatacccctgcttcaccccttttgatggccatctcctcattacctctgaataatccagtcacaagcataacactcaaggccttggagagtctggccataggacaccttttgaacttttaactcaccacatcctcccatacrccttcatgttttccacaccaaaaatgcttcaggcatctgcaagcaggccaggtactttctcaccttcatacctttgtttctt

SEQ ID NO: 217981 - DNA, 609 bp, Homo sapiens
aagcttacaatcatggcagaagacaaagagggagagggcacatcacatagcaagaaagggagcaagagagaggaggaggtgccaggctctttttaataaccaggtcttatgtgaactgataatgtgagaactcacttatcactaagtggatgacaccaaaacattcatgagagatctgccccatgacccagtaccttctactaggccccatttccaacactggggatcatatttgaacatgagatttggaggsgacaaacatctcaactatatctcttcatttaggaagtgagggtacgaagcccactcggaggctaaagacactaccactacccaaactcccaaacaaagaataagaaggtcttccctccaggggcaccagtacccacaccaactgtcccaactgtcctacaagggtttgttcaattatttaagagatgaggtctcagaatatctttctgggaataaatggccctttaggtcgctagtgataaaaaccaattcacactagtttaggcaaaaaataaaaataaaaaaagccaacattattagcataggtgcacaatctcatttcagttctgatatccaaagagctctgaaaaccaaatg

SEQ ID NO: 217982 - DNA, 480 bp, Homo sapiens
ttcaagcacagcatccctgaattatgtccagttgttgtgcatcttcagtttaacctttattcctgattcttggagagaatgaatacagtcaataaaaatctacagtagtaaamtaacattgagtctgggaggctggtgggaatgattaatgaaaggaatttatttcttgttgatttattaataattgaatttgtgtagaaaaaaattaatagggatattagagagatggtttagagaaagaagataactatttgccgaaataaatcattgttttcttactagcttgttgcaactttgctactctaaggagctgtaaagtgaagcaaacaatgcttattgtcagatgtaatccttgaagagtttgtttattgataaccaaagaacatctaaagataatgtgtattttgcaagattattctctttcacctgctgattaaattgtgagaaatcggtgagcccagatgcaaatttccctgttcc

SEQ ID NO: 217983 - DNA, 603 bp, Homo sapiens
ttcggtgattttggatagcatttttggctgmatatttgtcagtcctgataatctcttggttggaaagcccaatgatggatgacacaatcctgcttacaaagccttttaaagcattttttagtccatcatctattatgaacctaatcaatatcaccgatgataccagtcaaagagctagaaggtaggaaaggcaatacttttatgtatttcaaggcatgtatatctttcatggtgtgttcttaatgtgctaccaggaaaataatttatgattaaaattctcccacccttcagtctgacaaatttgtatttaattaaaatatgagtccttagagaaaagcaatggagaaaaaatgtagaaatacagattcctatcctggcacaaaactaatttctctgttctttgcctgaacagagaagggtgtaaaaatgaggaaacctgtatggagacctctagttaaaaagtgtacttctttttcttttcctcatccttcattccagagtcttcctctttgtcctctttcatttgacctgaactcagattttaaaatttcagaagccatgaatcatacgtatatttcttagactgatataattcacaaataa

SEQ ID NO: 217984 - DNA, 603 bp, Homo sapiens
ttcggtgattttggatagcatttttggctgaatatttgtcagtcctgataatctcttggttggaaagcccaatgatggatgacacaatcctgcttacaaagccttttaaagcattttttagtccatcatctattatgaacctaatcaatatcaccgatgataccartcaaagagctagaaggtaggaaaggcaatacttttatgtatttcaaggcatgtatatctttcatggtgtgttcttaatgtgctaccaggaaaataatttatgattaaaattctcccacccttcagtctgacaaatttgtatttaattaaaatatgagtccttagagaaaagcaatggagaaaaaatgtagaaatacagattcctatcctggcacaaaactaatttctctgttctttgcctgaacagagaagggtgtaaaaatgaggaaacctgtatggagacctctagttaaaaagtgtacttctttttcttttcctcatccttcattccagagtcttcctctttgtcctctttcatttgacctgaactcagattttaaaatttcagaagccatgaatcatacgtatatttcttagactgatataattcacaaataa

SEQ ID NO: 217985 - DNA, 603 bp, Homo sapiens
ttcggtgattttggatagcatttttggctgaatatttgtcagtcctgataatctcttggttggaaagcccaatgatggatgacacaatcctgcttacaaagccttttaaagcattttttagtccatcatctattatgaacctaatcaatatcaccgatgataccagtcaaagagctagaaggtaggaaaggcaatacttttatgtatttcaaggcatgtatatctttcatggtgtgttcttaatgtgctaccaggmaaataatttatgattaaaattctcccacccttcagtctgacaaatttgtatttaattaaaatatgagtccttagagaaaagcaatggagaaaaaatgtagaaatacagattcctatcctggcacaaaactaatttctctgttctttgcctgaacagagaagggtgtaaaaatgaggaaacctgtatggagacctctagttaaaaagtgtacttctttttcttttcctcatccttcattccagagtcttcctctttgtcctctttcatttgacctgaactcagattttaaaatttcagaagccatgaatcatacgtatatttcttagactgatataattcacaaataa

SEQ ID NO: 217986 - DNA, 579 bp, Homo sapiens
atgtgtattttttcacaattaaaataatattcttacacatagtatttcatgaactgaaatactatatagtattgtactatgtccaataatacatacacaatgtaattttgctattgaaggcagtagttctaatgatgagagtggtcaaaatccttacataatgcaattgttctgaattctggatttaagatatgactatacaaagacgtgtctgggcacattaaaacaatttttgcaaagatcatcatggtgttgaatagtgattaagaaaaactggtaaaaatttaaaacattgcatcatgtctctacagcttagttgaaagtgtttttcttttttgtgtgtgcaaatgcatacatgttatgttcatgcagagacacagctacctcacacatactctctttaacttcctctgaaaacatgtattatttaatgagtcagtgcctctgctgtgtgacaattgtgcttgtctacacttccctgtctcatatctaaaaaaattatatgtctggtgccaaatatcatggtcagacttacctgyagggcttttaaaatgcatatgtgtcattatgtttgaaaat

SEQ ID NO: 217987 - DNA, 401 bp, Homo sapiens
aaatcagcccctgaagaatgatgtccatacaatgagcttagccctcagagaggaaaagctgtaatttaaacctgtaggaatgcagtttagcttaaggtgcctgcccctttctcctcacaaaatcctaggctgtggaaaataaaagtggtaaatgttatataaatagtgcatgacatttgcaaaggttaagaagagtctctttaccccttttcttcttttaccaagtattatatktgagcagtgaaccccaaggtttcagtattcaggtacaagcctgcaggtcagattactggtgatacagagctagatcaggaatttccaccctgtttgttccttggaagaaagcaaggaagattgtgcacaaacacagcccaagcaagggcgaggtggcattctgccaa

SEQ ID NO: 217988 - DNA, 581 bp, Homo sapiens
aaaatggaagttttttacctgcaaatatgaagaaggatttttttaaaacattgtatagtatctgaatagttctctttgatggtaccttatctggaatttaatcacagtgtttattgatgtttccataaatatatctgtattgaagcacagtttattttctgaaccacagagctctaatttcacccaccccatagaatactcatcattttcatccaattccttgacttcataggaggtcttccttcctcttcaatgtgagaaatgaaccattttccaycacttaagctcacagtggctgctatagtagaagtcctttgcacaagagagaacgattcattaggcactcagcaataccacactaagtaccatgaggagaaattaaggacctagataaagaccctgccattgagggatatccatttttagatgcgaatagtcagcaactttgaagaaactgctgttagtgctccctaatcttcccagtctataaacgtcttttctctgtttgctttttctttccctttcctgctttactggccttaggcctgacattaacactcccaggtactcaaattcccaga

SEQ ID NO: 217989 - DNA, 584 bp, Homo sapiens
gacatagatatagatatagaagacagataccatgtacagacatatggcacagattgagcagactctcccacctgcctcatccctgagctgccacaatcctttggacttgcctctcttagagccattgtcattgtcttttgtctttgacaagccacagtcttttaatcaccagaagtttttaatgtcttcaggcaataactctttcaggacattatcaacatcagctgaatgctcccccacacaatagctattgcttcttaaatggaaaaaattcttacccacactaaaactttcaacgttaagaaattattatttgcaaagagtgcatgycaaagcaaggagggtagaaagtaaactttccatacccttcagtaatcaatttttacttaaacacaatttgaatttaacaaaatcatctaatcccaaacaagcaaaagctgaatgaactcatccctactagaccagccttataagaactgctcaagggatttctgcatctgaaagcaaaaagatgatcatcatcataaaaacaggtaaaatgataaaactcacttataaaatagaaatataaaggagaaagtaaa

SEQ ID NO: 217990 - DNA, 500 bp, Homo sapiens
caacaattaaaaattgtatatatttatcatgtataacatgttgttttgaaatacatatttattgtagaatggctaaatcaagctaattaacatatgtattacctcacatatctatttttgtggtgaagacatttacaatctaatctcttagcaattttcaagaaatttgaattttcaagaaatctgtatttcagtcaatacattgttattaactgtagtcaccatgttgtacaatagatctcttgaacttattcttcctaactgaaattgtgtacccattggccagcatctccccaaccctcagcccaagcccagtccctgggaaccaccattttactgtctgttgtgagttcaacttttttggagtccacatatctatgagactatgtatttctatttgtctagttctatgcctggcttatttcacttaacgtaatgtcctccagttttatcaatgctgtygcaaatgagaggatttttttaaatgaccaaatagtatt

SEQ ID NO: 217991 - DNA, 503 bp, Homo sapiens
tctgatagtttggaccctgcctatttaaggcctgtgttgggttgtcatccactcaaccgcattttctcatcccacatttcctcaccctgtggccttcatgctttgtttcccactccaggttctgttctgatcttggctaggaaccctgatgcctgtctgttctggcattgtcctgcatgctaggcatgtcagagacaggaaagatggtgagagagacagcctcttaggtgcacagaggtcccattttctaaatggatattcatttggatagcgaaatgaagctctgagtttgacttgatactctgagcttccctcctagataggagcatcagtgataactccccatgtgatcaatgaaaacgccgaggccctgaggggggaaaaaagactcagcccaaatcccagmaaagcattcatggccaggcacatagtaggcactcaatagtcacttgattattgtgagaggccatttattattatagctgagagctcagggtttgagg

SEQ ID NO: 217992 - DNA, 577 bp, Homo sapiens
gaaggttattatgggagaagatgagtcctcagtgtggaccactgtggtcagagtagagtgacagcataggacagtgctaggaaaggaggctagagagctaacttcaaatttgaaaggtggaacatttttctgtgttgctcctcaaggaaaaacttgaatgctaacttcttatcttccaggtctcagattaaatgtcacttcctccaggaagccttccctgaacttcctcccctctacccccaagactacatgaggtcatcatgcattcctgtcataactctgcacttctttgaaacattttgtgaaggcagatctaggtctgattcatttcctcgtggtatttcttcagcaacaagaacagtttcaggcttacaatagatgccttatacacatwggatgaataaaaaaaacaaaacaaacaaacaaaaaacaaatgagctagtggtgaaagttgaaaaaggaacagatgtggttttcattaaaacagttcataacaccaagccatgtctatagtagaaggggtcgcttccaagagctggctgaaaagagtaaggacacaaacccaaggcttttgcct

SEQ ID NO: 217993 - DNA, 571 bp, Homo sapiens
gggataatggacatatttacctcgaagaattgttttgaggattaaactaattgattatgaaaagtggcactttagaacaaaatctggcacaccctgaactctgtatcagggctaggtatggcaatttttacatccattttatgaaagaggatgcatatacctgctaggaggggaaataagactgcaaagcctgtcttctctgcccaaatgctgggctcttcccaattgacaaagctaactgttgatgctaacctttcctaagactcaaaagcaggacaatgaatgctcatctctgttttttcccttgtggggagagaaaggatcaagtctttaccacactccattgccagytctccttccctcctgcagcccttctttgttttcctatcccagagccaggccccatcaccacttttcagaaatgccatcttaccggggcaccaccctcagaggccctaaaagacagagtgatttgggattctcatctcatctccatttgtctgctagagtctgggcagacagcagaacacagtcatctaattagaagtctcgtctcctctggggctcgggg

SEQ ID NO: 217994 - DNA, 560 bp, Homo sapiens
tttgttttcaatttttgattttcaatcttaattaattaatttttaattggcaaatgaaaagtgtgtatatggtgtacaatgtgatgttttgatgyatgtatatggctgtggaatggttatatcattatactgataacttgatatatatgttatgtattaacatatatatgttaatatgactgtattaacatatccatcacctcacacacttatttttgtgatgagagtatttaaaatctactctcagcaatttttaatatacaatacattcttattaactgtgctcaccatgctgtacaatggatcttcagaacttactccttctgtctaacttgaagaaccatttttgagatgctattttgccttttactagatatgtaaccttgagcaaatcattaaacatgcctcatatgcaggtttatgataatatctcacccattgcctcctagggttgttttgagaatcagctgagatgttgatgatgatgatggcagcatttattaactctttaatcatcacagccaccctaagagagagtattattgttagcggtggcaaat

SEQ ID NO: 217995 - DNA, 511 bp, Homo sapiens
actttctatttttacatagtcaagtttattatttttcttttatgctttctaggtttggatcataattcagctttctcattctgaaatcttaaaaagtttcccatttttttttagtatttttaatacttcattttttacctctagatctgtgatctatctggaattttayttttgatgtaaaatggtagagatccaacttaattccttttaaaactttcttgacaatgtattaaatgatctatgtttttctcactgaattttgttgctaacttcgttagaaattacattccttcatgttttggggtgatttctggtgctatagtctgctctatttatgtgtgtgcttaatcttgtgcctgtgccctgctgttttaaatactgtatcttgatagtatgttttgtatctagcagagttagtcacccttcattattgttactttgtataattttcttaggtatttgtgaatgtttacttttgttggtctgaagatgtcttcatcttgcccttaat

SEQ ID NO: 217996 - DNA, 511 bp, Homo sapiens
actttctatttttacatagtcaagtttattatttttcttttatgctttctaggtttggatcataattcagctttctcattctgaaatcttaaaaagtttcccatttttttttagtatttttaatacttcattttttacctctagatctgtgatctatctggaattttacttttgatgtaaaatggtagagatccaacttaattccttttaaaactttcttgacaatgtattaaatgatctatgtttttctcactgaattttgttgctaacttcgttagaaattacattccttcatgttttggggtgatttctggtgctatagtctgctctatttatgtgtgtgcttaatcttgtgcctgtgcccwgctgttttaaatactgtatcttgatagtatgttttgtatctagcagagttagtcacccttcattattgttactttgtataattttcttaggtatttgtgaatgtttacttttgttggtctgaagatgtcttcatcttgcccttaat

SEQ ID NO: 217997 - DNA, 583 bp, Homo sapiens
ctctcaatttctcatttcttctccttcaccttagacctccctatacactccagtctygcctgaaaatctttcataggagaacatttccccacctgcaggaagggtctgggattaatcttgttgttataacgcagatagctgctgtaaacccatttatttaacatacatcccctgaggtttatattggagagaagtgcagtctgcagtctggtaccagtctgcaaaatgtttgtagctggtccgtgaggaaagaagtatggaaaatgaacatcgctatgcctgtgatggtatttctttaggttctggagtttatcaccatcaagactatcactagcaggcttctcctgcctgctcttaatattgaagaatttaatgcaggctgagtacagtgactcatgcctgtaatcccagtactttgggactatgaggcaggcctgggcaacatagtgagatcctgtctctaaaataaaaaaaaattgctggatgtggtggtgcatgcttgtaggcccagctacttgggaggctaatgcagaaggatggcttgagccctggtggtcaaggctgcaatgagccatgattgcac

SEQ ID NO: 217998 - DNA, 558 bp, Homo sapiens
aggaatgaaagggaaaatatgagaattcagaaattctgagatttgctgatttaatctatgctactgcttctcatttctttccaaaaaaattctcattctaatgtgtaacctgagggcaagggctaaatgcaggtgtgttgccactaagatacagcctgggaacaagaccaaatcaagagcatggcttacacaactttyactgagatatctgactgaataaataaggtagctcccagtaaattatatcagttggacaaaatagcttacagcaaaaagaagggcatggtcccactgaaggctgacaagcttaaggtaccatgattaagggagaaaaatagagagagggtgagattcatgagtagaaaattattgtgtatatagctattaacatatgaagttgaccggaatcaaatagattaaatataaacaaataaatctccccaacatttaaactagccctgtgttatgaaaagcactttggcacggactaacaaagactgtgagtgaattgcaaaataacctaagtttatagggacagatgtaagaagctgcttaaac

SEQ ID NO: 217999 - DNA, 558 bp, Homo sapiens
aggaatgaaagggaaaatatgagaattcagaaattctgagatttgctgatttaatctatgctactgcttctcatttctttccaaaaaaattctcattctaatgtgtaacctgagggcaagggctaaatgcaggtgtgttgccactaagatacagcctgggaacaagaccaaatcaagagcatggcttacacaactttcactgagatatctgactgaataaataaggtagctcccagtaaattatatcagttggacaaaatagcttacagcaaaaagaagggcatggtcccactgaaggctgacaagcttaaggtaccatgattaagggagaaaaatagagagagggtgagattcatgagtagaaaattattgtgtatatagctattaacatatgaagttgacyggaatcaaatagattaaatataaacaaataaatctccccaacatttaaactagccctgtgttatgaaaagcactttggcacggactaacaaagactgtgagtgaattgcaaaataacctaagtttatagggacagatgtaagaagctgcttaaac

SEQ ID NO: 218000 - DNA, 577 bp, Homo sapiens
tggtatctgctactattgtattccattctattccaaacatgtcaacggccacctactcaactgatttcataaccccctaataggccacaacatgcagttttaaaatcattttcctgaagtataataggctatatattataagaaattttaccmagccagttcactaggagaagtttaaaaaaatagatatgttcaaaatattgctactattttagctaattttaatttctataagttatacatgcacagaatgtaaagggttgaatagtattatgagtacccacaaccattcccaactctcactttccacttctcacttctgcagtgctaccatttgcaactcttgaaactgttttttttcatatttatctgcatataatcatagagcacattcatatgtctacttctcaaatttttagttttaggcattatctattgattcctcactctagaaatttactccctggtcactctctcaccctacccatacttcttctcctttccaacttgcagggtagctatatcaccgttttcattagattagtattcagggtttacgttgttatggttatagaaa

SEQ ID NO: 218001 - DNA, 511 bp, Homo sapiens
gatttcagcacaagaagaagaaggacttcccaatcaacatcaaaaaaatcaaatttgaatttttgaatttatcaaaaaatttgatggatataagaaatggacttctgttaacagaaaattaaaacagtgggcatttgtactgttctttactacctaatgtttatttattatcttatttgctataacaatcttaaatcaactgagtctaaagaaaacatttttctctttttttccttttttttttttcaagacagaatctcgctccgtcacccaggctgtattgcaatggtacaatctcagctcactgcaacctccaccacctcccaagttaaagcaatacttgtgcctcagccacttgagtagctgggattacaggcacgcaccaccatgcctggctaatttttgtatttttagtagttatgggttttgtcatgttggccaatctgatcttgcactcctggcctcaagtgatctgcccrccttggcttcccaaccaaagtgctgggattac

SEQ ID NO: 218002 - DNA, 627 bp, Homo sapiens
cagtttcaaactaagaaatcttgtgaaataaactatcaaagaagaaactaatccctagcactaatcaaattcaggaascctaattagagctgttaagcctcatctgccaatctggcatttgctcaaaatgtggtcaggaacactaactacttcagtgtataaaaatagagattatctcaaaatccacaatataagacatcattatcttctgagtaaataatacaagctagagtatacctcgtaataagtaaatgatctcttttattttaactgaagaaaaagaatcaatgttctggatgtaaatgtcctcaacagtgtttatttcttattcttggccagaaaagaagaaatgcattaagtatgtaataattcaagcagctgacaaaatgtaaaaaaaaaaattcagattctaatcgcaaagatagtgaaggtcttccgtctgcagccctctaattttctaactttatataccctctctcggtgacctcatccacatccatagtttcaatgatcacttgtacacctataacttccaaattgccaagagtccttcctcagtgtcttcctctcctcccagcaaatgacttcacttatttccatcaagcaaattgacatctttagaaagta

SEQ ID NO: 218003 - DNA, 627 bp, Homo sapiens
cagtttcaaactaagaaatcttgtgaaataaactatcaaagaagaaactaatccctagcactaatcaaattcaggaagcctaattagagctgttaagcctmatctgccaatctggcatttgctcaaaatgtggtcaggaacactaactacttcagtgtataaaaatagagattatctcaaaatccacaatataagacatcattatcttctgagtaaataatacaagctagagtatacctcgtaataagtaaatgatctcttttattttaactgaagaaaaagaatcaatgttctggatgtaaatgtcctcaacagtgtttatttcttattcttggccagaaaagaagaaatgcattaagtatgtaataattcaagcagctgacaaaatgtaaaaaaaaaaattcagattctaatcgcaaagatagtgaaggtcttccgtctgcagccctctaattttctaactttatataccctctctcggtgacctcatccacatccatagtttcaatgatcacttgtacacctataacttccaaattgccaagagtccttcctcagtgtcttcctctcctcccagcaaatgacttcacttatttccatcaagcaaattgacatctttagaaagta

SEQ ID NO: 218004 - DNA, 627 bp, Homo sapiens
cagtttcaaactaagaaatcttgtgaaataaactatcaaagaagaaactaatccctagcactaatcaaattcaggaagcctaattagagctgttaagcctcatctgccaatctggcatttgctcaaaatgtggtcaggaacactaactacttcagtgtataaaaatagagattatctcaaaatccacaatataagacatcattatcttctgagtaaataatacaagctagagtatacctcgtaataagtaaatgatctcttttattttaactgaagaaaaagaatcaatgttctggatgtaaatgtcctcaacagtgtttatttcttattcttggccagaaaagaagaaatgcattaagtatgtaataattcargcagctgacaaaatgtaaaaaaaaaaattcagattctaatcgcaaagatagtgaaggtcttccgtctgcagccctctaattttctaactttatataccctctctcggtgacctcatccacatccatagtttcaatgatcacttgtacacctataacttccaaattgccaagagtccttcctcagtgtcttcctctcctcccagcaaatgacttcacttatttccatcaagcaaattgacatctttagaaagta

SEQ ID NO: 218005 - DNA, 509 bp, Homo sapiens
ctgtcccaagctgatgtacccaaagcagccttgagcatcctgcaaggacagagaggaggggagattttacttgcctgactttgtctgatcactttgccaatcagaagaaaaaagaagttctctgatgctcttgaaagagcatccaaagagaatccaaagaagatactacgcaaaatgaaaggttgagagaagggagtagtgctctgtgtgtkgtagaatggtcaggattctccagagaaacagcaccaataggagcgtatctatgtagatatctatctgtatctgtctgtgtagacatgtatatctttatgtagagagatttattttaaagaattgtctcccatgattgagggagaagtctgaaatcttcagggcagtctggaagggaagagttgatgtcgtagtctcaagacctcagtcagtctggggacagaattccttcttaggagactccagtcttttctattaaggcctttagctgattggtttgggtccacccctattctgga

SEQ ID NO: 218006 - DNA, 509 bp, Homo sapiens
ctgtcccaagctgatgtacccaaagcagccttgagcatcctgcaaggacagagaggaggggagattttacttgcctgactttgtctgatcactttgccaatcagaagaaaaaagaagttctctgatgctcttgaaagagcatccaaagagaatccaaagaagatactacgcaaaatgaaaggttgagagaagggagtagtgctctgtgtgttktagaatggtcaggattctccagagaaacagcaccaataggagcgtatctatgtagatatctatctgtatctgtctgtgtagacatgtatatctttatgtagagagatttattttaaagaattgtctcccatgattgagggagaagtctgaaatcttcagggcagtctggaagggaagagttgatgtcgtagtctcaagacctcagtcagtctggggacagaattccttcttaggagactccagtcttttctattaaggcctttagctgattggtttgggtccacccctattctgga

SEQ ID NO: 218007 - DNA, 501 bp, Homo sapiens
gtctacactctggtagaaaagctactaaatgaacatcttctttggaaaattttctttaatccacttctcttaaagagaaaaaggaaaactttttttccttaataaagtgggtgaaagttgtgtatgggaaaggtcagaatgtcaagtactgagttgggtctgtccactgcaaagaaatcaaatttatccatgaacttgtaactagaactgtttctggatcttggccattgaaatcaacatcagtaaagcctacatcttaatttccttaatgccaagattgtctgttttaaattatacacatatgggaatgtgaatacattcgtcttcccccacctccctctgcccgaaaacaggaggaaaataaaggtacgttgaagatattctaaacttttgcagctctgcaatgaagagctgtggatgtgggctgcatatgtggtgcagatgtggctcctrccaattgaggtcattttaccttcatcttcagtgctgcaagcttaaatc

SEQ ID NO: 218008 - DNA, 576 bp, Homo sapiens
gcacctggcttgttataatcgctgtataacagctccatgctattatttcatatttataattaattttcagatctgccttacttcttctgtcatttcctttcacttagactttgctagtagcctctcagttggcctccataattccagcctcacctctctgcagactttccttgacataactaaaaactagcatttctaaaattcagaatggatcatgtcatgcccttgctgaaagcttttaactttcaggcccaaatacaaagtccttaatggagtatcctgtgtcccccataacctgtcccytgcctaccaattaagttttatttctctccacttgcccttacacatactgtgttccaaccacagggaatcatttccatttcctgaacagatcatgcagttgcacaaactgttccctctgtccagaatgcctttgctggcccaatttgcttgacaaactcctatgcattcctcaaagccaggagcagcaacgtttcctcctccaaggagtctttcttatatccctatatgctctaagaagggtgccctttctagttgcctgtataatgttttgaa

SEQ ID NO: 218009 - DNA, 401 bp, Homo sapiens
agaataaaaaatcaagaatcacgcagcattttaagaaagcctcagattgacacctagaggaaacaggatttttcagggagcagaagaaaacgtaagaaaaaaatatctaatatatacaaatatttgaggaatatgcccatgaaaacaggaatctctaaaaaagaaacagagaccaaggcagtgcttgaaaattaaaaatacggtaagcaatggaagaaaaaaaaaaamacaaaaaaagaattgggacataaataatggatgaaaccttctaataagtaggaaaaaagagaacataaacagaaaacagaattataagatcaatataagaagttcattgtctccagtttaaggaattcctgggaagtgagaggaaacaatgagaaaattatcagacataatga

SEQ ID NO: 218010 - DNA, 625 bp, Homo sapiens
ctgggtctttttgtttttaagagactgggtttcactctgttgctcaggctgtagtgcagtggcatgatcacagctcattgcagcctcgacctcccaggctcaggttatcctcccatctcagcctcccaagtagctgggactacagacatgcaccaacacacccagctaatgtttgtatttttgtagagatggggttttaccatgtggcccagactgacctcaaactcctgggctcaaggggtcctcccatcttggcctcccaaagtgctgagattataagtgtgagccactgcgcctggcctcatgtctctattrtaagtccactaacccattcatgagggctctactcctacaatttattcacctcccaaatgtcccacctccttgtactgtggcctggtagggttaggatttcaacgtatgaatttgaggagggacataaacatttggttcattgcaggggtactgaatgagataatatggatgaagtgtaattatgcaataaaggcttaattaaagtacaattgtcccttgatatccataggggattggttccaagcgtccccttgggtaccaaaatttacaaattctcaggttccttatataaaatggcatggtattttca

SEQ ID NO: 218011 - DNA, 613 bp, Homo sapiens
aatccttggcatcccttcaaacttgatgctgttcaattattaatgcttttgttatgacctactttgtgctaatccaggaaaaaggtaaacttrctcaggtatttaaataaaaatattgtcattttcaagtgaattcgcttcaagtataaatgaaataaaagctagaaatgtcaaaatgtaggcagcctgatagacctaactaggaatgaaatggaatcagttgacacccaacgaaatacacaaaagcttccagtagtgctcagtcccttcttaaatgaaggagttaacagacctagcatgtttcaagaaaaacaacctgttaaattacaatttacaaccagttctgtgtatcatttagagtgaataattcatttgtgccttaaattttttctctgtgtctgatttaaaacactgcttctaacaacaggtgcttatccctgtaaattactcttctgattctgttggataatggctgattacaagcacaggagaagagaaagatgctggggtgtttatgtcagagccagctatcctctaacaagattccaaaaacaaatacccttgaacaaatagtattacaccagggaaaacaagacccatgccatcaaaaata

SEQ ID NO: 218012 - DNA, 613 bp, Homo sapiens
aatccttggcatcccttcaaacttgatgctgttcaattattaatgcttttgttatgacctactttgtgctaatccaggaaaaaggtaaacttgctcaggtatttaaataaaaatattgtcattttcaagtgaattcgcttcaagtataaatgaaataaaagctagaaatgtcaaaatgtaggcagcctgatagacctaactaggaatgaaatggaawcagttgacacccaacgaaatacacaaaagcttccagtagtgctcagtcccttcttaaatgaaggagttaacagacctagcatgtttcaagaaaaacaacctgttaaattacaatttacaaccagttctgtgtatcatttagagtgaataattcatttgtgccttaaattttttctctgtgtctgatttaaaacactgcttctaacaacaggtgcttatccctgtaaattactcttctgattctgttggataatggctgattacaagcacaggagaagagaaagatgctggggtgtttatgtcagagccagctatcctctaacaagattccaaaaacaaatacccttgaacaaatagtattacaccagggaaaacaagacccatgccatcaaaaata

SEQ ID NO: 218013 - DNA, 571 bp, Homo sapiens
cattccttgcttcctggcagacttacagactgccggaacctccgaacccctctctcagatcccagggcccttgsgtcagctcatctgcttttgctttcttgaccgtgattttctgaacattcctacctcttggcttatcagtctgcaggaggctgtttcgctttgcctgaattgagactgacttcatatttattatgtggtttggcttcagaatcaagacaaaatgtcagtgccaagctgcctaatggccgacattagcatgcgttaaaaacctaataaaacatcgcctccaaaatttcaggccaaattcgcttatgtaaatgtctaacatcaggtctcacccagaatatcctgtcgggtttcgggagatgggcttgaaatctgccccaggctgtgggaacggcgcagatcgtgcttgtgtgctgggctttgctgggggctagaccatgagacatttcatgccagccacatttctggttttctctgaaactgtgttgaagccatgatgcctgataccccttatgtgtacttcttggaaaaagctaacccgtttcttttgtctgctaacgaa

SEQ ID NO: 218014 - DNA, 571 bp, Homo sapiens
cattccttgcttcctggcagacttacagactgccggaacctccgaacccctctctcagatcccagggcccttgcstcagctcatctgcttttgctttcttgaccgtgattttctgaacattcctacctcttggcttatcagtctgcaggaggctgtttcgctttgcctgaattgagactgacttcatatttattatgtggtttggcttcagaatcaagacaaaatgtcagtgccaagctgcctaatggccgacattagcatgcgttaaaaacctaataaaacatcgcctccaaaatttcaggccaaattcgcttatgtaaatgtctaacatcaggtctcacccagaatatcctgtcgggtttcgggagatgggcttgaaatctgccccaggctgtgggaacggcgcagatcgtgcttgtgtgctgggctttgctgggggctagaccatgagacatttcatgccagccacatttctggttttctctgaaactgtgttgaagccatgatgcctgataccccttatgtgtacttcttggaaaaagctaacccgtttcttttgtctgctaacgaa

SEQ ID NO: 218015 - DNA, 589 bp, Homo sapiens
cacagggatggtggggttatcccactcctgatcagaatttagattcactgactgcaccaatggtggggcttgatcttgaccactgggccaaaacagatggagatatacattaaacaaagaattccctctaatcaccacttctattatcaatcaaaagtatttgtatatttacttttgtgtacaaaaatttaacctcctgaatstgatcgctttatcttctgttcttggtcattcaaaccactttcccagaaaaatttaattgcccaaaaggccgcatgcaaatgctctttaattttagtttctgttccttctttaaaatccattttcagtgtaacaatatcgggcccagtgaaagtttctattgtagtgaaacgctttttttttttttttttttttttttttttttttttgagatggagtctcactccgttgcccaggctggagtgcggtggcgtgatctcggctcactgcaacttccgcctcccaggttcaagcaattctcctgcctcagcctcctcaggagctgggactacaggcacgcaccaccacgcctgaataattttttgtaattttagtagagacagggttt

SEQ ID NO: 218016 - DNA, 589 bp, Homo sapiens
cacagggatggtggggttatcccactcctgatcagaatttagattcactgactgcaccaatggtggggcttgatcttgaccactgggccaaaacagatggagatatacattaaacaaagaattccctctaatcaccacttctattatcaatcaaaagtatttgtatatttacttttgtgtacaaaaatttaacctcctgaatgtgatcrctttatcttctgttcttggtcattcaaaccactttcccagaaaaatttaattgcccaaaaggccgcatgcaaatgctctttaattttagtttctgttccttctttaaaatccattttcagtgtaacaatatcgggcccagtgaaagtttctattgtagtgaaacgctttttttttttttttttttttttttttttttttttgagatggagtctcactccgttgcccaggctggagtgcggtggcgtgatctcggctcactgcaacttccgcctcccaggttcaagcaattctcctgcctcagcctcctcaggagctgggactacaggcacgcaccaccacgcctgaataattttttgtaattttagtagagacagggttt

SEQ ID NO: 218017 - DNA, 589 bp, Homo sapiens
cacagggatggtggggttatcccactcctgatcagaatttagattcactgactgcaccaatggtggggcttgatcttgaccactgggccaaaacagatggagatatacattaaacaaagaattccctctaatcaccacttctattatcaatcaaaagtatttgtatatttacttttgtgtacaaaaatttaacctcctgaatgtgatcgctttatmttctgttcttggtcattcaaaccactttcccagaaaaatttaattgcccaaaaggccgcatgcaaatgctctttaattttagtttctgttccttctttaaaatccattttcagtgtaacaatatcgggcccagtgaaagtttctattgtagtgaaacgctttttttttttttttttttttttttttttttttttgagatggagtctcactccgttgcccaggctggagtgcggtggcgtgatctcggctcactgcaacttccgcctcccaggttcaagcaattctcctgcctcagcctcctcaggagctgggactacaggcacgcaccaccacgcctgaataattttttgtaattttagtagagacagggttt

SEQ ID NO: 218018 - DNA, 589 bp, Homo sapiens
cacagggatggtggggttatcccactcctgatcagaatttagattcactgactgcaccaatggtggggcttgatcttgaccactgggccaaaacagatggagatatacattaaacaaagaattccctctaatcaccacttctattatcaatcaaaagtatttgtatatttacttttgtgtacaaaaatttaacctcctgaatgtgatcgctttatcttctgttcttggtcattcaaaccactttcccagaaaaatttaattgcccaaaaggccgcatgcaaatgctctttaattttagtttctgttccttctttaaaatccattttcagtgtaacaatatcrggcccagtgaaagtttctattgtagtgaaacgctttttttttttttttttttttttttttttttttttgagatggagtctcactccgttgcccaggctggagtgcggtggcgtgatctcggctcactgcaacttccgcctcccaggttcaagcaattctcctgcctcagcctcctcaggagctgggactacaggcacgcaccaccacgcctgaataattttttgtaattttagtagagacagggttt

SEQ ID NO: 218019 - DNA, 463 bp, Homo sapiens
gcatttatatcctggcaaatgatctacatgcacattttttaaagccgtgggattaaaaagataaagacccttactagaagactagcagttggttttttawcttagctgctctgtttcatttctttttacagtcagtgataaatggagatcatatattctccttaatggcctgttcgtgatttggcattgtgctaaggctggctggcagtggctctgaggatatgtgggggtgtccctgggcaggagaggagatactgctgaaagtcatgccccatcccttttccctctgccccagtgctaggggctggctgggccactcagccagcacagacggcccagtgggcacaagttacaggggacttcttccagcttcctttttcctctcccttcctgcctgttcagagacgtgcaacagagtaatgagaaggaggaggcctccttgaaataatgtcacatggaattc

SEQ ID NO: 218020 - DNA, 463 bp, Homo sapiens
gcatttatatcctggcaaatgatctacatgcacattttttaaagccgtgggattaaaaagataaagacccttactagaagactagcagttggttttttaacttagctgctctgtttcatttctttttacagtcagtgataaatggagatcatatattctccttaatggcctgttcgtgatttggcattgtgctaaggctggctggcagtggctctgaggatatgtgggggtgtccctgggcaggagaggagatactgctgaaagtcatgccccatcccttttccctctgccccagtgctaggggctggctgggccactcagccagcacagacggcccagtgggcacaagttacaggggacttcttccagcttcctttttcctctcccttcctgcctgttcagagacgtgcaacagartaatgagaaggaggaggcctccttgaaataatgtcacatggaattc

SEQ ID NO: 218021 - DNA, 463 bp, Homo sapiens
gcatttatatcctggcaaatgatctacatgcacattttttaaagccgtgggattaaaaagataaagacccttactagaagactagcagttggttttttaacttagctgctctgtttcatttctttttacagtcagtgataaatggagatcatatattctccttaatggcctgttcgtgatttggcattgtgctaaggctggctggcagtggctctgaggatatgtgggggtgtccctgggcaggagaggagatactgctgaaagtcatgccccatcccttttccctctgccccagtgctaggggctggctgggccactcagccagcacagacggcccagtgggcacaagttacaggggacttcttccagcttcctttttcctctcccttcctgcctgttcagagacgtgcaacagagtaatgagaagsaggaggcctccttgaaataatgtcacatggaattc

SEQ ID NO: 218022 - DNA, 403 bp, Homo sapiens
ttacaggcattgagggacctcgccctggtctcagctcstgcgccaaggctggtgtccctgcctcctgatgtggatctgtgtggtgcaacctggcatggcaaacagagaggggaggatggcgccatcttgccctgggtttggtcatctaaccagctctgccactgcttatgtggccttgggtgaattactgagtctctctgagccttggttgctttatttataagtgacattcggaggagcaaattagttaatatctgtgaaacgcctaactctcaaaaagtatgggagactcttttttctggagagatgggatcttgctatgtttcccaggctggtctcgaattcctggcctcaaacgatcctcctgccttggcctccccaagccctgggattacaggcatga

SEQ ID NO: 218023 - DNA, 403 bp, Homo sapiens
ttacaggcattgagggacctcgccctggtctcagctcgtgcgccaaggctggtgtccctgcctcctgatgtggatctgtgtggtgcaacctggcatggcaaacagagaggggaggatggcgccatcttgccctgggtttggtcatytaaccagctctgccactgcttatgtggccttgggtgaattactgagtctctctgagccttggttgctttatttataagtgacattcggaggagcaaattagttaatatctgtgaaacgcctaactctcaaaaagtatgggagactcttttttctggagagatgggatcttgctatgtttcccaggctggtctcgaattcctggcctcaaacgatcctcctgccttggcctccccaagccctgggattacaggcatga

SEQ ID NO: 218024 - DNA, 555 bp, Homo sapiens
tgtctttgcatttccccctctccaaccttgtttacttatattactggaaggctcaacgatgctaactttggggggatatgatcccatcraggtagaagaagccagctggctgtagaagtggaggtgctactgaaataaatggtgcatcctcacttataatactgaaatcaattttatagacagaaagtagtatacgtggacaaatgttagctctgatatttcacaagtgtcacctagccttccagaaagggttctgcagataaagtcatgaccctagccattcttaccttgttgggaacagggaagatttgtgaagatggcaggtggcaggatgtaatagagtcttctagctgtgaaaaggaattagggtctatcactgggagcagatgagagagcccagggctctactacatctgggtctccagcgagtcctggaacattaaggtagagaaggtcggtggggggaagggaaggaagaaaagacagatgactttgcctttgacccagtggattatattaccaatttctaagaatttctgaaattctttaattttc

SEQ ID NO: 218025 - DNA, 572 bp, Homo sapiens
tcattgctttagcagaaagagaattatagttattttataattataatttgaattaactatcagtttaattgctctactctttttccagataggcagtttgccttttgtgacattgtgaattttttccaaagtaatttttccctctacctttacatkgctctttggtttcaaaattaacaaaagtttccagccatctctttatcccttggctagtcttaggaaaaagaaaagaatccacttataagcaatatttcatgtaaattatctgatttagatttaccttcttacccttccagggcaaggaaagtttgtctacatggtgcttgtttgttctaatcatgcaaattcattgtcttaattttccatctcatatttagataactagcaaattatctaattatcttctaatataatttatcctataaaatgtctcaggagatcattatctaccctgtgtttttttaaaaacacacttttattttcctatgaataatcttttgattattttccatgaatgatttattgatcatacaaaagtcatctttgttcttttgaacactcacatttagaca

SEQ ID NO: 218026 - DNA, 445 bp, Homo sapiens
gaattctgtttctaccactttcatgctgtggggcttgagcaatttgcttgatatctctgagattcaatatcctcatctgtaaaatggagccaataaagagtatcttctttatagcacagtcataagaatgcaatgtaaaaatgtcaattcagcaatttaagcaatgctatatgtaccttattcataggaaacccataatgatcagtggttataatcactatcagcatgattatggtgcaaaaatagtaatcagattkatatttaaattatataattgttatgtattccatacagtaatcatgccaggtaggttcctcctcctccttctttgcagctaataaaacgctgcacaaagcaccataagtggaaccaagatttgaacttgtgtctccataacatctgagctggtgttttattctgctacaccatataggaggattttcca

SEQ ID NO: 218027 - DNA, 569 bp, Homo sapiens
tgaatggacaataagcactttaaagaaagtttactttattaataagcaatgaaaagtgaataaaaacaatatgtgaactattttcacctattcattttttgaaaattaaagattggtattattaccactaggaaaaatgcaaggaattgactacctgctcaaacactgatagtaggagtataatatggcagagactattggaaggcaattagcaatatgtatcacctgttgaagtgaaagacccattagcaaaacttatatgaacacataaagaaatgtataagaatgtttagtaccacattgtttgaaaacatgcaaaattgcatgcatatgatcaatcaagatggaaatgaagaataacccaggaacatctgagctatagaatagyatgcagcctttacataagagatggccaagctttcatatatcactttgaaaatgctccaagtcatattcactgtattaaaaggaattcagagccgttgaatataagactgtctcatttgtactgaaaggatagctattaaatgcttaaaagttataactagggaaatgaaggtttttgggta

SEQ ID NO: 218028 - DNA, 292 bp, Homo sapiens
tgtacttttgtgccctccagtggccatctggagaatatactcatcctcatagaattgttcaagaaacataaagtggctaaggagrcaatggcaaaggaaacaagcaaactgtacacccagagaccctgaggctattactttctcataaatttactgaagtaagaagagagctagcagacttgggagattcttcagactgcttccaagaatgcaaaggagctattggtttggactacagatggttcttttgatcattcttgaatatactcttcttagacacttcttaaacaag

SEQ ID NO: 218029 - DNA, 561 bp, Homo sapiens
aagcttctcactctgggagaggtatcacttcagtcaacaggctcctgggstggggatcttttgggaaacctagcagatagctaccggaatgccagggaaataattgcacatggattttgcaagagactcaaaatcaaatcacactggcagagcaaagagttttgacaataagactttaattgaatagtcagagttagatggaacatccaaaatagaaaaatacctgtttattaaaatggacattacctattttctcatctttaccttttagtattagcttagccccagaattagatgcagttaatacagccaggtctgcagagcattgtagatagattttgattcctattttaaatgtggctggaatttctgatgccatttcttgcatggtcctagagggaatagagcctttggtttttatacagtcataggttttggtgcggttttttaagatcagtttgttatctttttctgagaattaaatggatcaaaatgtctctaaattttaaaaataagttttgtttaaacccagtgactgcttaactatttgcataatacttc

SEQ ID NO: 218030 - DNA, 554 bp, Homo sapiens
attgtgaatacaaaagaaaactacttgaaggaaattaaaagtgctactctagtgagcacacaagagataaggaagtacaacacccttgttgctgatatggagaaagtttgagtgatctgaatagaagattcaaccagtcactacattcccttaagccaaagaccaatcctgagcaaggctctagctcccttcaattctgtgaaggctgagagaagtgaggaagctggagaagaaaagttggatgctagcagaggttggttcctgacattcagggaaagaagctctctccataacacaaaagtgcaaggcgaagcagcaagttatccagaagagcmgctaagatcattgattaaggtgggtacactaaacaacagattttcagtgtacatgcaacagccttctgttggaagaagatgccatctatgacttttatatgtagagaagagaagtcagttcttggtttcaaagcttcagaggacagtctaattctcttgttaggggctaaaggagctgacgactttcaatgaaagccaatgataatttaccattatgaa

SEQ ID NO: 218031 - DNA, 495 bp, Homo sapiens
aaagtaaattaaggaaaaaagaaaaagaaaaagataacttcttcccccatacgattcttgtatttcacatttatcttgtgtttcagattttcacaaatataagaggacatcaactgtagctaagtaagttcaataagaatttacyggattttgcctatgccagtttacttcagggaaaacagtcacattaaaaatttaaattgctttgtttgtgcagatgtggcatccaaggtcatagtgatgacgagacagtggctctcctttgtttaacttatttatttgaacttcttttgggtagtgatgatctccccactctcagtgtgaacgtgaaaggcagtgggctggagctagagactaagaacaaactacctggcccacaaaagctcctgacctcatagctcaatgttcaagctaatatgttgtatatgtcaatgacaatggggaatactgagggaccaagtactaattagcaataaattaaatatatgcaattga

SEQ ID NO: 218032 - DNA, 457 bp, Homo sapiens
tagaagttgtacccaatgatccattttgaatttatcactcagcagtaatatctacagtttttgcaaagtgggctatagttccaatctcaattaattcttaggactatggtgttcattatatataaacatctgtctaaaagagtaaaatataatatccatgagaggaaaattaggctatctggtatttctctggggatggagattatatrtacatatatatgtatatatatgatatatatactcaaacatgcacatgaatacacagaaatgagcatacacatgtgtgcacacacacgagagcacacatgcaaatttttgtttttaaactaagctaacttttatatgcccacattaaattcttcccaattttgaggctaatcaaaattttgtttgtacctcctcatttgcttttcagaggatcttctagaagatttgcactatcagcttggtattcagt

SEQ ID NO: 218033 - DNA, 457 bp, Homo sapiens
tagaagttgtacccaatgatccattttgaatttatcactcagcagtaatatctacagtttttgcaaagtgggctatagttccaatctcaattaattcttaggactatggtgttcattatatataaacatctgtctaaaagagtaaaatataatatccatgagaggaaaattaggctatctggtatttctctggggatggagattatatatacatatatatgtatatatatgatatatatactcaaacrtgcacatgaatacacagaaatgagcatacacatgtgtgcacacacacgagagcacacatgcaaatttttgtttttaaactaagctaacttttatatgcccacattaaattcttcccaattttgaggctaatcaaaattttgtttgtacctcctcatttgcttttcagaggatcttctagaagatttgcactatcagcttggtattcagt

SEQ ID NO: 218034 - DNA, 486 bp, Homo sapiens
gctgtattcactgatgtaaccatcccatcctgggaaacgctatggcaatacttggcataatttgtatacctgaacctcacatgctccaccagtcccgttcctgggaaatgttctcacagatgcacggttatgctttgagaacactcagtctgatattatttgtgatggtgaaactttcaggaaaatggtgcctrttactaggcaagtgggaggatgagtaaaatgcatgaattatgttattgaatatgatgcaacagttagaatcagagattatgtgatgattttagaaacttattgcttactgaaaaaagggacatacaagtactgtaagttagaaaatatgtatactaaaatgacaatacacattttgatagactaattcaaatgaaaatatatacattgaatatatttgaaaggaaaaaataagtaatcaaaccaatctaacaccaccaccaccacaagagagggtttgcataagccaatgag

SEQ ID NO: 218035 - DNA, 554 bp, Homo sapiens
tgtcagcaacgtcctcagttccctgctctttattcatccacatccaaattctaaaatctcctttcaatctttcctcctatccctgagtactccagaccaacctcgaacttttatctgctcattaataaaccttcctacttgtaaccaatggtcttttattgaatagtggaggattttcaaggtttttttttgctactatctttccatttttaaatgctccatgccaaaagctcaaaactttttagcataacatttaagaaattctaccatccagcattatgcagtggctttaatcttatctcctcttcctacctaccscattccttctcttcatctccaataaacctgacacctattcattgcaaatattggcctctgcgttggtctttgtcttagaagtgcctgtcatcatctcaatggagcctgttcactaggctctgatacacatcattctatgtgagcacatagtacaaaagagttggcagccatcacattctgatttaggttacagtagcccagatgtgtagctgattctttaactggatgaagagatc

SEQ ID NO: 218036 - DNA, 608 bp, Homo sapiens
catcttttattaaaattattactaaaagtatatgatatattttggtgcttttctaaagggcattatttatattttatcatctaatttttattkcttccatatagacataacactgatttttttcgtatttactttgtatcttgagactttgctaaatttctctatgagttctagtaaaataattttgtaattttctttggagtacacaccatattatcctataagaataattagagttgtatttccttatctcccatcttgatgcttttttgtttgtttgtttgtttgtttgtttttctctatggataggttctgagtacagtgtttaacatgagtggtaagatggatccctttgtcttccaagcgattaatatgataagactgatgtatgactctaatcaaatatatttaaaaattaatacaggcatatgtgttttattgtgcttcactttattgtgtcttttataaattgaaattcatagcaaccctgcatcgagaaagtttattgacaccatttttccaatggcatgtgttcacttagtgtctccgtgtcacattttggtaatttccacattatttcaaaccatatatatatatatatgttatgg

SEQ ID NO: 218037 - DNA, 607 bp, Homo sapiens
aatttttctgattgcaattacattgtatttttattttttttctattttctatcttgctgtgagtttaagttgtccttctttttctactgtcttgagaccaagattgaaattattgtcttgagaggcttcttctttgataatataagcatgtaatgctataatcttccctttaagcattgctttatttgcattttacaaattttgatatgttgtgttttaacttttgtttcatttaaaatattttcatttccatttccttttaataatatattatttaaaaatgttgtgtttaaattcaaaatctgaccctgatgtagcttaagtgattaataactgtactttagcaatggaagatattccagtcagtttgatctcactaattctcattctgattctaaaaatgatggaattgcccctgattttcttcttgcaagcaaaggtgaagtctgtataaccamtaatacttctggctgcacttttattattaccctgtgtcaagagagaagggtcaatatagaaacttaagaaaactacctggatttctaagatggtttatgggattgttcagctgttttgtcatggtttcttgggtgcatagttgaaatta

SEQ ID NO: 218038 - DNA, 484 bp, Homo sapiens
gaattccagaatggaaaatcaggattcctaacttaggtcccagatttctaccagttcacagatccagagactrccatttggaatgagcttgggttgccttgaggaaggaccctgaaaatcctccacaattacatattgtaaatgttattctactacctctcctaggagtcctgcagcaaaccataggttaacagtacaataaagaaaagtaaatactcagaattttcagggacggttagatataaggtcttatgacactgatagcaggagacacaaaatggcactatggttttaagttacagtgggcattagaggccaagtaatgttgtgggacttttccttagtttagcgaaagatggggtccttgtcacatagctacaaaaatttaggcttgcagatgatttgaagggtgagaaaggctgggttttattgggtgaaaaggaaaataaggggaaacggggactctctgcatagccagagttcc

SEQ ID NO: 218039 - DNA, 499 bp, Homo sapiens
acagcatcaatagatgaataaacatacagtgttcaaggaacttcaagtctttccgtgttgcttgatgttgcagggcaaggagaaaaaaagacaaaaatttgcagcaaaaagtagggactaggtaatggggagccttgttatttatacgaagaaacttggctttcatattgttagcaatgtgaatcctcagggagttttcagtagggcagagagctataagctcaatgtggggcagaaagtataatatcaaacttttattttaggaaaatcacactggcaacagtgtacattatagtttttggaagaaaacactatgaaagggaaaggtatcaataagaaaactcttaaaacattccagattaaggatattgaaatastaatttaaggcaaataggcacataccatgagggaaattttgagaaacagttatggagtgaaatttacaggatgtaatatttagtttggcattctagaaaaggaaaagagaaatctatggttc

SEQ ID NO: 218040 - DNA, 599 bp, Homo sapiens
accccccactaagaatagaacaatagaactagatagaataattatcctggtgattatttaattttttaatgtgggatattttaaaagatttctatttttgtactagtgttacatctgtacttatgccattttaagtatccttagtctctgttctcttattaaaccttttactattgggtatgtcaattgttagtggtattctttctcccctgtattaactataacaatcaatgagctgctccaggttcctattttcctctgtcttacatttctcagttgatttatttctactttgccacacatagcgcctttgcacatcagtcttccacctttagaccctgcttctatttcagtttcgatgtttacttattaaaatatccattgcctttcttcttgcagaaaattttccagtcattgcttggtttttatgaagctcagtctgaaacatactcttctaaatgtgctggtgatagaggattctcccaatttttatgttttagacttttttccccactgttctgaaagtaaarttcaaattgtttagtgggttgttttttgattgtttggcttggtagtggagggaggaattgtgtgtcctc

SEQ ID NO: 218041 - DNA, 430 bp, Homo sapiens
tcatagctgaagtctaaacaacattttaaaatgaatgagtaaaagatgtgattctctgtagaatagaaaggaaaataataccaatagttttggaacagttaagaacatcacacaccagggggagggggagggatagcattaggagatatacctaatgtaaatgaygagttaatgggtgcagcacaccaacgtggcaaacctgctacgttgtgcacatataccctagaacttaaagtataataaaaatatatatattaaaaaaaaaaagaaatgtaactcaggctcaaactcccttctctagccattgcctcacacagcatagatgctgaaagaatgcacctgtgccattagatgtacatcaacagaccctggatacagtggattagctaaggtttggaatcatgatcagaaagaagccaatccattctcc

SEQ ID NO: 218042 - DNA, 413 bp, Homo sapiens
tcatagctgaagtctaaacaacattttaaaatgaatgagtaaaagatgtgattctctgtagaatagaaaggaaaataataccaatagttttggaacagttaagaacatcacacaccagggggagggggagggatagcattaggagatatacctaatgtaaatgatgagttaatgggtgcagcacaccaacgtggcaaacctgctacgttgtgcacatataccctagaacttaaagtataataaaaatatatatattaaaaaaaaaaagaaatgtaactcaggctcaaactcccttctctagccattgcctcacacagcatagmtgctgaaagaatgcacctgtgccattagatgtacatcaacagaccctggatacagtggattagctaaggtttggaatcatgatcagaaag

SEQ ID NO: 218043 - DNA, 578 bp, Homo sapiens
gacttgaatgttgtgatataagtcattggtcactgtagccatatctgcattaagggacactccaagcccaatatcactgcggcccttgcaggcttattgaagtaccaccttggtggtcttggatgaaatccagaacaattctctagattatcaggcagagactcttgttctcttccctktctttttccaaataaatgggaatccctctttgtgtgctgagctgcctggagctggggaaggggtgacacaagcaccactgtggccacgaccagtgggactgtgctgggtcaggcctgaagccagcacagcactgggcctcacccaaagcctgcctgaaaaccacccatgttcatgaaagacccaagtgttgtaaaatcagcatgtggtgaagctggccaggcttgtgtccttcccttcaggatgacaagatttccctggtcccaggtgggtccagaggtcccacctgcgagccagggcctggatttggaaaacttaggaaccaatctggtactctattctactgcagccgatcttggacccaatccacaagatgaagcccttcctacccttccgtgtcc

SEQ ID NO: 218044 - DNA, 559 bp, Homo sapiens
agtattactcaacaagtccagggtccaagcaaatctgagatccactcctacataaacacataacatgtaacacatgaacacacacacacacacacacacacaaaacctccaaaaatatccatcgtgattttctaaatataatttctcttataaggcatacttccttaatgagttaagaaaaataattgagagtcaagtaactgaagaaattcagttacctcagggctcaggcatcccaggtgctctgaggctggctgagtaacaaatggctgccgacctcctccraggtgagaggatttatttcaggcttaaagtagcctgaatcctatggaaggaaataggattggaatgttaagaaactggagtggatgttttaaatcctgaaatgtttctaaaaatgtgactttctgacccctagttctggaaatgctacctagtgttctgccttggtcttctgccactgtgaattgttagccacgagaaggtgctggatgtccctgcatagcctgaacgtgctccccaggagactagagcccttgcctaccattgcagtgaattc

SEQ ID NO: 218045 - DNA, 571 bp, Homo sapiens
gaagactcaccatgttaacactaatcaaaagaaaactggctgagtaatattccattgtgtatttatacccaatttctttatccattcatcttttggyggagacttaggtttattctacattttggctattgtgaataatgctgcaataaacattagaggcaatatatctctttgatataaatatttctttaggatataaatatttccttcctttaggatatgtatatgtatatgtatatgtatatgtatatgtatatgtatatgtatattttagatgatatggtttggccctgggtgcccacccaaatctcatcttgtagttcccataattcctacatgttgtgggaaggacccagtgggagatgactgaatcatggggtgggtctttcccatgctgttctcgtgatagtgaataggtctcatgagatctaatggttttaaaaatgggagtttgtctgcacaagctctctctttgcctgccaccatccatgtaagatgagacttgctcctgcttgccttctggtatgattgtgaggcctccccagccatgtgaaactgtaagtccattaaa

SEQ ID NO: 218046 - DNA, 626 bp, Homo sapiens
agatctcatgaaaactcactcactatcatgtgaatagcatgggggtaactgcccccatgatctaatcaccttccaccagctccctcccttgacacatggagattacaatttgacatgagatttgggtgaggacacagagccaaaccacatcattctaccctggcccctctcaaatgtcatgtctttttacattgataaatgcaattttcccctctcaacagtcctccaaagacttaactcattccagcattaatgcaaaagtccaagtccaaggtctcatgtgagacaaggtgagtctcttctgtctatgagcctgtaaaataaaaaacaagttagttacttccatgatacagtgggagtgcrggcattgggtaaatgttcctgttccacattggagaaattggacaaaacaaaggggctacagactccatgcaagtctgaaacccagcggagcagtcattaaatcttaaagccccaaaataaatctcctttgactccaggtctcacatccaagacacactgatgcaaggggctggctcttaaggtcttgggcagctctggccctgtggctttgcagggtccacctcccacagctgctttcatgggctggcattgggtgccttcag

SEQ ID NO: 218047 - DNA, 486 bp, Homo sapiens
gctgtattcactgatgtaaccatcccatcctgggaaacgctatggcaatacttggcataatttgtatacctgaacctcacatgctccaccagtcccgttcctgggaaatgttctcacagatgcacggttatgctttgagaacactcagtctgatattatttgtgatggtgaaactttcaggmaaatggtgcctattactaggcaagtgggaggatgagtaaaatgcatgaattatgttattgaatatgatgcaacagttagaatcagagattatgtgatgattttagaaacttattgcttactgaaaaaagggacatacaagtactgtaagttagaaaatatgtatactaaaatgacaatacacattttgatagactaattcaaatgaaaatatatacattgaatatatttgaaaggaaaaaataagtaatcaaaccaatctaacaccaccaccaccacaagagagggtttgcataagccaatgag

SEQ ID NO: 218048 - DNA, 547 bp, Homo sapiens
tttttcccgtacttcaccctgtttatcatcacttgatacatatttacttgtttgttctctactttctgccattagaacactagctacaagaggtcaggaactttgttcaatgccgaatcttcaccactgaaaaatatgtctatcacgttgtgagcgctcaagagatatttgttgaaataaagaataaatggcttataaatttgtttcatttaaagctgtttcaagcatttcttactaaaatagtcgacaacaacacacccaactatttgtaaataatatgtacatgaatagttatcctgatatatgcgtttacagttccatacaaaattaatagtgccttgaacataatcaacatttaatcaatatttgtgaaacatttagtaataagcttcttattcaaccaatatatatgcatgagcatgtcttgagatggcagaaaagcatcattcctyatttttgtccagagaaattagtgctctttgtggagataaaatactacaaccatgtattgcctaattacatatattcataatttaccataacaagt

SEQ ID NO: 218049 - DNA, 568 bp, Homo sapiens
aatattaccctgataacaaattcacccaaagacagtacaaaaatagaaagccacagaccaagatacctcatgacacagaaagctttaaaaaaaatagcaaatataatttatcaatacataaaaccaaccatacaccatgatcacatggtagttattcaargatacaaggctggttcaatatttgaaagtcaatcaatataatctaccacattaatagactaaagaagaaaaataacatgaccatatcagtcaatgcagaaaaagcatttgacagaattcagtgcagattcataataaaaacaaaacaagcaaacaaaaaatcactcccaggaaaatagtcctagagggaaacttcctcaatttgataaagaccatccataagagaacctacagctcacactatacttaatggcaaaatagtcaatgctttccccataagattaggtacaaggcaaagatgtcctctcctatcacccttttcaacatagtgctgtaagttctgaccagaacaataagacaagaaaaggaagtaaaattcttacagattaaaaaggatgaaagaaaattg

SEQ ID NO: 218050 - DNA, 468 bp, Homo sapiens
gtgcaaattcagtatgtctttgacctacattaaattgaagatgcatgagggagaaggaaaagtggagaacatccttcatatttttaatttgtacaactatgwgagtgtggttagtaatgccagaatggttagtaaccaaaatcagggaatctaagaggtgaagcaattaatttggagaaggaggacaaaaatattactatcagccatggtatattctgtgtagttggagatgaatggtagcagttgggaatatgagtgaggaaattaggagagagattaagaaacggtgttgatttgggaatcaacactagtcttcataggactacacctcatgtggctcctgagcacttgaaataaagctagttcaaagtaagatgtgctgtaagggtaatttacacgctggattttgaaggctaatctgaaagaacacacaagatggctcaataatttttatattgactatacatt

SEQ ID NO: 218051 - DNA, 468 bp, Homo sapiens
gtgcaaattcagtatgtctttgacctacattaaattgaagatgcatgagggagaaggaaaagtggagaacatccttcatatttttaatttgtacaactatgagagtgtggttagtaatgccagaatggttagtaaccaaaatcagggaatctaagaggtgaagcaattaatytggagaaggaggacaaaaatattactatcagccatggtatattctgtgtagttggagatgaatggtagcagttgggaatatgagtgaggaaattaggagagagattaagaaacggtgttgatttgggaatcaacactagtcttcataggactacacctcatgtggctcctgagcacttgaaataaagctagttcaaagtaagatgtgctgtaagggtaatttacacgctggattttgaaggctaatctgaaagaacacacaagatggctcaataatttttatattgactatacatt

SEQ ID NO: 218052 - DNA, 468 bp, Homo sapiens
gtgcaaattcagtatgtctttgacctacattaaattgaagatgcatgagggagaaggaaaagtggagaacatccttcatatttttaatttgtacaactatgagagtgtggttagtaatgccagaatggttagtaaccaaaatcagggaatctaagaggtgaagcaattaatttggagaaggaggacaaaaatattactatcagccatggtatattctgtgtagttggagatgaatggtagcagttgggaatatgagtgaggaaattaggagagagattaagaaamggtgttgatttgggaatcaacactagtcttcataggactacacctcatgtggctcctgagcacttgaaataaagctagttcaaagtaagatgtgctgtaagggtaatttacacgctggattttgaaggctaatctgaaagaacacacaagatggctcaataatttttatattgactatacatt

SEQ ID NO: 218053 - DNA, 605 bp, Homo sapiens
gaaaaagatctgaatcatgcaaatggaaaatttaaaaaayaaagcctgagcctacacggatcagcttcctctggtttatgcattgctctctctgaacctagttagtaagcttattcttggtgtgctaacagcttgtgtttttcagtgtacagaactgagaaccaaaccctggactagataaaattcaccaatccaaatgctggtttgtgaagctgtatagcgtatgaattaaaagcatgtactttgccagaataaagccttagcattacattttagcttcctcatttactcagtgaggtttcttgggcaggcaaattatttaacctctataagactcagtgcccacatctgtacaatgggtctggcaattccacttctagtaccccatacttacacatctgtatattatgctcaatgcatatattacataagtcatatgtaatagtttgtattcttttatccatgcatgtgtgcacatgtgtgtttctatgtggatgagcatgtgtgtatatacatttgtgtgtgtctatataaatttgagttcgtgtgtatttgtgcaaacctatattattctggggcaatattgtgttcttctataggctttg

SEQ ID NO: 218054 - DNA, 488 bp, Homo sapiens
tgaaatcacagtattaggatcactaaggcataaacccccaatacaaaagaaatcagaaaaaaacatcagagatgacagacttcagcagttctgaacgatagataatasatgtaaaattagtaactgaggaaatgccctttaaaatatttaacaaccaggatgacctgggcaccagccagtcagaagagaaatcagaagagtttaaagctgagccttggaggctcactgatgggtcaaatattaacccactcatcagtggttcgatggtggggagttgaaggctgagtttgaagctaaagactattttttaggctcagaggatgtgatctctattttcattgctatgctcttaatcctttatttctttttcttttaaaaaagaccccactttactcaggattcttgactttagtttgaacacataagacaaaaagtaacattgctattaatgatctttaaagatcattagaattgaatacttggcattt

SEQ ID NO: 218055 - DNA, 488 bp, Homo sapiens
acaatttaattaaaaaccataatatgccaggagcaagatggtggataggaggcagggctactgtgcatctcccatttggacggacagaacagagtgtagaggctctcattgtgaacttttcttccaagaaccactgcaggaatggaccaggaaaatcaaaagaattcacagatcctttgaaaggaatagcatgccactgcaaacttcacaagacaaacaaaaaactgtgagtccctgaagtgtgagaggaggaaaagtttgcctctgaacacatattcyccactgaggaatctgaaaatccaaatcacaggagaagaatttaaccttacctagagctagaaaaaatttagaaagctatgtgaaatacaaaagtagaaacagcagtgggaagagccttataggtactgtcagtctccagcttgagcccagggaagccatccctcactatatctcacagaggcccacagggaaggtagccagcagaatta

SEQ ID NO: 218056 - DNA, 556 bp, Homo sapiens
tgacttcacagcttgctctgctacctagcaggctcatgcctcaatttcctcacttgtaaaaatagaaattaacatagaacttatttcatacatctttgaaactattaaatgagttaatgctagacacttagaatagtacctggcatattattagcactatataaattttatttagctattatttttactctcacctacattatcatcaccatgactgtgyatttattaatttttttctgataattctgctcactgatcccataatttcatatatatttgtcaaacacatgtcccaatttctggtttggaaaatatgttcatcataaataaagaaaatatatttttaaaacaatgctgctgttcaattttcctaaacttaaatgccagctgtagagtgccctagcaggaaacacctcctgatgtcttctagtcccttgcactcttggtccataaagggctaatttctttagattatttagctcaaaatcaagtctcaaatgtcaaacagcaaatgtgttttccttttttaatcacaaaaggatatttgcatgctaat

SEQ ID NO: 218057 - DNA, 552 bp, Homo sapiens
cacactttgtgtctgactcccgggaatttcctgttgtaaggtatttataccatgatttacagctgcaacaagctgagaagtctgaggcaagcagtcactgtatttcatgaccacataacaaagttgttttgcactcagaaaatagtcagtagaatttcattgagttttgtaacttatagccaaatccaagtgacacaattccaccaaaagaaaattatttctgattttctctctcctcatctgtattgccagtatcatgacccaatttgggtgttccttaaaacccagtcctgagttattgcgataccttcttaacacatttccttagttcaaagtctacacaatccctgcagtaatttgttttgtatccaccactaggctaatcctgttatagcattggctgctgccaccagactacttcccacctcctactatgtcttctygaaaatatccccagtcaatgttaagatagaacacagactttagattctgtattcaaggccctctaaaaactgttttaacattccagttgcccaacacaaaccatattat

SEQ ID NO: 218058 - DNA, 591 bp, Homo sapiens
tatggagtccaagatcagttaaaactaatytatggtgatagggtttgatatagtggttattttgggaagaatagtgcttgggaggagaatgtgagaaccctctcagatactaggaatgttttatatattgatttaaacgtttgtacacttacgatgtgtcccctttactggatatgtcttaacctcaactttaaaaagaaatctatgtagctgaaaatatcataaacaaaattaaatacatattataaggagctaattttgaatacataaaatcataacagcactctctctgtctccagtactactctagtgctttatatacataaactcacttaatcctcaatataatcctataagtaccactactatccccatttaatgagtaaagaaactgaggcataaataacctaaatataatttgtttgtggtcgcacagttagaaagtgccaggaccagaattcaaattcaggcagtctgtagagtacttacatttaattacaccaaaagcaaaaagaccaacagtccattagagaaatggtcaatagacatgaacagaaaacagaaaaataatgtataaaactatgttactct

SEQ ID NO: 218059 - DNA, 506 bp, Homo sapiens
cagcgtccctattttcagttgcacactctctaccttggaccaggacagccttgcaagtgctgagatacagagaagggccaaaagtttttctgactttagctctggaataaaccttgaagttgcacttttataaacaccccgggcagctgtggaatagaacgaaggtctgcaggaggccttattacagcatccaggactacraagttatagcaggacacatctatggccctgaaacacccttcctcctacatactggttaactcccactctggagaaaaccacactcactctcccgactctaatcccccacaaaaacgttattcttgttgaatacagatacacaagccatgcttgaagtcagaggggagatattttttggtctccgtagttaggcttcatatctgaagcaatgtttgtgaatttcaccttgcccttgaagctcatctgcgctcatgtttgtaccaggaggttagacagattgtggaggacttcttgtttgttttgaa

SEQ ID NO: 218060 - DNA, 577 bp, Homo sapiens
cctgtctcagtcttccaaagtggtgggattagaggtgtgagccacacacccagcctccagtttttttgttttttgttttttttttgagacgaagtcttgctctgtcgccaggctggagtgcagtggcrccatctcggctcactgcaacctccgactccctggttcaagcgattcaattctcctgcctcagcctcctgagtagctgggaccacaggcatgcgccaccacgccagtctaatttttgtatttttagtagagacggggtttcaccacattggccacgacggtctccatctcctgacctcgtgatctgcccgtctcggcctcccaaaatgctgggattacaagcatgagccaccgcacctggccccttttttaatattatatgtttctagcttttttaaaaaaagttattgtagtgttatttttgtttttaatgaacagcattcagataattcaatatattataatgaggaatacattgagaagtctctcaccctatctcagtcctaccctccatctcataagaaaccatgattattagtttcttgagtatattgccagaatttatgtggaa

SEQ ID NO: 218061 - DNA, 595 bp, Homo sapiens
taattagtgaaacagttcatattaccttaaaatgatcaactgcccatattttagaaaataatcattgcatggcaatcttatggcatgctgtaactgtggtcataaagatgaacgacagtggcatcttttaatttgtgcagtttcataattcaaatgaacttgcttaaaatttgtggaagggtgaagctcctcccaacagcttagtataaagacgtgattcttctagtctgcgttttccaaacctctaaaacttcctacttacttgcaagttgctaaatgtttggggccacttaccaagattcttgcacaaaataatgaggaagacaggcatatagttacatagaactcttcaccataaaaatcagttcagcagccaggactactaaaaacagattgcctctgsgtgaattctaattcaggggaatatgtgagtcagcagagggaagaaaatcaggcttgtatggacacaccatacaagctgacaaggtgacaactttgaaacaccagaattgagaaacgcatagttagggttgcctaagtaaatttgggctccagggtattttcaagaaagaaaacagaatatgtggaaaacagc

SEQ ID NO: 218062 - DNA, 595 bp, Homo sapiens
taattagtgaaacagttcatattaccttaaaatgatcaactgcccatattttagaaaataatcattgcatggcaatcttatggcatgctgtaactgtggtcataaagatgaacgacagtggcatcttttaatttgtgcagtttcataattcaaatgaacttgcttaaaatttgtggaagggtgaagctcctcccaacagcttagtataaagacgtgattcttctagtctgcgttttccaaacctctaaaacttcctacttacttgcaagttgctaaatgtttggggccacttaccaagattcttgcacaaaataatgaggaagacaggcatatagttacatagaactcttcaccataaaaatcagttcagcagccaggactactaaaaacagattgcctctgcstgaattctaattcaggggaatatgtgagtcagcagagggaagaaaatcaggcttgtatggacacaccatacaagctgacaaggtgacaactttgaaacaccagaattgagaaacgcatagttagggttgcctaagtaaatttgggctccagggtattttcaagaaagaaaacagaatatgtggaaaacagc

SEQ ID NO: 218063 - DNA, 545 bp, Homo sapiens
cccaacaaaaatcccaaaaagatatttgtagaaatatccacacagactctaaaatttgtagaaaatgcaamgtaccttgaaaggccaaaataatttaaaattaaagaataattttggaggactcacaccaccaggtttcaagactcactaaaatctacaaaaattaacagtgtggtattgatatgctgatgtaaagaaagacataagaatcaatggaagaaaacacagtttggaaatggggccacatgtaaatggtcaaccgatttttaacatgccaaggtaatccaatatgttagaacagaatagtcttttcaataaacggtgctggaacaaccggctatgcctatggaaaaaaaggaagcttgacccttaactcatacaaaaaaattaacctgaatgggatcataatcttaaataaaaagctaaaatcatacaacttctagaagaaaacacagcagaaaatctttgtgactttgaggtaggcaaatacttcttagctattaaataatggaacataaaaaggaaaaactaaaaaattagaattc

SEQ ID NO: 218064 - DNA, 482 bp, Homo sapiens
tataagtgagatgatgcagtatttgtctttccgtgcctggcttatttcacttaacagttcatccatgtagtcaccaaggctggatttcattcttctttatggctgaatagtattccgttgtgtatatataccacattttctgtattcattcatccattgatggacacttagtttccacctaggtttctaccaataccctctttggtgtattctataccaaccctggctagtcccacagcactgccaccagatattactacttaagtggaaatgagagcccatttccttctattaacatgccattaatacacagagagtygctgcagagcatttgcacatttgctgttccctttgcttggaatgtttttcacccagatatatatatgcatgctctctctctcacttccttcaagtctgagctcaaatattgaatgagaggcctacctccctccttttaagataagcattctcctatgaatgtg

SEQ ID NO: 218065 - DNA, 414 bp, Homo sapiens
gaattcttatggtttcaggtcttagatttaagttgatttttgtataaagtgagatataagggcccagatcattcttctacatgtggytatccagttttccctgcaccatttattaaataaggtgtcctttccagaattatgtttttgtatgctttgttgaagatcagttgcttagaagtatttgactttatttctgggttttctgttctgttccattagtctgtgtgtccacatttataccaataccatgctgtattggtaattatagccttgtagtataaattgaaggcaggtaatatgatgcctccagattatttcattttgcttaggagtgctctggctattcaggctctttcttggttccatataaattttaggattgttttttccacctctgtaaaaaaaaaaatgtgt

SEQ ID NO: 218066 - DNA, 505 bp, Homo sapiens
acccagcaatgattacgaaaaaattaacttttccagttatattcaaaatagtgtaacatgtatgtaacaagtcttttaagcatgtaattaaaagttctatacctgattcttgttttaatttcctaaaataagaaggatcctttacttttaactgagatagaaacccaatgctgacagtccatttgcttatatagattcattgattgcaatgtaggtggggaattcacggttactagagttacatgggcttcatataaaagcttagatttttaaaatattcaagtataggccatttgaaaacamaacctctgagaaaggaattctgaatattttcctttcacattacagttagagagttattctgttgcaaaaattaatttgtatgtttaaaatgataaattatagtgatttcatcactttcataacataatctcaacaaccaaacttaactaataccactgctttcaggagtagaacatgaagtgtctcctatttaagtaataag

SEQ ID NO: 218067 - DNA, 495 bp, Homo sapiens
ctacctctcctatacttctagtgctgttgatttctccaggacttaattgctgacctatctaattccctgtttctccagcttcattgtttctggacaaaatgaaaaagtaaataaccaaacttattaaataatgatcttattttacacacaatctaagtcaataatctctggccccagggcctacatakatttgtaacaaccatcttcctcctcaagttgtagtttattatgttctaccaaaattactgaacatcccaagtaagacctccaggcttctagaactgtaattttttctttcttcataaattctctccctcgttgctattcatgacttctctgttattctcctcttaagtccttgagaaaatttgctcagatgcttatatctaccaagtctttataatttaggagattttcacaagggccctagcaggttttagtttgctatgaatcatggtgaatgggaatgggaagatgaggatgaaaaactatttg

SEQ ID NO: 218068 - DNA, 495 bp, Homo sapiens
ctacctctcctatacttctagtgctgttgatttctccaggacttaattgctgacctatctaattccctgtttctccagcttcattgtttctggacaaaatgaaaaagtaaataaccaaacttattaaataatgatcttattttacacacaatctaagtcaataatctctggccccagggcctacatagatttgtaacaaccatcttcctcctcaagttgtagtttattatgttctaccaaaattactgaacatcccaagtaagacctccaggcttctagaactgtaattttttctttcttcataaattctctccctckttgctattcatgacttctctgttattctcctcttaagtccttgagaaaatttgctcagatgcttatatctaccaagtctttataatttaggagattttcacaagggccctagcaggttttagtttgctatgaatcatggtgaatgggaatgggaagatgaggatgaaaaactatttg

SEQ ID NO: 218069 - DNA, 588 bp, Homo sapiens
tacaaaaataaacttggatcactatcctgtattgtatacaaaattaactagaaaaagatcacagagaaactaaaactgcaaacatttctagaagaaaacrcaaaaccttgagttaggcaaggatttaataaataggatacaagaaccacaaatcataaaattaaaaactgaataactagatttcttaagcattaaaaacactgtaaacattaggaaagatgctttaagagaatagtaagtaaagactgggaaaaataattaccaaacatatatgtgataaagaactagaatatatacaaaattcttataactcaacattagtaaacaaacaacccatttaaaaactgggcaaaagaattgagcaaatattttacaaaagaaggcatgcaaatgtcaagtaaagacataaaaagatgctcaacatcacttgttatcagataaaagcaaataaaatcttaatgcaatattagtgtgctcccactaagttcacacaaagactaggatgaaaatggtcatagcagctttactcataatagccccatttactcataatagcccccaattggaaacaactctaatgtctaaaaa

SEQ ID NO: 218070 - DNA, 588 bp, Homo sapiens
tacaaaaataaacttggatcactatcctgtattgtatacaaaattaactagaaaaagatcacagagaaactaaaactgcaaacatttctagaagaaaacacaaaaccttgagttaggcaaggatttaataaataggatacaagaaccacaaatcataaaattaaaaactgaataactagatttcttaagcattaaaaacactgtaaacattaggaaagatgctttaagagaatartaagtaaagactgggaaaaataattaccaaacatatatgtgataaagaactagaatatatacaaaattcttataactcaacattagtaaacaaacaacccatttaaaaactgggcaaaagaattgagcaaatattttacaaaagaaggcatgcaaatgtcaagtaaagacataaaaagatgctcaacatcacttgttatcagataaaagcaaataaaatcttaatgcaatattagtgtgctcccactaagttcacacaaagactaggatgaaaatggtcatagcagctttactcataatagccccatttactcataatagcccccaattggaaacaactctaatgtctaaaaa

SEQ ID NO: 218071 - DNA, 611 bp, Homo sapiens
aaaaaaacctttaaaatctacctggtgttatattgtactgctgccgagctgagctggctttcaaaccatgtaacacagtccttctcactattcccttcccttttcataggcaagggagcctcaccctatggccaccaccaccacaggctcatggagagtcctgtcacgattccaccaatgttcacttaaagcccaggggttcttcagtcagcttgtggtgaatgttgtcaagcctgggactcactcttccaggctcccctctggcccagggcaggtccagaaatgcwgtccaagagcaaaggcttgtaattaggaaccttaagagcctgcctggttttctactctattgtggccaaactggtacctaaggtacaagatgaagtcctctttactttttcctctgcttttctcaagcaaatggggcatctctccacagccaccacagctgggagtgtgctgtgcctctcctgaaaccagcaagtttccgtctcacccaaggctaatggcatactacctgggtaatattgctggttattcagggcccaaggcctctttagtcagcaggtgatgagtcctgccatgactgggtccttctctttaaggcagcatgt

SEQ ID NO: 218072 - DNA, 611 bp, Homo sapiens
aaaaaaacctttaaaatctacctggtgttatattgtactgctgccgagctgagctggctttcaaaccatgtaacacagtccttctcactattcccttcccttttcataggcaagggagcctcaccctatggccaccaccaccacaggctcatggagagtcctgtcacgattccaccaatgttcacttaaagcccaggggttcttcagtcagcttgtggtgaatgttgtcaagcctgggactcactcttccaggctcccctctggcccagggcaggtccagaaatgctgtccaagagcaaaggcttgtaattaggaaccttaagagcctgcctggttttctactctattgtggccaaactggtacctamggtacaagatgaagtcctctttactttttcctctgcttttctcaagcaaatggggcatctctccacagccaccacagctgggagtgtgctgtgcctctcctgaaaccagcaagtttccgtctcacccaaggctaatggcatactacctgggtaatattgctggttattcagggcccaaggcctctttagtcagcaggtgatgagtcctgccatgactgggtccttctctttaaggcagcatgt

SEQ ID NO: 218073 - DNA, 584 bp, Homo sapiens
gctgccactcctcatgctcagttaaatctggctccttttacactaaatttcttaaacctagcaagaaatcaaccttttacagtggcagaacaacatttcactggaagtaaatttgatccacaaaaaggaatgcgggtatggtggaaggatgcaactaacaaataggaattaggcacagtcgtaacatggggtaggggttttgcttgtgtttccccaggaaaaggactacagcccatgtgggtcycccccaccgacaactgaaattgcaccataactccaaagatgaaacgttcccagaaacaaaaggcaaagacccctcaaaaaccgaggaggaaatttcgcctcctgacacataaacttcatgacctcgacattgagacaaaatctcgctgtgtgacctacaacaccactcgttcaactccaccaacatggggtcaaataaaggtcttatcccatcacacagaaaatttattaaaagaaaaaggaatcccaaaaacgaccagtaatataattctggctgtctttatggtagtcagtgcagcagtaagtataccaccagttggggcaactcaaaattataccca

SEQ ID NO: 218074 - DNA, 581 bp, Homo sapiens
tgggtctcccccaccgacaactgaaattgcaccataactccaaagatgaaacgttcccagaaacaaaaggcaaagacccctcaaaaaccgaggaggaaatttcgcctcctgacacataaacttcatgacctcgacattgagacaaaatctcgctgtgtgacctacaacaccactcgttcaactccaccaacatggggtcaaataaaggtcttatcccatcacacagaaaatttattaaaagaaaaargaatcccaaaaacgaccagtaatataattctggctgtctttatggtagtcagtgcagcagtaagtataccaccagttggggcaactcaaaattatacccactgggcatatgttccttttccccctttaatttggtctgtctcctggatggactcctcagtagaagtttacactaataatagtgcattcatgccggtccctaatgatgataggtttccagctcaaccggaagaagaaggtatgcactttaatctgtcatttggctataaatacccaccactgtgtatcacctggctgtttagcttattcttaccagaattggatgtggaccgtac

SEQ ID NO: 218075 - DNA, 581 bp, Homo sapiens
tgggtctcccccaccgacaactgaaattgcaccataactccaaagatgaaacgttcccagaaacaaaaggcaaagacccctcaaaaaccgaggaggaaatttcgcctcctgacacataaacttcatgacctcgacattgagacaaaatctcgctgtgtgacctacaacaccactcgttcaactccaccaacatggggtcaaataaaggtcttatcccatcacacagaaaatttattaaaagaaaaaggaatcccaaaaacgaccagtaatataattctggctgtctttatggtagtcagtgcagcagtaagtataccaccagttggggcaactcaaaattataccyactgggcatatgttccttttccccctttaatttggtctgtctcctggatggactcctcagtagaagtttacactaataatagtgcattcatgccggtccctaatgatgataggtttccagctcaaccggaagaagaaggtatgcactttaatctgtcatttggctataaatacccaccactgtgtatcacctggctgtttagcttattcttaccagaattggatgtggaccgtac

SEQ ID NO: 218076 - DNA, 609 bp, Homo sapiens
ctctctccgcctcagctgccaaacagggaagggccccctgtccagtggacacgtgacccacgtgaccttacctatcaytggagatggctcacactccttaccctacccctatgtcttgtatccaataaatatcagcacagcctggcatttggggccactaccggtctccatgtcttggtggtagtggtgccctgggcccagctgccttttcttttatctctttgtcttgtgtctttatttctacaatctctcatctccacacatggggagaaaaacccaccgaccctgtggggctggtccctacaattctcttggtcttctgttccagctctaatgaattaaaaaactaagaaagtaagaaatggatatttaatatcctggctatgttctttgaagggtgtctctgcagaccactaaagtgaatatttctataacatacactgggcaagtcccagatttgtcccggagtttctgcttcctatgccctaagtcaaggtcagatgtagagcagcaagtaatattctgaccagtgaagtttagccaaatgatccaaacagacagtttggtttaaagctgctttagggattcaaatccaaatatcagaaggat

SEQ ID NO: 218077 - DNA, 609 bp, Homo sapiens
ctctctccgcctcagctgccaaacagggaagggccccctgtccagtggacacgtgacccacgtgaccttacctatcattggagatggctcacactccttaccctrcccctatgtcttgtatccaataaatatcagcacagcctggcatttggggccactaccggtctccatgtcttggtggtagtggtgccctgggcccagctgccttttcttttatctctttgtcttgtgtctttatttctacaatctctcatctccacacatggggagaaaaacccaccgaccctgtggggctggtccctacaattctcttggtcttctgttccagctctaatgaattaaaaaactaagaaagtaagaaatggatatttaatatcctggctatgttctttgaagggtgtctctgcagaccactaaagtgaatatttctataacatacactgggcaagtcccagatttgtcccggagtttctgcttcctatgccctaagtcaaggtcagatgtagagcagcaagtaatattctgaccagtgaagtttagccaaatgatccaaacagacagtttggtttaaagctgctttagggattcaaatccaaatatcagaaggat

SEQ ID NO: 218078 - DNA, 452 bp, Homo sapiens
gatctcagctcactgcaaccctcacctcccaagttcaagcgattctcctgcctcagccttccgagtaactrggattacaggggcgcaccaccacgcccggctaaattttgtatttttagtacagacggggtttcaccatgttggtcaggctggtctcgaactcctgacctcgtaacccgcccacctcggcctcccaaagtgctgggattataggcacgagcaccgcgcccggccaagattcccatcttttaagtgaattgagcagatggcagaccctgccctctacctgctggactggtgtcacaacagatttaacaatgataactgatcagtgaaaaggccgtctcgctgtaccctacagagctgtttaggaaacactgaaacctcagtgatttgcttatctgtatccgtgtctgatttagccagtgacacgtgatggttttacacaccat

SEQ ID NO: 218079 - DNA, 452 bp, Homo sapiens
gatctcagctcactgcaaccctcacctcccaagttcaagcgattctcctgcctcagccttccgagtaactaggattacaggkgcgcaccaccacgcccggctaaattttgtatttttagtacagacggggtttcaccatgttggtcaggctggtctcgaactcctgacctcgtaacccgcccacctcggcctcccaaagtgctgggattataggcacgagcaccgcgcccggccaagattcccatcttttaagtgaattgagcagatggcagaccctgccctctacctgctggactggtgtcacaacagatttaacaatgataactgatcagtgaaaaggccgtctcgctgtaccctacagagctgtttaggaaacactgaaacctcagtgatttgcttatctgtatccgtgtctgatttagccagtgacacgtgatggttttacacaccat

SEQ ID NO: 218080 - DNA, 657 bp, Homo sapiens
  misc_feature (1)...(657): n = A,T,C or G
nnnnnnnnnnnnnnnaaagtgttgggattacaggtgtgagccaccgtccctggctggatcctaatttctgaagaccattttccattaaaaggcttcagggtctgtcaaataaatggccaatgccagggctgggtcagagaaagtacaagatgatccttggatttctycttgttccagaaagtaagaaagtgcacaaagactgagggaaagatgtaaataaaacacacaaaccagcttgtaggggctcccactggccaaatttaggacaatttgagcataatttaaaaattttaatgatggtaacacattataacacattgaataaatgaagaatttgtgcatcatgatgatacctcacataaaagagactgggaagctcttctttacagagactatcagctaatatagaacacataatagaattagaaaatgaccattttgcaacccccagcataataacttattcaggtgaagaccatcaaggaatactaaaactgttaggtaaaatgtgttggggaacaggatgttcacaccgtgtcaagtatccccctgacactacccggttacttaagcatcaagggatacagtgcctttacaatggagagaactgatggatagccctttaaccaagtgatcaaatttagtgtcaataataat

SEQ ID NO: 218081 - DNA, 441 bp, Homo sapiens
tatttcatcctagatacttaacgaactatatcttattttatccttacaacagctctttcaactaggtattcttctttgcatttacagaagaggaaactgagcctggctcagtaatatttgcccaaagtcacatagttgataaataacaaagtcaggattcctgccattatgtcacattgttccagtaaggtgttgaactcttaatgactgtcacttaaataatggctgagctggtctgctgcttttagttagcaaaactgggattgcagcccatttctcagaatctgttgctagaatgacaagaccatgctgccctctatcagcttcaatgactgcagtcacctgtcattgtatatcataaacattgtagcccacacatgtrtacacaaaaattgatacaaaaatatgaacctaatttgtggtagtatcagtcacttcttc

SEQ ID NO: 218082 - DNA, 442 bp, Homo sapiens
gtatttcatcctagatacttaacgaactatatcttattttatccttacaacagctctttcaactaggtattcttctttgcatttacagaagaggaaactgagcctggctcagtaatatttgcccaaagtcacatagttgataaataacaaagtcaggattcctgccattatgtcacattgttccagtaaggtgttgaactcttaatgactgtcacttaaataatggctgagctggtctgctgcttttagttagcaaaactgggattgcagcccatttctcagaatctgttgctagaatgacaagaccatgctgccctctatcagcttcaatgactgcagtcacctgtcattgtatatcataaacattgtagcccacacatgtatacacaaaaattgatacaaaaatatgaaccyaatttgtggtagtatcagtcacttcttc

SEQ ID NO: 218083 - DNA, 596 bp, Homo sapiens
tctggagatgaatagtggtgagatatggaacatttccgtcatctgaaaaaattccctcttgccattttgtagctaatacccttcccccaaactccagcccttcataatcaaggatagtatctctgtcctcaatgatttttcttttctcagatgtcatataagtgaaaccatacactatatacctgctgtgtctggcttctttcacttatcgtaatgctggtgagaatcatccatgttgctgcatgtaccatactttgtcccttttgattgttgacttgtattctattgtctgtgccacagtttatgtatatattcatcacttgatggacatatagtttcaatttttgatactttttaataaaagtgctatgaatattcacatayacgtatgctctttaataaacacaaaaagtgagattgctgcgttgtttggtaagtgtttgttggaatacaaaaggcacttgcagattgttttctgggttagttttcccactgcattcccaacatcatgtgagagatctggcatcttcatatccttgccagcatttgcattgtctgtttctgttcttgtctttaatttttatcattctggtagt

SEQ ID NO: 218084 - DNA, 529 bp, Homo sapiens
actttataattttgcagaatttttaaaatttataatttattatgacttcttattctgtaaatagctgttggtttttaccactaatttcgtgatggttatttttcttaaagagtttcgctctccctaattacataaacttcaggcccccaaccatggatctgtgtgggaatgtacagtctcccaaacataccttctgattatctgcctctgagaccacattctttttcaaggagtattaaattagaagtcaatacttctactcttaatagactaacarggattagcaccatgtatgataattatgagataataaggcagagactgctggggtttcaaggagtggggaggaataaaatggaatcagaagatatgtgttcgcttagtgtacatggatggctttgtgcacaatgaagactatttgtggctactttgaacaaaaataatttttaatttattactgtaataattttaaatcctagttctctttaagccccctagttgatattaaactttaaattcattttattct

SEQ ID NO: 218085 - DNA, 529 bp, Homo sapiens
actttataattttgcagaatttttaaaatttataatttattatgacttcttattctgtaaatagctgttggtttttaccactaatttcgtgatggttatttttcttaaagagtttcgctctccctaattacataaacttcaggcccccaaccatggatctgtgtgggaatgtacagtctcccaaacataccttctgattatctgcctctgagaccacattctttttcaaggagtattaaattagaagtcaatacttctactcttaatagactaacagggattagcaccatgtatgataattatgagataataaggcagagactgctggggtttcaaggagtggggaggaataaaatggaatcagaagatatgtgttcgcttagtgtrcatggatggctttgtgcacaatgaagactatttgtggctactttgaacaaaaataatttttaatttattactgtaataattttaaatcctagttctctttaagccccctagttgatattaaactttaaattcattttattct

SEQ ID NO: 218086 - DNA, 515 bp, Homo sapiens
ctcctatatacacttttgcttctgggaaacaccaatagtactagcattaaattacacagtctaattttgtatttttattaacaagtttcaattgatcaagtgtgaacaagtgttttgaagttttttaaaaaaaacattgaatcacttttcttataatttgctcgttaattcaacagacatttattgatcatttactagattccaggcaaggtgatagattcagagaatacaatgataagcaagatctgactggactcattttatggagcatacaatcaaagggagaagacagataatcagatgataacacaagtaaatataaaactgaagtcagagccgttaagatgtttatgccagattacactaaggagatatgtccattatcscttatcagtttttcttaatgaggaaaataaatatacatagacaactaatgtagtatttaaagattcataaaacttatttccatgatggcagatgcagccttcctttgcattccacctgtatccttatgt

SEQ ID NO: 218087 - DNA, 592 bp, Homo sapiens
atgtgaacctttatttctaagataagacataacagttgttcatttacttggccatttggggtaagcagctaaatgttacttacagttcccagaatataagttgtacayagtaatgtagtattctcagtgatatcttaacaagaccaacatcttccaaaaataagctgaataaatatataatggaaaattgcaaatctattatgacgtttttagaaaaagaaacaagtttactaatttattttttttgtcctgatatgaagcaccctacaattggattccccaaacaatgggatggatttgtaaggaaagaatctgtagcctaagccattttaaaatatgttcacaataattagtgaatattctgatacatgttcagatgtcttggactgaagaactttatttatgaagcagtaaaatagaacacaaagagtgctgattgttctattcttagaccatgaaatctctgcattcttatttaaagaattgggctaaatttaaattctaacaaatattggtgaagaatctgctgtggggtgggcacctagaagaaaaaatttgcagaaacactgttctcatggtgctaactcagcaa

SEQ ID NO: 218088 - DNA, 541 bp, Homo sapiens
tgtttactctttcttggatctgggacaccctttttctcctgcccctggatattaaaactccaggttctctggtctttggactctgtggctttcatccacaaatggagttacaccacaggcttccctgtttctaaggctttcagccttggacagtaaggcaactggcttccctggttcwccagcttgcagacagcctattgtctatcatgagacttctcagtctccataatactgtaagccaatttccctaaaaaaatcgcctctctcatatatatatatctcctattggtctgtctctctggagaaccctaatacagcaagtttactcctaatgatgtcaagggttttcctttacttagagtcttccccaccagctattatttttctcatgtttcttatgtactcatcattccactaataagagtctactgtgtgcatatggccacaaagcaatgcacacaattctgttgtgcccatcttataatgcattctataatgttctactttcacagaaacacttggtggactcttgtaaactgaa

SEQ ID NO: 218089 - DNA, 503 bp, Homo sapiens
actcaaaataatacttttaatattatctattgctattctgaagtaaataaaattcatggcattcttattttacagacaattgttgcataaacaaggctagatattgttactcttccaaaagaagttccatttaaaacatatttatccagatgggaaatactcattagcagaggacccggtaataggaaataataagctgccaatcaagcaaattaccttcatgatgatgatcattagaaaggaaatgctttagatgaacaactgattgaaggatgatgaggtcagagcatagctttgccatggacagggacaaagaaacatgcctgtgtmtgtggaaggctgcagaactctgcctctgtgccagaactttgttctggtcagtgggaacatttttctcctaaaatgtgccttctcaatggatatcaatttgtattgtacttttctatagtattatctaaaattctttgacatcttccatgaaggggctaacacaagaaccagag

SEQ ID NO: 218090 - DNA, 267 bp, Homo sapiens
ttaaagccaaagccaaggactttttcagcatctaccacaycttcacaatctggcttcctattccctccagacttcctttctcatgactctccttcaccacattctgtcctggttgcacttcctcaaacaaaccaggcaagtcaaggcctttcaaactacccttatctttgcctgtaatcctggagcctagctccaggtctctccctcaactcaaatcataccctttcattgaggctttctctgagcccatatttaaaattgtgaaaa

SEQ ID NO: 218091 - DNA, 572 bp, Homo sapiens
gctgagtgctataaaatgaataagaaagaatacctgaaataaataggaaatcacagatgcatagaaaaacacttgcttattaacaaaatattttatagcattttttcattttctagtcaaatatttattcaatcaacattaatatagattaatatttcatgctgcttagaagagtggcatatggtgattcttaagtaattccaattatgctacctttaagaataggtggagtggaaggatggacatgtgagagaagttacaataaaaataaaaacwgtgacaggatgtacaatggtgttggtgggatatttgttatatcccacagattttgtgatatttaataactccatattgttttgagtaaatttttcactaaagtatgataaagggaaagctagtattaaggggcagattatttaatttttattcaagacctttccatgcatgtttcaaggaaaaccttttcatgtgattgatttcatgagtagtttctcatttaaaatgctaaaatgtaaaaccttttcatgtggttgatttcatgagtagtttctcatttaaaatgctaaaatgta

SEQ ID NO: 218092 - DNA, 572 bp, Homo sapiens
gctgagtgctataaaatgaataagaaagaatacctgaaataaataggaaatcacagatgcatagaaaaacacttgcttattaacaaaatattttatagcattttttcattttctagtcaaatatttattcaatcaacattaatatagattaatatttcatgctgcttagaagagtggcatatggtgattcttaagtaattccaattatgctacctttaagaataggtggagtggaaggatggacatgtgagagaagttacaataaaaataaaaactgtgacaggatgtacaatggtgttggtgggatatttgttatatcccacagattttgtgatatttaataactccatattgttttgagtaaatttttcactaaagtatgataaagggaaagctagtattaaggggcagattatttaatttttattcaagacctttccatgcatgtttcaaggaaaaccttttcatgtgattgatttcatgagtagtttctcatttaaaatgctaaaatgtaaaaccttttcrtgtggttgatttcatgagtagtttctcatttaaaatgctaaaatgta

SEQ ID NO: 218093 - DNA, 546 bp, Homo sapiens
gttaaagattaaggttaatttttcattacacactgtaaagattcttttagagaaactaatttttcgagtcattctgggttttggaagcttctacataccaatcaaaaaatgtatctcattgtttctgaggttttgggggtcctttttttctaatgcacccatacaaaaataatttcataaggagtaaaacctcttccttgttgctactgtaattccttgtcttcctgaggtacacyaatttctttagaaagacctaggtctgggtccaagacttctgaacataaaattagctggagttccagattaaagtgtcctagactccttggattctgatgaaccgataatactttgccttaaattttgcttatcacaggtctccaactgaaccgagtccagttcctgctgaacacaatttgacttctggatggcagtctggattctgaacctcgcccttctaacatggaagcacatgcactagactgaccttgtccagttttgtcaggcccagtctaacctctaaaataaaaattgctcaaataaagttag

SEQ ID NO: 218094 - DNA, 546 bp, Homo sapiens
gttaaagattaaggttaatttttcattacacactgtaaagattcttttagagaaactaatttttcgagtcattctgggttttggaagcttctacataccaatcaaaaaatgtatctcattgtttctgaggttttgggggtcctttttttctaatgcacccatacaaaaataatttcataaggagtaaaacctcttccttgttgctactgtaattccttgtcttcctgaggtacaccratttctttagaaagacctaggtctgggtccaagacttctgaacataaaattagctggagttccagattaaagtgtcctagactccttggattctgatgaaccgataatactttgccttaaattttgcttatcacaggtctccaactgaaccgagtccagttcctgctgaacacaatttgacttctggatggcagtctggattctgaacctcgcccttctaacatggaagcacatgcactagactgaccttgtccagttttgtcaggcccagtctaacctctaaaataaaaattgctcaaataaagttag

SEQ ID NO: 218095 - DNA, 597 bp, Homo sapiens
ataatcatactgtccaaagtgatctacacactcaatgctatccctatcaaagtactaatgccatgtttcacaaaaatagaaaaacaattctaaaattcacgtggaaccaaaaaggggcccaaatagccaaagcaatcctgatttaaaagaacaaaccgggaggcaacttaatacctgaattcaaattatactgtaaacctacagtaagcaaaacattatggcattgttaaaaaagatacattaaccaatggatccaaatacataatccaggaataaactcatatatttacggccaactgatttttaacaaagrcgtaaagaacatacaaaaagggaaaaacactctcctaaataagtcgagaaaactggatatcacaagcagaagaatgaaactagacctctacctctcaccatacacaaacagcaactcaaaatatattcaatatttaaatataagcctaaaaattatgaaattatcaaaagaaaacataggggagatgcttgagaacattggtaagcaaaaattttataagtaagacttcaaaagcacagataacaaaaatgaaactagacaaatgagactgtgccaaactaaaa

SEQ ID NO: 218096 - DNA, 539 bp, Homo sapiens
ttgtatgactataagcaataaagttctttctytgctttacttctgtgtttcttctgtaaaagctgctcctttcattcccttggtggggtttctaaacaacttctggtttgaagctggccaatgaatgattcattatttgctcaaactcttttaaattttatttcgcctctgtttacttcaacacctctttgctgggagtgagtatagaactgaggttggccaggtgccatatgatgctctcactttaagaggacaaaagagaacacattgaatccagaaaagagaaaagtatttctacacaaaacgataagtctagtgaaggctgtgagggctctttgtctcttgaatagaaaggttccagctctgagacccattcttaagtgaccaaggcactgtatgaagactacatgcatatgagtgacttttataatagtccacccccattgactattactcagccaccaaaataacagataaaagacatcaactctggtagaaccattgcccaacccaaatttggaggcagagctaaataaatg

SEQ ID NO: 218097 - DNA, 539 bp, Homo sapiens
ttgtatgactataagcaataaagttctttctctgctttacttctgtgtttcttctgtaaaagctgctcctttcattcccttggtggggtttctaaacaacttctggtttgaagctggccaatgaatgattcattatttgctcaaactcttttaaattttatttcgcctctgtttacttcaacacctctttgctgggagtgagtatagaactgaggttggccaggtgccatatgatgctctcactttaagaggacaaaagagaacacattgaatccagaaaagagaaaastatttctacacaaaacgataagtctagtgaaggctgtgagggctctttgtctcttgaatagaaaggttccagctctgagacccattcttaagtgaccaaggcactgtatgaagactacatgcatatgagtgacttttataatagtccacccccattgactattactcagccaccaaaataacagataaaagacatcaactctggtagaaccattgcccaacccaaatttggaggcagagctaaataaatg

SEQ ID NO: 218098 - DNA, 539 bp, Homo sapiens
ttgtatgactataagcaataaagttctttctctgctttacttctgtgtttcttctgtaaaagctgctcctttcattcccttggtggggtttctaaacaacttctggtttgaagctggccaatgaatgattcattatttgctcaaactcttttaaattttatttcgcctctgtttacttcaacacctctttgctgggagtgagtatagaactgaggttggccaggtgccatatgatgctctcactttaagaggacaaaagagaacacattgaatccagaaaagagaaaagtatttctacacaaaacgataagtctagtgaaggctgtgagggctctttgtctcttgaatagaaaggttccagcyctgagacccattcttaagtgaccaaggcactgtatgaagactacatgcatatgagtgacttttataatagtccacccccattgactattactcagccaccaaaataacagataaaagacatcaactctggtagaaccattgcccaacccaaatttggaggcagagctaaataaatg

SEQ ID NO: 218099 - DNA, 629 bp, Homo sapiens
tcagattctggagcatttcaaatgttggatttttggatcagcaatgctcaaccggtatttgtgtttgccttcgattttttgaatggaaattgaaactcacgtctcagagaatgttgaggtattctgtagatgcagatgactatacaggtgtttgtagctggaagtaaaagttaaaatttcagagaaacaaaaaagacataaaatttttaaaatttataagaaaataacaaattaatacaattataaggatccaagtattgcccaaaaacactggagtgtgctttgaagaaaaggaggtatccttgtcttgtgatgctggtgagataaaacgcaataggagctgagtgtcttcacagagctctaaagaaaggcagggaactgctgggctgagaagaattttggaatttgtggcaagaaaggacacattagtctttctatctctcctgtctttcaaatactgtccgtaatggtagctgtcatgcattctttcattgctcttcaagggatttatcaggacacattatttcatcgtgtattattaaatcagtytttaaaatatcctgatattttaaaatcaaacacgcaataaaacctttgctagactaagtgacagtataagtttgaaagta

SEQ ID NO: 218100 - DNA, 448 bp, Homo sapiens
gttcttctaagttgaggagtctgataggagaactccagaaagctgaactcagatggcatttgcctcattctgtgaggaacaagaggaaaatctccctttccaccttccctaccttaaagagattataggaatttagtcttgatgcttcaaagagcgggagtgggatgggaaattcaactgaagagttgtaactctaagccagcatggatttggtgtccaaagatgtatattttggattgtccataaaatcccaaaccataaatttattgtatttcattgattctgtcatgcacttaatcctccctgcccccacattttacatcaaaatgtacccraggatcaacaatgtcttcaattcaatgaaatattgaactgtaaaatttcctggtggaagcatagacgaaccttctctggagtaatacaacttcatcttcatctcagagaattc

SEQ ID NO: 218101 - DNA, 563 bp, Homo sapiens
gtgactccatataagctctctcagtagctagcacacagtccaaaaccttcacctctactatattatgtgaggctgcctatcagttgcgtggtctttaattttaaaaggttacacatgacattttcaaaaggtgaaayggagcaaagtgtgacttactaaaaagagaattatatgtatccttcaaagtgagcataggtataaattagaatattatgtcttctagcatttcatgacactcagagcaaataaaactttaaaggagtcacaagtctctacctattacacattcatcaaataagaaactgaaaaaatagttcttatatttaaatatcagacacctggaatgctttaatagactttaatcaattttgaaatggcacttatctgtgaaaaagataacgagtctgcttttgaagcaaaatacaatcaacagaacaaaaagcttcctttatgctgctgtttctttgatagcttttacacagcccacaaacttttcacaatgagctctcaataaagctcagtttctagatggcctcagcatgacaatggatgctgagctatgg

SEQ ID NO: 218102 - DNA, 615 bp, Homo sapiens
ttcttttttctagagaagcaacttaaactttggaacattctcttctcttgcacttgtaatagttcacacagtatctctttccaagtgcagctctgtatgcttgcatgaagcaaaatttcactaaagtattttactactcctagtatagaaattatttttactcaagacagcctgctttggaagcatatatcctrtgcacaggattagaattgacaccctccccctacccgaaaatttaccaaaagcatatgaaaggcttatgtttttcaactctggagcatctccctgtgagtcattgaaagtaattgatactgtactatcctaaagttttataatattaggctgatactatagattgatactatgaaacataatgctataccatgtttcttactcaactgaccttcacttaatcaactggctggcttaactcaagttctgtagtcttcccttgaaacttactgattgccacccacagcatgctggatcttgtggctagaagcctaatctttatattcctgtgcacttctgctcccatctgttgagttgaatgcttgccagaaatcagttttatttattcccaaatttgtttttgctggttttactttacattgt

SEQ ID NO: 218103 - DNA, 566 bp, Homo sapiens
ttggaacattctcttctcttgcacttgtaatagttcacacagtatctctttccaagtgcagctctgtatgcttgcatgaagcaaaatttcactaaagtattttactactcctagtatagaaattatttttactcaagacagcctgctttggaagcatatatcctgtgcacaggattagaattgacaccctccccctacccgaaaatttaccaaaagcatatgaaaggcttatgtttttcaactctggagcatctccctgtgagtcattgaaagtaattgatactgtactatcctaaagttttataatattaggctgatactatagattgatactatgaaacataatgctataccatgtttcttactyaactgaccttcacttaatcaactggctggcttaactcaagttctgtagtcttcccttgaaacttactgattgccacccacagcatgctggatcttgtggctagaagcctaatctttatattcctgtgcacttctgctcccatctgttgagttgaatgcttgccagaaatcagttttatttattcccaaatttgtttttg

SEQ ID NO: 218104 - DNA, 603 bp, Homo sapiens
agtaacctcatctttgttaatacaaaactgtatcaccttaggtgtgtccctcaggtatcgtgacaattctgcaagactttccacactgctctgctgtgatttctagaggtttccccttccctactgggtatttcttaggctgcaaaatcacatccttctgttgttagatatgccacttggggaggcatttttaagactcagagaacatagtcatctgaaacatcctagagtttcattgtacatatgtccttagaatatcatgtagaggaaaatagttgtaacaaaaytcatacaagctctgtcaattcctaactatgtgccaccaaagttctgttttctctctaagcctgtttctagatcattgctatgcctgtcttctcaaactttagtgtgcttagatagaaatcatgactgggcatggtggttcacgcctatcatcccagaacttttgtagctgggcatggtggcaggcacctgtagtcccagctactcgggaggctgaggcatgagaatggcgtgaacccaggaggtgaagcttgcagggagccaagatcatgacactgcactccagcctgggtgacagagcgagattccatctcaaaa

SEQ ID NO: 218105 - DNA, 466 bp, Homo sapiens
tgcctgtcttctcaaactttagtgtgcttagatagaaatcatgactgggcatggtggttcacgcctatcatcccagmacttttgtagctgggcatggtggcaggcacctgtagtcccagctactcgggaggctgaggcatgagaatggcgtgaacccaggaggtgaagcttgcagggagccaagatcatgacactgcactccagcctgggtgacagagcgagattccatctcaaaaaataataataaaaaataaaaaataaaaataaaaataaaaataaaaataaaatcatctggaaatcatgttggatccatattctatttcaatgaccacggaaaccagtattctgtattttagcaaactttcaagtggtaaatggtaccagtgctgctggtctgaagccacactctgagtaacaaagtacgaaagactcgttgtgaacaatcttaagttctttcaaaaagctg

SEQ ID NO: 218106 - DNA, 565 bp, Homo sapiens
ttggcttacacttgtaatctcagcactttgggaggcaacggcaggagtatcacctgaggccaggagttcaaggcaggcctactacatagaatatatacagccagaaatatagcaagaccctgtttataaccccccaaaagataaaaatmtaactttaaaaaattttccaaactaggtgaaaaactgcaagataggaaggatttttttaaaaatcagcaacatgaccaatatgttcttatattacaatgattcccatcttgaatggctcacatcattttgaaccatactttattgactcagtggaaagtatttactgcctacctcctgcaggcacagttctagacatttgagatgtaataatgaataaaacataaaataccctgccttcaagagagcttgctttctagcaagagaacatattttataaaaataattataataaatgagtgagttacatagtgtgttagaaggtgacaaatactatgaaaatagagccaataagatcagttgccagcatggggaggcaatttggagttttaaagagcaccatttctgtaggtattat

SEQ ID NO: 218107 - DNA, 419 bp, Homo sapiens
taataatgaataaaacataaaataccctgccttcaagagagcttgctttctagcaagagaacatattttataaaaataattataataaatgagtgagttacatagtgtgttagaaggtgacaaatactatgaaaatagagccaataagatcagttgccagcatggggaggcaatttggarttttaaagagcaccatttctgtaggtattatttcaaaggcgatatttgcacaacaacagaagtgagtaaagagagaaagaaaaactgccacagttggaaaagtccgtgttagatggcaataggaaccattcatttcaatcccaggcatggaagcagatcgtctggttgcaggtgctatgaagtaataggtgtgatggtggcaatctgtgtaagttcttttctcattgctttaattttct

SEQ ID NO: 218108 - DNA, 634 bp, Homo sapiens
  misc_feature (1)...(634): n = A,T,C or G
tactgtttcttttacatttctttcaattatgaccagtcatttttaatctgctataaacatcagtgctgaaataatagattagataaacacaggttgatgttttttcatcttcatcattaaatatcccagatacagtacatacgtcatgggccaaggaccatttcttttatatctcctccagcctgttgatatatccttgtcagcacttggcagtttcacaacctgggtttcgactggtattttcagggggatgcctgcaagctgcctcatcatcaccaatgcctcatccaataaggctgacctaaggactaactaatgtgaaaattcagcatataaggatgtgtatagttcctctgtctctctccttcaagcagttctttttcaaagtcttgccttgaaaatctaagccagagagacagaagtgaaaacatgcctcctngatgatgcacacatgtgtaatgagaatgtctaaatatcatattcaattttgtttttagagctggtgcagttcaaagtcatctatgccactgcagtgtgctggtttacctaagactgygtggagctatctgtcttgaggttcttttctactggaggtgtgactagttttgcaattatagatttttgtctatttggc

SEQ ID NO: 218109 - DNA, 571 bp, Homo sapiens
ggacctgagccccctttgcccgcgccttgctacagccctttttctgcatccaaagcaatagctcctctgactttggggcagggatgcccattttatgttagcatcccaagaacttggcccagttatcagcaggtagttggtgcctaaatggtgttggttccaacgtgaaagagaagaggcatcaggggatttccaaactgtttagcctgagctgctttgttgggatgtgtggtttatgkgggtcagcattaaagagtgtgggcaaagaaaaacagggagctagaaggggctcaacatgggatagccatggggaatatagatcatgtgtgttggcacttttgctttattcactgcatgcctgctttcaaatttaatgttcctgaggcatgtctcaaattgagttatttatatttttttcattaagttgtaaacttcttacaggaaagtgtcccccaggtgccttgtctggggccttgaacccctggagctgctctagaaatactcagtgacttggtttctgtaaacctgaacttcatattcttccgtgcacagtgctcaacagcgctgcttc

SEQ ID NO: 218110 - DNA, 526 bp, Homo sapiens
caatctatcaccactgtgtgcctttgtaagaaaacttcatttctaaaatttcatttggagatatttgcatatgcacacacacacacacacacacagaagccaccaagctgaacctgatgacctgtttgtctgaattcccacccataggttccaaaaggaaggtagcatctcttctcagccaaaatgaactggcaggcaggctgctgaattgcagagagagcagtaggaggtagactagacagactccccaatcacaaggaaaataaccattacttaagttttccaagtcaagtcagctgtaaaagtccatgayaaaagtaagtaaagttttcagatcatttgggttcgttaggcagggctcaacaactcaacacgtgacttaagagggtgcaatgcatcagtaaagcacacactttggagtcagatgctggttctaccaccaaatagctctgtggccacaagcaaattataccatctgagtttcagtttccttatttgtaaaatcaagataatcaagcctaattca

SEQ ID NO: 218111 - DNA, 384 bp, Homo sapiens
cagatcttaaaccagctgcctccactcaactttctacaaggccttcctggctgctcttatttaacttttgtgcccccaaggaggcatatcacatgtatcacatctccctgtcaggtcttcctctctggacgtagctctatcagaaattctaatatatgtacrtggttggtttgttgtctgtggccctattagaatataaaacccaggagagcggggacctcttccgtcttgctcaagtctgtctctccaggatctataaatgtgcctggcacatattagtgctcaatacatttttgttaaataaatggaataattaatcagtccgtgtcttgggagatccacgaaactttacctccctgggtagaaaatctgtttaagggtatg

SEQ ID NO: 218112 - DNA, 541 bp, Homo sapiens
aaggccaggtgcggtggctcatgcctgtaatcccagcactttgggaggccaaggcaggcggatcacctgaggttgggagttcgagaccagcctgaccaacatggagaaaccccatttytactaaaaatacaaaagtagccggatgtggtggtgcatgcctgtaatcccagctactcaggagactgaggcaggagaatcacttgaacccagtaggcggaggttgcggtgacgcaacattgcaccattacactccagcctgggctacaagagcaaactgtctcaaaaaaaaaaaaaaaaaaaaaaaggaagaagtgattgtattgcatttctgccagctctgtctcctgctttgcatttaggcgttgctgatttcttttagaccttgtctgatttctctttaggacaagaaattccattcaggactgatttgattcatttgttgatcttggaacctgtccattgtagagaatgtcaaggggtttcttctgaacacctggtaagagaatccggaatccttctacagctgatggtcatgcaggag

SEQ ID NO: 218113 - DNA, 541 bp, Homo sapiens
aaggccaggtgcggtggctcatgcctgtaatcccagcactttgggaggccaaggcaggcggatcacctgaggttgggagttcgagaccagcctgaccaacatggagaaaccccatttctactaaaaatacaaaagtagccggatgtggtggtgcatgcctgtaatcccagctactcaggagactgaggcaggagaatcacttgaacccagtaggcggaggttgcggtgasgcaacattgcaccattacactccagcctgggctacaagagcaaactgtctcaaaaaaaaaaaaaaaaaaaaaaaggaagaagtgattgtattgcatttctgccagctctgtctcctgctttgcatttaggcgttgctgatttcttttagaccttgtctgatttctctttaggacaagaaattccattcaggactgatttgattcatttgttgatcttggaacctgtccattgtagagaatgtcaaggggtttcttctgaacacctggtaagagaatccggaatccttctacagctgatggtcatgcaggag

SEQ ID NO: 218114 - DNA, 633 bp, Homo sapiens
gaattccatgaaagaagcggaatcagaccaactgcagttaagtgtgtattctttcatgcttactggttttaaagaattgtgatactagcactagttaactacacttagaattggaaattactcacctaatttacaatggagtacaaaccttaggcaagccaggagtaccaaagcaatgatgtcaatattaagtaagtttcaggctgaaagtcaacccaatccactctaaatgtgacccactatgagctcagaaacaaaaagatgaggagaagcagtaggaagaacaggcagaggaagaaaccatcccatgaggttcaccctgcggggaagtgactctaggtgactcctgaatgtgactcaagtcactggcagttgtgtggtggaaatgtagatgttggccaggcacctatcgtaaataacactgtttctaagggggtcaccaatgtctgagggcacaggactgtctatttctagccttgtgcatgggaagagtgtggagtgagggcctggcttccctgctgcccctgtgacccacgctgcctcttctgctcaaaagactgagcagcatgtttggtracttgctgggcaagaagtcactgggaaagccaccagcaggggacagggtgggataac

SEQ ID NO: 218115 - DNA, 300 bp, Homo sapiens
aagatctgtcaacgttctcatacattcatcacacattgtgtcccctttatgagagactagggggtcgctgctgccaacatgtgggtgtgyttcccaaccagacacctctgcttctcctcctctatctgagcctttgacccacacagagccttaaacacaggactagggtgttctaggctctgatggagctcaggttgacaccttcctcctttaattcacggtgacttcatcatgggtttaaggacaatttcttcaacaaaaccctgtctgtcccagctgacacctataggtatggccgat

SEQ ID NO: 218116 - DNA, 605 bp, Homo sapiens
ataacctacaaatggacaaaaatgacaacatgattaagttaactaaaagtgagtttattcgttaggactcttgcattgcaggagacaggaatcccacrctatcttaagaaaatatgggaatgttcttgactcacagggagaagcagaggagggattggtcttaaggatgacaggaacccaggctttgctgttcctcccatctctgagtactgtaccctggctcccagtctggccgtccctggagcaggggtagtgccaggctgaagtctaactgcctcgagataagaatggaaagggctctgtcagcgccagagtcacaaggaaggctctgattggccaccaagaccaagtctcccgactgggggtgattatgacaggctgagccagggactagggaggcagaataccagcgtcccctaccagacctaaatactgtgctgggagaggtaatttcctccaatagcagatgtgtgtatacgtcaagccaggagcacgcacttgctgtgggtgggccacagcttgggtgattatgttccagtcagctctaggactcacaagatacaaacagaccaagagttcaggagaaagacaactattcttggttt

SEQ ID NO: 218117 - DNA, 508 bp, Homo sapiens
atatagacatagagagattctaaatagggtattagctcataccttatgccttttaaatatatatattttttcaaacaggtattagctcatgtgattatggaggctaataagttccaacatctgccatcagcaagctggagacccaggacagcgaggggtgtagttttaaggcctgaaagccagagaactgatgttatagattccaggcaaggtgtgaaggcctgagaaccaagagtgctgagggcaggggaagattgatgtctcagctcaagcagtcaggcagatggcaaattgagtctcctttcagctttctgttccattcagaccctcaacagattagatgatgccacacacattgacgagagccatctgctttattcaattcaccaactcraatgctaagacatgatgcttaaccagatatctgggcatcccatggcccagtcaagttgacacataaaattaacaatcacagcaaccaaatccaaatatatttttatttttaaaa

SEQ ID NO: 218118 - DNA, 499 bp, Homo sapiens
aagtcactttcaaaataagttcaagaaaatcacattagatttaaaaagttatactttcttcaaacacaatattgtcattccattcattgycaaccaatttcctaatagaatttgccagtgctttgaattctcctgtcccaactcaaagacaaaatttgtacgaaaacaagtccaaaatgataagtaaaccattacacatttctctgaggcccattgtttgatccatttgaatagctgaacccagaatccaggttttgccttttatattttacctcataaacagtctaattaatattccgtctctggacagtacaatttcataagccaacccccaaagagagaaatatgctcttttccttgagatctggagaatgcaatcaacatccactttataagaagaaggatgctaataaataaaactacaaaattgcatcacctactgggagcaatccattgccaaggaaagtaattttacaaatgaaaaaccaaacggcaatca

SEQ ID NO: 218119 - DNA, 594 bp, Homo sapiens
ggctctcatgctccctccacatgcaaagttcagggttccttgctgctttcgtttaataaaacctctctctacaaccttttcttaatggtctcactgggatgattctgaagagagaatttatcaggtcaggcagcaaccttaacctctccaaatccagcaacgtcagttcttctgcgacaggaaacttgggcaataaggaccatgaaaatatccagtaaattaccacgatgctgtcagtgctgatactgttaaattttgagtaggaatttcacaaattgacctttactgcactatataaaatcatataacataacatagtataatataacatccctgtgaagttcttgtcartaaatgataaccacaagattaaaaggtggaaaacccttattttcttagggatatcaaagtacgtataagatttaggcatcctatttagtctcaggtgtaagacaattctggtctgtctctccctttctctctgcaattgtttttctgagcacacttgactgaatgcccttgataacttagcagtagccacctatcatgtgcctcttatgatgtgttggacattttgcatgtattattacagcc

SEQ ID NO: 218120 - DNA, 474 bp, Homo sapiens
acctagcaatgtctgtttatttcattaaaatgtgaatgccttggtattagagggtgacttattcatctttctatcccatcatctaacagaatcgaagaaggcctattttcacaatgaatattggctgaatgattatttgctgggtgaattgagatctgaaggctatacctaaaaattctagcagctgtggttggacagaaaagagtttgaaaaggatcatggaaatggtctatatayttttaagggaggactggttcatatgggacatcctaggcagcagaaggaagcttattgggcagaagttgggaatagtaagagaaggagtgtgttatctgataaaaaatatctattattttgaattgtttcataggtcagccttaacatgtcctatatccttttcttacgcattcacctattagataatgaataatataacagtataaaatgagaccactgcttctatcaaattttatg

SEQ ID NO: 218121 - DNA, 517 bp, Homo sapiens
atattatgctttgaaatttgcataaattatttgcaggtcatgtgaaagaacttttctcttctatttaattgtgaagtaatatatgcctacagacaacagtgcagaacaaaaatcaaaagcttaaagattcaccaagaagcaagcamttctgtaatcatgaattaacttaaaaaatagaatattgatagcaccacaaacccccccctggaaccactcctaagccacccacaaaggcaccactacctggcatctttggtaacacttttcttgccctcttaattgttcttcttcataagggattgcataaaggtgtattccctccagcaatttatgacaatcaaattcctttccaacatatcagatcgccactttacatatttcaagccattctgcagggtatatatattggcaactcaatgtagtatgatttaacttttctctgattacagctgagattgagcaccttgtcaaatagttattgatccctggggtgtagtttctttgtgttaattttcta

SEQ ID NO: 218122 - DNA, 588 bp, Homo sapiens
aattgtgtaaatatggaatacaggataattttttttttgtttgtgacttctcttttatcttctacccactttaaaaaatgactacatgaagcaataattatacaacttagtcaaaggcttataatgtataaatctgtgatggtattacaataaaaacacagaggaggaaagcagaaaaggaaccatatgggagtaaagttttgtagactattgaaattaacttggtataaattcaaagtttatcattatatgtatagatgttaattttactccttactgccttaccactacaaaagtaactttagattaaaaaaatacaaatagcttaaatgtaaaaggacaacaagatcatatcatgtgaatagtcaytaaaagagagcttgaatggctgcattatcgacagttttcagacacaaaaaggatattttatatgaataaaaagacagactcatcaagaaccataataattatggatacatatttagctaacaaaaacaaaacaacaaaatatatgatggaaaattgacataatttaagagagaagcagacaacaataatagttacagacttcaatagtttactttcagt

SEQ ID NO: 218123 - DNA, 588 bp, Homo sapiens
aattgtgtaaatatggaatacaggataattttttttttgtttgtgacttctcttttatcttctacccactttaaaaaatgactacatgaagcaataattatacaacttagtcaaaggcttataatgtataaatctgtgatggtattacaataaaaacacagaggaggaaagcagaaaaggaaccatatgggagtaaagttttgtagactattgaaattaacttggtataaattcaaagtttatcattatatgtatagatgttaattttactccttactgccttaccactacaaaagtaactttagattaaaaaaatacaaatagcttaaatgtaaaaggacaacaagatcatatcatgtgaatagtcattaaaagagagcttgaatggctgcattatcgacagttttcagacacaaaaaggatattttatatgaataaaargacagactcatcaagaaccataataattatggatacatatttagctaacaaaaacaaaacaacaaaatatatgatggaaaattgacataatttaagagagaagcagacaacaataatagttacagacttcaatagtttactttcagt

SEQ ID NO: 218124 - DNA, 630 bp, Homo sapiens
agtaggtgtgaagtgatgtctctgtgtggttttgatttgcatttccatcatgactagtaacgttgagaatccttccrtgtgcttgttggctgtttatagatcttctttggatgcatgtgttaggattttaaaaagcagcacaggacacctggtactagtgctgcattaatctaggctaggctaggctatatgataaacacaatcccaaatgtacaaactttgacacctaaaatgttttaaaaaggtaaaactctcacttgcatgtcttgggacatgaattatgtatatgttaatctggcttctttgtgggaaaggacaaagaaattatcccaacaatagtataatactgtataatatagttggttttggctgctttttgcaaggtacaacacacacacacaaatgtgagctctgcaaataacggtcaatatgcaagcagaaataataaaagattctagaaaaagtgtaacaatttaactttttcaaatatgagaaagaccaataactatagttctctaaataaagagatatttctgaaaaagcctctgaaacacaggctcaagtgatttaggttaaacatgagactgagggtatgtgtcctgtaatgactgtaactgcagatttgggcat

SEQ ID NO: 218125 - DNA, 258 bp, Homo sapiens
tctctccttgcttactcctgtgggtggctgggatagggagaggaaggataggcattcttcagtagctcacaagatgtaattttttagatatctatataggtttgcaaatgttttctttccatataaagttcctatggtaattgatttctttagaagaagtaatttcccctcattattttaaygacttcattcactccattgtcttctggcttccagtatttctattgaaaagcctgatatcaatcaaattagcaatac

SEQ ID NO: 218126 - DNA, 542 bp, Homo sapiens
ccaggctgttttccaaactatctgctccattttacatttctactaccagagtatgaggtagkattcatgagtactcatgaggttccaatttctttacatcattcttgttattatctgacatttaggtttcagccagccttgtgggtatgaattgatatgtcattgtgtttatttttgttatctttctatataattattggttatttttgtatatccttagagaaatatctattcaactcatttgcctattttaagtgtgttttttttttaaatttcattattgagttgtaagaattgtttatatattttagatacaagtttcttatcacatatatgatctgtaaatatttttctcccattctgtgagttgtctttttactttcttaatactgttctttgcaatacagaagctttaaattttgataatcaaatatatctatttttattctattactcatgttttggtgccatatcagagtccttttcaaaatctaacgtcatgaagatttatcacaatgtttaagagtttatagatttataaa

SEQ ID NO: 218127 - DNA, 542 bp, Homo sapiens
ccaggctgttttccaaactatctgctccattttacatttctactaccagagtatgaggtaggattcatgagtactcatgaggttccaatttctttacatcattcttgttmttatctgacatttaggtttcagccagccttgtgggtatgaattgatatgtcattgtgtttatttttgttatctttctatataattattggttatttttgtatatccttagagaaatatctattcaactcatttgcctattttaagtgtgttttttttttaaatttcattattgagttgtaagaattgtttatatattttagatacaagtttcttatcacatatatgatctgtaaatatttttctcccattctgtgagttgtctttttactttcttaatactgttctttgcaatacagaagctttaaattttgataatcaaatatatctatttttattctattactcatgttttggtgccatatcagagtccttttcaaaatctaacgtcatgaagatttatcacaatgtttaagagtttatagatttataaa

SEQ ID NO: 218128 - DNA, 542 bp, Homo sapiens
ccaggctgttttccaaactatctgctccattttacatttctactaccagagtatgaggtaggattcatgagtactcatgaggttccaatttctttacatcattcttgttatwatctgacatttaggtttcagccagccttgtgggtatgaattgatatgtcattgtgtttatttttgttatctttctatataattattggttatttttgtatatccttagagaaatatctattcaactcatttgcctattttaagtgtgttttttttttaaatttcattattgagttgtaagaattgtttatatattttagatacaagtttcttatcacatatatgatctgtaaatatttttctcccattctgtgagttgtctttttactttcttaatactgttctttgcaatacagaagctttaaattttgataatcaaatatatctatttttattctattactcatgttttggtgccatatcagagtccttttcaaaatctaacgtcatgaagatttatcacaatgtttaagagtttatagatttataaa

SEQ ID NO: 218129 - DNA, 542 bp, Homo sapiens
ccaggctgttttccaaactatctgctccattttacatttctactaccagagtatgaggtaggattcatgagtactcatgaggttccaatttctttacatcattcttgttattatctgacatttaggtttcagccagccttgtgggtatgaattgatatgtcattgtgtttatttttgttatctttctatataattattggttatttttgtatatccttagagaaatatctattcaastcatttgcctattttaagtgtgttttttttttaaatttcattattgagttgtaagaattgtttatatattttagatacaagtttcttatcacatatatgatctgtaaatatttttctcccattctgtgagttgtctttttactttcttaatactgttctttgcaatacagaagctttaaattttgataatcaaatatatctatttttattctattactcatgttttggtgccatatcagagtccttttcaaaatctaacgtcatgaagatttatcacaatgtttaagagtttatagatttataaa

SEQ ID NO: 218130 - DNA, 557 bp, Homo sapiens
aacctaagtagaacaagcctgaaaagaaagataagctggttcaaaataaataaggacagaacatgattttctataaacaacatctagatttctgaagatctccctttgcgtctagatgttctatgtcacatgttggcctgaaaaggctagaaagaataattttatttcatttttagctgaaatatacttcataagtgtgtatacactgaaacactttaaattactgaccattcttggcatttcacacttacttttatcttccctstacctcaaagaaatacaaggaagccactttttaaatgataagacaagtcaccattgttttcaaggccatggatcaaaacttggaagaaaaacttagccactgacaactttttattggaaattattttattaatttagatctgcttgaaaataatccttactgaatgcatagtataaacttttatgtggatgtcaatgaatagaacaaaaatgatataaaagtcatagtttcaaaaaaaaaaaaggagagagacttggcttttttttccattcctaattctcccattctttca

SEQ ID NO: 218131 - DNA, 584 bp, Homo sapiens
tggtgcccactctctggctggagattgtgccaaggacgtgttttagaaacaattcttcatactgggcaaagaaaaacgaagaaggctttactaatatattttcaatcatatataagagaaggatgaaggaatttttcttgtagcagaaaaaggtaattgctttgtaacttcacattcgaaaagcctaattcatttttcttaaataaaatgcaagccgttcaccaaaccagtttagtttacaatggcaaatgcatgtaacttattcaaacaaaagcaaacatacacgtttattccacaagtattccttgagcaattcctgtctctttggcacgatgctagatttggggkatggatgcaaggaagaagacagatatcatcagtccacaccgttgtggagcttaagtgacattggatgggacagacaatgaacaagacaacaagcaagaaaagaaacctttacaagccagtgatccccgtggagaaggaaatgaacagagttttgcaatagaaataatgaaggggttatttaggaggttctgttttcaattaagtggtcagaaaactcctcttctgtggcaaattag

SEQ ID NO: 218132 - DNA, 584 bp, Homo sapiens
tggtgcccactctctggctggagattgtgccaaggacgtgttttagaaacaattcttcatactgggcaaagaaaaacgaagaaggctttactaatatattttcaatcatatataagagaaggatgaaggaatttttcttgtagcagaaaaaggtaattgctttgtaacttcacattcgaaaagcctaattcatttttcttaaataaaatgcaagccgttcaccaaaccagtttagtttacaatggcaaatgcatgtaacttattcaaacaaaagcaaacatacacgtttattccacaagtattccttgagcaattcctgtctctttggcacgatgctagatttgggggatggatgcaaggaagaagacagatatcatcagtccacaccrttgtggagcttaagtgacattggatgggacagacaatgaacaagacaacaagcaagaaaagaaacctttacaagccagtgatccccgtggagaaggaaatgaacagagttttgcaatagaaataatgaaggggttatttaggaggttctgttttcaattaagtggtcagaaaactcctcttctgtggcaaattag

SEQ ID NO: 218133 - DNA, 584 bp, Homo sapiens
tggtgcccactctctggctggagattgtgccaaggacgtgttttagaaacaattcttcatactgggcaaagaaaaacgaagaaggctttactaatatattttcaatcatatataagagaaggatgaaggaatttttcttgtagcagaaaaaggtaattgctttgtaacttcacattcgaaaagcctaattcatttttcttaaataaaatgcaagccgttcaccaaaccagtttagtttacaatggcaaatgcatgtaacttattcaaacaaaagcaaacatacacgtttattccacaagtattccttgagcaattcctgtctctttggcacgatgctagatttgggggatggatgcaaggaagaagacagatatcatcagtccacaccgttgtggagcttaartgacattggatgggacagacaatgaacaagacaacaagcaagaaaagaaacctttacaagccagtgatccccgtggagaaggaaatgaacagagttttgcaatagaaataatgaaggggttatttaggaggttctgttttcaattaagtggtcagaaaactcctcttctgtggcaaattag

SEQ ID NO: 218134 - DNA, 560 bp, Homo sapiens
cctgaattttgtaaaattttaagttgctaaggattcagaaatctactaaacaggggaagcctaataaacacataatattctgaacctacaacacaagtgtatgagtatgattttatgaaacagagccaaataggagatagactaagcctaacaaaatggcaaatttgatgggattaagtttagtctcagagaagttttgtaatcaagaaccttaaccggttaagatgaattctcaatagaaaaataatcccatatagagcctcttttcactttggccatatttttctgccttttgcaacactgtaaatctactggtatgataaagaacaagacagtgtcctccaaatgaagtgaaaaaattcatagaaagagatcacaggtaacacaaacrttagaataagcatacaaagtctttaaaataaccatggttgatatattcaaaaattagagaaaagagaagagaaaagattaaaggatggagaactttctcaaataattgtaatttataaaaaagaattgaatagaaattaaaacatttaagtttacaatctctgtaatta

SEQ ID NO: 218135 - DNA, 531 bp, Homo sapiens
catctcttactggtcagtatcagaaaccaccaccactgcacacaaactcacctttcttctaacggtaagcccaagagtgggagttcagagacctgagttacggaactttggacaattcacgtcctatctcaggaccccaattttctcactgataaattaaggtgagcaggtggatgctgtccaccattcagtctggctttgtttggaaatgatgtccacggcctctagggctggtgccttcttgtgatgctaggatggcgccatgtttgatgaaggtgagtaggtgccaatgaagacctagagaaaggccaaggaaagaaggtycctgctttactacccacagcatatacagttataaagaagcatatgtaaaaggcaccctgaaggagggctgagatttcagagctcagacagtcaagaggggattgagaacaacatgagcaaagccacagatgtgaaaggaataagctccagcgggaaagcatgggcaggttcagtggttagagccacgtgttttcattgagctcttat

SEQ ID NO: 218136 - DNA, 374 bp, Homo sapiens
aaccaccagaagctaagcagaggcctgggacagattctcctcacagmtctcggagggaaccagccctgccaacatcttgattttggacttccagcctccagaactgtgagacaataaaagtctgtggttttaagccacccagattgtggtcacttgttatagcagctccaggaaactcacacagccctagactgatgtggcctgaacaccctggagtcctggaggagtgagcaatcttccttggagactcaggattcaggaagaatgtggaggagggaagaggaagcagccacctttgagatgccccacatgtgtatgagacacagaagcctcagccttcttctggaaggaggagctgagtcagggtttgaaga

SEQ ID NO: 218137 - DNA, 453 bp, Homo sapiens
agataaattacacttatatcgtaaaaacaagttgaatgatagcagatttctcatcagaaactaaaggctggaaaacagtggcacagttttaagtgctgaaagaaaagaactgtcaacgtggaatcttatgtacaacaaaaatatccttcaggaatgaaggaaaatcaagacagtctcaaattagaaaaaagaaaaaaaaaaactaaaagaatttgtcaccagcagaactaccctaaaagaatggctaaaggaggagggkggagccaagacagccgaatagcaacagctccagtctacagctcccagcgtgaatgacgcagaagatgggtgatttctgcatttccaactgaggtaccgggttcatctcactggggagtgccagacagtgcgtgcaggacagtgggggcagcacactgtgcgtgagccgaagcatgcgagcatcgcctcacccgg

SEQ ID NO: 218138 - DNA, 453 bp, Homo sapiens
agataaattacacttatatcgtaaaaacaagttgaatgatagcagatttctcatcagaaactaaaggctggaaaacagtggcacagttttaagtgctgaaagaaaagaactgtcaacgtggaatcttatgtacaacaaaaatatccttcaggaatgaaggaaaatcaagacagtctcaaattagaaaaaagaaaaaaaaaaactaaaagaatttgtcaccagcagaactaccctaaaagaatggctaaaggaggagggtggagccaagacagccgaatagcaacagctccagtctacagctcccagcgtgaatgacgcagaaratgggtgatttctgcatttccaactgaggtaccgggttcatctcactggggagtgccagacagtgcgtgcaggacagtgggggcagcacactgtgcgtgagccgaagcatgcgagcatcgcctcacccgg

SEQ ID NO: 218139 - DNA, 453 bp, Homo sapiens
agataaattacacttatatcgtaaaaacaagttgaatgatagcagatttctcatcagaaactaaaggctggaaaacagtggcacagttttaagtgctgaaagaaaagaactgtcaacgtggaatcttatgtacaacaaaaatatccttcaggaatgaaggaaaatcaagacagtctcaaattagaaaaaagaaaaaaaaaaactaaaagaatttgtcaccagcagaactaccctaaaagaatggctaaaggaggagggtggagccaagacagccgaatagcaacagctccagtctacagctcccagcgtgaatgacgcagaagatgggtgatttytgcatttccaactgaggtaccgggttcatctcactggggagtgccagacagtgcgtgcaggacagtgggggcagcacactgtgcgtgagccgaagcatgcgagcatcgcctcacccgg

SEQ ID NO: 218140 - DNA, 409 bp, Homo sapiens
gaattctgcaaccacataattcgattttaggtctaatccttattcatgtctgtgctgcagctataggcaataagggattctcttaaggcctccatagaagctttctggttctctacttttgtcytgaattgaagataaagcaatatactaatatttgtctttacacaagctctctggcacagtcaagtaacttataccacctgaaacatgtgtcgtcatcattgtgacaatatcaggggtacaacagtctggtgactttccaaagccttgtcctctgctggctctccatctcacaccactaggatgaccattcaagagacaatgatgccacatcacatacctactgctaagtgttgtgtgttctcaagaatagaggtcatccatgaatttgcctagggtattaagcaac

SEQ ID NO: 218141 - DNA, 660 bp, Homo sapiens
aagggattttgctattttgtttctataatcaaaaaatagttttatgcagcctccctttgagtttgttgtataaacacatttgtgaatagaaaatttaagagacctttaacatttgagaaattcagctgtttcaacagtcaccatgtcaagcacacaatgacactttgttttcactgagcctcatagaattggattacccagcaatgatgcgatgmaggtgtatgttgtaaacagtaatgggctactcgataatgagaatcttacatgttatcccaagtcaggtgggtacagtcaaagtcaaagggatttggatgctctactggtaaaaaaatctttcccatgtagtctgtcaatccattcattcaaaaaacaaacaaaaacaaaaaaaaaaacagggtttgaaaaagtatcctatcataaccctgcggatttcaaactgtctttttcaagtagaagatgtccaaaatatggaaattggattttaaaaaacctacaggtggtagaagaaaataagagttctttcagttctctctctagcccctccataatctcagaggttccagtaagcaaggtgtgaaaaccatgataggaaattctttcctcattcattgtcaagtatggcaccccctgaagttttgcaacatatcagccctgactgaa

SEQ ID NO: 218142 - DNA, 660 bp, Homo sapiens
aagggattttgctattttgtttctataatcaaaaaatagttttatgcagcctccctttgagtttgttgtataaacacatttgtgaatagaaaatttaagagacctttaacatttgagaaattcagctgtttcaacagtcaccatgtcaagcacacaatgacactttgttttcactgagcctcatagaattggattacccagcaatgatgcgatgaaggtgtatgttgtaaacagtaatgggctactcgataatgagaatcttacatgttatcccaagtcaggtgggtacagtcaaagtcaaagggatttggatgctctactggtaaaaaaatctttcccatgtagtctgtcaatccattcattcaaaaaacaaacaaaaacaaaaaaaaaaacagggtttgaaaaagtatcctatcataaccctgyggatttcaaactgtctttttcaagtagaagatgtccaaaatatggaaattggattttaaaaaacctacaggtggtagaagaaaataagagttctttcagttctctctctagcccctccataatctcagaggttccagtaagcaaggtgtgaaaaccatgataggaaattctttcctcattcattgtcaagtatggcaccccctgaagttttgcaacatatcagccctgactgaa

SEQ ID NO: 218143 - DNA, 473 bp, Homo sapiens
taaaacagtatttgatggctgattttcatgagtgaatacagaactttgattttttgcagtcctgagattgataatgggtctcaggagattttcaggtacwctcagaataagactattggtatggattggacctgagtcccacccaaaactcgtgtcaaattgtaatccccaacattggagatggggcctagtgggagttgattgtatcatggggatggatttttccccttggtactatcctcacaatagtgagtgagttctccagggatctggtcatttaaaagtgtatagcacctcccctttctctctcccttgctcctgctccagccaggtaagacatgcctgttccccttcaccttctgccatgattatgtttcctgagcttcccttcactttctacaatgattataagttttctgaggcctcttcagaagcaaaacccactctacttcctgtacagcctgcagaactgt

SEQ ID NO: 218144 - DNA, 206 bp, Homo sapiens
ctgagcgtcccccgcagtctccaactccggcgccagtcaggttgtggggtgggggcggcggagggyggagagcgcaggcgcagagtccgcgcggcggcgcccctctccctccgcagtactccgggcagcgcccgcctcgattttcccaggcgagggcacgcccgcgtcagtcgcctccggggcaccttcctcgccacgacacgcag

SEQ ID NO: 218145 - DNA, 544 bp, Homo sapiens
gttaggacaaatgacaaattttgaatgtggtgtgtggattagatagtggaattatatcaatgtkaaatttctgattttggtgataacactgtggttatgcaggagagggtccttgtcttaaaggaaaacacttaagtagttagggataattggatatcacctctgcaacttaccttcgattggttcagaaaaagaaaatgaatggcaaaacaaatgtaaaatgtttacaattggagaacttgggtgaagaataataagagagttatcttttacccaggagtttgttgtattatatttgcaacttttatgtaagtttgaaattactacaaaataagttacaaaaatggcaataccagtatttaattcgttggattttggggaaaagtacatgagttaatatgtgtggtatgtttacaacagagctagacacataataaatgctatatatatatgttagcaatgatggtgatagtgagacagtggtggtggtgatgatgaagtcctgaattttaaacacacaggtgcagtggctcatacctgtaat

SEQ ID NO: 218146 - DNA, 544 bp, Homo sapiens
gttaggacaaatgacaaattttgaatgtggtgtgtggattagatagtggaattatatcaatgtgaaatttctgattttggtgataacactgtggttatgcaggagagggtccttgtcttaaaggaaaacacttaagtagttagggataattggatatcacctctgcaacttaccttcgattggttcagaaaaagaaaatgaatggcaaaacaaatgtaaaatgtttacaattggagaactygggtgaagaataataagagagttatcttttacccaggagtttgttgtattatatttgcaacttttatgtaagtttgaaattactacaaaataagttacaaaaatggcaataccagtatttaattcgttggattttggggaaaagtacatgagttaatatgtgtggtatgtttacaacagagctagacacataataaatgctatatatatatgttagcaatgatggtgatagtgagacagtggtggtggtgatgatgaagtcctgaattttaaacacacaggtgcagtggctcatacctgtaat

SEQ ID NO: 218147 - DNA, 544 bp, Homo sapiens
gttaggacaaatgacaaattttgaatgtggtgtgtggattagatagtggaattatatcaatgtgaaatttctgattttggtgataacactgtggttatgcaggagagggtccttgtcttaaaggaaaacacttaagtagttagggataattggatatcacctctgcaacttaccttcgattggttcagaaaaagaaaatgaatggcaaaacaaatgtaaaatgtttacaattggagaacttgggtgaagaataataagagagttatcttttacccaggagtttgttgtattatatttgcaacttttatgtaagtttgaaattactacaaaataagttacaaaaatggcaataccagtatttaattygttggattttggggaaaagtacatgagttaatatgtgtggtatgtttacaacagagctagacacataataaatgctatatatatatgttagcaatgatggtgatagtgagacagtggtggtggtgatgatgaagtcctgaattttaaacacacaggtgcagtggctcatacctgtaat

SEQ ID NO: 218148 - DNA, 381 bp, Homo sapiens
ggaattcctgtttggtttttcctttttttttttttttttctttttgagatggagtctcgctctgtttcccaggctagagtgctatggcacgatctcagctaactgcaaccttcacctcccaggttcaagtgattcttctgcctcagcctccgaagtagctgggactacaggtgcctgccaccacacctggkgtggcggcaatttttttgtattctttgcagagacagggtttcactgtgttagccagtcttgtcttgaactcctgacctccagtgatttgccttccttggcctcccaaagtgctgggattgattacaggcatcagccattgtgcccaacctggttttcctttgtgatatctagttcctttagtaaatttct

SEQ ID NO: 218149 - DNA, 428 bp, Homo sapiens
ttgctatatgtgtctgttctactgcagcattcttaggagtttattatgccttggacaaattccatccagctttggttagcacagtacaacatttggagattgtggtagctatggtcttgcagcttctcgtgctgcacatatttcctagcatctatgatgtttttggaggggtaatcattatgattagtgtttttgtccttgctggctataaactttactggaggaatttaagaargcaggactaccaggaaatactagactctcccattaaatgaatacctgattattattgtctcattaatgttcagttattatgtatactgccattttaatgtttacctatgaatgtcttttgtgttatataactgacagagtgctataaaatatataatatatacaaatgcagaaaatttattctagtctaatat

SEQ ID NO: 218150 - DNA, 546 bp, Homo sapiens
tcttgggaacaacaccagtaaatgatggaaaaactgcagtattagggagagggacaagtggaactgcaacagaatcaaacataggtctcagccagtcctccaggaagctctggagctgggaaaggccttcagagtagtcccaaatggaggcaataatgttgggccattgtaccttcatcaacagtcagtcactgggtgcagactgcmccagggaaagaaatacaactttagaagaggtggcttcctgtacctgaggggaattcccagagagaaactcagagctattggcaaccaacgcctgtaacctgggataatgagtgtcctggtcctgaaagcaaggatctgtattgcactccataacattcactgaatcatcactattgaattcactttttagtgagtctagaacactagatatctttcaacatcaccatggtggcaaagatacttggagccgggagagtttttggatgtgtgatcagatgctttcagtaaatgggatctgcacaagaaacggctcatcttaagtgtccaaaaattttacat

SEQ ID NO: 218151 - DNA, 546 bp, Homo sapiens
tcttgggaacaacaccagtaaatgatggaaaaactgcagtattagggagagggacaagtggaactgcaacagaatcaaacataggtctcagccagtcctccaggaagctctggagctgggaaaggccttcagagtagtcccaaatggaggcaataatgttgggccattgtaccttcatcaacagtcagtcactgggtgcagactgccccagggaargaaatacaactttagaagaggtggcttcctgtacctgaggggaattcccagagagaaactcagagctattggcaaccaacgcctgtaacctgggataatgagtgtcctggtcctgaaagcaaggatctgtattgcactccataacattcactgaatcatcactattgaattcactttttagtgagtctagaacactagatatctttcaacatcaccatggtggcaaagatacttggagccgggagagtttttggatgtgtgatcagatgctttcagtaaatgggatctgcacaagaaacggctcatcttaagtgtccaaaaattttacat

SEQ ID NO: 218152 - DNA, 516 bp, Homo sapiens
caatttgaaaatctataaaatatgggtaattctactactcaaaacayaggatgctgacatggattaaaataaacattgcgttttaaggacccattatagtatctgggcatagaataagcaaaaaataaatgtgatattgttaagagtttccattgctattccaatactgattaaatgcgaaaaagggaaaagccctcatttctcttcttcacggtagtaagaaatggtaaagctgaggtttgcggaaaggagaaagagtgggaagaagcagccacgcagagaagagaaaagcaggatgagtccctgagactttgagtgggagtaaaaagaacatttctgtccaagaaggagccttggtgcttagttgcccaaagacatgttacgtttcccatcagactgtcttttccaatagactctcatcccaaggggtaaaatgacaaagttttataaacctttgtaacccttacattatctgaaattgtgctttgcctgtggtcgatgctcaatatttttata

SEQ ID NO: 218153 - DNA, 579 bp, Homo sapiens
ttgactgattctgatgaaaaggtcatctctcctttcatggtctcccaaacaatgtcaacattccacccgttcaggaactttgatccaacgttcactttcaactcgtgtgggtttctaaaaccttctctcccagacttactttctctttcatacattcttagtctttccttgacttctcaatgcttggcatgtcctgcctcttctctagtccctgagtcctgacctgaattgttctctgttctgactggacagtttttccttgggctctgaaatggcatcaccatagtcaccgccactcaggttctgaacttcccaggggtgtcctctgtctttctctttgctccctatacctcacaactccagccccatccatcctatttcctcattgccagtagctataccttcaacagattttaagctaaccctttcccccacacacacaaccattttccaacaatattaggccttcatgcgwgactttggtgatagaccattttatcacgttgatttttatgtggtttttagactgttagattgacaatttttgacatgtatattataacacctattcatggcaag

SEQ ID NO: 218154 - DNA, 410 bp, Homo sapiens
actttaacgtttgatgtcgttttgttcctttccaccctttggcttctggaatattaaaaacatataattatcttagagttcatgaaaactttgcctccaagcaaacccttcagtttgaacttacaaatttttcaaaataaattttactggtaatgaaaataattgccttcatgttgtagagaattaaccccataactctatcaaattggtattctaaaataacaaataaaacacaaatataaaccagcatctatcttcaggttattggagcctataaaagaggtagctaaaaattcctctaaaaaataaygtattgaatttttagatcctccagcccactattaaattaacacacgttagtttagctgggtttgatactagtgcaactagcaattgattcatacctactc

SEQ ID NO: 218155 - DNA, 571 bp, Homo sapiens
cttctctgttttcttctttattagtcttgctagaggtctatcaattttgttgatcttttcaaaaaaccagctcctggattcattaattttttgaagggtttttttgtgtctctacttccttcagttctgctctsatcttagttatttcttgccttctgctaacttttgaatgtgtttgctcttgcttttctagttcttttaattgtgatgttagggtgtcagttttagatctttcctgctttctcttgtgggcacttacggctatgtttttttgtttttgtttttgttttttaagacagggtctccctctctcactgagggtggagtgcagtggcgcgacctcagctcactgaagcctcctcctcccaggttcaagcaattcttgtgcctcagcctgctgagtagctgggcatacaggtgcacgccaccacacccggctaatttttgtatttttagtagaggcagggtttcaccattttggccaggctggtcttgaactcctgacctcaggtgatccgcccacctcagcctcccaaactgctgggattacaggcgtgagccactgcaccag

SEQ ID NO: 218156 - DNA, 571 bp, Homo sapiens
cttctctgttttcttctttattagtcttgctagaggtctatcaattttgttgatcttttcaaaaaaccagctcctggattcattaattttttgaagggtttttttgtgtctctacttccttcagttctgctctcatcttagttatttcttgccttctgctaacttttgaatgtgtttgctcttgcttttctagttcttttaattgtgatgttagggtgtcagttttagatctttcctgctttctcttgtgggcacttacggctatgtttttttgtttttgtttttgttttttaagacagggtctccctctctcactgagggtggagtgcagtggcgcgacctcagctcactgaagcctcctcctcccaggttcaagcaattcttgtgcctcagcctgctgagtagctgggcatacaggtgcacrccaccacacccggctaatttttgtatttttagtagaggcagggtttcaccattttggccaggctggtcttgaactcctgacctcaggtgatccgcccacctcagcctcccaaactgctgggattacaggcgtgagccactgcaccag

SEQ ID NO: 218157 - DNA, 494 bp, Homo sapiens
ttttctcttaccatccttactttgttgaatgcgtcctgtgattattaagtagcaaaaatggttaccagttgcaactaatcatcagaagatttcctaggttctatgcaatagaaaaaaacctcaaaatacattggatgtgaaggtggtggtattgtttgaatgtggtcccttcaaaattcaggtgttgccaatgtgatgattttaagaagctgggcctttgtaaggtaattaggccatgagggcttactgggattaaagctctttcaaaggaagcttcacacagcctttggctaccttgccctctgtyttatgccatgtgaggatgtagcaagaaggccctaagcagaccaatgccaatgccttagtcttgagcttccagtctccagagttgtaacaaataaatttcttttatttgtaaattactcagtctgtggtattttgttgtagcagcacaaacagactaggtggcaatattactgtaactgtcatccata

SEQ ID NO: 218158 - DNA, 494 bp, Homo sapiens
ttttctcttaccatccttactttgttgaatgcgtcctgtgattattaagtagcaaaaatggttaccagttgcaactaatcatcagaagatttcctaggttctatgcaatagaaaaaaacctcaaaatacattggatgtgaaggtggtggtattgtttgaatgtggtcccttcaaaattcaggtgttgccaatgtgatgattttaagaagctgggcctttgtaaggtaattaggccatgagggcttactgggattaaagctctttcaaaggaagcttcacacagcctttggctaccttgccctctgtcttatgccatgtgaggatgtagcaagaaggccctaagcagaccaatgccaatgccttagtcttgagcttccagtctccagagttgtaacaaataaatttcttttatttgtaaattactcagyctgtggtattttgttgtagcagcacaaacagactaggtggcaatattactgtaactgtcatccata

SEQ ID NO: 218159 - DNA, 494 bp, Homo sapiens
ttttctcttaccatccttactttgttgaatgcgtcctgtgattattaagtagcaaaaatggttaccagttgcaactaatcatcagaagatttcctaggttctatgcaatagaaaaaaacctcaaaatacattggatgtgaaggtggtggtattgtttgaatgtggtcccttcaaaattcaggtgttgccaatgtgatgattttaagaagctgggcctttgtaaggtaattaggccatgagggcttactgggattaaagctctttcaaaggaagcttcacacagcctttggctaccttgccctctgtcttatgccatgtgaggatgtagcaagaaggccctaagcagaccaatgccaatgccttagtcttgagcttccagtctccagagttgtaacaaataaatttcttttatttgtaaattactcagtctgtggtattttgttgtagcagcacaaacagactaggtggcratattactgtaactgtcatccata

SEQ ID NO: 218160 - DNA, 586 bp, Homo sapiens
tgtatgataagaccttgttctccacaaccccttatcttaacccaaatattcctttctattgataataactcttttaagcaattgccagtcagaaaatttttaaatatacctgtgactgggaagctccccgcccccacttcgagttgttttggctttcgaggttgaaccaatgtaactctgacatgtattgattgatgtattatgtaccattaraatgtataaaagcatgctgtatgccaaccaccttgggcacatgttgtcagaatttcctgaggctgggtcatggatgtgtccttaccttcacaaaataaactttctaaattgactgagacctgtctcagatactttcgggttcacagtagctataataaaatgctgtattaccatcttgtttgctaacactatttttcaaccagagaacaataaggacacatagctcaactggcatgctgaagataatatcaatattgggtcctgaaaagctgtatcattagaatgtagtaaactagagatgaaacacagatgttttgtgggacttcctaaaatggtaagaaagtgttctaaggaaaagaaacagcagacattt

SEQ ID NO: 218161 - DNA, 328 bp, Homo sapiens
tttggagtgccccctcaagctctttctgcaaccatatttaagattaacttcaaatctaaggttacataaaatcatttgccttatttaacaaggcaaaatattgagacattatcctctaagaaacaaagtaataagtcatagttakagctaatgagttgctattgaatttgtacaggcgaatcaaggaccttctctcattcagctagaaatgctgatcttatgttagcttgccattgatatcttaatcttattgacaaaaatgtaaaagtgtgaagcatagtgtgacttctgtgttgaatctactgaatgagtaaaatctgaaaggagt

SEQ ID NO: 218162 - DNA, 486 bp, Homo sapiens
ccctcagcttttgccttcctgggaaagtctttacctttcccttatttctgagggacagctttgacaggtaaagtatttttggttggctatttatttttattttcagcactcaaaatatattgttcaactttcttctggcttgcaaggtttcagctgagaaatccactgacagtcttgtgggtgttctcttgtatgtgatgattcaggggttttttttcctggctttcataattttctataagtctgatttttgacagtttgattatartgtgtcttggtgaagtcctcttttggttgaacttatttgggaacttttcagcttcatgtacttgcatgtccatttctcttcttttctctctctgttctccttcttatactcctataatgtacatgatagttctctcaattatgtcccacaaaatcccataggcttttgccatatcttttcattttttttcctttttctactttgactgtacaatttca

SEQ ID NO: 218163 - DNA, 376 bp, Homo sapiens
aatgacagaagagagatattaactgtttggtacattacacttagastaaattaagagcttggaaactatgtcagatatattaaccttttaaaaacttccatccagaaattcccatccaatatggtcagttagctgtgtcattgggtagtgtgtttgtgttggccagaaatggaaaggagagaaagagtactacctgaaaagaattggaagagaaatgtttgggtccagggattcctttttttttcctgaaaaaaattgttttttcttttttactcttggttgggtggtaacaaagaatgcactcaagctctaacaataaatgagttgtgtcaaatccagcacatgtttccaagcagaatttaaaaatatgtagagt

SEQ ID NO: 218164 - DNA, 485 bp, Homo sapiens
ggatttaggatcactatatatatgctttggatttgttttgtccttttctttagtgtttgcagttgtatggagtaagcacatttaaatggatgaaccaaatttgattttatcagcccctatgcaaggatataaagctgtgtgcaatatttacaattaaaaaaagctggaatgtataaccttatgctttcatattctacacrtatgtgtggtaacctttgctaggtaaaaagtatgcatatttatagctttggtagacactgctaaatcacactccaaaagggttttaccagtacctactcctgtcaacatgagtgagagtgcccattcccaatagacttgccaacagagtatgcaataaaagttttagatctttatcttcctgataggtgaaaaatgatatttcaatgtgaagtttatttgcatttctcattttaatttccttttctataaactgtctatttgtagtcttttctactttttttttt

SEQ ID NO: 218165 - DNA, 485 bp, Homo sapiens
ggatttaggatcactatatatatgctttggatttgttttgtccttttctttagtgtttgcagttgtatggagtaagcacatttaaatggatgaaccaaatttgattttatcagcccctatgcaaggatataaagctgtgtgcaatatttacaattaaaaaaagctggaatgtataaccttatgctttcatattctacacgtatgtgtggtaacctttgctaggtaaaaagtatgcatatttatagctttggtrgacactgctaaatcacactccaaaagggttttaccagtacctactcctgtcaacatgagtgagagtgcccattcccaatagacttgccaacagagtatgcaataaaagttttagatctttatcttcctgataggtgaaaaatgatatttcaatgtgaagtttatttgcatttctcattttaatttccttttctataaactgtctatttgtagtcttttctactttttttttt

SEQ ID NO: 218166 - DNA, 298 bp, Homo sapiens
tctgcaatacattaacagtgaccaagctgagaatcaaatcaagaactctacccattttacaaaagcttatacatatatatgtatatataatgtacatataaatatgtacatataaatatgactttatttatactcagaatgcctttacctcctatctctgccattctaccrattctgcaaggccatttcagagataacctttcctttttctgaaatctgtatgaccacacaatcccttactctaaacccttgggtgcaatggatttctaaattcagaatcttttggaatttatataca

SEQ ID NO: 218167 - DNA, 432 bp, Homo sapiens
gaattcatttatatgaacatgttgttttcatcacatgaatctaacaatttttcttcaaccattcccacatatctgccatatttcctatcatgctatgatctttcttctctgctttcatgagttcaacctttcttttaaaattcagctcatattctatctgtatcatttaatttttgatttaaaacaatcggaagcaaacactggctaacttaattcccctttacctattcattccccccaaaggggtttggggagtcagaggttacaggaaggattcatggaatccccagaaggctggaagatcagggttgagacagtcggaaccaaggaagctctggaaacttaagaagtaggaggcacagcaagtctcacsgcaagaagagcttggtaaggacttggtcactaccactaccgctgccatgaccttgacct

SEQ ID NO: 218168 - DNA, 369 bp, Homo sapiens
gacaccttgtggcttgtaaatactctagaacagagggaatgatggtggtgagaggcaaaggaagagtcaactagttactgaagagtcactagtcactaatagactagtcaactaatgtcactgtgaaygtgaatggccctttaacttagaagacatttaaaagttacaatgaatcaaaagcagcattgacttctgtgcctatagaatctaacaagaatatctaatcattcacttgtctgtgctttgcagttcactttacaggtattatcagttggtggtatttatttttaccattattgtttttcggacaaggaaattaaggtcagagaagtcaaataactgtcccccaaatttaagttatgatagatc

SEQ ID NO: 218169 - DNA, 369 bp, Homo sapiens
gacaccttgtggcttgtaaatactctagaacagagggaatgatggtggtgagaggcaaaggaagagtcaactagttactgaagagtcactagtcactaatagactagtcaactaatgtcactgtgaacgtgaatggccctttaacttagaagacatttaaaarttacaatgaatcaaaagcagcattgacttctgtgcctatagaatctaacaagaatatctaatcattcacttgtctgtgctttgcagttcactttacaggtattatcagttggtggtatttatttttaccattattgtttttcggacaaggaaattaaggtcagagaagtcaaataactgtcccccaaatttaagttatgatagatc

SEQ ID NO: 218170 - DNA, 550 bp, Homo sapiens
  misc_feature (1)...(550): n = A,T,C or G
agagcctcaaacttcccagtttattatctagtttgtaatatttcaaaacaatattaaaatgagacagaaatacagaattaagtaaaaaagaaacaatgtggtttactttgtaagaaaattcttaatggggtagaaaagacttggaaaccataaacaaagataatagatgatataaaagaaaaagtagcttagagtgtaccagttgataatgaagctctggcttaaaaattagtatataaaagtatacyagtatgtagtatatttatagtatagaaatgagtataaaaactagtataattagtattagtatatattagtatattagtatataaattagcattgtaattatacattcgtatataaaattattatatatattagtagattagtaataaaactagtaaagtttatattacttataaaatatagaaaatgctgtgggatcttccctatgtgtaattatatataatagagtgttatattctgtttctgaaccctgacatanaaatttgggaacttatagtggtcttaggcaaagtaaaataataaa

SEQ ID NO: 218171 - DNA, 399 bp, Homo sapiens
acaacttgtcattatctagcaaaggcaaacatgcacatagtttaagaccctgaaattctactcttagacatatactctagaaaaactctgacttgtgtacattaggttagatattcaataattttcatagtagcattcttaataactgcaaaaattgaaaacaacccagatatatataccaaagaatccatatataatgtattttattgtattacaattagatattatattataatgaaaggaagtacactaaawatacacatcagctaggtaaaatcaaactatatgttgtctagagattcatacctaagtttgaaacctataaagtagagaagataataatttgaaattagcagtttttttccttttcttttcttttttttttttttttgattgttt

SEQ ID NO: 218172 - DNA, 530 bp, Homo sapiens
agacagatcttggactgctactgagtctcagtagaaactgaatgcctgatcaggtaccaccaagttatcacgcaatctgagctgcctattattaactggatgttacctgacccaccaagctatgaatttaggcrtttgcagcaatacttcatcaccaaatggaagtggtataaatgtaactgggcacaagtaagttacataaagaagtagctcaaatgtccatggctcctactactgctacactgtcttctctctcccaaactgtatttatggcctcatggggaattctctacaatcagttgacagggaagacaaaatttggcctagtttatagacactactgtataataagcaaacatcacctgaaggtagatttattatctgatttgtttactaaaatagttattgcaacaaaagctactcatgggtttataaggaagagtatagtttaggcacttagaaatgtctttgtttaaaacaaatttttttaagtgcactgtaaaagcatcatgcagtctagcctcataata

SEQ ID NO: 218173 - DNA, 332 bp, Homo sapiens
tgatggtaaaaatctatggctggtcttaacttgaaaaaatgtcttatctgagattccttctatggaacaaatttccttcaaagccaattttaaaagcctaygtgaaaaataattattcttgcttcactgtatacaaataatctggacaagtataataaagcaaatcattcctaccaagattattctttagtaaaagttggaaactgaaaagagaaaaattatgtttcaaaaactatagtacacctgttgtttgattctagtcttgcctaatatttttctatgtttcttatttttttacattttggactgaattctaatttttcctggctaca

SEQ ID NO: 218174 - DNA, 532 bp, Homo sapiens
aagatctgcagagggaaagtctctgagaaactcacagaatggctctaaaaagagaaagagcctgcattatgcatgggccctccatggctccaggttcagatgacagcagtaccagccacagtcgaaatatactttgccctaatctactctcccactggtttgaccatagagaggtcagaaacagtcagtgactgaggacagagagaaaaggctgagaaagcctcctcccccactgtgggcctcccaacgacaggcaaaccgaagctaagagagagaagagttttaacactgaatagtgagttttyatacctccctaattgaactggagtgtgattattagactgactttttagtgctcctctacctcaaaagggattagttcattaatttttttttttttttttttttggtaattttttgtagaggcaaaggccaggctggtctgaaactcctggcctcacgccatcctctcacctcagcctcccaaagaactggaattataggcatgaaccaccgtgcctggctaattaac

SEQ ID NO: 218175 - DNA, 532 bp, Homo sapiens
aagatctgcagagggaaagtctctgagaaactcacagaatggctctaaaaagagaaagagcctgcattatgcatgggccctccatggctccaggttcagatgacagcagtaccagccacagtcgaaatatactttgccctaatctactctcccactggtttgaccatagagaggtcagaaacagtcagtgactgaggacagagagaaaaggctgagaaagcctcctcccccactgtgggcctcccaacgacaggcaaaccgaagctaagagagagaagagttttaacactgaatagtgagttttcatacctccctaattgaactggagtgtgattattagactgactttttagtgctcctctacctcaaaagggaytagttcattaatttttttttttttttttttttggtaattttttgtagaggcaaaggccaggctggtctgaaactcctggcctcacgccatcctctcacctcagcctcccaaagaactggaattataggcatgaaccaccgtgcctggctaattaac

SEQ ID NO: 218176 - DNA, 428 bp, Homo sapiens
aattcattggggtctaacttcaggtattgttgttatttatgtaacttacaaacacaggtttaacaatctcaagttgctatttttaccctcctatctgctattgtaattcaaccagtgaagttctcttttgttaagagttaacatcattgattaggagattttctccctattaaccctcaaatacgcttcatcagactctggatcmcctctgatcttctcttcattataccacacctgtgtagcactgatttttttagcttctgagccatggccttctggtacctccacacatgggtgaacatcacttttggaattgctgattgctgatctggcaacagatatacctataagtgacatcatgatggaggtgccagcatgtacactataaaagggaagattttttagtacatttaaaacacttggggaac

SEQ ID NO: 218177 - DNA, 428 bp, Homo sapiens
aattcattggggtctaacttcaggtattgttgttatttatgtaacttacaaacacaggtttaacaatctcaagttgctatttttaccctcctatctgctattgtaattcaaccagtgaagttctcttttgttaagagttaacatcattgattaggagattttctccctattaaccctcaaatacgcttcatcagactctggatcacctctgatcttctcttcattataccacacctgtgtagcactgatttttttagcttctgagccatggccttctggtacctccacacatgggtgaacatcacttttggaattgctgattgctgatctggcaacagatatacctataagtgacatcatgatggaggtgccagcatgkacactataaaagggaagattttttagtacatttaaaacacttggggaac

SEQ ID NO: 218178 - DNA, 605 bp, Homo sapiens
gctgcctttcctagtcatctggcatagctcagctccagagatccatttccaagagtctgagggacagatgagcaggcaggagactcactcctttttgttgtttagggcttagctcttcccctgtgtaattgacactaggaatggccaactcttcaggggagagtccaaccttaataacaagattgtagccatatctttaatagtataatcacatcaaaatatcctacaattaagcttagcatctgtgtaagactgggagatgacatttaatcttgaccttgaaagatacatagacattttctcagcaaagaagggttggaaatggaataacaagcaatataccagaggcataaaagcccatgaagttttagaggaatgaaaagtagtctccagtcttgctggatgtaggatgtattagagaacttggtattcataattatgtgatgggtaaattaytcaatggtgatacaattttgatattttctgcctgaaataaatattaaatgaatcagctattcataatcaagtaattgctcaggagaagttctaaactcattaggtacataccagaaaggatgtctgattttattataggcagagtaaaa

SEQ ID NO: 218179 - DNA, 416 bp, Homo sapiens
tatttgtacaagtatgctttatcagcaagcctatttcaacatttaatttwattttattttattatttatttatttattttgagactgagtctcactccattgcccaggctggagtacagtggtgtgatcttggctcactgcaaactctgcctcctgggttcaaataattatcctgcctcagcctcccaagtagctgggattacaagggcctgccaccacaccagactaatttttgtatttttaggagagacaaggtttcaccatttttgccaggctggtctcaaactcctgacctcaagtgatccacctgcatcagcctcccaaagtgctgggattacaggtgcgagccaccatgcccagctaacacaattttaaatgttgggtcataagtgatgctgattaaacatttgagaagt

SEQ ID NO: 218180 - DNA, 466 bp, Homo sapiens
gaattcacataacactttgtttcaatataattggcgaaaacttggtcacattgtcattcagctgtaagagggacagggtaaagtcttttggatggctacactgccaagctaaacaaatgcacaattatttttctaagaaagaagaattggatgttggattggcaactagtagtatctacattccttcaactctctcattaatatcaacaacatttttgaacacttagtatgttctcaaattctcattagaaaaaaattaagatagccagaaatagtattagttttctgttaccaaacacttagtggattaaaaacaatatccatttagtagccaacaattctgwgggtcagaatccaggcagagtgggctgggctttctgcatagggtttcacagggccgatatcaagatttcaactagtctgggcttttatatgaatgctctagtaaagactttacttccataaa

SEQ ID NO: 218181 - DNA, 389 bp, Homo sapiens
ttttattaacatattttttatctgcaattagttggatccacagatgtggaacccatggatatggaggactgactgtatatacatatgtaatgtattcttttaaaaaatggttagacgtcatcaatagctgacctaattctacttgacaattaaaactttcttttagtcaagtctcttttttctayagacagagaaatacttaaaacatctttgaactagtgtattagatatataatatctggattcatgagtaattttggtgacattaaaaatgcttatcaatatcaaactttatgaagagttgaagaatataaattatggcaaccagtttttaagctgtactctgtttaaccactttgtatatagtagatgatcagatcctcatatta

SEQ ID NO: 218182 - DNA, 584 bp, Homo sapiens
  misc_feature (1)...(584): n = A,T,C or G
gcatggtgtattgtaaataacagttcttgttwaaatggaggtaaaactcatatggagggacgaggaagtaaggtgacccccatagcaattcttctggccaggcagggtatttttaaacagacacaatttaagatagaaacctttgctgctggcgcacgaaacatctcagaaatgccattccatgccactaccttcccaatgcacctgggacagacctcttttagagtcttggggagtgtgaacagcttcatgttccaaattatgtatacaaatattaatatataaaccatatacagataagggtcattaagctctattttttattattaaaacaaaataaccttcagctaggaataaccctccattttgccctctgggttatattaagaatataaaaatgttttcattatcaaactgctcaaaaatgagaatttgcacaaatatcatggtatcaaatggtaatcatcacaatctcatctaaattttaanaatcattattccagcagttcttcacattataagagcttgtcttccttgcatatatttgttcatgctttcccatttcccatactttcaccttaaaa

SEQ ID NO: 218183 - DNA, 584 bp, Homo sapiens
  misc_feature (1)...(584): n = A,T,C or G
gcatggtgtattgtaaataacagttcttgtttaaatggaggtaaaactcatatggagggacgaggaagtaaggtgacccccatagcaattcttctggccaggcagggtatttttaaacagacacaatttaagatagaaacctytgctgctggcgcacgaaacatctcagaaatgccattccatgccactaccttcccaatgcacctgggacagacctcttttagagtcttggggagtgtgaacagcttcatgttccaaattatgtatacaaatattaatatataaaccatatacagataagggtcattaagctctattttttattattaaaacaaaataaccttcagctaggaataaccctccattttgccctctgggttatattaagaatataaaaatgttttcattatcaaactgctcaaaaatgagaatttgcacaaatatcatggtatcaaatggtaatcatcacaatctcatctaaattttaanaatcattattccagcagttcttcacattataagagcttgtcttccttgcatatatttgttcatgctttcccatttcccatactttcaccttaaaa

SEQ ID NO: 218184 - DNA, 584 bp, Homo sapiens
  misc_feature (1)...(584): n = A,T,C or G
gcatggtgtattgtaaataacagttcttgtttaaatggaggtaaaactcatatggagggacgaggaagtaaggtgacccccatagcaattcttctggccaggcagggtatttttaaacagacacaatttaagatagaaacctttgctgctggygcacgaaacatctcagaaatgccattccatgccactaccttcccaatgcacctgggacagacctcttttagagtcttggggagtgtgaacagcttcatgttccaaattatgtatacaaatattaatatataaaccatatacagataagggtcattaagctctattttttattattaaaacaaaataaccttcagctaggaataaccctccattttgccctctgggttatattaagaatataaaaatgttttcattatcaaactgctcaaaaatgagaatttgcacaaatatcatggtatcaaatggtaatcatcacaatctcatctaaattttaanaatcattattccagcagttcttcacattataagagcttgtcttccttgcatatatttgttcatgctttcccatttcccatactttcaccttaaaa

SEQ ID NO: 218185 - DNA, 547 bp, Homo sapiens
tccagtgttaggtgcatatatatttaggactgtgatattttcctgttggactagtccttttattattatataatgtccctctgtctttttaaactgctgttgctttaaagtttgttctgtctgatataagaatggctactcctgtttgcttttggtgtcaatttgcatggaatatctttttccacacctttaccataagtttatgtgaattcatgtgcgtcagctgagtcccttgtagccagcaaatacttggttggtgaattcttatccattctgccatggtgtatcttttaaggggagcatttaggccatttacattaaacattagtattgtgatgtgaggtagyattctattcattgtgctatttgttgcctgaataccttgtttttttcattctgttgttgttttacatatcatgtgatatttatgctttaaggagattctattttggtgcatttccaggatttgtttcaagatttagagttcattttagcagttcttatagttctggcttggtagtggcaaattctctcagcatttgtttgt

SEQ ID NO: 218186 - DNA, 518 bp, Homo sapiens
  misc_feature (1)...(518): n = A,T,C or G
ccatggtgtatcttttaaggggagcatttaggccatttacattaaacattagtattgtgatgtgaggtagtattctattcattgtgctatttgttgcctgaataccttgtttttttcattctgttgttgttttacatatcatgtgatatttatgctttaaggagattctattttggtgcatttccaggatttgtttcaagatttagagttcattttagcagttcttatagttctggcttggtagtggcaaattctctcagcatttgtttgtctgaaaaaggctgtatcttttcttcatttatgaagctcagttttnctggatacaaacttcttgggtgataatagttttgtttaaggagactaaagataggaacccaatcccttctagcttgcagggttcctgagaaatctactttgaatatgataggttttcctttatagrttacctgatgctttggcctcacagctcttaagattctttccttcatcttgactttggataatctaatgactatgta

SEQ ID NO: 218187 - DNA, 475 bp, Homo sapiens
tgaggccagcattatcctgctaccaaaaccaaaggtattacacaagagaaaactgtatttctcattcatatagatgctaaaatttcttatatgattttaactaattgaattcacctatctataaaaatataatatactattaaaataagatttattctaggaatacagaaataaatttaaaattcaatcaatgcaattcaccatgttaacagactaaaaaggacatccatattattttctcgatagacaaagaacaaggatttaacaaaataatactgtaaccctgrtaaaaaaaaaaaagtctacaaactaagaatagaagggaacttcctcaagctgatgaagaccatctaagaaaatcctacagctaacattgtgcttaatgttacttgaaagactacatgctttccctttaagatgagaatgatagatggctgctcttaccacttccatacaacatggtattggaggctct

SEQ ID NO: 218188 - DNA, 472 bp, Homo sapiens
ttcctttttatttctgtggtataatttgttatgtctcctcttacatttctgattttagatgtatcttctttatttttttcttagtttagataagagtttgttaaatttgtttatattttcaaaaaaaccaacttagattccttgattttttctagtctctattttatttatttctgctttgatctttattatttcctttccttgytctaactttgagcttagattgttctttttccagttcattgagatgcaaagttaagttgtttatttgagatctttttattttcttaatgtagggatttatgactacaaacttctcagaactgcttttgctgcgtcccgtaagttttggtatgttatgtttccattttcatttgttgtaagacatttttgctttcccttttatttattctttggcccatggattatgcaggtgtgtgttgtttaatttccacatatttgtgtatttttc

SEQ ID NO: 218189 - DNA, 382 bp, Homo sapiens
tttggttcttgctcagacatcgctagcaaattctcagaaaagcaataggctgtaccattagcctatgtctgtagatgaatatactatctaggtttttgtagtgtgttctgatgttcacacaatgatgaaatcgcctaayaatgcatttctcagaatgtattttgttgccataggatgcatgactgttaaattcctgttctagcccaaagattctgtgaaaacttctgtgtaaaataaatttttccccccaaagtgatgaggtgtagaatttactgtattaataggagggaactctcacacttacaagtgcattgtacaaaaccccgtctgcccatgatgtacaaaagttgttcctgaatgagatcattaagttggaatcaca

SEQ ID NO: 218190 - DNA, 367 bp, Homo sapiens
ctcagacatcgctagcaaattctcagaaaagcaataggctgtaccattagcctatgtctgtagatgaatatactatctaggtttttgtagtgtgttctgatgttcacacaatgatgaaatcgcctaacaatgcatttctcaraatgtattttgttgccataggatgcatgactgttaaattcctgttctagcccaaagattctgtgaaaacttctgtgtaaaataaatttttccccccaaagtgatgaggtgtagaatttactgtattaataggagggaactctcacacttacaagtgcattgtacaaaaccccgtctgcccatgatgtacaaaagttgttcctgaatgagatcattaagttggaat

SEQ ID NO: 218191 - DNA, 382 bp, Homo sapiens
tttggttcttgctcagacatcgctagcaaattctcagaaaagcaataggctgtaccattagcctatgtctgtagatgaatatactatctaggtttttgtagtgtgttctgatgttcacacaatgatgaaatcgcctaacaatgcatttctcagaatgtattttgttgccataggatgcatgactgttaaattcctgttctagcccaaagattctgtgaaaacttctgtgtaaaataaatttttccccccaaagkgatgaggtgtagaatttactgtattaataggagggaactctcacacttacaagtgcattgtacaaaaccccgtctgcccatgatgtacaaaagttgttcctgaatgagatcattaagttggaatcaca

SEQ ID NO: 218192 - DNA, 591 bp, Homo sapiens
gaattccatccaataaattcacaaacacttgaaaatcacaatacgtattttaggtaatgggccataagggattattttaattgtaagaaaatgtacaaaaaatttgctttttacaaattttytatttaatagcaataaaatgaagtgacactaaagtacaaaaaagcctgaacagtatgatttctttgtatcaacagtgaagggctcccttgtatatggagttcccaaacagtaagttttcttaatcctgatcatctgtggccagtgtaaaagaaaggcctgacaggaaaagttaaggagccagctgggtaactccatatgagggaactcttggtgacattcaaaaaactcacacttccactttcaaaatcaagaaacacaccaacccggcccagaggtttctctatatagtgaggaaactctggggaggtggtcaagagactgaaatgattatccaccttcagacacaaaagaagaaatatgtcctcagagttaaccattgtgctattcttccttatccaggagtcgttacagactcccagagcccagtcacaagagttgtccacatccagctcccagtagtgtttccca

SEQ ID NO: 218193 - DNA, 615 bp, Homo sapiens
  misc_feature (1)...(615): n = A,T,C or G
gaaaatcacaatacgtattttaggtaatgggccataagggattattttaattgtaagaaaatgtacaaaaaatttgctttttacaaattttctatttaatagcaataaaatgaagtgacactaaagtacaaaaaagcctgaacagtatgatttctttgtatcaacagtgaagggctcccttgtatatggagttcccaaacagtaagttttcttaatcctgatcatctgtggccagtgtaaaagaaaggcctgacaggaaaagttaaggagccagctgggtaactccatatgagggaactcttggtgacattcaaaaaactcacacttccactttcaaaatcaagaaacacaccaacccggcccagaggtttctctatrtagtgaggaaactctggggaggtggtcaagagactgaaatgattatccaccttcagacacaaaagaagaaatatgtcctcagagttaaccattgtgctattcttccttatccaggagtcgttacagactcccagagcccagtcacaagagttgtccacatccagctcccagtagtgtttcccaaaggagaagaccctggctccccatgcagcanaatagtcagatctgtcagaattc

SEQ ID NO: 218194 - DNA, 615 bp, Homo sapiens
  misc_feature (1)...(615): n = A,T,C or G
gaaaatcacaatacgtattttaggtaatgggccataagggattattttaattgtaagaaaatgtacaaaaaatttgctttttacaaattttctatttaatagcaataaaatgaagtgacactaaagtacaaaaaagcctgaacagtatgatttctttgtatcaacagtgaagggctcccttgtatatggagttcccaaacagtaagttttcttaatcctgatcatctgtggccagtgtaaaagaaaggcctgacaggaaaagttaaggagccagctgggtaactccatatgagggaactcttggtgacattcaaaaaactcacacttccactttcaaaatcaagaaacacaccaacccggcccagaggtttctctatatagtgaggaaactctggggaggtggtcaagagactgaaatgattatccaccttcagacacaaaagaagaaatatgtcctcagagttaaccattgtgctattcttccttatccaggagtygttacagactcccagagcccagtcacaagagttgtccacatccagctcccagtagtgtttcccaaaggagaagaccctggctccccatgcagcanaatagtcagatctgtcagaattc

SEQ ID NO: 218195 - DNA, 535 bp, Homo sapiens
gtatatgtgtgtaaacgctggccaacgtagggatggatcatctctctgagttagacttattttttgttttgttttgtattgtttttataataagctatgargcagaccttttaggttatcaagagagctagagaccagtctggtgttattctattccttattcatcatgactttgagtaatgttaccttacattcacatattcacctcagttccagcctttttttcaatatacttctcgcttagatattggagcagatttagacctctaacctttgtataaagtagttacagagttttctcaaaacaagacatgtgcttcgaagggagagaatacatcaacccttggtatagcctctctgaaggcaggtacaatttgtggtgatgacactaacagtaaacccatcatctcataaatagggagagtagtcagatttttctttctttcctatactagcaacattgaaacacaagttttcatttaaaaaatatacatgttctatttgctacaatgctgtgggatgcacattgtttaga

SEQ ID NO: 218196 - DNA, 535 bp, Homo sapiens
gtatatgtgtgtaaacgctggccaacgtagggatggatcatctctctgagttagacttattttttgttttgttttgtattgtttttataataagctatgaggcagaccttttargttatcaagagagctagagaccagtctggtgttattctattccttattcatcatgactttgagtaatgttaccttacattcacatattcacctcagttccagcctttttttcaatatacttctcgcttagatattggagcagatttagacctctaacctttgtataaagtagttacagagttttctcaaaacaagacatgtgcttcgaagggagagaatacatcaacccttggtatagcctctctgaaggcaggtacaatttgtggtgatgacactaacagtaaacccatcatctcataaatagggagagtagtcagatttttctttctttcctatactagcaacattgaaacacaagttttcatttaaaaaatatacatgttctatttgctacaatgctgtgggatgcacattgtttaga

SEQ ID NO: 218197 - DNA, 596 bp, Homo sapiens
gatctgcctacctaggccccccaaagtgctgggatttacaggtktgagccactatgcccggccaatttatttaaaaaagattttttttttttttgaagcaggttctcactctgtcacccaggctggagtgcagtggcatgatctcggctcactgtgacctctgtctcccaggttcaagtgattcttgtgtctcagcctcccgagtagctgggattacaggcatgtgccaccacacctggctcatttttttgtaattttagtagagacagggttttaccatgttggccaggctggtcttgaactcctgacctcaaatgatctgcccccctcggcctcccaaagtgctgggactataggtgtgagtcactgcacctggccctttaaaaacatttttaaaagtatgtagtcacaattgaaattttgggaaaaaaatttcccaattttttgtaaaatttctgtaaaattaaggtttacaatgctgcattgtcctctaattcccgtaacagcggtctgggcatcacaatctggattttgttcctgacagttcctggtttactgggctatagtttagtagcctgaagaaaaaaaactccagt

SEQ ID NO: 218198 - DNA, 596 bp, Homo sapiens
gatctgcctacctaggccccccaaagtgctgggatttacaggtgtgagccactrtgcccggccaatttatttaaaaaagattttttttttttttgaagcaggttctcactctgtcacccaggctggagtgcagtggcatgatctcggctcactgtgacctctgtctcccaggttcaagtgattcttgtgtctcagcctcccgagtagctgggattacaggcatgtgccaccacacctggctcatttttttgtaattttagtagagacagggttttaccatgttggccaggctggtcttgaactcctgacctcaaatgatctgcccccctcggcctcccaaagtgctgggactataggtgtgagtcactgcacctggccctttaaaaacatttttaaaagtatgtagtcacaattgaaattttgggaaaaaaatttcccaattttttgtaaaatttctgtaaaattaaggtttacaatgctgcattgtcctctaattcccgtaacagcggtctgggcatcacaatctggattttgttcctgacagttcctggtttactgggctatagtttagtagcctgaagaaaaaaaactccagt

SEQ ID NO: 218199 - DNA, 596 bp, Homo sapiens
gatctgcctacctaggccccccaaagtgctgggatttacaggtgtgagccactatgcccggccaatttatttaaaaaagattttttttttttttgaagcaggttctcactctgtcacccaggctggagtgcagtggcatgatctcrgctcactgtgacctctgtctcccaggttcaagtgattcttgtgtctcagcctcccgagtagctgggattacaggcatgtgccaccacacctggctcatttttttgtaattttagtagagacagggttttaccatgttggccaggctggtcttgaactcctgacctcaaatgatctgcccccctcggcctcccaaagtgctgggactataggtgtgagtcactgcacctggccctttaaaaacatttttaaaagtatgtagtcacaattgaaattttgggaaaaaaatttcccaattttttgtaaaatttctgtaaaattaaggtttacaatgctgcattgtcctctaattcccgtaacagcggtctgggcatcacaatctggattttgttcctgacagttcctggtttactgggctatagtttagtagcctgaagaaaaaaaactccagt

SEQ ID NO: 218200 - DNA, 530 bp, Homo sapiens
ctagaaaacatgcaaaaatgtgggaaggtttgtagtattttaaaccacaacactaaaggaagccaaaaacacggtagcggtctgatgaaataggattaaaggtcttagtcaaaattcaaaggcattataataagaattaccacatgcaaataaagtgtaaaaacagaaagagaaaaagrcatggccatatgttctatttggcttcctcttgggaaaaactctgaggagtttggaaaaaggttgtcattttttaaatcacatcgacaataagaagaatgtgacatatatcatgataaatttgtgcctgtgcttctccaccagactctgctcaagtcagtgcaagtggtaagtcaagcagctgcccattcatattgactcacctgctccactgtctgcatggcactcttgaaggaatgctaaattgggaaaagatagacacccccttcccaatgtatgaaagttgactacatggtggcgcatcataagtagcctaccctgggttatttttaccacctttattctcacttcaa

SEQ ID NO: 218201 - DNA, 427 bp, Homo sapiens
gaattcctcttgacaccgcaagtttggttacagataccattgtgtgtccctatccctctgtgcttacttttgtcacactgctataattcttcatatgtctctttctttgaagagatgcagattcctgcacagtaaggctgggttgcatttatctctataaacctagcaactagtactgggcctggaatgtagttggagctctgtaatgctgaatgaagcaaggtggatgggaataatcaaaccatatacccctcccagaagagtccttgggtaagatattgtccaagattctaatttcgtggatatagttatgaaacctaaagtagactgagggagttgccctaratcatacagcatgttggttttagagagggaaccgaatttagtcttcctaaatccaagttcaggactcccttatttaaattaa

SEQ ID NO: 218202 - DNA, 331 bp, Homo sapiens
attcttcatatgtctctttctttgaagagatgcagattcctgcacagtaaggctgggttgcatttatctctataaacctagcaactagtactgggcctggaatgtagttggagctctgtaatgctgaatgaagcaaggtggatgggaataatcaaaccatatacccctcccagaagagtccttgggtaagatattgtccaagattctaatttcgtggatatagttatgaaacctaaagtagactgagggagttgccctagatcatacagcatgttggttttagagagggaaccraatttagtcttcctaaatccaagttcaggactccctt

SEQ ID NO: 218203 - DNA, 570 bp, Homo sapiens
tcaagaggtaatggaaaactgggtgcggtggctcacacctgtaattccagcattttaggaggctgatgtgggctgatgacttaagttcaggggttcaagaccagcttgggaaacatagaaaaacctcatatctacagaaatacaaaacattagcagagcatggtggtacatgcctgtagtcccagctactcaggaggctgaggtgagaggatctcttgagcctgatggtggaggctgcagtgaacctagattcagccactgcactttaaactgggtrattaggtgagaccctgtctcaaaaagaggtaatggaaaattgttttccaacatggttgtaacaatctattatgtctaccagcagtggcagagagttggtgtggctctatgtccttgctagcacttcatgtttgctaatctggtagatgtgacacagtgtctcattgtggttttaacttgcattcccctggttgcacttgaagtttttttctcaggcattaatattattgccctcatactcttcctaattattatggacaaatatcacatagactcttgcatggtttatgggga

SEQ ID NO: 218204 - DNA, 590 bp, Homo sapiens
tgatgtttgcacaacaacaaaatcacataacagtgcatttctcagaacatatctctattgttaagtgacacatgactgtacctatttattggataaagttactcactagcctaaagtgagtaaattattgagataagattacttgaagtatcttattctagaatagaaattatttgtctctactttcttatttgtctcaacttagaaatgtcccacgatgtaagaggctaaacatgaatcttcaaagagtcatattcataacattaaattattatcttgggaagtgtctaacagtgggatgtgtaacatttcttgttaatagccaagtatcttttacacatagactgagtgcacaaaccacagttattcttggtttgcttttgcccctagcattcctcaggtatctgaattaaagtgaaagaaaacagaaacacgtgrggagagggctggggaataaccaaggccctttttctcctgcctctttttaaccaggccagtaagctgcatccacagtttaccaggcgtgtttcagaaagctgcttttataataggcatttcctcctctttggcagtggggtgaaagcaagaac

SEQ ID NO: 218205 - DNA, 552 bp, Homo sapiens
agggaatattgcaggggcagttttctcccctattaatccatatttgtgtaagccttaaaatagttcaggggaaatagtatttaaggcaggtgactraaacataaaccctcttaaaaattagttttagcctcttaaaaataatattttgttttattttatgtgagtatgagtgaacataaagaaagaatgctaaagcagtccctttgcaccacagcccagattggtctctgcagatggaatgtggaaccctgtcctggctgctgacggactcactgacttgcacaagactcaatgcatcaggtctccttcatcatcccaactcacttgggagctactcttggtcatcttttgacagtgagtattaatgtttagtcttccaaactcagctgttctttgtaggcaatactgcaccggcattcttgttattggatattttaaagccaaaatgtgatcctcagtggaacaatgtactcttgtctgtctctgaatatgtgtgctttttccttctgcaataatcaaattataacagaactgaacaaatgagtttgggcc

SEQ ID NO: 218206 - DNA, 470 bp, Homo sapiens
ttgaggtgtcttagagacagcaatttactgaggtgagaaaaaaagagcctgtgaaaaataaatccatggttcagttttagacttattaagcycaaaattcctatgaaatatcaaaatggctatgtcaagtgaatagttagatccagtgtctgaagctcataagagagatctatgttaaagacataaatgcaagaattgccagcatacagattttaatcaactttattgaggtataacttacaataaattgcacccacttaatatgttcaatttcatgagttttgactgatgtatacacctatgaaaccacctcacaataaagatacagaacacttccataatcctgaagggttttgtggtggttgttttttgtttttgtttgtttgtttttaatgcacttcttagcaatccatccctcccttcgtccccagcctccgacaatgctgatcagcttttgccactatagatta

SEQ ID NO: 218207 - DNA, 510 bp, Homo sapiens
atacagaaataaactctattttatttaagccactgtactttgaggtgtcttagagacagcaatttactgaggtgagaaaaaaagagcctgtgaaaaataaatccatggttcagttttagacttattaagctcaaaattcytatgaaatatcaaaatggctatgtcaagtgaatagttagatccagtgtctgaagctcataagagagatctatgttaaagacataaatgcaagaattgccagcatacagattttaatcaactttattgaggtataacttacaataaattgcacccacttaatatgttcaatttcatgagttttgactgatgtatacacctatgaaaccacctcacaataaagatacagaacacttccataatcctgaagggttttgtggtggttgttttttgtttttgtttgtttgtttttaatgcacttcttagcaatccatccctcccttcgtccccagcctccgacaatgctgatcagcttttgccactatagattag

SEQ ID NO: 218208 - DNA, 462 bp, Homo sapiens
agttcttggagggtgaggtactctgtaatgtttagcatttaaatgtaaggaaagaacaccattgtctccttacgtattgatagcaacgagtgccagccagcataatgcgtctgtcttcatgaattcaccgtagtgacttggggaaatgtggctgctaggtactctaggctctagtatgcatcaaggcaattatgtcctgaaaactgtcataagactacacaaattgaaagacaaaacataataagaaagatgaactaacctgaagtaactaaatatctgtgaataacagaagcctcaggatggttgtcctgagtttctgctgcaaagtacttgtctgcaatattttaaagacttaatagaattttattttaaagccatgacattagcacagttaagccaatcaatgtttttwaatagccttttaaaggtgcctttttaattgtgctctgtgggagggaaagg

SEQ ID NO: 218209 - DNA, 514 bp, Homo sapiens
gtatttttccaaacagcaatttccctgmctctggcttctaattctgaatttttctctatttgagaaacattccagttccccattcctttttctgatcaatagctggcctctacccacaattgattccttctccaattagctctaaatcatagtatcagatagaaactgctttctgttcaaaggcttagtgttagaaaaataatcacaacaatactgaaacacatatgtgacttgctttttgtttatgtaataaatttgactgaattttttctatggatcagtgctcctcaatttttaaatattcccatacttacgcgtgagtacatcagaacatatttacaccagtcttgggattagaggtaatgagcctcatttctccaaaaacaacagacttcctctacctcctactcacagacaaatttccctagtctgagtttgaaactaagggcacattggtttctggaaaggtgtaacctgctgtgtttgaaccagtaattaggacaatgcttataca

SEQ ID NO: 218210 - DNA, 500 bp, Homo sapiens
cagcaatttccctgactctggcttctaattctgaayttttctctatttgagaaacattccagttccccattcctttttctgatcaatagctggcctctacccacaattgattccttctccaattagctctaaatcatagtatcagatagaaactgctttctgttcaaaggcttagtgttagaaaaataatcacaacaatactgaaacacatatgtgacttgctttttgtttatgtaataaatttgactgaattttttctatggatcagtgctcctcaatttttaaatattcccatacttacgcgtgagtacatcagaacatatttacaccagtcttgggattagaggtaatgagcctcatttctccaaaaacaacagacttcctctacctcctactcacagacaaatttccctagtctgagtttgaaactaagggcacattggtttctggaaaggtgtaacctgctgtgtttgaaccagtaattaggacaatgcttatac

SEQ ID NO: 218211 - DNA, 501 bp, Homo sapiens
cagcaatttccctgactctggcttctaattctgaatttttctctatttgagaaacattccagttccccattcctttttctgatcaatagctggcctctacccacaatygattccttctccaattagctctaaatcatagtatcagatagaaactgctttctgttcaaaggcttagtgttagaaaaataatcacaacaatactgaaacacatatgtgacttgctttttgtttatgtaataaatttgactgaattttttctatggatcagtgctcctcaatttttaaatattcccatacttacgcgtgagtacatcagaacatatttacaccagtcttgggattagaggtaatgagcctcatttctccaaaaacaacagacttcctctacctcctactcacagacaaatttccctagtctgagtttgaaactaagggcacattggtttctggaaaggtgtaacctgctgtgtttgaaccagtaattaggacaatgcttataca

SEQ ID NO: 218212 - DNA, 514 bp, Homo sapiens
gtatttttccaaacagcaatttccctgactctggcttctaattctgaatttttctctatttgagaaacattccagttccccattcctttttctgatcaatagctggcctctacccacaattgattccttctccaattagctctaaatcatagtatcagatagaaactgctttctgttcaaaggcttagtgttagaaaaataatcacaacaatactgaaacacatatgtgacttgctttttgtttatgtaataaatttgactgaattttttctatggatcagtgctcctcaatttttaaatattcccatacttacgcgtgagtacatcagaacatatttacaccagtcttgggattagaggtaatgagcctcatttctccaaaaacaacagacttcctctacctcctactcacagacaaatttccctagtctgagtttgaaactaagggcacaytggtttctggaaaggtgtaacctgctgtgtttgaaccagtaattaggacaatgcttataca

SEQ ID NO: 218213 - DNA, 533 bp, Homo sapiens
ccctgctccatcatccccaggttgattccaggtaggagatgaatcaaaagaacattccctgattgtgctgggaagacaagagtaaaaaagaccagtgccttacttctatgtgggcccaggagagcggcaaggcctagagttctaccccaccccagtgtgaggctggagaagttaagtagaaatacctatatgaggtgtctaggaaacagggcctgaaacagctccttgggggaatcaaatgttttcagtacagacaagagcagcatgggtatgatcctgagagaaggcgagcctgctggggctaacaataggagagaatacaagagtaggtgagctgaaaagcatacaggactctttagagagcaggagttgcctgagcagatatgtgatttcatagctgcccatrccctggcctctatctaagcaccaggaattcagatgcaagaggtaaagaaaaagggaaatcttggtgaactgaaaatcatcttgatttgacagcgtttacccgaattgacaaagaacatgttttcttc

SEQ ID NO: 218214 - DNA, 563 bp, Homo sapiens
tcttttgtcaaaatgtgattttcaaaaagttaaaaagcaaaaaactctttcaagtgtttagtaaacacatgccaaaaatttatttaactcattgatgaagggaatagtaggatgacaaagctggtttaaaggaggatatgagaaagatattcaggtagatagaaaacgagagagaaaggagggaaggaaaagagaataccggaataagattgcaaagctagatacaaaatggttcatttcctacagggcaataaaacaataatatttggggttrttgttcatctggtcagaaatgttttgcacctacactagacaaaaattatgtgtaatttaccaattttctacagtctgtatagaatctgggtccaatcaatagtaaatagtaagtcaaacaaagttatatttcctgtgagtgttagatgacacttcgatgggcttgtcagtcagtgctgtagtacattactacccggtagcgctttctgcaatgatgaaaatattttgtatatgtggtgtttaatatggtagctatgggccagatgtggctcttcagcatttgaaatgta

SEQ ID NO: 218215 - DNA, 515 bp, Homo sapiens
attcaaacaatgaaatactatacaacaatgaaattgtatagtagaaaaacatggatgaggcttaggattcatcctaacatagggtcagcaacagaagcatctgtctctgacaactaaaaacacatatgttttatataaatctcaaaacatgcaaaacaaccttttccttaatggatagaaatgtgataaaattcagaaggaaactgaggaaatgatgaaatggacgatggagttacttctgaaggaggaggaaatgggaaaggaaacttcaaaggaaaacatgatatgctttgtcttaaaagtatgtgagggaacttcgggggtgwtggaactattccatatcttgatcatagtggttttcccatgactgtatacatttgttaaaactcatagaactgtatgccaaaaagggtgaattttgtaggaggtaaagtatagctcagttgaaaatacccatgttaaagaaaagtatatggcggacacacagataatatttattatatatttttatatac

SEQ ID NO: 218216 - DNA, 285 bp, Homo sapiens
atactatgattactgtctcagcgctgaccttgctggattgcagctgtctgtggacttctctatgtcccactagactgaaggctgcctgagtgttatctaccccttatatcccctgggtctggcacatcataggagttcagaaggacttgtgaagttttgttgagatatgcaggaatcccctttgattcygtagggggaaaaacaatgggaagaaatgggtaagaggtggagagtctacatggtgataattacttcagacttggccagttctacaggccaagggtt

SEQ ID NO: 218217 - DNA, 421 bp, Homo sapiens
gtgaggctcacttgacgcaggagggcaaggctgcagtgagctgtgatcacaccattacactccagcctgagcgatacagcgagaccttgtctcaaaaacaaagaaaaaaaatgaatctgtaagttaaaacttttccataaaaaaaataggctgagatgacctcccaattaattattccaaaaagaaaattttgttttttaaaaatgccaattttatagaaactcttccagagamtataagaaggatcacctccaagctcattttataaagccagaaaaccttgatactaaagcttgagaagcaaattacaagaaaagaaaagtacaagtcaatttcaatcatgaatataaaggcaaaacatcctaaacctaataacagcaactctaaacagtgataacaatgataatacattacaaccaca

SEQ ID NO: 218218 - DNA, 584 bp, Homo sapiens
tagctctatcttttgatggcttgcgtgggcattttttaaaaacataacagtgataaaaatatttatgtaattattttatactatccttacatacattgaaggaagaattatttatcccactttataagtgaagaaacaaaggccagaggctgagttattcaagatcaggtagctaggaagtttcattcgggatttaaacccatattcattgttgtttgcacagaccaaagctcactcaggctacttgattttcacaaaactgcccattaattgccaattctgccatttataagcatagattaattcgttctgtgatcttagagaagtcacttcaacccactgtgcctcagtgtactcaactgtaataaagaagaaaattatacccctctgccctacttgccaatttgatttaagagcacaatcagacgcaggaggcataagcatattgyttaaaacatggactctggagttagctgcttgagtgtgtataccacatgagcagcttattaatggtccatgaacaggttgtttaacttctctaaacctccattgtatcgtctgcaacatgaaaataaaggttattc

SEQ ID NO: 218219 - DNA, 589 bp, Homo sapiens
ccacctagcttatggtatttagtatagcaacttaaatggacttaggcaaaataacaaaaatagcttcaagaacattatttttgtcagtagttattttaatatgatgaccatatgtaacatacttcttaagttttgaataaaaggtaatccctacattttcttatacttaggtcctcagtactgagaatccttcatctgatgacatttctaagactccaagcaagagaaagaagaaaagattatcaacatatggctaagaaagcagtagtgcccaagtggtcaaactcaatgttaaacatctcagaaccaaggactcccactgtcttggggggaagtgtaagaggaatccctgtccaatcccttcttcagctagaacaggttgttccattttctctatctaggtgcttcccattaaaggagctcacttcttcccaaagcaaaacacaccacagctaaaataactttagaatgtttttaaatatctaacaaattccaaatgraggacatttccatcaacactcctcccatacccctcaattgcccaaggacaattcaccattttaattacaactgggcagaggtagagttg

SEQ ID NO: 218220 - DNA, 560 bp, Homo sapiens
agacccaggaaccacaatatctgagaaataattgaaagaaatggtggtttttatctagaagaggttacaaaatggctgtcttctgatawttgaagagctgtgatgtagaataggtataaaatgggtttgtatggctctaaacggtagaattaggagacatgattagacgttgctgtgagatagattttagacttgaacatgtagaagagctgttcaacgtagcaatgagcattcctgaaaaatagtaagctcacaattactgaaagaattcctacaatgagtagaattcagctgtcaagaaaagtgtagaagagattatggcattggaaaagagtggcctagtcttagagttagtcatacaccatatacatgccaccacccccagcaatgggagtctatgactaatcaatgacagctgtcttccctgctgagctaaactcagcctagcaatccttttcaatacaatgctccaagccatccccaccaatttatcagagttgacaacctatccaacccagatgatcccttagtgtctctaagatcctataacttaaaatttt

SEQ ID NO: 218221 - DNA, 593 bp, Homo sapiens
gcagcagaaacttctgcagacttaaacgtccctgtcaacagctttgaagagagtagtggtactctcagcacggagtttgagatctgaaaacagacagactgcctcctcaggtgggtccctgacccccgagtagcctaactgggaggcacctccccgtaggcctaactgaaacctcacatagccaggtactcctctgagacaaagcttccagaggaacaatcaggcaggaacatttgctgtttctgcaacatttgctgttctgcagcctccgctggtgaaacacgggcaaacagtgtctggagtggacctccagcaaactccaacagaccagcagctgaaggtcctgactgttagaaagaaaactaacaaacagaaartacatccataccaaaatcccatctgtatatcaccatcatcaaagaccaagggtagataaaaccacaaagttggggagaaaccagagcagaaaagctgaaaattctaaaaattagagcacctcttctcctccaaaggaacgcagctccccaccagcaacagaacaaagctggatggagaatgactttgacgagttgagagaagaaggcttcagacga

SEQ ID NO: 218222 - DNA, 593 bp, Homo sapiens
gcagcagaaacttctgcagacttaaacgtccctgtcaacagctttgaagagagtagtggtactctcagcacggagtttgagatctgaaaacagacagactgcctcctcaggtgggtccctgacccccgagtagcctaactgggaggcacctccccgtaggcctaactgaaacctcacatagccaggtactcctctgagacaaagcttccagaggaacaatcaggcaggaacatttgctgtttctgcaacatttgctgttctgcagcctccgctggtgaaacacgggcaaacagtgtctggagtggacctccagcaaactccaacagaccagcagctgaaggtcctgactgttagaaagaaaactaacaaacagaaaatacatccataccaaaatcccatctgtatatcaccatcatcaaagaccaagggtagataaaaccacaaagttggggagaaaccagagcagaaaagctgaaaattctaaaaatyagagcacctcttctcctccaaaggaacgcagctccccaccagcaacagaacaaagctggatggagaatgactttgacgagttgagagaagaaggcttcagacga

SEQ ID NO: 218223 - DNA, 569 bp, Homo sapiens
ctacaaaattatgttacattacaaaaatgcattgataaaatagcatagaggttgcaaaatataacatttctcaattttatggggaaatactgacaagaataaaatttttaaaaaatacacacactataaaaatctttattggcaaaactatgcattgatacactgaactaaataccgtcaaaatatgttttttacttcccttagattatgccagcatatgtaaatatgaaatatacacatgcaagtacaaaagaaacaygtttgggcaattttaaagaaactggaatacaaaaaaagagaatataatataacacaacattgtgtaatattcaccagaaatataggctcaagtaaaacaaactaatgaaggtaataaagtgcaacagcatattgtattttattcttctttcaagatattggagttctgagcagaattatagcacctaacacatgaactggtttagcaaatattcattataatgaaatataatgatggtagttgctataaccaaagagaaattactcttctttttaaattctgtgatgttggtaattttgggagagtcagc

SEQ ID NO: 218224 - DNA, 590 bp, Homo sapiens
tcactggtaatagtcagtacacagaattttataacattgtaactgtggtgtgtaaactactcttttactaagtagaaaaactaagcaataagccaatcaaaaataataactgcaataatgtttcatggcatggagagtacaagaagatatacatagaaacaaaaaaagagttaaaaagaagcagaagaactatgttaaggcatagagtttttataatttttttgcttgtttgttcatgcaaaaagtctttaattgttattagcttaaaataatagggtataagatagtatttgcaagcctcatggtaacctcaaaccaaaaaaacatacaatggattcagaaacaataataagcaagaaaataaatcataatcaccagataaaattaccttcactaataatacaacaaggaaagaaaamagaaagagaagaccacgaatgtccagaaaataaataacaaaatggcaggcgtaagtctgtacttatcagtaataacattgaatgtaaatggactaaattctccaataaaaagacaaagaatggccaaatgaatgaataaacagggcccattgatcgattgcctacaaaaac

SEQ ID NO: 218225 - DNA, 523 bp, Homo sapiens
cgctggcctcctctactgacaaagtctacttgtaccaagtggcaaaggaaaaatattaagagtttagctctgatctcacaaagtaggaaaaagggaagtagatttggtactgcaagtaataaattgatagaccaatatacccgtttgcttactccactttcatataaagatttttatacattaaagcttccaaacaaaaatgaaaccactccgtttccgtgtaacaagatgtagctatccatggtacaagtaaaaacttccaatactttctggaaatgagaaggcacacaattccaaagatattttatcaattatcatcaaatgatttgaacagtctcactaaatgcattgctacctaaatagtaaagtaagcttcaaaagtttaatataaaataataataggaatgatayggtttggctctgcgtccccacccaaatctcatctcaaattgtaatctccacatattgagagagagacctggtgatgtcatgggctccttggggtgttatttcaccagccaga

SEQ ID NO: 218226 - DNA, 523 bp, Homo sapiens
cgctggcctcctctactgacaaagtctacttgtaccaagtggcaaaggaaaaatattaagagtttagctctgatctcacaaagtaggaaaaagggaagtagatttggtactgcaagtaataaattgatagaccaatatacccgtttgcttactccactttcatataaagatttttatacattaaagcttccaaacaaaaatgaaaccactccgtttccgtgtaacaagatgtagctatccatggtacaagtaaaaacttccaatactttctggaaatgagaaggcacacaattccaaagatattttatcaattatcatcaaatgatttgaacagtctcactaaatgcattgctacctaaatagtaaagtaagcttcaaaagtttaatataaaataataataggaatgatatggtttggctctgcgtccccacccaaatctcatctcaaattgtaatctccacatattgagagrgagacctggtgatgtcatgggctccttggggtgttatttcaccagccaga

SEQ ID NO: 218227 - DNA, 433 bp, Homo sapiens
tttactactggtgtatttttaatagaaattatagtcatggagagaacttgtttttttccataacaatgtctaatcttcattccctacttgagttttgaggggcaggtgcgagtcattcaggtttgrgaaataaaaatcaatcagatgtagcatatttctagagccaacaggtgcagcagtgacagactcaaaatccctagataaaaggtaaataaatatgttcctttggtcaacagcccctgccataatgcagtcttatgtccccattcaatggaatcatcactgatatttgaaggaagctttctgatattagacgttaagatttaaactaaaaacttgaaaagctgccttaatttataattatttcttctttttttcatcagatattacatttctaaagtgttatcaatataaatcattctccacaatctca

SEQ ID NO: 218228 - DNA, 577 bp, Homo sapiens
ttacttagcattgttttgttcctctcctttgaaaacattaatgttttgaacaaaggttaaaagaatttcattcagataatagtcactcaatatgtattttggaaatgtagatatgagagaaagagcttgtaaagtgaaatagttgtatcagtaaggatctggatacaattcagggaaacaaattagaaactggttaagctgatagaagcaaaatattttagttatttttgatattagtaagctattatctcaggggctgactttacaaaaaacaatktgtatcttttatgtttaattttggatattaatgtagccacattccaagcagttacatagaaaatatcacagttagaaatatacaatggatgttctcccaagacattgtattatatattttcttgcaggcaaatacatattgaaaacatattttaaaattattaattatcttgacagaaaaatgttgtccctaaagggtatttagtaatcaaattaaaatgaatttaaaatttaaattattttttcctcactacatttagcagaaatattatagtcagcagaccaacttaaataaaatatt

SEQ ID NO: 218229 - DNA, 542 bp, Homo sapiens
acattaaaatgtctgaggcggggcacagtggctcatgcttgtaatgccagcactttaggaggctgaggtgggtggatcacgaggtcaggagatggagaccatcctggctaacacgatgaaaccccatctttactagaaatacaaaaaattagccgggcgtggtggcatacgcctatagtcccagctacttgggaggctgaggcaggagaattgcttgaacccaggaggtggaggtggcagtgacccgagatagcaccactccactccagcctgggcgacagtgagactccatctcaaaaaaaaaaatctgaagttaagatgtggagtgtctaataaaagtaaaatgatgaattctgggttctaaatagaaayggattcaagtgagaagggactaaagacagaaatgagctatgaaaaggcctcgtaacaacacaggtgactctacatatgttcttaggaaaggccacataatacaccaacttttattccttacccactagatgagaaattgatgctgttttccccacacctacaaaccgcct

SEQ ID NO: 218230 - DNA, 542 bp, Homo sapiens
acattaaaatgtctgaggcggggcacagtggctcatgcttgtaatgccagcactttaggaggctgaggtgggtggatcacgaggtcaggagatggagaccatcctggctaacacgatgaaaccccatctttactagaaatacaaaaaattagccgggcgtggtggcatacgcctatagtcccagctacttgggaggctgaggcaggagaattgcttgaacccaggaggtggaggtggcagtgacccgagatagcaccactccactccagcctgggcgacagtgagactccatctcaaaaaaaaaaatctgaagttaagatgtggagtgtctaataaaagtaaaatgatgaattctgggttctaaatagaaatggattcaagtgagaagggactaaagacagaaatgagctatgaaaaggcctcgtaacaacacaggtgactctacatatgttcttaggaaaggccacataatayaccaacttttattccttacccactagatgagaaattgatgctgttttccccacacctacaaaccgcct

SEQ ID NO: 218231 - DNA, 491 bp, Homo sapiens
gtgctgggattacaggcgtgcagccgcgccctgctgagttatattttatagggaacatttaaacatttgacgttacaagcagagtcatttgtatattcttattttttctttctttcccacttacttcacttttactacttcacattttcaccaaatcaaggtgtgcagagtttatttcacattaatgtattaattggattttttttttttktgtcaaatagggaattctctttaaacaatctctgtatttcacagctggtccaagagcaaatgagaacaaattctaatatatccaggggaaattatcactaaccaggcataaagcttaaagggaagagggtaggctgaggaggctagtggcaggtcacagttagcacacagggccaggcttggtcccaggattcaggcaggagcccttgttcccagcccacccagcagtcctcagatggcatgatgggtggacatgaattctcgaattccagtctgaggtg

SEQ ID NO: 218232 - DNA, 544 bp, Homo sapiens
taatccattcttcaagcccataggcattggccaggaattagttttatggccatacctaggggaaaaataagtgaggaatagaaatatattattttatattatttctttttggaggctatccttttagctaaaaatagaaagtttttattgttatgagaaacaagcaaataatgggctggaagaaaggtaactaataatctgtaccagagaaccggtttcagtgtgtgttaatagttggttcttcaagcatgttttggagtttgctaagtcaacaaacatgggaaaatagtgttccagacggaaagaggagcatgttcattgagtcactgtgtacctagacctgaaactgtcttctagtataccatttattttcatacttgttactcttcagaggactgaatagggatcagccctgacttgggataaattggtcctcaaacaagaactcttygtctttttgataatgtgatattactttgatgctatagaagcaaaaatattgaagatatgtgttcatgatttttgaccctctctccaccctcta

SEQ ID NO: 218233 - DNA, 546 bp, Homo sapiens
tccattcaaattttaggattttttctatttatgtgaacaacaatatcgtattttcatagagattgcattaaacttgtagattgctttgggaagtacggacatttaaaaaatattaattcttctaatccttgagcacaggatatcattccatttatttgtatcttcaatttcatcaatgttttatagttttcagtgtagagatttttcacctctgcaattaaatttattcctaagtactttattttttgtagctattataaatgagattgttttcttacagtgcactatctgaaaaattgagaaaacaatctattgtgttgagatacaagtttttataaagggayattgaatatttttaaatgccttttctgcatctattgaaatgattgtatggtttttctccttcattctgttaatgtgatgtatcgagtttattgatttgcatatcttgacccatccttgcatccccgagataaatcccacttgatcgtggtaaattatctttttagtgtgctgttgaatttgatttcctagtaatttgttgag

SEQ ID NO: 218234 - DNA, 377 bp, Homo sapiens
taacaattacaaagctaattaacatttggggaggagggatraagtaaacagctcttggccgggcatggtgtctcacgcttttaaccccagcaatttcggaggctgaggcaggtggatcatttgagctcaggagttcgaaaccagcctgggcaacatggtgaaactccaactctacaaaaagtacaataattaggtaggcatggtggcatgcacctatagtcccagctactcatgagcctggggtgggaaaattgtttgagcccaggaggttgaggctgcagtgagctgtgatcatgctactgcactctagcctgggcaatgaaagtgagaacctgtctataaaaattaaaaaaaaaaaagcccttaaatggtttatc

SEQ ID NO: 218235 - DNA, 377 bp, Homo sapiens
taacaattacaaagctaattaacatttggggaggagggatgaagtaaacagctcttggccgggcatggtgkctcacgcttttaaccccagcaatttcggaggctgaggcaggtggatcatttgagctcaggagttcgaaaccagcctgggcaacatggtgaaactccaactctacaaaaagtacaataattaggtaggcatggtggcatgcacctatagtcccagctactcatgagcctggggtgggaaaattgtttgagcccaggaggttgaggctgcagtgagctgtgatcatgctactgcactctagcctgggcaatgaaagtgagaacctgtctataaaaattaaaaaaaaaaaagcccttaaatggtttatc

SEQ ID NO: 218236 - DNA, 377 bp, Homo sapiens
taacaattacaaagctaattaacatttggggaggagggatgaagtaaacagctcttggccgggcatggtgtctcacgcttttaaccccagcamtttcggaggctgaggcaggtggatcatttgagctcaggagttcgaaaccagcctgggcaacatggtgaaactccaactctacaaaaagtacaataattaggtaggcatggtggcatgcacctatagtcccagctactcatgagcctggggtgggaaaattgtttgagcccaggaggttgaggctgcagtgagctgtgatcatgctactgcactctagcctgggcaatgaaagtgagaacctgtctataaaaattaaaaaaaaaaaagcccttaaatggtttatc

SEQ ID NO: 218237 - DNA, 482 bp, Homo sapiens
agggattataatcaccaaaattctaaaggaaaagttatgtatatatctaataataaaagctaacatttaattaaacataatcctcattcaacagatgaggaatctaaaacccaaagagtcattatcactgttccacttatctctatatccctacaaaaatactcactcttgatctgtaacaatgcctccttaaactccctgaatggcagcttcaggtaaaaacttcccagaaagtttgaaacaacaaggrtaaaaggaaaattcttggagccacataaaaaagaaaacagatcattacaaaaaaagaagaatcaggcatcagttctcattaccaatactgaattaaaaagaaacccccaaaaaatcattattttcctaggtctataaaaaattatttaaaaccaaaattttaatgtctgttaagctaacattcaagtccatggataacaaatgtaaatgggttaaattctctagtaaaagac

SEQ ID NO: 218238 - DNA, 482 bp, Homo sapiens
agggattataatcaccaaaattctaaaggaaaagttatgtatatatctaataataaaagctaacatttaattaaacataatcctcattcaacagatgaggaatctaaaacccaaagagtcattatcactgttccacttatctctatatccctacaaaaatactcactcttgatctgtaacaatgcctccttaaactccctgaatggcagcttcaggtaaaaacttcccagaaagtttgaaacaacaaggataaaaggaaaattcttggarccacataaaaaagaaaacagatcattacaaaaaaagaagaatcaggcatcagttctcattaccaatactgaattaaaaagaaacccccaaaaaatcattattttcctaggtctataaaaaattatttaaaaccaaaattttaatgtctgttaagctaacattcaagtccatggataacaaatgtaaatgggttaaattctctagtaaaagac

SEQ ID NO: 218239 - DNA, 355 bp, Homo sapiens
aaaaataaagatgagaatataaatcaataaaacagaaaggggaaagaaaatagagaaaagtccatgaaaacaaaggctgactcaagaagatcaataagattgataaatctctagacagactgatcaggaaaaaaataagacaagatacaaattattagtatcaagaatgaggaaggtgaaatcactacagattctacacggtattaaaataataagaaacattatgatcaactccattcctttaatttgtcaagatagacraaatgaacaaatttcttgaaagatgcaaatttatgaaaggagagacagataacctaaataggtacctattaaagaaataaaatttgttgttaaa

SEQ ID NO: 218240 - DNA, 463 bp, Homo sapiens
agcaccacacttcctgtactgtctgcagaatcgtgagccaattaaacctctttttgttatcaattacccagcgacaggtatttctttacaacaacacaggagcggctgtatatatatatatattcatacatatgcacaatgtacagtgacatacacaattcaaaaacagmcttgaggggaaaaaacacaaacgctatccaaaaaatgcaggtatagcaataattgcaaagaaacagaatttaaactaaaaagcagtgaataagtcaaagataataattcacaataacataagttttatgttacagtgtaaattccaaaagaagccatagtcattaaagtttatacacctaataaatatatgtcacatatagaaagtaaagctgagtagaaataacatgcatagattagactttaacatagctctcaaatcaggatattaaatagatatgaaataaataataac

SEQ ID NO: 218241 - DNA, 463 bp, Homo sapiens
agcaccacacttcctgtactgtctgcagaatcgtgagccaattaaacctctttttgttatcaattacccagcgacaggtatttctttacaacaacacaggagcggctgtatatatatatatattcatacatatgcacaatgtacagtgacatacacaattcaaaaacagccttgaggggaaaaaacacaaacgctatccaaaaaatgcaggtatagcaataattgcaaagaaacagaatttaaactaaaaagcagtgaayaagtcaaagataataattcacaataacataagttttatgttacagtgtaaattccaaaagaagccatagtcattaaagtttatacacctaataaatatatgtcacatatagaaagtaaagctgagtagaaataacatgcatagattagactttaacatagctctcaaatcaggatattaaatagatatgaaataaataataac

SEQ ID NO: 218242 - DNA, 463 bp, Homo sapiens
agcaccacacttcctgtactgtctgcagaatcgtgagccaattaaacctctttttgttatcaattacccagcgacaggtatttctttacaacaacacaggagcggctgtatatatatatatattcatacatatgcacaatgtacagtgacatacacaattcaaaaacagccttgaggggaaaaaacacaaacgctatccaaaaaatgcaggtatagcaataattgcaaagaaacagaatttaaactaaaaagcagtgaataagtcaaagataataattcacaataacataagttttatgttrcagtgtaaattccaaaagaagccatagtcattaaagtttatacacctaataaatatatgtcacatatagaaagtaaagctgagtagaaataacatgcatagattagactttaacatagctctcaaatcaggatattaaatagatatgaaataaataataac

SEQ ID NO: 218243 - DNA, 355 bp, Homo sapiens
aaaaataaagatgagaatataaatcaataaaacagaaaggggaaagaaaatagagaaaagtccatgaaaacaaaggctgactcaagaagatcaataagattgataaatctctagacagactgatcaggaaaaaaataagacaagatacaaattattagtatcaagaatgaggaaggtgaaatcactacagattctacacggtattaaaataataagaaacattatgatcaactccattcctttaatttgtcaagatagacgaaatgaacaaatttcttgaaagatgcaaatttatgmaaggagagacagataacctaaataggtacctattaaagaaataaaatttgttgttaaa

SEQ ID NO: 218244 - DNA, 463 bp, Homo sapiens
agcaccacacttcctgtactgtctgcagaatcgtgagccaattaaacctctttttgttatcaattacccagcgacaggtatttctttacaacaacacaggagcggctgtatatatatatatattcatacatatgcacaatgtacagtgacatacacaattcaaaaacagccttgaggggaaaaaacacaaacgctatccaaaaaatgcaggtatagcaataattgcaaagaaacagaatttaaactaaaaagcagtgaataagtcaaagataataattcacaataacataagttttatgttacagtgtaaattccaaaagaagccatagtcattaaagtttatacacctaataaatatatgtcacatatagaaagtaaagctgagtagaaataacatgcatagattagactttaacatagctctcaaatcaggatattaartagatatgaaataaataataac

SEQ ID NO: 218245 - DNA, 592 bp, Homo sapiens
gaattctgcagatgtgattaaagccatcaatcaactgcctttgaattaatcaaaagggagatttgcctaatctaatcaaataacctctttgaaagcggagttttatccagctactagcaaaagggaaattcatagcaagggaacatttcagtacactgttgctatctttgaagataaaaagagccaggagcaaaaaccaaagagtggcctctaggaactgagggtgacccaagccaataggcagtaagaaaatggtgagctcagcagggtgtggtggctcatgcctgtaatcccagcactttgggaggccaaggcaggaggatcacgakgtcatgagatcgagaccatcctggctaacacggtaaaaccccgtttctactaaaaatacaaaaaaaaaaattagccggcatggtggtgcacgcctgtaatcccggccacttgggaggctgaggcatgagaatcacttgaacccaggaggcagaggttgcagtgagccgagactgcaccactgcactccagcctgtgcgacagagcaagactctgtctcaaaaaaaaaaaaaaaaagaaaagaaaaagaaaatggcaagctcag

SEQ ID NO: 218246 - DNA, 476 bp, Homo sapiens
tactttgctgttgttgatcatgtatataatgaaaggtttatggcaacataaagctaaaagatatactaaaattatgagtactctgcctttttccaaaatagacttatggagacataaaaatacatgagcaataggataaaactaaaaataagtaaggaaatttggcaatggaaaatttagataggataagtatgaagataatagagacccccaaaaatatgtaattccagacaaactacaaatttggccccataccttttcaacagtcaatacaaagaaggacatatgagcccttaatctgattcttactatttataacatcacttgatataatgatataataataagacatcccttgatagaatgcaatgaaaaattgtcttaaagtagccaccttgcagtagraaaataccagtttcatagggctgtttcttatagcagccttcaaactaagtcagtggtataaaattaaggcc

SEQ ID NO: 218247 - DNA, 277 bp, Homo sapiens
tgagttaggagtaaggttgacctctttttataaaagttgagaaatttaacaaaagcatgtatctcattataaagaaatccactaaagagagtatctgtgaagaaggccaagattttcatcaggaaacacttttagggtgctctgtcatagktaaatggctggtcattgttgcaacattattttcatgatgatacaaggatacattaaccttgtctggaaattttacactaaaaatccatctaggagatacaaccagatatacttcctgaataggaaa

SEQ ID NO: 218248 - DNA, 636 bp, Homo sapiens
atttttgtgacaatgacagttgtcttgttgcagagtgaactttgttgtatataacagtgctgtgcagtataaatataatgtgagcaacataagtaatttttctagtgggtatgttaaaaatttgaggaaaaggaaacatttgggaacaattgtagtaaattttatttaattcagtaatccaaaatagtaatatttcaaattttgagatactttttccccattaagattttgraatccagtgtgcattttatgcttactgcatacctcgatttgaactaattacatttcacttgttcagaaaccacatgtcgctagtagctaccatggcaacttgaagtgtcaggggagcaaactctagaaagtttcacagaagcattttagtgttcctaggaaagtataatagaaaaatgaattgattatctgataattagtttctgataattagttgagtattcccccaatttttaaaagttttacagtgagcaaaaagagatcaatttttcaatgtacatattttgaaagataaatactagtactctcttaatattaagaaacataacatcccagttatgtcctttctatcaaaaatgaaccaatttatgatgcttccattgttagattaatgatttattttaa

SEQ ID NO: 218249 - DNA, 636 bp, Homo sapiens
atttttgtgacaatgacagttgtcttgttgcagagtgaactttgttgtatataacagtgctgtgcagtataaatataatgtgagcaacataagtaatttttctagtgggtatgttaaaaatttgaggaaaaggaaacatttgggaacaattgtagtaaattttatttaattcagtaatccaaaatagtaatatttcaaattttgagatactttttccccattaagattttggaatccagtgwgcattttatgcttactgcatacctcgatttgaactaattacatttcacttgttcagaaaccacatgtcgctagtagctaccatggcaacttgaagtgtcaggggagcaaactctagaaagtttcacagaagcattttagtgttcctaggaaagtataatagaaaaatgaattgattatctgataattagtttctgataattagttgagtattcccccaatttttaaaagttttacagtgagcaaaaagagatcaatttttcaatgtacatattttgaaagataaatactagtactctcttaatattaagaaacataacatcccagttatgtcctttctatcaaaaatgaaccaatttatgatgcttccattgttagattaatgatttattttaa

SEQ ID NO: 218250 - DNA, 636 bp, Homo sapiens
atttttgtgacaatgacagttgtcttgttgcagagtgaactttgttgtatataacagtgctgtgcagtataaatataatgtgagcaacataagtaatttttctagtgggtatgttaaaaatttgaggaaaaggaaacatttgggaacaattgtagtaaattttatttaattcagtaatccaaaatagtaatatttcaaattttgagatactttttccccattaagattttggaatccagtgtgcattttatgcttactgcatacctcgatttgaactaattacatttcacttgttcagaaaccacatgtcgctagtagctaccatggcaacttgaagtgtcaggggagcaaactctagaaagtttcacagaagcattttagtgttcctaggaragtataatagaaaaatgaattgattatctgataattagtttctgataattagttgagtattcccccaatttttaaaagttttacagtgagcaaaaagagatcaatttttcaatgtacatattttgaaagataaatactagtactctcttaatattaagaaacataacatcccagttatgtcctttctatcaaaaatgaaccaatttatgatgcttccattgttagattaatgatttattttaa

SEQ ID NO: 218251 - DNA, 636 bp, Homo sapiens
atttttgtgacaatgacagttgtcttgttgcagagtgaactttgttgtatataacagtgctgtgcagtataaatataatgtgagcaacataagtaatttttctagtgggtatgttaaaaatttgaggaaaaggaaacatttgggaacaattgtagtaaattttatttaattcagtaatccaaaatagtaatatttcaaattttgagatactttttccccattaagattttggaatccagtgtgcattttatgcttactgcatacctcgatttgaactaattacatttcacttgttcagaaaccacatgtcgctagtagctaccatggcaacttgaagtgtcaggggagcaaactctagaaagtttcacagaagcattttagtgttcctaggaaagtataatagaaaaatgaattgattatctgataattagtttctgataattagttgagtattcccmcaatttttaaaagttttacagtgagcaaaaagagatcaatttttcaatgtacatattttgaaagataaatactagtactctcttaatattaagaaacataacatcccagttatgtcctttctatcaaaaatgaaccaatttatgatgcttccattgttagattaatgatttattttaa

SEQ ID NO: 218252 - DNA, 471 bp, Homo sapiens
gttggcaatgtcctgagtgcaaagtgtgccagaactgcaagtaagttttcatttcaattcaaagctgtgtattgggtttaagaggsaccctattgctaggcgctaaaagtttgtgtaatataatagaggttgttcatattttggctgtattcattcagagtgacttcatcatacttaaaaaaattactggatattaacgtttatattattttgaaagaagtctaaacaaaactgattttaatcatttaaattgctctggtcgtctaaagagctaatttaaatttaccaacagtttaaaaaataagcgatattaacaatttaaaacaagcatgagaagaataaagtagcttgtcttcaggggcaccggggaggggatgtgataggatttaaacctctcactacagacgtagaagaattagagttgagtcaaaacgtcagtcatgtgtttgaatttccattccaggaaggaca

SEQ ID NO: 218253 - DNA, 471 bp, Homo sapiens
gttggcaatgtcctgagtgcaaagtgtgccagaactgcaagtaagttttcatttcaattcaaagctgtgtattgggtttaagaggcaccctattgctaggcgctaaaagtttgtgtaatataatagaggttgttcatattttggctgtattcattcagagtgacttcatcatacttaaaaaaattactggatattaacgtttatattattttgaaagaagtctaaacaaaactgattttaatcatttaaattgctctggtcrtctaaagagctaatttaaatttaccaacagtttaaaaaataagcgatattaacaatttaaaacaagcatgagaagaataaagtagcttgtcttcaggggcaccggggaggggatgtgataggatttaaacctctcactacagacgtagaagaattagagttgagtcaaaacgtcagtcatgtgtttgaatttccattccaggaaggaca

SEQ ID NO: 218254 - DNA, 471 bp, Homo sapiens
gttggcaatgtcctgagtgcaaagtgtgccagaactgcaagtaagttttcatttcaattcaaagctgtgtattgggtttaagaggcaccctattgctaggcgctaaaagtttgtgtaatataatagaggttgttcatattttggctgtattcattcagagtgacttcatcatacttaaaaaaattactggatattaacgtttatattattttgaaagaagtctaaacaaaactgattttaatcatttaaattgctctggtcgyctaaagagctaatttaaatttaccaacagtttaaaaaataagcgatattaacaatttaaaacaagcatgagaagaataaagtagcttgtcttcaggggcaccggggaggggatgtgataggatttaaacctctcactacagacgtagaagaattagagttgagtcaaaacgtcagtcatgtgtttgaatttccattccaggaaggaca

SEQ ID NO: 218255 - DNA, 499 bp, Homo sapiens
aaatttgtaagggggttatcttttcctattgtatttcatctcttggtcatttctcttttctgtgatttccgcttgcacccccatgattctaatgagcatgataatttggggatgttaccagcatcttcatttacaggctgagaatttttgttgtaaccagcaagaattatgcccaactgccatgatcagtctgtttttattatttagttttawaagaaataagcgtcaatatcttagagttacgtgacataaataggactatgtaccttcatattttggtaaaaattagataaaatattcagtaaacatttactcgataccttgtatctgcactcagtttcttgggaaggattaaaagaacttgaaggaagagtacttgtcctccaagatctttgcatgtagctgaagagataaaacatgtgactttttatggagaggttgaactgaataataattggaggccaactgacccatcttcctgttgacttctgtttatccc

SEQ ID NO: 218256 - DNA, 499 bp, Homo sapiens
aaatttgtaagggggttatcttttcctattgtatttcatctcttggtcatttctcttttctgtgatttccgcttgcacccccatgattctaatgagcatgataatttggggatgttaccagcatcttcatttacaggctgagaatttttgttgtaaccagcaagaattatgcccaactgccatgatcagtctgtttttattatttagttttataagaaataagcgtcaatatcttagagttacgtgacataaataggactatgtaccttcatattttggtaaaaattagataaaatattcagtaaacatttactcgataccttgtatctgcactcagtttcttgggaaggattaaaagaacttgaaggaagagtacttgtcctccaagatctttgcatgtagctgaagagataaaacatgtgastttttatggagaggttgaactgaataataattggaggccaactgacccatcttcctgttgacttctgtttatccc

SEQ ID NO: 218257 - DNA, 499 bp, Homo sapiens
aaatttgtaagggggttatcttttcctattgtatttcatctcttggtcatttctcttttctgtgatttccgcttgcacccccatgattctaatgagcatgataatttggggatgttaccagcatcttcatttacaggctgagaatttttgttgtaaccagcaagaattatgcccaactgccatgatcagtctgtttttattatttagttttataagaaataagcgtcaatatcttagagttacgtgacataaataggactatgtaccttcatattttggtaaaaattagataaaatattcagtaaacatttactcgataccttgtatctgcactcagtttcttgggaaggattaaaagaacttgaaggaagagtacttgtcctccaagatctttgcatgtagctgaagagataaaacatgtgactttttatggagaggttgaactgaataataattggaggccaactgrcccatcttcctgttgacttctgtttatccc

SEQ ID NO: 218258 - DNA, 483 bp, Homo sapiens
tgtgactttttatggagaggttgaactgaataataattggaggccaactgacccatcttcctgttgacttctgtttatcccccagatttcattcagagattcctctctcagctcttcttgctttccctgttttttctsttcccctcctcttgaatttaaaatcatagtatctgaaagtaattatagtcaaaaatctcaacagagataacgctgtaggaaaggggcccaatctttgggggcagaagagtgtttaaagaaaggttttaggttttcaattataattcttaataattatgacaaggttcatcttttgaaataattattcagcatttaattgcttaatagacattataagcacttgaacctgcattacatttaattctcacagtaatgtttattattccccttttatacctgaaactcagagagctttagtctaagttgtttagtgacacagctagaaaacagcagcctggatacaaa

SEQ ID NO: 218259 - DNA, 451 bp, Homo sapiens
aaaacatgtgactttttatggagaggttgaactgaataataattggaggccaactgacccatcttcctgttgacttctgtttatcccccagatttcattcagagattcctctctcagctcttcttgctttccctgttttttctcttcccctcctcttgaatttaaaatcatagtatctgaaagtaattatagtcaaaaatctcaacagagataacgctgtaggaaaggggcccaatctttgggggcagaagagtgtttaaagaaaggttttaggttttcaattataattcttaataattatgacaagrttcatcttttgaaataattattcagcatttaattgcttaatagacattataagcacttgaacctgcattacatttaattctcacagtaatgtttattattccccttttatacctgaaactcagagagctttagtctaagttgt

SEQ ID NO: 218260 - DNA, 471 bp, Homo sapiens
ttgcatgtagctgaagagataaaacatgtgactttttatggagaggttgaactgaataataattggaggccaactgacccatcttcctgttgacttctgtttatcccccagatttcattcagagattcctctctcagctcttcttgctttccctgttttttctcttcccctcctcttgaatttaaaatcatagtatctgaaagtaattatagtcaaaaatctcaacagagataacgctgtaggaaaggggcccaatctttgggggcagaagagtgtttaaagaaaggttttaggttttcaattataattcttaataattatgacaaggttcrtcttttgaaataattattcagcatttaattgcttaatagacattataagcacttgaacctgcattacatttaattctcacagtaatgtttattattccccttttatacctgaaactcagagagctttagtctaagttgt

SEQ ID NO: 218261 - DNA, 451 bp, Homo sapiens
aaaacatgtgactttttatggagaggttgaactgaataataattggaggccaactgacccatcttcctgttgacttctgtttatcccccagatttcattcagagattcctctctcagctcttcttgctttccctgttttttctcttcccctcctcttgaatttaaaatcatagtatctgaaagtaattatagtcaaaaatctcaacagagataacgctgtaggaaaggggcccaatctttgggggcagaagagtgtttaaagaaaggttttaggttttcaattataattcttaataattatgacaaggttcatcttttgaaataattattcagcatttaattgcttaatagacattmtaagcacttgaacctgcattacatttaattctcacagtaatgtttattattccccttttatacctgaaactcagagagctttagtctaagttgt

SEQ ID NO: 218262 - DNA, 617 bp, Homo sapiens
cctttgttgggccctataaagggtttccggatatcaaatgataaatagtctccagatgaagaaatgctctataacgccccaccgctgtgttttcctatattttgtccttttctgaaaactttaaatacacgaatttttggtagaaatgaaaatctttctgttttatatatttgtttctgtccatggcactctgatatctttgaatctagtaaggatatagccttgtcttatttataccagcaagcagtgttgtcacttaatgctctcatttttcacgtaaatgactgacattttcccaagtcttcrcaagtgatttttgaagacgttgctgcattgagcagagactatgtcattgtaattgcagaagtttttaaattaaatatgtttaataaaattttagagcctgtttctgtggaacacataacacataatggtggtgtaatgtgtatttaaccataaattagcttcacaaaaatttgtgtacttaaaagtgtttatatccaaagaaattcttatttactgctcagtaatctcttgtgtagaagaaaatatgtaacatagtttgctgagtctttgataataacccccagtgtaaaataaagccgtaaagatgaaat

SEQ ID NO: 218263 - DNA, 440 bp, Homo sapiens
agtgcatgtcaaactgtggaagcaaaacaatcaagaaaaaaatttcttaagtattatttatttatttattgttattatactttaagttttagggtayatgtgcacaacgtgcaggtttgttaaaatgtaactgtcaatgatcatggcaaatattttgatatataaaaggtgattaacatgaaaaaagcctctgatatttcaaatattttggttagatttgttttatgggaatctaattacatattaggtatttggagtgtaatgtatacatttcttgcataagtgaatgaagagatggcaggagggctaaagttgagaatccaggaaatggaaaaacaccagaagtctgcatgactgtggacaacatgagtatttttgttaactatgcttctgtatgtagatatctgaactaatgaactgagaatacatcctgcaagcag

SEQ ID NO: 218264 - DNA, 610 bp, Homo sapiens
atttatcctcctggggtcctttcatttgacatcacattttttggcttcagttaagagaatcactttggtagaagtacttccttgtgttagttgtagtcatgtgaaacctaatctctctcttgaaatctgkactacatgttttatgaaaacttaattatgtgtcccttttgctttgtagaatcttctgagcgacctcctttatccacagtaaacaaatatattttcctttttaattaacaaaatgctttgtgatatatacatgatatattaatcaattaatcattatgttgtaaaacccattcagcttactctgaaagaggcagatcccagttcaaaagtagccatgagaaggaaggattcaccacctccaggaaaaggtaaatttgccaatacaaatttcatctggaaagaaggacataaatatattggaaatgttcatggtcttctgattcttatttcttttaccccaataagatagaaggatttgatctaaatgatgctgatgctgttgttagtgtctatgattataaaatgatatttagaagaacaaggaaaagaaatgtttaaaatgtgagctctagctcagatgcttttccttttaggttgtgat

SEQ ID NO: 218265 - DNA, 610 bp, Homo sapiens
atttatcctcctggggtcctttcatttgacatcacattttttggcttcagttaagagaatcactttggtagaagtacttccttgtgttagttgtagtcatgtgaaacctaatctctctcttgaaatctggactacatgttttatgaaaacttaattatgtgtcccttttgctttgtagaatcttctgagcgacctcctttatccacagtaaacaaatatattttcctttttaattaacaaaatgctttgtgatatatacatgatatattaatcaattaatcattatgttgtaaaacccattcagcttactctgaaagaggcagatcccagttcaaaagtagccatgagaaggaaggattcaccacctccagsaaaaggtaaatttgccaatacaaatttcatctggaaagaaggacataaatatattggaaatgttcatggtcttctgattcttatttcttttaccccaataagatagaaggatttgatctaaatgatgctgatgctgttgttagtgtctatgattataaaatgatatttagaagaacaaggaaaagaaatgtttaaaatgtgagctctagctcagatgcttttccttttaggttgtgat

SEQ ID NO: 218266 - DNA, 519 bp, Homo sapiens
gtgatagagttgggataaaccacagtgactcattattcctctttgttactattgggcaccagaggtatatgttttgttgatattggttattcaaatgagataaacgtgaatatgcatacattggctttgtttttcaaggagctgttggataaaatagcaacttaataaaaattctctagagaataacatgataatttaaccagactattttagaagtgaaaataatgttgaattcattacttgactcccaaatggttattttcaaggaatattggcgtgatttccagatgtaaaagcttattcatatctaatgcttgtagcaattttattttgtataagtatgtcaaatttggtaatttattawactttttgatgaagtttatacattataccttgttgccatgagtggatgaagatttcggaaggctaaactagaagatgcaagagatgtaggcacattattacaccatatgggtgtgagaaataatgaacattacatactataattcaccaaacata

SEQ ID NO: 218267 - DNA, 519 bp, Homo sapiens
gtgatagagttgggataaaccacagtgactcattattcctctttgttactattgggcaccagaggtatatgttttgttgatattggttattcaaatgagataaacgtgaatatgcatacattggctttgtttttcaaggagctgttggataaaatagcaacttaataaaaattctctagagaataacatgataatttaaccagactattttagaagtgaaaataatgttgaattcattacttgactcccaaatggttattttcaaggaatattggcgtgatttccagatgtaaaagcttattcatatctaatgcttgtagcaattttattttgtataagtatgtcaaatttggtaatttattaaactttttgatgaagtttatacattataccttgttgccatgagtggatgaagatttcggaaggctaaactagaagatgcaagagatgtaggcacattattacaccatatgggtrtgagaaataatgaacattacatactataattcaccaaacata

SEQ ID NO: 218268 - DNA, 605 bp, Homo sapiens
atgataatttaaccagactattttagaagtgaaaataatgttgaattcattacttgactcccaaatggttattttcaaggaatattggcgtgatttccagatgtaaaagcttattcatatctaatgcttgtagcaattttattttgtataagtatgtcaaatttggtaatttattaaactttttgatgaagtttatacattataccttgttgccatgagtggatgaagatttcggaaggctaaactagaagatgcaagagatgtaggcacattattacaccatatgggtgtgagaaataatgaacattacatactataattcaccaaacatatatccaagctgattaagttaggacacttccactgaagwgctgtgaagtgtacattcaactaaagtgtcattataattgtgtaccttctcactgattgatcaagttaaagagcatgacgaatatttgcagtaaaatgttccaaatcattctgatatcttgcatgaaagacacgcgggtgcatgtgtcacctgctttgacgttgattcccaggtgtatgagttggactctgattttagatcacatttgtcctcaacactcagcatatccacattg

SEQ ID NO: 218269 - DNA, 605 bp, Homo sapiens
atgataatttaaccagactattttagaagtgaaaataatgttgaattcattacttgactcccaaatggttattttcaaggaatattggcgtgatttccagatgtaaaagcttattcatatctaatgcttgtagcaattttattttgtataagtatgtcaaatttggtaatttattaaactttttgatgaagtttatacattataccttgttgccatgagtggatgaagatttcggaaggctaaactagaagatgcaagagatgtaggcacattattacaccatatgggtgtgagaaataatgaacattacatactataattcaccaaacatatatccaagctgattaagttaggacacttccactgaagagmtgtgaagtgtacattcaactaaagtgtcattataattgtgtaccttctcactgattgatcaagttaaagagcatgacgaatatttgcagtaaaatgttccaaatcattctgatatcttgcatgaaagacacgcgggtgcatgtgtcacctgctttgacgttgattcccaggtgtatgagttggactctgattttagatcacatttgtcctcaacactcagcatatccacattg

SEQ ID NO: 218270 - DNA, 605 bp, Homo sapiens
atgataatttaaccagactattttagaagtgaaaataatgttgaattcattacttgactcccaaatggttattttcaaggaatattggcgtgatttccagatgtaaaagcttattcatatctaatgcttgtagcaattttattttgtataagtatgtcaaatttggtaatttattaaactttttgatgaagtttatacattataccttgttgccatgagtggatgaagatttcggaaggctaaactagaagatgcaagagatgtaggcacattattacaccatatgggtgtgagaaataatgaacattacatactataattcaccaaacatatatccaagctgattaagttaggacacttccactgaagagctgtgaagtgtacattcaactaaagtgtcattataattgtgtaccttctcactgattgatcaagttaaagagcatgaygaatatttgcagtaaaatgttccaaatcattctgatatcttgcatgaaagacacgcgggtgcatgtgtcacctgctttgacgttgattcccaggtgtatgagttggactctgattttagatcacatttgtcctcaacactcagcatatccacattg

SEQ ID NO: 218271 - DNA, 451 bp, Homo sapiens
ttccactgaagagctgtgaagtgtacattcaactaaagtgtcattataattgtgtaccttctcactgattgatcaagttaaagagcatgacgaatatttgcagtaaaatgttccaaatcattctgatatcttgcatgaaagacacgcgggtgcatgtgtcacctgctttgacgttgattcccaggtgtatgagttgractctgattttagatcacatttgtcctcaacactcagcatatccacattgatattgacatggttttattttagttttagacatatggagaaagttatatcacatttgaaattgtcagtatatatttcttgaagcctgtattcctattttcttcagtgtatttccttcatgtttagtcccaagaaacaaagtataaaatatcaaagcctacagtaatacaggcaggagtataaaacttgatgctaacatgctatc

SEQ ID NO: 218272 - DNA, 451 bp, Homo sapiens
ttccactgaagagctgtgaagtgtacattcaactaaagtgtcattataattgtgtaccttctcactgattgatcaagttaaagagcatgacgaatatttgcagtaaaatgttccaaatcattctgatatcttgcatgaaagacacgcgggtgcatgtgtcacctgctttgacgttgattcccaggtgtatgagttggactctgattttagatcacatttgtcctcaacactcagcatatccacattgatattgacatggytttattttagttttagacatatggagaaagttatatcacatttgaaattgtcagtatatatttcttgaagcctgtattcctattttcttcagtgtatttccttcatgtttagtcccaagaaacaaagtataaaatatcaaagcctacagtaatacaggcaggagtataaaacttgatgctaacatgctatc

SEQ ID NO: 218273 - DNA, 451 bp, Homo sapiens
ttccactgaagagctgtgaagtgtacattcaactaaagtgtcattataattgtgtaccttctcactgattgatcaagttaaagagcatgacgaatatttgcagtaaaatgttccaaatcattctgatatcttgcatgaaagacacgcgggtgcatgtgtcacctgctttgacgttgattcccaggtgtatgagttggactctgattttagatcacatttgtcctcaacactcagcatatccacattgatattgacatggttttattttagttytagacatatggagaaagttatatcacatttgaaattgtcagtatatatttcttgaagcctgtattcctattttcttcagtgtatttccttcatgtttagtcccaagaaacaaagtataaaatatcaaagcctacagtaatacaggcaggagtataaaacttgatgctaacatgctatc

SEQ ID NO: 218274 - DNA, 646 bp, Homo sapiens
tggtaaccatattactttttttttaatcatcaaagttttaaaggcagttatcagttatctgtggccacaggaccctaagtttttcataagcaagaccaggccagtcctagaaaaatattatcttactgtgcttggagaatatctaaatatagtccatgttatgttaactatatttagcatatattaaaaggatgtttctaattcatttctctacttactacctacccagttaggttttctctttcagtaagtaccctgcctggttctctgaagctttttcttattttctggattcttttttttccttctgtgacatggtaataatattttcggtgatgtctttttactgttctcctctgcttttcttagggtttatgatcttctattatagttttcatttaaggcagctaaatattccccattttcctatagacaaaatcagargtgcatagaatttcagaatgttaagaaatcctagagactaaacaaaatatcttctagtacttgaatccttgcttaacatcctgatcaagtggttgttcaggtggagaacctgaaactcaaagagagaaaattatttggatacagtaaatcagataaatgggaattgcactcaggtttcttagttcaaaacccagtcttcttt

SEQ ID NO: 218275 - DNA, 594 bp, Homo sapiens
ctgactagaaaaaaaacaaacgagaaatttatttctttagtactaaaagtgtaactgtcaataatcatggcaaatattttgatatgtaaaagttgattaakccgggcgcggtgactcacggctgtaatcccagcacattgggaggctgaggcgggaggatcacgaggtcaggagatggagaccatcctggctaacatggtgaaaccccatctctactaaaaatacaaaaaattagccaggcgtggtggcatgtgcctgtagtcccagctactagggagcctgaggcaggagaatcacttgaacccgggcggcggaggttgctgtgagccgagattgtgccactgcactccagcctaggtaacagagcaagactccatgtcaaaaaagaaagttgattagtatgaaaaaaaagtcaatggtgattcagacatttttggttacattttgtaaatgaaaatctgagtactcattagttatttgatgtgtaacatatactttttttgcataagggaatgaaaagatggcaagagaactaaagttgagaatccacgaagttgaaaatatcagaagtcttcatgactgtggataacatga

SEQ ID NO: 218276 - DNA, 594 bp, Homo sapiens
ctgactagaaaaaaaacaaacgagaaatttatttctttagtactaaaagtgtaactgtcaataatcatggcaaatattttgatatgtaaaagttgattaagccrggcgcggtgactcacggctgtaatcccagcacattgggaggctgaggcgggaggatcacgaggtcaggagatggagaccatcctggctaacatggtgaaaccccatctctactaaaaatacaaaaaattagccaggcgtggtggcatgtgcctgtagtcccagctactagggagcctgaggcaggagaatcacttgaacccgggcggcggaggttgctgtgagccgagattgtgccactgcactccagcctaggtaacagagcaagactccatgtcaaaaaagaaagttgattagtatgaaaaaaaagtcaatggtgattcagacatttttggttacattttgtaaatgaaaatctgagtactcattagttatttgatgtgtaacatatactttttttgcataagggaatgaaaagatggcaagagaactaaagttgagaatccacgaagttgaaaatatcagaagtcttcatgactgtggataacatga

SEQ ID NO: 218277 - DNA, 594 bp, Homo sapiens
ctgactagaaaaaaaacaaacgagaaatttatttctttagtactaaaagtgtaactgtcaataatcatggcaaatattttgatatgtaaaagttgattaagccgggcgcrgtgactcacggctgtaatcccagcacattgggaggctgaggcgggaggatcacgaggtcaggagatggagaccatcctggctaacatggtgaaaccccatctctactaaaaatacaaaaaattagccaggcgtggtggcatgtgcctgtagtcccagctactagggagcctgaggcaggagaatcacttgaacccgggcggcggaggttgctgtgagccgagattgtgccactgcactccagcctaggtaacagagcaagactccatgtcaaaaaagaaagttgattagtatgaaaaaaaagtcaatggtgattcagacatttttggttacattttgtaaatgaaaatctgagtactcattagttatttgatgtgtaacatatactttttttgcataagggaatgaaaagatggcaagagaactaaagttgagaatccacgaagttgaaaatatcagaagtcttcatgactgtggataacatga

SEQ ID NO: 218278 - DNA, 594 bp, Homo sapiens
ctgactagaaaaaaaacaaacgagaaatttatttctttagtactaaaagtgtaactgtcaataatcatggcaaatattttgatatgtaaaagttgattaagccgggcgcggtgactcacggctgtaatcccagcacattgggaggctgaggcgggaggatcacgaggtcaggagatggagaccatcctggctaacatggtgaaaccccatctctactaaaaatacaaaaaattagccaggcgtggtggcatgtgcctgtagtcccagctactagggagcctgaggcaggagaatcacttgaacccgggcggcggaggttgctgtgagccgagattgtgccactgcactccagcctaggtaacagagcaagactccatgtcaaaaaagaaagttgattagtatgaaaaaaaagtcaatggtgattcagasatttttggttacattttgtaaatgaaaatctgagtactcattagttatttgatgtgtaacatatactttttttgcataagggaatgaaaagatggcaagagaactaaagttgagaatccacgaagttgaaaatatcagaagtcttcatgactgtggataacatga

SEQ ID NO: 218279 - DNA, 425 bp, Homo sapiens
agcttcataacatgatagtaagcaaatatctatcaatcttaaaattttttaaataaaagagcaactatattacataatgactttttagagagggttggcatagaaagataaggagtcaaagaggaaggtaagaaaagagaaagggtgagaaagtaaatatacaagaaaatgtaaccagaggctcaaaaaaaagaaaagtaggacagtaaaataaacattttgacctatttatatgactcataaratcaaaataacttgctatgagattttcatcattaactgacatttagattagagaaaatatacatgaagcaagcctcaacccaggcaatacaagagctccgattccacttttcagctttgacctgcctcggccacctcgccccgacagtcctgcaccttgaggtctccactttcttggaaat

SEQ ID NO: 218280 - DNA, 536 bp, Homo sapiens
gtcactcaggttggactgcagtggtgtgatcacagctcactgcagcctagaactcttgggctcaagtgatcctcctgcttctgcctcccaaagtgccaggattatgggagtaagccaaagcatccagccaggaaaaattatttgaggattacaggaaagctgacaaaaggctttgtgaaagctttgctttaaataatctgaataataaatacttgaaatggaaataatttatctgacttcttacacaagaaataaacctatgggaaaatgtgttaaattcccygataatttcagacattaagtaccagagtatcgtgttccctgccccctcacccttgtttgtactaattaattactccttgaaaaaacctggcacctacctaagtagaagaattatgtatatttaaaattatccagatgctcaggaaaatacttagatgtttccctcatgataagttaaataatatgtcatatcttcaactgatgtcccttatcatagtttgaaatgaacttattccctatttagcagaatggtt

SEQ ID NO: 218281 - DNA, 536 bp, Homo sapiens
gtcactcaggttggactgcagtggtgtgatcacagctcactgcagcctagaactcttgggctcaagtgatcctcctgcttctgcctcccaaagtgccaggattatgggagtaagccaaagcatccagccaggaaaaattatttgaggattacaggaaagctgacaaaaggctttgtgaaagctttgctttaaataatctgaataataaatacttgaaatggaaataatttatctgacttcttacacaagaaataaacctatgggaaaatgtgttaaattccctgataatttcagacattaagtaccagagtatsgtgttccctgccccctcacccttgtttgtactaattaattactccttgaaaaaacctggcacctacctaagtagaagaattatgtatatttaaaattatccagatgctcaggaaaatacttagatgtttccctcatgataagttaaataatatgtcatatcttcaactgatgtcccttatcatagtttgaaatgaacttattccctatttagcagaatggtt

SEQ ID NO: 218282 - DNA, 536 bp, Homo sapiens
gtcactcaggttggactgcagtggtgtgatcacagctcactgcagcctagaactcttgggctcaagtgatcctcctgcttctgcctcccaaagtgccaggattatgggagtaagccaaagcatccagccaggaaaaattatttgaggattacaggaaagctgacaaaaggctttgtgaaagctttgctttaaataatctgaataataaatacttgaaatggaaataatttatctgacttcttacacaagaaataaacctatgggaaaatgtgttaaattccctgataatttcagacattaagtaccagagtatcgtgttccctgccccctcacccttgtttgtactaattaattactccttgaaraaacctggcacctacctaagtagaagaattatgtatatttaaaattatccagatgctcaggaaaatacttagatgtttccctcatgataagttaaataatatgtcatatcttcaactgatgtcccttatcatagtttgaaatgaacttattccctatttagcagaatggtt

SEQ ID NO: 218283 - DNA, 515 bp, Homo sapiens
cttcattagtctaaattaaacagccatattccagaatattaaatatagaatatgaaraaaaactgtcatctccagtcaatgaagttttttaacttttgagttaatactttttcaaagtaatttttttctctccgaaatgcatcacactacttaactcacttcaaggactggcagagccatcaaccaatgtcataggggaaaaagccttgtcattttaaggtattaaacagacaatgaaatctgccacaattttggtatttcttctccatgagaacataataaattaatggagttttttcttttgcttttttctaagcaacaaagttttatgatatcatgaatgaaaagatccttaattaccttttggtctacacgtcaaggacttctccctcataaaaccagtagtaatcacaacaaaaggaattaaccataaaaagaggtattaaaaatgtatacttgatttttaaatgcaagcatattatttctttacattaaaatttttagatttaaaaagc

SEQ ID NO: 218284 - DNA, 438 bp, Homo sapiens
tccttcattagtctaaattaaacagccatattccagaatattaaatatagaatatgaagaaaaactgtcatctccagtcaatgaagttttttaacttttgagttaatactttttcaaagtaatttttttctctycgaaatgcatcacactacttaactcacttcaaggactggcagagccatcaaccaatgtcataggggaaaaagccttgtcattttaaggtattaaacagacaatgaaatctgccacaattttggtatttcttctccatgagaacataataaattaatggagttttttcttttgcttttttctaagcaacaaagttttatgatatcatgaatgaaaagatccttaattaccttttggtctacacgtcaaggacttctccctcataaaaccagtagtaatcacaacaaaaggaattaaccataaaaa

SEQ ID NO: 218285 - DNA, 438 bp, Homo sapiens
tccttcattagtctaaattaaacagccatattccagaatattaaatatagaatatgaagaaaaactgtcatctccagtcaatgaagttttttaacttttgagttaatactttttcaaagtaatttttttctctccraaatgcatcacactacttaactcacttcaaggactggcagagccatcaaccaatgtcataggggaaaaagccttgtcattttaaggtattaaacagacaatgaaatctgccacaattttggtatttcttctccatgagaacataataaattaatggagttttttcttttgcttttttctaagcaacaaagttttatgatatcatgaatgaaaagatccttaattaccttttggtctacacgtcaaggacttctccctcataaaaccagtagtaatcacaacaaaaggaattaaccataaaaa

SEQ ID NO: 218286 - DNA, 438 bp, Homo sapiens
tccttcattagtctaaattaaacagccatattccagaatattaaatatagaatatgaagaaaaactgtcatctccagtcaatgaagttttttaacttttgagttaatactttttcaaagtaatttttttctctccgaaatgyatcacactacttaactcacttcaaggactggcagagccatcaaccaatgtcataggggaaaaagccttgtcattttaaggtattaaacagacaatgaaatctgccacaattttggtatttcttctccatgagaacataataaattaatggagttttttcttttgcttttttctaagcaacaaagttttatgatatcatgaatgaaaagatccttaattaccttttggtctacacgtcaaggacttctccctcataaaaccagtagtaatcacaacaaaaggaattaaccataaaaa

SEQ ID NO: 218287 - DNA, 438 bp, Homo sapiens
tccttcattagtctaaattaaacagccatattccagaatattaaatatagaatatgaagaaaaactgtcatctccagtcaatgaagttttttaacttttgagttaatactttttcaaagtaatttttttctctccgaaatgcatcacactacttaactcacttcaaggactggcagagccatcaaccaatgtcatrggggaaaaagccttgtcattttaaggtattaaacagacaatgaaatctgccacaattttggtatttcttctccatgagaacataataaattaatggagttttttcttttgcttttttctaagcaacaaagttttatgatatcatgaatgaaaagatccttaattaccttttggtctacacgtcaaggacttctccctcataaaaccagtagtaatcacaacaaaaggaattaaccataaaaa

SEQ ID NO: 218288 - DNA, 517 bp, Homo sapiens
tccttcattagtctaaattaaacagccatattccagaatattaaatatagaatatgaagaaaaactgtcatctccagtcaatgaagttttttaacttttgagttaatactttttcaaagtaatttttttctctccgaaatgcatcacactacttaactcacttcaaggactggcagagccatcaaccaatgtcataggggaaaaagccttgtcattttaaggtattaaacagacaatgaaatctgccacaattttggtatttcttctccatgagaacataataaattaatggagttttttcttttgcttttttctaagcaacaaagttttatgatatcatgaatgaaaagatccttaattaccttttgktctacacgtcaaggacttctccctcataaaaccagtagtaatcacaacaaaaggaattaaccataaaaagaggtattaaaaatgtatacttgatttttaaatgcaagcatattatttctttacattaaaatttttagatttaaaaagc

SEQ ID NO: 218289 - DNA, 491 bp, Homo sapiens
ctttccttagtgctcccagtgaaccatcatctctcttaccacactaccacaccattagtgcctctcattgcatcaccacctaggacrttttattgtttgtaattttatttagtggtaggcagtggggcaagagatacctaaattacttctctcaatatttccattggtttttctctgagatttggctaacatacatcttaaattctttttagtcaatagtttaatattatgttggcagtagacagttctaaaaaatatgagacagaaagtcatactctaagataaaaataatgttgaataattttatttcagaaataagaattttctggtaattatgtattattcatcataatttaaaagttagctttgatgccaaaattttatctcactttgaaaagacagactttgtgtaattttatagttctgaagaaaaattatcattatacttagatattctgacaaattatctagtatattccttagaccttaaa

SEQ ID NO: 218290 - DNA, 370 bp, Homo sapiens
taattctggaactgctgtttttgtatttctcaaaatgttttgtcttgcatcgtgcaataaggcagccaccatcatatgtgaccacmgagcacttctaatgcagctagccagaactgatgttttaagtataaagcatcttgttcacttttatactaaatgctgaaatattgttttgaatataccaggttaaataaaatatattaaaatttatttcacctttttttttaagtgtaactactagaaaatttaaaattacacatatggtctgcatcatatttctattagacagcactggctcaccgttctactggttggctagcttgtacctccagataacatctgataatccaatcactagctatcacaaact

SEQ ID NO: 218291 - DNA, 422 bp, Homo sapiens
taattctggaactgctgtttttgtatttctcaaaatgttttgtcttgcatcgtgcaataaggcagccaccatcatatgtgaccaccgagcacttctaatgcagctagccagaactgatgttttaagtataaagcatcttgttcayttttatactaaatgctgaaatattgttttgaatataccaggttaaataaaatatattaaaatttatttcacctttttttttaagtgtaactactagaaaatttaaaattacacatatggtctgcatcatatttctattagacagcactggctcaccgttctactggttggctagcttgtacctccagataacatctgataatccaatcactagctatcacaaactagatctttcagatgtttcctattaaaatgtttgtttaattttgaagtgaatt

SEQ ID NO: 218292 - DNA, 422 bp, Homo sapiens
taattctggaactgctgtttttgtatttctcaaaatgttttgtcttgcatcgtgcaataaggcagccaccatcatatgtgaccaccgagcacttctaatgcagctagccagaactgatgttttaagtataaagcatcttgttcacttttatactaaatgctgaaatattgttttgaatataccaggttaaataaaatayattaaaatttatttcacctttttttttaagtgtaactactagaaaatttaaaattacacatatggtctgcatcatatttctattagacagcactggctcaccgttctactggttggctagcttgtacctccagataacatctgataatccaatcactagctatcacaaactagatctttcagatgtttcctattaaaatgtttgtttaattttgaagtgaatt

SEQ ID NO: 218293 - DNA, 429 bp, Homo sapiens
aaagctcatataatactattatagaaaatcattaaaatcaacttaataatttkcccaccatgaaacagaacttaaggtaaatctacatttctttggttagtatttactgtactggtaaagaccaaagaattggtaatgttcaacaaaatatgaaaatgccagtgactttaacaaaaaaatagctggaaaccaaagaatcttgcttacatcacaatcacagctaggaaaatgcagcttattttacagccggtccccgatgtgaagaatatgtagaaacaacagtaaataaaaaaggaagtataatacggaaatgcctaatatcaaagaaattcatgtaacagaatactgaacttcagtatttctaatatacgtatatacacattcctgctaactgtagaatatttcctgcaagttatggtcccagtgcct

SEQ ID NO: 218294 - DNA, 462 bp, Homo sapiens
attaaaatgtttgtttaattttgaagtgaattcctagaaaagctcatataatactattatagaaaatcattaaaatcaacttaataatttgcccaccatgaaacagaacttaaggtaaatctacatttctttggttagtatttactgtactggtaaagaccaaagaattggtaatgttcaacaaaatatgaaaatgccagtgactttaacaaaaraatagctggaaaccaaagaatcttgcttacatcacaatcacagctaggaaaatgcagcttattttacagccggtccccgatgtgaagaatatgtagaaacaacagtaaataaaaaaggaagtataatacggaaatgcctaatatcaaagaaattcatgtaacagaatactgaacttcagtatttctaatatacgtatatacacattcctgctaactgtagaatatttcctgcaagttatggtcccag

SEQ ID NO: 218295 - DNA, 340 bp, Homo sapiens
gtttaattttgaagtgaattcctagaaaagctcatataatactattatagaaaatcattaaaatcaacttaataatttgcccaccatgaaacagaacttaaggtaaatctacatttctttggttagtatttactgtactggtaaagaccaaagaattggtaatgttcaacaaaatatgaaaatgccagtgactttaacaaaaaaatagctggaaaccaaagaatcttgcttacatcacaatcacagctaggaaaatgcagcttattttacagccrgtccccgatgtgaagaatatgtagaaacaacagtaaataaaaaaggaagtataatacggaaatgc

SEQ ID NO: 218296 - DNA, 429 bp, Homo sapiens
aaagctcatataatactattatagaaaatcattaaaatcaacttaataatttgcccaccatgaaacagaacttaaggtaaatctacatttctttggttagtatttactgtactggtaaagaccaaagaattggtaatgttcaacaaaatatgaaaatgccagtgactttaacaaaaaaatagctggaaaccaaagaatcttgcttacatcacaatcacagctaggaaaatgcagcttattttacagccggtccccgatgtgaagaatatgtagaaacaacagtaaataaaaamggaagtataatacggaaatgcctaatatcaaagaaattcatgtaacagaatactgaacttcagtatttctaatatacgtatatacacattcctgctaactgtagaatatttcctgcaagttatggtcccagtgcct

SEQ ID NO: 218297 - DNA, 429 bp, Homo sapiens
aaagctcatataatactattatagaaaatcattaaaatcaacttaataatttgcccaccatgaaacagaacttaaggtaaatctacatttctttggttagtatttactgtactggtaaagaccaaagaattggtaatgttcaacaaaatatgaaaatgccagtgactttaacaaaaaaatagctggaaaccaaagaatcttgcttacatcacaatcacagctaggaaaatgcagcttattttacagccggtccccgatgtgaagaatatgtagaaacaacagtaaataaaaaargaagtataatacggaaatgcctaatatcaaagaaattcatgtaacagaatactgaacttcagtatttctaatatacgtatatacacattcctgctaactgtagaatatttcctgcaagttatggtcccagtgcct

SEQ ID NO: 218298 - DNA, 429 bp, Homo sapiens
aaagctcatataatactattatagaaaatcattaaaatcaacttaataatttgcccaccatgaaacagaacttaaggtaaatctacatttctttggttagtatttactgtactggtaaagaccaaagaattggtaatgttcaacaaaatatgaaaatgccagtgactttaacaaaaaaatagctggaaaccaaagaatcttgcttacatcacaatcacagctaggaaaatgcagcttattttacagccggtccccgatgtgaagaatatgtagaaacaacagtaaataaaaaaggaagtataatacrgaaatgcctaatatcaaagaaattcatgtaacagaatactgaacttcagtatttctaatatacgtatatacacattcctgctaactgtagaatatttcctgcaagttatggtcccagtgcct

SEQ ID NO: 218299 - DNA, 561 bp, Homo sapiens
aaatactaggacatggctcatataagatggaataagcctggaaatacacccccctccccaatatttcagaacataaagtctacagaaagagaatcctaatgtattgaacctggtttctcaattgaaacaaaagtcttcaaggaaggagagatacgyaaaatttaacaggaatatatatgaagcagtatctttaaagaatgtaaatatatcaaccaaaagtaaacttgagattcaaatttccattgctaaagtattttcagttagaatgacataattattatataactactcaaaacaaaacaaaacttactggaaaaaagaacaactggtttgagaagaaaaacttttcatggtagagcagaaataactgtcaaagagaaaatacttagaaaaagtcatatataaagagtggcctagttttactgcacacgtctttgccatgcagaaacagctaaatcccatctgacaactactttccctttcgtgtaccttgtctttagagaataaaatatatctgggtttgatatagaggagactaattttcacattaaaaatgatttt

SEQ ID NO: 218300 - DNA, 561 bp, Homo sapiens
aaatactaggacatggctcatataagatggaataagcctggaaatacacccccctccccaatatttcagaacataaagtctacagaaagagaatcctaatgtattgaacctggtttctcaattgaaacaaaagtcttcaaggaaggagagatacgcaaaatttaacaggaatatatatgaagcagtatctttaaagaatgtaaatatatcaaccaaaagtaaacttgagattcaaatttccattgctaaagtmttttcagttagaatgacataattattatataactactcaaaacaaaacaaaacttactggaaaaaagaacaactggtttgagaagaaaaacttttcatggtagagcagaaataactgtcaaagagaaaatacttagaaaaagtcatatataaagagtggcctagttttactgcacacgtctttgccatgcagaaacagctaaatcccatctgacaactactttccctttcgtgtaccttgtctttagagaataaaatatatctgggtttgatatagaggagactaattttcacattaaaaatgatttt

SEQ ID NO: 218301 - DNA, 495 bp, Homo sapiens
atatgtacgtatgataaatttatccatacatcatgcagtgttattatcaagctgtatcttcgctgcctgcactagtgtaggctttgatgtttcctactttttgtctggagactggaacamgacagaaatacaacgaaaaaaaaggaatacaggctacacaaaatatacccttacaatttcaaacatggtatgattcgtgatatgtctaagactaaaataagaccgtgtcaatatcaatgtggatatgctgagtgatgaggacaaatcagaggggtaactcacacacctgagaatcaatgtcaaagcaggtggtacatgacccacagtatgtctttctttcaagaaattagaaggatttacaccattatactacaaacgttcatcgtgccctttaacttgcccaataagtagaacatacacaattacaatgacaattcagttaaatgtacatttcatgtctcttcagtggaagtgtcctaacttgatcaccttgga

SEQ ID NO: 218302 - DNA, 495 bp, Homo sapiens
atatgtacgtatgataaatttatccatacatcatgcagtgttattatcaagctgtatcttcgctgcctgcactagtgtaggctttgatgtttcctactttttgtctggagactggaacacgacagaaatacaacgaaaaaaaaggaatacaggctacacaaaatatacccttacaatttcaaacatggtatgattcgtgatatgtctaagactaaaataagaccgtgtcaatatcaatgtggatatgctgagtgatgaggacaaatcagaggggtaactcacacacctgagaatcaatgtcaaagcaggtggtacatgacccacagtatgtctttcttkcaagaaattagaaggatttacaccattatactacaaacgttcatcgtgccctttaacttgcccaataagtagaacatacacaattacaatgacaattcagttaaatgtacatttcatgtctcttcagtggaagtgtcctaacttgatcaccttgga

SEQ ID NO: 218303 - DNA, 495 bp, Homo sapiens
atatgtacgtatgataaatttatccatacatcatgcagtgttattatcaagctgtatcttcgctgcctgcactagtgtaggctttgatgtttcctactttttgtctggagactggaacacgacagaaatacaacgaaaaaaaaggaatacaggctacacaaaatatacccttacaatttcaaacatggtatgattcgtgatatgtctaagactaaaataagaccgtgtcaatatcaatgtggatatgctgagtgatgaggacaaatcagaggggtaactcacacacctgagaatcaatgtcaaagcaggtggtacatgacccacagtatgtctttctttcaagaaattagaaggatttacaccattatactacaaacgttcatcgtgccctttaacttgcccaataagtagaacatacacaattacaatgacaattcagttaaatktacatttcatgtctcttcagtggaagtgtcctaacttgatcaccttgga

SEQ ID NO: 218304 - DNA, 608 bp, Homo sapiens
aaccttagttgttaaagcagtggcagggtttgagctgactccaattttgaaaaaaagttctacttttgggtaaaatatgctatcaaacagcatcaagtgctacagagaaatctttcatgaaagaaagagrcaatcaatgtagcaaacttcattgttgtcttattgtatgtagagtgagaggcaccccaacctgcagcaatcactgctgggatcagtcagcagccaccaacatcctctatcagcaaaaaatcttacaatttactgaaagctcagaagatcagtagcattttttaacaataaagtatttttaaattaaagtatgcacattggttttttaaatataatgctattgaacatttaatagactgcagtagaatataaacataatatttacatgcactggtaaaccaaaatatttgtgtgccttgttttatggtgatattcactttattgtagtagtctataatggaacctacagtatctccaaggtatgcctgtatttactttggtaccaattctagatatacatctgcatatacctgggtatttaactccctggtctcatgttccttaaatagttaataagaaagagtaattatgaaccatgc

SEQ ID NO: 218305 - DNA, 608 bp, Homo sapiens
aaccttagttgttaaagcagtggcagggtttgagctgactccaattttgaaaaaaagttctacttttgggtaaaatatgctatcaaacagcatcaagtgctacagagaaatctttcatgaaagaaagaggcaatcaatgtagcaaacttcattgttgtcttattgtatgtagagtgagaggcaccccaacctgcagcaatcactgctgggatcagtcagcagccaccaacatcctctatcagcaaaaaatcttacaatttactgaaagctcagaagatcagtagcattttttaacaataaagtatttttaaattaaagtatgcacattggttttttaaatataatgctattgaacatttaatagactgcagtagaatataaacrtaatatttacatgcactggtaaaccaaaatatttgtgtgccttgttttatggtgatattcactttattgtagtagtctataatggaacctacagtatctccaaggtatgcctgtatttactttggtaccaattctagatatacatctgcatatacctgggtatttaactccctggtctcatgttccttaaatagttaataagaaagagtaattatgaaccatgc

SEQ ID NO: 218306 - DNA, 608 bp, Homo sapiens
aaccttagttgttaaagcagtggcagggtttgagctgactccaattttgaaaaaaagttctacttttgggtaaaatatgctatcaaacagcatcaagtgctacagagaaatctttcatgaaagaaagaggcaatcaatgtagcaaacttcattgttgtcttattgtatgtagagtgagaggcaccccaacctgcagcaatcactgctgggatcagtcagcagccaccaacatcctctatcagcaaaaaatcttacaatttactgaaagctcagaagatcagtagcattttttaacaataaagtatttttaaattaaagtatgcacattggttttttaaatataatgctattgaacatttaatagactgcagtagaatataaacataatatttacatgcactggtaaaccaaaatatttgtgtgccttgttttatggtgatattcactttattgtagtagtctataatggaacctacagtatctccaaggtatgcctgtatttactttggtaccaattctagatatacatctgcatatacctgggtatttaactycctggtctcatgttccttaaatagttaataagaaagagtaattatgaaccatgc

SEQ ID NO: 218307 - DNA, 512 bp, Homo sapiens
tttaggaatttttcctttgttatctctaatttgtgtttatttccatccactatagtttttacttctgacaatgtaatttgcatctctgcaagtatggttccttttttttttttaaaaaaaaaaaaccttccctgcttccacttattgtcttgagttttatttggagtacagagatttacttaaaatctttccatgcttgcttttagatttggggtaattcctcactcctgagrcaagacctttctgaatattcattgtcctgtgaagtatgtggtattttggcctggctcatgggaatggaccctcttccagtcattgtgtgaaccccagacatagtttctgctaattttctttaactttttttaaattttattttccattgttcttaggcagtttcctagcacacaagcacttttcattactccactaaatacccaagagggaatctctgcacacctccaggatttgtttcctgtactgctttttttctctccagttttctgtcctgtgat

SEQ ID NO: 218308 - DNA, 403 bp, Homo sapiens
atttccaaaatatttggacaaacttttagagtatccaggcttctaaggaacactctaaagagagttaatatataacaaaatgtgactttctgaattgatctgagttaaaccagtatcgtgatcacactgctgcataggtctgtatccatctatgcttaggggcaaatgaagtggttagagagccaggcaggatgatggccaaatcatgggttgrctacctgttaactgtggaatcatgagccaatatttcaacctctttaaagcagagttgtctaattagtaaaaaagcaataatagcacaaatagtttgtaaagctgtgtggagacgacatgacatgataaatattaagcatgtaatatggtgtctagcacagaggagaacaccaaacggtactagttctat

SEQ ID NO: 218309 - DNA, 403 bp, Homo sapiens
atttccaaaatatttggacaaacttttagagtatccaggcttctaaggaacactctaaagagagttaatatataacaaaatgtgactttctgaattgatctgagttaaaccagtatcgtgatcacactgctgcataggtctgtatccatctatgcttaggggcaaatgaagtggttagagagccaggcaggatgatggccaaatcatgggttggctacctgttaactgtggaatcatgagccaatatttcaacctctttaaagcagagttgtctaattagtaaaaaagcaataatagcacaaatagtttgtaaarctgtgtggagacgacatgacatgataaatattaagcatgtaatatggtgtctagcacagaggagaacaccaaacggtactagttctat

SEQ ID NO: 218310 - DNA, 403 bp, Homo sapiens
atttccaaaatatttggacaaacttttagagtatccaggcttctaaggaacactctaaagagagttaatatataacaaaatgtgactttctgaattgatctgagttaaaccagtatcgtgatcacactgctgcataggtctgtatccatctatgcttaggggcaaatgaagtggttagagagccaggcaggatgatggccaaatcatgggttggctacctgttaactgtggaatcatgagccaatatttcaacctctttaaagcagagttgtctaattagtaaaaaagcaataatagcacaaatagtttgtaaagctgtgtggagaygacatgacatgataaatattaagcatgtaatatggtgtctagcacagaggagaacaccaaacggtactagttctat

SEQ ID NO: 218311 - DNA, 519 bp, Homo sapiens
tatgttaattaactaaatgattcatcctaactgaggagtaattactgtgtgaagaaaagataatttttatcctgtaactttactgaataattttcaacatcctttttcatactatttgctggagttactagtaacagaaacttatgcaggttgttcttttatcaatacatttcaacttacacatgtcctttggatgagattkaggtgagaaactaaaaacatgagaactagaaagaaaaataatatttaagaacatagaaatttcattaggataataaaccaacatacgaatgttttctaatatcaacaaagagagtcaaactctgtaagatatttgaagagatttattctgagccaaatatgagtgactgtggcccctgacacagccctcaggaggtcctgagaacatgttcccaaggtggtcggggcgccgttggttttattcattttagggaggcatgagacatcaatcaaatacatttaagaaatacattggtttggttcagaaaggcaggccaa

SEQ ID NO: 218312 - DNA, 519 bp, Homo sapiens
tatgttaattaactaaatgattcatcctaactgaggagtaattactgtgtgaagaaaagataatttttatcctgtaactttactgaataattttcaacatcctttttcatactatttgctggagttactagtaacagaaacttatgcaggttgttcttttatcaatacatttcaacttacacatgtcctttggatgagatttaggtgagaaactaaaaacatgagractagaaagaaaaataatatttaagaacatagaaatttcattaggataataaaccaacatacgaatgttttctaatatcaacaaagagagtcaaactctgtaagatatttgaagagatttattctgagccaaatatgagtgactgtggcccctgacacagccctcaggaggtcctgagaacatgttcccaaggtggtcggggcgccgttggttttattcattttagggaggcatgagacatcaatcaaatacatttaagaaatacattggtttggttcagaaaggcaggccaa

SEQ ID NO: 218313 - DNA, 519 bp, Homo sapiens
tatgttaattaactaaatgattcatcctaactgaggagtaattactgtgtgaagaaaagataatttttatcctgtaactttactgaataattttcaacatcctttttcatactatttgctggagttactagtaacagaaacttatgcaggttgttcttttatcaatacatttcaacttacacatgtcctttggatgagatttaggtgagaaactaaaaacatgagaactagaaagaaaaataatatttaagaacatagaaatttcwttaggataataaaccaacatacgaatgttttctaatatcaacaaagagagtcaaactctgtaagatatttgaagagatttattctgagccaaatatgagtgactgtggcccctgacacagccctcaggaggtcctgagaacatgttcccaaggtggtcggggcgccgttggttttattcattttagggaggcatgagacatcaatcaaatacatttaagaaatacattggtttggttcagaaaggcaggccaa

SEQ ID NO: 218314 - DNA, 416 bp, Homo sapiens
  misc_feature (1)...(416): n = A,T,C or G
tgaagttacatcaagttaaaaatcttctgtatgtcaaaggaaatgatcaataaagtgaggagacaacccacnagaataggagaacatatttgcaaactattcacctgacaaaagattaataactagaacagataagcagctcaaactactgtataggaaaaaaatctagtaatctgatctttamaatgggcaaaatatttcaataaacatttcttaaaagaaggcatatgaattgcaagcagttatattatcagaaacatgcaaatcaaaactacaatgagatatcaacttatcccagttaaaatgaattttgtccaaaagtcaggcaacagcaaatgctagtgagaatgtggagaaatgggaagcctggtacactgttgctggaaatgtaaattagtacaaccactatggaaaac

SEQ ID NO: 218315 - DNA, 398 bp, Homo sapiens
aatatgttctgttttcttaacttcaggatatgtgtgtagtttgtggcagttttggccaaggagcagaaggaagattacttgcctgttctcagtgtggtcagtgttaccatccacactgtgtcagtattaaggtaaacatccttaaattgagttaacaaataygtattgaatttgtatttggttttagtagtaatatgagctcctagttctcacaatgaagtattatgattattaaacatatgtgacagtatttaagcactttaaatactgcttttaagggtttcctatctcaagaaatttgctcctctataaatcttatattgtactaatatcctgcttttgtcttgaaaaagtaaaacataaaaatatatgcatttaatttaaaagacaatttatac

SEQ ID NO: 218316 - DNA, 398 bp, Homo sapiens
aatatgttctgttttcttaacttcaggatatgtgtgtagtttgtggcagttttggccaaggagcagaaggaagattacttgcctgttctcagtgtggtcagtgttaccatccacactgtgtcagtattaaggtaaacatccttaaattgagttaacaaatacgtattgaatttgtatttggttttagtagtaayatgagctcctagttctcacaatgaagtattatgattattaaacatatgtgacagtatttaagcactttaaatactgcttttaagggtttcctatctcaagaaatttgctcctctataaatcttatattgtactaatatcctgcttttgtcttgaaaaagtaaaacataaaaatatatgcatttaatttaaaagacaatttatac

SEQ ID NO: 218317 - DNA, 202 bp, Homo sapiens
gtgtaagaaaaaatatttaatgtagcatgtattaaccaagcaattgagaggaataccrttcactacttacagtttatttcagaaatcaatgatttgaatttaattcataaattttggcaacataccttcatctagctcttgaacacctggcagcatctgaaataaatcaaatattacttataaagtttcagtcaaacaagag

SEQ ID NO: 218318 - DNA, 202 bp, Homo sapiens
gtgtaagaaaaaatatttaatgtagcatgtattaaccaagcaattgagaggaataccattcactacttacagtttatttcagaaatcartgatttgaatttaattcataaattttggcaacataccttcatctagctcttgaacacctggcagcatctgaaataaatcaaatattacttataaagtttcagtcaaacaagag

SEQ ID NO: 218319 - DNA, 599 bp, Homo sapiens
tgctagtgtgtgatacgtgtgacaaagggtatcatactttttgtcttcaacgaattatgaaatctgtaccaaccaatggctggaaatgcaaagtaagttgtttacttttttaaatcctctgtatgttttatrtggagaacagacaaatcggatatctattcaaatctatacattaccatcagctttttaaaaacagctttattgacatataactgacatacagtaaactgtacactcttcaagataatgaacatagtcatcaccatcaaagtttcctggtgccacttggcttgctttgtggctgttcaaacccaaaccctctgtcttcctagtctgctttttcactatagattagtattcacttcctagaatttttaataaaagcttcatatactatatactcgtttttggtctggcttctttaactcagtgtaattattttgaaattcatccctattgctgcacagatcagtagtgattcttttgtattactgagtgctggagataccacaatttgtgtattgaatcacctgttggtgaacatttagggtccttcaaaattttgagctattataaaaaatgccgatgaactcattaac

SEQ ID NO: 218320 - DNA, 599 bp, Homo sapiens
tgctagtgtgtgatacgtgtgacaaagggtatcatactttttgtcttcaacgaattatgaaatctgtaccaaccaatggctggaaatgcaaagtaagttgtttacttttttaaatcctctgtatgttttatatggagaacagacaaatcggatatctattcaaatctatacattaccatcagctttttaaaaacagctttaytgacatataactgacatacagtaaactgtacactcttcaagataatgaacatagtcatcaccatcaaagtttcctggtgccacttggcttgctttgtggctgttcaaacccaaaccctctgtcttcctagtctgctttttcactatagattagtattcacttcctagaatttttaataaaagcttcatatactatatactcgtttttggtctggcttctttaactcagtgtaattattttgaaattcatccctattgctgcacagatcagtagtgattcttttgtattactgagtgctggagataccacaatttgtgtattgaatcacctgttggtgaacatttagggtccttcaaaattttgagctattataaaaaatgccgatgaactcattaac

SEQ ID NO: 218321 - DNA, 599 bp, Homo sapiens
tgctagtgtgtgatacgtgtgacaaagggtatcatactttttgtcttcaacgaattatgaaatctgtaccaaccaatggctggaaatgcaaagtaagttgtttacttttttaaatcctctgtatgttttatatggagaacagacaaatcggatatctattcaaatctatacattaccatcagctttttaaaaacagctttattgacatataactgacatacagtaaactgtacactcttcaagataatgaacatagtcatcaccatcaaagtttcctggtgccacttggcttgctttgtggctgttcaaacccaaaccctctgtcttcctagtctgctttttcactatagattagtattcacttcctagaatttttaataaaagcttcatatactatatactcgtttttggtctggcttctttaactcagtgtaattattttgawattcatccctattgctgcacagatcagtagtgattcttttgtattactgagtgctggagataccacaatttgtgtattgaatcacctgttggtgaacatttagggtccttcaaaattttgagctattataaaaaatgccgatgaactcattaac

SEQ ID NO: 218322 - DNA, 550 bp, Homo sapiens
ggcaagctgagcattcctgctatcactgccacctaatcagagccactgagttaccacctccagttgcccaacagagtcacgcttctgcttatgaaactgacgacttctgaatatgcaagagcggtgatttaccacaggatgctttcagggacaaatgcactttcactccacctctagaatttgcactgtcatggctgccctggggaatgcctcaagcctggggacaaatttcacccacccctagatccactctgtcctgtagccacaaggacagaacttgttctgcttcctgtggacggtgtcccatctgctgaacayacattttaatacataaactctatttccaggaataatacctattggtattaacaagaaaatagcatttctacaagactctgtgaaaagaaaccctgtcagtgccactcattctaccttcagagacaagtccctgtaattactttctccttatttccttgtctggctaaagcaacaagatcaaaagaacctatccattttccccagataccttccaaaatgtgcgtttgctttg

SEQ ID NO: 218323 - DNA, 566 bp, Homo sapiens
ccatttcccatttcttgaataatttatcttattcccactgatgtaaaatgctactttgattatgtactaaatgtctaaacatactttctggccctaccatggcaatttggtcagtctgtgtatttctgtgtcagcaccatacattttaatatctcattactcttatgtttagaattttcttggctagctattcttgaatgtttattcttccagataagctttagaattatttttcaaagtttcaagaaagatcctgttgggactttcattagaattatgtaacttatacaatatatgtttacataaatttataaattaacttgggggagaactggcttttttgcaattttgagtctccttatgtgataatataagaagagacatgatttctcaaatagctcaaaactttgttgaaacctccttctctctctctctctstgtgtgtgtgtgtgtgtgtgtgtgtgatcacaaatagattttgcctgtttcttgtaaggtttatttctgggaattttacagggttttgttggcttatgattaaccatatggttctaaggtatgtgcgt

SEQ ID NO: 218324 - DNA, 420 bp, Homo sapiens
ttataatacttaatacaatgtaaatagttgttttattgggccaggcacggtggctcacacctgtaatcccagcactttgggaaatcaaggcaggaggattgcttaaacccaggagttagagaccagactggacaatatagcgagacctcatttctaacccccaaaaaaatatacacacgcacacacacacacacaaacayacacacacacacacgcatgcaaactatattaaaaaaacggtcatgctgcatggttttttatttgtgttatttttattgttgtaatgttactttattttctaatattttctgtttgcggttggttgaatcctcagctgtggaacctacagatacagaaccacagatttggagggccacattgtatatgtactattttgtgacttattttgaatatttctgc

SEQ ID NO: 218325 - DNA, 428 bp, Homo sapiens
ttctcatccccccaggccacctctcctctcttacactggaagtctagaagctggtttgcaaggggtccctgaatgaccttccrtagaggacagtgccttaccgagaagaggaaacacatactgaaaccagccacttttctctttttgccttctcacagtcaggtgattcgggtttggagagagccccagctcccatgcgcaggggattttctgtcctagaaaggcttaggcacagtggattcacctggatctcttctagttttgcagccagtttttctttcttgctcttggaccggagagcccccagacccaggcgtaggcttaggtaaagggggctcaggagacaaatctgtctgctttggccctaggctagccacctctgccttgccaacaattaattaatacattagttaattaattaattaagt

SEQ ID NO: 218326 - DNA, 416 bp, Homo sapiens
ggaattctatttaaagtgatgtgtttaaatctgacgtgttttatcacaagcgttaaagtttagctacaataatattaataatctaatattattatattagacacaatttgctataatgcttgaaccttgagtaaagacttccaaatcctctccccctgcaaacttgtaatttgtaacagttcattctctaaacctcgtgcatttgattgctttaatcatgttccggccctgcacatggagtgtgtggcttcagtgcagcyattgtcattgtgattccttgccagggctgtgctgcaaagctttgtgaagcttagagagaagccaaaattgccctgttgtcagaataacccatttacagacgaaacaatcctctttgttcctcacacatggattcctagaacttgacgcggggcgct

SEQ ID NO: 218327 - DNA, 578 bp, Homo sapiens
ctcccttgatcactctctatcatactaccatttttttcatcgtatttaacaatgacttaaattattgatgtatttgtttgttcttgtttgctgttttatttatttatttttttctcaccagcaagtcagctccataaaagcaggggcttcgaatctttcttccctggcctatctatccccagcacccagcacaatgctggatgaattaagattaaaaataatatctatttccaggggctggtgtgaggcttgaatgtaaaaaatgctttgtggaggggtcatacaattgttggattttatcaatcattttatgtgtctgtaattagaaaagattatattgctgtttactaatataggtcagaagaaatgaaaagtctcgcatccgattagktagtgaatctgcccaaaatctgtgtgattgaagctgttcatacatactgagatgaaatcactcgctgtcttgtaagcatctattatctactctgcttcagggggtgtggctggggtatgaaagacagatgcctggtctctttgccttgacggtgcttacaaacaaatgaatgacgtgtgcctgagcc

SEQ ID NO: 218328 - DNA, 578 bp, Homo sapiens
ctcccttgatcactctctatcatactaccatttttttcatcgtatttaacaatgacttaaattattgatgtatttgtttgttcttgtttgctgttttatttatttatttttttctcaccagcaagtcagctccataaaagcaggggcttcgaatctttcttccctggcctatctatccccagcacccagcacaatgctggatgaattaagattaaaaataatatctatttccaggggctggtgtgaggcttgaatgtaaaaaatgctttgtggaggggtcatacaattgttggattttatcaatcattttatgtgtctgtaattagaaaagattatattgctgtttactaatataggtcagaagaaatgaaaagtctcgcatccgattaggtagtgaatctgcccaaaatctgtgtgattgaagctgttcatacatactgagatgaaatcactcgctgtcttgtaagcatctattatctactctgcttcagggggtgtggctggggtatgaaagacagatgcctggtctctttgccttgasggtgcttacaaacaaatgaatgacgtgtgcctgagcc

SEQ ID NO: 218329 - DNA, 575 bp, Homo sapiens
acattggtggccgggggagccctagttcaccactttctatatgtggaaaagtgtacaattgtaaggactttcacataacctcctcaagcccagagaaaaatctctgtagacttgagagggccttaatgatcatgttaggtagtgctcaaagccctttctkacatatcgaaatgcttgcccacattgccattctcagccttatgaactggaaatagctggtgctattagtcccattatatacatgagaaaacagagattaagaagtcccaggccaggcgcggtggctcacgcctgtaatcccagcacttcgggaggccgaggcgggtggatcatgatgtcaagagatcgagaccatcctgaccaacatggtgaaaccccatctctactaaaaatacaaaaattagctggacatgggggtgcacgcctgtagtcccagctactcagggggctgagacaggagaatcgcttgaacccgggaggcagaggttgcagtgagctgagatcgtgccactgcactccagcctggtgacagagcgaaactccatctcaaaaaaaaagaagtcccaatgatgaat

SEQ ID NO: 218330 - DNA, 575 bp, Homo sapiens
acattggtggccgggggagccctagttcaccactttctatatgtggaaaagtgtacaattgtaaggactttcacataacctcctcaagcccagagaaaaatctctgtagacttgagagggccttaatgatcatgttaggtagtgctcaaagccctttcttacatatcgaaatgcttgcccacattgccattctcagccttatgaactggaaatagctggtgctattagtcccattatatacatgagaaaacagagattaagaagtcccaggccaggcgcggtggctcacgcctgtaatcccagcacttcgggaggccgaggcgggtggatcatgatgtcaagagatcgagaccatcctgaccaacatggtgaaaccccatctctactaaaaatacaaaaattagctggacatgggggtgcacgcctgtagtcccagctactcagggggctgagacaggagaatcgcttgaacccgggaggcagaggttgcagtgagctgagatcgtgccactgcactccagcctggtgacagagcgaaactccrtctcaaaaaaaaagaagtcccaatgatgaat

SEQ ID NO: 218331 - DNA, 604 bp, Homo sapiens
aagcttgtaagaccaaggttgggagttcacttttttttcctccaagtgcattaartacataaatcacctctcaagaaagaacataaggttcctggatttctattttgtctggcatgaaaactaaagtccaatctgcaaagcatcatactgttatatccatctgcagtgcactaaaatcactctcaaagattgtaactcttggagcaaatttttagcacaatgggcagagcgggttgtttcttgcccaggtaactgaagcaggttcttatctcacctaaattcatcttctgtctgaaaagtaagtgtatctcaacatgcggtttgaggttctgaagggttccacgctgcccttccactcaggcagggagaagtcagtcctgggattgagtctgaagattttgatggacatggtcctggagcgagttcggagctagtgttaaaatgccctctagtggtcattagctgtaaccagtgagcgtagggaagggaaaatcttgtgaaactggcttgggtgtggttttctataaacaccgaccaaaaccagagtcctaggttatagcgcgggttacttgcatctgtcgcggataccgcgatggcggtagga

SEQ ID NO: 218332 - DNA, 604 bp, Homo sapiens
aagcttgtaagaccaaggttgggagttcacttttttttcctccaagtgcattaaatacataaatcayctctcaagaaagaacataaggttcctggatttctattttgtctggcatgaaaactaaagtccaatctgcaaagcatcatactgttatatccatctgcagtgcactaaaatcactctcaaagattgtaactcttggagcaaatttttagcacaatgggcagagcgggttgtttcttgcccaggtaactgaagcaggttcttatctcacctaaattcatcttctgtctgaaaagtaagtgtatctcaacatgcggtttgaggttctgaagggttccacgctgcccttccactcaggcagggagaagtcagtcctgggattgagtctgaagattttgatggacatggtcctggagcgagttcggagctagtgttaaaatgccctctagtggtcattagctgtaaccagtgagcgtagggaagggaaaatcttgtgaaactggcttgggtgtggttttctataaacaccgaccaaaaccagagtcctaggttatagcgcgggttacttgcatctgtcgcggataccgcgatggcggtagga

SEQ ID NO: 218333 - DNA, 604 bp, Homo sapiens
aagcttgtaagaccaaggttgggagttcacttttttttcctccaagtgcattaaatacataaatcacctctcaagaaagaacataaggttcctggatttctattttgtctggcatgaaaactaaagtccaatctgcaaagcatcatactgttatatccatctgcagtgcactaaaatcactckcaaagattgtaactcttggagcaaatttttagcacaatgggcagagcgggttgtttcttgcccaggtaactgaagcaggttcttatctcacctaaattcatcttctgtctgaaaagtaagtgtatctcaacatgcggtttgaggttctgaagggttccacgctgcccttccactcaggcagggagaagtcagtcctgggattgagtctgaagattttgatggacatggtcctggagcgagttcggagctagtgttaaaatgccctctagtggtcattagctgtaaccagtgagcgtagggaagggaaaatcttgtgaaactggcttgggtgtggttttctataaacaccgaccaaaaccagagtcctaggttatagcgcgggttacttgcatctgtcgcggataccgcgatggcggtagga

SEQ ID NO: 218334 - DNA, 604 bp, Homo sapiens
aagcttgtaagaccaaggttgggagttcacttttttttcctccaagtgcattaaatacataaatcacctctcaagaaagaacataaggttcctggatttctattttgtctggcatgaaaactaaagtccaatctgcaaagcatcatactgttatatccatctgcagtgcactaaaatcactctcaaagattgtaactcttggagcaaatttttagcacaatgggcagagcgggttgttwcttgcccaggtaactgaagcaggttcttatctcacctaaattcatcttctgtctgaaaagtaagtgtatctcaacatgcggtttgaggttctgaagggttccacgctgcccttccactcaggcagggagaagtcagtcctgggattgagtctgaagattttgatggacatggtcctggagcgagttcggagctagtgttaaaatgccctctagtggtcattagctgtaaccagtgagcgtagggaagggaaaatcttgtgaaactggcttgggtgtggttttctataaacaccgaccaaaaccagagtcctaggttatagcgcgggttacttgcatctgtcgcggataccgcgatggcggtagga

SEQ ID NO: 218335 - DNA, 311 bp, Homo sapiens
tgtatgaatggggagtgagtgggaggtggggagactatttatggctctttaaagaaacttagctgtgaattgaagaagggaggatgatgatttggagaccatggagggtcaagggaagtgggaaaaattcaatgtgtagaatagaggctttcattgatggagcagggacccagagaggacagtcagagatgggatcaggtgtgcagatggaaggattaaccttggacagatgtggaagcttttttccacagtgccagaggaaagaaggtaagaatgtataccgatgtrgagaaatttgcaggtcaagttgg

SEQ ID NO: 218336 - DNA, 485 bp, Homo sapiens
aggcactctatctagtgacgactcagaatcctttttaatacagtgttttcgacagccacaagcagttatagagttggcctctatgatggaatcagtttacaacattgtactagtcctttgataaaggggcttgctttgattgagttaaattatgactttgataccaaataaaggtttaggaaaaaatgcaatatgttagtacatttgactatagggatgtaaagctatttatgaaagctgtgtgttattaaaataagtactctttaattacaccttytttgacagagtggcctttgtgtataaagcaagactgaattcttttaatttttagatttctcttttacacattagaaagcttatttcctaagagatttgctaatgtttgtttctccctctatctttttttttttaaattctctacagataaaataattgtgggtagctttatgggatacctaaggatctttagcccccatcctgcaaaa

SEQ ID NO: 218337 - DNA, 563 bp, Homo sapiens
cgttcacattgtatatataaacaatttcagtactstctggtttagcataaaaatctgacaaagtattttcttggtattgaatatttttgtcctgcttgggttagcagttttataaactagtcagtctgttcattaaagttctgagaattctttttttttttttttttgaaatggagtctagctctgttgcccaggctggagtgcagtggtacaatctcagctcattgcaacctctgcctcccgggttcaagcgactctcctgcctcagcctcctgggtggctgggattgcaggtgcccaccaccatgtccagctaatttttgtattttagtagagatggggttcactgtgttggccaggctgttcttgaactcctgaccttgtgatccaccctcctcagcctcccaaagtgctgggagtacaagcatgagccaccacgatcagccttaaattctgggaattcttaccccatccaaattatatgatcctaaagttaccagaaacctgtattcaagagtgcttgtcggggtcctttctatcctttcatgaacctccttaaagata

SEQ ID NO: 218338 - DNA, 625 bp, Homo sapiens
ttttccaatatttatcctttagatatgatctatcaccaaataacatcagcattctctagtgtttttttgttttgttttgttttgttttgttttaacaaatcctgtctggccatcaagagctatactgttagtgatatataatcacagggcatctcatcaktcactttaggcagcagggaagtgagcttaagagcattataatgaagattgtattatgtgagggagagagtaaaagtatctcataagacaccagctggccaggcacggttgcttactcctataatcccagcattttgggaggctgaggcgggaggatggcttgagcccaggagtttgagaccagcctgggcaacatagcgagacctccaactctacagaaaaattaaaaaattagctggttgtgtggtggcatgtctgttatcccagctactcaggggtgctgagatgggaggattgcttgagcccaggagattgaggctgcagtgagctatgatcatgccactgcactctatcctggtgacagtgtgggaccctgtctcaacaaaacaaaagaagccaacctgctaatagaaaaaggttaagtgcaatgcaaatttagaagagcttcagcagaaggaggtacata

SEQ ID NO: 218339 - DNA, 601 bp, Homo sapiens
cctagactttctatgaaaaggcttattagattgagttgctattggaataagtacacccttagagctgggtgtggtggctcctgcctggaatctttcttaggaggttgaggtgggaggatgccttgagcccaggagtttgagaccagcctgagtagcatagtgagactccatctgtgtgtaaataaataaatgaataaataaagtttaaaaaatttttaaaaaggcctaagtacaccattggaaattctaatctaaaagatggatcctatacattagaaagatycctaaattttaaaaaagattaaatgggatgaaggggtggttctggatctttgtaaacagtggccctatttgtatttataggaagattaaattaaaagaatgacacgtaatagtatcatggctattcttagaaattctcttgacaaaattaaagagcaacagtctgatctaaaacaaatttaaaatgatttgtactctcaaattgccagttttggatcctttgtaggatttgcaacaataactactctatcttgtctagttaaaattctacactttcaccaccgtggcctgggtttgattcccagtcagggaactagtc

SEQ ID NO: 218340 - DNA, 530 bp, Homo sapiens
catacataaggtttttctccactgtgaattctatgatgtctcagaaggtctgagctctgattgaaagttttcccacattctttgcattcatatggtttctctcttgtatgagttacctgatgtctgatgaggtctgagctgccctggaaagccctaccacactgattacaccaataagctttygcttcctggtgaattttctgctctcccctaagctcctcatcctggctgaaggttttctcacattcaagtttctctccagtatgcaggctctgatgtttgaggaaagctgtgcgccaaatgaagagcttcccacattccttacattcatagggtttctcaccactatgaattctccgatgttgaataaggagtgaacgccgcctgaaggctttcccacattcagtgcactgatagggcttctctccagtatggattttctggtgtgtaacaaggtgtgacctctggctaaaggctttcccacattcactacattcatagggtttctctccagtatgaacacgatggtg

SEQ ID NO: 218341 - DNA, 530 bp, Homo sapiens
catacataaggtttttctccactgtgaattctatgatgtctcagaaggtctgagctctgattgaaagttttcccacattctttgcattcatatggtttctctcttgtatgagttacctgatgtctgatgaggtctgagctgccctggaaagccctaccacactgattacaccaataagcttttgcttcctggtgaattttctgctctcccctaagctcytcatcctggctgaaggttttctcacattcaagtttctctccagtatgcaggctctgatgtttgaggaaagctgtgcgccaaatgaagagcttcccacattccttacattcatagggtttctcaccactatgaattctccgatgttgaataaggagtgaacgccgcctgaaggctttcccacattcagtgcactgatagggcttctctccagtatggattttctggtgtgtaacaaggtgtgacctctggctaaaggctttcccacattcactacattcatagggtttctctccagtatgaacacgatggtg

SEQ ID NO: 218342 - DNA, 415 bp, Homo sapiens
  misc_feature (1)...(415): n = A,T,C or G
tctaaaacctggctcagctgtcccacccagggcctaggggatgccaaattccagggtccagaaagagcttgggataaaatgaacatccaakgggagggctttgacctgggcttagtctgcctgtgccatccaaacggagtctcaagtcctgagacagggcgtccagatgccangtgcagggtccccctgatcaacacctgctcccctgtactcattagcaacctcacccaccctactctcaaagcacttggccctcgtatctgggagctctgcaactgtggattctgccaacagcagatggaaaatattcagaaaacaaatcggatggttgtctctactgaacatgtgcagacgttgttcttgtcatcattccctaaatacagtatcacaaccatttatatagcatctgcattgt

SEQ ID NO: 218343 - DNA, 459 bp, Homo sapiens
gcccctctgtgagaactttcattttgcttcgggaaaagtacattgaatcaaatatagaaaaggcttgcaaggtggctgacaggttcggctgttttatcatgctggtgttttatcttctggactgcagtaaaaggagcacagctgtgtctgtctctgtgtaataactcaggactcacctgaataaaatgtggggtgtcatgagatgaactgctacttccagttagagaggctccagggacaaaatttcaagagccttctgagggatagaagagaagagctgccytattctctgatcccaggtaactgctcagagacagagacaagagctgggtgacaccaaatgcatatactaggggtctttgatacagcctccatttccctgctaaatctatgcaatgacaaactgagaaatctagcaagtggggctgaagatccctggtgtgtcaactcgagggttgg

SEQ ID NO: 218344 - DNA, 528 bp, Homo sapiens
aaggagaactctctcattctggaggatccttttgaatataatgattcrggagaagattgcactcacagttccacaataactcagtgtttgttaactcacagtggaaagaaaccctgctgtcagcaaacacgtgtggaaaatcccttcgtaatcttttgtcccctaaaccacgtaaacaaattcatactaaaggtaaatcatatcaatgtaatctatgtgaaaaggcctatactacttgcttttaccttagacggcccaagatgactcatcactggagagaggccatatgcatgtcatctactgtggaaaagccttcactcagtgttctcaccttagaagacatgagaaaactcacacgggagagagaccatataagtgtcatcaatgtgggaaagcctttattcaatcctttaaccttcgaagacatgagagaactcaccttggacaaaagtgttatgaatgtgataaaagtgggaaagcctttagtcaaagctctggctttagaggaaacaaaataattcacattgg

SEQ ID NO: 218345 - DNA, 594 bp, Homo sapiens
tatcactcatttaataaaaccactaattaatattcaactgatattattcattgagaaagcacctcctcctattaggacacaggaccctgttgcttacctggattctggtcttgaagaaatactcttccttcccrccacagctcttttccttgctccagctgcaaaattatataggatttgcttatctggtaccctgttagtggaaagaatacatgtgttttgagttcactgtcaataaatgtgcattatcaccaagtgtaaggcaggctatcaaggaagaataaaaacagtgaaggtcagctcaggccacaagacctagaacacagaaaactccccaggatttttctgacccaacttgagactagaaaataaatccaaaccaaagggccatcaggaaaaggaaattcaaaacagtcaggacctatgaatgctgagtccatgcctaagttccaagacacaatgcataatacacaatcttttcagaaagagagtaattaaatctctgcacattgtgtttattattattctcacgcagaacaaaaaaaaacattcgatttacaaaaataattggtgttctatatggcaaagatattg

SEQ ID NO: 218346 - DNA, 558 bp, Homo sapiens
gtaaacttgcctaatttggagatggaataagagggtttcaaagacttgaaacaccattgacttcatttaactgggttgctatggagaattaacgaattagatggctgcaggctctcagccaatgagtcttccaggtttcctatgagacccccttttctggtcataggtgatggtgatttctctttgagtaytgaatccctgtaaggtgttaggcactctactcttaccaagtttattttgttacctggtagaacttggctcataaagaagaaaatggtgaagaagaggacagcaatcctcatggctgaagaaagaaaaaagtttggcttcatttccaggaggcagagaaaacttccgtctgtggctctctagcagcagtggaatgtctctgtttggataataagagtctttctgtacctccttagggatattcatagatagaggtgttctatgcacgcaaaattgcttttatgggaagactgagaatcctttttttttattggacagccagttcattagaatgatgtgggtgcacagttttggccagaaaaccttgtt

SEQ ID NO: 218347 - DNA, 457 bp, Homo sapiens
caaggctcagaaatggaaattaaacatgtaatagtagtcacattcaacagagaaggatgctatatttgtataaaacttctgatgggccaggcatggtggttcacgcctgttatcccagcacgttgtgaggttcaggtcagaggaytccttgaggccaggtgttggatactagcttgggcagtataactagacaccatctctacaaataatgataataaagataataaagattagctggccatagtgtcacatgatcgtagccttagcttcttgggaggctgaggtatgaggattacatgagtccaggagtttgaggctgtagtgagcaatgatcgtagcactgcactccagcctgaaaaatacagaccttgtcaaaaaacaaaaaacaaacaaacaaacaaacaaaaaccttctgattaatcaattatgaacaaggaggacaattttaaaaattaag

SEQ ID NO: 218348 - DNA, 469 bp, Homo sapiens
gaattctttaaggcattatccaaggctcagaaatggaaattaaacatgtaatagtagtcacattcaacagagaaggatgctatatttgtataaaacttctgatgggccaggcatggtggttcacgcctgttatcccagcacgttgtgaggttcaggtcagaggattccttgaggccaggtgttggatactagctwgggcagtataactagacaccatctctacaaataatgataataaagataataaagattagctggccatagtgtcacatgatcgtagccttagcttcttgggaggctgaggtatgaggattacatgagtccaggagtttgaggctgtagtgagcaatgatcgtagcactgcactccagcctgaaaaatacagaccttgtcaaaaaacaaaaaacaaacaaacaaacaaacaaaaaccttctgattaatcaattatgaacaaggaggacaattttaa

SEQ ID NO: 218349 - DNA, 593 bp, Homo sapiens
tgatgggccaggcatggtggttcacgcctgttatcccagcacgttgtgaggttcaggtcagaggattccttgaggccaggtgttggatactagcttgggcagtataactagacaccatctctacaaataatgataataaagataataaagattagctggccatagtgtcacatgatcgtagccttagcttcttgggaggctgaggtatgaggattacatgagtccaggagtttgaggctgtagtgagcaatgatcgtagcactgcactccagcctgaaaaatacagaccttgtcaaaaaacaaaaaacaaacaaacaaacaaacaaaaaccttctgattaatcaattatgaacaaggaggrcaattttaaaaattaagtttttcttgttaataaatacatagcaatagaattcataaacaggggttttgaataagttacaaatcatgatgccatattggtctgctgtgggcctctgcaacttacagaacatgtcagaagatgcatcaaaattccgctggagaaattgacacttaaaattagattcaaatttacatgaaactgatttgtttaaagagttaaatcttttgagaca

SEQ ID NO: 218350 - DNA, 360 bp, Homo sapiens
atctgcccccaagaatcataaatgccttttcactcatcctgcagaatgcactctctactttaatgatcgtgtgggatgtgactttaatttgtaggcatgrggattgatcttaagaaaaagcagggaaagtgccttacctgttctgggactctgctccacttgccaacatttgagtggattcatttgtgttgtagtcaagctacaggaaataaagggaccagtcagtcttccacacaatgacacagaggccaattatcacaagtccaaatctccatttgtcatccagctcacattcccgttgtggcacaaggacacatgcactcgtgtccaactccaaatagtagcttcacatagtatgtc

SEQ ID NO: 218351 - DNA, 360 bp, Homo sapiens
atctgcccccaagaatcataaatgccttttcactcatcctgcagaatgcactctctactttaatgatcgtgtgggatgtgactttaatttgtaggcatgaggattgatcttaagaaaaagcaggsaaagtgccttacctgttctgggactctgctccacttgccaacatttgagtggattcatttgtgttgtagtcaagctacaggaaataaagggaccagtcagtcttccacacaatgacacagaggccaattatcacaagtccaaatctccatttgtcatccagctcacattcccgttgtggcacaaggacacatgcactcgtgtccaactccaaatagtagcttcacatagtatgtc

SEQ ID NO: 218352 - DNA, 360 bp, Homo sapiens
atctgcccccaagaatcataaatgccttttcactcatcctgcagaatgcactctctactttaatgatcgtgtgggatgtgactttaatttgtaggcatgaggattgatcttaagaaaaagcagggaaagtgccttacctgtyctgggactctgctccacttgccaacatttgagtggattcatttgtgttgtagtcaagctacaggaaataaagggaccagtcagtcttccacacaatgacacagaggccaattatcacaagtccaaatctccatttgtcatccagctcacattcccgttgtggcacaaggacacatgcactcgtgtccaactccaaatagtagcttcacatagtatgtc

SEQ ID NO: 218353 - DNA, 360 bp, Homo sapiens
atctgcccccaagaatcataaatgccttttcactcatcctgcagaatgcactctctactttaatgatcgtgtgggatgtgactttaatttgtaggcatgaggattgatcttaagaaaaagcagggaaagtgccttacctgttctgggactctgctccacttgccaacatttgagtggattcatttgtgtkgtagtcaagctacaggaaataaagggaccagtcagtcttccacacaatgacacagaggccaattatcacaagtccaaatctccatttgtcatccagctcacattcccgttgtggcacaaggacacatgcactcgtgtccaactccaaatagtagcttcacatagtatgtc

SEQ ID NO: 218354 - DNA, 556 bp, Homo sapiens
gaagctccacattaatttttgtatccttacatttatattgtctccagtattaaaattcrtactatttaggtcattgagttcattatcatgattattaattatttttcatatatcgtttctttttattgattaatttttgtggcagctgttatataacaatcactagagtttccctattcatgaaagatgtccaagttaatggagatcactaggagtgttactttacaggtatgtaaatacagataatcttggctggactgtggctatattgtctggtgtccctttgagggtgaagcctcttgtattattctaagtgacctctggagaaagcaactgtctcataattgcagggacgacttgagaaagcatcctgagcctatgcagaaatgcagaaacacttccatgatctaaacaacctatgtgaaggcctgaaagccaaagcaagatcctcttattacaaagctgtccaacaaaatttttccaagtaacactggaggtccatcagtcactcttcctggtctggaaatgccagaaatgtcctccttggtccttctga

SEQ ID NO: 218355 - DNA, 556 bp, Homo sapiens
gaagctccacattaatttttgtatccttacatttatattgtctccagtattaaaattcgtactatttaggtcattgagttcattatcatgattattaattatttttcatatatcgtttctttttattgattaatttttgtggcagctgttatataacaatcactagagtttccctattcatgaaagatgtccaagttaatggagatcactaggagtgttactttacaggtatgtaaatacagataatcttggctggactgtggctatattgtctggtgtccctttgagggtgaagcctcttgtattattctaagtgacctctggagaaagcaactgtctcataattgcagggacgacttgagaargcatcctgagcctatgcagaaatgcagaaacacttccatgatctaaacaacctatgtgaaggcctgaaagccaaagcaagatcctcttattacaaagctgtccaacaaaatttttccaagtaacactggaggtccatcagtcactcttcctggtctggaaatgccagaaatgtcctccttggtccttctga

SEQ ID NO: 218356 - DNA, 404 bp, Homo sapiens
tcttttggatcagctgtttttattcctacacacacacacacactctctctatatgatagattataatagatgtatctttcaaaartagaactgaaatatagacctaaaagataatatacttcaattgttagagaggatatttttcctgtggaagggaacaatattcctatgtgtttaatacgtaaatatatctgtgccattacttgttacaccctgagacttcactcactactcatatctctggcactggtctttgaggttgcaatttttctctagaaaccattgcatatattaagagtgaaacattcaaggtcttcttaaaggctcaaaaactatacttgttgaaaatattgaatagtatttcatttatgtcctaagatatcactgctctggggataggccac

SEQ ID NO: 218357 - DNA, 404 bp, Homo sapiens
tcttttggatcagctgtttttattcctacacacacacacacactctctctatatgatagattataatagatgtatctttcaaaaatagaactgaaatatagacctaaaagataatatacttcaattgttagagaggatatttttcctgtggaagggaacaatattcctatgtgtttaatacrtaaatatatctgtgccattacttgttacaccctgagacttcactcactactcatatctctggcactggtctttgaggttgcaatttttctctagaaaccattgcatatattaagagtgaaacattcaaggtcttcttaaaggctcaaaaactatacttgttgaaaatattgaatagtatttcatttatgtcctaagatatcactgctctggggataggccac

SEQ ID NO: 218358 - DNA, 404 bp, Homo sapiens
tcttttggatcagctgtttttattcctacacacacacacacactctctctatatgatagattataatagatgtatctttcaaaaatagaactgaaatatagacctaaaagataatatacttcaattgttagagaggatatttttcctgtggaagggaacaatattcctatgtgtttaatacgtaaatatatctgtgccattacttgttacaccctgagacttcactcactactcatatctctggcactggtctttgaggttgcaatttttctctagaaaccattgcatatattaagagtgaaacattcaaggtcttcttaaaggctcaaaaactatacttgttgaaaayattgaatagtatttcatttatgtcctaagatatcactgctctggggataggccac

SEQ ID NO: 218359 - DNA, 561 bp, Homo sapiens
aagcattggagctaaacttgtccaagatgttgccaataacacaratgaagagactgggggatggcactatcactgctgctgtactggtatgctctatttccaaataagccttccagaaggttagcaaaggtgctaatccagtggaaatcaagagaggtgtgatgttagctgttgatgctgtaattgctgaacttaaaaagcagtctaaacctgtgaccaaacctgaagaaattgcacaggttgctacaatttctgcaaatggagacaaagaaattggtaacatcatctctgatgcaatgaaaaagtttggaagaaagggcatcatcacagtaaaggatggaaaaacactgactgatgaattagaaattattgaaggcatgaaaatttgatcgaggatatatttctccatactttattaatacatcaaaaggtgagaaatgtgaattccaggatgcctacgttctgttgcatgaaaagaaaatttctagtgtccagtccattgtacctgctcttgaaattgccaatgcttactgtaagcctttggtcataattgctggagac

SEQ ID NO: 218360 - DNA, 550 bp, Homo sapiens
gaattccaggatgcctacgttctgttgcatgaaaagaaaatttctagtgtccagtccattgtacctgctcttgaaattgccaatgcttactgtaagcctttggtcataattgctggagacattgatggagaagctctaactacactcatcctgaataggctaaaggttggtcttcaggttgtggcagtcaaagctccagggtttggtgacaatagaaagaaccagcttaaagatacggttattgctactggtggtacagtgtttggagaagagggctgacactaaatcttgaagacgttcagcctcgtgaygtaggagaagttggagaggtcactgtgatcaaagattatgccatgctcttaaaaggaaaaggtaacaagtctcaaattgaaaaatgtgttcaagaaatcattgaccagtcagatgtcacaactagtgaatacgaaaaggaaaaactgagtggagaaactttcagatggagtagctgtgctgaaggttggtgggacaagtgatgttgaagtgaatgaagagaaagacagagttataggtg

SEQ ID NO: 218361 - DNA, 550 bp, Homo sapiens
gaattccaggatgcctacgttctgttgcatgaaaagaaaatttctagtgtccagtccattgtacctgctcttgaaattgccaatgcttactgtaagcctttggtcataattgctggagacattgatggagaagctctaactacactcatcctgaataggctaaaggttggtcttcaggttgtggcagtcaaagctccagggtttggtgacaatagaaagaaccagcttaaagatacggttattgctactggtggtacagtgtttggagaagagggctgacactaaatcttgaagacgttcagcctcgtgacgtaggagaagttggagaggtcactgtgatcaaagatkatgccatgctcttaaaaggaaaaggtaacaagtctcaaattgaaaaatgtgttcaagaaatcattgaccagtcagatgtcacaactagtgaatacgaaaaggaaaaactgagtggagaaactttcagatggagtagctgtgctgaaggttggtgggacaagtgatgttgaagtgaatgaagagaaagacagagttataggtg

SEQ ID NO: 218362 - DNA, 596 bp, Homo sapiens
ctggtgtctcacatgttctttctccaacctcagcttttcttagtgcctaaagtgtctgcaagtggaaatccagaggaagacagagagaaactgagttcctgacaatgcattcactagtgagtaggggatgcctctttctactgaaattatacccatattgctggcaaatgggcagttttctccaatttgcatgggtgtttcatttttattctttttttgtttgtttttatgatgtaaaatccacccagcctgggtgttccaaatgcagtcaggaggctttcaggtatctggcctccaattaagttttctcaggactctaggttgggtatcgtgtgtcaaagactcctaaattatcaatataatttctaatattacactactttattccagcccttattaagactatttacaaaaaaagatatgagaggtttcatttatatatttctttytcttctatccatcctataatctcatagggaaataattgacccattaactgtactgttggctgaaatagacttaggattgtgatgaatgcagacgacagagatgagtgaagagcagaacatcacagcccaacaatgagtctgatgttc

SEQ ID NO: 218363 - DNA, 538 bp, Homo sapiens
ttgaggtgcttggtggggcatggaaatttacatgtaggcagtttcatctgataggattgaatttcagcagcatcgattattatatccactcactaggtcaaaagacatggatggaatcttatcaacaggagctactgctaaatgagtcccttttctatttttccctattataatcctagtgaagctgtaaatattaggtacttgaacccacaggactgattctagkatcttgtctggccagagatatagccttctgatctgcagaaccttatagtaatcagctaccaacttacctggggataagagaatttaaaaaagaaggagaataaggagaagcaaatggagtctcatggctgaagggccagcatcaatgtgggttgagcctggagtctctgggcatcgtgggtctaggcctttttatgatgctctctgagtctgtgatttgttcttggtcagtaaagcctaacgaaaagagaataactaaatctcccacaggaaacttccagggacacacaagtacataaatgtggtgatatct

SEQ ID NO: 218364 - DNA, 538 bp, Homo sapiens
ttgaggtgcttggtggggcatggaaatttacatgtaggcagtttcatctgataggattgaatttcagcagcatcgattattatatccactcactaggtcaaaagacatggatggaatcttatcaacaggagctactgctaaatgagtcccttttctatttttccctattataatcctagtgaagctgtaaatattaggtacttgaacccacaggactgattctagtwtcttgtctggccagagatatagccttctgatctgcagaaccttatagtaatcagctaccaacttacctggggataagagaatttaaaaaagaaggagaataaggagaagcaaatggagtctcatggctgaagggccagcatcaatgtgggttgagcctggagtctctgggcatcgtgggtctaggcctttttatgatgctctctgagtctgtgatttgttcttggtcagtaaagcctaacgaaaagagaataactaaatctcccacaggaaacttccagggacacacaagtacataaatgtggtgatatct

SEQ ID NO: 218365 - DNA, 538 bp, Homo sapiens
ttgaggtgcttggtggggcatggaaatttacatgtaggcagtttcatctgataggattgaatttcagcagcatcgattattatatccactcactaggtcaaaagacatggatggaatcttatcaacaggagctactgctaaatgagtcccttttctatttttccctattataatcctagtgaagctgtaaatattaggtacttgaacccacaggactgattctagtatcttgtctggccagagatatagccttctsatctgcagaaccttatagtaatcagctaccaacttacctggggataagagaatttaaaaaagaaggagaataaggagaagcaaatggagtctcatggctgaagggccagcatcaatgtgggttgagcctggagtctctgggcatcgtgggtctaggcctttttatgatgctctctgagtctgtgatttgttcttggtcagtaaagcctaacgaaaagagaataactaaatctcccacaggaaacttccagggacacacaagtacataaatgtggtgatatct

SEQ ID NO: 218366 - DNA, 538 bp, Homo sapiens
ttgaggtgcttggtggggcatggaaatttacatgtaggcagtttcatctgataggattgaatttcagcagcatcgattattatatccactcactaggtcaaaagacatggatggaatcttatcaacaggagctactgctaaatgagtcccttttctatttttccctattataatcctagtgaagctgtaaatattaggtacttgaacccacaggactgattctagtatcttgtctggccagagatatagccttctgatctgcagaaccttatagtaatcagctaccaacttacctggggataagagaatttaaaaaagaaggagaataaggagaagcaaatggagtctcatggctgaagggccagcatcaatgtgggttgagcctggagtctctgggcatcgtgggtctaggcctttttatgatgctctctgagtctgtgatttgttcttggtcagtaaagcctaacgaaaagagaataactaaatctcccacaggaaacttccagggacacayaagtacataaatgtggtgatatct

SEQ ID NO: 218367 - DNA, 487 bp, Homo sapiens
ttatgttttaaatattactgttttcccaaaggaaaaaagtttgtaatttttggaacataatgacattgtcaaactcatgaactcagctctaaaaagaaggcaacataagccagggttcagattcttcttgagctgggtaaaaatacaacactttcagtttaagagaaactaaagacaaagaaaacaattaagtacattgtttcagtttaactgataaaatttcaattgtaacaaccagtagcacaaactatcacaacccattcaataatctactcctaacacccttttaagaattattattcctgactaatggcccaggcatatccaatttttcttttctatctcctccctggacaacttgaagcagacatttgaatctgcattttcaaaatgarcgttccaacatacgcgagcctgcaatgaaaaattacgctgtagcatttaataactaatctaaaaaacaaatgtaacagcaatcaatattaaa

SEQ ID NO: 218368 - DNA, 619 bp, Homo sapiens
ttactccctccctctctctgcccccaccccccaaaaccctgaagttccgaaggttaattctgatttatttggcaatgcagygtagttttgttgagggggtagagctaggctatttcaaaatcacttgaaggaacaagtagttctatgagatgataaggatgatgatgataagagactcattgaatttttaactacgtctgtctacattcattatatcatttagtcctcacgaaaactgtaagaagccagtttctttacagatggggaaattgaggcttagggaagtgaaataattgaccccaggttagaaagctcaaaagtggcagaaccaagtttcctccttctgtctgtcttacttcaaagccccactcctgaccatcactattttgcctgtttcaggaagatgttttaccaaaagtaaaaaaggtaccaggctgctctacatcaagcaattctaagcaagcttggggttaatgtcttaaagtgatggggagactcatagcaccttaacatgaatatgaaactttgcttaacaaggaaaaaaagaaggctgggaaaagcatttccattttgatgatgatgatgatagtgatgatgatgatggtggtggctaacactt

SEQ ID NO: 218369 - DNA, 623 bp, Homo sapiens
gattgtaatagttaagcctttaccatcagatatactcaggagggtataactaagactccgttgggaaaaccaaattgggacaacatcagactaaattgtgggggtttccacaatgttactgatgctattttatgctggtcagtggaattcaacaagggactggagttacttgtgaatttttgaatgtccctaactataacttgctttcggaaaaaaatattctcagtaatatttctttttactattaatttactattaattaattaattaattaattaaaggctggagggcttgaattttgcctgtggtcttcaacagtcaggcaagtccagttttaccacctgtactagccaaggctgcacttttcctttttaaatgaagatttggttgcactttcctttaagaagagccacaaaagagataatgtgccytgctgcgttcagcaaggctaccttgcttgtacttctaatttcaaaaaaagagaggcaagggtggattatttgtcaattaagtaacaagctaaactgcagattaaacatcaaattcagtactagatttaagttttagagaacacaaggttattggttattcacacacactcacacaataacacacacacacgt

SEQ ID NO: 218370 - DNA, 621 bp, Homo sapiens
tatacccctggggtcaggcagagtaaaggtatattgctggtcttgccagctgaaggcaaattgcttctggtgggccttatggacaggaatggagaaaaagacatttgccaagtcaagggctgcataacaggtactaggagatgtgttaatttactcaagcaatgaaaccacatcttgtacagaagctgcaattggagtcaccayttggttaagcttaatccactgtcattctttaagatccatctgtcttctgcacaggccaaataggagagttgaatggggatgtggtgggaataaccactcctgcatcttttaagtcctcgaggcatgcaatattgtttttgattcactatttttctatgtagaggcagctctaatggcttccatttggcctttcccaccataatagccctcaccttgccagtcagagagctaatgttggggttctgccagctgctaagtatgtctatgctgattatgcattctggcactggggaaatgaccacagaatgagtctggggaccccctggacccactgtaagtcggacctgagctaaaactctattaattacctaacctccataagcacctactttaactggagggccacaatgacatttt

SEQ ID NO: 218371 - DNA, 568 bp, Homo sapiens
atacaccctttctgaatgggagaaattggccaagacaaaagagctacaggcccgttgcaagtctaaaatccaattgggcagtcattaaaccttacttttgcaaaatgatctcctttgactccatgtctcacatccaggtcacactgatgtaagaggtgggcacccatggccttgggcagctgcacctctgtggctttgcagggtagagccccactcccagctggttttatgggctggcattgagtgtctgtgccttttccaggtgtacagtgcaagctgtcagtygatctatcattcttgggcctggaggacggtggccctctttgacagctctactaggcagtgccagtggggactctgtgtgggcgctctgatcccatatttcccttctgcagtgccctagcagaggttcttccttagggctccacccctgcagcgaacttctgccttgacatgcaggcttttccatacatcttctgaaatctaggtggaggttcccaaacctcagttcttgacttctgtgtacccacaggctcaacaccacatggaaaccaccaaggcttgggac

SEQ ID NO: 218372 - DNA, 494 bp, Homo sapiens
ttttattttgataggcttatgtagatgatcagtaaattaatttcactatttttaaactatcagaactggaaaacatttcagcaatgcttttgaattaatttagatttataataaaactttttcttatgtggtaaaggttagtggaaattttttatatactataattcttggtaaaatcattgctgttcataaagtatggagaaagagggagagagtacttggatatatataaaagggaaaagtcttaggttatttcgtttatttctcacttcaactaaaccaacaataaggttttaaaaccaatcctggggtttaaaaaacagtggtgagtgataggtcctatgttctacttgccctttatgcttctggtttgtgtgtgggtgggagtacctgagatgattatgttacatgaaacagttrcaattttttacttctgtaggcagatctaaagttcttcagctttctttcctgaaactataatctatctcagcgtt
